United States Patent Application Publication US 2018/0305689 A1 - sequence listing, part 148

SEQ ID NO: 2085952 - RNA, 19 nt, Artificial Sequence
  Description of Artificial Sequence: Synthetic oligonucleotide
  Sense strand starting at position 3671 of SEQ ID NO: 1881979
gggagucccuuucucugaa

SEQ ID NO: 2085953 - RNA, 19 nt, Artificial Sequence
  Description of Artificial Sequence: Synthetic oligonucleotide
  Antisense strand to SEQ ID NO: 2085952
uucagagaaagggacuccc

SEQ ID NO: 2085954 - RNA, 19 nt, Artificial Sequence
  Description of Artificial Sequence: Synthetic oligonucleotide
  Sense strand starting at position 3673 of SEQ ID NO: 1881979
gagucccuuucucugaaga

SEQ ID NO: 2085955 - RNA, 19 nt, Artificial Sequence
  Description of Artificial Sequence: Synthetic oligonucleotide
  Antisense strand to SEQ ID NO: 2085954
ucuucagagaaagggacuc

SEQ ID NO: 2085956 - RNA, 19 nt, Artificial Sequence
  Description of Artificial Sequence: Synthetic oligonucleotide
  Sense strand starting at position 3791 of SEQ ID NO: 1881979
ggagacucagcucaugagu

SEQ ID NO: 2085957 - RNA, 19 nt, Artificial Sequence
  Description of Artificial Sequence: Synthetic oligonucleotide
  Antisense strand to SEQ ID NO: 2085956
acucaugagcugagucucc

SEQ ID NO: 2085958 - RNA, 19 nt, Artificial Sequence
  Description of Artificial Sequence: Synthetic oligonucleotide
  Sense strand starting at position 3893 of SEQ ID NO: 1881979
gguagcucaguuugggauu

SEQ ID NO: 2085959 - RNA, 19 nt, Artificial Sequence
  Description of Artificial Sequence: Synthetic oligonucleotide
  Antisense strand to SEQ ID NO: 2085958
aaucccaaacugagcuacc

SEQ ID NO: 2085960 - RNA, 19 nt, Artificial Sequence
  Description of Artificial Sequence: Synthetic oligonucleotide
  Sense strand starting at position 3918 of SEQ ID NO: 1881979
ggaauuuccuccugggauc

SEQ ID NO: 2085961 - RNA, 19 nt, Artificial Sequence
  Description of Artificial Sequence: Synthetic oligonucleotide
  Antisense strand to SEQ ID NO: 2085960
gaucccaggaggaaauucc

SEQ ID NO: 2085962 - RNA, 19 nt, Artificial Sequence
  Description of Artificial Sequence: Synthetic oligonucleotide
  Sense strand starting at position 3921 of SEQ ID NO: 1881979
auuuccuccugggaucuau

SEQ ID NO: 2085963 - RNA, 19 nt, Artificial Sequence
  Description of Artificial Sequence: Synthetic oligonucleotide
  Antisense strand to SEQ ID NO: 2085962
auagaucccaggaggaaau

SEQ ID NO: 2085964 - RNA, 19 nt, Artificial Sequence
  Description of Artificial Sequence: Synthetic oligonucleotide
  Sense strand starting at position 259 of SEQ ID NO: 1881980
gcuuucuaucucuaaagug

SEQ ID NO: 2085965 - RNA, 19 nt, Artificial Sequence
  Description of Artificial Sequence: Synthetic oligonucleotide
  Antisense strand to SEQ ID NO: 2085964
cacuuuagagauagaaagc

SEQ ID NO: 2085966 - RNA, 19 nt, Artificial Sequence
  Description of Artificial Sequence: Synthetic oligonucleotide
  Sense strand starting at position 274 of SEQ ID NO: 1881980
aguggugcuguccaauaaa

SEQ ID NO: 2085967 - RNA, 19 nt, Artificial Sequence
  Description of Artificial Sequence: Synthetic oligonucleotide
  Antisense strand to SEQ ID NO: 2085966
uuuauuggacagcaccacu

SEQ ID NO: 2085968 - RNA, 19 nt, Artificial Sequence
  Description of Artificial Sequence: Synthetic oligonucleotide
  Sense strand starting at position 499 of SEQ ID NO: 1881980
uuuauauuacacuggcaga

SEQ ID NO: 2085969 - RNA, 19 nt, Artificial Sequence
  Description of Artificial Sequence: Synthetic oligonucleotide
  Antisense strand to SEQ ID NO: 2085968
ucugccaguguaauauaaa

SEQ ID NO: 2085970 - RNA, 19 nt, Artificial Sequence
  Description of Artificial Sequence: Synthetic oligonucleotide
  Sense strand starting at position 576 of SEQ ID NO: 1881980
gacagcucagcuugaaaga

SEQ ID NO: 2085971 - RNA, 19 nt, Artificial Sequence
  Description of Artificial Sequence: Synthetic oligonucleotide
  Antisense strand to SEQ ID NO: 2085970
ucuuucaagcugagcuguc

SEQ ID NO: 2085972 - RNA, 19 nt, Artificial Sequence
  Description of Artificial Sequence: Synthetic oligonucleotide
  Sense strand starting at position 1619 of SEQ ID NO: 1881980
ugggaaaugccucauucug

SEQ ID NO: 2085973 - RNA, 19 nt, Artificial Sequence
  Description of Artificial Sequence: Synthetic oligonucleotide
  Antisense strand to SEQ ID NO: 2085972
cagaaugaggcauuuccca

SEQ ID NO: 2085974 - RNA, 19 nt, Artificial Sequence
  Description of Artificial Sequence: Synthetic oligonucleotide
  Sense strand starting at position 1621 of SEQ ID NO: 1881980
ggaaaugccucauucuguu

SEQ ID NO: 2085975 - RNA, 19 nt, Artificial Sequence
  Description of Artificial Sequence: Synthetic oligonucleotide
  Antisense strand to SEQ ID NO: 2085974
aacagaaugaggcauuucc

SEQ ID NO: 2085976 - RNA, 19 nt, Artificial Sequence
  Description of Artificial Sequence: Synthetic oligonucleotide
  Sense strand starting at position 1646 of SEQ ID NO: 1881980
cggguuucccacuauaguc

SEQ ID NO: 2085977 - RNA, 19 nt, Artificial Sequence
  Description of Artificial Sequence: Synthetic oligonucleotide
  Antisense strand to SEQ ID NO: 2085976
gacuauagugggaaacccg

SEQ ID NO: 2085978 - RNA, 19 nt, Artificial Sequence
  Description of Artificial Sequence: Synthetic oligonucleotide
  Sense strand starting at position 1915 of SEQ ID NO: 1881980
cagggccuaugagaaauuu

SEQ ID NO: 2085979 - RNA, 19 nt, Artificial Sequence
  Description of Artificial Sequence: Synthetic oligonucleotide
  Antisense strand to SEQ ID NO: 2085978
aaauuucucauaggcccug

SEQ ID NO: 2085980 - RNA, 19 nt, Artificial Sequence
  Description of Artificial Sequence: Synthetic oligonucleotide
  Sense strand starting at position 2103 of SEQ ID NO: 1881980
gccuuuggauucucauaca

SEQ ID NO: 2085981 - RNA, 19 nt, Artificial Sequence
  Description of Artificial Sequence: Synthetic oligonucleotide
  Antisense strand to SEQ ID NO: 2085980
uguaugagaauccaaaggc

SEQ ID NO: 2085982 - RNA, 19 nt, Artificial Sequence
  Description of Artificial Sequence: Synthetic oligonucleotide
  Sense strand starting at position 2152 of SEQ ID NO: 1881980
auccaucagccuggauuau

SEQ ID NO: 2085983 - RNA, 19 nt, Artificial Sequence
  Description of Artificial Sequence: Synthetic oligonucleotide
  Antisense strand to SEQ ID NO: 2085982
auaauccaggcugauggau

SEQ ID NO: 2085984 - RNA, 19 nt, Artificial Sequence
  Description of Artificial Sequence: Synthetic oligonucleotide
  Sense strand starting at position 2202 of SEQ ID NO: 1881980
cugaaacaaucagcaguau

SEQ ID NO: 2085985 - RNA, 19 nt, Artificial Sequence
  Description of Artificial Sequence: Synthetic oligonucleotide
  Antisense strand to SEQ ID NO: 2085984
auacugcugauuguuucag

SEQ ID NO: 2085986 - RNA, 19 nt, Artificial Sequence
  Description of Artificial Sequence: Synthetic oligonucleotide
  Sense strand starting at position 2243 of SEQ ID NO: 1881980
ggcucuuaacuacagcaaa

SEQ ID NO: 2085987 - RNA, 19 nt, Artificial Sequence
  Description of Artificial Sequence: Synthetic oligonucleotide
  Antisense strand to SEQ ID NO: 2085986
uuugcuguaguuaagagcc

SEQ ID NO: 2085988 - RNA, 19 nt, Artificial Sequence
  Description of Artificial Sequence: Synthetic oligonucleotide
  Sense strand starting at position 2363 of SEQ ID NO: 1881980
gagacagacucuuugccua

SEQ ID NO: 2085989 - RNA, 19 nt, Artificial Sequence
  Description of Artificial Sequence: Synthetic oligonucleotide
  Antisense strand to SEQ ID NO: 2085988
uaggcaaagagucugucuc

SEQ ID NO: 2085990 - RNA, 19 nt, Artificial Sequence
  Description of Artificial Sequence: Synthetic oligonucleotide
  Sense strand starting at position 2367 of SEQ ID NO: 1881980
cagacucuuugccuaggua

SEQ ID NO: 2085991 - RNA, 19 nt, Artificial Sequence
  Description of Artificial Sequence: Synthetic oligonucleotide
  Antisense strand to SEQ ID NO: 2085990
uaccuaggcaaagagucug

SEQ ID NO: 2085992 - RNA, 19 nt, Artificial Sequence
  Description of Artificial Sequence: Synthetic oligonucleotide
  Sense strand starting at position 2368 of SEQ ID NO: 1881980
agacucuuugccuagguau

SEQ ID NO: 2085993 - RNA, 19 nt, Artificial Sequence
  Description of Artificial Sequence: Synthetic oligonucleotide
  Antisense strand to SEQ ID NO: 2085992
auaccuaggcaaagagucu

SEQ ID NO: 2085994 - RNA, 19 nt, Artificial Sequence
  Description of Artificial Sequence: Synthetic oligonucleotide
  Sense strand starting at position 2479 of SEQ ID NO: 1881980
agcacuuugguguaagauc

SEQ ID NO: 2085995 - RNA, 19 nt, Artificial Sequence
  Description of Artificial Sequence: Synthetic oligonucleotide
  Antisense strand to SEQ ID NO: 2085994
gaucuuacaccaaagugcu

SEQ ID NO: 2085996 - RNA, 19 nt, Artificial Sequence
  Description of Artificial Sequence: Synthetic oligonucleotide
  Sense strand starting at position 2581 of SEQ ID NO: 1881980
caaugaaugucacugagcu

SEQ ID NO: 2085997 - RNA, 19 nt, Artificial Sequence
  Description of Artificial Sequence: Synthetic oligonucleotide
  Antisense strand to SEQ ID NO: 2085996
agcucagugacauucauug

SEQ ID NO: 2085998 - RNA, 19 nt, Artificial Sequence
  Description of Artificial Sequence: Synthetic oligonucleotide
  Sense strand starting at position 2582 of SEQ ID NO: 1881980
aaugaaugucacugagcua

SEQ ID NO: 2085999 - RNA, 19 nt, Artificial Sequence
  Description of Artificial Sequence: Synthetic oligonucleotide
  Antisense strand to SEQ ID NO: 2085998
uagcucagugacauucauu

SEQ ID NO: 2086000 - RNA, 19 nt, Artificial Sequence
  Description of Artificial Sequence: Synthetic oligonucleotide
  Sense strand starting at position 3297 of SEQ ID NO: 1881980
gccugaccucugcaggauu

SEQ ID NO: 2086001 - RNA, 19 nt, Artificial Sequence
  Description of Artificial Sequence: Synthetic oligonucleotide
  Antisense strand to SEQ ID NO: 2086000
aauccugcagaggucaggc

SEQ ID NO: 2086002 - RNA, 19 nt, Artificial Sequence
  Description of Artificial Sequence: Synthetic oligonucleotide
  Sense strand starting at position 3299 of SEQ ID NO: 1881980
cugaccucugcaggauuau

SEQ ID NO: 2086003 - RNA, 19 nt, Artificial Sequence
  Description of Artificial Sequence: Synthetic oligonucleotide
  Antisense strand to SEQ ID NO: 2086002
auaauccugcagaggucag

SEQ ID NO: 2086004 - RNA, 19 nt, Artificial Sequence
  Description of Artificial Sequence: Synthetic oligonucleotide
  Sense strand starting at position 3300 of SEQ ID NO: 1881980
ugaccucugcaggauuauu

SEQ ID NO: 2086005 - RNA, 19 nt, Artificial Sequence
  Description of Artificial Sequence: Synthetic oligonucleotide
  Antisense strand to SEQ ID NO: 2086004
aauaauccugcagagguca

SEQ ID NO: 2086006 - RNA, 19 nt, Artificial Sequence
  Description of Artificial Sequence: Synthetic oligonucleotide
  Sense strand starting at position 3352 of SEQ ID NO: 1881980
uggccacauucuguaauaa

SEQ ID NO: 2086007 - RNA, 19 nt, Artificial Sequence
  Description of Artificial Sequence: Synthetic oligonucleotide
  Antisense strand to SEQ ID NO: 2086006
uuauuacagaauguggcca

SEQ ID NO: 2086008 - RNA, 19 nt, Artificial Sequence
  Description of Artificial Sequence: Synthetic oligonucleotide
  Sense strand starting at position 3353 of SEQ ID NO: 1881980
ggccacauucuguaauaaa

SEQ ID NO: 2086009 - RNA, 19 nt, Artificial Sequence
  Description of Artificial Sequence: Synthetic oligonucleotide
  Antisense strand to SEQ ID NO: 2086008
uuuauuacagaauguggcc

SEQ ID NO: 2086010 - RNA, 19 nt, Artificial Sequence
  Description of Artificial Sequence: Synthetic oligonucleotide
  Sense strand starting at position 3433 of SEQ ID NO: 1881980
cucacauccuuugcagaga

SEQ ID NO: 2086011 - RNA, 19 nt, Artificial Sequence
  Description of Artificial Sequence: Synthetic oligonucleotide
  Antisense strand to SEQ ID NO: 2086010
ucucugcaaaggaugugag

SEQ ID NO: 2086012 - RNA, 19 nt, Artificial Sequence
  Description of Artificial Sequence: Synthetic oligonucleotide
  Sense strand starting at position 3514 of SEQ ID NO: 1881980
aaugauuacucagcuggua

SEQ ID NO: 2086013 - RNA, 19 nt, Artificial Sequence
  Description of Artificial Sequence: Synthetic oligonucleotide
  Antisense strand to SEQ ID NO: 2086012
uaccagcugaguaaucauu

SEQ ID NO: 2086014 - RNA, 19 nt, Artificial Sequence
  Description of Artificial Sequence: Synthetic oligonucleotide
  Sense strand starting at position 3566 of SEQ ID NO: 1881980
uuuccuuauuuggaaugua

SEQ ID NO: 2086015 - RNA, 19 nt, Artificial Sequence
  Description of Artificial Sequence: Synthetic oligonucleotide
  Antisense strand to SEQ ID NO: 2086014
uacauuccaaauaaggaaa

SEQ ID NO: 2086016 - RNA, 19 nt, Artificial Sequence
  Description of Artificial Sequence: Synthetic oligonucleotide
  Sense strand starting at position 3612 of SEQ ID NO: 1881980
ucaugugaucaugaggcau

SEQ ID NO: 2086017 - RNA, 19 nt, Artificial Sequence
  Description of Artificial Sequence: Synthetic oligonucleotide
  Antisense strand to SEQ ID NO: 2086016
augccucaugaucacauga

SEQ ID NO: 2086018 - RNA, 19 nt, Artificial Sequence
  Description of Artificial Sequence: Synthetic oligonucleotide
  Sense strand starting at position 3693 of SEQ ID NO: 1881980
ugucuaaugucagcuuaga

SEQ ID NO: 2086019 - RNA, 19 nt, Artificial Sequence
  Description of Artificial Sequence: Synthetic oligonucleotide
  Antisense strand to SEQ ID NO: 2086018
ucuaagcugacauuagaca

SEQ ID NO: 2086020 - RNA, 19 nt, Artificial Sequence
  Description of Artificial Sequence: Synthetic oligonucleotide
  Sense strand starting at position 3738 of SEQ ID NO: 1881980
ugggauaucuaucucuaca

SEQ ID NO: 2086021 - RNA, 19 nt, Artificial Sequence
  Description of Artificial Sequence: Synthetic oligonucleotide
  Antisense strand to SEQ ID NO: 2086020
uguagagauagauauccca

SEQ ID NO: 2086022 - RNA, 19 nt, Artificial Sequence
  Description of Artificial Sequence: Synthetic oligonucleotide
  Sense strand starting at position 3740 of SEQ ID NO: 1881980
ggauaucuaucucuacaug

SEQ ID NO: 2086023 - RNA, 19 nt, Artificial Sequence
  Description of Artificial Sequence: Synthetic oligonucleotide
  Antisense strand to SEQ ID NO: 2086022
cauguagagauagauaucc

SEQ ID NO: 2086024 - RNA, 19 nt, Artificial Sequence
  Description of Artificial Sequence: Synthetic oligonucleotide
  Sense strand starting at position 3756 of SEQ ID NO: 1881980
augucauguuaugugagaa

SEQ ID NO: 2086025 - RNA, 19 nt, Artificial Sequence
  Description of Artificial Sequence: Synthetic oligonucleotide
  Antisense strand to SEQ ID NO: 2086024
uucucacauaacaugacau

SEQ ID NO: 2086026 - RNA, 19 nt, Artificial Sequence
  Description of Artificial Sequence: Synthetic oligonucleotide
  Sense strand starting at position 3757 of SEQ ID NO: 1881980
ugucauguuaugugagaaa

SEQ ID NO: 2086027 - RNA, 19 nt, Artificial Sequence
  Description of Artificial Sequence: Synthetic oligonucleotide
  Antisense strand to SEQ ID NO: 2086026
uuucucacauaacaugaca

SEQ ID NO: 2086028 - RNA, 19 nt, Artificial Sequence
  Description of Artificial Sequence: Synthetic oligonucleotide
  Sense strand starting at position 3776 of SEQ ID NO: 1881980
aaugaacucuugucugguu

SEQ ID NO: 2086029 - RNA, 19 nt, Artificial Sequence
  Description of Artificial Sequence: Synthetic oligonucleotide
  Antisense strand to SEQ ID NO: 2086028
aaccagacaagaguucauu

SEQ ID NO: 2086030 - RNA, 19 nt, Artificial Sequence
  Description of Artificial Sequence: Synthetic oligonucleotide
  Sense strand starting at position 3778 of SEQ ID NO: 1881980
ugaacucuugucugguuga

SEQ ID NO: 2086031 - RNA, 19 nt, Artificial Sequence
  Description of Artificial Sequence: Synthetic oligonucleotide
  Antisense strand to SEQ ID NO: 2086030
ucaaccagacaagaguuca

SEQ ID NO: 2086032 - RNA, 19 nt, Artificial Sequence
  Description of Artificial Sequence: Synthetic oligonucleotide
  Sense strand starting at position 3783 of SEQ ID NO: 1881980
ucuugucugguugaagcaa

SEQ ID NO: 2086033 - RNA, 19 nt, Artificial Sequence
  Description of Artificial Sequence: Synthetic oligonucleotide
  Antisense strand to SEQ ID NO: 2086032
uugcuucaaccagacaaga

SEQ ID NO: 2086034 - RNA, 19 nt, Artificial Sequence
  Description of Artificial Sequence: Synthetic oligonucleotide
  Sense strand starting at position 3835 of SEQ ID NO: 1881980
aggcaugcuuacuuuaacu

SEQ ID NO: 2086035 - RNA, 19 nt, Artificial Sequence
  Description of Artificial Sequence: Synthetic oligonucleotide
  Antisense strand to SEQ ID NO: 2086034
aguuaaaguaagcaugccu

SEQ ID NO: 2086036 - RNA, 19 nt, Artificial Sequence
  Description of Artificial Sequence: Synthetic oligonucleotide
  Sense strand starting at position 3905 of SEQ ID NO: 1881980
cuuugaaacugcucuguca

SEQ ID NO: 2086037 - RNA, 19 nt, Artificial Sequence
  Description of Artificial Sequence: Synthetic oligonucleotide
  Antisense strand to SEQ ID NO: 2086036
ugacagagcaguuucaaag

SEQ ID NO: 2086038 - RNA, 19 nt, Artificial Sequence
  Description of Artificial Sequence: Synthetic oligonucleotide
  Sense strand starting at position 3907 of SEQ ID NO: 1881980
uugaaacugcucugucaag

SEQ ID NO: 2086039 - RNA, 19 nt, Artificial Sequence
  Description of Artificial Sequence: Synthetic oligonucleotide
  Antisense strand to SEQ ID NO: 2086038
cuugacagagcaguuucaa

SEQ ID NO: 2086040 - RNA, 19 nt, Artificial Sequence
  Description of Artificial Sequence: Synthetic oligonucleotide
  Sense strand starting at position 3908 of SEQ ID NO: 1881980
ugaaacugcucugucaagu

SEQ ID NO: 2086041 - RNA, 19 nt, Artificial Sequence
  Description of Artificial Sequence: Synthetic oligonucleotide
  Antisense strand to SEQ ID NO: 2086040
acuugacagagcaguuuca

SEQ ID NO: 2086042 - RNA, 19 nt, Artificial Sequence
  Description of Artificial Sequence: Synthetic oligonucleotide
  Sense strand starting at position 3961 of SEQ ID NO: 1881980
uugagacuggucuagcuau

SEQ ID NO: 2086043 - RNA, 19 nt, Artificial Sequence
  Description of Artificial Sequence: Synthetic oligonucleotide
  Antisense strand to SEQ ID NO: 2086042
auagcuagaccagucucaa

SEQ ID NO: 2086044 - RNA, 19 nt, Artificial Sequence
  Description of Artificial Sequence: Synthetic oligonucleotide
  Sense strand starting at position 182 of SEQ ID NO: 1881982
guccaaagaacucgagcaa

SEQ ID NO: 2086045 - RNA, 19 nt, Artificial Sequence
  Description of Artificial Sequence: Synthetic oligonucleotide
  Antisense strand to SEQ ID NO: 2086044
uugcucgaguucuuuggac

SEQ ID NO: 2086046 - RNA, 19 nt, Artificial Sequence
  Description of Artificial Sequence: Synthetic oligonucleotide
  Sense strand starting at position 183 of SEQ ID NO: 1881982
uccaaagaacucgagcaau

SEQ ID NO: 2086047 - RNA, 19 nt, Artificial Sequence
  Description of Artificial Sequence: Synthetic oligonucleotide
  Antisense strand to SEQ ID NO: 2086046
auugcucgaguucuuugga

SEQ ID NO: 2086048 - RNA, 19 nt, Artificial Sequence
  Description of Artificial Sequence: Synthetic oligonucleotide
  Sense strand starting at position 355 of SEQ ID NO: 1881982
cucacauccucaggugaau

SEQ ID NO: 2086049 - RNA, 19 nt, Artificial Sequence
  Description of Artificial Sequence: Synthetic oligonucleotide
  Antisense strand to SEQ ID NO: 2086048
auucaccugaggaugugag

SEQ ID NO: 2086050 - RNA, 19 nt, Artificial Sequence
  Description of Artificial Sequence: Synthetic oligonucleotide
  Sense strand starting at position 382 of SEQ ID NO: 1881982
cccagaagugguugucuga

SEQ ID NO: 2086051 - RNA, 19 nt, Artificial Sequence
  Description of Artificial Sequence: Synthetic oligonucleotide
  Antisense strand to SEQ ID NO: 2086050
ucagacaaccacuucuggg

SEQ ID NO: 2086052 - RNA, 19 nt, Artificial Sequence
  Description of Artificial Sequence: Synthetic oligonucleotide
  Sense strand starting at position 389 of SEQ ID NO: 1881982
gugguugucugaggguuag

SEQ ID NO: 2086053 - RNA, 19 nt, Artificial Sequence
  Description of Artificial Sequence: Synthetic oligonucleotide
  Antisense strand to SEQ ID NO: 2086052
cuaacccucagacaaccac

SEQ ID NO: 2086054 - RNA, 19 nt, Artificial Sequence
  Description of Artificial Sequence: Synthetic oligonucleotide
  Sense strand starting at position 399 of SEQ ID NO: 1881982
gaggguuagugccauuauu

SEQ ID NO: 2086055 - RNA, 19 nt, Artificial Sequence
  Description of Artificial Sequence: Synthetic oligonucleotide
  Antisense strand to SEQ ID NO: 2086054
aauaauggcacuaacccuc

SEQ ID NO: 2086056 - RNA, 19 nt, Artificial Sequence
  Description of Artificial Sequence: Synthetic oligonucleotide
  Sense strand starting at position 470 of SEQ ID NO: 1881982
cacugaugauagucuguga

SEQ ID NO: 2086057 - RNA, 19 nt, Artificial Sequence
  Description of Artificial Sequence: Synthetic oligonucleotide
  Antisense strand to SEQ ID NO: 2086056
ucacagacuaucaucagug

SEQ ID NO: 2086058 - RNA, 19 nt, Artificial Sequence
  Description of Artificial Sequence: Synthetic oligonucleotide
  Sense strand starting at position 473 of SEQ ID NO: 1881982
ugaugauagucugugaacu

SEQ ID NO: 2086059 - RNA, 19 nt, Artificial Sequence
  Description of Artificial Sequence: Synthetic oligonucleotide
  Antisense strand to SEQ ID NO: 2086058
aguucacagacuaucauca

SEQ ID NO: 2086060 - RNA, 19 nt, Artificial Sequence
  Description of Artificial Sequence: Synthetic oligonucleotide
  Sense strand starting at position 474 of SEQ ID NO: 1881982
gaugauagucugugaacug

SEQ ID NO: 2086061 - RNA, 19 nt, Artificial Sequence
  Description of Artificial Sequence: Synthetic oligonucleotide
  Antisense strand to SEQ ID NO: 2086060
caguucacagacuaucauc

SEQ ID NO: 2086062 - RNA, 19 nt, Artificial Sequence
  Description of Artificial Sequence: Synthetic oligonucleotide
  Sense strand starting at position 475 of SEQ ID NO: 1881982
augauagucugugaacugu

SEQ ID NO: 2086063 - RNA, 19 nt, Artificial Sequence
  Description of Artificial Sequence: Synthetic oligonucleotide
  Antisense strand to SEQ ID NO: 2086062
acaguucacagacuaucau

SEQ ID NO: 2086064 - RNA, 19 nt, Artificial Sequence
  Description of Artificial Sequence: Synthetic oligonucleotide
  Sense strand starting at position 601 of SEQ ID NO: 1881982
guaugagguguugucgcaa

SEQ ID NO: 2086065 - RNA, 19 nt, Artificial Sequence
  Description of Artificial Sequence: Synthetic oligonucleotide
  Antisense strand to SEQ ID NO: 2086064
uugcgacaacaccucauac

SEQ ID NO: 2086066 - RNA, 19 nt, Artificial Sequence
  Description of Artificial Sequence: Synthetic oligonucleotide
  Sense strand starting at position 912 of SEQ ID NO: 1881982
agucuuguauacucuuaga

SEQ ID NO: 2086067 - RNA, 19 nt, Artificial Sequence
  Description of Artificial Sequence: Synthetic oligonucleotide
  Antisense strand to SEQ ID NO: 2086066
ucuaagaguauacaagacu

SEQ ID NO: 2086068 - RNA, 19 nt, Artificial Sequence
  Description of Artificial Sequence: Synthetic oligonucleotide
  Sense strand starting at position 926 of SEQ ID NO: 1881982
uuagaaaucuaugugacua

SEQ ID NO: 2086069 - RNA, 19 nt, Artificial Sequence
  Description of Artificial Sequence: Synthetic oligonucleotide
  Antisense strand to SEQ ID NO: 2086068
uagucacauagauuucuaa

SEQ ID NO: 2086070 - RNA, 19 nt, Artificial Sequence
  Description of Artificial Sequence: Synthetic oligonucleotide
  Sense strand starting at position 928 of SEQ ID NO: 1881982
agaaaucuaugugacuauc

SEQ ID NO: 2086071 - RNA, 19 nt, Artificial Sequence
  Description of Artificial Sequence: Synthetic oligonucleotide
  Antisense strand to SEQ ID NO: 2086070
gauagucacauagauuucu

SEQ ID NO: 2086072 - RNA, 19 nt, Artificial Sequence
  Description of Artificial Sequence: Synthetic oligonucleotide
  Sense strand starting at position 1475 of SEQ ID NO: 1881982
gcauccaguuccuugggaa

SEQ ID NO: 2086073 - RNA, 19 nt, Artificial Sequence
  Description of Artificial Sequence: Synthetic oligonucleotide
  Antisense strand to SEQ ID NO: 2086072
uucccaaggaacuggaugc

SEQ ID NO: 2086074 - RNA, 19 nt, Artificial Sequence
  Description of Artificial Sequence: Synthetic oligonucleotide
  Sense strand starting at position 1476 of SEQ ID NO: 1881982
cauccaguuccuugggaac

SEQ ID NO: 2086075 - RNA, 19 nt, Artificial Sequence
  Description of Artificial Sequence: Synthetic oligonucleotide
  Antisense strand to SEQ ID NO: 2086074
guucccaaggaacuggaug

SEQ ID NO: 2086076 - RNA, 19 nt, Artificial Sequence
  Description of Artificial Sequence: Synthetic oligonucleotide
  Sense strand starting at position 1901 of SEQ ID NO: 1881982
gugauaugccuccagucau

SEQ ID NO: 2086077 - RNA, 19 nt, Artificial Sequence
  Description of Artificial Sequence: Synthetic oligonucleotide
  Antisense strand to SEQ ID NO: 2086076
augacuggaggcauaucac

SEQ ID NO: 2086078 - RNA, 19 nt, Artificial Sequence
  Description of Artificial Sequence: Synthetic oligonucleotide
  Sense strand starting at position 2055 of SEQ ID NO: 1881982
gcagcugugugucaugaag

SEQ ID NO: 2086079 - RNA, 19 nt, Artificial Sequence
  Description of Artificial Sequence: Synthetic oligonucleotide
  Antisense strand to SEQ ID NO: 2086078
cuucaugacacacagcugc

SEQ ID NO: 2086080 - RNA, 19 nt, Artificial Sequence
  Description of Artificial Sequence: Synthetic oligonucleotide
  Sense strand starting at position 2057 of SEQ ID NO: 1881982
agcugugugucaugaaggu

SEQ ID NO: 2086081 - RNA, 19 nt, Artificial Sequence
  Description of Artificial Sequence: Synthetic oligonucleotide
  Antisense strand to SEQ ID NO: 2086080
accuucaugacacacagcu

SEQ ID NO: 2086082 - RNA, 19 nt, Artificial Sequence
  Description of Artificial Sequence: Synthetic oligonucleotide
  Sense strand starting at position 2212 of SEQ ID NO: 1881982
aaauuuacagugugcguaa

SEQ ID NO: 2086083 - RNA, 19 nt, Artificial Sequence
  Description of Artificial Sequence: Synthetic oligonucleotide
  Antisense strand to SEQ ID NO: 2086082
uuacgcacacuguaaauuu

SEQ ID NO: 2086084 - RNA, 19 nt, Artificial Sequence
  Description of Artificial Sequence: Synthetic oligonucleotide
  Sense strand starting at position 2213 of SEQ ID NO: 1881982
aauuuacagugugcguaau

SEQ ID NO: 2086085 - RNA, 19 nt, Artificial Sequence
  Description of Artificial Sequence: Synthetic oligonucleotide
  Antisense strand to SEQ ID NO: 2086084
auuacgcacacuguaaauu

SEQ ID NO: 2086086 - RNA, 19 nt, Artificial Sequence
  Description of Artificial Sequence: Synthetic oligonucleotide
  Sense strand starting at position 2215 of SEQ ID NO: 1881982
uuuacagugugcguaauga

SEQ ID NO: 2086087 - RNA, 19 nt, Artificial Sequence
  Description of Artificial Sequence: Synthetic oligonucleotide
  Antisense strand to SEQ ID NO: 2086086
ucauuacgcacacuguaaa

SEQ ID NO: 2086088 - RNA, 19 nt, Artificial Sequence
  Description of Artificial Sequence: Synthetic oligonucleotide
  Sense strand starting at position 2223 of SEQ ID NO: 1881982
gugcguaaugauuaguaaa

SEQ ID NO: 2086089 - RNA, 19 nt, Artificial Sequence
  Description of Artificial Sequence: Synthetic oligonucleotide
  Antisense strand to SEQ ID NO: 2086088
uuuacuaaucauuacgcac

SEQ ID NO: 2086090 - RNA, 19 nt, Artificial Sequence
  Description of Artificial Sequence: Synthetic oligonucleotide
  Sense strand starting at position 2226 of SEQ ID NO: 1881982
cguaaugauuaguaaagca

SEQ ID NO: 2086091 - RNA, 19 nt, Artificial Sequence
  Description of Artificial Sequence: Synthetic oligonucleotide
  Antisense strand to SEQ ID NO: 2086090
ugcuuuacuaaucauuacg

SEQ ID NO: 2086092 - RNA, 19 nt, Artificial Sequence
  Description of Artificial Sequence: Synthetic oligonucleotide
  Sense strand starting at position 2321 of SEQ ID NO: 1881982
cuccuacaugauuguuaag

SEQ ID NO: 2086093 - RNA, 19 nt, Artificial Sequence
  Description of Artificial Sequence: Synthetic oligonucleotide
  Antisense strand to SEQ ID NO: 2086092
cuuaacaaucauguaggag

SEQ ID NO: 2086094 - RNA, 19 nt, Artificial Sequence
  Description of Artificial Sequence: Synthetic oligonucleotide
  Sense strand starting at position 2323 of SEQ ID NO: 1881982
ccuacaugauuguuaaguu

SEQ ID NO: 2086095 - RNA, 19 nt, Artificial Sequence
  Description of Artificial Sequence: Synthetic oligonucleotide
  Antisense strand to SEQ ID NO: 2086094
aacuuaacaaucauguagg

SEQ ID NO: 2086096 - RNA, 19 nt, Artificial Sequence
  Description of Artificial Sequence: Synthetic oligonucleotide
  Sense strand starting at position 2324 of SEQ ID NO: 1881982
cuacaugauuguuaaguuu

SEQ ID NO: 2086097 - RNA, 19 nt, Artificial Sequence
  Description of Artificial Sequence: Synthetic oligonucleotide
  Antisense strand to SEQ ID NO: 2086096
aaacuuaacaaucauguag

SEQ ID NO: 2086098 - RNA, 19 nt, Artificial Sequence
  Description of Artificial Sequence: Synthetic oligonucleotide
  Sense strand starting at position 2677 of SEQ ID NO: 1881982
gguuucuauucuugugguu

SEQ ID NO: 2086099 - RNA, 19 nt, Artificial Sequence
  Description of Artificial Sequence: Synthetic oligonucleotide
  Antisense strand to SEQ ID NO: 2086098
aaccacaagaauagaaacc

SEQ ID NO: 2086100 - RNA, 19 nt, Artificial Sequence
  Description of Artificial Sequence: Synthetic oligonucleotide
  Sense strand starting at position 2679 of SEQ ID NO: 1881982
uuucuauucuugugguuac

SEQ ID NO: 2086101 - RNA, 19 nt, Artificial Sequence
  Description of Artificial Sequence: Synthetic oligonucleotide
  Antisense strand to SEQ ID NO: 2086100
guaaccacaagaauagaaa

SEQ ID NO: 2086102 - RNA, 19 nt, Artificial Sequence
  Description of Artificial Sequence: Synthetic oligonucleotide
  Sense strand starting at position 2680 of SEQ ID NO: 1881982
uucuauucuugugguuaca

SEQ ID NO: 2086103 - RNA, 19 nt, Artificial Sequence
  Description of Artificial Sequence: Synthetic oligonucleotide
  Antisense strand to SEQ ID NO: 2086102
uguaaccacaagaauagaa

SEQ ID NO: 2086104 - RNA, 19 nt, Artificial Sequence
  Description of Artificial Sequence: Synthetic oligonucleotide
  Sense strand starting at position 2682 of SEQ ID NO: 1881982
cuauucuugugguuacaau

SEQ ID NO: 2086105 - RNA, 19 nt, Artificial Sequence
  Description of Artificial Sequence: Synthetic oligonucleotide
  Antisense strand to SEQ ID NO: 2086104
auuguaaccacaagaauag

SEQ ID NO: 2086106 - RNA, 19 nt, Artificial Sequence
  Description of Artificial Sequence: Synthetic oligonucleotide
  Sense strand starting at position 3005 of SEQ ID NO: 1881982
acgccugacucauuucuuu

SEQ ID NO: 2086107 - RNA, 19 nt, Artificial Sequence
  Description of Artificial Sequence: Synthetic oligonucleotide
  Antisense strand to SEQ ID NO: 2086106
aaagaaaugagucaggcgu

SEQ ID NO: 2086108 - RNA, 19 nt, Artificial Sequence
  Description of Artificial Sequence: Synthetic oligonucleotide
  Sense strand starting at position 3386 of SEQ ID NO: 1881982
ggaauuaaaucaccuuugu

SEQ ID NO: 2086109 - RNA, 19 nt, Artificial Sequence
  Description of Artificial Sequence: Synthetic oligonucleotide
  Antisense strand to SEQ ID NO: 2086108
acaaaggugauuuaauucc

SEQ ID NO: 2086110 - RNA, 19 nt, Artificial Sequence
  Description of Artificial Sequence: Synthetic oligonucleotide
  Sense strand starting at position 3395 of SEQ ID NO: 1881982
ucaccuuuguugugauaaa

SEQ ID NO: 2086111 - RNA, 19 nt, Artificial Sequence
  Description of Artificial Sequence: Synthetic oligonucleotide
  Antisense strand to SEQ ID NO: 2086110
uuuaucacaacaaagguga

SEQ ID NO: 2086112 - RNA, 19 nt, Artificial Sequence
  Description of Artificial Sequence: Synthetic oligonucleotide
  Sense strand starting at position 67 of SEQ ID NO: 1881983
auguuuagauuuccuuguu

SEQ ID NO: 2086113 - RNA, 19 nt, Artificial Sequence
  Description of Artificial Sequence: Synthetic oligonucleotide
  Antisense strand to SEQ ID NO: 2086112
aacaaggaaaucuaaacau

SEQ ID NO: 2086114 - RNA, 19 nt, Artificial Sequence
  Description of Artificial Sequence: Synthetic oligonucleotide
  Sense strand starting at position 68 of SEQ ID NO: 1881983
uguuuagauuuccuuguua

SEQ ID NO: 2086115 - RNA, 19 nt, Artificial Sequence
  Description of Artificial Sequence: Synthetic oligonucleotide
  Antisense strand to SEQ ID NO: 2086114
uaacaaggaaaucuaaaca

SEQ ID NO: 2086116 - RNA, 19 nt, Artificial Sequence
  Description of Artificial Sequence: Synthetic oligonucleotide
  Sense strand starting at position 193 of SEQ ID NO: 1881983
acacuuaguucuguuucua

SEQ ID NO: 2086117 - RNA, 19 nt, Artificial Sequence
  Description of Artificial Sequence: Synthetic oligonucleotide
  Antisense strand to SEQ ID NO: 2086116
uagaaacagaacuaagugu

SEQ ID NO: 2086118 - RNA, 19 nt, Artificial Sequence
  Description of Artificial Sequence: Synthetic oligonucleotide
  Sense strand starting at position 293 of SEQ ID NO: 1881983
ggugcuguccaauaagaua

SEQ ID NO: 2086119 - RNA, 19 nt, Artificial Sequence
  Description of Artificial Sequence: Synthetic oligonucleotide
  Antisense strand to SEQ ID NO: 2086118
uaucuuauuggacagcacc

SEQ ID NO: 2086120 - RNA, 19 nt, Artificial Sequence
  Description of Artificial Sequence: Synthetic oligonucleotide
  Sense strand starting at position 556 of SEQ ID NO: 1881983
cccacuuaagcuuaggagu

SEQ ID NO: 2086121 - RNA, 19 nt, Artificial Sequence
  Description of Artificial Sequence: Synthetic oligonucleotide
  Antisense strand to SEQ ID NO: 2086120
acuccuaagcuuaaguggg

SEQ ID NO: 2086122 - RNA, 19 nt, Artificial Sequence
  Description of Artificial Sequence: Synthetic oligonucleotide
  Sense strand starting at position 631 of SEQ ID NO: 1881983
gggaccgugucuccaauaa

SEQ ID NO: 2086123 - RNA, 19 nt, Artificial Sequence
  Description of Artificial Sequence: Synthetic oligonucleotide
  Antisense strand to SEQ ID NO: 2086122
uuauuggagacacgguccc

SEQ ID NO: 2086124 - RNA, 19 nt, Artificial Sequence
  Description of Artificial Sequence: Synthetic oligonucleotide
  Sense strand starting at position 635 of SEQ ID NO: 1881983
ccgugucuccaauaaauaa

SEQ ID NO: 2086125 - RNA, 19 nt, Artificial Sequence
  Description of Artificial Sequence: Synthetic oligonucleotide
  Antisense strand to SEQ ID NO: 2086124
uuauuuauuggagacacgg

SEQ ID NO: 2086126 - RNA, 19 nt, Artificial Sequence
  Description of Artificial Sequence: Synthetic oligonucleotide
  Sense strand starting at position 773 of SEQ ID NO: 1881983
cugaauucuuaagauuuag

SEQ ID NO: 2086127 - RNA, 19 nt, Artificial Sequence
  Description of Artificial Sequence: Synthetic oligonucleotide
  Antisense strand to SEQ ID NO: 2086126
cuaaaucuuaagaauucag

SEQ ID NO: 2086128 - RNA, 19 nt, Artificial Sequence
  Description of Artificial Sequence: Synthetic oligonucleotide
  Sense strand starting at position 872 of SEQ ID NO: 1881983
aaaugaucauguucuggau

SEQ ID NO: 2086129 - RNA, 19 nt, Artificial Sequence
  Description of Artificial Sequence: Synthetic oligonucleotide
  Antisense strand to SEQ ID NO: 2086128
auccagaacaugaucauuu

SEQ ID NO: 2086130 - RNA, 19 nt, Artificial Sequence
  Description of Artificial Sequence: Synthetic oligonucleotide
  Sense strand starting at position 878 of SEQ ID NO: 1881983
ucauguucuggauauacuu

SEQ ID NO: 2086131 - RNA, 19 nt, Artificial Sequence
  Description of Artificial Sequence: Synthetic oligonucleotide
  Antisense strand to SEQ ID NO: 2086130
aaguauauccagaacauga

SEQ ID NO: 2086132 - RNA, 19 nt, Artificial Sequence
  Description of Artificial Sequence: Synthetic oligonucleotide
  Sense strand starting at position 950 of SEQ ID NO: 1881983
ugcagcauugcccaauaaa

SEQ ID NO: 2086133 - RNA, 19 nt, Artificial Sequence
  Description of Artificial Sequence: Synthetic oligonucleotide
  Antisense strand to SEQ ID NO: 2086132
uuuauugggcaaugcugca

SEQ ID NO: 2086134 - RNA, 19 nt, Artificial Sequence
  Description of Artificial Sequence: Synthetic oligonucleotide
  Sense strand starting at position 1000 of SEQ ID NO: 1881983
uauauuccugcuugggaca

SEQ ID NO: 2086135 - RNA, 19 nt, Artificial Sequence
  Description of Artificial Sequence: Synthetic oligonucleotide
  Antisense strand to SEQ ID NO: 2086134
ugucccaagcaggaauaua

SEQ ID NO: 2086136 - RNA, 19 nt, Artificial Sequence
  Description of Artificial Sequence: Synthetic oligonucleotide
  Sense strand starting at position 1005 of SEQ ID NO: 1881983
uccugcuugggacauaaua

SEQ ID NO: 2086137 - RNA, 19 nt, Artificial Sequence
  Description of Artificial Sequence: Synthetic oligonucleotide
  Antisense strand to SEQ ID NO: 2086136
uauuaugucccaagcagga

SEQ ID NO: 2086138 - RNA, 19 nt, Artificial Sequence
  Description of Artificial Sequence: Synthetic oligonucleotide
  Sense strand starting at position 1215 of SEQ ID NO: 1881983
ugaauaaacucugcacgga

SEQ ID NO: 2086139 - RNA, 19 nt, Artificial Sequence
  Description of Artificial Sequence: Synthetic oligonucleotide
  Antisense strand to SEQ ID NO: 2086138
uccgugcagaguuuauuca

SEQ ID NO: 2086140 - RNA, 19 nt, Artificial Sequence
  Description of Artificial Sequence: Synthetic oligonucleotide
  Sense strand starting at position 1218 of SEQ ID NO: 1881983
auaaacucugcacggaaau

SEQ ID NO: 2086141 - RNA, 19 nt, Artificial Sequence
  Description of Artificial Sequence: Synthetic oligonucleotide
  Antisense strand to SEQ ID NO: 2086140
auuuccgugcagaguuuau

SEQ ID NO: 2086142 - RNA, 19 nt, Artificial Sequence
  Description of Artificial Sequence: Synthetic oligonucleotide
  Sense strand starting at position 1263 of SEQ ID NO: 1881983
cuaggcuaggaucguuaau

SEQ ID NO: 2086143 - RNA, 19 nt, Artificial Sequence
  Description of Artificial Sequence: Synthetic oligonucleotide
  Antisense strand to SEQ ID NO: 2086142
auuaacgauccuagccuag

SEQ ID NO: 2086144 - RNA, 19 nt, Artificial Sequence
  Description of Artificial Sequence: Synthetic oligonucleotide
  Sense strand starting at position 1269 of SEQ ID NO: 1881983
uaggaucguuaaucgugaa

SEQ ID NO: 2086145 - RNA, 19 nt, Artificial Sequence
  Description of Artificial Sequence: Synthetic oligonucleotide
  Antisense strand to SEQ ID NO: 2086144
uucacgauuaacgauccua

SEQ ID NO: 2086146 - RNA, 19 nt, Artificial Sequence
  Description of Artificial Sequence: Synthetic oligonucleotide
  Sense strand starting at position 1273 of SEQ ID NO: 1881983
aucguuaaucgugaaguua

SEQ ID NO: 2086147 - RNA, 19 nt, Artificial Sequence
  Description of Artificial Sequence: Synthetic oligonucleotide
  Antisense strand to SEQ ID NO: 2086146
uaacuucacgauuaacgau

SEQ ID NO: 2086148 - RNA, 19 nt, Artificial Sequence
  Description of Artificial Sequence: Synthetic oligonucleotide
  Sense strand starting at position 1317 of SEQ ID NO: 1881983
uggcuuguuacagacgaaa

SEQ ID NO: 2086149 - RNA, 19 nt, Artificial Sequence
  Description of Artificial Sequence: Synthetic oligonucleotide
  Antisense strand to SEQ ID NO: 2086148
uuucgucuguaacaagcca

SEQ ID NO: 2086150 - RNA, 19 nt, Artificial Sequence
  Description of Artificial Sequence: Synthetic oligonucleotide
  Sense strand starting at position 1384 of SEQ ID NO: 1881983
ucucuacuaggguaguuaa

SEQ ID NO: 2086151 - RNA, 19 nt, Artificial Sequence
  Description of Artificial Sequence: Synthetic oligonucleotide
  Antisense strand to SEQ ID NO: 2086150
uuaacuacccuaguagaga

SEQ ID NO: 2086152 - RNA, 19 nt, Artificial Sequence
  Description of Artificial Sequence: Synthetic oligonucleotide
  Sense strand starting at position 1439 of SEQ ID NO: 1881983
aagauuaggcggugucaag

SEQ ID NO: 2086153 - RNA, 19 nt, Artificial Sequence
  Description of Artificial Sequence: Synthetic oligonucleotide
  Antisense strand to SEQ ID NO: 2086152
cuugacaccgccuaaucuu

SEQ ID NO: 2086154 - RNA, 19 nt, Artificial Sequence
  Description of Artificial Sequence: Synthetic oligonucleotide
  Sense strand starting at position 1456 of SEQ ID NO: 1881983
agagcaacuaucugugaga

SEQ ID NO: 2086155 - RNA, 19 nt, Artificial Sequence
  Description of Artificial Sequence: Synthetic oligonucleotide
  Antisense strand to SEQ ID NO: 2086154
ucucacagauaguugcucu

SEQ ID NO: 2086156 - RNA, 19 nt, Artificial Sequence
  Description of Artificial Sequence: Synthetic oligonucleotide
  Sense strand starting at position 1457 of SEQ ID NO: 1881983
gagcaacuaucugugagac

SEQ ID NO: 2086157 - RNA, 19 nt, Artificial Sequence
  Description of Artificial Sequence: Synthetic oligonucleotide
  Antisense strand to SEQ ID NO: 2086156
gucucacagauaguugcuc

SEQ ID NO: 2086158 - RNA, 19 nt, Artificial Sequence
  Description of Artificial Sequence: Synthetic oligonucleotide
  Sense strand starting at position 2986 of SEQ ID NO: 1881983
ggucaugcccuguaaguaa

SEQ ID NO: 2086159 - RNA, 19 nt, Artificial Sequence
  Description of Artificial Sequence: Synthetic oligonucleotide
  Antisense strand to SEQ ID NO: 2086158
uuacuuacagggcaugacc

SEQ ID NO: 2086160 - RNA, 19 nt, Artificial Sequence
  Description of Artificial Sequence: Synthetic oligonucleotide
  Sense strand starting at position 3349 of SEQ ID NO: 1881983
aguugucacucuuuaagau

SEQ ID NO: 2086161 - RNA, 19 nt, Artificial Sequence
  Description of Artificial Sequence: Synthetic oligonucleotide
  Antisense strand to SEQ ID NO: 2086160
aucuuaaagagugacaacu

SEQ ID NO: 2086162 - RNA, 19 nt, Artificial Sequence
  Description of Artificial Sequence: Synthetic oligonucleotide
  Sense strand starting at position 3350 of SEQ ID NO: 1881983
guugucacucuuuaagauc

SEQ ID NO: 2086163 - RNA, 19 nt, Artificial Sequence
  Description of Artificial Sequence: Synthetic oligonucleotide
  Antisense strand to SEQ ID NO: 2086162
gaucuuaaagagugacaac

SEQ ID NO: 2086164 - RNA, 19 nt, Artificial Sequence
  Description of Artificial Sequence: Synthetic oligonucleotide
  Sense strand starting at position 3393 of SEQ ID NO: 1881983
gugacuuguugaccuggaa

SEQ ID NO: 2086165 - RNA, 19 nt, Artificial Sequence
  Description of Artificial Sequence: Synthetic oligonucleotide
  Antisense strand to SEQ ID NO: 2086164
uuccaggucaacaagucac

SEQ ID NO: 2086166 - RNA, 19 nt, Artificial Sequence
  Description of Artificial Sequence: Synthetic oligonucleotide
  Sense strand starting at position 3396 of SEQ ID NO: 1881983
acuuguugaccuggaauau

SEQ ID NO: 2086167 - RNA, 19 nt, Artificial Sequence
  Description of Artificial Sequence: Synthetic oligonucleotide
  Antisense strand to SEQ ID NO: 2086166
auauuccaggucaacaagu

SEQ ID NO: 2086168 - RNA, 19 nt, Artificial Sequence
  Description of Artificial Sequence: Synthetic oligonucleotide
  Sense strand starting at position 3397 of SEQ ID NO: 1881983
cuuguugaccuggaauauu

SEQ ID NO: 2086169 - RNA, 19 nt, Artificial Sequence
  Description of Artificial Sequence: Synthetic oligonucleotide
  Antisense strand to SEQ ID NO: 2086168
aauauuccaggucaacaag

SEQ ID NO: 2086170 - RNA, 19 nt, Artificial Sequence
  Description of Artificial Sequence: Synthetic oligonucleotide
  Sense strand starting at position 3422 of SEQ ID NO: 1881983
gguauuaugaggcaaggcu

SEQ ID NO: 2086171 - RNA, 19 nt, Artificial Sequence
  Description of Artificial Sequence: Synthetic oligonucleotide
  Antisense strand to SEQ ID NO: 2086170
agccuugccucauaauacc

SEQ ID NO: 2086172 - RNA, 19 nt, Artificial Sequence
  Description of Artificial Sequence: Synthetic oligonucleotide
  Sense strand starting at position 3435 of SEQ ID NO: 1881983
aaggcugucggccagauuu

SEQ ID NO: 2086173 - RNA, 19 nt, Artificial Sequence
  Description of Artificial Sequence: Synthetic oligonucleotide
  Antisense strand to SEQ ID NO: 2086172
aaaucuggccgacagccuu

SEQ ID NO: 2086174 - RNA, 19 nt, Artificial Sequence
  Description of Artificial Sequence: Synthetic oligonucleotide
  Sense strand starting at position 3581 of SEQ ID NO: 1881983
gauguaggaacaugauguu

SEQ ID NO: 2086175 - RNA, 19 nt, Artificial Sequence
  Description of Artificial Sequence: Synthetic oligonucleotide
  Antisense strand to SEQ ID NO: 2086174
aacaucauguuccuacauc

SEQ ID NO: 2086176 - RNA, 19 nt, Artificial Sequence
  Description of Artificial Sequence: Synthetic oligonucleotide
  Sense strand starting at position 3595 of SEQ ID NO: 1881983
auguuaaugauguaugugu

SEQ ID NO: 2086177 - RNA, 19 nt, Artificial Sequence
  Description of Artificial Sequence: Synthetic oligonucleotide
  Antisense strand to SEQ ID NO: 2086176
acacauacaucauuaacau

SEQ ID NO: 2086178 - RNA, 19 nt, Artificial Sequence
  Description of Artificial Sequence: Synthetic oligonucleotide
  Sense strand starting at position 3667 of SEQ ID NO: 1881983
ugaguaaguagccagugaa

SEQ ID NO: 2086179 - RNA, 19 nt, Artificial Sequence
  Description of Artificial Sequence: Synthetic oligonucleotide
  Antisense strand to SEQ ID NO: 2086178
uucacuggcuacuuacuca

SEQ ID NO: 2086180 - RNA, 19 nt, Artificial Sequence
  Description of Artificial Sequence: Synthetic oligonucleotide
  Sense strand starting at position 3670 of SEQ ID NO: 1881983
guaaguagccagugaauag

SEQ ID NO: 2086181 - RNA, 19 nt, Artificial Sequence
  Description of Artificial Sequence: Synthetic oligonucleotide
  Antisense strand to SEQ ID NO: 2086180
cuauucacuggcuacuuac

SEQ ID NO: 2086182 - RNA, 19 nt, Artificial Sequence
  Description of Artificial Sequence: Synthetic oligonucleotide
  Sense strand starting at position 3681 of SEQ ID NO: 1881983
gugaauagcccucauugau

SEQ ID NO: 2086183 - RNA, 19 nt, Artificial Sequence
  Description of Artificial Sequence: Synthetic oligonucleotide
  Antisense strand to SEQ ID NO: 2086182
aucaaugagggcuauucac

SEQ ID NO: 2086184 - RNA, 19 nt, Artificial Sequence
  Description of Artificial Sequence: Synthetic oligonucleotide
  Sense strand starting at position 3708 of SEQ ID NO: 1881983
ucacuaaaugugcagauga

SEQ ID NO: 2086185 - RNA, 19 nt, Artificial Sequence
  Description of Artificial Sequence: Synthetic oligonucleotide
  Antisense strand to SEQ ID NO: 2086184
ucaucugcacauuuaguga

SEQ ID NO: 2086186 - RNA, 19 nt, Artificial Sequence
  Description of Artificial Sequence: Synthetic oligonucleotide
  Sense strand starting at position 3725 of SEQ ID NO: 1881983
gaccaauucgcagguuaga

SEQ ID NO: 2086187 - RNA, 19 nt, Artificial Sequence
  Description of Artificial Sequence: Synthetic oligonucleotide
  Antisense strand to SEQ ID NO: 2086186
ucuaaccugcgaauugguc

SEQ ID NO: 2086188 - RNA, 19 nt, Artificial Sequence
  Description of Artificial Sequence: Synthetic oligonucleotide
  Sense strand starting at position 3728 of SEQ ID NO: 1881983
caauucgcagguuagagaa

SEQ ID NO: 2086189 - RNA, 19 nt, Artificial Sequence
  Description of Artificial Sequence: Synthetic oligonucleotide
  Antisense strand to SEQ ID NO: 2086188
uucucuaaccugcgaauug

SEQ ID NO: 2086190 - RNA, 19 nt, Artificial Sequence
  Description of Artificial Sequence: Synthetic oligonucleotide
  Sense strand starting at position 3796 of SEQ ID NO: 1881983
gcauaauagugagcugaag

SEQ ID NO: 2086191 - RNA, 19 nt, Artificial Sequence
  Description of Artificial Sequence: Synthetic oligonucleotide
  Antisense strand to SEQ ID NO: 2086190
cuucagcucacuauuaugc

SEQ ID NO: 2086192 - RNA, 19 nt, Artificial Sequence
  Description of Artificial Sequence: Synthetic oligonucleotide
  Sense strand starting at position 48 of SEQ ID NO: 1881984
ucucaaauguaagucauca

SEQ ID NO: 2086193 - RNA, 19 nt, Artificial Sequence
  Description of Artificial Sequence: Synthetic oligonucleotide
  Antisense strand to SEQ ID NO: 2086192
ugaugacuuacauuugaga

SEQ ID NO: 2086194 - RNA, 19 nt, Artificial Sequence
  Description of Artificial Sequence: Synthetic oligonucleotide
  Sense strand starting at position 53 of SEQ ID NO: 1881984
aauguaagucaucaggcuu

SEQ ID NO: 2086195 - RNA, 19 nt, Artificial Sequence
  Description of Artificial Sequence: Synthetic oligonucleotide
  Antisense strand to SEQ ID NO: 2086194
aagccugaugacuuacauu

SEQ ID NO: 2086196 - RNA, 19 nt, Artificial Sequence
  Description of Artificial Sequence: Synthetic oligonucleotide
  Sense strand starting at position 195 of SEQ ID NO: 1881984
cauguuuaucucuauggga

SEQ ID NO: 2086197 - RNA, 19 nt, Artificial Sequence
  Description of Artificial Sequence: Synthetic oligonucleotide
  Antisense strand to SEQ ID NO: 2086196
ucccauagagauaaacaug

SEQ ID NO: 2086198 - RNA, 19 nt, Artificial Sequence
  Description of Artificial Sequence: Synthetic oligonucleotide
  Sense strand starting at position 197 of SEQ ID NO: 1881984
uguuuaucucuaugggaaa

SEQ ID NO: 2086199 - RNA, 19 nt, Artificial Sequence
  Description of Artificial Sequence: Synthetic oligonucleotide
  Antisense strand to SEQ ID NO: 2086198
uuucccauagagauaaaca

SEQ ID NO: 2086200 - RNA, 19 nt, Artificial Sequence
  Description of Artificial Sequence: Synthetic oligonucleotide
  Sense strand starting at position 232 of SEQ ID NO: 1881984
gaagauuugcuucguauug

SEQ ID NO: 2086201 - RNA, 19 nt, Artificial Sequence
  Description of Artificial Sequence: Synthetic oligonucleotide
  Antisense strand to SEQ ID NO: 2086200
caauacgaagcaaaucuuc

SEQ ID NO: 2086202 - RNA, 19 nt, Artificial Sequence
  Description of Artificial Sequence: Synthetic oligonucleotide
  Sense strand starting at position 233 of SEQ ID NO: 1881984
aagauuugcuucguauuga

SEQ ID NO: 2086203 - RNA, 19 nt, Artificial Sequence
  Description of Artificial Sequence: Synthetic oligonucleotide
  Antisense strand to SEQ ID NO: 2086202
ucaauacgaagcaaaucuu

SEQ ID NO: 2086204 - RNA, 19 nt, Artificial Sequence
  Description of Artificial Sequence: Synthetic oligonucleotide
  Sense strand starting at position 529 of SEQ ID NO: 1881984
gaggaaacuuacgcaucuu

SEQ ID NO: 2086205 - RNA, 19 nt, Artificial Sequence
  Description of Artificial Sequence: Synthetic oligonucleotide
  Antisense strand to SEQ ID NO: 2086204
aagaugcguaaguuuccuc

SEQ ID NO: 2086206 - RNA, 19 nt, Artificial Sequence
  Description of Artificial Sequence: Synthetic oligonucleotide
  Sense strand starting at position 690 of SEQ ID NO: 1881984
gcaacaagacaccgaaauu

SEQ ID NO: 2086207 - RNA, 19 nt, Artificial Sequence
  Description of Artificial Sequence: Synthetic oligonucleotide
  Antisense strand to SEQ ID NO: 2086206
aauuucggugucuuguugc

SEQ ID NO: 2086208 - RNA, 19 nt, Artificial Sequence
  Description of Artificial Sequence: Synthetic oligonucleotide
  Sense strand starting at position 825 of SEQ ID NO: 1881984
ugugacugucuuugggaga

SEQ ID NO: 2086209 - RNA, 19 nt, Artificial Sequence
  Description of Artificial Sequence: Synthetic oligonucleotide
  Antisense strand to SEQ ID NO: 2086208
ucucccaaagacagucaca

SEQ ID NO: 2086210 - RNA, 19 nt, Artificial Sequence
  Description of Artificial Sequence: Synthetic oligonucleotide
  Sense strand starting at position 830 of SEQ ID NO: 1881984
cugucuuugggagaccgua

SEQ ID NO: 2086211 - RNA, 19 nt, Artificial Sequence
  Description of Artificial Sequence: Synthetic oligonucleotide
  Antisense strand to SEQ ID NO: 2086210
uacggucucccaaagacag

SEQ ID NO: 2086212 - RNA, 19 nt, Artificial Sequence
  Description of Artificial Sequence: Synthetic oligonucleotide
  Sense strand starting at position 1043 of SEQ ID NO: 1881984
ccacaaagucauggagacu

SEQ ID NO: 2086213 - RNA, 19 nt, Artificial Sequence
  Description of Artificial Sequence: Synthetic oligonucleotide
  Antisense strand to SEQ ID NO: 2086212
agucuccaugacuuugugg

SEQ ID NO: 2086214 - RNA, 19 nt, Artificial Sequence
  Description of Artificial Sequence: Synthetic oligonucleotide
  Sense strand starting at position 1052 of SEQ ID NO: 1881984
cauggagacuuguccuuau

SEQ ID NO: 2086215 - RNA, 19 nt, Artificial Sequence
  Description of Artificial Sequence: Synthetic oligonucleotide
  Antisense strand to SEQ ID NO: 2086214
auaaggacaagucuccaug

SEQ ID NO: 2086216 - RNA, 19 nt, Artificial Sequence
  Description of Artificial Sequence: Synthetic oligonucleotide
  Sense strand starting at position 1055 of SEQ ID NO: 1881984
ggagacuuguccuuauaau

SEQ ID NO: 2086217 - RNA, 19 nt, Artificial Sequence
  Description of Artificial Sequence: Synthetic oligonucleotide
  Antisense strand to SEQ ID NO: 2086216
auuauaaggacaagucucc

SEQ ID NO: 2086218 - RNA, 19 nt, Artificial Sequence
  Description of Artificial Sequence: Synthetic oligonucleotide
  Sense strand starting at position 1400 of SEQ ID NO: 1881984
ugguguagcagucaggaaa

SEQ ID NO: 2086219 - RNA, 19 nt, Artificial Sequence
  Description of Artificial Sequence: Synthetic oligonucleotide
  Antisense strand to SEQ ID NO: 2086218
uuuccugacugcuacacca

SEQ ID NO: 2086220 - RNA, 19 nt, Artificial Sequence
  Description of Artificial Sequence: Synthetic oligonucleotide
  Sense strand starting at position 1422 of SEQ ID NO: 1881984
uuccucuggguuuaaucau

SEQ ID NO: 2086221 - RNA, 19 nt, Artificial Sequence
  Description of Artificial Sequence: Synthetic oligonucleotide
  Antisense strand to SEQ ID NO: 2086220
augauuaaacccagaggaa

SEQ ID NO: 2086222 - RNA, 19 nt, Artificial Sequence
  Description of Artificial Sequence: Synthetic oligonucleotide
  Sense strand starting at position 1428 of SEQ ID NO: 1881984
uggguuuaaucaucccauu

SEQ ID NO: 2086223 - RNA, 19 nt, Artificial Sequence
  Description of Artificial Sequence: Synthetic oligonucleotide
  Antisense strand to SEQ ID NO: 2086222
aaugggaugauuaaaccca

SEQ ID NO: 2086224 - RNA, 19 nt, Artificial Sequence
  Description of Artificial Sequence: Synthetic oligonucleotide
  Sense strand starting at position 1480 of SEQ ID NO: 1881984
gccaguucuggaggaacua

SEQ ID NO: 2086225 - RNA, 19 nt, Artificial Sequence
  Description of Artificial Sequence: Synthetic oligonucleotide
  Antisense strand to SEQ ID NO: 2086224
uaguuccuccagaacuggc

SEQ ID NO: 2086226 - RNA, 19 nt, Artificial Sequence
  Description of Artificial Sequence: Synthetic oligonucleotide
  Sense strand starting at position 2463 of SEQ ID NO: 1881984
uggagucauugccuggaga

SEQ ID NO: 2086227 - RNA, 19 nt, Artificial Sequence
  Description of Artificial Sequence: Synthetic oligonucleotide
  Antisense strand to SEQ ID NO: 2086226
ucuccaggcaaugacucca

SEQ ID NO: 2086228 - RNA, 19 nt, Artificial Sequence
  Description of Artificial Sequence: Synthetic oligonucleotide
  Sense strand starting at position 2464 of SEQ ID NO: 1881984
ggagucauugccuggagaa

SEQ ID NO: 2086229 - RNA, 19 nt, Artificial Sequence
  Description of Artificial Sequence: Synthetic oligonucleotide
  Antisense strand to SEQ ID NO: 2086228
uucuccaggcaaugacucc

SEQ ID NO: 2086230 - RNA, 19 nt, Artificial Sequence
  Description of Artificial Sequence: Synthetic oligonucleotide
  Sense strand starting at position 2465 of SEQ ID NO: 1881984
gagucauugccuggagaaa

SEQ ID NO: 2086231 - RNA, 19 nt, Artificial Sequence
  Description of Artificial Sequence: Synthetic oligonucleotide
  Antisense strand to SEQ ID NO: 2086230
uuucuccaggcaaugacuc

SEQ ID NO: 2086232 - RNA, 19 nt, Artificial Sequence
  Description of Artificial Sequence: Synthetic oligonucleotide
  Sense strand starting at position 2524 of SEQ ID NO: 1881984
gcuuacugucgguucuuau

SEQ ID NO: 2086233 - RNA, 19 nt, Artificial Sequence
  Description of Artificial Sequence: Synthetic oligonucleotide
  Antisense strand to SEQ ID NO: 2086232
auaagaaccgacaguaagc

SEQ ID NO: 2086234 - RNA, 19 nt, Artificial Sequence
  Description of Artificial Sequence: Synthetic oligonucleotide
  Sense strand starting at position 2537 of SEQ ID NO: 1881984
ucuuaucuucgggaaacug

SEQ ID NO: 2086235 - RNA, 19 nt, Artificial Sequence
  Description of Artificial Sequence: Synthetic oligonucleotide
  Antisense strand to SEQ ID NO: 2086234
caguuucccgaagauaaga

SEQ ID NO: 2086236 - RNA, 19 nt, Artificial Sequence
  Description of Artificial Sequence: Synthetic oligonucleotide
  Sense strand starting at position 2546 of SEQ ID NO: 1881984
cgggaaacugauuguaccu

SEQ ID NO: 2086237 - RNA, 19 nt, Artificial Sequence
  Description of Artificial Sequence: Synthetic oligonucleotide
  Antisense strand to SEQ ID NO: 2086236
agguacaaucaguuucccg

SEQ ID NO: 2086238 - RNA, 19 nt, Artificial Sequence
  Description of Artificial Sequence: Synthetic oligonucleotide
  Sense strand starting at position 2568 of SEQ ID NO: 1881984
gugugaauucgccugugug

SEQ ID NO: 2086239 - RNA, 19 nt, Artificial Sequence
  Description of Artificial Sequence: Synthetic oligonucleotide
  Antisense strand to SEQ ID NO: 2086238
cacacaggcgaauucacac

SEQ ID NO: 2086240 - RNA, 19 nt, Artificial Sequence
  Description of Artificial Sequence: Synthetic oligonucleotide
  Sense strand starting at position 2685 of SEQ ID NO: 1881984
acagucaaugcccagagau

SEQ ID NO: 2086241 - RNA, 19 nt, Artificial Sequence
  Description of Artificial Sequence: Synthetic oligonucleotide
  Antisense strand to SEQ ID NO: 2086240
aucucugggcauugacugu

SEQ ID NO: 2086242 - RNA, 19 nt, Artificial Sequence
  Description of Artificial Sequence: Synthetic oligonucleotide
  Sense strand starting at position 2687 of SEQ ID NO: 1881984
agucaaugcccagagaugu

SEQ ID NO: 2086243 - RNA, 19 nt, Artificial Sequence
  Description of Artificial Sequence: Synthetic oligonucleotide
  Antisense strand to SEQ ID NO: 2086242
acaucucugggcauugacu

SEQ ID NO: 2086244 - RNA, 19 nt, Artificial Sequence
  Description of Artificial Sequence: Synthetic oligonucleotide
  Sense strand starting at position 2693 of SEQ ID NO: 1881984
ugcccagagaugugaauua

SEQ ID NO: 2086245 - RNA, 19 nt, Artificial Sequence
  Description of Artificial Sequence: Synthetic oligonucleotide
  Antisense strand to SEQ ID NO: 2086244
uaauucacaucucugggca

SEQ ID NO: 2086246 - RNA, 19 nt, Artificial Sequence
  Description of Artificial Sequence: Synthetic oligonucleotide
  Sense strand starting at position 2704 of SEQ ID NO: 1881984
gugaauuagcauuagacuu

SEQ ID NO: 2086247 - RNA, 19 nt, Artificial Sequence
  Description of Artificial Sequence: Synthetic oligonucleotide
  Antisense strand to SEQ ID NO: 2086246
aagucuaaugcuaauucac

SEQ ID NO: 2086248 - RNA, 19 nt, Artificial Sequence
  Description of Artificial Sequence: Synthetic oligonucleotide
  Sense strand starting at position 2959 of SEQ ID NO: 1881984
cguacaaauguagacuauu

SEQ ID NO: 2086249 - RNA, 19 nt, Artificial Sequence
  Description of Artificial Sequence: Synthetic oligonucleotide
  Antisense strand to SEQ ID NO: 2086248
aauagucuacauuuguacg

SEQ ID NO: 2086250 - RNA, 19 nt, Artificial Sequence
  Description of Artificial Sequence: Synthetic oligonucleotide
  Sense strand starting at position 3116 of SEQ ID NO: 1881984
cagaguacgcccuauaaga

SEQ ID NO: 2086251 - RNA, 19 nt, Artificial Sequence
  Description of Artificial Sequence: Synthetic oligonucleotide
  Antisense strand to SEQ ID NO: 2086250
ucuuauagggcguacucug

SEQ ID NO: 2086252 - RNA, 19 nt, Artificial Sequence
  Description of Artificial Sequence: Synthetic oligonucleotide
  Sense strand starting at position 3118 of SEQ ID NO: 1881984
gaguacgcccuauaagaga

SEQ ID NO: 2086253 - RNA, 19 nt, Artificial Sequence
  Description of Artificial Sequence: Synthetic oligonucleotide
  Antisense strand to SEQ ID NO: 2086252
ucucuuauagggcguacuc

SEQ ID NO: 2086254 - RNA, 19 nt, Artificial Sequence
  Description of Artificial Sequence: Synthetic oligonucleotide
  Sense strand starting at position 3152 of SEQ ID NO: 1881984
uguuuaucucuguaggaag

SEQ ID NO: 2086255 - RNA, 19 nt, Artificial Sequence
  Description of Artificial Sequence: Synthetic oligonucleotide
  Antisense strand to SEQ ID NO: 2086254
cuuccuacagagauaaaca

SEQ ID NO: 2086256 - RNA, 19 nt, Artificial Sequence
  Description of Artificial Sequence: Synthetic oligonucleotide
  Sense strand starting at position 3154 of SEQ ID NO: 1881984
uuuaucucuguaggaagua

SEQ ID NO: 2086257 - RNA, 19 nt, Artificial Sequence
  Description of Artificial Sequence: Synthetic oligonucleotide
  Antisense strand to SEQ ID NO: 2086256
uacuuccuacagagauaaa

SEQ ID NO: 2086258 - RNA, 19 nt, Artificial Sequence
  Description of Artificial Sequence: Synthetic oligonucleotide
  Sense strand starting at position 3167 of SEQ ID NO: 1881984
gaaguaaacgguuagucaa

SEQ ID NO: 2086259 - RNA, 19 nt, Artificial Sequence
  Description of Artificial Sequence: Synthetic oligonucleotide
  Antisense strand to SEQ ID NO: 2086258
uugacuaaccguuuacuuc

SEQ ID NO: 2086260 - RNA, 19 nt, Artificial Sequence
  Description of Artificial Sequence: Synthetic oligonucleotide
  Sense strand starting at position 3635 of SEQ ID NO: 1881984
uuguuuaauuacucuugga

SEQ ID NO: 2086261 - RNA, 19 nt, Artificial Sequence
  Description of Artificial Sequence: Synthetic oligonucleotide
  Antisense strand to SEQ ID NO: 2086260
uccaagaguaauuaaacaa

SEQ ID NO: 2086262 - RNA, 19 nt, Artificial Sequence
  Description of Artificial Sequence: Synthetic oligonucleotide
  Sense strand starting at position 3639 of SEQ ID NO: 1881984
uuaauuacucuuggaguuu

SEQ ID NO: 2086263 - RNA, 19 nt, Artificial Sequence
  Description of Artificial Sequence: Synthetic oligonucleotide
  Antisense strand to SEQ ID NO: 2086262
aaacuccaagaguaauuaa

SEQ ID NO: 2086264 - RNA, 19 nt, Artificial Sequence
  Description of Artificial Sequence: Synthetic oligonucleotide
  Sense strand starting at position 3654 of SEQ ID NO: 1881984
guuuaugaugcacaaauua

SEQ ID NO: 2086265 - RNA, 19 nt, Artificial Sequence
  Description of Artificial Sequence: Synthetic oligonucleotide
  Antisense strand to SEQ ID NO: 2086264
uaauuugugcaucauaaac

SEQ ID NO: 2086266 - RNA, 19 nt, Artificial Sequence
  Description of Artificial Sequence: Synthetic oligonucleotide
  Sense strand starting at position 3830 of SEQ ID NO: 1881984
gcaucaaugcaauagguga

SEQ ID NO: 2086267 - RNA, 19 nt, Artificial Sequence
  Description of Artificial Sequence: Synthetic oligonucleotide
  Antisense strand to SEQ ID NO: 2086266
ucaccuauugcauugaugc

SEQ ID NO: 2086268 - RNA, 19 nt, Artificial Sequence
  Description of Artificial Sequence: Synthetic oligonucleotide
  Sense strand starting at position 3861 of SEQ ID NO: 1881984
accgaagcauguuuagaga

SEQ ID NO: 2086269 - RNA, 19 nt, Artificial Sequence
  Description of Artificial Sequence: Synthetic oligonucleotide
  Antisense strand to SEQ ID NO: 2086268
ucucuaaacaugcuucggu

SEQ ID NO: 2086270 - RNA, 19 nt, Artificial Sequence
  Description of Artificial Sequence: Synthetic oligonucleotide
  Sense strand starting at position 3870 of SEQ ID NO: 1881984
uguuuagagauguacuuug

SEQ ID NO: 2086271 - RNA, 19 nt, Artificial Sequence
  Description of Artificial Sequence: Synthetic oligonucleotide
  Antisense strand to SEQ ID NO: 2086270
caaaguacaucucuaaaca

SEQ ID NO: 2086272 - RNA, 19 nt, Artificial Sequence
  Description of Artificial Sequence: Synthetic oligonucleotide
  Sense strand starting at position 61 of SEQ ID NO: 1881985
gcuccuaugucucuuuguu

SEQ ID NO: 2086273 - RNA, 19 nt, Artificial Sequence
  Description of Artificial Sequence: Synthetic oligonucleotide
  Antisense strand to SEQ ID NO: 2086272
aacaaagagacauaggagc

SEQ ID NO: 2086274 - RNA, 19 nt, Artificial Sequence
  Description of Artificial Sequence: Synthetic oligonucleotide
  Sense strand starting at position 82 of SEQ ID NO: 1881985
gcuuaucuggaagggagaa

SEQ ID NO: 2086275 - RNA, 19 nt, Artificial Sequence
  Description of Artificial Sequence: Synthetic oligonucleotide
  Antisense strand to SEQ ID NO: 2086274
uucucccuuccagauaagc

SEQ ID NO: 2086276 - RNA, 19 nt, Artificial Sequence
  Description of Artificial Sequence: Synthetic oligonucleotide
  Sense strand starting at position 92 of SEQ ID NO: 1881985
aagggagaauugugugucu

SEQ ID NO: 2086277 - RNA, 19 nt, Artificial Sequence
  Description of Artificial Sequence: Synthetic oligonucleotide
  Antisense strand to SEQ ID NO: 2086276
agacacacaauucucccuu

SEQ ID NO: 2086278 - RNA, 19 nt, Artificial Sequence
  Description of Artificial Sequence: Synthetic oligonucleotide
  Sense strand starting at position 94 of SEQ ID NO: 1881985
gggagaauugugugucugu

SEQ ID NO: 2086279 - RNA, 19 nt, Artificial Sequence
  Description of Artificial Sequence: Synthetic oligonucleotide
  Antisense strand to SEQ ID NO: 2086278
acagacacacaauucuccc

SEQ ID NO: 2086280 - RNA, 19 nt, Artificial Sequence
  Description of Artificial Sequence: Synthetic oligonucleotide
  Sense strand starting at position 259 of SEQ ID NO: 1881985
uugguaguuacuugagaga

SEQ ID NO: 2086281 - RNA, 19 nt, Artificial Sequence
  Description of Artificial Sequence: Synthetic oligonucleotide
  Antisense strand to SEQ ID NO: 2086280
ucucucaaguaacuaccaa

SEQ ID NO: 2086282 - RNA, 19 nt, Artificial Sequence
  Description of Artificial Sequence: Synthetic oligonucleotide
  Sense strand starting at position 262 of SEQ ID NO: 1881985
guaguuacuugagagacuu

SEQ ID NO: 2086283 - RNA, 19 nt, Artificial Sequence
  Description of Artificial Sequence: Synthetic oligonucleotide
  Antisense strand to SEQ ID NO: 2086282
aagucucucaaguaacuac

SEQ ID NO: 2086284 - RNA, 19 nt, Artificial Sequence
  Description of Artificial Sequence: Synthetic oligonucleotide
  Sense strand starting at position 355 of SEQ ID NO: 1881985
guaguuagaagugaaguga

SEQ ID NO: 2086285 - RNA, 19 nt, Artificial Sequence
  Description of Artificial Sequence: Synthetic oligonucleotide
  Antisense strand to SEQ ID NO: 2086284
ucacuucacuucuaacuac

SEQ ID NO: 2086286 - RNA, 19 nt, Artificial Sequence
  Description of Artificial Sequence: Synthetic oligonucleotide
  Sense strand starting at position 613 of SEQ ID NO: 1881985
ccguaaguguugucccuga

SEQ ID NO: 2086287 - RNA, 19 nt, Artificial Sequence
  Description of Artificial Sequence: Synthetic oligonucleotide
  Antisense strand to SEQ ID NO: 2086286
ucagggacaacacuuacgg

SEQ ID NO: 2086288 - RNA, 19 nt, Artificial Sequence
  Description of Artificial Sequence: Synthetic oligonucleotide
  Sense strand starting at position 617 of SEQ ID NO: 1881985
aaguguugucccugaccuc

SEQ ID NO: 2086289 - RNA, 19 nt, Artificial Sequence
  Description of Artificial Sequence: Synthetic oligonucleotide
  Antisense strand to SEQ ID NO: 2086288
gaggucagggacaacacuu

SEQ ID NO: 2086290 - RNA, 19 nt, Artificial Sequence
  Description of Artificial Sequence: Synthetic oligonucleotide
  Sense strand starting at position 1096 of SEQ ID NO: 1881985
gcggcacuguuccacaaua

SEQ ID NO: 2086291 - RNA, 19 nt, Artificial Sequence
  Description of Artificial Sequence: Synthetic oligonucleotide
  Antisense strand to SEQ ID NO: 2086290
uauuguggaacagugccgc

SEQ ID NO: 2086292 - RNA, 19 nt, Artificial Sequence
  Description of Artificial Sequence: Synthetic oligonucleotide
  Sense strand starting at position 1462 of SEQ ID NO: 1881985
gcccauguauaccuguuaa

SEQ ID NO: 2086293 - RNA, 19 nt, Artificial Sequence
  Description of Artificial Sequence: Synthetic oligonucleotide
  Antisense strand to SEQ ID NO: 2086292
uuaacagguauacaugggc

SEQ ID NO: 2086294 - RNA, 19 nt, Artificial Sequence
  Description of Artificial Sequence: Synthetic oligonucleotide
  Sense strand starting at position 1466 of SEQ ID NO: 1881985
auguauaccuguuaaccaa

SEQ ID NO: 2086295 - RNA, 19 nt, Artificial Sequence
  Description of Artificial Sequence: Synthetic oligonucleotide
  Antisense strand to SEQ ID NO: 2086294
uugguuaacagguauacau

SEQ ID NO: 2086296 - RNA, 19 nt, Artificial Sequence
  Description of Artificial Sequence: Synthetic oligonucleotide
  Sense strand starting at position 1642 of SEQ ID NO: 1881985
agagcuguccuguuugcuu

SEQ ID NO: 2086297 - RNA, 19 nt, Artificial Sequence
  Description of Artificial Sequence: Synthetic oligonucleotide
  Antisense strand to SEQ ID NO: 2086296
aagcaaacaggacagcucu

SEQ ID NO: 2086298 - RNA, 19 nt, Artificial Sequence
  Description of Artificial Sequence: Synthetic oligonucleotide
  Sense strand starting at position 1745 of SEQ ID NO: 1881985
ggcgccugcuccugucaga

SEQ ID NO: 2086299 - RNA, 19 nt, Artificial Sequence
  Description of Artificial Sequence: Synthetic oligonucleotide
  Antisense strand to SEQ ID NO: 2086298
ucugacaggagcaggcgcc

SEQ ID NO: 2086300 - RNA, 19 nt, Artificial Sequence
  Description of Artificial Sequence: Synthetic oligonucleotide
  Sense strand starting at position 1844 of SEQ ID NO: 1881985
gcagaaaggugcuucucaa

SEQ ID NO: 2086301 - RNA, 19 nt, Artificial Sequence
  Description of Artificial Sequence: Synthetic oligonucleotide
  Antisense strand to SEQ ID NO: 2086300
uugagaagcaccuuucugc

SEQ ID NO: 2086302 - RNA, 19 nt, Artificial Sequence
  Description of Artificial Sequence: Synthetic oligonucleotide
  Sense strand starting at position 2538 of SEQ ID NO: 1881985
ggaugcaagaucugguacu

SEQ ID NO: 2086303 - RNA, 19 nt, Artificial Sequence
  Description of Artificial Sequence: Synthetic oligonucleotide
  Antisense strand to SEQ ID NO: 2086302
aguaccagaucuugcaucc

SEQ ID NO: 2086304 - RNA, 19 nt, Artificial Sequence
  Description of Artificial Sequence: Synthetic oligonucleotide
  Sense strand starting at position 2580 of SEQ ID NO: 1881985
ccagaagacucugagaaca

SEQ ID NO: 2086305 - RNA, 19 nt, Artificial Sequence
  Description of Artificial Sequence: Synthetic oligonucleotide
  Antisense strand to SEQ ID NO: 2086304
uguucucagagucuucugg

SEQ ID NO: 2086306 - RNA, 19 nt, Artificial Sequence
  Description of Artificial Sequence: Synthetic oligonucleotide
  Sense strand starting at position 2582 of SEQ ID NO: 1881985
agaagacucugagaacaac

SEQ ID NO: 2086307 - RNA, 19 nt, Artificial Sequence
  Description of Artificial Sequence: Synthetic oligonucleotide
  Antisense strand to SEQ ID NO: 2086306
guuguucucagagucuucu

SEQ ID NO: 2086308 - RNA, 19 nt, Artificial Sequence
  Description of Artificial Sequence: Synthetic oligonucleotide
  Sense strand starting at position 2811 of SEQ ID NO: 1881985
gaagaaauguaaccaguug

SEQ ID NO: 2086309 - RNA, 19 nt, Artificial Sequence
  Description of Artificial Sequence: Synthetic oligonucleotide
  Antisense strand to SEQ ID NO: 2086308
caacugguuacauuucuuc

SEQ ID NO: 2086310 - RNA, 19 nt, Artificial Sequence
  Description of Artificial Sequence: Synthetic oligonucleotide
  Sense strand starting at position 2949 of SEQ ID NO: 1881985
agagcucuagcucguaagu

SEQ ID NO: 2086311 - RNA, 19 nt, Artificial Sequence
  Description of Artificial Sequence: Synthetic oligonucleotide
  Antisense strand to SEQ ID NO: 2086310
acuuacgagcuagagcucu

SEQ ID NO: 2086312 - RNA, 19 nt, Artificial Sequence
  Description of Artificial Sequence: Synthetic oligonucleotide
  Sense strand starting at position 2950 of SEQ ID NO: 1881985
gagcucuagcucguaaguu

SEQ ID NO: 2086313 - RNA, 19 nt, Artificial Sequence
  Description of Artificial Sequence: Synthetic oligonucleotide
  Antisense strand to SEQ ID NO: 2086312
aacuuacgagcuagagcuc

SEQ ID NO: 2086314 - RNA, 19 nt, Artificial Sequence
  Description of Artificial Sequence: Synthetic oligonucleotide
  Sense strand starting at position 2951 of SEQ ID NO: 1881985
agcucuagcucguaaguuu

SEQ ID NO: 2086315 - RNA, 19 nt, Artificial Sequence
  Description of Artificial Sequence: Synthetic oligonucleotide
  Antisense strand to SEQ ID NO: 2086314
aaacuuacgagcuagagcu

SEQ ID NO: 2086316 - RNA, 19 nt, Artificial Sequence
  Description of Artificial Sequence: Synthetic oligonucleotide
  Sense strand starting at position 2978 of SEQ ID NO: 1881985
uacuguucucugggagguu

SEQ ID NO: 2086317 - RNA, 19 nt, Artificial Sequence
  Description of Artificial Sequence: Synthetic oligonucleotide
  Antisense strand to SEQ ID NO: 2086316
aaccucccagagaacagua

SEQ ID NO: 2086318 - RNA, 19 nt, Artificial Sequence
  Description of Artificial Sequence: Synthetic oligonucleotide
  Sense strand starting at position 2979 of SEQ ID NO: 1881985
acuguucucugggagguuu

SEQ ID NO: 2086319 - RNA, 19 nt, Artificial Sequence
  Description of Artificial Sequence: Synthetic oligonucleotide
  Antisense strand to SEQ ID NO: 2086318
aaaccucccagagaacagu

SEQ ID NO: 2086320 - RNA, 19 nt, Artificial Sequence
  Description of Artificial Sequence: Synthetic oligonucleotide
  Sense strand starting at position 2987 of SEQ ID NO: 1881985
cugggagguuucccaagaa

SEQ ID NO: 2086321 - RNA, 19 nt, Artificial Sequence
  Description of Artificial Sequence: Synthetic oligonucleotide
  Antisense strand to SEQ ID NO: 2086320
uucuugggaaaccucccag

SEQ ID NO: 2086322 - RNA, 19 nt, Artificial Sequence
  Description of Artificial Sequence: Synthetic oligonucleotide
  Sense strand starting at position 3030 of SEQ ID NO: 1881985
uucuuuaaggcugggauga

SEQ ID NO: 2086323 - RNA, 19 nt, Artificial Sequence
  Description of Artificial Sequence: Synthetic oligonucleotide
  Antisense strand to SEQ ID NO: 2086322
ucaucccagccuuaaagaa

SEQ ID NO: 2086324 - RNA, 19 nt, Artificial Sequence
  Description of Artificial Sequence: Synthetic oligonucleotide
  Sense strand starting at position 3031 of SEQ ID NO: 1881985
ucuuuaaggcugggaugau

SEQ ID NO: 2086325 - RNA, 19 nt, Artificial Sequence
  Description of Artificial Sequence: Synthetic oligonucleotide
  Antisense strand to SEQ ID NO: 2086324
aucaucccagccuuaaaga

SEQ ID NO: 2086326 - RNA, 19 nt, Artificial Sequence
  Description of Artificial Sequence: Synthetic oligonucleotide
  Sense strand starting at position 3626 of SEQ ID NO: 1881985
uggagcuuauacccaaaga

SEQ ID NO: 2086327 - RNA, 19 nt, Artificial Sequence
  Description of Artificial Sequence: Synthetic oligonucleotide
  Antisense strand to SEQ ID NO: 2086326
ucuuuggguauaagcucca

SEQ ID NO: 2086328 - RNA, 19 nt, Artificial Sequence
  Description of Artificial Sequence: Synthetic oligonucleotide
  Sense strand starting at position 3680 of SEQ ID NO: 1881985
caaggcuuauauccagagu

SEQ ID NO: 2086329 - RNA, 19 nt, Artificial Sequence
  Description of Artificial Sequence: Synthetic oligonucleotide
  Antisense strand to SEQ ID NO: 2086328
acucuggauauaagccuug

SEQ ID NO: 2086330 - RNA, 19 nt, Artificial Sequence
  Description of Artificial Sequence: Synthetic oligonucleotide
  Sense strand starting at position 3683 of SEQ ID NO: 1881985
ggcuuauauccagaguuua

SEQ ID NO: 2086331 - RNA, 19 nt, Artificial Sequence
  Description of Artificial Sequence: Synthetic oligonucleotide
  Antisense strand to SEQ ID NO: 2086330
uaaacucuggauauaagcc

SEQ ID NO: 2086332 - RNA, 19 nt, Artificial Sequence
  Description of Artificial Sequence: Synthetic oligonucleotide
  Sense strand starting at position 3843 of SEQ ID NO: 1881985
gggcuuauacacuacuuau

SEQ ID NO: 2086333 - RNA, 19 nt, Artificial Sequence
  Description of Artificial Sequence: Synthetic oligonucleotide
  Antisense strand to SEQ ID NO: 2086332
auaaguaguguauaagccc

SEQ ID NO: 2086334 - RNA, 19 nt, Artificial Sequence
  Description of Artificial Sequence: Synthetic oligonucleotide
  Sense strand starting at position 57 of SEQ ID NO: 1881986
cuuggucaugucuaagaga

SEQ ID NO: 2086335 - RNA, 19 nt, Artificial Sequence
  Description of Artificial Sequence: Synthetic oligonucleotide
  Antisense strand to SEQ ID NO: 2086334
ucucuuagacaugaccaag

SEQ ID NO: 2086336 - RNA, 19 nt, Artificial Sequence
  Description of Artificial Sequence: Synthetic oligonucleotide
  Sense strand starting at position 86 of SEQ ID NO: 1881986
aucugucacaguugaggaa

SEQ ID NO: 2086337 - RNA, 19 nt, Artificial Sequence
  Description of Artificial Sequence: Synthetic oligonucleotide
  Antisense strand to SEQ ID NO: 2086336
uuccucaacugugacagau

SEQ ID NO: 2086338 - RNA, 19 nt, Artificial Sequence
  Description of Artificial Sequence: Synthetic oligonucleotide
  Sense strand starting at position 136 of SEQ ID NO: 1881986
ugucguucgauguccguaa

SEQ ID NO: 2086339 - RNA, 19 nt, Artificial Sequence
  Description of Artificial Sequence: Synthetic oligonucleotide
  Antisense strand to SEQ ID NO: 2086338
uuacggacaucgaacgaca

SEQ ID NO: 2086340 - RNA, 19 nt, Artificial Sequence
  Description of Artificial Sequence: Synthetic oligonucleotide
  Sense strand starting at position 241 of SEQ ID NO: 1881986
gcucacuuagcuggagaau

SEQ ID NO: 2086341 - RNA, 19 nt, Artificial Sequence
  Description of Artificial Sequence: Synthetic oligonucleotide
  Antisense strand to SEQ ID NO: 2086340
auucuccagcuaagugagc

SEQ ID NO: 2086342 - RNA, 19 nt, Artificial Sequence
  Description of Artificial Sequence: Synthetic oligonucleotide
  Sense strand starting at position 269 of SEQ ID NO: 1881986
ucuguaaaguugucuggag

SEQ ID NO: 2086343 - RNA, 19 nt, Artificial Sequence
  Description of Artificial Sequence: Synthetic oligonucleotide
  Antisense strand to SEQ ID NO: 2086342
cuccagacaacuuuacaga

SEQ ID NO: 2086344 - RNA, 19 nt, Artificial Sequence
  Description of Artificial Sequence: Synthetic oligonucleotide
  Sense strand starting at position 273 of SEQ ID NO: 1881986
uaaaguugucuggaguuua

SEQ ID NO: 2086345 - RNA, 19 nt, Artificial Sequence
  Description of Artificial Sequence: Synthetic oligonucleotide
  Antisense strand to SEQ ID NO: 2086344
uaaacuccagacaacuuua

SEQ ID NO: 2086346 - RNA, 19 nt, Artificial Sequence
  Description of Artificial Sequence: Synthetic oligonucleotide
  Sense strand starting at position 552 of SEQ ID NO: 1881986
guuagaaauuaaucuguac

SEQ ID NO: 2086347 - RNA, 19 nt, Artificial Sequence
  Description of Artificial Sequence: Synthetic oligonucleotide
  Antisense strand to SEQ ID NO: 2086346
guacagauuaauuucuaac

SEQ ID NO: 2086348 - RNA, 19 nt, Artificial Sequence
  Description of Artificial Sequence: Synthetic oligonucleotide
  Sense strand starting at position 594 of SEQ ID NO: 1881986
gaaauauuaggugguucga

SEQ ID NO: 2086349 - RNA, 19 nt, Artificial Sequence
  Description of Artificial Sequence: Synthetic oligonucleotide
  Antisense strand to SEQ ID NO: 2086348
ucgaaccaccuaauauuuc

SEQ ID NO: 2086350 - RNA, 19 nt, Artificial Sequence
  Description of Artificial Sequence: Synthetic oligonucleotide
  Sense strand starting at position 656 of SEQ ID NO: 1881986
uguugaaguguugauggaa

SEQ ID NO: 2086351 - RNA, 19 nt, Artificial Sequence
  Description of Artificial Sequence: Synthetic oligonucleotide
  Antisense strand to SEQ ID NO: 2086350
uuccaucaacacuucaaca

SEQ ID NO: 2086352 - RNA, 19 nt, Artificial Sequence
  Description of Artificial Sequence: Synthetic oligonucleotide
  Sense strand starting at position 695 of SEQ ID NO: 1881986
gcuuacaguguuugagaaa

SEQ ID NO: 2086353 - RNA, 19 nt, Artificial Sequence
  Description of Artificial Sequence: Synthetic oligonucleotide
  Antisense strand to SEQ ID NO: 2086352
uuucucaaacacuguaagc

SEQ ID NO: 2086354 - RNA, 19 nt, Artificial Sequence
  Description of Artificial Sequence: Synthetic oligonucleotide
  Sense strand starting at position 704 of SEQ ID NO: 1881986
guuugagaaacacgacaaa

SEQ ID NO: 2086355 - RNA, 19 nt, Artificial Sequence
  Description of Artificial Sequence: Synthetic oligonucleotide
  Antisense strand to SEQ ID NO: 2086354
uuugucguguuucucaaac

SEQ ID NO: 2086356 - RNA, 19 nt, Artificial Sequence
  Description of Artificial Sequence: Synthetic oligonucleotide
  Sense strand starting at position 883 of SEQ ID NO: 1881986
agguguuaccuccagaguu

SEQ ID NO: 2086357 - RNA, 19 nt, Artificial Sequence
  Description of Artificial Sequence: Synthetic oligonucleotide
  Antisense strand to SEQ ID NO: 2086356
aacucuggagguaacaccu

SEQ ID NO: 2086358 - RNA, 19 nt, Artificial Sequence
  Description of Artificial Sequence: Synthetic oligonucleotide
  Sense strand starting at position 885 of SEQ ID NO: 1881986
guguuaccuccagaguuuc

SEQ ID NO: 2086359 - RNA, 19 nt, Artificial Sequence
  Description of Artificial Sequence: Synthetic oligonucleotide
  Antisense strand to SEQ ID NO: 2086358
gaaacucuggagguaacac

SEQ ID NO: 2086360 - RNA, 19 nt, Artificial Sequence
  Description of Artificial Sequence: Synthetic oligonucleotide
  Sense strand starting at position 1139 of SEQ ID NO: 1881986
guagacgucuauuuaguuu

SEQ ID NO: 2086361 - RNA, 19 nt, Artificial Sequence
  Description of Artificial Sequence: Synthetic oligonucleotide
  Antisense strand to SEQ ID NO: 2086360
aaacuaaauagacgucuac

SEQ ID NO: 2086362 - RNA, 19 nt, Artificial Sequence
  Description of Artificial Sequence: Synthetic oligonucleotide
  Sense strand starting at position 1142 of SEQ ID NO: 1881986
gacgucuauuuaguuugau

SEQ ID NO: 2086363 - RNA, 19 nt, Artificial Sequence
  Description of Artificial Sequence: Synthetic oligonucleotide
  Antisense strand to SEQ ID NO: 2086362
aucaaacuaaauagacguc

SEQ ID NO: 2086364 - RNA, 19 nt, Artificial Sequence
  Description of Artificial Sequence: Synthetic oligonucleotide
  Sense strand starting at position 1143 of SEQ ID NO: 1881986
acgucuauuuaguuugauu

SEQ ID NO: 2086365 - RNA, 19 nt, Artificial Sequence
  Description of Artificial Sequence: Synthetic oligonucleotide
  Antisense strand to SEQ ID NO: 2086364
aaucaaacuaaauagacgu

SEQ ID NO: 2086366 - RNA, 19 nt, Artificial Sequence
  Description of Artificial Sequence: Synthetic oligonucleotide
  Sense strand starting at position 1433 of SEQ ID NO: 1881986
cgaggaguuuaaagggagu

SEQ ID NO: 2086367 - RNA, 19 nt, Artificial Sequence
  Description of Artificial Sequence: Synthetic oligonucleotide
  Antisense strand to SEQ ID NO: 2086366
acucccuuuaaacuccucg

SEQ ID NO: 2086368 - RNA, 19 nt, Artificial Sequence
  Description of Artificial Sequence: Synthetic oligonucleotide
  Sense strand starting at position 1467 of SEQ ID NO: 1881986
aagaucugcuggucuugaa

SEQ ID NO: 2086369 - RNA, 19 nt, Artificial Sequence
  Description of Artificial Sequence: Synthetic oligonucleotide
  Antisense strand to SEQ ID NO: 2086368
uucaagaccagcagaucuu

SEQ ID NO: 2086370 - RNA, 19 nt, Artificial Sequence
  Description of Artificial Sequence: Synthetic oligonucleotide
  Sense strand starting at position 1625 of SEQ ID NO: 1881986
cccucauucgcugacuaau

SEQ ID NO: 2086371 - RNA, 19 nt, Artificial Sequence
  Description of Artificial Sequence: Synthetic oligonucleotide
  Antisense strand to SEQ ID NO: 2086370
auuagucagcgaaugaggg

SEQ ID NO: 2086372 - RNA, 19 nt, Artificial Sequence
  Description of Artificial Sequence: Synthetic oligonucleotide
  Sense strand starting at position 1656 of SEQ ID NO: 1881986
uuccauuucguacgaauuc

SEQ ID NO: 2086373 - RNA, 19 nt, Artificial Sequence
  Description of Artificial Sequence: Synthetic oligonucleotide
  Antisense strand to SEQ ID NO: 2086372
gaauucguacgaaauggaa

SEQ ID NO: 2086374 - RNA, 19 nt, Artificial Sequence
  Description of Artificial Sequence: Synthetic oligonucleotide
  Sense strand starting at position 1674 of SEQ ID NO: 1881986
cgacuaauuucugccaucu

SEQ ID NO: 2086375 - RNA, 19 nt, Artificial Sequence
  Description of Artificial Sequence: Synthetic oligonucleotide
  Antisense strand to SEQ ID NO: 2086374
agauggcagaaauuagucg

SEQ ID NO: 2086376 - RNA, 19 nt, Artificial Sequence
  Description of Artificial Sequence: Synthetic oligonucleotide
  Sense strand starting at position 2690 of SEQ ID NO: 1881986
gagauuaagugacucacuu

SEQ ID NO: 2086377 - RNA, 19 nt, Artificial Sequence
  Description of Artificial Sequence: Synthetic oligonucleotide
  Antisense strand to SEQ ID NO: 2086376
aagugagucacuuaaucuc

SEQ ID NO: 2086378 - RNA, 19 nt, Artificial Sequence
  Description of Artificial Sequence: Synthetic oligonucleotide
  Sense strand starting at position 2777 of SEQ ID NO: 1881986
auauaaccacugugguaua

SEQ ID NO: 2086379 - RNA, 19 nt, Artificial Sequence
  Description of Artificial Sequence: Synthetic oligonucleotide
  Antisense strand to SEQ ID NO: 2086378
uauaccacagugguuauau

SEQ ID NO: 2086380 - RNA, 19 nt, Artificial Sequence
  Description of Artificial Sequence: Synthetic oligonucleotide
  Sense strand starting at position 2790 of SEQ ID NO: 1881986
gguauacagcuuuacagac

SEQ ID NO: 2086381 - RNA, 19 nt, Artificial Sequence
  Description of Artificial Sequence: Synthetic oligonucleotide
  Antisense strand to SEQ ID NO: 2086380
gucuguaaagcuguauacc

SEQ ID NO: 2086382 - RNA, 19 nt, Artificial Sequence
  Description of Artificial Sequence: Synthetic oligonucleotide
  Sense strand starting at position 3188 of SEQ ID NO: 1881986
gauguugcaugagcauaaa

SEQ ID NO: 2086383 - RNA, 19 nt, Artificial Sequence
  Description of Artificial Sequence: Synthetic oligonucleotide
  Antisense strand to SEQ ID NO: 2086382
uuuaugcucaugcaacauc

SEQ ID NO: 2086384 - RNA, 19 nt, Artificial Sequence
  Description of Artificial Sequence: Synthetic oligonucleotide
  Sense strand starting at position 3212 of SEQ ID NO: 1881986
ccgaauguagaauguugau

SEQ ID NO: 2086385 - RNA, 19 nt, Artificial Sequence
  Description of Artificial Sequence: Synthetic oligonucleotide
  Antisense strand to SEQ ID NO: 2086384
aucaacauucuacauucgg

SEQ ID NO: 2086386 - RNA, 19 nt, Artificial Sequence
  Description of Artificial Sequence: Synthetic oligonucleotide
  Sense strand starting at position 3235 of SEQ ID NO: 1881986
augggaguguauucaugaa

SEQ ID NO: 2086387 - RNA, 19 nt, Artificial Sequence
  Description of Artificial Sequence: Synthetic oligonucleotide
  Antisense strand to SEQ ID NO: 2086386
uucaugaauacacucccau

SEQ ID NO: 2086388 - RNA, 19 nt, Artificial Sequence
  Description of Artificial Sequence: Synthetic oligonucleotide
  Sense strand starting at position 3270 of SEQ ID NO: 1881986
uuaauaaguucccuaugag

SEQ ID NO: 2086389 - RNA, 19 nt, Artificial Sequence
  Description of Artificial Sequence: Synthetic oligonucleotide
  Antisense strand to SEQ ID NO: 2086388
cucauagggaacuuauuaa

SEQ ID NO: 2086390 - RNA, 19 nt, Artificial Sequence
  Description of Artificial Sequence: Synthetic oligonucleotide
  Sense strand starting at position 3273 of SEQ ID NO: 1881986
auaaguucccuaugagguu

SEQ ID NO: 2086391 - RNA, 19 nt, Artificial Sequence
  Description of Artificial Sequence: Synthetic oligonucleotide
  Antisense strand to SEQ ID NO: 2086390
aaccucauagggaacuuau

SEQ ID NO: 2086392 - RNA, 19 nt, Artificial Sequence
  Description of Artificial Sequence: Synthetic oligonucleotide
  Sense strand starting at position 3279 of SEQ ID NO: 1881986
ucccuaugagguugauacu

SEQ ID NO: 2086393 - RNA, 19 nt, Artificial Sequence
  Description of Artificial Sequence: Synthetic oligonucleotide
  Antisense strand to SEQ ID NO: 2086392
aguaucaaccucauaggga

SEQ ID NO: 2086394 - RNA, 19 nt, Artificial Sequence
  Description of Artificial Sequence: Synthetic oligonucleotide
  Sense strand starting at position 3466 of SEQ ID NO: 1881986
aggugaauucccugucuua

SEQ ID NO: 2086395 - RNA, 19 nt, Artificial Sequence
  Description of Artificial Sequence: Synthetic oligonucleotide
  Antisense strand to SEQ ID NO: 2086394
uaagacagggaauucaccu

SEQ ID NO: 2086396 - RNA, 19 nt, Artificial Sequence
  Description of Artificial Sequence: Synthetic oligonucleotide
  Sense strand starting at position 3477 of SEQ ID NO: 1881986
cugucuuacagaugggaaa

SEQ ID NO: 2086397 - RNA, 19 nt, Artificial Sequence
  Description of Artificial Sequence: Synthetic oligonucleotide
  Antisense strand to SEQ ID NO: 2086396
uuucccaucuguaagacag

SEQ ID NO: 2086398 - RNA, 19 nt, Artificial Sequence
  Description of Artificial Sequence: Synthetic oligonucleotide
  Sense strand starting at position 3696 of SEQ ID NO: 1881986
ucuuguacucugugaggau

SEQ ID NO: 2086399 - RNA, 19 nt, Artificial Sequence
  Description of Artificial Sequence: Synthetic oligonucleotide
  Antisense strand to SEQ ID NO: 2086398
auccucacagaguacaaga

SEQ ID NO: 2086400 - RNA, 19 nt, Artificial Sequence
  Description of Artificial Sequence: Synthetic oligonucleotide
  Sense strand starting at position 3705 of SEQ ID NO: 1881986
cugugaggauguccacaaa

SEQ ID NO: 2086401 - RNA, 19 nt, Artificial Sequence
  Description of Artificial Sequence: Synthetic oligonucleotide
  Antisense strand to SEQ ID NO: 2086400
uuuguggacauccucacag

SEQ ID NO: 2086402 - RNA, 19 nt, Artificial Sequence
  Description of Artificial Sequence: Synthetic oligonucleotide
  Sense strand starting at position 3809 of SEQ ID NO: 1881986
cccuguugacaagggaaua

SEQ ID NO: 2086403 - RNA, 19 nt, Artificial Sequence
  Description of Artificial Sequence: Synthetic oligonucleotide
  Antisense strand to SEQ ID NO: 2086402
uauucccuugucaacaggg

SEQ ID NO: 2086404 - RNA, 19 nt, Artificial Sequence
  Description of Artificial Sequence: Synthetic oligonucleotide
  Sense strand starting at position 3823 of SEQ ID NO: 1881986
gaauaaaggugcuuccauc

SEQ ID NO: 2086405 - RNA, 19 nt, Artificial Sequence
  Description of Artificial Sequence: Synthetic oligonucleotide
  Antisense strand to SEQ ID NO: 2086404
gauggaagcaccuuuauuc

SEQ ID NO: 2086406 - RNA, 19 nt, Artificial Sequence
  Description of Artificial Sequence: Synthetic oligonucleotide
  Sense strand starting at position 3871 of SEQ ID NO: 1881986
agagaugacaucugucaug

SEQ ID NO: 2086407 - RNA, 19 nt, Artificial Sequence
  Description of Artificial Sequence: Synthetic oligonucleotide
  Antisense strand to SEQ ID NO: 2086406
caugacagaugucaucucu

SEQ ID NO: 2086408 - RNA, 19 nt, Artificial Sequence
  Description of Artificial Sequence: Synthetic oligonucleotide
  Sense strand starting at position 3877 of SEQ ID NO: 1881986
gacaucugucauggaagcu

SEQ ID NO: 2086409 - RNA, 19 nt, Artificial Sequence
  Description of Artificial Sequence: Synthetic oligonucleotide
  Antisense strand to SEQ ID NO: 2086408
agcuuccaugacagauguc

SEQ ID NO: 2086410 - RNA, 19 nt, Artificial Sequence
  Description of Artificial Sequence: Synthetic oligonucleotide
  Sense strand starting at position 3912 of SEQ ID NO: 1881986
agaagaaagucugagauga

SEQ ID NO: 2086411 - RNA, 19 nt, Artificial Sequence
  Description of Artificial Sequence: Synthetic oligonucleotide
  Antisense strand to SEQ ID NO: 2086410
ucaucucagacuuucuucu

SEQ ID NO: 2086412 - RNA, 19 nt, Artificial Sequence
  Description of Artificial Sequence: Synthetic oligonucleotide
  Sense strand starting at position 3914 of SEQ ID NO: 1881986
aagaaagucugagaugaaa

SEQ ID NO: 2086413 - RNA, 19 nt, Artificial Sequence
  Description of Artificial Sequence: Synthetic oligonucleotide
  Antisense strand to SEQ ID NO: 2086412
uuucaucucagacuuucuu

SEQ ID NO: 2086414 - RNA, 19 nt, Artificial Sequence
  Description of Artificial Sequence: Synthetic oligonucleotide
  Sense strand starting at position 138 of SEQ ID NO: 1881987
ccaugcuacuguguggaua

SEQ ID NO: 2086415 - RNA, 19 nt, Artificial Sequence
  Description of Artificial Sequence: Synthetic oligonucleotide
  Antisense strand to SEQ ID NO: 2086414
uauccacacaguagcaugg

SEQ ID NO: 2086416 - RNA, 19 nt, Artificial Sequence
  Description of Artificial Sequence: Synthetic oligonucleotide
  Sense strand starting at position 139 of SEQ ID NO: 1881987
caugcuacuguguggauaa

SEQ ID NO: 2086417 - RNA, 19 nt, Artificial Sequence
  Description of Artificial Sequence: Synthetic oligonucleotide
  Antisense strand to SEQ ID NO: 2086416
uuauccacacaguagcaug

SEQ ID NO: 2086418 - RNA, 19 nt, Artificial Sequence
  Description of Artificial Sequence: Synthetic oligonucleotide
  Sense strand starting at position 140 of SEQ ID NO: 1881987
augcuacuguguggauaaa

SEQ ID NO: 2086419 - RNA, 19 nt, Artificial Sequence
  Description of Artificial Sequence: Synthetic oligonucleotide
  Antisense strand to SEQ ID NO: 2086418
uuuauccacacaguagcau

SEQ ID NO: 2086420 - RNA, 19 nt, Artificial Sequence
  Description of Artificial Sequence: Synthetic oligonucleotide
  Sense strand starting at position 141 of SEQ ID NO: 1881987
ugcuacuguguggauaaau

SEQ ID NO: 2086421 - RNA, 19 nt, Artificial Sequence
  Description of Artificial Sequence: Synthetic oligonucleotide
  Antisense strand to SEQ ID NO: 2086420
auuuauccacacaguagca

SEQ ID NO: 2086422 - RNA, 19 nt, Artificial Sequence
  Description of Artificial Sequence: Synthetic oligonucleotide
  Sense strand starting at position 349 of SEQ ID NO: 1881987
gagaaagacuacuagguca

SEQ ID NO: 2086423 - RNA, 19 nt, Artificial Sequence
  Description of Artificial Sequence: Synthetic oligonucleotide
  Antisense strand to SEQ ID NO: 2086422
ugaccuaguagucuuucuc

SEQ ID NO: 2086424 - RNA, 19 nt, Artificial Sequence
  Description of Artificial Sequence: Synthetic oligonucleotide
  Sense strand starting at position 370 of SEQ ID NO: 1881987
ugguaagucuauguugaac

SEQ ID NO: 2086425 - RNA, 19 nt, Artificial Sequence
  Description of Artificial Sequence: Synthetic oligonucleotide
  Antisense strand to SEQ ID NO: 2086424
guucaacauagacuuacca

SEQ ID NO: 2086426 - RNA, 19 nt, Artificial Sequence
  Description of Artificial Sequence: Synthetic oligonucleotide
  Sense strand starting at position 372 of SEQ ID NO: 1881987
guaagucuauguugaacau

SEQ ID NO: 2086427 - RNA, 19 nt, Artificial Sequence
  Description of Artificial Sequence: Synthetic oligonucleotide
  Antisense strand to SEQ ID NO: 2086426
auguucaacauagacuuac

SEQ ID NO: 2086428 - RNA, 19 nt, Artificial Sequence
  Description of Artificial Sequence: Synthetic oligonucleotide
  Sense strand starting at position 376 of SEQ ID NO: 1881987
gucuauguugaacauuaaa

SEQ ID NO: 2086429 - RNA, 19 nt, Artificial Sequence
  Description of Artificial Sequence: Synthetic oligonucleotide
  Antisense strand to SEQ ID NO: 2086428
uuuaauguucaacauagac

SEQ ID NO: 2086430 - RNA, 19 nt, Artificial Sequence
  Description of Artificial Sequence: Synthetic oligonucleotide
  Sense strand starting at position 397 of SEQ ID NO: 1881987
cugggaaacugucuuccaa

SEQ ID NO: 2086431 - RNA, 19 nt, Artificial Sequence
  Description of Artificial Sequence: Synthetic oligonucleotide
  Antisense strand to SEQ ID NO: 2086430
uuggaagacaguuucccag

SEQ ID NO: 2086432 - RNA, 19 nt, Artificial Sequence
  Description of Artificial Sequence: Synthetic oligonucleotide
  Sense strand starting at position 399 of SEQ ID NO: 1881987
gggaaacugucuuccaaca

SEQ ID NO: 2086433 - RNA, 19 nt, Artificial Sequence
  Description of Artificial Sequence: Synthetic oligonucleotide
  Antisense strand to SEQ ID NO: 2086432
uguuggaagacaguuuccc

SEQ ID NO: 2086434 - RNA, 19 nt, Artificial Sequence
  Description of Artificial Sequence: Synthetic oligonucleotide
  Sense strand starting at position 412 of SEQ ID NO: 1881987
ccaacauggcuguaucauu

SEQ ID NO: 2086435 - RNA, 19 nt, Artificial Sequence
  Description of Artificial Sequence: Synthetic oligonucleotide
  Antisense strand to SEQ ID NO: 2086434
aaugauacagccauguugg

SEQ ID NO: 2086436 - RNA, 19 nt, Artificial Sequence
  Description of Artificial Sequence: Synthetic oligonucleotide
  Sense strand starting at position 438 of SEQ ID NO: 1881987
ucccauuagcaaugaaaga

SEQ ID NO: 2086437 - RNA, 19 nt, Artificial Sequence
  Description of Artificial Sequence: Synthetic oligonucleotide
  Antisense strand to SEQ ID NO: 2086436
ucuuucauugcuaauggga

SEQ ID NO: 2086438 - RNA, 19 nt, Artificial Sequence
  Description of Artificial Sequence: Synthetic oligonucleotide
  Sense strand starting at position 480 of SEQ ID NO: 1881987
gacagcauuuguuauuguu

SEQ ID NO: 2086439 - RNA, 19 nt, Artificial Sequence
  Description of Artificial Sequence: Synthetic oligonucleotide
  Antisense strand to SEQ ID NO: 2086438
aacaauaacaaaugcuguc

SEQ ID NO: 2086440 - RNA, 19 nt, Artificial Sequence
  Description of Artificial Sequence: Synthetic oligonucleotide
  Sense strand starting at position 513 of SEQ ID NO: 1881987
cuuaaauauucugaugugu

SEQ ID NO: 2086441 - RNA, 19 nt, Artificial Sequence
  Description of Artificial Sequence: Synthetic oligonucleotide
  Antisense strand to SEQ ID NO: 2086440
acacaucagaauauuuaag

SEQ ID NO: 2086442 - RNA, 19 nt, Artificial Sequence
  Description of Artificial Sequence: Synthetic oligonucleotide
  Sense strand starting at position 518 of SEQ ID NO: 1881987
auauucugauguguaugua

SEQ ID NO: 2086443 - RNA, 19 nt, Artificial Sequence
  Description of Artificial Sequence: Synthetic oligonucleotide
  Antisense strand to SEQ ID NO: 2086442
uacauacacaucagaauau

SEQ ID NO: 2086444 - RNA, 19 nt, Artificial Sequence
  Description of Artificial Sequence: Synthetic oligonucleotide
  Sense strand starting at position 650 of SEQ ID NO: 1881987
caaguuaguguacagguaa

SEQ ID NO: 2086445 - RNA, 19 nt, Artificial Sequence
  Description of Artificial Sequence: Synthetic oligonucleotide
  Antisense strand to SEQ ID NO: 2086444
uuaccuguacacuaacuug

SEQ ID NO: 2086446 - RNA, 19 nt, Artificial Sequence
  Description of Artificial Sequence: Synthetic oligonucleotide
  Sense strand starting at position 894 of SEQ ID NO: 1881987
agagaagugagguggcuuu

SEQ ID NO: 2086447 - RNA, 19 nt, Artificial Sequence
  Description of Artificial Sequence: Synthetic oligonucleotide
  Antisense strand to SEQ ID NO: 2086446
aaagccaccucacuucucu

SEQ ID NO: 2086448 - RNA, 19 nt, Artificial Sequence
  Description of Artificial Sequence: Synthetic oligonucleotide
  Sense strand starting at position 947 of SEQ ID NO: 1881987
ccaugauauuuggaaugac

SEQ ID NO: 2086449 - RNA, 19 nt, Artificial Sequence
  Description of Artificial Sequence: Synthetic oligonucleotide
  Antisense strand to SEQ ID NO: 2086448
gucauuccaaauaucaugg

SEQ ID NO: 2086450 - RNA, 19 nt, Artificial Sequence
  Description of Artificial Sequence: Synthetic oligonucleotide
  Sense strand starting at position 1167 of SEQ ID NO: 1881987
gaaagaguguaaugcaacu

SEQ ID NO: 2086451 - RNA, 19 nt, Artificial Sequence
  Description of Artificial Sequence: Synthetic oligonucleotide
  Antisense strand to SEQ ID NO: 2086450
aguugcauuacacucuuuc

SEQ ID NO: 2086452 - RNA, 19 nt, Artificial Sequence
  Description of Artificial Sequence: Synthetic oligonucleotide
  Sense strand starting at position 1372 of SEQ ID NO: 1881987
gcgguaaucuccuucugca

SEQ ID NO: 2086453 - RNA, 19 nt, Artificial Sequence
  Description of Artificial Sequence: Synthetic oligonucleotide
  Antisense strand to SEQ ID NO: 2086452
ugcagaaggagauuaccgc

SEQ ID NO: 2086454 - RNA, 19 nt, Artificial Sequence
  Description of Artificial Sequence: Synthetic oligonucleotide
  Sense strand starting at position 1397 of SEQ ID NO: 1881987
uggugaugcuaggguacau

SEQ ID NO: 2086455 - RNA, 19 nt, Artificial Sequence
  Description of Artificial Sequence: Synthetic oligonucleotide
  Antisense strand to SEQ ID NO: 2086454
auguacccuagcaucacca

SEQ ID NO: 2086456 - RNA, 19 nt, Artificial Sequence
  Description of Artificial Sequence: Synthetic oligonucleotide
  Sense strand starting at position 1444 of SEQ ID NO: 1881987
gcauacaggucuuuguaga

SEQ ID NO: 2086457 - RNA, 19 nt, Artificial Sequence
  Description of Artificial Sequence: Synthetic oligonucleotide
  Antisense strand to SEQ ID NO: 2086456
ucuacaaagaccuguaugc

SEQ ID NO: 2086458 - RNA, 19 nt, Artificial Sequence
  Description of Artificial Sequence: Synthetic oligonucleotide
  Sense strand starting at position 1445 of SEQ ID NO: 1881987
cauacaggucuuuguagau

SEQ ID NO: 2086459 - RNA, 19 nt, Artificial Sequence
  Description of Artificial Sequence: Synthetic oligonucleotide
  Antisense strand to SEQ ID NO: 2086458
aucuacaaagaccuguaug

SEQ ID NO: 2086460 - RNA, 19 nt, Artificial Sequence
  Description of Artificial Sequence: Synthetic oligonucleotide
  Sense strand starting at position 1457 of SEQ ID NO: 1881987
uguagauguccacauccga

SEQ ID NO: 2086461 - RNA, 19 nt, Artificial Sequence
  Description of Artificial Sequence: Synthetic oligonucleotide
  Antisense strand to SEQ ID NO: 2086460
ucggauguggacaucuaca

SEQ ID NO: 2086462 - RNA, 19 nt, Artificial Sequence
  Description of Artificial Sequence: Synthetic oligonucleotide
  Sense strand starting at position 1472 of SEQ ID NO: 1881987
ccgacuucaugauggaguu

SEQ ID NO: 2086463 - RNA, 19 nt, Artificial Sequence
  Description of Artificial Sequence: Synthetic oligonucleotide
  Antisense strand to SEQ ID NO: 2086462
aacuccaucaugaagucgg

SEQ ID NO: 2086464 - RNA, 19 nt, Artificial Sequence
  Description of Artificial Sequence: Synthetic oligonucleotide
  Sense strand starting at position 1530 of SEQ ID NO: 1881987
gaaggaaguuuggaagagu

SEQ ID NO: 2086465 - RNA, 19 nt, Artificial Sequence
  Description of Artificial Sequence: Synthetic oligonucleotide
  Antisense strand to SEQ ID NO: 2086464
acucuuccaaacuuccuuc

SEQ ID NO: 2086466 - RNA, 19 nt, Artificial Sequence
  Description of Artificial Sequence: Synthetic oligonucleotide
  Sense strand starting at position 1568 of SEQ ID NO: 1881987
acuuguugcuaauggugau

SEQ ID NO: 2086467 - RNA, 19 nt, Artificial Sequence
  Description of Artificial Sequence: Synthetic oligonucleotide
  Antisense strand to SEQ ID NO: 2086466
aucaccauuagcaacaagu

SEQ ID NO: 2086468 - RNA, 19 nt, Artificial Sequence
  Description of Artificial Sequence: Synthetic oligonucleotide
  Sense strand starting at position 1580 of SEQ ID NO: 1881987
uggugaugaccuggccauu

SEQ ID NO: 2086469 - RNA, 19 nt, Artificial Sequence
  Description of Artificial Sequence: Synthetic oligonucleotide
  Antisense strand to SEQ ID NO: 2086468
aauggccaggucaucacca

SEQ ID NO: 2086470 - RNA, 19 nt, Artificial Sequence
  Description of Artificial Sequence: Synthetic oligonucleotide
  Sense strand starting at position 1712 of SEQ ID NO: 1881987
gcaugacugugguggugaa

SEQ ID NO: 2086471 - RNA, 19 nt, Artificial Sequence
  Description of Artificial Sequence: Synthetic oligonucleotide
  Antisense strand to SEQ ID NO: 2086470
uucaccaccacagucaugc

SEQ ID NO: 2086472 - RNA, 19 nt, Artificial Sequence
  Description of Artificial Sequence: Synthetic oligonucleotide
  Sense strand starting at position 1915 of SEQ ID NO: 1881987
ccuggauggccacguauau

SEQ ID NO: 2086473 - RNA, 19 nt, Artificial Sequence
  Description of Artificial Sequence: Synthetic oligonucleotide
  Antisense strand to SEQ ID NO: 2086472
auauacguggccauccagg

SEQ ID NO: 2086474 - RNA, 19 nt, Artificial Sequence
  Description of Artificial Sequence: Synthetic oligonucleotide
  Sense strand starting at position 1941 of SEQ ID NO: 1881987
gugugaaggucucaaacau

SEQ ID NO: 2086475 - RNA, 19 nt, Artificial Sequence
  Description of Artificial Sequence: Synthetic oligonucleotide
  Antisense strand to SEQ ID NO: 2086474
auguuugagaccuucacac

SEQ ID NO: 2086476 - RNA, 19 nt, Artificial Sequence
  Description of Artificial Sequence: Synthetic oligonucleotide
  Sense strand starting at position 1964 of SEQ ID NO: 1881987
uaagucaucuucucgcagu

SEQ ID NO: 2086477 - RNA, 19 nt, Artificial Sequence
  Description of Artificial Sequence: Synthetic oligonucleotide
  Antisense strand to SEQ ID NO: 2086476
acugcgagaagaugacuua

SEQ ID NO: 2086478 - RNA, 19 nt, Artificial Sequence
  Description of Artificial Sequence: Synthetic oligonucleotide
  Sense strand starting at position 1965 of SEQ ID NO: 1881987
aagucaucuucucgcaguu

SEQ ID NO: 2086479 - RNA, 19 nt, Artificial Sequence
  Description of Artificial Sequence: Synthetic oligonucleotide
  Antisense strand to SEQ ID NO: 2086478
aacugcgagaagaugacuu

SEQ ID NO: 2086480 - RNA, 19 nt, Artificial Sequence
  Description of Artificial Sequence: Synthetic oligonucleotide
  Sense strand starting at position 3454 of SEQ ID NO: 1881987
ugcuguguuuguguggaaa

SEQ ID NO: 2086481 - RNA, 19 nt, Artificial Sequence
  Description of Artificial Sequence: Synthetic oligonucleotide
  Antisense strand to SEQ ID NO: 2086480
uuuccacacaaacacagca

SEQ ID NO: 2086482 - RNA, 19 nt, Artificial Sequence
  Description of Artificial Sequence: Synthetic oligonucleotide
  Sense strand starting at position 3456 of SEQ ID NO: 1881987
cuguguuuguguggaaaga

SEQ ID NO: 2086483 - RNA, 19 nt, Artificial Sequence
  Description of Artificial Sequence: Synthetic oligonucleotide
  Antisense strand to SEQ ID NO: 2086482
ucuuuccacacaaacacag

SEQ ID NO: 2086484 - RNA, 19 nt, Artificial Sequence
  Description of Artificial Sequence: Synthetic oligonucleotide
  Sense strand starting at position 650 of SEQ ID NO: 1881988
ugguaagugccuuacaaga

SEQ ID NO: 2086485 - RNA, 19 nt, Artificial Sequence
  Description of Artificial Sequence: Synthetic oligonucleotide
  Antisense strand to SEQ ID NO: 2086484
ucuuguaaggcacuuacca

SEQ ID NO: 2086486 - RNA, 19 nt, Artificial Sequence
  Description of Artificial Sequence: Synthetic oligonucleotide
  Sense strand starting at position 1036 of SEQ ID NO: 1881988
uaccgcugccuagaguauu

SEQ ID NO: 2086487 - RNA, 19 nt, Artificial Sequence
  Description of Artificial Sequence: Synthetic oligonucleotide
  Antisense strand to SEQ ID NO: 2086486
aauacucuaggcagcggua

SEQ ID NO: 2086488 - RNA, 19 nt, Artificial Sequence
  Description of Artificial Sequence: Synthetic oligonucleotide
  Sense strand starting at position 1042 of SEQ ID NO: 1881988
ugccuagaguauuugguau

SEQ ID NO: 2086489 - RNA, 19 nt, Artificial Sequence
  Description of Artificial Sequence: Synthetic oligonucleotide
  Antisense strand to SEQ ID NO: 2086488
auaccaaauacucuaggca

SEQ ID NO: 2086490 - RNA, 19 nt, Artificial Sequence
  Description of Artificial Sequence: Synthetic oligonucleotide
  Sense strand starting at position 1148 of SEQ ID NO: 1881988
uguuaaguacacugugaug

SEQ ID NO: 2086491 - RNA, 19 nt, Artificial Sequence
  Description of Artificial Sequence: Synthetic oligonucleotide
  Antisense strand to SEQ ID NO: 2086490
caucacaguguacuuaaca

SEQ ID NO: 2086492 - RNA, 19 nt, Artificial Sequence
  Description of Artificial Sequence: Synthetic oligonucleotide
  Sense strand starting at position 1150 of SEQ ID NO: 1881988
uuaaguacacugugauguu

SEQ ID NO: 2086493 - RNA, 19 nt, Artificial Sequence
  Description of Artificial Sequence: Synthetic oligonucleotide
  Antisense strand to SEQ ID NO: 2086492
aacaucacaguguacuuaa

SEQ ID NO: 2086494 - RNA, 19 nt, Artificial Sequence
  Description of Artificial Sequence: Synthetic oligonucleotide
  Sense strand starting at position 1206 of SEQ ID NO: 1881988
guauucccaucguuaaaca

SEQ ID NO: 2086495 - RNA, 19 nt, Artificial Sequence
  Description of Artificial Sequence: Synthetic oligonucleotide
  Antisense strand to SEQ ID NO: 2086494
uguuuaacgaugggaauac

SEQ ID NO: 2086496 - RNA, 19 nt, Artificial Sequence
  Description of Artificial Sequence: Synthetic oligonucleotide
  Sense strand starting at position 1214 of SEQ ID NO: 1881988
aucguuaaacaaugcauga

SEQ ID NO: 2086497 - RNA, 19 nt, Artificial Sequence
  Description of Artificial Sequence: Synthetic oligonucleotide
  Antisense strand to SEQ ID NO: 2086496
ucaugcauuguuuaacgau

SEQ ID NO: 2086498 - RNA, 19 nt, Artificial Sequence
  Description of Artificial Sequence: Synthetic oligonucleotide
  Sense strand starting at position 1309 of SEQ ID NO: 1881988
gucuucucucacuagucau

SEQ ID NO: 2086499 - RNA, 19 nt, Artificial Sequence
  Description of Artificial Sequence: Synthetic oligonucleotide
  Antisense strand to SEQ ID NO: 2086498
augacuagugagagaagac

SEQ ID NO: 2086500 - RNA, 19 nt, Artificial Sequence
  Description of Artificial Sequence: Synthetic oligonucleotide
  Sense strand starting at position 1319 of SEQ ID NO: 1881988
acuagucauuagguggaau

SEQ ID NO: 2086501 - RNA, 19 nt, Artificial Sequence
  Description of Artificial Sequence: Synthetic oligonucleotide
  Antisense strand to SEQ ID NO: 2086500
auuccaccuaaugacuagu

SEQ ID NO: 2086502 - RNA, 19 nt, Artificial Sequence
  Description of Artificial Sequence: Synthetic oligonucleotide
  Sense strand starting at position 1320 of SEQ ID NO: 1881988
cuagucauuagguggaauu

SEQ ID NO: 2086503 - RNA, 19 nt, Artificial Sequence
  Description of Artificial Sequence: Synthetic oligonucleotide
  Antisense strand to SEQ ID NO: 2086502
aauuccaccuaaugacuag

SEQ ID NO: 2086504 - RNA, 19 nt, Artificial Sequence
  Description of Artificial Sequence: Synthetic oligonucleotide
  Sense strand starting at position 1321 of SEQ ID NO: 1881988
uagucauuagguggaauua

SEQ ID NO: 2086505 - RNA, 19 nt, Artificial Sequence
  Description of Artificial Sequence: Synthetic oligonucleotide
  Antisense strand to SEQ ID NO: 2086504
uaauuccaccuaaugacua

SEQ ID NO: 2086506 - RNA, 19 nt, Artificial Sequence
  Description of Artificial Sequence: Synthetic oligonucleotide
  Sense strand starting at position 1344 of SEQ ID NO: 1881988
ugagcuuuaggguaagugu

SEQ ID NO: 2086507 - RNA, 19 nt, Artificial Sequence
  Description of Artificial Sequence: Synthetic oligonucleotide
  Antisense strand to SEQ ID NO: 2086506
acacuuacccuaaagcuca

SEQ ID NO: 2086508 - RNA, 19 nt, Artificial Sequence
  Description of Artificial Sequence: Synthetic oligonucleotide
  Sense strand starting at position 1353 of SEQ ID NO: 1881988
ggguaaguguuuccaccac

SEQ ID NO: 2086509 - RNA, 19 nt, Artificial Sequence
  Description of Artificial Sequence: Synthetic oligonucleotide
  Antisense strand to SEQ ID NO: 2086508
gugguggaaacacuuaccc

SEQ ID NO: 2086510 - RNA, 19 nt, Artificial Sequence
  Description of Artificial Sequence: Synthetic oligonucleotide
  Sense strand starting at position 1359 of SEQ ID NO: 1881988
guguuuccaccacagagau

SEQ ID NO: 2086511 - RNA, 19 nt, Artificial Sequence
  Description of Artificial Sequence: Synthetic oligonucleotide
  Antisense strand to SEQ ID NO: 2086510
aucucugugguggaaacac

SEQ ID NO: 2086512 - RNA, 19 nt, Artificial Sequence
  Description of Artificial Sequence: Synthetic oligonucleotide
  Sense strand starting at position 1500 of SEQ ID NO: 1881988
agucuucuaguuuaacaga

SEQ ID NO: 2086513 - RNA, 19 nt, Artificial Sequence
  Description of Artificial Sequence: Synthetic oligonucleotide
  Antisense strand to SEQ ID NO: 2086512
ucuguuaaacuagaagacu

SEQ ID NO: 2086514 - RNA, 19 nt, Artificial Sequence
  Description of Artificial Sequence: Synthetic oligonucleotide
  Sense strand starting at position 1526 of SEQ ID NO: 1881988
gugggcaggguugauuaau

SEQ ID NO: 2086515 - RNA, 19 nt, Artificial Sequence
  Description of Artificial Sequence: Synthetic oligonucleotide
  Antisense strand to SEQ ID NO: 2086514
auuaaucaacccugcccac

SEQ ID NO: 2086516 - RNA, 19 nt, Artificial Sequence
  Description of Artificial Sequence: Synthetic oligonucleotide
  Sense strand starting at position 1534 of SEQ ID NO: 1881988
gguugauuaaugugaaaug

SEQ ID NO: 2086517 - RNA, 19 nt, Artificial Sequence
  Description of Artificial Sequence: Synthetic oligonucleotide
  Antisense strand to SEQ ID NO: 2086516
cauuucacauuaaucaacc

SEQ ID NO: 2086518 - RNA, 19 nt, Artificial Sequence
  Description of Artificial Sequence: Synthetic oligonucleotide
  Sense strand starting at position 1544 of SEQ ID NO: 1881988
ugugaaauguccucccuuc

SEQ ID NO: 2086519 - RNA, 19 nt, Artificial Sequence
  Description of Artificial Sequence: Synthetic oligonucleotide
  Antisense strand to SEQ ID NO: 2086518
gaagggaggacauuucaca

SEQ ID NO: 2086520 - RNA, 19 nt, Artificial Sequence
  Description of Artificial Sequence: Synthetic oligonucleotide
  Sense strand starting at position 1555 of SEQ ID NO: 1881988
cucccuucuguuuaugaga

SEQ ID NO: 2086521 - RNA, 19 nt, Artificial Sequence
  Description of Artificial Sequence: Synthetic oligonucleotide
  Antisense strand to SEQ ID NO: 2086520
ucucauaaacagaagggag

SEQ ID NO: 2086522 - RNA, 19 nt, Artificial Sequence
  Description of Artificial Sequence: Synthetic oligonucleotide
  Sense strand starting at position 1817 of SEQ ID NO: 1881988
caaagcaaagauuguugua

SEQ ID NO: 2086523 - RNA, 19 nt, Artificial Sequence
  Description of Artificial Sequence: Synthetic oligonucleotide
  Antisense strand to SEQ ID NO: 2086522
uacaacaaucuuugcuuug

SEQ ID NO: 2086524 - RNA, 19 nt, Artificial Sequence
  Description of Artificial Sequence: Synthetic oligonucleotide
  Sense strand starting at position 1819 of SEQ ID NO: 1881988
aagcaaagauuguuguaau

SEQ ID NO: 2086525 - RNA, 19 nt, Artificial Sequence
  Description of Artificial Sequence: Synthetic oligonucleotide
  Antisense strand to SEQ ID NO: 2086524
auuacaacaaucuuugcuu

SEQ ID NO: 2086526 - RNA, 19 nt, Artificial Sequence
  Description of Artificial Sequence: Synthetic oligonucleotide
  Sense strand starting at position 1949 of SEQ ID NO: 1881988
cuaucaaacuaagagagau

SEQ ID NO: 2086527 - RNA, 19 nt, Artificial Sequence
  Description of Artificial Sequence: Synthetic oligonucleotide
  Antisense strand to SEQ ID NO: 2086526
aucucucuuaguuugauag

SEQ ID NO: 2086528 - RNA, 19 nt, Artificial Sequence
  Description of Artificial Sequence: Synthetic oligonucleotide
  Sense strand starting at position 1969 of SEQ ID NO: 1881988
cuacuuacggcguggauuu

SEQ ID NO: 2086529 - RNA, 19 nt, Artificial Sequence
  Description of Artificial Sequence: Synthetic oligonucleotide
  Antisense strand to SEQ ID NO: 2086528
aaauccacgccguaaguag

SEQ ID NO: 2086530 - RNA, 19 nt, Artificial Sequence
  Description of Artificial Sequence: Synthetic oligonucleotide
  Sense strand starting at position 1980 of SEQ ID NO: 1881988
guggauuuauaggaagacu

SEQ ID NO: 2086531 - RNA, 19 nt, Artificial Sequence
  Description of Artificial Sequence: Synthetic oligonucleotide
  Antisense strand to SEQ ID NO: 2086530
agucuuccuauaaauccac

SEQ ID NO: 2086532 - RNA, 19 nt, Artificial Sequence
  Description of Artificial Sequence: Synthetic oligonucleotide
  Sense strand starting at position 1989 of SEQ ID NO: 1881988
uaggaagacucuggauaaa

SEQ ID NO: 2086533 - RNA, 19 nt, Artificial Sequence
  Description of Artificial Sequence: Synthetic oligonucleotide
  Antisense strand to SEQ ID NO: 2086532
uuuauccagagucuuccua

SEQ ID NO: 2086534 - RNA, 19 nt, Artificial Sequence
  Description of Artificial Sequence: Synthetic oligonucleotide
  Sense strand starting at position 2020 of SEQ ID NO: 1881988
ucacuuugccauuggaaga

SEQ ID NO: 2086535 - RNA, 19 nt, Artificial Sequence
  Description of Artificial Sequence: Synthetic oligonucleotide
  Antisense strand to SEQ ID NO: 2086534
ucuuccaauggcaaaguga

SEQ ID NO: 2086536 - RNA, 19 nt, Artificial Sequence
  Description of Artificial Sequence: Synthetic oligonucleotide
  Sense strand starting at position 2035 of SEQ ID NO: 1881988
aagaguaugccaugggacu

SEQ ID NO: 2086537 - RNA, 19 nt, Artificial Sequence
  Description of Artificial Sequence: Synthetic oligonucleotide
  Antisense strand to SEQ ID NO: 2086536
agucccauggcauacucuu

SEQ ID NO: 2086538 - RNA, 19 nt, Artificial Sequence
  Description of Artificial Sequence: Synthetic oligonucleotide
  Sense strand starting at position 2260 of SEQ ID NO: 1881988
aucauuacagguuaauagu

SEQ ID NO: 2086539 - RNA, 19 nt, Artificial Sequence
  Description of Artificial Sequence: Synthetic oligonucleotide
  Antisense strand to SEQ ID NO: 2086538
acuauuaaccuguaaugau

SEQ ID NO: 2086540 - RNA, 19 nt, Artificial Sequence
  Description of Artificial Sequence: Synthetic oligonucleotide
  Sense strand starting at position 2266 of SEQ ID NO: 1881988
acagguuaauaguuaaauc

SEQ ID NO: 2086541 - RNA, 19 nt, Artificial Sequence
  Description of Artificial Sequence: Synthetic oligonucleotide
  Antisense strand to SEQ ID NO: 2086540
gauuuaacuauuaaccugu

SEQ ID NO: 2086542 - RNA, 19 nt, Artificial Sequence
  Description of Artificial Sequence: Synthetic oligonucleotide
  Sense strand starting at position 2370 of SEQ ID NO: 1881988
auccuaaugugauuagguu

SEQ ID NO: 2086543 - RNA, 19 nt, Artificial Sequence
  Description of Artificial Sequence: Synthetic oligonucleotide
  Antisense strand to SEQ ID NO: 2086542
aaccuaaucacauuaggau

SEQ ID NO: 2086544 - RNA, 19 nt, Artificial Sequence
  Description of Artificial Sequence: Synthetic oligonucleotide
  Sense strand starting at position 2371 of SEQ ID NO: 1881988
uccuaaugugauuagguuu

SEQ ID NO: 2086545 - RNA, 19 nt, Artificial Sequence
  Description of Artificial Sequence: Synthetic oligonucleotide
  Antisense strand to SEQ ID NO: 2086544
aaaccuaaucacauuagga

SEQ ID NO: 2086546 - RNA, 19 nt, Artificial Sequence
  Description of Artificial Sequence: Synthetic oligonucleotide
  Sense strand starting at position 2424 of SEQ ID NO: 1881988
uaggaagacuggucucauu

SEQ ID NO: 2086547 - RNA, 19 nt, Artificial Sequence
  Description of Artificial Sequence: Synthetic oligonucleotide
  Antisense strand to SEQ ID NO: 2086546
aaugagaccagucuuccua

SEQ ID NO: 2086548 - RNA, 19 nt, Artificial Sequence
  Description of Artificial Sequence: Synthetic oligonucleotide
  Sense strand starting at position 2486 of SEQ ID NO: 1881988
ccaggucucgguuaggaga

SEQ ID NO: 2086549 - RNA, 19 nt, Artificial Sequence
  Description of Artificial Sequence: Synthetic oligonucleotide
  Antisense strand to SEQ ID NO: 2086548
ucuccuaaccgagaccugg

SEQ ID NO: 2086550 - RNA, 19 nt, Artificial Sequence
  Description of Artificial Sequence: Synthetic oligonucleotide
  Sense strand starting at position 2587 of SEQ ID NO: 1881988
gcacacugguaguucuuaa

SEQ ID NO: 2086551 - RNA, 19 nt, Artificial Sequence
  Description of Artificial Sequence: Synthetic oligonucleotide
  Antisense strand to SEQ ID NO: 2086550
uuaagaacuaccagugugc

SEQ ID NO: 2086552 - RNA, 19 nt, Artificial Sequence
  Description of Artificial Sequence: Synthetic oligonucleotide
  Sense strand starting at position 2594 of SEQ ID NO: 1881988
gguaguucuuaauccauuc

SEQ ID NO: 2086553 - RNA, 19 nt, Artificial Sequence
  Description of Artificial Sequence: Synthetic oligonucleotide
  Antisense strand to SEQ ID NO: 2086552
gaauggauuaagaacuacc

SEQ ID NO: 2086554 - RNA, 19 nt, Artificial Sequence
  Description of Artificial Sequence: Synthetic oligonucleotide
  Sense strand starting at position 2617 of SEQ ID NO: 1881988
cucaacguggaauguuaaa

SEQ ID NO: 2086555 - RNA, 19 nt, Artificial Sequence
  Description of Artificial Sequence: Synthetic oligonucleotide
  Antisense strand to SEQ ID NO: 2086554
uuuaacauuccacguugag

SEQ ID NO: 2086556 - RNA, 19 nt, Artificial Sequence
  Description of Artificial Sequence: Synthetic oligonucleotide
  Sense strand starting at position 2793 of SEQ ID NO: 1881988
cauucugauguguaaguga

SEQ ID NO: 2086557 - RNA, 19 nt, Artificial Sequence
  Description of Artificial Sequence: Synthetic oligonucleotide
  Antisense strand to SEQ ID NO: 2086556
ucacuuacacaucagaaug

SEQ ID NO: 2086558 - RNA, 19 nt, Artificial Sequence
  Description of Artificial Sequence: Synthetic oligonucleotide
  Sense strand starting at position 2796 of SEQ ID NO: 1881988
ucugauguguaagugaauu

SEQ ID NO: 2086559 - RNA, 19 nt, Artificial Sequence
  Description of Artificial Sequence: Synthetic oligonucleotide
  Antisense strand to SEQ ID NO: 2086558
aauucacuuacacaucaga

SEQ ID NO: 2086560 - RNA, 19 nt, Artificial Sequence
  Description of Artificial Sequence: Synthetic oligonucleotide
  Sense strand starting at position 2915 of SEQ ID NO: 1881988
gaucaugaggucuguaaac

SEQ ID NO: 2086561 - RNA, 19 nt, Artificial Sequence
  Description of Artificial Sequence: Synthetic oligonucleotide
  Antisense strand to SEQ ID NO: 2086560
guuuacagaccucaugauc

SEQ ID NO: 2086562 - RNA, 19 nt, Artificial Sequence
  Description of Artificial Sequence: Synthetic oligonucleotide
  Sense strand starting at position 3934 of SEQ ID NO: 1881988
ugaucugacuuauagaaag

SEQ ID NO: 2086563 - RNA, 19 nt, Artificial Sequence
  Description of Artificial Sequence: Synthetic oligonucleotide
  Antisense strand to SEQ ID NO: 2086562
cuuucuauaagucagauca

SEQ ID NO: 2086564 - RNA, 19 nt, Artificial Sequence
  Description of Artificial Sequence: Synthetic oligonucleotide
  Sense strand starting at position 1 of SEQ ID NO: 1881989
gggaaaggauaguuugguu

SEQ ID NO: 2086565 - RNA, 19 nt, Artificial Sequence
  Description of Artificial Sequence: Synthetic oligonucleotide
  Antisense strand to SEQ ID NO: 2086564
aaccaaacuauccuuuccc

SEQ ID NO: 2086566 - RNA, 19 nt, Artificial Sequence
  Description of Artificial Sequence: Synthetic oligonucleotide
  Sense strand starting at position 25 of SEQ ID NO: 1881989
aggagcagcagugaugaaa

SEQ ID NO: 2086567 - RNA, 19 nt, Artificial Sequence
  Description of Artificial Sequence: Synthetic oligonucleotide
  Antisense strand to SEQ ID NO: 2086566
uuucaucacugcugcuccu

SEQ ID NO: 2086568 - RNA, 19 nt, Artificial Sequence
  Description of Artificial Sequence: Synthetic oligonucleotide
  Sense strand starting at position 47 of SEQ ID NO: 1881989
ggaaaugaugagugugguu

SEQ ID NO: 2086569 - RNA, 19 nt, Artificial Sequence
  Description of Artificial Sequence: Synthetic oligonucleotide
  Antisense strand to SEQ ID NO: 2086568
aaccacacucaucauuucc

SEQ ID NO: 2086570 - RNA, 19 nt, Artificial Sequence
  Description of Artificial Sequence: Synthetic oligonucleotide
  Sense strand starting at position 52 of SEQ ID NO: 1881989
ugaugagugugguuggaga

SEQ ID NO: 2086571 - RNA, 19 nt, Artificial Sequence
  Description of Artificial Sequence: Synthetic oligonucleotide
  Antisense strand to SEQ ID NO: 2086570
ucuccaaccacacucauca

SEQ ID NO: 2086572 - RNA, 19 nt, Artificial Sequence
  Description of Artificial Sequence: Synthetic oligonucleotide
  Sense strand starting at position 137 of SEQ ID NO: 1881989
aauauaaaugcuuguggga

SEQ ID NO: 2086573 - RNA, 19 nt, Artificial Sequence
  Description of Artificial Sequence: Synthetic oligonucleotide
  Antisense strand to SEQ ID NO: 2086572
ucccacaagcauuuauauu

SEQ ID NO: 2086574 - RNA, 19 nt, Artificial Sequence
  Description of Artificial Sequence: Synthetic oligonucleotide
  Sense strand starting at position 294 of SEQ ID NO: 1881989
agaaaucaaugaugcauuu

SEQ ID NO: 2086575 - RNA, 19 nt, Artificial Sequence
  Description of Artificial Sequence: Synthetic oligonucleotide
  Antisense strand to SEQ ID NO: 2086574
aaaugcaucauugauuucu

SEQ ID NO: 2086576 - RNA, 19 nt, Artificial Sequence
  Description of Artificial Sequence: Synthetic oligonucleotide
  Sense strand starting at position 376 of SEQ ID NO: 1881989
gguguaugucucgcuguca

SEQ ID NO: 2086577 - RNA, 19 nt, Artificial Sequence
  Description of Artificial Sequence: Synthetic oligonucleotide
  Antisense strand to SEQ ID NO: 2086576
ugacagcgagacauacacc

SEQ ID NO: 2086578 - RNA, 19 nt, Artificial Sequence
  Description of Artificial Sequence: Synthetic oligonucleotide
  Sense strand starting at position 379 of SEQ ID NO: 1881989
guaugucucgcugucaauu

SEQ ID NO: 2086579 - RNA, 19 nt, Artificial Sequence
  Description of Artificial Sequence: Synthetic oligonucleotide
  Antisense strand to SEQ ID NO: 2086578
aauugacagcgagacauac

SEQ ID NO: 2086580 - RNA, 19 nt, Artificial Sequence
  Description of Artificial Sequence: Synthetic oligonucleotide
  Sense strand starting at position 460 of SEQ ID NO: 1881989
cccaaauaucgaggauauc

SEQ ID NO: 2086581 - RNA, 19 nt, Artificial Sequence
  Description of Artificial Sequence: Synthetic oligonucleotide
  Antisense strand to SEQ ID NO: 2086580
gauauccucgauauuuggg

SEQ ID NO: 2086582 - RNA, 19 nt, Artificial Sequence
  Description of Artificial Sequence: Synthetic oligonucleotide
  Sense strand starting at position 504 of SEQ ID NO: 1881989
gagcgauugccacagaguu

SEQ ID NO: 2086583 - RNA, 19 nt, Artificial Sequence
  Description of Artificial Sequence: Synthetic oligonucleotide
  Antisense strand to SEQ ID NO: 2086582
aacucuguggcaaucgcuc

SEQ ID NO: 2086584 - RNA, 19 nt, Artificial Sequence
  Description of Artificial Sequence: Synthetic oligonucleotide
  Sense strand starting at position 576 of SEQ ID NO: 1881989
ggcgacugugccuuucauu

SEQ ID NO: 2086585 - RNA, 19 nt, Artificial Sequence
  Description of Artificial Sequence: Synthetic oligonucleotide
  Antisense strand to SEQ ID NO: 2086584
aaugaaaggcacagucgcc

SEQ ID NO: 2086586 - RNA, 19 nt, Artificial Sequence
  Description of Artificial Sequence: Synthetic oligonucleotide
  Sense strand starting at position 763 of SEQ ID NO: 1881989
ugcuguuugcgaccagcau

SEQ ID NO: 2086587 - RNA, 19 nt, Artificial Sequence
  Description of Artificial Sequence: Synthetic oligonucleotide
  Antisense strand to SEQ ID NO: 2086586
augcuggucgcaaacagca

SEQ ID NO: 2086588 - RNA, 19 nt, Artificial Sequence
  Description of Artificial Sequence: Synthetic oligonucleotide
  Sense strand starting at position 885 of SEQ ID NO: 1881989
ucgguaauuacggauuaug

SEQ ID NO: 2086589 - RNA, 19 nt, Artificial Sequence
  Description of Artificial Sequence: Synthetic oligonucleotide
  Antisense strand to SEQ ID NO: 2086588
cauaauccguaauuaccga

SEQ ID NO: 2086590 - RNA, 19 nt, Artificial Sequence
  Description of Artificial Sequence: Synthetic oligonucleotide
  Sense strand starting at position 888 of SEQ ID NO: 1881989
guaauuacggauuauggca

SEQ ID NO: 2086591 - RNA, 19 nt, Artificial Sequence
  Description of Artificial Sequence: Synthetic oligonucleotide
  Antisense strand to SEQ ID NO: 2086590
ugccauaauccguaauuac

SEQ ID NO: 2086592 - RNA, 19 nt, Artificial Sequence
  Description of Artificial Sequence: Synthetic oligonucleotide
  Sense strand starting at position 895 of SEQ ID NO: 1881989
cggauuauggcacagccaa

SEQ ID NO: 2086593 - RNA, 19 nt, Artificial Sequence
  Description of Artificial Sequence: Synthetic oligonucleotide
  Antisense strand to SEQ ID NO: 2086592
uuggcugugccauaauccg

SEQ ID NO: 2086594 - RNA, 19 nt, Artificial Sequence
  Description of Artificial Sequence: Synthetic oligonucleotide
  Sense strand starting at position 1101 of SEQ ID NO: 1881989
ggcugacaucucuaguuuc

SEQ ID NO: 2086595 - RNA, 19 nt, Artificial Sequence
  Description of Artificial Sequence: Synthetic oligonucleotide
  Antisense strand to SEQ ID NO: 2086594
gaaacuagagaugucagcc

SEQ ID NO: 2086596 - RNA, 19 nt, Artificial Sequence
  Description of Artificial Sequence: Synthetic oligonucleotide
  Sense strand starting at position 1104 of SEQ ID NO: 1881989
ugacaucucuaguuucuca

SEQ ID NO: 2086597 - RNA, 19 nt, Artificial Sequence
  Description of Artificial Sequence: Synthetic oligonucleotide
  Antisense strand to SEQ ID NO: 2086596
ugagaaacuagagauguca

SEQ ID NO: 2086598 - RNA, 19 nt, Artificial Sequence
  Description of Artificial Sequence: Synthetic oligonucleotide
  Sense strand starting at position 1173 of SEQ ID NO: 1881989
cgcauuugucuuuggcaac

SEQ ID NO: 2086599 - RNA, 19 nt, Artificial Sequence
  Description of Artificial Sequence: Synthetic oligonucleotide
  Antisense strand to SEQ ID NO: 2086598
guugccaaagacaaaugcg

SEQ ID NO: 2086600 - RNA, 19 nt, Artificial Sequence
  Description of Artificial Sequence: Synthetic oligonucleotide
  Sense strand starting at position 1355 of SEQ ID NO: 1881989
cuaguuggucugcacgaaa

SEQ ID NO: 2086601 - RNA, 19 nt, Artificial Sequence
  Description of Artificial Sequence: Synthetic oligonucleotide
  Antisense strand to SEQ ID NO: 2086600
uuucgugcagaccaacuag

SEQ ID NO: 2086602 - RNA, 19 nt, Artificial Sequence
  Description of Artificial Sequence: Synthetic oligonucleotide
  Sense strand starting at position 1592 of SEQ ID NO: 1881989
uaacgaauguucuccuuga

SEQ ID NO: 2086603 - RNA, 19 nt, Artificial Sequence
  Description of Artificial Sequence: Synthetic oligonucleotide
  Antisense strand to SEQ ID NO: 2086602
ucaaggagaacauucguua

SEQ ID NO: 2086604 - RNA, 19 nt, Artificial Sequence
  Description of Artificial Sequence: Synthetic oligonucleotide
  Sense strand starting at position 2111 of SEQ ID NO: 1881989
uagguuuaccgaugaucag

SEQ ID NO: 2086605 - RNA, 19 nt, Artificial Sequence
  Description of Artificial Sequence: Synthetic oligonucleotide
  Antisense strand to SEQ ID NO: 2086604
cugaucaucgguaaaccua

SEQ ID NO: 2086606 - RNA, 19 nt, Artificial Sequence
  Description of Artificial Sequence: Synthetic oligonucleotide
  Sense strand starting at position 2112 of SEQ ID NO: 1881989
agguuuaccgaugaucagu

SEQ ID NO: 2086607 - RNA, 19 nt, Artificial Sequence
  Description of Artificial Sequence: Synthetic oligonucleotide
  Antisense strand to SEQ ID NO: 2086606
acugaucaucgguaaaccu

SEQ ID NO: 2086608 - RNA, 19 nt, Artificial Sequence
  Description of Artificial Sequence: Synthetic oligonucleotide
  Sense strand starting at position 2120 of SEQ ID NO: 1881989
cgaugaucaguuuagcagu

SEQ ID NO: 2086609 - RNA, 19 nt, Artificial Sequence
  Description of Artificial Sequence: Synthetic oligonucleotide
  Antisense strand to SEQ ID NO: 2086608
acugcuaaacugaucaucg

SEQ ID NO: 2086610 - RNA, 19 nt, Artificial Sequence
  Description of Artificial Sequence: Synthetic oligonucleotide
  Sense strand starting at position 2188 of SEQ ID NO: 1881989
uuagcuaagcuugugugua

SEQ ID NO: 2086611 - RNA, 19 nt, Artificial Sequence
  Description of Artificial Sequence: Synthetic oligonucleotide
  Antisense strand to SEQ ID NO: 2086610
uacacacaagcuuagcuaa

SEQ ID NO: 2086612 - RNA, 19 nt, Artificial Sequence
  Description of Artificial Sequence: Synthetic oligonucleotide
  Sense strand starting at position 2226 of SEQ ID NO: 1881989
ucaggaaauguccgcaaac

SEQ ID NO: 2086613 - RNA, 19 nt, Artificial Sequence
  Description of Artificial Sequence: Synthetic oligonucleotide
  Antisense strand to SEQ ID NO: 2086612
guuugcggacauuuccuga

SEQ ID NO: 2086614 - RNA, 19 nt, Artificial Sequence
  Description of Artificial Sequence: Synthetic oligonucleotide
  Sense strand starting at position 2244 of SEQ ID NO: 1881989
cgcgauuucugguuaccaa

SEQ ID NO: 2086615 - RNA, 19 nt, Artificial Sequence
  Description of Artificial Sequence: Synthetic oligonucleotide
  Antisense strand to SEQ ID NO: 2086614
uugguaaccagaaaucgcg

SEQ ID NO: 2086616 - RNA, 19 nt, Artificial Sequence
  Description of Artificial Sequence: Synthetic oligonucleotide
  Sense strand starting at position 2452 of SEQ ID NO: 1881989
ccgguuuagaucugacaga

SEQ ID NO: 2086617 - RNA, 19 nt, Artificial Sequence
  Description of Artificial Sequence: Synthetic oligonucleotide
  Antisense strand to SEQ ID NO: 2086616
ucugucagaucuaaaccgg

SEQ ID NO: 2086618 - RNA, 19 nt, Artificial Sequence
  Description of Artificial Sequence: Synthetic oligonucleotide
  Sense strand starting at position 2498 of SEQ ID NO: 1881989
uuagcaagguuuguaauuu

SEQ ID NO: 2086619 - RNA, 19 nt, Artificial Sequence
  Description of Artificial Sequence: Synthetic oligonucleotide
  Antisense strand to SEQ ID NO: 2086618
aaauuacaaaccuugcuaa

SEQ ID NO: 2086620 - RNA, 19 nt, Artificial Sequence
  Description of Artificial Sequence: Synthetic oligonucleotide
  Sense strand starting at position 2525 of SEQ ID NO: 1881989
uaggauugguucucuguaa

SEQ ID NO: 2086621 - RNA, 19 nt, Artificial Sequence
  Description of Artificial Sequence: Synthetic oligonucleotide
  Antisense strand to SEQ ID NO: 2086620
uuacagagaaccaauccua

SEQ ID NO: 2086622 - RNA, 19 nt, Artificial Sequence
  Description of Artificial Sequence: Synthetic oligonucleotide
  Sense strand starting at position 2526 of SEQ ID NO: 1881989
aggauugguucucuguaau

SEQ ID NO: 2086623 - RNA, 19 nt, Artificial Sequence
  Description of Artificial Sequence: Synthetic oligonucleotide
  Antisense strand to SEQ ID NO: 2086622
auuacagagaaccaauccu

SEQ ID NO: 2086624 - RNA, 19 nt, Artificial Sequence
  Description of Artificial Sequence: Synthetic oligonucleotide
  Sense strand starting at position 2578 of SEQ ID NO: 1881989
ugcucugagaacgauguua

SEQ ID NO: 2086625 - RNA, 19 nt, Artificial Sequence
  Description of Artificial Sequence: Synthetic oligonucleotide
  Antisense strand to SEQ ID NO: 2086624
uaacaucguucucagagca

SEQ ID NO: 2086626 - RNA, 19 nt, Artificial Sequence
  Description of Artificial Sequence: Synthetic oligonucleotide
  Sense strand starting at position 2600 of SEQ ID NO: 1881989
auguguuugcuuuccaugu

SEQ ID NO: 2086627 - RNA, 19 nt, Artificial Sequence
  Description of Artificial Sequence: Synthetic oligonucleotide
  Antisense strand to SEQ ID NO: 2086626
acauggaaagcaaacacau

SEQ ID NO: 2086628 - RNA, 19 nt, Artificial Sequence
  Description of Artificial Sequence: Synthetic oligonucleotide
  Sense strand starting at position 2803 of SEQ ID NO: 1881989
cuucguaugcggagcugau

SEQ ID NO: 2086629 - RNA, 19 nt, Artificial Sequence
  Description of Artificial Sequence: Synthetic oligonucleotide
  Antisense strand to SEQ ID NO: 2086628
aucagcuccgcauacgaag

SEQ ID NO: 2086630 - RNA, 19 nt, Artificial Sequence
  Description of Artificial Sequence: Synthetic oligonucleotide
  Sense strand starting at position 3190 of SEQ ID NO: 1881989
gguucauuccuccgaagag

SEQ ID NO: 2086631 - RNA, 19 nt, Artificial Sequence
  Description of Artificial Sequence: Synthetic oligonucleotide
  Antisense strand to SEQ ID NO: 2086630
cucuucggaggaaugaacc

SEQ ID NO: 2086632 - RNA, 19 nt, Artificial Sequence
  Description of Artificial Sequence: Synthetic oligonucleotide
  Sense strand starting at position 3354 of SEQ ID NO: 1881989
uuucucuuucggucguuaa

SEQ ID NO: 2086633 - RNA, 19 nt, Artificial Sequence
  Description of Artificial Sequence: Synthetic oligonucleotide
  Antisense strand to SEQ ID NO: 2086632
uuaacgaccgaaagagaaa

SEQ ID NO: 2086634 - RNA, 19 nt, Artificial Sequence
  Description of Artificial Sequence: Synthetic oligonucleotide
  Sense strand starting at position 3356 of SEQ ID NO: 1881989
ucucuuucggucguuaagu

SEQ ID NO: 2086635 - RNA, 19 nt, Artificial Sequence
  Description of Artificial Sequence: Synthetic oligonucleotide
  Antisense strand to SEQ ID NO: 2086634
acuuaacgaccgaaagaga

SEQ ID NO: 2086636 - RNA, 19 nt, Artificial Sequence
  Description of Artificial Sequence: Synthetic oligonucleotide
  Sense strand starting at position 3450 of SEQ ID NO: 1881989
aagcgcugcgaucuguaaa

SEQ ID NO: 2086637 - RNA, 19 nt, Artificial Sequence
  Description of Artificial Sequence: Synthetic oligonucleotide
  Antisense strand to SEQ ID NO: 2086636
uuuacagaucgcagcgcuu

SEQ ID NO: 2086638 - RNA, 19 nt, Artificial Sequence
  Description of Artificial Sequence: Synthetic oligonucleotide
  Sense strand starting at position 3671 of SEQ ID NO: 1881989
agcauaaauguccaggcua

SEQ ID NO: 2086639 - RNA, 19 nt, Artificial Sequence
  Description of Artificial Sequence: Synthetic oligonucleotide
  Antisense strand to SEQ ID NO: 2086638
uagccuggacauuuaugcu

SEQ ID NO: 2086640 - RNA, 19 nt, Artificial Sequence
  Description of Artificial Sequence: Synthetic oligonucleotide
  Sense strand starting at position 3685 of SEQ ID NO: 1881989
ggcuaaugggagugcugaa

SEQ ID NO: 2086641 - RNA, 19 nt, Artificial Sequence
  Description of Artificial Sequence: Synthetic oligonucleotide
  Antisense strand to SEQ ID NO: 2086640
uucagcacucccauuagcc

SEQ ID NO: 2086642 - RNA, 19 nt, Artificial Sequence
  Description of Artificial Sequence: Synthetic oligonucleotide
  Sense strand starting at position 3731 of SEQ ID NO: 1881989
gcuuguguccugcucuaag

SEQ ID NO: 2086643 - RNA, 19 nt, Artificial Sequence
  Description of Artificial Sequence: Synthetic oligonucleotide
  Antisense strand to SEQ ID NO: 2086642
cuuagagcaggacacaagc

SEQ ID NO: 2086644 - RNA, 19 nt, Artificial Sequence
  Description of Artificial Sequence: Synthetic oligonucleotide
  Sense strand starting at position 53 of SEQ ID NO: 1881990
ucgguaauuacggauuaug

SEQ ID NO: 2086645 - RNA, 19 nt, Artificial Sequence
  Description of Artificial Sequence: Synthetic oligonucleotide
  Antisense strand to SEQ ID NO: 2086644
cauaauccguaauuaccga

SEQ ID NO: 2086646 - RNA, 19 nt, Artificial Sequence
  Description of Artificial Sequence: Synthetic oligonucleotide
  Sense strand starting at position 56 of SEQ ID NO: 1881990
guaauuacggauuauggca

SEQ ID NO: 2086647 - RNA, 19 nt, Artificial Sequence
  Description of Artificial Sequence: Synthetic oligonucleotide
  Antisense strand to SEQ ID NO: 2086646
ugccauaauccguaauuac

SEQ ID NO: 2086648 - RNA, 19 nt, Artificial Sequence
  Description of Artificial Sequence: Synthetic oligonucleotide
  Sense strand starting at position 63 of SEQ ID NO: 1881990
cggauuauggcacagccaa

SEQ ID NO: 2086649 - RNA, 19 nt, Artificial Sequence
  Description of Artificial Sequence: Synthetic oligonucleotide
  Antisense strand to SEQ ID NO: 2086648
uuggcugugccauaauccg

SEQ ID NO: 2086650 - RNA, 19 nt, Artificial Sequence
  Description of Artificial Sequence: Synthetic oligonucleotide
  Sense strand starting at position 269 of SEQ ID NO: 1881990
ggcugacaucucuaguuuc

SEQ ID NO: 2086651 - RNA, 19 nt, Artificial Sequence
  Description of Artificial Sequence: Synthetic oligonucleotide
  Antisense strand to SEQ ID NO: 2086650
gaaacuagagaugucagcc

SEQ ID NO: 2086652 - RNA, 19 nt, Artificial Sequence
  Description of Artificial Sequence: Synthetic oligonucleotide
  Sense strand starting at position 272 of SEQ ID NO: 1881990
ugacaucucuaguuucuca

SEQ ID NO: 2086653 - RNA, 19 nt, Artificial Sequence
  Description of Artificial Sequence: Synthetic oligonucleotide
  Antisense strand to SEQ ID NO: 2086652
ugagaaacuagagauguca

SEQ ID NO: 2086654 - RNA, 19 nt, Artificial Sequence
  Description of Artificial Sequence: Synthetic oligonucleotide
  Sense strand starting at position 341 of SEQ ID NO: 1881990
cgcauuugucuuuggcaac

SEQ ID NO: 2086655 - RNA, 19 nt, Artificial Sequence
  Description of Artificial Sequence: Synthetic oligonucleotide
  Antisense strand to SEQ ID NO: 2086654
guugccaaagacaaaugcg

SEQ ID NO: 2086656 - RNA, 19 nt, Artificial Sequence
  Description of Artificial Sequence: Synthetic oligonucleotide
  Sense strand starting at position 523 of SEQ ID NO: 1881990
cuaguuggucugcacgaaa

SEQ ID NO: 2086657 - RNA, 19 nt, Artificial Sequence
  Description of Artificial Sequence: Synthetic oligonucleotide
  Antisense strand to SEQ ID NO: 2086656
uuucgugcagaccaacuag

SEQ ID NO: 2086658 - RNA, 19 nt, Artificial Sequence
  Description of Artificial Sequence: Synthetic oligonucleotide
  Sense strand starting at position 760 of SEQ ID NO: 1881990
uaacgaauguucuccuuga

SEQ ID NO: 2086659 - RNA, 19 nt, Artificial Sequence
  Description of Artificial Sequence: Synthetic oligonucleotide
  Antisense strand to SEQ ID NO: 2086658
ucaaggagaacauucguua

SEQ ID NO: 2086660 - RNA, 19 nt, Artificial Sequence
  Description of Artificial Sequence: Synthetic oligonucleotide
  Sense strand starting at position 1279 of SEQ ID NO: 1881990
uagguuuaccgaugaucag

SEQ ID NO: 2086661 - RNA, 19 nt, Artificial Sequence
  Description of Artificial Sequence: Synthetic oligonucleotide
  Antisense strand to SEQ ID NO: 2086660
cugaucaucgguaaaccua

SEQ ID NO: 2086662 - RNA, 19 nt, Artificial Sequence
  Description of Artificial Sequence: Synthetic oligonucleotide
  Sense strand starting at position 1280 of SEQ ID NO: 1881990
agguuuaccgaugaucagu

SEQ ID NO: 2086663 - RNA, 19 nt, Artificial Sequence
  Description of Artificial Sequence: Synthetic oligonucleotide
  Antisense strand to SEQ ID NO: 2086662
acugaucaucgguaaaccu

SEQ ID NO: 2086664 - RNA, 19 nt, Artificial Sequence
  Description of Artificial Sequence: Synthetic oligonucleotide
  Sense strand starting at position 1356 of SEQ ID NO: 1881990
uuagcuaagcuugugugua

SEQ ID NO: 2086665 - RNA, 19 nt, Artificial Sequence
  Description of Artificial Sequence: Synthetic oligonucleotide
  Antisense strand to SEQ ID NO: 2086664
uacacacaagcuuagcuaa

SEQ ID NO: 2086666 - RNA, 19 nt, Artificial Sequence
  Description of Artificial Sequence: Synthetic oligonucleotide
  Sense strand starting at position 1394 of SEQ ID NO: 1881990
ucaggaaauguccgcaaac

SEQ ID NO: 2086667 - RNA, 19 nt, Artificial Sequence
  Description of Artificial Sequence: Synthetic oligonucleotide
  Antisense strand to SEQ ID NO: 2086666
guuugcggacauuuccuga

SEQ ID NO: 2086668 - RNA, 19 nt, Artificial Sequence
  Description of Artificial Sequence: Synthetic oligonucleotide
  Sense strand starting at position 1412 of SEQ ID NO: 1881990
cgcgauuucugguuaccaa

SEQ ID NO: 2086669 - RNA, 19 nt, Artificial Sequence
  Description of Artificial Sequence: Synthetic oligonucleotide
  Antisense strand to SEQ ID NO: 2086668
uugguaaccagaaaucgcg

SEQ ID NO: 2086670 - RNA, 19 nt, Artificial Sequence
  Description of Artificial Sequence: Synthetic oligonucleotide
  Sense strand starting at position 1620 of SEQ ID NO: 1881990
ccgguuuagaucugacaga

SEQ ID NO: 2086671 - RNA, 19 nt, Artificial Sequence
  Description of Artificial Sequence: Synthetic oligonucleotide
  Antisense strand to SEQ ID NO: 2086670
ucugucagaucuaaaccgg

SEQ ID NO: 2086672 - RNA, 19 nt, Artificial Sequence
  Description of Artificial Sequence: Synthetic oligonucleotide
  Sense strand starting at position 1666 of SEQ ID NO: 1881990
uuagcaagguuuguaauuu

SEQ ID NO: 2086673 - RNA, 19 nt, Artificial Sequence
  Description of Artificial Sequence: Synthetic oligonucleotide
  Antisense strand to SEQ ID NO: 2086672
aaauuacaaaccuugcuaa

SEQ ID NO: 2086674 - RNA, 19 nt, Artificial Sequence
  Description of Artificial Sequence: Synthetic oligonucleotide
  Sense strand starting at position 1693 of SEQ ID NO: 1881990
uaggauugguucucuguaa

SEQ ID NO: 2086675 - RNA, 19 nt, Artificial Sequence
  Description of Artificial Sequence: Synthetic oligonucleotide
  Antisense strand to SEQ ID NO: 2086674
uuacagagaaccaauccua

SEQ ID NO: 2086676 - RNA, 19 nt, Artificial Sequence
  Description of Artificial Sequence: Synthetic oligonucleotide
  Sense strand starting at position 1694 of SEQ ID NO: 1881990
aggauugguucucuguaau

SEQ ID NO: 2086677 - RNA, 19 nt, Artificial Sequence
  Description of Artificial Sequence: Synthetic oligonucleotide
  Antisense strand to SEQ ID NO: 2086676
auuacagagaaccaauccu

SEQ ID NO: 2086678 - RNA, 19 nt, Artificial Sequence
  Description of Artificial Sequence: Synthetic oligonucleotide
  Sense strand starting at position 1746 of SEQ ID NO: 1881990
ugcucugagaacgauguua

SEQ ID NO: 2086679 - RNA, 19 nt, Artificial Sequence
  Description of Artificial Sequence: Synthetic oligonucleotide
  Antisense strand to SEQ ID NO: 2086678
uaacaucguucucagagca

SEQ ID NO: 2086680 - RNA, 19 nt, Artificial Sequence
  Description of Artificial Sequence: Synthetic oligonucleotide
  Sense strand starting at position 1768 of SEQ ID NO: 1881990
auguguuugcuuuccaugu

SEQ ID NO: 2086681 - RNA, 19 nt, Artificial Sequence
  Description of Artificial Sequence: Synthetic oligonucleotide
  Antisense strand to SEQ ID NO: 2086680
acauggaaagcaaacacau

SEQ ID NO: 2086682 - RNA, 19 nt, Artificial Sequence
  Description of Artificial Sequence: Synthetic oligonucleotide
  Sense strand starting at position 1971 of SEQ ID NO: 1881990
cuucguaugcggagcugau

SEQ ID NO: 2086683 - RNA, 19 nt, Artificial Sequence
  Description of Artificial Sequence: Synthetic oligonucleotide
  Antisense strand to SEQ ID NO: 2086682
aucagcuccgcauacgaag

SEQ ID NO: 2086684 - RNA, 19 nt, Artificial Sequence
  Description of Artificial Sequence: Synthetic oligonucleotide
  Sense strand starting at position 2358 of SEQ ID NO: 1881990
gguucauuccuccgaagag

SEQ ID NO: 2086685 - RNA, 19 nt, Artificial Sequence
  Description of Artificial Sequence: Synthetic oligonucleotide
  Antisense strand to SEQ ID NO: 2086684
cucuucggaggaaugaacc

SEQ ID NO: 2086686 - RNA, 19 nt, Artificial Sequence
  Description of Artificial Sequence: Synthetic oligonucleotide
  Sense strand starting at position 2522 of SEQ ID NO: 1881990
uuucucuuucggucguuaa

SEQ ID NO: 2086687 - RNA, 19 nt, Artificial Sequence
  Description of Artificial Sequence: Synthetic oligonucleotide
  Antisense strand to SEQ ID NO: 2086686
uuaacgaccgaaagagaaa

SEQ ID NO: 2086688 - RNA, 19 nt, Artificial Sequence
  Description of Artificial Sequence: Synthetic oligonucleotide
  Sense strand starting at position 2524 of SEQ ID NO: 1881990
ucucuuucggucguuaagu

SEQ ID NO: 2086689 - RNA, 19 nt, Artificial Sequence
  Description of Artificial Sequence: Synthetic oligonucleotide
  Antisense strand to SEQ ID NO: 2086688
acuuaacgaccgaaagaga

SEQ ID NO: 2086690 - RNA, 19 nt, Artificial Sequence
  Description of Artificial Sequence: Synthetic oligonucleotide
  Sense strand starting at position 2618 of SEQ ID NO: 1881990
aagcgcugcgaucuguaaa

SEQ ID NO: 2086691 - RNA, 19 nt, Artificial Sequence
  Description of Artificial Sequence: Synthetic oligonucleotide
  Antisense strand to SEQ ID NO: 2086690
uuuacagaucgcagcgcuu

SEQ ID NO: 2086692 - RNA, 19 nt, Artificial Sequence
  Description of Artificial Sequence: Synthetic oligonucleotide
  Sense strand starting at position 2839 of SEQ ID NO: 1881990
agcauaaauguccaggcua

SEQ ID NO: 2086693 - RNA, 19 nt, Artificial Sequence
  Description of Artificial Sequence: Synthetic oligonucleotide
  Antisense strand to SEQ ID NO: 2086692
uagccuggacauuuaugcu

SEQ ID NO: 2086694 - RNA, 19 nt, Artificial Sequence
  Description of Artificial Sequence: Synthetic oligonucleotide
  Sense strand starting at position 2853 of SEQ ID NO: 1881990
ggcuaaugggagugcugaa

SEQ ID NO: 2086695 - RNA, 19 nt, Artificial Sequence
  Description of Artificial Sequence: Synthetic oligonucleotide
  Antisense strand to SEQ ID NO: 2086694
uucagcacucccauuagcc

SEQ ID NO: 2086696 - RNA, 19 nt, Artificial Sequence
  Description of Artificial Sequence: Synthetic oligonucleotide
  Sense strand starting at position 2899 of SEQ ID NO: 1881990
gcuuguguccugcucuaag

SEQ ID NO: 2086697 - RNA, 19 nt, Artificial Sequence
  Description of Artificial Sequence: Synthetic oligonucleotide
  Antisense strand to SEQ ID NO: 2086696
cuuagagcaggacacaagc

SEQ ID NO: 2086698 - RNA, 19 nt, Artificial Sequence
  Description of Artificial Sequence: Synthetic oligonucleotide
  Sense strand starting at position 3279 of SEQ ID NO: 1881990
auuuauuggucagcgguuu

SEQ ID NO: 2086699 - RNA, 19 nt, Artificial Sequence
  Description of Artificial Sequence: Synthetic oligonucleotide
  Antisense strand to SEQ ID NO: 2086698
aaaccgcugaccaauaaau

SEQ ID NO: 2086700 - RNA, 19 nt, Artificial Sequence
  Description of Artificial Sequence: Synthetic oligonucleotide
  Sense strand starting at position 3290 of SEQ ID NO: 1881990
agcgguuucugauuuaucu

SEQ ID NO: 2086701 - RNA, 19 nt, Artificial Sequence
  Description of Artificial Sequence: Synthetic oligonucleotide
  Antisense strand to SEQ ID NO: 2086700
agauaaaucagaaaccgcu

SEQ ID NO: 2086702 - RNA, 19 nt, Artificial Sequence
  Description of Artificial Sequence: Synthetic oligonucleotide
  Sense strand starting at position 3442 of SEQ ID NO: 1881990
gcuaaaucuuggguuacug

SEQ ID NO: 2086703 - RNA, 19 nt, Artificial Sequence
  Description of Artificial Sequence: Synthetic oligonucleotide
  Antisense strand to SEQ ID NO: 2086702
caguaacccaagauuuagc

SEQ ID NO: 2086704 - RNA, 19 nt, Artificial Sequence
  Description of Artificial Sequence: Synthetic oligonucleotide
  Sense strand starting at position 3616 of SEQ ID NO: 1881990
agcgaauugcaauaaagag

SEQ ID NO: 2086705 - RNA, 19 nt, Artificial Sequence
  Description of Artificial Sequence: Synthetic oligonucleotide
  Antisense strand to SEQ ID NO: 2086704
cucuuuauugcaauucgcu

SEQ ID NO: 2086706 - RNA, 19 nt, Artificial Sequence
  Description of Artificial Sequence: Synthetic oligonucleotide
  Sense strand starting at position 3633 of SEQ ID NO: 1881990
aguuuaauaugggcagagu

SEQ ID NO: 2086707 - RNA, 19 nt, Artificial Sequence
  Description of Artificial Sequence: Synthetic oligonucleotide
  Antisense strand to SEQ ID NO: 2086706
acucugcccauauuaaacu

SEQ ID NO: 2086708 - RNA, 19 nt, Artificial Sequence
  Description of Artificial Sequence: Synthetic oligonucleotide
  Sense strand starting at position 3634 of SEQ ID NO: 1881990
guuuaauaugggcagaguu

SEQ ID NO: 2086709 - RNA, 19 nt, Artificial Sequence
  Description of Artificial Sequence: Synthetic oligonucleotide
  Antisense strand to SEQ ID NO: 2086708
aacucugcccauauuaaac

SEQ ID NO: 2086710 - RNA, 19 nt, Artificial Sequence
  Description of Artificial Sequence: Synthetic oligonucleotide
  Sense strand starting at position 3642 of SEQ ID NO: 1881990
ugggcagaguuggcuaaau

SEQ ID NO: 2086711 - RNA, 19 nt, Artificial Sequence
  Description of Artificial Sequence: Synthetic oligonucleotide
  Antisense strand to SEQ ID NO: 2086710
auuuagccaacucugccca

SEQ ID NO: 2086712 - RNA, 19 nt, Artificial Sequence
  Description of Artificial Sequence: Synthetic oligonucleotide
  Sense strand starting at position 3644 of SEQ ID NO: 1881990
ggcagaguuggcuaaauug

SEQ ID NO: 2086713 - RNA, 19 nt, Artificial Sequence
  Description of Artificial Sequence: Synthetic oligonucleotide
  Antisense strand to SEQ ID NO: 2086712
caauuuagccaacucugcc

SEQ ID NO: 2086714 - RNA, 19 nt, Artificial Sequence
  Description of Artificial Sequence: Synthetic oligonucleotide
  Sense strand starting at position 3729 of SEQ ID NO: 1881990
gauaguuuggcagaagggu

SEQ ID NO: 2086715 - RNA, 19 nt, Artificial Sequence
  Description of Artificial Sequence: Synthetic oligonucleotide
  Antisense strand to SEQ ID NO: 2086714
acccuucugccaaacuauc

SEQ ID NO: 2086716 - RNA, 19 nt, Artificial Sequence
  Description of Artificial Sequence: Synthetic oligonucleotide
  Sense strand starting at position 3894 of SEQ ID NO: 1881990
agguucuaguaauuaggga

SEQ ID NO: 2086717 - RNA, 19 nt, Artificial Sequence
  Description of Artificial Sequence: Synthetic oligonucleotide
  Antisense strand to SEQ ID NO: 2086716
ucccuaauuacuagaaccu

SEQ ID NO: 2086718 - RNA, 19 nt, Artificial Sequence
  Description of Artificial Sequence: Synthetic oligonucleotide
  Sense strand starting at position 3934 of SEQ ID NO: 1881990
uggaauaaaggcugguaau

SEQ ID NO: 2086719 - RNA, 19 nt, Artificial Sequence
  Description of Artificial Sequence: Synthetic oligonucleotide
  Antisense strand to SEQ ID NO: 2086718
auuaccagccuuuauucca

SEQ ID NO: 2086720 - RNA, 19 nt, Artificial Sequence
  Description of Artificial Sequence: Synthetic oligonucleotide
  Sense strand starting at position 3935 of SEQ ID NO: 1881990
ggaauaaaggcugguaauc

SEQ ID NO: 2086721 - RNA, 19 nt, Artificial Sequence
  Description of Artificial Sequence: Synthetic oligonucleotide
  Antisense strand to SEQ ID NO: 2086720
gauuaccagccuuuauucc

SEQ ID NO: 2086722 - RNA, 19 nt, Artificial Sequence
  Description of Artificial Sequence: Synthetic oligonucleotide
  Sense strand starting at position 3964 of SEQ ID NO: 1881990
gcccacaucuuagcagaaa

SEQ ID NO: 2086723 - RNA, 19 nt, Artificial Sequence
  Description of Artificial Sequence: Synthetic oligonucleotide
  Antisense strand to SEQ ID NO: 2086722
uuucugcuaagaugugggc

SEQ ID NO: 2086724 - RNA, 19 nt, Artificial Sequence
  Description of Artificial Sequence: Synthetic oligonucleotide
  Sense strand starting at position 39 of SEQ ID NO: 1881991
auccgaaguuuccucggau

SEQ ID NO: 2086725 - RNA, 19 nt, Artificial Sequence
  Description of Artificial Sequence: Synthetic oligonucleotide
  Antisense strand to SEQ ID NO: 2086724
auccgaggaaacuucggau

SEQ ID NO: 2086726 - RNA, 19 nt, Artificial Sequence
  Description of Artificial Sequence: Synthetic oligonucleotide
  Sense strand starting at position 40 of SEQ ID NO: 1881991
uccgaaguuuccucggauu

SEQ ID NO: 2086727 - RNA, 19 nt, Artificial Sequence
  Description of Artificial Sequence: Synthetic oligonucleotide
  Antisense strand to SEQ ID NO: 2086726
aauccgaggaaacuucgga

SEQ ID NO: 2086728 - RNA, 19 nt, Artificial Sequence
  Description of Artificial Sequence: Synthetic oligonucleotide
  Sense strand starting at position 42 of SEQ ID NO: 1881991
cgaaguuuccucggauuaa

SEQ ID NO: 2086729 - RNA, 19 nt, Artificial Sequence
  Description of Artificial Sequence: Synthetic oligonucleotide
  Antisense strand to SEQ ID NO: 2086728
uuaauccgaggaaacuucg

SEQ ID NO: 2086730 - RNA, 19 nt, Artificial Sequence
  Description of Artificial Sequence: Synthetic oligonucleotide
  Sense strand starting at position 46 of SEQ ID NO: 1881991
guuuccucggauuaagaag

SEQ ID NO: 2086731 - RNA, 19 nt, Artificial Sequence
  Description of Artificial Sequence: Synthetic oligonucleotide
  Antisense strand to SEQ ID NO: 2086730
cuucuuaauccgaggaaac

SEQ ID NO: 2086732 - RNA, 19 nt, Artificial Sequence
  Description of Artificial Sequence: Synthetic oligonucleotide
  Sense strand starting at position 63 of SEQ ID NO: 1881991
agaaacagccaugguuaaa

SEQ ID NO: 2086733 - RNA, 19 nt, Artificial Sequence
  Description of Artificial Sequence: Synthetic oligonucleotide
  Antisense strand to SEQ ID NO: 2086732
uuuaaccauggcuguuucu

SEQ ID NO: 2086734 - RNA, 19 nt, Artificial Sequence
  Description of Artificial Sequence: Synthetic oligonucleotide
  Sense strand starting at position 89 of SEQ ID NO: 1881991
uugcgacaccaacaauuau

SEQ ID NO: 2086735 - RNA, 19 nt, Artificial Sequence
  Description of Artificial Sequence: Synthetic oligonucleotide
  Antisense strand to SEQ ID NO: 2086734
auaauuguuggugucgcaa

SEQ ID NO: 2086736 - RNA, 19 nt, Artificial Sequence
  Description of Artificial Sequence: Synthetic oligonucleotide
  Sense strand starting at position 99 of SEQ ID NO: 1881991
aacaauuaucuguagccga

SEQ ID NO: 2086737 - RNA, 19 nt, Artificial Sequence
  Description of Artificial Sequence: Synthetic oligonucleotide
  Antisense strand to SEQ ID NO: 2086736
ucggcuacagauaauuguu

SEQ ID NO: 2086738 - RNA, 19 nt, Artificial Sequence
  Description of Artificial Sequence: Synthetic oligonucleotide
  Sense strand starting at position 174 of SEQ ID NO: 1881991
ugcgaauucuaacuuggua

SEQ ID NO: 2086739 - RNA, 19 nt, Artificial Sequence
  Description of Artificial Sequence: Synthetic oligonucleotide
  Antisense strand to SEQ ID NO: 2086738
uaccaaguuagaauucgca

SEQ ID NO: 2086740 - RNA, 19 nt, Artificial Sequence
  Description of Artificial Sequence: Synthetic oligonucleotide
  Sense strand starting at position 176 of SEQ ID NO: 1881991
cgaauucuaacuugguaug

SEQ ID NO: 2086741 - RNA, 19 nt, Artificial Sequence
  Description of Artificial Sequence: Synthetic oligonucleotide
  Antisense strand to SEQ ID NO: 2086740
cauaccaaguuagaauucg

SEQ ID NO: 2086742 - RNA, 19 nt, Artificial Sequence
  Description of Artificial Sequence: Synthetic oligonucleotide
  Sense strand starting at position 177 of SEQ ID NO: 1881991
gaauucuaacuugguauga

SEQ ID NO: 2086743 - RNA, 19 nt, Artificial Sequence
  Description of Artificial Sequence: Synthetic oligonucleotide
  Antisense strand to SEQ ID NO: 2086742
ucauaccaaguuagaauuc

SEQ ID NO: 2086744 - RNA, 19 nt, Artificial Sequence
  Description of Artificial Sequence: Synthetic oligonucleotide
  Sense strand starting at position 182 of SEQ ID NO: 1881991
cuaacuugguaugauuuaa

SEQ ID NO: 2086745 - RNA, 19 nt, Artificial Sequence
  Description of Artificial Sequence: Synthetic oligonucleotide
  Antisense strand to SEQ ID NO: 2086744
uuaaaucauaccaaguuag

SEQ ID NO: 2086746 - RNA, 19 nt, Artificial Sequence
  Description of Artificial Sequence: Synthetic oligonucleotide
  Sense strand starting at position 311 of SEQ ID NO: 1881991
ggaauuugcuacuacuaaa

SEQ ID NO: 2086747 - RNA, 19 nt, Artificial Sequence
  Description of Artificial Sequence: Synthetic oligonucleotide
  Antisense strand to SEQ ID NO: 2086746
uuuaguaguagcaaauucc

SEQ ID NO: 2086748 - RNA, 19 nt, Artificial Sequence
  Description of Artificial Sequence: Synthetic oligonucleotide
  Sense strand starting at position 331 of SEQ ID NO: 1881991
uuauguaggcaugguuaaa

SEQ ID NO: 2086749 - RNA, 19 nt, Artificial Sequence
  Description of Artificial Sequence: Synthetic oligonucleotide
  Antisense strand to SEQ ID NO: 2086748
uuuaaccaugccuacauaa

SEQ ID NO: 2086750 - RNA, 19 nt, Artificial Sequence
  Description of Artificial Sequence: Synthetic oligonucleotide
  Sense strand starting at position 342 of SEQ ID NO: 1881991
ugguuaaagccagaauugu

SEQ ID NO: 2086751 - RNA, 19 nt, Artificial Sequence
  Description of Artificial Sequence: Synthetic oligonucleotide
  Antisense strand to SEQ ID NO: 2086750
acaauucuggcuuuaacca

SEQ ID NO: 2086752 - RNA, 19 nt, Artificial Sequence
  Description of Artificial Sequence: Synthetic oligonucleotide
  Sense strand starting at position 418 of SEQ ID NO: 1881991
aaacucugacuuggucaga

SEQ ID NO: 2086753 - RNA, 19 nt, Artificial Sequence
  Description of Artificial Sequence: Synthetic oligonucleotide
  Antisense strand to SEQ ID NO: 2086752
ucugaccaagucagaguuu

SEQ ID NO: 2086754 - RNA, 19 nt, Artificial Sequence
  Description of Artificial Sequence: Synthetic oligonucleotide
  Sense strand starting at position 421 of SEQ ID NO: 1881991
cucugacuuggucagacua

SEQ ID NO: 2086755 - RNA, 19 nt, Artificial Sequence
  Description of Artificial Sequence: Synthetic oligonucleotide
  Antisense strand to SEQ ID NO: 2086754
uagucugaccaagucagag

SEQ ID NO: 2086756 - RNA, 19 nt, Artificial Sequence
  Description of Artificial Sequence: Synthetic oligonucleotide
  Sense strand starting at position 429 of SEQ ID NO: 1881991
uggucagacuaagaaauca

SEQ ID NO: 2086757 - RNA, 19 nt, Artificial Sequence
  Description of Artificial Sequence: Synthetic oligonucleotide
  Antisense strand to SEQ ID NO: 2086756
ugauuucuuagucugacca

SEQ ID NO: 2086758 - RNA, 19 nt, Artificial Sequence
  Description of Artificial Sequence: Synthetic oligonucleotide
  Sense strand starting at position 476 of SEQ ID NO: 1881991
gcgaaauccugucucuagg

SEQ ID NO: 2086759 - RNA, 19 nt, Artificial Sequence
  Description of Artificial Sequence: Synthetic oligonucleotide
  Antisense strand to SEQ ID NO: 2086758
ccuagagacaggauuucgc

SEQ ID NO: 2086760 - RNA, 19 nt, Artificial Sequence
  Description of Artificial Sequence: Synthetic oligonucleotide
  Sense strand starting at position 478 of SEQ ID NO: 1881991
gaaauccugucucuaggaa

SEQ ID NO: 2086761 - RNA, 19 nt, Artificial Sequence
  Description of Artificial Sequence: Synthetic oligonucleotide
  Antisense strand to SEQ ID NO: 2086760
uuccuagagacaggauuuc

SEQ ID NO: 2086762 - RNA, 19 nt, Artificial Sequence
  Description of Artificial Sequence: Synthetic oligonucleotide
  Sense strand starting at position 734 of SEQ ID NO: 1881991
gcuaaacagugacuuccua

SEQ ID NO: 2086763 - RNA, 19 nt, Artificial Sequence
  Description of Artificial Sequence: Synthetic oligonucleotide
  Antisense strand to SEQ ID NO: 2086762
uaggaagucacuguuuagc

SEQ ID NO: 2086764 - RNA, 19 nt, Artificial Sequence
  Description of Artificial Sequence: Synthetic oligonucleotide
  Sense strand starting at position 741 of SEQ ID NO: 1881991
agugacuuccuaggaccaa

SEQ ID NO: 2086765 - RNA, 19 nt, Artificial Sequence
  Description of Artificial Sequence: Synthetic oligonucleotide
  Antisense strand to SEQ ID NO: 2086764
uugguccuaggaagucacu

SEQ ID NO: 2086766 - RNA, 19 nt, Artificial Sequence
  Description of Artificial Sequence: Synthetic oligonucleotide
  Sense strand starting at position 797 of SEQ ID NO: 1881991
ggacuugcuuaggcugaga

SEQ ID NO: 2086767 - RNA, 19 nt, Artificial Sequence
  Description of Artificial Sequence: Synthetic oligonucleotide
  Antisense strand to SEQ ID NO: 2086766
ucucagccuaagcaagucc

SEQ ID NO: 2086768 - RNA, 19 nt, Artificial Sequence
  Description of Artificial Sequence: Synthetic oligonucleotide
  Sense strand starting at position 799 of SEQ ID NO: 1881991
acuugcuuaggcugagaaa

SEQ ID NO: 2086769 - RNA, 19 nt, Artificial Sequence
  Description of Artificial Sequence: Synthetic oligonucleotide
  Antisense strand to SEQ ID NO: 2086768
uuucucagccuaagcaagu

SEQ ID NO: 2086770 - RNA, 19 nt, Artificial Sequence
  Description of Artificial Sequence: Synthetic oligonucleotide
  Sense strand starting at position 800 of SEQ ID NO: 1881991
cuugcuuaggcugagaaau

SEQ ID NO: 2086771 - RNA, 19 nt, Artificial Sequence
  Description of Artificial Sequence: Synthetic oligonucleotide
  Antisense strand to SEQ ID NO: 2086770
auuucucagccuaagcaag

SEQ ID NO: 2086772 - RNA, 19 nt, Artificial Sequence
  Description of Artificial Sequence: Synthetic oligonucleotide
  Sense strand starting at position 828 of SEQ ID NO: 1881991
gcuaguuauuuggacaaga

SEQ ID NO: 2086773 - RNA, 19 nt, Artificial Sequence
  Description of Artificial Sequence: Synthetic oligonucleotide
  Antisense strand to SEQ ID NO: 2086772
ucuuguccaaauaacuagc

SEQ ID NO: 2086774 - RNA, 19 nt, Artificial Sequence
  Description of Artificial Sequence: Synthetic oligonucleotide
  Sense strand starting at position 1339 of SEQ ID NO: 1881991
agguucugcgaccgagaaa

SEQ ID NO: 2086775 - RNA, 19 nt, Artificial Sequence
  Description of Artificial Sequence: Synthetic oligonucleotide
  Antisense strand to SEQ ID NO: 2086774
uuucucggucgcagaaccu

SEQ ID NO: 2086776 - RNA, 19 nt, Artificial Sequence
  Description of Artificial Sequence: Synthetic oligonucleotide
  Sense strand starting at position 1340 of SEQ ID NO: 1881991
gguucugcgaccgagaaau

SEQ ID NO: 2086777 - RNA, 19 nt, Artificial Sequence
  Description of Artificial Sequence: Synthetic oligonucleotide
  Antisense strand to SEQ ID NO: 2086776
auuucucggucgcagaacc

SEQ ID NO: 2086778 - RNA, 19 nt, Artificial Sequence
  Description of Artificial Sequence: Synthetic oligonucleotide
  Sense strand starting at position 1350 of SEQ ID NO: 1881991
ccgagaaauucggugcaac

SEQ ID NO: 2086779 - RNA, 19 nt, Artificial Sequence
  Description of Artificial Sequence: Synthetic oligonucleotide
  Antisense strand to SEQ ID NO: 2086778
guugcaccgaauuucucgg

SEQ ID NO: 2086780 - RNA, 19 nt, Artificial Sequence
  Description of Artificial Sequence: Synthetic oligonucleotide
  Sense strand starting at position 1351 of SEQ ID NO: 1881991
cgagaaauucggugcaaca

SEQ ID NO: 2086781 - RNA, 19 nt, Artificial Sequence
  Description of Artificial Sequence: Synthetic oligonucleotide
  Antisense strand to SEQ ID NO: 2086780
uguugcaccgaauuucucg

SEQ ID NO: 2086782 - RNA, 19 nt, Artificial Sequence
  Description of Artificial Sequence: Synthetic oligonucleotide
  Sense strand starting at position 1365 of SEQ ID NO: 1881991
caacaagugcugugacaga

SEQ ID NO: 2086783 - RNA, 19 nt, Artificial Sequence
  Description of Artificial Sequence: Synthetic oligonucleotide
  Antisense strand to SEQ ID NO: 2086782
ucugucacagcacuuguug

SEQ ID NO: 2086784 - RNA, 19 nt, Artificial Sequence
  Description of Artificial Sequence: Synthetic oligonucleotide
  Sense strand starting at position 2425 of SEQ ID NO: 1881991
ugaugucuucuccaucuuu

SEQ ID NO: 2086785 - RNA, 19 nt, Artificial Sequence
  Description of Artificial Sequence: Synthetic oligonucleotide
  Antisense strand to SEQ ID NO: 2086784
aaagauggagaagacauca

SEQ ID NO: 2086786 - RNA, 19 nt, Artificial Sequence
  Description of Artificial Sequence: Synthetic oligonucleotide
  Sense strand starting at position 2443 of SEQ ID NO: 1881991
ugggaagugcaaugcaauu

SEQ ID NO: 2086787 - RNA, 19 nt, Artificial Sequence
  Description of Artificial Sequence: Synthetic oligonucleotide
  Antisense strand to SEQ ID NO: 2086786
aauugcauugcacuuccca

SEQ ID NO: 2086788 - RNA, 19 nt, Artificial Sequence
  Description of Artificial Sequence: Synthetic oligonucleotide
  Sense strand starting at position 2937 of SEQ ID NO: 1881991
gaaagagggcagugucaau

SEQ ID NO: 2086789 - RNA, 19 nt, Artificial Sequence
  Description of Artificial Sequence: Synthetic oligonucleotide
  Antisense strand to SEQ ID NO: 2086788
auugacacugcccucuuuc

SEQ ID NO: 2086790 - RNA, 19 nt, Artificial Sequence
  Description of Artificial Sequence: Synthetic oligonucleotide
  Sense strand starting at position 3145 of SEQ ID NO: 1881991
ggagcuuacuucccuaaag

SEQ ID NO: 2086791 - RNA, 19 nt, Artificial Sequence
  Description of Artificial Sequence: Synthetic oligonucleotide
  Antisense strand to SEQ ID NO: 2086790
cuuuagggaaguaagcucc

SEQ ID NO: 2086792 - RNA, 19 nt, Artificial Sequence
  Description of Artificial Sequence: Synthetic oligonucleotide
  Sense strand starting at position 3147 of SEQ ID NO: 1881991
agcuuacuucccuaaagga

SEQ ID NO: 2086793 - RNA, 19 nt, Artificial Sequence
  Description of Artificial Sequence: Synthetic oligonucleotide
  Antisense strand to SEQ ID NO: 2086792
uccuuuagggaaguaagcu

SEQ ID NO: 2086794 - RNA, 19 nt, Artificial Sequence
  Description of Artificial Sequence: Synthetic oligonucleotide
  Sense strand starting at position 3197 of SEQ ID NO: 1881991
gucugauuccaauauggug

SEQ ID NO: 2086795 - RNA, 19 nt, Artificial Sequence
  Description of Artificial Sequence: Synthetic oligonucleotide
  Antisense strand to SEQ ID NO: 2086794
caccauauuggaaucagac

SEQ ID NO: 2086796 - RNA, 19 nt, Artificial Sequence
  Description of Artificial Sequence: Synthetic oligonucleotide
  Sense strand starting at position 3253 of SEQ ID NO: 1881991
cuguauauuccucagcaag

SEQ ID NO: 2086797 - RNA, 19 nt, Artificial Sequence
  Description of Artificial Sequence: Synthetic oligonucleotide
  Antisense strand to SEQ ID NO: 2086796
cuugcugaggaauauacag

SEQ ID NO: 2086798 - RNA, 19 nt, Artificial Sequence
  Description of Artificial Sequence: Synthetic oligonucleotide
  Sense strand starting at position 3255 of SEQ ID NO: 1881991
guauauuccucagcaagag

SEQ ID NO: 2086799 - RNA, 19 nt, Artificial Sequence
  Description of Artificial Sequence: Synthetic oligonucleotide
  Antisense strand to SEQ ID NO: 2086798
cucuugcugaggaauauac

SEQ ID NO: 2086800 - RNA, 19 nt, Artificial Sequence
  Description of Artificial Sequence: Synthetic oligonucleotide
  Sense strand starting at position 3531 of SEQ ID NO: 1881991
ggugccuuccaucacgauu

SEQ ID NO: 2086801 - RNA, 19 nt, Artificial Sequence
  Description of Artificial Sequence: Synthetic oligonucleotide
  Antisense strand to SEQ ID NO: 2086800
aaucgugauggaaggcacc

SEQ ID NO: 2086802 - RNA, 19 nt, Artificial Sequence
  Description of Artificial Sequence: Synthetic oligonucleotide
  Sense strand starting at position 3660 of SEQ ID NO: 1881991
cuaauacagaugugguaga

SEQ ID NO: 2086803 - RNA, 19 nt, Artificial Sequence
  Description of Artificial Sequence: Synthetic oligonucleotide
  Antisense strand to SEQ ID NO: 2086802
ucuaccacaucuguauuag

SEQ ID NO: 2086804 - RNA, 19 nt, Artificial Sequence
  Description of Artificial Sequence: Synthetic oligonucleotide
  Sense strand starting at position 30 of SEQ ID NO: 1881992
ggaacaucuuacgaucaau

SEQ ID NO: 2086805 - RNA, 19 nt, Artificial Sequence
  Description of Artificial Sequence: Synthetic oligonucleotide
  Antisense strand to SEQ ID NO: 2086804
auugaucguaagauguucc

SEQ ID NO: 2086806 - RNA, 19 nt, Artificial Sequence
  Description of Artificial Sequence: Synthetic oligonucleotide
  Sense strand starting at position 330 of SEQ ID NO: 1881992
ucauuucuauucuggguau

SEQ ID NO: 2086807 - RNA, 19 nt, Artificial Sequence
  Description of Artificial Sequence: Synthetic oligonucleotide
  Antisense strand to SEQ ID NO: 2086806
auacccagaauagaaauga

SEQ ID NO: 2086808 - RNA, 19 nt, Artificial Sequence
  Description of Artificial Sequence: Synthetic oligonucleotide
  Sense strand starting at position 387 of SEQ ID NO: 1881992
cuugcuauguuauuuguau

SEQ ID NO: 2086809 - RNA, 19 nt, Artificial Sequence
  Description of Artificial Sequence: Synthetic oligonucleotide
  Antisense strand to SEQ ID NO: 2086808
auacaaauaacauagcaag

SEQ ID NO: 2086810 - RNA, 19 nt, Artificial Sequence
  Description of Artificial Sequence: Synthetic oligonucleotide
  Sense strand starting at position 462 of SEQ ID NO: 1881992
caggaugucucauacacag

SEQ ID NO: 2086811 - RNA, 19 nt, Artificial Sequence
  Description of Artificial Sequence: Synthetic oligonucleotide
  Antisense strand to SEQ ID NO: 2086810
cuguguaugagacauccug

SEQ ID NO: 2086812 - RNA, 19 nt, Artificial Sequence
  Description of Artificial Sequence: Synthetic oligonucleotide
  Sense strand starting at position 561 of SEQ ID NO: 1881992
ucugaauagucaccuuuag

SEQ ID NO: 2086813 - RNA, 19 nt, Artificial Sequence
  Description of Artificial Sequence: Synthetic oligonucleotide
  Antisense strand to SEQ ID NO: 2086812
cuaaaggugacuauucaga

SEQ ID NO: 2086814 - RNA, 19 nt, Artificial Sequence
  Description of Artificial Sequence: Synthetic oligonucleotide
  Sense strand starting at position 776 of SEQ ID NO: 1881992
cuccgcauguaacuuuaua

SEQ ID NO: 2086815 - RNA, 19 nt, Artificial Sequence
  Description of Artificial Sequence: Synthetic oligonucleotide
  Antisense strand to SEQ ID NO: 2086814
uauaaaguuacaugcggag

SEQ ID NO: 2086816 - RNA, 19 nt, Artificial Sequence
  Description of Artificial Sequence: Synthetic oligonucleotide
  Sense strand starting at position 812 of SEQ ID NO: 1881992
guaugcugggaccaguaaa

SEQ ID NO: 2086817 - RNA, 19 nt, Artificial Sequence
  Description of Artificial Sequence: Synthetic oligonucleotide
  Antisense strand to SEQ ID NO: 2086816
uuuacuggucccagcauac

SEQ ID NO: 2086818 - RNA, 19 nt, Artificial Sequence
  Description of Artificial Sequence: Synthetic oligonucleotide
  Sense strand starting at position 823 of SEQ ID NO: 1881992
ccaguaaagaucuggguaa

SEQ ID NO: 2086819 - RNA, 19 nt, Artificial Sequence
  Description of Artificial Sequence: Synthetic oligonucleotide
  Antisense strand to SEQ ID NO: 2086818
uuacccagaucuuuacugg

SEQ ID NO: 2086820 - RNA, 19 nt, Artificial Sequence
  Description of Artificial Sequence: Synthetic oligonucleotide
  Sense strand starting at position 1059 of SEQ ID NO: 1881992
acuucuuaucagcacagga

SEQ ID NO: 2086821 - RNA, 19 nt, Artificial Sequence
  Description of Artificial Sequence: Synthetic oligonucleotide
  Antisense strand to SEQ ID NO: 2086820
uccugugcugauaagaagu

SEQ ID NO: 2086822 - RNA, 19 nt, Artificial Sequence
  Description of Artificial Sequence: Synthetic oligonucleotide
  Sense strand starting at position 1061 of SEQ ID NO: 1881992
uucuuaucagcacaggauu

SEQ ID NO: 2086823 - RNA, 19 nt, Artificial Sequence
  Description of Artificial Sequence: Synthetic oligonucleotide
  Antisense strand to SEQ ID NO: 2086822
aauccugugcugauaagaa

SEQ ID NO: 2086824 - RNA, 19 nt, Artificial Sequence
  Description of Artificial Sequence: Synthetic oligonucleotide
  Sense strand starting at position 2062 of SEQ ID NO: 1881992
agcagaaagcucuggucuu

SEQ ID NO: 2086825 - RNA, 19 nt, Artificial Sequence
  Description of Artificial Sequence: Synthetic oligonucleotide
  Antisense strand to SEQ ID NO: 2086824
aagaccagagcuuucugcu

SEQ ID NO: 2086826 - RNA, 19 nt, Artificial Sequence
  Description of Artificial Sequence: Synthetic oligonucleotide
  Sense strand starting at position 2101 of SEQ ID NO: 1881992
uggugagcuugucccauga

SEQ ID NO: 2086827 - RNA, 19 nt, Artificial Sequence
  Description of Artificial Sequence: Synthetic oligonucleotide
  Antisense strand to SEQ ID NO: 2086826
ucaugggacaagcucacca

SEQ ID NO: 2086828 - RNA, 19 nt, Artificial Sequence
  Description of Artificial Sequence: Synthetic oligonucleotide
  Sense strand starting at position 2483 of SEQ ID NO: 1881992
ccaggacaguuuguaaaug

SEQ ID NO: 2086829 - RNA, 19 nt, Artificial Sequence
  Description of Artificial Sequence: Synthetic oligonucleotide
  Antisense strand to SEQ ID NO: 2086828
cauuuacaaacuguccugg

SEQ ID NO: 2086830 - RNA, 19 nt, Artificial Sequence
  Description of Artificial Sequence: Synthetic oligonucleotide
  Sense strand starting at position 2705 of SEQ ID NO: 1881992
ccugaauucuuuccugagu

SEQ ID NO: 2086831 - RNA, 19 nt, Artificial Sequence
  Description of Artificial Sequence: Synthetic oligonucleotide
  Antisense strand to SEQ ID NO: 2086830
acucaggaaagaauucagg

SEQ ID NO: 2086832 - RNA, 19 nt, Artificial Sequence
  Description of Artificial Sequence: Synthetic oligonucleotide
  Sense strand starting at position 2777 of SEQ ID NO: 1881992
guauuacaugcacaugauu

SEQ ID NO: 2086833 - RNA, 19 nt, Artificial Sequence
  Description of Artificial Sequence: Synthetic oligonucleotide
  Antisense strand to SEQ ID NO: 2086832
aaucaugugcauguaauac

SEQ ID NO: 2086834 - RNA, 19 nt, Artificial Sequence
  Description of Artificial Sequence: Synthetic oligonucleotide
  Sense strand starting at position 2782 of SEQ ID NO: 1881992
acaugcacaugauuguaaa

SEQ ID NO: 2086835 - RNA, 19 nt, Artificial Sequence
  Description of Artificial Sequence: Synthetic oligonucleotide
  Antisense strand to SEQ ID NO: 2086834
uuuacaaucaugugcaugu

SEQ ID NO: 2086836 - RNA, 19 nt, Artificial Sequence
  Description of Artificial Sequence: Synthetic oligonucleotide
  Sense strand starting at position 2879 of SEQ ID NO: 1881992
aguggcuucuugcuggaga

SEQ ID NO: 2086837 - RNA, 19 nt, Artificial Sequence
  Description of Artificial Sequence: Synthetic oligonucleotide
  Antisense strand to SEQ ID NO: 2086836
ucuccagcaagaagccacu

SEQ ID NO: 2086838 - RNA, 19 nt, Artificial Sequence
  Description of Artificial Sequence: Synthetic oligonucleotide
  Sense strand starting at position 2881 of SEQ ID NO: 1881992
uggcuucuugcuggagaaa

SEQ ID NO: 2086839 - RNA, 19 nt, Artificial Sequence
  Description of Artificial Sequence: Synthetic oligonucleotide
  Antisense strand to SEQ ID NO: 2086838
uuucuccagcaagaagcca

SEQ ID NO: 2086840 - RNA, 19 nt, Artificial Sequence
  Description of Artificial Sequence: Synthetic oligonucleotide
  Sense strand starting at position 2968 of SEQ ID NO: 1881992
gugaguaguagugguaaau

SEQ ID NO: 2086841 - RNA, 19 nt, Artificial Sequence
  Description of Artificial Sequence: Synthetic oligonucleotide
  Antisense strand to SEQ ID NO: 2086840
auuuaccacuacuacucac

SEQ ID NO: 2086842 - RNA, 19 nt, Artificial Sequence
  Description of Artificial Sequence: Synthetic oligonucleotide
  Sense strand starting at position 2974 of SEQ ID NO: 1881992
aguagugguaaauguguuu

SEQ ID NO: 2086843 - RNA, 19 nt, Artificial Sequence
  Description of Artificial Sequence: Synthetic oligonucleotide
  Antisense strand to SEQ ID NO: 2086842
aaacacauuuaccacuacu

SEQ ID NO: 2086844 - RNA, 19 nt, Artificial Sequence
  Description of Artificial Sequence: Synthetic oligonucleotide
  Sense strand starting at position 2977 of SEQ ID NO: 1881992
agugguaaauguguuuaaa

SEQ ID NO: 2086845 - RNA, 19 nt, Artificial Sequence
  Description of Artificial Sequence: Synthetic oligonucleotide
  Antisense strand to SEQ ID NO: 2086844
uuuaaacacauuuaccacu

SEQ ID NO: 2086846 - RNA, 19 nt, Artificial Sequence
  Description of Artificial Sequence: Synthetic oligonucleotide
  Sense strand starting at position 3164 of SEQ ID NO: 1881992
gguagauaggugugugcau

SEQ ID NO: 2086847 - RNA, 19 nt, Artificial Sequence
  Description of Artificial Sequence: Synthetic oligonucleotide
  Antisense strand to SEQ ID NO: 2086846
augcacacaccuaucuacc

SEQ ID NO: 2086848 - RNA, 19 nt, Artificial Sequence
  Description of Artificial Sequence: Synthetic oligonucleotide
  Sense strand starting at position 3165 of SEQ ID NO: 1881992
guagauaggugugugcaua

SEQ ID NO: 2086849 - RNA, 19 nt, Artificial Sequence
  Description of Artificial Sequence: Synthetic oligonucleotide
  Antisense strand to SEQ ID NO: 2086848
uaugcacacaccuaucuac

SEQ ID NO: 2086850 - RNA, 19 nt, Artificial Sequence
  Description of Artificial Sequence: Synthetic oligonucleotide
  Sense strand starting at position 3166 of SEQ ID NO: 1881992
uagauaggugugugcauaa

SEQ ID NO: 2086851 - RNA, 19 nt, Artificial Sequence
  Description of Artificial Sequence: Synthetic oligonucleotide
  Antisense strand to SEQ ID NO: 2086850
uuaugcacacaccuaucua

SEQ ID NO: 2086852 - RNA, 19 nt, Artificial Sequence
  Description of Artificial Sequence: Synthetic oligonucleotide
  Sense strand starting at position 3209 of SEQ ID NO: 1881992
gguagcauuccuuacacaa

SEQ ID NO: 2086853 - RNA, 19 nt, Artificial Sequence
  Description of Artificial Sequence: Synthetic oligonucleotide
  Antisense strand to SEQ ID NO: 2086852
uuguguaaggaaugcuacc

SEQ ID NO: 2086854 - RNA, 19 nt, Artificial Sequence
  Description of Artificial Sequence: Synthetic oligonucleotide
  Sense strand starting at position 3227 of SEQ ID NO: 1881992
acuugcuuccuaugguaaa

SEQ ID NO: 2086855 - RNA, 19 nt, Artificial Sequence
  Description of Artificial Sequence: Synthetic oligonucleotide
  Antisense strand to SEQ ID NO: 2086854
uuuaccauaggaagcaagu

SEQ ID NO: 2086856 - RNA, 19 nt, Artificial Sequence
  Description of Artificial Sequence: Synthetic oligonucleotide
  Sense strand starting at position 3301 of SEQ ID NO: 1881992
gguggcagucuuuauauga

SEQ ID NO: 2086857 - RNA, 19 nt, Artificial Sequence
  Description of Artificial Sequence: Synthetic oligonucleotide
  Antisense strand to SEQ ID NO: 2086856
ucauauaaagacugccacc

SEQ ID NO: 2086858 - RNA, 19 nt, Artificial Sequence
  Description of Artificial Sequence: Synthetic oligonucleotide
  Sense strand starting at position 3371 of SEQ ID NO: 1881992
agaacaauauugcagugaa

SEQ ID NO: 2086859 - RNA, 19 nt, Artificial Sequence
  Description of Artificial Sequence: Synthetic oligonucleotide
  Antisense strand to SEQ ID NO: 2086858
uucacugcaauauuguucu

SEQ ID NO: 2086860 - RNA, 19 nt, Artificial Sequence
  Description of Artificial Sequence: Synthetic oligonucleotide
  Sense strand starting at position 3374 of SEQ ID NO: 1881992
acaauauugcagugaauau

SEQ ID NO: 2086861 - RNA, 19 nt, Artificial Sequence
  Description of Artificial Sequence: Synthetic oligonucleotide
  Antisense strand to SEQ ID NO: 2086860
auauucacugcaauauugu

SEQ ID NO: 2086862 - RNA, 19 nt, Artificial Sequence
  Description of Artificial Sequence: Synthetic oligonucleotide
  Sense strand starting at position 3381 of SEQ ID NO: 1881992
ugcagugaauaucccuaua

SEQ ID NO: 2086863 - RNA, 19 nt, Artificial Sequence
  Description of Artificial Sequence: Synthetic oligonucleotide
  Antisense strand to SEQ ID NO: 2086862
uauagggauauucacugca

SEQ ID NO: 2086864 - RNA, 19 nt, Artificial Sequence
  Description of Artificial Sequence: Synthetic oligonucleotide
  Sense strand starting at position 3519 of SEQ ID NO: 1881992
gguacuaaaugaguacaca

SEQ ID NO: 2086865 - RNA, 19 nt, Artificial Sequence
  Description of Artificial Sequence: Synthetic oligonucleotide
  Antisense strand to SEQ ID NO: 2086864
uguguacucauuuaguacc

SEQ ID NO: 2086866 - RNA, 19 nt, Artificial Sequence
  Description of Artificial Sequence: Synthetic oligonucleotide
  Sense strand starting at position 3617 of SEQ ID NO: 1881992
accagaaauucuuggaaac

SEQ ID NO: 2086867 - RNA, 19 nt, Artificial Sequence
  Description of Artificial Sequence: Synthetic oligonucleotide
  Antisense strand to SEQ ID NO: 2086866
guuuccaagaauuucuggu

SEQ ID NO: 2086868 - RNA, 19 nt, Artificial Sequence
  Description of Artificial Sequence: Synthetic oligonucleotide
  Sense strand starting at position 3692 of SEQ ID NO: 1881992
gaaacuauuuggugucuag

SEQ ID NO: 2086869 - RNA, 19 nt, Artificial Sequence
  Description of Artificial Sequence: Synthetic oligonucleotide
  Antisense strand to SEQ ID NO: 2086868
cuagacaccaaauaguuuc

SEQ ID NO: 2086870 - RNA, 19 nt, Artificial Sequence
  Description of Artificial Sequence: Synthetic oligonucleotide
  Sense strand starting at position 3695 of SEQ ID NO: 1881992
acuauuuggugucuaguuu

SEQ ID NO: 2086871 - RNA, 19 nt, Artificial Sequence
  Description of Artificial Sequence: Synthetic oligonucleotide
  Antisense strand to SEQ ID NO: 2086870
aaacuagacaccaaauagu

SEQ ID NO: 2086872 - RNA, 19 nt, Artificial Sequence
  Description of Artificial Sequence: Synthetic oligonucleotide
  Sense strand starting at position 3818 of SEQ ID NO: 1881992
gcugcauacacugaggauu

SEQ ID NO: 2086873 - RNA, 19 nt, Artificial Sequence
  Description of Artificial Sequence: Synthetic oligonucleotide
  Antisense strand to SEQ ID NO: 2086872
aauccucaguguaugcagc

SEQ ID NO: 2086874 - RNA, 19 nt, Artificial Sequence
  Description of Artificial Sequence: Synthetic oligonucleotide
  Sense strand starting at position 3820 of SEQ ID NO: 1881992
ugcauacacugaggauuua

SEQ ID NO: 2086875 - RNA, 19 nt, Artificial Sequence
  Description of Artificial Sequence: Synthetic oligonucleotide
  Antisense strand to SEQ ID NO: 2086874
uaaauccucaguguaugca

SEQ ID NO: 2086876 - RNA, 19 nt, Artificial Sequence
  Description of Artificial Sequence: Synthetic oligonucleotide
  Sense strand starting at position 3898 of SEQ ID NO: 1881992
ucacaugacuaucauguga

SEQ ID NO: 2086877 - RNA, 19 nt, Artificial Sequence
  Description of Artificial Sequence: Synthetic oligonucleotide
  Antisense strand to SEQ ID NO: 2086876
ucacaugauagucauguga

SEQ ID NO: 2086878 - RNA, 19 nt, Artificial Sequence
  Description of Artificial Sequence: Synthetic oligonucleotide
  Sense strand starting at position 3903 of SEQ ID NO: 1881992
ugacuaucaugugacagag

SEQ ID NO: 2086879 - RNA, 19 nt, Artificial Sequence
  Description of Artificial Sequence: Synthetic oligonucleotide
  Antisense strand to SEQ ID NO: 2086878
cucugucacaugauaguca

SEQ ID NO: 2086880 - RNA, 19 nt, Artificial Sequence
  Description of Artificial Sequence: Synthetic oligonucleotide
  Sense strand starting at position 3937 of SEQ ID NO: 1881992
agauguuacugacucuaaa

SEQ ID NO: 2086881 - RNA, 19 nt, Artificial Sequence
  Description of Artificial Sequence: Synthetic oligonucleotide
  Antisense strand to SEQ ID NO: 2086880
uuuagagucaguaacaucu

SEQ ID NO: 2086882 - RNA, 19 nt, Artificial Sequence
  Description of Artificial Sequence: Synthetic oligonucleotide
  Sense strand starting at position 3960 of SEQ ID NO: 1881992
acacucugauucucaguau

SEQ ID NO: 2086883 - RNA, 19 nt, Artificial Sequence
  Description of Artificial Sequence: Synthetic oligonucleotide
  Antisense strand to SEQ ID NO: 2086882
auacugagaaucagagugu

SEQ ID NO: 2086884 - RNA, 19 nt, Artificial Sequence
  Description of Artificial Sequence: Synthetic oligonucleotide
  Sense strand starting at position 145 of SEQ ID NO: 1881993
guagucagguguucaauga

SEQ ID NO: 2086885 - RNA, 19 nt, Artificial Sequence
  Description of Artificial Sequence: Synthetic oligonucleotide
  Antisense strand to SEQ ID NO: 2086884
ucauugaacaccugacuac

SEQ ID NO: 2086886 - RNA, 19 nt, Artificial Sequence
  Description of Artificial Sequence: Synthetic oligonucleotide
  Sense strand starting at position 283 of SEQ ID NO: 1881993
ccaguauucgcacacugau

SEQ ID NO: 2086887 - RNA, 19 nt, Artificial Sequence
  Description of Artificial Sequence: Synthetic oligonucleotide
  Antisense strand to SEQ ID NO: 2086886
aucagugugcgaauacugg

SEQ ID NO: 2086888 - RNA, 19 nt, Artificial Sequence
  Description of Artificial Sequence: Synthetic oligonucleotide
  Sense strand starting at position 286 of SEQ ID NO: 1881993
guauucgcacacugauaag

SEQ ID NO: 2086889 - RNA, 19 nt, Artificial Sequence
  Description of Artificial Sequence: Synthetic oligonucleotide
  Antisense strand to SEQ ID NO: 2086888
cuuaucagugugcgaauac

SEQ ID NO: 2086890 - RNA, 19 nt, Artificial Sequence
  Description of Artificial Sequence: Synthetic oligonucleotide
  Sense strand starting at position 762 of SEQ ID NO: 1881993
ucagaaaguuauccacugu

SEQ ID NO: 2086891 - RNA, 19 nt, Artificial Sequence
  Description of Artificial Sequence: Synthetic oligonucleotide
  Antisense strand to SEQ ID NO: 2086890
acaguggauaacuuucuga

SEQ ID NO: 2086892 - RNA, 19 nt, Artificial Sequence
  Description of Artificial Sequence: Synthetic oligonucleotide
  Sense strand starting at position 768 of SEQ ID NO: 1881993
aguuauccacugugaacag

SEQ ID NO: 2086893 - RNA, 19 nt, Artificial Sequence
  Description of Artificial Sequence: Synthetic oligonucleotide
  Antisense strand to SEQ ID NO: 2086892
cuguucacaguggauaacu

SEQ ID NO: 2086894 - RNA, 19 nt, Artificial Sequence
  Description of Artificial Sequence: Synthetic oligonucleotide
  Sense strand starting at position 858 of SEQ ID NO: 1881993
gaagcucggugucugauau

SEQ ID NO: 2086895 - RNA, 19 nt, Artificial Sequence
  Description of Artificial Sequence: Synthetic oligonucleotide
  Antisense strand to SEQ ID NO: 2086894
auaucagacaccgagcuuc

SEQ ID NO: 2086896 - RNA, 19 nt, Artificial Sequence
  Description of Artificial Sequence: Synthetic oligonucleotide
  Sense strand starting at position 862 of SEQ ID NO: 1881993
cucggugucugauaucacu

SEQ ID NO: 2086897 - RNA, 19 nt, Artificial Sequence
  Description of Artificial Sequence: Synthetic oligonucleotide
  Antisense strand to SEQ ID NO: 2086896
agugauaucagacaccgag

SEQ ID NO: 2086898 - RNA, 19 nt, Artificial Sequence
  Description of Artificial Sequence: Synthetic oligonucleotide
  Sense strand starting at position 1222 of SEQ ID NO: 1881993
gccaucagucacuacaguu

SEQ ID NO: 2086899 - RNA, 19 nt, Artificial Sequence
  Description of Artificial Sequence: Synthetic oligonucleotide
  Antisense strand to SEQ ID NO: 2086898
aacuguagugacugauggc

SEQ ID NO: 2086900 - RNA, 19 nt, Artificial Sequence
  Description of Artificial Sequence: Synthetic oligonucleotide
  Sense strand starting at position 1240 of SEQ ID NO: 1881993
uucggacauucgguggaaa

SEQ ID NO: 2086901 - RNA, 19 nt, Artificial Sequence
  Description of Artificial Sequence: Synthetic oligonucleotide
  Antisense strand to SEQ ID NO: 2086900
uuuccaccgaauguccgaa

SEQ ID NO: 2086902 - RNA, 19 nt, Artificial Sequence
  Description of Artificial Sequence: Synthetic oligonucleotide
  Sense strand starting at position 1413 of SEQ ID NO: 1881993
cggcucuugaggcgagaaa

SEQ ID NO: 2086903 - RNA, 19 nt, Artificial Sequence
  Description of Artificial Sequence: Synthetic oligonucleotide
  Antisense strand to SEQ ID NO: 2086902
uuucucgccucaagagccg

SEQ ID NO: 2086904 - RNA, 19 nt, Artificial Sequence
  Description of Artificial Sequence: Synthetic oligonucleotide
  Sense strand starting at position 2026 of SEQ ID NO: 1881993
gcgcguuguccgggaugca

SEQ ID NO: 2086905 - RNA, 19 nt, Artificial Sequence
  Description of Artificial Sequence: Synthetic oligonucleotide
  Antisense strand to SEQ ID NO: 2086904
ugcaucccggacaacgcgc

SEQ ID NO: 2086906 - RNA, 19 nt, Artificial Sequence
  Description of Artificial Sequence: Synthetic oligonucleotide
  Sense strand starting at position 2226 of SEQ ID NO: 1881993
acuugugaucccugcgcuu

SEQ ID NO: 2086907 - RNA, 19 nt, Artificial Sequence
  Description of Artificial Sequence: Synthetic oligonucleotide
  Antisense strand to SEQ ID NO: 2086906
aagcgcagggaucacaagu

SEQ ID NO: 2086908 - RNA, 19 nt, Artificial Sequence
  Description of Artificial Sequence: Synthetic oligonucleotide
  Sense strand starting at position 2853 of SEQ ID NO: 1881993
gcacaauucgcgugggaag

SEQ ID NO: 2086909 - RNA, 19 nt, Artificial Sequence
  Description of Artificial Sequence: Synthetic oligonucleotide
  Antisense strand to SEQ ID NO: 2086908
cuucccacgcgaauugugc

SEQ ID NO: 2086910 - RNA, 19 nt, Artificial Sequence
  Description of Artificial Sequence: Synthetic oligonucleotide
  Sense strand starting at position 2880 of SEQ ID NO: 1881993
gcagcauucuccguugucu

SEQ ID NO: 2086911 - RNA, 19 nt, Artificial Sequence
  Description of Artificial Sequence: Synthetic oligonucleotide
  Antisense strand to SEQ ID NO: 2086910
agacaacggagaaugcugc

SEQ ID NO: 2086912 - RNA, 19 nt, Artificial Sequence
  Description of Artificial Sequence: Synthetic oligonucleotide
  Sense strand starting at position 3073 of SEQ ID NO: 1881993
gacacaguucuguggugga

SEQ ID NO: 2086913 - RNA, 19 nt, Artificial Sequence
  Description of Artificial Sequence: Synthetic oligonucleotide
  Antisense strand to SEQ ID NO: 2086912
uccaccacagaacuguguc

SEQ ID NO: 2086914 - RNA, 19 nt, Artificial Sequence
  Description of Artificial Sequence: Synthetic oligonucleotide
  Sense strand starting at position 3326 of SEQ ID NO: 1881993
uaggguugucucugaauau

SEQ ID NO: 2086915 - RNA, 19 nt, Artificial Sequence
  Description of Artificial Sequence: Synthetic oligonucleotide
  Antisense strand to SEQ ID NO: 2086914
auauucagagacaacccua

SEQ ID NO: 2086916 - RNA, 19 nt, Artificial Sequence
  Description of Artificial Sequence: Synthetic oligonucleotide
  Sense strand starting at position 3579 of SEQ ID NO: 1881993
guguguccuuucuccuaaa

SEQ ID NO: 2086917 - RNA, 19 nt, Artificial Sequence
  Description of Artificial Sequence: Synthetic oligonucleotide
  Antisense strand to SEQ ID NO: 2086916
uuuaggagaaaggacacac

SEQ ID NO: 2086918 - RNA, 19 nt, Artificial Sequence
  Description of Artificial Sequence: Synthetic oligonucleotide
  Sense strand starting at position 3652 of SEQ ID NO: 1881993
uaggaaacaucguuccaug

SEQ ID NO: 2086919 - RNA, 19 nt, Artificial Sequence
  Description of Artificial Sequence: Synthetic oligonucleotide
  Antisense strand to SEQ ID NO: 2086918
cauggaacgauguuuccua

SEQ ID NO: 2086920 - RNA, 19 nt, Artificial Sequence
  Description of Artificial Sequence: Synthetic oligonucleotide
  Sense strand starting at position 3655 of SEQ ID NO: 1881993
gaaacaucguuccaugacu

SEQ ID NO: 2086921 - RNA, 19 nt, Artificial Sequence
  Description of Artificial Sequence: Synthetic oligonucleotide
  Antisense strand to SEQ ID NO: 2086920
agucauggaacgauguuuc

SEQ ID NO: 2086922 - RNA, 19 nt, Artificial Sequence
  Description of Artificial Sequence: Synthetic oligonucleotide
  Sense strand starting at position 3660 of SEQ ID NO: 1881993
aucguuccaugacucauua

SEQ ID NO: 2086923 - RNA, 19 nt, Artificial Sequence
  Description of Artificial Sequence: Synthetic oligonucleotide
  Antisense strand to SEQ ID NO: 2086922
uaaugagucauggaacgau

SEQ ID NO: 2086924 - RNA, 19 nt, Artificial Sequence
  Description of Artificial Sequence: Synthetic oligonucleotide
  Sense strand starting at position 3668 of SEQ ID NO: 1881993
augacucauuaguggagua

SEQ ID NO: 2086925 - RNA, 19 nt, Artificial Sequence
  Description of Artificial Sequence: Synthetic oligonucleotide
  Antisense strand to SEQ ID NO: 2086924
uacuccacuaaugagucau

SEQ ID NO: 2086926 - RNA, 19 nt, Artificial Sequence
  Description of Artificial Sequence: Synthetic oligonucleotide
  Sense strand starting at position 3670 of SEQ ID NO: 1881993
gacucauuaguggaguacu

SEQ ID NO: 2086927 - RNA, 19 nt, Artificial Sequence
  Description of Artificial Sequence: Synthetic oligonucleotide
  Antisense strand to SEQ ID NO: 2086926
aguacuccacuaaugaguc

SEQ ID NO: 2086928 - RNA, 19 nt, Artificial Sequence
  Description of Artificial Sequence: Synthetic oligonucleotide
  Sense strand starting at position 3673 of SEQ ID NO: 1881993
ucauuaguggaguacuaua

SEQ ID NO: 2086929 - RNA, 19 nt, Artificial Sequence
  Description of Artificial Sequence: Synthetic oligonucleotide
  Antisense strand to SEQ ID NO: 2086928
uauaguacuccacuaauga

SEQ ID NO: 2086930 - RNA, 19 nt, Artificial Sequence
  Description of Artificial Sequence: Synthetic oligonucleotide
  Sense strand starting at position 4 of SEQ ID NO: 1881994
agcagaacacauuggaauu

SEQ ID NO: 2086931 - RNA, 19 nt, Artificial Sequence
  Description of Artificial Sequence: Synthetic oligonucleotide
  Antisense strand to SEQ ID NO: 2086930
aauuccaauguguucugcu

SEQ ID NO: 2086932 - RNA, 19 nt, Artificial Sequence
  Description of Artificial Sequence: Synthetic oligonucleotide
  Sense strand starting at position 15 of SEQ ID NO: 1881994
uuggaauuauuggcuauau

SEQ ID NO: 2086933 - RNA, 19 nt, Artificial Sequence
  Description of Artificial Sequence: Synthetic oligonucleotide
  Antisense strand to SEQ ID NO: 2086932
auauagccaauaauuccaa

SEQ ID NO: 2086934 - RNA, 19 nt, Artificial Sequence
  Description of Artificial Sequence: Synthetic oligonucleotide
  Sense strand starting at position 98 of SEQ ID NO: 1881994
ugacuuuauugaucuagua

SEQ ID NO: 2086935 - RNA, 19 nt, Artificial Sequence
  Description of Artificial Sequence: Synthetic oligonucleotide
  Antisense strand to SEQ ID NO: 2086934
uacuagaucaauaaaguca

SEQ ID NO: 2086936 - RNA, 19 nt, Artificial Sequence
  Description of Artificial Sequence: Synthetic oligonucleotide
  Sense strand starting at position 151 of SEQ ID NO: 1881994
auacaugguucccuuacau

SEQ ID NO: 2086937 - RNA, 19 nt, Artificial Sequence
  Description of Artificial Sequence: Synthetic oligonucleotide
  Antisense strand to SEQ ID NO: 2086936
auguaagggaaccauguau

SEQ ID NO: 2086938 - RNA, 19 nt, Artificial Sequence
  Description of Artificial Sequence: Synthetic oligonucleotide
  Sense strand starting at position 571 of SEQ ID NO: 1881994
uagguauuauaggcaaagu

SEQ ID NO: 2086939 - RNA, 19 nt, Artificial Sequence
  Description of Artificial Sequence: Synthetic oligonucleotide
  Antisense strand to SEQ ID NO: 2086938
acuuugccuauaauaccua

SEQ ID NO: 2086940 - RNA, 19 nt, Artificial Sequence
  Description of Artificial Sequence: Synthetic oligonucleotide
  Sense strand starting at position 572 of SEQ ID NO: 1881994
agguauuauaggcaaagua

SEQ ID NO: 2086941 - RNA, 19 nt, Artificial Sequence
  Description of Artificial Sequence: Synthetic oligonucleotide
  Antisense strand to SEQ ID NO: 2086940
uacuuugccuauaauaccu

SEQ ID NO: 2086942 - RNA, 19 nt, Artificial Sequence
  Description of Artificial Sequence: Synthetic oligonucleotide
  Sense strand starting at position 593 of SEQ ID NO: 1881994
augagaaauccuugguuug

SEQ ID NO: 2086943 - RNA, 19 nt, Artificial Sequence
  Description of Artificial Sequence: Synthetic oligonucleotide
  Antisense strand to SEQ ID NO: 2086942
caaaccaaggauuucucau

SEQ ID NO: 2086944 - RNA, 19 nt, Artificial Sequence
  Description of Artificial Sequence: Synthetic oligonucleotide
  Sense strand starting at position 594 of SEQ ID NO: 1881994
ugagaaauccuugguuugg

SEQ ID NO: 2086945 - RNA, 19 nt, Artificial Sequence
  Description of Artificial Sequence: Synthetic oligonucleotide
  Antisense strand to SEQ ID NO: 2086944
ccaaaccaaggauuucuca

SEQ ID NO: 2086946 - RNA, 19 nt, Artificial Sequence
  Description of Artificial Sequence: Synthetic oligonucleotide
  Sense strand starting at position 608 of SEQ ID NO: 1881994
uuuggcuuccuagacuuga

SEQ ID NO: 2086947 - RNA, 19 nt, Artificial Sequence
  Description of Artificial Sequence: Synthetic oligonucleotide
  Antisense strand to SEQ ID NO: 2086946
ucaagucuaggaagccaaa

SEQ ID NO: 2086948 - RNA, 19 nt, Artificial Sequence
  Description of Artificial Sequence: Synthetic oligonucleotide
  Sense strand starting at position 617 of SEQ ID NO: 1881994
cuagacuugagucagguuu

SEQ ID NO: 2086949 - RNA, 19 nt, Artificial Sequence
  Description of Artificial Sequence: Synthetic oligonucleotide
  Antisense strand to SEQ ID NO: 2086948
aaaccugacucaagucuag

SEQ ID NO: 2086950 - RNA, 19 nt, Artificial Sequence
  Description of Artificial Sequence: Synthetic oligonucleotide
  Sense strand starting at position 744 of SEQ ID NO: 1881994
uuuaaugagauugggccua

SEQ ID NO: 2086951 - RNA, 19 nt, Artificial Sequence
  Description of Artificial Sequence: Synthetic oligonucleotide
  Antisense strand to SEQ ID NO: 2086950
uaggcccaaucucauuaaa

SEQ ID NO: 2086952 - RNA, 19 nt, Artificial Sequence
  Description of Artificial Sequence: Synthetic oligonucleotide
  Sense strand starting at position 746 of SEQ ID NO: 1881994
uaaugagauugggccuauu

SEQ ID NO: 2086953 - RNA, 19 nt, Artificial Sequence
  Description of Artificial Sequence: Synthetic oligonucleotide
  Antisense strand to SEQ ID NO: 2086952
aauaggcccaaucucauua

SEQ ID NO: 2086954 - RNA, 19 nt, Artificial Sequence
  Description of Artificial Sequence: Synthetic oligonucleotide
  Sense strand starting at position 786 of SEQ ID NO: 1881994
uuugaucaucuuugguaga

SEQ ID NO: 2086955 - RNA, 19 nt, Artificial Sequence
  Description of Artificial Sequence: Synthetic oligonucleotide
  Antisense strand to SEQ ID NO: 2086954
ucuaccaaagaugaucaaa

SEQ ID NO: 2086956 - RNA, 19 nt, Artificial Sequence
  Description of Artificial Sequence: Synthetic oligonucleotide
  Sense strand starting at position 810 of SEQ ID NO: 1881994
aggugacuguagguuuaaa

SEQ ID NO: 2086957 - RNA, 19 nt, Artificial Sequence
  Description of Artificial Sequence: Synthetic oligonucleotide
  Antisense strand to SEQ ID NO: 2086956
uuuaaaccuacagucaccu

SEQ ID NO: 2086958 - RNA, 19 nt, Artificial Sequence
  Description of Artificial Sequence: Synthetic oligonucleotide
  Sense strand starting at position 1809 of SEQ ID NO: 1881994
uguuguuacgcauucaugu

SEQ ID NO: 2086959 - RNA, 19 nt, Artificial Sequence
  Description of Artificial Sequence: Synthetic oligonucleotide
  Antisense strand to SEQ ID NO: 2086958
acaugaaugcguaacaaca

SEQ ID NO: 2086960 - RNA, 19 nt, Artificial Sequence
  Description of Artificial Sequence: Synthetic oligonucleotide
  Sense strand starting at position 1810 of SEQ ID NO: 1881994
guuguuacgcauucauguu

SEQ ID NO: 2086961 - RNA, 19 nt, Artificial Sequence
  Description of Artificial Sequence: Synthetic oligonucleotide
  Antisense strand to SEQ ID NO: 2086960
aacaugaaugcguaacaac

SEQ ID NO: 2086962 - RNA, 19 nt, Artificial Sequence
  Description of Artificial Sequence: Synthetic oligonucleotide
  Sense strand starting at position 2402 of SEQ ID NO: 1881994
ccaccuuaugacugagaau

SEQ ID NO: 2086963 - RNA, 19 nt, Artificial Sequence
  Description of Artificial Sequence: Synthetic oligonucleotide
  Antisense strand to SEQ ID NO: 2086962
auucucagucauaaggugg

SEQ ID NO: 2086964 - RNA, 19 nt, Artificial Sequence
  Description of Artificial Sequence: Synthetic oligonucleotide
  Sense strand starting at position 2703 of SEQ ID NO: 1881994
uauggauugcucuaauugu

SEQ ID NO: 2086965 - RNA, 19 nt, Artificial Sequence
  Description of Artificial Sequence: Synthetic oligonucleotide
  Antisense strand to SEQ ID NO: 2086964
acaauuagagcaauccaua

SEQ ID NO: 2086966 - RNA, 19 nt, Artificial Sequence
  Description of Artificial Sequence: Synthetic oligonucleotide
  Sense strand starting at position 2735 of SEQ ID NO: 1881994
ucuauuguuugucuggaaa

SEQ ID NO: 2086967 - RNA, 19 nt, Artificial Sequence
  Description of Artificial Sequence: Synthetic oligonucleotide
  Antisense strand to SEQ ID NO: 2086966
uuuccagacaaacaauaga

SEQ ID NO: 2086968 - RNA, 19 nt, Artificial Sequence
  Description of Artificial Sequence: Synthetic oligonucleotide
  Sense strand starting at position 2763 of SEQ ID NO: 1881994
uuaaaugccugauugauua

SEQ ID NO: 2086969 - RNA, 19 nt, Artificial Sequence
  Description of Artificial Sequence: Synthetic oligonucleotide
  Antisense strand to SEQ ID NO: 2086968
uaaucaaucaggcauuuaa

SEQ ID NO: 2086970 - RNA, 19 nt, Artificial Sequence
  Description of Artificial Sequence: Synthetic oligonucleotide
  Sense strand starting at position 2767 of SEQ ID NO: 1881994
augccugauugauuacacu

SEQ ID NO: 2086971 - RNA, 19 nt, Artificial Sequence
  Description of Artificial Sequence: Synthetic oligonucleotide
  Antisense strand to SEQ ID NO: 2086970
aguguaaucaaucaggcau

SEQ ID NO: 2086972 - RNA, 19 nt, Artificial Sequence
  Description of Artificial Sequence: Synthetic oligonucleotide
  Sense strand starting at position 2791 of SEQ ID NO: 1881994
gaggccuaacuuugguaga

SEQ ID NO: 2086973 - RNA, 19 nt, Artificial Sequence
  Description of Artificial Sequence: Synthetic oligonucleotide
  Antisense strand to SEQ ID NO: 2086972
ucuaccaaaguuaggccuc

SEQ ID NO: 2086974 - RNA, 19 nt, Artificial Sequence
  Description of Artificial Sequence: Synthetic oligonucleotide
  Sense strand starting at position 2793 of SEQ ID NO: 1881994
ggccuaacuuugguagaag

SEQ ID NO: 2086975 - RNA, 19 nt, Artificial Sequence
  Description of Artificial Sequence: Synthetic oligonucleotide
  Antisense strand to SEQ ID NO: 2086974
cuucuaccaaaguuaggcc

SEQ ID NO: 2086976 - RNA, 19 nt, Artificial Sequence
  Description of Artificial Sequence: Synthetic oligonucleotide
  Sense strand starting at position 2873 of SEQ ID NO: 1881994
ugaguuauuccuggaacug

SEQ ID NO: 2086977 - RNA, 19 nt, Artificial Sequence
  Description of Artificial Sequence: Synthetic oligonucleotide
  Antisense strand to SEQ ID NO: 2086976
caguuccaggaauaacuca

SEQ ID NO: 2086978 - RNA, 19 nt, Artificial Sequence
  Description of Artificial Sequence: Synthetic oligonucleotide
  Sense strand starting at position 2898 of SEQ ID NO: 1881994
gguucaauggguuaugcaa

SEQ ID NO: 2086979 - RNA, 19 nt, Artificial Sequence
  Description of Artificial Sequence: Synthetic oligonucleotide
  Antisense strand to SEQ ID NO: 2086978
uugcauaacccauugaacc

SEQ ID NO: 2086980 - RNA, 19 nt, Artificial Sequence
  Description of Artificial Sequence: Synthetic oligonucleotide
  Sense strand starting at position 2905 of SEQ ID NO: 1881994
uggguuaugcaauaaucuu

SEQ ID NO: 2086981 - RNA, 19 nt, Artificial Sequence
  Description of Artificial Sequence: Synthetic oligonucleotide
  Antisense strand to SEQ ID NO: 2086980
aagauuauugcauaaccca

SEQ ID NO: 2086982 - RNA, 19 nt, Artificial Sequence
  Description of Artificial Sequence: Synthetic oligonucleotide
  Sense strand starting at position 3418 of SEQ ID NO: 1881994
ugggaagguuacucucuga

SEQ ID NO: 2086983 - RNA, 19 nt, Artificial Sequence
  Description of Artificial Sequence: Synthetic oligonucleotide
  Antisense strand to SEQ ID NO: 2086982
ucagagaguaaccuuccca

SEQ ID NO: 2086984 - RNA, 19 nt, Artificial Sequence
  Description of Artificial Sequence: Synthetic oligonucleotide
  Sense strand starting at position 3421 of SEQ ID NO: 1881994
gaagguuacucucugaccu

SEQ ID NO: 2086985 - RNA, 19 nt, Artificial Sequence
  Description of Artificial Sequence: Synthetic oligonucleotide
  Antisense strand to SEQ ID NO: 2086984
aggucagagaguaaccuuc

SEQ ID NO: 2086986 - RNA, 19 nt, Artificial Sequence
  Description of Artificial Sequence: Synthetic oligonucleotide
  Sense strand starting at position 3511 of SEQ ID NO: 1881994
aagggacuuccuuguucuu

SEQ ID NO: 2086987 - RNA, 19 nt, Artificial Sequence
  Description of Artificial Sequence: Synthetic oligonucleotide
  Antisense strand to SEQ ID NO: 2086986
aagaacaaggaagucccuu

SEQ ID NO: 2086988 - RNA, 19 nt, Artificial Sequence
  Description of Artificial Sequence: Synthetic oligonucleotide
  Sense strand starting at position 3513 of SEQ ID NO: 1881994
gggacuuccuuguucuuga

SEQ ID NO: 2086989 - RNA, 19 nt, Artificial Sequence
  Description of Artificial Sequence: Synthetic oligonucleotide
  Antisense strand to SEQ ID NO: 2086988
ucaagaacaaggaaguccc

SEQ ID NO: 2086990 - RNA, 19 nt, Artificial Sequence
  Description of Artificial Sequence: Synthetic oligonucleotide
  Sense strand starting at position 3514 of SEQ ID NO: 1881994
ggacuuccuuguucuugaa

SEQ ID NO: 2086991 - RNA, 19 nt, Artificial Sequence
  Description of Artificial Sequence: Synthetic oligonucleotide
  Antisense strand to SEQ ID NO: 2086990
uucaagaacaaggaagucc

SEQ ID NO: 2086992 - RNA, 19 nt, Artificial Sequence
  Description of Artificial Sequence: Synthetic oligonucleotide
  Sense strand starting at position 3521 of SEQ ID NO: 1881994
cuuguucuugaaggcagaa

SEQ ID NO: 2086993 - RNA, 19 nt, Artificial Sequence
  Description of Artificial Sequence: Synthetic oligonucleotide
  Antisense strand to SEQ ID NO: 2086992
uucugccuucaagaacaag

SEQ ID NO: 2086994 - RNA, 19 nt, Artificial Sequence
  Description of Artificial Sequence: Synthetic oligonucleotide
  Sense strand starting at position 3610 of SEQ ID NO: 1881994
aucauacuucugcaugagu

SEQ ID NO: 2086995 - RNA, 19 nt, Artificial Sequence
  Description of Artificial Sequence: Synthetic oligonucleotide
  Antisense strand to SEQ ID NO: 2086994
acucaugcagaaguaugau

SEQ ID NO: 2086996 - RNA, 19 nt, Artificial Sequence
  Description of Artificial Sequence: Synthetic oligonucleotide
  Sense strand starting at position 3612 of SEQ ID NO: 1881994
cauacuucugcaugaguga

SEQ ID NO: 2086997 - RNA, 19 nt, Artificial Sequence
  Description of Artificial Sequence: Synthetic oligonucleotide
  Antisense strand to SEQ ID NO: 2086996
ucacucaugcagaaguaug

SEQ ID NO: 2086998 - RNA, 19 nt, Artificial Sequence
  Description of Artificial Sequence: Synthetic oligonucleotide
  Sense strand starting at position 3784 of SEQ ID NO: 1881994
auuggaaucuuggccauga

SEQ ID NO: 2086999 - RNA, 19 nt, Artificial Sequence
  Description of Artificial Sequence: Synthetic oligonucleotide
  Antisense strand to SEQ ID NO: 2086998
ucauggccaagauuccaau

SEQ ID NO: 2087000 - RNA, 19 nt, Artificial Sequence
  Description of Artificial Sequence: Synthetic oligonucleotide
  Sense strand starting at position 3785 of SEQ ID NO: 1881994
uuggaaucuuggccaugaa

SEQ ID NO: 2087001 - RNA, 19 nt, Artificial Sequence
  Description of Artificial Sequence: Synthetic oligonucleotide
  Antisense strand to SEQ ID NO: 2087000
uucauggccaagauuccaa

SEQ ID NO: 2087002 - RNA, 19 nt, Artificial Sequence
  Description of Artificial Sequence: Synthetic oligonucleotide
  Sense strand starting at position 3794 of SEQ ID NO: 1881994
uggccaugaaccuagaagu

SEQ ID NO: 2087003 - RNA, 19 nt, Artificial Sequence
  Description of Artificial Sequence: Synthetic oligonucleotide
  Antisense strand to SEQ ID NO: 2087002
acuucuagguucauggcca

SEQ ID NO: 2087004 - RNA, 19 nt, Artificial Sequence
  Description of Artificial Sequence: Synthetic oligonucleotide
  Sense strand starting at position 3965 of SEQ ID NO: 1881994
aguguagagaauuaguguu

SEQ ID NO: 2087005 - RNA, 19 nt, Artificial Sequence
  Description of Artificial Sequence: Synthetic oligonucleotide
  Antisense strand to SEQ ID NO: 2087004
aacacuaauucucuacacu

SEQ ID NO: 2087006 - RNA, 19 nt, Artificial Sequence
  Description of Artificial Sequence: Synthetic oligonucleotide
  Sense strand starting at position 3967 of SEQ ID NO: 1881994
uguagagaauuaguguuua

SEQ ID NO: 2087007 - RNA, 19 nt, Artificial Sequence
  Description of Artificial Sequence: Synthetic oligonucleotide
  Antisense strand to SEQ ID NO: 2087006
uaaacacuaauucucuaca

SEQ ID NO: 2087008 - RNA, 19 nt, Artificial Sequence
  Description of Artificial Sequence: Synthetic oligonucleotide
  Sense strand starting at position 3971 of SEQ ID NO: 1881994
gagaauuaguguuuacaca

SEQ ID NO: 2087009 - RNA, 19 nt, Artificial Sequence
  Description of Artificial Sequence: Synthetic oligonucleotide
  Antisense strand to SEQ ID NO: 2087008
uguguaaacacuaauucuc

SEQ ID NO: 2087010 - RNA, 19 nt, Artificial Sequence
  Description of Artificial Sequence: Synthetic oligonucleotide
  Sense strand starting at position 113 of SEQ ID NO: 1881995
ugcugacuuccugauacua

SEQ ID NO: 2087011 - RNA, 19 nt, Artificial Sequence
  Description of Artificial Sequence: Synthetic oligonucleotide
  Antisense strand to SEQ ID NO: 2087010
uaguaucaggaagucagca

SEQ ID NO: 2087012 - RNA, 19 nt, Artificial Sequence
  Description of Artificial Sequence: Synthetic oligonucleotide
  Sense strand starting at position 141 of SEQ ID NO: 1881995
aagaucugguugcuguaaa

SEQ ID NO: 2087013 - RNA, 19 nt, Artificial Sequence
  Description of Artificial Sequence: Synthetic oligonucleotide
  Antisense strand to SEQ ID NO: 2087012
uuuacagcaaccagaucuu

SEQ ID NO: 2087014 - RNA, 19 nt, Artificial Sequence
  Description of Artificial Sequence: Synthetic oligonucleotide
  Sense strand starting at position 198 of SEQ ID NO: 1881995
cuggccuuccaccaugaau

SEQ ID NO: 2087015 - RNA, 19 nt, Artificial Sequence
  Description of Artificial Sequence: Synthetic oligonucleotide
  Antisense strand to SEQ ID NO: 2087014
auucaugguggaaggccag

SEQ ID NO: 2087016 - RNA, 19 nt, Artificial Sequence
  Description of Artificial Sequence: Synthetic oligonucleotide
  Sense strand starting at position 200 of SEQ ID NO: 1881995
ggccuuccaccaugaauaa

SEQ ID NO: 2087017 - RNA, 19 nt, Artificial Sequence
  Description of Artificial Sequence: Synthetic oligonucleotide
  Antisense strand to SEQ ID NO: 2087016
uuauucaugguggaaggcc

SEQ ID NO: 2087018 - RNA, 19 nt, Artificial Sequence
  Description of Artificial Sequence: Synthetic oligonucleotide
  Sense strand starting at position 388 of SEQ ID NO: 1881995
ugugguaaauucuuccaau

SEQ ID NO: 2087019 - RNA, 19 nt, Artificial Sequence
  Description of Artificial Sequence: Synthetic oligonucleotide
  Antisense strand to SEQ ID NO: 2087018
auuggaagaauuuaccaca

SEQ ID NO: 2087020 - RNA, 19 nt, Artificial Sequence
  Description of Artificial Sequence: Synthetic oligonucleotide
  Sense strand starting at position 389 of SEQ ID NO: 1881995
gugguaaauucuuccaauu

SEQ ID NO: 2087021 - RNA, 19 nt, Artificial Sequence
  Description of Artificial Sequence: Synthetic oligonucleotide
  Antisense strand to SEQ ID NO: 2087020
aauuggaagaauuuaccac

SEQ ID NO: 2087022 - RNA, 19 nt, Artificial Sequence
  Description of Artificial Sequence: Synthetic oligonucleotide
  Sense strand starting at position 478 of SEQ ID NO: 1881995
gauugugaauaccuaugaa

SEQ ID NO: 2087023 - RNA, 19 nt, Artificial Sequence
  Description of Artificial Sequence: Synthetic oligonucleotide
  Antisense strand to SEQ ID NO: 2087022
uucauagguauucacaauc

SEQ ID NO: 2087024 - RNA, 19 nt, Artificial Sequence
  Description of Artificial Sequence: Synthetic oligonucleotide
  Sense strand starting at position 481 of SEQ ID NO: 1881995
ugugaauaccuaugaacuc

SEQ ID NO: 2087025 - RNA, 19 nt, Artificial Sequence
  Description of Artificial Sequence: Synthetic oligonucleotide
  Antisense strand to SEQ ID NO: 2087024
gaguucauagguauucaca

SEQ ID NO: 2087026 - RNA, 19 nt, Artificial Sequence
  Description of Artificial Sequence: Synthetic oligonucleotide
  Sense strand starting at position 745 of SEQ ID NO: 1881995
aguuguucuagugaaguca

SEQ ID NO: 2087027 - RNA, 19 nt, Artificial Sequence
  Description of Artificial Sequence: Synthetic oligonucleotide
  Antisense strand to SEQ ID NO: 2087026
ugacuucacuagaacaacu

SEQ ID NO: 2087028 - RNA, 19 nt, Artificial Sequence
  Description of Artificial Sequence: Synthetic oligonucleotide
  Sense strand starting at position 828 of SEQ ID NO: 1881995
ccaaguauguacuugggaa

SEQ ID NO: 2087029 - RNA, 19 nt, Artificial Sequence
  Description of Artificial Sequence: Synthetic oligonucleotide
  Antisense strand to SEQ ID NO: 2087028
uucccaaguacauacuugg

SEQ ID NO: 2087030 - RNA, 19 nt, Artificial Sequence
  Description of Artificial Sequence: Synthetic oligonucleotide
  Sense strand starting at position 1212 of SEQ ID NO: 1881995
auagcaaaguguccacaau

SEQ ID NO: 2087031 - RNA, 19 nt, Artificial Sequence
  Description of Artificial Sequence: Synthetic oligonucleotide
  Antisense strand to SEQ ID NO: 2087030
auuguggacacuuugcuau

SEQ ID NO: 2087032 - RNA, 19 nt, Artificial Sequence
  Description of Artificial Sequence: Synthetic oligonucleotide
  Sense strand starting at position 1252 of SEQ ID NO: 1881995
cagggacauugaucucuau

SEQ ID NO: 2087033 - RNA, 19 nt, Artificial Sequence
  Description of Artificial Sequence: Synthetic oligonucleotide
  Antisense strand to SEQ ID NO: 2087032
auagagaucaaugucccug

SEQ ID NO: 2087034 - RNA, 19 nt, Artificial Sequence
  Description of Artificial Sequence: Synthetic oligonucleotide
  Sense strand starting at position 1255 of SEQ ID NO: 1881995
ggacauugaucucuauauc

SEQ ID NO: 2087035 - RNA, 19 nt, Artificial Sequence
  Description of Artificial Sequence: Synthetic oligonucleotide
  Antisense strand to SEQ ID NO: 2087034
gauauagagaucaaugucc

SEQ ID NO: 2087036 - RNA, 19 nt, Artificial Sequence
  Description of Artificial Sequence: Synthetic oligonucleotide
  Sense strand starting at position 1349 of SEQ ID NO: 1881995
ucugauaugcuccauguuu

SEQ ID NO: 2087037 - RNA, 19 nt, Artificial Sequence
  Description of Artificial Sequence: Synthetic oligonucleotide
  Antisense strand to SEQ ID NO: 2087036
aaacauggagcauaucaga

SEQ ID NO: 2087038 - RNA, 19 nt, Artificial Sequence
  Description of Artificial Sequence: Synthetic oligonucleotide
  Sense strand starting at position 1478 of SEQ ID NO: 1881995
auuaguagcagauggguua

SEQ ID NO: 2087039 - RNA, 19 nt, Artificial Sequence
  Description of Artificial Sequence: Synthetic oligonucleotide
  Antisense strand to SEQ ID NO: 2087038
uaacccaucugcuacuaau

SEQ ID NO: 2087040 - RNA, 19 nt, Artificial Sequence
  Description of Artificial Sequence: Synthetic oligonucleotide
  Sense strand starting at position 1550 of SEQ ID NO: 1881995
cuguguugauuaguaucaa

SEQ ID NO: 2087041 - RNA, 19 nt, Artificial Sequence
  Description of Artificial Sequence: Synthetic oligonucleotide
  Antisense strand to SEQ ID NO: 2087040
uugauacuaaucaacacag

SEQ ID NO: 2087042 - RNA, 19 nt, Artificial Sequence
  Description of Artificial Sequence: Synthetic oligonucleotide
  Sense strand starting at position 1562 of SEQ ID NO: 1881995
guaucaaacuagcuuuaga

SEQ ID NO: 2087043 - RNA, 19 nt, Artificial Sequence
  Description of Artificial Sequence: Synthetic oligonucleotide
  Antisense strand to SEQ ID NO: 2087042
ucuaaagcuaguuugauac

SEQ ID NO: 2087044 - RNA, 19 nt, Artificial Sequence
  Description of Artificial Sequence: Synthetic oligonucleotide
  Sense strand starting at position 1598 of SEQ ID NO: 1881995
ggcaauagacuuuggcaaa

SEQ ID NO: 2087045 - RNA, 19 nt, Artificial Sequence
  Description of Artificial Sequence: Synthetic oligonucleotide
  Antisense strand to SEQ ID NO: 2087044
uuugccaaagucuauugcc

SEQ ID NO: 2087046 - RNA, 19 nt, Artificial Sequence
  Description of Artificial Sequence: Synthetic oligonucleotide
  Sense strand starting at position 1611 of SEQ ID NO: 1881995
ggcaaauuauuugaguaaa

SEQ ID NO: 2087047 - RNA, 19 nt, Artificial Sequence
  Description of Artificial Sequence: Synthetic oligonucleotide
  Antisense strand to SEQ ID NO: 2087046
uuuacucaaauaauuugcc

SEQ ID NO: 2087048 - RNA, 19 nt, Artificial Sequence
  Description of Artificial Sequence: Synthetic oligonucleotide
  Sense strand starting at position 1639 of SEQ ID NO: 1881995
gucagauaugucgaggcau

SEQ ID NO: 2087049 - RNA, 19 nt, Artificial Sequence
  Description of Artificial Sequence: Synthetic oligonucleotide
  Antisense strand to SEQ ID NO: 2087048
augccucgacauaucugac

SEQ ID NO: 2087050 - RNA, 19 nt, Artificial Sequence
  Description of Artificial Sequence: Synthetic oligonucleotide
  Sense strand starting at position 1862 of SEQ ID NO: 1881995
ggcccucuucgagaugaaa

SEQ ID NO: 2087051 - RNA, 19 nt, Artificial Sequence
  Description of Artificial Sequence: Synthetic oligonucleotide
  Antisense strand to SEQ ID NO: 2087050
uuucaucucgaagagggcc

SEQ ID NO: 2087052 - RNA, 19 nt, Artificial Sequence
  Description of Artificial Sequence: Synthetic oligonucleotide
  Sense strand starting at position 1864 of SEQ ID NO: 1881995
cccucuucgagaugaaagu

SEQ ID NO: 2087053 - RNA, 19 nt, Artificial Sequence
  Description of Artificial Sequence: Synthetic oligonucleotide
  Antisense strand to SEQ ID NO: 2087052
acuuucaucucgaagaggg

SEQ ID NO: 2087054 - RNA, 19 nt, Artificial Sequence
  Description of Artificial Sequence: Synthetic oligonucleotide
  Sense strand starting at position 1865 of SEQ ID NO: 1881995
ccucuucgagaugaaagua

SEQ ID NO: 2087055 - RNA, 19 nt, Artificial Sequence
  Description of Artificial Sequence: Synthetic oligonucleotide
  Antisense strand to SEQ ID NO: 2087054
uacuuucaucucgaagagg

SEQ ID NO: 2087056 - RNA, 19 nt, Artificial Sequence
  Description of Artificial Sequence: Synthetic oligonucleotide
  Sense strand starting at position 2613 of SEQ ID NO: 1881995
cugagaguccugggaaggu

SEQ ID NO: 2087057 - RNA, 19 nt, Artificial Sequence
  Description of Artificial Sequence: Synthetic oligonucleotide
  Antisense strand to SEQ ID NO: 2087056
accuucccaggacucucag

SEQ ID NO: 2087058 - RNA, 19 nt, Artificial Sequence
  Description of Artificial Sequence: Synthetic oligonucleotide
  Sense strand starting at position 2757 of SEQ ID NO: 1881995
cgcagaacuuggucauaau

SEQ ID NO: 2087059 - RNA, 19 nt, Artificial Sequence
  Description of Artificial Sequence: Synthetic oligonucleotide
  Antisense strand to SEQ ID NO: 2087058
auuaugaccaaguucugcg

SEQ ID NO: 2087060 - RNA, 19 nt, Artificial Sequence
  Description of Artificial Sequence: Synthetic oligonucleotide
  Sense strand starting at position 2918 of SEQ ID NO: 1881995
uuuaaugcuugagcuaaca

SEQ ID NO: 2087061 - RNA, 19 nt, Artificial Sequence
  Description of Artificial Sequence: Synthetic oligonucleotide
  Antisense strand to SEQ ID NO: 2087060
uguuagcucaagcauuaaa

SEQ ID NO: 2087062 - RNA, 19 nt, Artificial Sequence
  Description of Artificial Sequence: Synthetic oligonucleotide
  Sense strand starting at position 2972 of SEQ ID NO: 1881995
ugcucuuagguggacagaa

SEQ ID NO: 2087063 - RNA, 19 nt, Artificial Sequence
  Description of Artificial Sequence: Synthetic oligonucleotide
  Antisense strand to SEQ ID NO: 2087062
uucuguccaccuaagagca

SEQ ID NO: 2087064 - RNA, 19 nt, Artificial Sequence
  Description of Artificial Sequence: Synthetic oligonucleotide
  Sense strand starting at position 3010 of SEQ ID NO: 1881995
acuacaaguuggucacagu

SEQ ID NO: 2087065 - RNA, 19 nt, Artificial Sequence
  Description of Artificial Sequence: Synthetic oligonucleotide
  Antisense strand to SEQ ID NO: 2087064
acugugaccaacuuguagu

SEQ ID NO: 2087066 - RNA, 19 nt, Artificial Sequence
  Description of Artificial Sequence: Synthetic oligonucleotide
  Sense strand starting at position 3011 of SEQ ID NO: 1881995
cuacaaguuggucacaguu

SEQ ID NO: 2087067 - RNA, 19 nt, Artificial Sequence
  Description of Artificial Sequence: Synthetic oligonucleotide
  Antisense strand to SEQ ID NO: 2087066
aacugugaccaacuuguag

SEQ ID NO: 2087068 - RNA, 19 nt, Artificial Sequence
  Description of Artificial Sequence: Synthetic oligonucleotide
  Sense strand starting at position 3071 of SEQ ID NO: 1881995
ccuuacaugucuuuccuga

SEQ ID NO: 2087069 - RNA, 19 nt, Artificial Sequence
  Description of Artificial Sequence: Synthetic oligonucleotide
  Antisense strand to SEQ ID NO: 2087068
ucaggaaagacauguaagg

SEQ ID NO: 2087070 - RNA, 19 nt, Artificial Sequence
  Description of Artificial Sequence: Synthetic oligonucleotide
  Sense strand starting at position 3073 of SEQ ID NO: 1881995
uuacaugucuuuccugaca

SEQ ID NO: 2087071 - RNA, 19 nt, Artificial Sequence
  Description of Artificial Sequence: Synthetic oligonucleotide
  Antisense strand to SEQ ID NO: 2087070
ugucaggaaagacauguaa

SEQ ID NO: 2087072 - RNA, 19 nt, Artificial Sequence
  Description of Artificial Sequence: Synthetic oligonucleotide
  Sense strand starting at position 3085 of SEQ ID NO: 1881995
ccugacagcuccucagauu

SEQ ID NO: 2087073 - RNA, 19 nt, Artificial Sequence
  Description of Artificial Sequence: Synthetic oligonucleotide
  Antisense strand to SEQ ID NO: 2087072
aaucugaggagcugucagg

SEQ ID NO: 2087074 - RNA, 19 nt, Artificial Sequence
  Description of Artificial Sequence: Synthetic oligonucleotide
  Sense strand starting at position 3088 of SEQ ID NO: 1881995
gacagcuccucagauuuag

SEQ ID NO: 2087075 - RNA, 19 nt, Artificial Sequence
  Description of Artificial Sequence: Synthetic oligonucleotide
  Antisense strand to SEQ ID NO: 2087074
cuaaaucugaggagcuguc

SEQ ID NO: 2087076 - RNA, 19 nt, Artificial Sequence
  Description of Artificial Sequence: Synthetic oligonucleotide
  Sense strand starting at position 3198 of SEQ ID NO: 1881995
uuucgaacucuuugagagu

SEQ ID NO: 2087077 - RNA, 19 nt, Artificial Sequence
  Description of Artificial Sequence: Synthetic oligonucleotide
  Antisense strand to SEQ ID NO: 2087076
acucucaaagaguucgaaa

SEQ ID NO: 2087078 - RNA, 19 nt, Artificial Sequence
  Description of Artificial Sequence: Synthetic oligonucleotide
  Sense strand starting at position 3444 of SEQ ID NO: 1881995
agguuacacgucuaauaaa

SEQ ID NO: 2087079 - RNA, 19 nt, Artificial Sequence
  Description of Artificial Sequence: Synthetic oligonucleotide
  Antisense strand to SEQ ID NO: 2087078
uuuauuagacguguaaccu

SEQ ID NO: 2087080 - RNA, 19 nt, Artificial Sequence
  Description of Artificial Sequence: Synthetic oligonucleotide
  Sense strand starting at position 3640 of SEQ ID NO: 1881995
acaguaguugcggauccau

SEQ ID NO: 2087081 - RNA, 19 nt, Artificial Sequence
  Description of Artificial Sequence: Synthetic oligonucleotide
  Antisense strand to SEQ ID NO: 2087080
auggauccgcaacuacugu

SEQ ID NO: 2087082 - RNA, 19 nt, Artificial Sequence
  Description of Artificial Sequence: Synthetic oligonucleotide
  Sense strand starting at position 3732 of SEQ ID NO: 1881995
gggagcauuguauaaucuu

SEQ ID NO: 2087083 - RNA, 19 nt, Artificial Sequence
  Description of Artificial Sequence: Synthetic oligonucleotide
  Antisense strand to SEQ ID NO: 2087082
aagauuauacaaugcuccc

SEQ ID NO: 2087084 - RNA, 19 nt, Artificial Sequence
  Description of Artificial Sequence: Synthetic oligonucleotide
  Sense strand starting at position 3735 of SEQ ID NO: 1881995
agcauuguauaaucuuuga

SEQ ID NO: 2087085 - RNA, 19 nt, Artificial Sequence
  Description of Artificial Sequence: Synthetic oligonucleotide
  Antisense strand to SEQ ID NO: 2087084
ucaaagauuauacaaugcu

SEQ ID NO: 2087086 - RNA, 19 nt, Artificial Sequence
  Description of Artificial Sequence: Synthetic oligonucleotide
  Sense strand starting at position 3739 of SEQ ID NO: 1881995
uuguauaaucuuugaacag

SEQ ID NO: 2087087 - RNA, 19 nt, Artificial Sequence
  Description of Artificial Sequence: Synthetic oligonucleotide
  Antisense strand to SEQ ID NO: 2087086
cuguucaaagauuauacaa

SEQ ID NO: 2087088 - RNA, 19 nt, Artificial Sequence
  Description of Artificial Sequence: Synthetic oligonucleotide
  Sense strand starting at position 3964 of SEQ ID NO: 1881995
gaguuaaguccugcgcugu

SEQ ID NO: 2087089 - RNA, 19 nt, Artificial Sequence
  Description of Artificial Sequence: Synthetic oligonucleotide
  Antisense strand to SEQ ID NO: 2087088
acagcgcaggacuuaacuc

SEQ ID NO: 2087090 - RNA, 19 nt, Artificial Sequence
  Description of Artificial Sequence: Synthetic oligonucleotide
  Sense strand starting at position 109 of SEQ ID NO: 1881996
agagaaauguuccuuuaag

SEQ ID NO: 2087091 - RNA, 19 nt, Artificial Sequence
  Description of Artificial Sequence: Synthetic oligonucleotide
  Antisense strand to SEQ ID NO: 2087090
cuuaaaggaacauuucucu

SEQ ID NO: 2087092 - RNA, 19 nt, Artificial Sequence
  Description of Artificial Sequence: Synthetic oligonucleotide
  Sense strand starting at position 110 of SEQ ID NO: 1881996
gagaaauguuccuuuaaga

SEQ ID NO: 2087093 - RNA, 19 nt, Artificial Sequence
  Description of Artificial Sequence: Synthetic oligonucleotide
  Antisense strand to SEQ ID NO: 2087092
ucuuaaaggaacauuucuc

SEQ ID NO: 2087094 - RNA, 19 nt, Artificial Sequence
  Description of Artificial Sequence: Synthetic oligonucleotide
  Sense strand starting at position 250 of SEQ ID NO: 1881996
cugagcuuacacugaguga

SEQ ID NO: 2087095 - RNA, 19 nt, Artificial Sequence
  Description of Artificial Sequence: Synthetic oligonucleotide
  Antisense strand to SEQ ID NO: 2087094
ucacucaguguaagcucag

SEQ ID NO: 2087096 - RNA, 19 nt, Artificial Sequence
  Description of Artificial Sequence: Synthetic oligonucleotide
  Sense strand starting at position 340 of SEQ ID NO: 1881996
uuucuaugacuugaguuua

SEQ ID NO: 2087097 - RNA, 19 nt, Artificial Sequence
  Description of Artificial Sequence: Synthetic oligonucleotide
  Antisense strand to SEQ ID NO: 2087096
uaaacucaagucauagaaa

SEQ ID NO: 2087098 - RNA, 19 nt, Artificial Sequence
  Description of Artificial Sequence: Synthetic oligonucleotide
  Sense strand starting at position 345 of SEQ ID NO: 1881996
augacuugaguuuaaagca

SEQ ID NO: 2087099 - RNA, 19 nt, Artificial Sequence
  Description of Artificial Sequence: Synthetic oligonucleotide
  Antisense strand to SEQ ID NO: 2087098
ugcuuuaaacucaagucau

SEQ ID NO: 2087100 - RNA, 19 nt, Artificial Sequence
  Description of Artificial Sequence: Synthetic oligonucleotide
  Sense strand starting at position 390 of SEQ ID NO: 1881996
ucauaaaucugagugggcu

SEQ ID NO: 2087101 - RNA, 19 nt, Artificial Sequence
  Description of Artificial Sequence: Synthetic oligonucleotide
  Antisense strand to SEQ ID NO: 2087100
agcccacucagauuuauga

SEQ ID NO: 2087102 - RNA, 19 nt, Artificial Sequence
  Description of Artificial Sequence: Synthetic oligonucleotide
  Sense strand starting at position 540 of SEQ ID NO: 1881996
uuaauauuuauuggcggua

SEQ ID NO: 2087103 - RNA, 19 nt, Artificial Sequence
  Description of Artificial Sequence: Synthetic oligonucleotide
  Antisense strand to SEQ ID NO: 2087102
uaccgccaauaaauauuaa

SEQ ID NO: 2087104 - RNA, 19 nt, Artificial Sequence
  Description of Artificial Sequence: Synthetic oligonucleotide
  Sense strand starting at position 541 of SEQ ID NO: 1881996
uaauauuuauuggcgguau

SEQ ID NO: 2087105 - RNA, 19 nt, Artificial Sequence
  Description of Artificial Sequence: Synthetic oligonucleotide
  Antisense strand to SEQ ID NO: 2087104
auaccgccaauaaauauua

SEQ ID NO: 2087106 - RNA, 19 nt, Artificial Sequence
  Description of Artificial Sequence: Synthetic oligonucleotide
  Sense strand starting at position 692 of SEQ ID NO: 1881996
agcuuuauacuagauuaug

SEQ ID NO: 2087107 - RNA, 19 nt, Artificial Sequence
  Description of Artificial Sequence: Synthetic oligonucleotide
  Antisense strand to SEQ ID NO: 2087106
cauaaucuaguauaaagcu

SEQ ID NO: 2087108 - RNA, 19 nt, Artificial Sequence
  Description of Artificial Sequence: Synthetic oligonucleotide
  Sense strand starting at position 700 of SEQ ID NO: 1881996
acuagauuaugaguacuuu

SEQ ID NO: 2087109 - RNA, 19 nt, Artificial Sequence
  Description of Artificial Sequence: Synthetic oligonucleotide
  Antisense strand to SEQ ID NO: 2087108
aaaguacucauaaucuagu

SEQ ID NO: 2087110 - RNA, 19 nt, Artificial Sequence
  Description of Artificial Sequence: Synthetic oligonucleotide
  Sense strand starting at position 801 of SEQ ID NO: 1881996
auuuguucuucguuucuaa

SEQ ID NO: 2087111 - RNA, 19 nt, Artificial Sequence
  Description of Artificial Sequence: Synthetic oligonucleotide
  Antisense strand to SEQ ID NO: 2087110
uuagaaacgaagaacaaau

SEQ ID NO: 2087112 - RNA, 19 nt, Artificial Sequence
  Description of Artificial Sequence: Synthetic oligonucleotide
  Sense strand starting at position 933 of SEQ ID NO: 1881996
auguucuaguaacuacaau

SEQ ID NO: 2087113 - RNA, 19 nt, Artificial Sequence
  Description of Artificial Sequence: Synthetic oligonucleotide
  Antisense strand to SEQ ID NO: 2087112
auuguaguuacuagaacau

SEQ ID NO: 2087114 - RNA, 19 nt, Artificial Sequence
  Description of Artificial Sequence: Synthetic oligonucleotide
  Sense strand starting at position 1119 of SEQ ID NO: 1881996
aggucuaacguuuauguca

SEQ ID NO: 2087115 - RNA, 19 nt, Artificial Sequence
  Description of Artificial Sequence: Synthetic oligonucleotide
  Antisense strand to SEQ ID NO: 2087114
ugacauaaacguuagaccu

SEQ ID NO: 2087116 - RNA, 19 nt, Artificial Sequence
  Description of Artificial Sequence: Synthetic oligonucleotide
  Sense strand starting at position 1260 of SEQ ID NO: 1881996
guuuaugagauuugcuguu

SEQ ID NO: 2087117 - RNA, 19 nt, Artificial Sequence
  Description of Artificial Sequence: Synthetic oligonucleotide
  Antisense strand to SEQ ID NO: 2087116
aacagcaaaucucauaaac

SEQ ID NO: 2087118 - RNA, 19 nt, Artificial Sequence
  Description of Artificial Sequence: Synthetic oligonucleotide
  Sense strand starting at position 1266 of SEQ ID NO: 1881996
gagauuugcuguuuagcuc

SEQ ID NO: 2087119 - RNA, 19 nt, Artificial Sequence
  Description of Artificial Sequence: Synthetic oligonucleotide
  Antisense strand to SEQ ID NO: 2087118
gagcuaaacagcaaaucuc

SEQ ID NO: 2087120 - RNA, 19 nt, Artificial Sequence
  Description of Artificial Sequence: Synthetic oligonucleotide
  Sense strand starting at position 1562 of SEQ ID NO: 1881996
agggaaaggugguuuagau

SEQ ID NO: 2087121 - RNA, 19 nt, Artificial Sequence
  Description of Artificial Sequence: Synthetic oligonucleotide
  Antisense strand to SEQ ID NO: 2087120
aucuaaaccaccuuucccu

SEQ ID NO: 2087122 - RNA, 19 nt, Artificial Sequence
  Description of Artificial Sequence: Synthetic oligonucleotide
  Sense strand starting at position 1570 of SEQ ID NO: 1881996
gugguuuagauacagcuaa

SEQ ID NO: 2087123 - RNA, 19 nt, Artificial Sequence
  Description of Artificial Sequence: Synthetic oligonucleotide
  Antisense strand to SEQ ID NO: 2087122
uuagcuguaucuaaaccac

SEQ ID NO: 2087124 - RNA, 19 nt, Artificial Sequence
  Description of Artificial Sequence: Synthetic oligonucleotide
  Sense strand starting at position 1646 of SEQ ID NO: 1881996
gccucagaaucacuuggaa

SEQ ID NO: 2087125 - RNA, 19 nt, Artificial Sequence
  Description of Artificial Sequence: Synthetic oligonucleotide
  Antisense strand to SEQ ID NO: 2087124
uuccaagugauucugaggc

SEQ ID NO: 2087126 - RNA, 19 nt, Artificial Sequence
  Description of Artificial Sequence: Synthetic oligonucleotide
  Sense strand starting at position 1663 of SEQ ID NO: 1881996
aaggcuugugaggaguaaa

SEQ ID NO: 2087127 - RNA, 19 nt, Artificial Sequence
  Description of Artificial Sequence: Synthetic oligonucleotide
  Antisense strand to SEQ ID NO: 2087126
uuuacuccucacaagccuu

SEQ ID NO: 2087128 - RNA, 19 nt, Artificial Sequence
  Description of Artificial Sequence: Synthetic oligonucleotide
  Sense strand starting at position 2335 of SEQ ID NO: 1881996
agauaaugaguuuagcucu

SEQ ID NO: 2087129 - RNA, 19 nt, Artificial Sequence
  Description of Artificial Sequence: Synthetic oligonucleotide
  Antisense strand to SEQ ID NO: 2087128
agagcuaaacucauuaucu

SEQ ID NO: 2087130 - RNA, 19 nt, Artificial Sequence
  Description of Artificial Sequence: Synthetic oligonucleotide
  Sense strand starting at position 2350 of SEQ ID NO: 1881996
cucugaggucgguaauaag

SEQ ID NO: 2087131 - RNA, 19 nt, Artificial Sequence
  Description of Artificial Sequence: Synthetic oligonucleotide
  Antisense strand to SEQ ID NO: 2087130
cuuauuaccgaccucagag

SEQ ID NO: 2087132 - RNA, 19 nt, Artificial Sequence
  Description of Artificial Sequence: Synthetic oligonucleotide
  Sense strand starting at position 2544 of SEQ ID NO: 1881996
accagugcauuucugcuaa

SEQ ID NO: 2087133 - RNA, 19 nt, Artificial Sequence
  Description of Artificial Sequence: Synthetic oligonucleotide
  Antisense strand to SEQ ID NO: 2087132
uuagcagaaaugcacuggu

SEQ ID NO: 2087134 - RNA, 19 nt, Artificial Sequence
  Description of Artificial Sequence: Synthetic oligonucleotide
  Sense strand starting at position 2591 of SEQ ID NO: 1881996
uuuggacugccagaagguu

SEQ ID NO: 2087135 - RNA, 19 nt, Artificial Sequence
  Description of Artificial Sequence: Synthetic oligonucleotide
  Antisense strand to SEQ ID NO: 2087134
aaccuucuggcaguccaaa

SEQ ID NO: 2087136 - RNA, 19 nt, Artificial Sequence
  Description of Artificial Sequence: Synthetic oligonucleotide
  Sense strand starting at position 2635 of SEQ ID NO: 1881996
augaaauaucgcgaggcuu

SEQ ID NO: 2087137 - RNA, 19 nt, Artificial Sequence
  Description of Artificial Sequence: Synthetic oligonucleotide
  Antisense strand to SEQ ID NO: 2087136
aagccucgcgauauuucau

SEQ ID NO: 2087138 - RNA, 19 nt, Artificial Sequence
  Description of Artificial Sequence: Synthetic oligonucleotide
  Sense strand starting at position 2654 of SEQ ID NO: 1881996
cuacucuuguuucucagau

SEQ ID NO: 2087139 - RNA, 19 nt, Artificial Sequence
  Description of Artificial Sequence: Synthetic oligonucleotide
  Antisense strand to SEQ ID NO: 2087138
aucugagaaacaagaguag

SEQ ID NO: 2087140 - RNA, 19 nt, Artificial Sequence
  Description of Artificial Sequence: Synthetic oligonucleotide
  Sense strand starting at position 2813 of SEQ ID NO: 1881996
gguguaauuggagacccau

SEQ ID NO: 2087141 - RNA, 19 nt, Artificial Sequence
  Description of Artificial Sequence: Synthetic oligonucleotide
  Antisense strand to SEQ ID NO: 2087140
augggucuccaauuacacc

SEQ ID NO: 2087142 - RNA, 19 nt, Artificial Sequence
  Description of Artificial Sequence: Synthetic oligonucleotide
  Sense strand starting at position 2993 of SEQ ID NO: 1881996
uguucugcuaagggauaau

SEQ ID NO: 2087143 - RNA, 19 nt, Artificial Sequence
  Description of Artificial Sequence: Synthetic oligonucleotide
  Antisense strand to SEQ ID NO: 2087142
auuaucccuuagcagaaca

SEQ ID NO: 2087144 - RNA, 19 nt, Artificial Sequence
  Description of Artificial Sequence: Synthetic oligonucleotide
  Sense strand starting at position 3133 of SEQ ID NO: 1881996
ggaagaucuuccucagcuu

SEQ ID NO: 2087145 - RNA, 19 nt, Artificial Sequence
  Description of Artificial Sequence: Synthetic oligonucleotide
  Antisense strand to SEQ ID NO: 2087144
aagcugaggaagaucuucc

SEQ ID NO: 2087146 - RNA, 19 nt, Artificial Sequence
  Description of Artificial Sequence: Synthetic oligonucleotide
  Sense strand starting at position 3256 of SEQ ID NO: 1881996
acagucaacugguuugaca

SEQ ID NO: 2087147 - RNA, 19 nt, Artificial Sequence
  Description of Artificial Sequence: Synthetic oligonucleotide
  Antisense strand to SEQ ID NO: 2087146
ugucaaaccaguugacugu

SEQ ID NO: 2087148 - RNA, 19 nt, Artificial Sequence
  Description of Artificial Sequence: Synthetic oligonucleotide
  Sense strand starting at position 3258 of SEQ ID NO: 1881996
agucaacugguuugacaug

SEQ ID NO: 2087149 - RNA, 19 nt, Artificial Sequence
  Description of Artificial Sequence: Synthetic oligonucleotide
  Antisense strand to SEQ ID NO: 2087148
caugucaaaccaguugacu

SEQ ID NO: 2087150 - RNA, 19 nt, Artificial Sequence
  Description of Artificial Sequence: Synthetic oligonucleotide
  Sense strand starting at position 3281 of SEQ ID NO: 1881996
uguguuaccggauuguguu

SEQ ID NO: 2087151 - RNA, 19 nt, Artificial Sequence
  Description of Artificial Sequence: Synthetic oligonucleotide
  Antisense strand to SEQ ID NO: 2087150
aacacaauccgguaacaca

SEQ ID NO: 2087152 - RNA, 19 nt, Artificial Sequence
  Description of Artificial Sequence: Synthetic oligonucleotide
  Sense strand starting at position 3419 of SEQ ID NO: 1881996
guuuccagaguuuaugaga

SEQ ID NO: 2087153 - RNA, 19 nt, Artificial Sequence
  Description of Artificial Sequence: Synthetic oligonucleotide
  Antisense strand to SEQ ID NO: 2087152
ucucauaaacucuggaaac

SEQ ID NO: 2087154 - RNA, 19 nt, Artificial Sequence
  Description of Artificial Sequence: Synthetic oligonucleotide
  Sense strand starting at position 3727 of SEQ ID NO: 1881996
ccgauauauagugauuguc

SEQ ID NO: 2087155 - RNA, 19 nt, Artificial Sequence
  Description of Artificial Sequence: Synthetic oligonucleotide
  Antisense strand to SEQ ID NO: 2087154
gacaaucacuauauaucgg

SEQ ID NO: 2087156 - RNA, 19 nt, Artificial Sequence
  Description of Artificial Sequence: Synthetic oligonucleotide
  Sense strand starting at position 3729 of SEQ ID NO: 1881996
gauauauagugauugucag

SEQ ID NO: 2087157 - RNA, 19 nt, Artificial Sequence
  Description of Artificial Sequence: Synthetic oligonucleotide
  Antisense strand to SEQ ID NO: 2087156
cugacaaucacuauauauc

SEQ ID NO: 2087158 - RNA, 19 nt, Artificial Sequence
  Description of Artificial Sequence: Synthetic oligonucleotide
  Sense strand starting at position 3730 of SEQ ID NO: 1881996
auauauagugauugucagu

SEQ ID NO: 2087159 - RNA, 19 nt, Artificial Sequence
  Description of Artificial Sequence: Synthetic oligonucleotide
  Antisense strand to SEQ ID NO: 2087158
acugacaaucacuauauau

SEQ ID NO: 2087160 - RNA, 19 nt, Artificial Sequence
  Description of Artificial Sequence: Synthetic oligonucleotide
  Sense strand starting at position 3735 of SEQ ID NO: 1881996
uagugauugucaguuauga

SEQ ID NO: 2087161 - RNA, 19 nt, Artificial Sequence
  Description of Artificial Sequence: Synthetic oligonucleotide
  Antisense strand to SEQ ID NO: 2087160
ucauaacugacaaucacua

SEQ ID NO: 2087162 - RNA, 19 nt, Artificial Sequence
  Description of Artificial Sequence: Synthetic oligonucleotide
  Sense strand starting at position 3737 of SEQ ID NO: 1881996
gugauugucaguuaugaau

SEQ ID NO: 2087163 - RNA, 19 nt, Artificial Sequence
  Description of Artificial Sequence: Synthetic oligonucleotide
  Antisense strand to SEQ ID NO: 2087162
auucauaacugacaaucac

SEQ ID NO: 2087164 - RNA, 19 nt, Artificial Sequence
  Description of Artificial Sequence: Synthetic oligonucleotide
  Sense strand starting at position 3881 of SEQ ID NO: 1881996
uuguuucuuccacaguaac

SEQ ID NO: 2087165 - RNA, 19 nt, Artificial Sequence
  Description of Artificial Sequence: Synthetic oligonucleotide
  Antisense strand to SEQ ID NO: 2087164
guuacuguggaagaaacaa

SEQ ID NO: 2087166 - RNA, 19 nt, Artificial Sequence
  Description of Artificial Sequence: Synthetic oligonucleotide
  Sense strand starting at position 3894 of SEQ ID NO: 1881996
aguaacauuagugggaaua

SEQ ID NO: 2087167 - RNA, 19 nt, Artificial Sequence
  Description of Artificial Sequence: Synthetic oligonucleotide
  Antisense strand to SEQ ID NO: 2087166
uauucccacuaauguuacu

SEQ ID NO: 2087168 - RNA, 19 nt, Artificial Sequence
  Description of Artificial Sequence: Synthetic oligonucleotide
  Sense strand starting at position 3895 of SEQ ID NO: 1881996
guaacauuagugggaauaa

SEQ ID NO: 2087169 - RNA, 19 nt, Artificial Sequence
  Description of Artificial Sequence: Synthetic oligonucleotide
  Antisense strand to SEQ ID NO: 2087168
uuauucccacuaauguuac

SEQ ID NO: 2087170 - RNA, 19 nt, Artificial Sequence
  Description of Artificial Sequence: Synthetic oligonucleotide
  Sense strand starting at position 193 of SEQ ID NO: 1881997
gcgggugcauaaggauaaa

SEQ ID NO: 2087171 - RNA, 19 nt, Artificial Sequence
  Description of Artificial Sequence: Synthetic oligonucleotide
  Antisense strand to SEQ ID NO: 2087170
uuuauccuuaugcacccgc

SEQ ID NO: 2087172 - RNA, 19 nt, Artificial Sequence
  Description of Artificial Sequence: Synthetic oligonucleotide
  Sense strand starting at position 1281 of SEQ ID NO: 1881997
cgcugagaguaugugcaaa

SEQ ID NO: 2087173 - RNA, 19 nt, Artificial Sequence
  Description of Artificial Sequence: Synthetic oligonucleotide
  Antisense strand to SEQ ID NO: 2087172
uuugcacauacucucagcg

SEQ ID NO: 2087174 - RNA, 19 nt, Artificial Sequence
  Description of Artificial Sequence: Synthetic oligonucleotide
  Sense strand starting at position 1364 of SEQ ID NO: 1881997
ugaaauacggcuggagagu

SEQ ID NO: 2087175 - RNA, 19 nt, Artificial Sequence
  Description of Artificial Sequence: Synthetic oligonucleotide
  Antisense strand to SEQ ID NO: 2087174
acucuccagccguauuuca

SEQ ID NO: 2087176 - RNA, 19 nt, Artificial Sequence
  Description of Artificial Sequence: Synthetic oligonucleotide
  Sense strand starting at position 1365 of SEQ ID NO: 1881997
gaaauacggcuggagaguu

SEQ ID NO: 2087177 - RNA, 19 nt, Artificial Sequence
  Description of Artificial Sequence: Synthetic oligonucleotide
  Antisense strand to SEQ ID NO: 2087176
aacucuccagccguauuuc

SEQ ID NO: 2087178 - RNA, 19 nt, Artificial Sequence
  Description of Artificial Sequence: Synthetic oligonucleotide
  Sense strand starting at position 1373 of SEQ ID NO: 1881997
gcuggagaguucccaggau

SEQ ID NO: 2087179 - RNA, 19 nt, Artificial Sequence
  Description of Artificial Sequence: Synthetic oligonucleotide
  Antisense strand to SEQ ID NO: 2087178
auccugggaacucuccagc

SEQ ID NO: 2087180 - RNA, 19 nt, Artificial Sequence
  Description of Artificial Sequence: Synthetic oligonucleotide
  Sense strand starting at position 2038 of SEQ ID NO: 1881997
ggguguccugccaguggua

SEQ ID NO: 2087181 - RNA, 19 nt, Artificial Sequence
  Description of Artificial Sequence: Synthetic oligonucleotide
  Antisense strand to SEQ ID NO: 2087180
uaccacuggcaggacaccc

SEQ ID NO: 2087182 - RNA, 19 nt, Artificial Sequence
  Description of Artificial Sequence: Synthetic oligonucleotide
  Sense strand starting at position 2653 of SEQ ID NO: 1881997
cuugaaagguuucuagacu

SEQ ID NO: 2087183 - RNA, 19 nt, Artificial Sequence
  Description of Artificial Sequence: Synthetic oligonucleotide
  Antisense strand to SEQ ID NO: 2087182
agucuagaaaccuuucaag

SEQ ID NO: 2087184 - RNA, 19 nt, Artificial Sequence
  Description of Artificial Sequence: Synthetic oligonucleotide
  Sense strand starting at position 2654 of SEQ ID NO: 1881997
uugaaagguuucuagacug

SEQ ID NO: 2087185 - RNA, 19 nt, Artificial Sequence
  Description of Artificial Sequence: Synthetic oligonucleotide
  Antisense strand to SEQ ID NO: 2087184
cagucuagaaaccuuucaa

SEQ ID NO: 2087186 - RNA, 19 nt, Artificial Sequence
  Description of Artificial Sequence: Synthetic oligonucleotide
  Sense strand starting at position 2731 of SEQ ID NO: 1881997
acagcuuucugcucauuga

SEQ ID NO: 2087187 - RNA, 19 nt, Artificial Sequence
  Description of Artificial Sequence: Synthetic oligonucleotide
  Antisense strand to SEQ ID NO: 2087186
ucaaugagcagaaagcugu

SEQ ID NO: 2087188 - RNA, 19 nt, Artificial Sequence
  Description of Artificial Sequence: Synthetic oligonucleotide
  Sense strand starting at position 2790 of SEQ ID NO: 1881997
cuucucucugauuggaaga

SEQ ID NO: 2087189 - RNA, 19 nt, Artificial Sequence
  Description of Artificial Sequence: Synthetic oligonucleotide
  Antisense strand to SEQ ID NO: 2087188
ucuuccaaucagagagaag

SEQ ID NO: 2087190 - RNA, 19 nt, Artificial Sequence
  Description of Artificial Sequence: Synthetic oligonucleotide
  Sense strand starting at position 2792 of SEQ ID NO: 1881997
ucucucugauuggaagaaa

SEQ ID NO: 2087191 - RNA, 19 nt, Artificial Sequence
  Description of Artificial Sequence: Synthetic oligonucleotide
  Antisense strand to SEQ ID NO: 2087190
uuucuuccaaucagagaga

SEQ ID NO: 2087192 - RNA, 19 nt, Artificial Sequence
  Description of Artificial Sequence: Synthetic oligonucleotide
  Sense strand starting at position 2856 of SEQ ID NO: 1881997
ucacguuagggcgucuuua

SEQ ID NO: 2087193 - RNA, 19 nt, Artificial Sequence
  Description of Artificial Sequence: Synthetic oligonucleotide
  Antisense strand to SEQ ID NO: 2087192
uaaagacgcccuaacguga

SEQ ID NO: 2087194 - RNA, 19 nt, Artificial Sequence
  Description of Artificial Sequence: Synthetic oligonucleotide
  Sense strand starting at position 2976 of SEQ ID NO: 1881997
ucuuuauuucugggucuuu

SEQ ID NO: 2087195 - RNA, 19 nt, Artificial Sequence
  Description of Artificial Sequence: Synthetic oligonucleotide
  Antisense strand to SEQ ID NO: 2087194
aaagacccagaaauaaaga

SEQ ID NO: 2087196 - RNA, 19 nt, Artificial Sequence
  Description of Artificial Sequence: Synthetic oligonucleotide
  Sense strand starting at position 2985 of SEQ ID NO: 1881997
cugggucuuuaauaucuaa

SEQ ID NO: 2087197 - RNA, 19 nt, Artificial Sequence
  Description of Artificial Sequence: Synthetic oligonucleotide
  Antisense strand to SEQ ID NO: 2087196
uuagauauuaaagacccag

SEQ ID NO: 2087198 - RNA, 19 nt, Artificial Sequence
  Description of Artificial Sequence: Synthetic oligonucleotide
  Sense strand starting at position 3036 of SEQ ID NO: 1881997
ggacaauguauauguaaug

SEQ ID NO: 2087199 - RNA, 19 nt, Artificial Sequence
  Description of Artificial Sequence: Synthetic oligonucleotide
  Antisense strand to SEQ ID NO: 2087198
cauuacauauacauugucc

SEQ ID NO: 2087200 - RNA, 19 nt, Artificial Sequence
  Description of Artificial Sequence: Synthetic oligonucleotide
  Sense strand starting at position 3037 of SEQ ID NO: 1881997
gacaauguauauguaauga

SEQ ID NO: 2087201 - RNA, 19 nt, Artificial Sequence
  Description of Artificial Sequence: Synthetic oligonucleotide
  Antisense strand to SEQ ID NO: 2087200
ucauuacauauacauuguc

SEQ ID NO: 2087202 - RNA, 19 nt, Artificial Sequence
  Description of Artificial Sequence: Synthetic oligonucleotide
  Sense strand starting at position 3047 of SEQ ID NO: 1881997
auguaaugaguauaugagu

SEQ ID NO: 2087203 - RNA, 19 nt, Artificial Sequence
  Description of Artificial Sequence: Synthetic oligonucleotide
  Antisense strand to SEQ ID NO: 2087202
acucauauacucauuacau

SEQ ID NO: 2087204 - RNA, 19 nt, Artificial Sequence
  Description of Artificial Sequence: Synthetic oligonucleotide
  Sense strand starting at position 3050 of SEQ ID NO: 1881997
uaaugaguauaugagugaa

SEQ ID NO: 2087205 - RNA, 19 nt, Artificial Sequence
  Description of Artificial Sequence: Synthetic oligonucleotide
  Antisense strand to SEQ ID NO: 2087204
uucacucauauacucauua

SEQ ID NO: 2087206 - RNA, 19 nt, Artificial Sequence
  Description of Artificial Sequence: Synthetic oligonucleotide
  Sense strand starting at position 3063 of SEQ ID NO: 1881997
agugaaagauauugugcuu

SEQ ID NO: 2087207 - RNA, 19 nt, Artificial Sequence
  Description of Artificial Sequence: Synthetic oligonucleotide
  Antisense strand to SEQ ID NO: 2087206
aagcacaauaucuuucacu

SEQ ID NO: 2087208 - RNA, 19 nt, Artificial Sequence
  Description of Artificial Sequence: Synthetic oligonucleotide
  Sense strand starting at position 3066 of SEQ ID NO: 1881997
gaaagauauugugcuuuau

SEQ ID NO: 2087209 - RNA, 19 nt, Artificial Sequence
  Description of Artificial Sequence: Synthetic oligonucleotide
  Antisense strand to SEQ ID NO: 2087208
auaaagcacaauaucuuuc

SEQ ID NO: 2087210 - RNA, 19 nt, Artificial Sequence
  Description of Artificial Sequence: Synthetic oligonucleotide
  Sense strand starting at position 3070 of SEQ ID NO: 1881997
gauauugugcuuuauuaug

SEQ ID NO: 2087211 - RNA, 19 nt, Artificial Sequence
  Description of Artificial Sequence: Synthetic oligonucleotide
  Antisense strand to SEQ ID NO: 2087210
cauaauaaagcacaauauc

SEQ ID NO: 2087212 - RNA, 19 nt, Artificial Sequence
  Description of Artificial Sequence: Synthetic oligonucleotide
  Sense strand starting at position 3078 of SEQ ID NO: 1881997
gcuuuauuaugauauaagg

SEQ ID NO: 2087213 - RNA, 19 nt, Artificial Sequence
  Description of Artificial Sequence: Synthetic oligonucleotide
  Antisense strand to SEQ ID NO: 2087212
ccuuauaucauaauaaagc

SEQ ID NO: 2087214 - RNA, 19 nt, Artificial Sequence
  Description of Artificial Sequence: Synthetic oligonucleotide
  Sense strand starting at position 3133 of SEQ ID NO: 1881997
gggucagauuuggaauugu

SEQ ID NO: 2087215 - RNA, 19 nt, Artificial Sequence
  Description of Artificial Sequence: Synthetic oligonucleotide
  Antisense strand to SEQ ID NO: 2087214
acaauuccaaaucugaccc

SEQ ID NO: 2087216 - RNA, 19 nt, Artificial Sequence
  Description of Artificial Sequence: Synthetic oligonucleotide
  Sense strand starting at position 3236 of SEQ ID NO: 1881997
cuuagaagguuugacuaaa

SEQ ID NO: 2087217 - RNA, 19 nt, Artificial Sequence
  Description of Artificial Sequence: Synthetic oligonucleotide
  Antisense strand to SEQ ID NO: 2087216
uuuagucaaaccuucuaag

SEQ ID NO: 2087218 - RNA, 19 nt, Artificial Sequence
  Description of Artificial Sequence: Synthetic oligonucleotide
  Sense strand starting at position 3326 of SEQ ID NO: 1881997
gugcaaauacccuacuaga

SEQ ID NO: 2087219 - RNA, 19 nt, Artificial Sequence
  Description of Artificial Sequence: Synthetic oligonucleotide
  Antisense strand to SEQ ID NO: 2087218
ucuaguaggguauuugcac

SEQ ID NO: 2087220 - RNA, 19 nt, Artificial Sequence
  Description of Artificial Sequence: Synthetic oligonucleotide
  Sense strand starting at position 3481 of SEQ ID NO: 1881997
ggaauauuccuaugacuuu

SEQ ID NO: 2087221 - RNA, 19 nt, Artificial Sequence
  Description of Artificial Sequence: Synthetic oligonucleotide
  Antisense strand to SEQ ID NO: 2087220
aaagucauaggaauauucc

SEQ ID NO: 2087222 - RNA, 19 nt, Artificial Sequence
  Description of Artificial Sequence: Synthetic oligonucleotide
  Sense strand starting at position 3514 of SEQ ID NO: 1881997
cucuguuucuuauacaguu

SEQ ID NO: 2087223 - RNA, 19 nt, Artificial Sequence
  Description of Artificial Sequence: Synthetic oligonucleotide
  Antisense strand to SEQ ID NO: 2087222
aacuguauaagaaacagag

SEQ ID NO: 2087224 - RNA, 19 nt, Artificial Sequence
  Description of Artificial Sequence: Synthetic oligonucleotide
  Sense strand starting at position 3630 of SEQ ID NO: 1881997
auagauugaugcuguaugu

SEQ ID NO: 2087225 - RNA, 19 nt, Artificial Sequence
  Description of Artificial Sequence: Synthetic oligonucleotide
  Antisense strand to SEQ ID NO: 2087224
acauacagcaucaaucuau

SEQ ID NO: 2087226 - RNA, 19 nt, Artificial Sequence
  Description of Artificial Sequence: Synthetic oligonucleotide
  Sense strand starting at position 3654 of SEQ ID NO: 1881997
agcgauacugcagauauau

SEQ ID NO: 2087227 - RNA, 19 nt, Artificial Sequence
  Description of Artificial Sequence: Synthetic oligonucleotide
  Antisense strand to SEQ ID NO: 2087226
auauaucugcaguaucgcu

SEQ ID NO: 2087228 - RNA, 19 nt, Artificial Sequence
  Description of Artificial Sequence: Synthetic oligonucleotide
  Sense strand starting at position 3671 of SEQ ID NO: 1881997
auggauagauaugaguaau

SEQ ID NO: 2087229 - RNA, 19 nt, Artificial Sequence
  Description of Artificial Sequence: Synthetic oligonucleotide
  Antisense strand to SEQ ID NO: 2087228
auuacucauaucuauccau

SEQ ID NO: 2087230 - RNA, 19 nt, Artificial Sequence
  Description of Artificial Sequence: Synthetic oligonucleotide
  Sense strand starting at position 3784 of SEQ ID NO: 1881997
gguagaacaugacuugauu

SEQ ID NO: 2087231 - RNA, 19 nt, Artificial Sequence
  Description of Artificial Sequence: Synthetic oligonucleotide
  Antisense strand to SEQ ID NO: 2087230
aaucaagucauguucuacc

SEQ ID NO: 2087232 - RNA, 19 nt, Artificial Sequence
  Description of Artificial Sequence: Synthetic oligonucleotide
  Sense strand starting at position 3817 of SEQ ID NO: 1881997
acgaaauaauuucguauga

SEQ ID NO: 2087233 - RNA, 19 nt, Artificial Sequence
  Description of Artificial Sequence: Synthetic oligonucleotide
  Antisense strand to SEQ ID NO: 2087232
ucauacgaaauuauuucgu

SEQ ID NO: 2087234 - RNA, 19 nt, Artificial Sequence
  Description of Artificial Sequence: Synthetic oligonucleotide
  Sense strand starting at position 3819 of SEQ ID NO: 1881997
gaaauaauuucguaugacu

SEQ ID NO: 2087235 - RNA, 19 nt, Artificial Sequence
  Description of Artificial Sequence: Synthetic oligonucleotide
  Antisense strand to SEQ ID NO: 2087234
agucauacgaaauuauuuc

SEQ ID NO: 2087236 - RNA, 19 nt, Artificial Sequence
  Description of Artificial Sequence: Synthetic oligonucleotide
  Sense strand starting at position 3822 of SEQ ID NO: 1881997
auaauuucguaugacugaa

SEQ ID NO: 2087237 - RNA, 19 nt, Artificial Sequence
  Description of Artificial Sequence: Synthetic oligonucleotide
  Antisense strand to SEQ ID NO: 2087236
uucagucauacgaaauuau

SEQ ID NO: 2087238 - RNA, 19 nt, Artificial Sequence
  Description of Artificial Sequence: Synthetic oligonucleotide
  Sense strand starting at position 3826 of SEQ ID NO: 1881997
uuucguaugacugaaagug

SEQ ID NO: 2087239 - RNA, 19 nt, Artificial Sequence
  Description of Artificial Sequence: Synthetic oligonucleotide
  Antisense strand to SEQ ID NO: 2087238
cacuuucagucauacgaaa

SEQ ID NO: 2087240 - RNA, 19 nt, Artificial Sequence
  Description of Artificial Sequence: Synthetic oligonucleotide
  Sense strand starting at position 8 of SEQ ID NO: 1881998
ucagcugcgggugaaauua

SEQ ID NO: 2087241 - RNA, 19 nt, Artificial Sequence
  Description of Artificial Sequence: Synthetic oligonucleotide
  Antisense strand to SEQ ID NO: 2087240
uaauuucacccgcagcuga

SEQ ID NO: 2087242 - RNA, 19 nt, Artificial Sequence
  Description of Artificial Sequence: Synthetic oligonucleotide
  Sense strand starting at position 16 of SEQ ID NO: 1881998
gggugaaauuauccuguuc

SEQ ID NO: 2087243 - RNA, 19 nt, Artificial Sequence
  Description of Artificial Sequence: Synthetic oligonucleotide
  Antisense strand to SEQ ID NO: 2087242
gaacaggauaauuucaccc

SEQ ID NO: 2087244 - RNA, 19 nt, Artificial Sequence
  Description of Artificial Sequence: Synthetic oligonucleotide
  Sense strand starting at position 53 of SEQ ID NO: 1881998
cuggcaaugcuguaaauug

SEQ ID NO: 2087245 - RNA, 19 nt, Artificial Sequence
  Description of Artificial Sequence: Synthetic oligonucleotide
  Antisense strand to SEQ ID NO: 2087244
caauuuacagcauugccag

SEQ ID NO: 2087246 - RNA, 19 nt, Artificial Sequence
  Description of Artificial Sequence: Synthetic oligonucleotide
  Sense strand starting at position 70 of SEQ ID NO: 1881998
uguugugaggcuuaaggaa

SEQ ID NO: 2087247 - RNA, 19 nt, Artificial Sequence
  Description of Artificial Sequence: Synthetic oligonucleotide
  Antisense strand to SEQ ID NO: 2087246
uuccuuaagccucacaaca

SEQ ID NO: 2087248 - RNA, 19 nt, Artificial Sequence
  Description of Artificial Sequence: Synthetic oligonucleotide
  Sense strand starting at position 172 of SEQ ID NO: 1881998
uuaacaguucugggaaugu

SEQ ID NO: 2087249 - RNA, 19 nt, Artificial Sequence
  Description of Artificial Sequence: Synthetic oligonucleotide
  Antisense strand to SEQ ID NO: 2087248
acauucccagaacuguuaa

SEQ ID NO: 2087250 - RNA, 19 nt, Artificial Sequence
  Description of Artificial Sequence: Synthetic oligonucleotide
  Sense strand starting at position 176 of SEQ ID NO: 1881998
caguucugggaauguaaau

SEQ ID NO: 2087251 - RNA, 19 nt, Artificial Sequence
  Description of Artificial Sequence: Synthetic oligonucleotide
  Antisense strand to SEQ ID NO: 2087250
auuuacauucccagaacug

SEQ ID NO: 2087252 - RNA, 19 nt, Artificial Sequence
  Description of Artificial Sequence: Synthetic oligonucleotide
  Sense strand starting at position 301 of SEQ ID NO: 1881998
cagagcucaggcuauacau

SEQ ID NO: 2087253 - RNA, 19 nt, Artificial Sequence
  Description of Artificial Sequence: Synthetic oligonucleotide
  Antisense strand to SEQ ID NO: 2087252
auguauagccugagcucug

SEQ ID NO: 2087254 - RNA, 19 nt, Artificial Sequence
  Description of Artificial Sequence: Synthetic oligonucleotide
  Sense strand starting at position 596 of SEQ ID NO: 1881998
uuacauagugucuaggaca

SEQ ID NO: 2087255 - RNA, 19 nt, Artificial Sequence
  Description of Artificial Sequence: Synthetic oligonucleotide
  Antisense strand to SEQ ID NO: 2087254
uguccuagacacuauguaa

SEQ ID NO: 2087256 - RNA, 19 nt, Artificial Sequence
  Description of Artificial Sequence: Synthetic oligonucleotide
  Sense strand starting at position 621 of SEQ ID NO: 1881998
agcucauauuuaguguuua

SEQ ID NO: 2087257 - RNA, 19 nt, Artificial Sequence
  Description of Artificial Sequence: Synthetic oligonucleotide
  Antisense strand to SEQ ID NO: 2087256
uaaacacuaaauaugagcu

SEQ ID NO: 2087258 - RNA, 19 nt, Artificial Sequence
  Description of Artificial Sequence: Synthetic oligonucleotide
  Sense strand starting at position 787 of SEQ ID NO: 1881998
gcauguauagcacauguga

SEQ ID NO: 2087259 - RNA, 19 nt, Artificial Sequence
  Description of Artificial Sequence: Synthetic oligonucleotide
  Antisense strand to SEQ ID NO: 2087258
ucacaugugcuauacaugc

SEQ ID NO: 2087260 - RNA, 19 nt, Artificial Sequence
  Description of Artificial Sequence: Synthetic oligonucleotide
  Sense strand starting at position 845 of SEQ ID NO: 1881998
gaaggucagccaggaugua

SEQ ID NO: 2087261 - RNA, 19 nt, Artificial Sequence
  Description of Artificial Sequence: Synthetic oligonucleotide
  Antisense strand to SEQ ID NO: 2087260
uacauccuggcugaccuuc

SEQ ID NO: 2087262 - RNA, 19 nt, Artificial Sequence
  Description of Artificial Sequence: Synthetic oligonucleotide
  Sense strand starting at position 1049 of SEQ ID NO: 1881998
cuggcagacagguggaaau

SEQ ID NO: 2087263 - RNA, 19 nt, Artificial Sequence
  Description of Artificial Sequence: Synthetic oligonucleotide
  Antisense strand to SEQ ID NO: 2087262
auuuccaccugucugccag

SEQ ID NO: 2087264 - RNA, 19 nt, Artificial Sequence
  Description of Artificial Sequence: Synthetic oligonucleotide
  Sense strand starting at position 1060 of SEQ ID NO: 1881998
guggaaaugugaguacauc

SEQ ID NO: 2087265 - RNA, 19 nt, Artificial Sequence
  Description of Artificial Sequence: Synthetic oligonucleotide
  Antisense strand to SEQ ID NO: 2087264
gauguacucacauuuccac

SEQ ID NO: 2087266 - RNA, 19 nt, Artificial Sequence
  Description of Artificial Sequence: Synthetic oligonucleotide
  Sense strand starting at position 1552 of SEQ ID NO: 1881998
guauauaccugucuuagag

SEQ ID NO: 2087267 - RNA, 19 nt, Artificial Sequence
  Description of Artificial Sequence: Synthetic oligonucleotide
  Antisense strand to SEQ ID NO: 2087266
cucuaagacagguauauac

SEQ ID NO: 2087268 - RNA, 19 nt, Artificial Sequence
  Description of Artificial Sequence: Synthetic oligonucleotide
  Sense strand starting at position 1588 of SEQ ID NO: 1881998
ggaguuuccugauuacaug

SEQ ID NO: 2087269 - RNA, 19 nt, Artificial Sequence
  Description of Artificial Sequence: Synthetic oligonucleotide
  Antisense strand to SEQ ID NO: 2087268
cauguaaucaggaaacucc

SEQ ID NO: 2087270 - RNA, 19 nt, Artificial Sequence
  Description of Artificial Sequence: Synthetic oligonucleotide
  Sense strand starting at position 1604 of SEQ ID NO: 1881998
augacagacuccucugcua

SEQ ID NO: 2087271 - RNA, 19 nt, Artificial Sequence
  Description of Artificial Sequence: Synthetic oligonucleotide
  Antisense strand to SEQ ID NO: 2087270
uagcagaggagucugucau

SEQ ID NO: 2087272 - RNA, 19 nt, Artificial Sequence
  Description of Artificial Sequence: Synthetic oligonucleotide
  Sense strand starting at position 1606 of SEQ ID NO: 1881998
gacagacuccucugcuaga

SEQ ID NO: 2087273 - RNA, 19 nt, Artificial Sequence
  Description of Artificial Sequence: Synthetic oligonucleotide
  Antisense strand to SEQ ID NO: 2087272
ucuagcagaggagucuguc

SEQ ID NO: 2087274 - RNA, 19 nt, Artificial Sequence
  Description of Artificial Sequence: Synthetic oligonucleotide
  Sense strand starting at position 1823 of SEQ ID NO: 1881998
aagaguuccagcuggguga

SEQ ID NO: 2087275 - RNA, 19 nt, Artificial Sequence
  Description of Artificial Sequence: Synthetic oligonucleotide
  Antisense strand to SEQ ID NO: 2087274
ucacccagcuggaacucuu

SEQ ID NO: 2087276 - RNA, 19 nt, Artificial Sequence
  Description of Artificial Sequence: Synthetic oligonucleotide
  Sense strand starting at position 1842 of SEQ ID NO: 1881998
gcuucuugugaggaaagga

SEQ ID NO: 2087277 - RNA, 19 nt, Artificial Sequence
  Description of Artificial Sequence: Synthetic oligonucleotide
  Antisense strand to SEQ ID NO: 2087276
uccuuuccucacaagaagc

SEQ ID NO: 2087278 - RNA, 19 nt, Artificial Sequence
  Description of Artificial Sequence: Synthetic oligonucleotide
  Sense strand starting at position 1872 of SEQ ID NO: 1881998
gaacacauagugugacaau

SEQ ID NO: 2087279 - RNA, 19 nt, Artificial Sequence
  Description of Artificial Sequence: Synthetic oligonucleotide
  Antisense strand to SEQ ID NO: 2087278
auugucacacuauguguuc

SEQ ID NO: 2087280 - RNA, 19 nt, Artificial Sequence
  Description of Artificial Sequence: Synthetic oligonucleotide
  Sense strand starting at position 1905 of SEQ ID NO: 1881998
gaugaaagcuguucuuaaa

SEQ ID NO: 2087281 - RNA, 19 nt, Artificial Sequence
  Description of Artificial Sequence: Synthetic oligonucleotide
  Antisense strand to SEQ ID NO: 2087280
uuuaagaacagcuuucauc

SEQ ID NO: 2087282 - RNA, 19 nt, Artificial Sequence
  Description of Artificial Sequence: Synthetic oligonucleotide
  Sense strand starting at position 1944 of SEQ ID NO: 1881998
ccgagcuugacacaugguu

SEQ ID NO: 2087283 - RNA, 19 nt, Artificial Sequence
  Description of Artificial Sequence: Synthetic oligonucleotide
  Antisense strand to SEQ ID NO: 2087282
aaccaugugucaagcucgg

SEQ ID NO: 2087284 - RNA, 19 nt, Artificial Sequence
  Description of Artificial Sequence: Synthetic oligonucleotide
  Sense strand starting at position 1997 of SEQ ID NO: 1881998
gauuguaugucuccuggag

SEQ ID NO: 2087285 - RNA, 19 nt, Artificial Sequence
  Description of Artificial Sequence: Synthetic oligonucleotide
  Antisense strand to SEQ ID NO: 2087284
cuccaggagacauacaauc

SEQ ID NO: 2087286 - RNA, 19 nt, Artificial Sequence
  Description of Artificial Sequence: Synthetic oligonucleotide
  Sense strand starting at position 2012 of SEQ ID NO: 1881998
ggagccuucuguuuaaaua

SEQ ID NO: 2087287 - RNA, 19 nt, Artificial Sequence
  Description of Artificial Sequence: Synthetic oligonucleotide
  Antisense strand to SEQ ID NO: 2087286
uauuuaaacagaaggcucc

SEQ ID NO: 2087288 - RNA, 19 nt, Artificial Sequence
  Description of Artificial Sequence: Synthetic oligonucleotide
  Sense strand starting at position 2123 of SEQ ID NO: 1881998
uguggcaaucucugauaug

SEQ ID NO: 2087289 - RNA, 19 nt, Artificial Sequence
  Description of Artificial Sequence: Synthetic oligonucleotide
  Antisense strand to SEQ ID NO: 2087288
cauaucagagauugccaca

SEQ ID NO: 2087290 - RNA, 19 nt, Artificial Sequence
  Description of Artificial Sequence: Synthetic oligonucleotide
  Sense strand starting at position 2243 of SEQ ID NO: 1881998
uguagagaaucaucuuuaa

SEQ ID NO: 2087291 - RNA, 19 nt, Artificial Sequence
  Description of Artificial Sequence: Synthetic oligonucleotide
  Antisense strand to SEQ ID NO: 2087290
uuaaagaugauucucuaca

SEQ ID NO: 2087292 - RNA, 19 nt, Artificial Sequence
  Description of Artificial Sequence: Synthetic oligonucleotide
  Sense strand starting at position 2271 of SEQ ID NO: 1881998
uugucaaucuugucaauag

SEQ ID NO: 2087293 - RNA, 19 nt, Artificial Sequence
  Description of Artificial Sequence: Synthetic oligonucleotide
  Antisense strand to SEQ ID NO: 2087292
cuauugacaagauugacaa

SEQ ID NO: 2087294 - RNA, 19 nt, Artificial Sequence
  Description of Artificial Sequence: Synthetic oligonucleotide
  Sense strand starting at position 2890 of SEQ ID NO: 1881998
uuguuucugaaauguagag

SEQ ID NO: 2087295 - RNA, 19 nt, Artificial Sequence
  Description of Artificial Sequence: Synthetic oligonucleotide
  Antisense strand to SEQ ID NO: 2087294
cucuacauuucagaaacaa

SEQ ID NO: 2087296 - RNA, 19 nt, Artificial Sequence
  Description of Artificial Sequence: Synthetic oligonucleotide
  Sense strand starting at position 2924 of SEQ ID NO: 1881998
cuagucugucuccauauca

SEQ ID NO: 2087297 - RNA, 19 nt, Artificial Sequence
  Description of Artificial Sequence: Synthetic oligonucleotide
  Antisense strand to SEQ ID NO: 2087296
ugauauggagacagacuag

SEQ ID NO: 2087298 - RNA, 19 nt, Artificial Sequence
  Description of Artificial Sequence: Synthetic oligonucleotide
  Sense strand starting at position 2960 of SEQ ID NO: 1881998
ucaggauaaagucgaaauu

SEQ ID NO: 2087299 - RNA, 19 nt, Artificial Sequence
  Description of Artificial Sequence: Synthetic oligonucleotide
  Antisense strand to SEQ ID NO: 2087298
aauuucgacuuuauccuga

SEQ ID NO: 2087300 - RNA, 19 nt, Artificial Sequence
  Description of Artificial Sequence: Synthetic oligonucleotide
  Sense strand starting at position 3071 of SEQ ID NO: 1881998
uugauaucggcuuacuucu

SEQ ID NO: 2087301 - RNA, 19 nt, Artificial Sequence
  Description of Artificial Sequence: Synthetic oligonucleotide
  Antisense strand to SEQ ID NO: 2087300
agaaguaagccgauaucaa

SEQ ID NO: 2087302 - RNA, 19 nt, Artificial Sequence
  Description of Artificial Sequence: Synthetic oligonucleotide
  Sense strand starting at position 3249 of SEQ ID NO: 1881998
cugaccuaacauggugaaa

SEQ ID NO: 2087303 - RNA, 19 nt, Artificial Sequence
  Description of Artificial Sequence: Synthetic oligonucleotide
  Antisense strand to SEQ ID NO: 2087302
uuucaccauguuaggucag

SEQ ID NO: 2087304 - RNA, 19 nt, Artificial Sequence
  Description of Artificial Sequence: Synthetic oligonucleotide
  Sense strand starting at position 3534 of SEQ ID NO: 1881998
aggaaauccuaccuaguag

SEQ ID NO: 2087305 - RNA, 19 nt, Artificial Sequence
  Description of Artificial Sequence: Synthetic oligonucleotide
  Antisense strand to SEQ ID NO: 2087304
cuacuagguaggauuuccu

SEQ ID NO: 2087306 - RNA, 19 nt, Artificial Sequence
  Description of Artificial Sequence: Synthetic oligonucleotide
  Sense strand starting at position 3545 of SEQ ID NO: 1881998
ccuaguagcuauuuccuga

SEQ ID NO: 2087307 - RNA, 19 nt, Artificial Sequence
  Description of Artificial Sequence: Synthetic oligonucleotide
  Antisense strand to SEQ ID NO: 2087306
ucaggaaauagcuacuagg

SEQ ID NO: 2087308 - RNA, 19 nt, Artificial Sequence
  Description of Artificial Sequence: Synthetic oligonucleotide
  Sense strand starting at position 3929 of SEQ ID NO: 1881998
ucauguuggucauuaaaga

SEQ ID NO: 2087309 - RNA, 19 nt, Artificial Sequence
  Description of Artificial Sequence: Synthetic oligonucleotide
  Antisense strand to SEQ ID NO: 2087308
ucuuuaaugaccaacauga

SEQ ID NO: 2087310 - RNA, 19 nt, Artificial Sequence
  Description of Artificial Sequence: Synthetic oligonucleotide
  Sense strand starting at position 3937 of SEQ ID NO: 1881998
gucauuaaagagcaguauu

SEQ ID NO: 2087311 - RNA, 19 nt, Artificial Sequence
  Description of Artificial Sequence: Synthetic oligonucleotide
  Antisense strand to SEQ ID NO: 2087310
aauacugcucuuuaaugac

SEQ ID NO: 2087312 - RNA, 19 nt, Artificial Sequence
  Description of Artificial Sequence: Synthetic oligonucleotide
  Sense strand starting at position 3945 of SEQ ID NO: 1881998
agagcaguauucucuagau

SEQ ID NO: 2087313 - RNA, 19 nt, Artificial Sequence
  Description of Artificial Sequence: Synthetic oligonucleotide
  Antisense strand to SEQ ID NO: 2087312
aucuagagaauacugcucu

SEQ ID NO: 2087314 - RNA, 19 nt, Artificial Sequence
  Description of Artificial Sequence: Synthetic oligonucleotide
  Sense strand starting at position 3973 of SEQ ID NO: 1881998
ugacaaauguuggucaacu

SEQ ID NO: 2087315 - RNA, 19 nt, Artificial Sequence
  Description of Artificial Sequence: Synthetic oligonucleotide
  Antisense strand to SEQ ID NO: 2087314
aguugaccaacauuuguca

SEQ ID NO: 2087316 - RNA, 19 nt, Artificial Sequence
  Description of Artificial Sequence: Synthetic oligonucleotide
  Sense strand starting at position 3974 of SEQ ID NO: 1881998
gacaaauguuggucaacuu

SEQ ID NO: 2087317 - RNA, 19 nt, Artificial Sequence
  Description of Artificial Sequence: Synthetic oligonucleotide
  Antisense strand to SEQ ID NO: 2087316
aaguugaccaacauuuguc

SEQ ID NO: 2087318 - RNA, 19 nt, Artificial Sequence
  Description of Artificial Sequence: Synthetic oligonucleotide
  Sense strand starting at position 3975 of SEQ ID NO: 1881998
acaaauguuggucaacuuu

SEQ ID NO: 2087319 - RNA, 19 nt, Artificial Sequence
  Description of Artificial Sequence: Synthetic oligonucleotide
  Antisense strand to SEQ ID NO: 2087318
aaaguugaccaacauuugu

SEQ ID NO: 2087320 - RNA, 19 nt, Artificial Sequence
  Description of Artificial Sequence: Synthetic oligonucleotide
  Sense strand starting at position 64 of SEQ ID NO: 1881999
gauucuuuauagucagaug

SEQ ID NO: 2087321 - RNA, 19 nt, Artificial Sequence
  Description of Artificial Sequence: Synthetic oligonucleotide
  Antisense strand to SEQ ID NO: 2087320
caucugacuauaaagaauc

SEQ ID NO: 2087322 - RNA, 19 nt, Artificial Sequence
  Description of Artificial Sequence: Synthetic oligonucleotide
  Sense strand starting at position 72 of SEQ ID NO: 1881999
auagucagaugaguuugaa

SEQ ID NO: 2087323 - RNA, 19 nt, Artificial Sequence
  Description of Artificial Sequence: Synthetic oligonucleotide
  Antisense strand to SEQ ID NO: 2087322
uucaaacucaucugacuau

SEQ ID NO: 2087324 - RNA, 19 nt, Artificial Sequence
  Description of Artificial Sequence: Synthetic oligonucleotide
  Sense strand starting at position 81 of SEQ ID NO: 1881999
ugaguuugaaucugagauu

SEQ ID NO: 2087325 - RNA, 19 nt, Artificial Sequence
  Description of Artificial Sequence: Synthetic oligonucleotide
  Antisense strand to SEQ ID NO: 2087324
aaucucagauucaaacuca

SEQ ID NO: 2087326 - RNA, 19 nt, Artificial Sequence
  Description of Artificial Sequence: Synthetic oligonucleotide
  Sense strand starting at position 92 of SEQ ID NO: 1881999
cugagauugucacuuaaug

SEQ ID NO: 2087327 - RNA, 19 nt, Artificial Sequence
  Description of Artificial Sequence: Synthetic oligonucleotide
  Antisense strand to SEQ ID NO: 2087326
cauuaagugacaaucucag

SEQ ID NO: 2087328 - RNA, 19 nt, Artificial Sequence
  Description of Artificial Sequence: Synthetic oligonucleotide
  Sense strand starting at position 172 of SEQ ID NO: 1881999
ggguuauaauuucugugcu

SEQ ID NO: 2087329 - RNA, 19 nt, Artificial Sequence
  Description of Artificial Sequence: Synthetic oligonucleotide
  Antisense strand to SEQ ID NO: 2087328
agcacagaaauuauaaccc

SEQ ID NO: 2087330 - RNA, 19 nt, Artificial Sequence
  Description of Artificial Sequence: Synthetic oligonucleotide
  Sense strand starting at position 174 of SEQ ID NO: 1881999
guuauaauuucugugcuag

SEQ ID NO: 2087331 - RNA, 19 nt, Artificial Sequence
  Description of Artificial Sequence: Synthetic oligonucleotide
  Antisense strand to SEQ ID NO: 2087330
cuagcacagaaauuauaac

SEQ ID NO: 2087332 - RNA, 19 nt, Artificial Sequence
  Description of Artificial Sequence: Synthetic oligonucleotide
  Sense strand starting at position 176 of SEQ ID NO: 1881999
uauaauuucugugcuaggu

SEQ ID NO: 2087333 - RNA, 19 nt, Artificial Sequence
  Description of Artificial Sequence: Synthetic oligonucleotide
  Antisense strand to SEQ ID NO: 2087332
accuagcacagaaauuaua

SEQ ID NO: 2087334 - RNA, 19 nt, Artificial Sequence
  Description of Artificial Sequence: Synthetic oligonucleotide
  Sense strand starting at position 459 of SEQ ID NO: 1881999
ucugaacuuccuugagaga

SEQ ID NO: 2087335 - RNA, 19 nt, Artificial Sequence
  Description of Artificial Sequence: Synthetic oligonucleotide
  Antisense strand to SEQ ID NO: 2087334
ucucucaaggaaguucaga

SEQ ID NO: 2087336 - RNA, 19 nt, Artificial Sequence
  Description of Artificial Sequence: Synthetic oligonucleotide
  Sense strand starting at position 1306 of SEQ ID NO: 1881999
ccagguagguacucagaga

SEQ ID NO: 2087337 - RNA, 19 nt, Artificial Sequence
  Description of Artificial Sequence: Synthetic oligonucleotide
  Antisense strand to SEQ ID NO: 2087336
ucucugaguaccuaccugg

SEQ ID NO: 2087338 - RNA, 19 nt, Artificial Sequence
  Description of Artificial Sequence: Synthetic oligonucleotide
  Sense strand starting at position 1313 of SEQ ID NO: 1881999
gguacucagagagguauaa

SEQ ID NO: 2087339 - RNA, 19 nt, Artificial Sequence
  Description of Artificial Sequence: Synthetic oligonucleotide
  Antisense strand to SEQ ID NO: 2087338
uuauaccucucugaguacc

SEQ ID NO: 2087340 - RNA, 19 nt, Artificial Sequence
  Description of Artificial Sequence: Synthetic oligonucleotide
  Sense strand starting at position 1389 of SEQ ID NO: 1881999
cugcucugucuugcuguua

SEQ ID NO: 2087341 - RNA, 19 nt, Artificial Sequence
  Description of Artificial Sequence: Synthetic oligonucleotide
  Antisense strand to SEQ ID NO: 2087340
uaacagcaagacagagcag

SEQ ID NO: 2087342 - RNA, 19 nt, Artificial Sequence
  Description of Artificial Sequence: Synthetic oligonucleotide
  Sense strand starting at position 1520 of SEQ ID NO: 1881999
gccuuuggcgucuccuaua

SEQ ID NO: 2087343 - RNA, 19 nt, Artificial Sequence
  Description of Artificial Sequence: Synthetic oligonucleotide
  Antisense strand to SEQ ID NO: 2087342
uauaggagacgccaaaggc

SEQ ID NO: 2087344 - RNA, 19 nt, Artificial Sequence
  Description of Artificial Sequence: Synthetic oligonucleotide
  Sense strand starting at position 1534 of SEQ ID NO: 1881999
cuauacuucccagggauau

SEQ ID NO: 2087345 - RNA, 19 nt, Artificial Sequence
  Description of Artificial Sequence: Synthetic oligonucleotide
  Antisense strand to SEQ ID NO: 2087344
auaucccugggaaguauag

SEQ ID NO: 2087346 - RNA, 19 nt, Artificial Sequence
  Description of Artificial Sequence: Synthetic oligonucleotide
  Sense strand starting at position 1535 of SEQ ID NO: 1881999
uauacuucccagggauaug

SEQ ID NO: 2087347 - RNA, 19 nt, Artificial Sequence
  Description of Artificial Sequence: Synthetic oligonucleotide
  Antisense strand to SEQ ID NO: 2087346
cauaucccugggaaguaua

SEQ ID NO: 2087348 - RNA, 19 nt, Artificial Sequence
  Description of Artificial Sequence: Synthetic oligonucleotide
  Sense strand starting at position 1567 of SEQ ID NO: 1881999
agacaaauacucggucuga

SEQ ID NO: 2087349 - RNA, 19 nt, Artificial Sequence
  Description of Artificial Sequence: Synthetic oligonucleotide
  Antisense strand to SEQ ID NO: 2087348
ucagaccgaguauuugucu

SEQ ID NO: 2087350 - RNA, 19 nt, Artificial Sequence
  Description of Artificial Sequence: Synthetic oligonucleotide
  Sense strand starting at position 1568 of SEQ ID NO: 1881999
gacaaauacucggucugaa

SEQ ID NO: 2087351 - RNA, 19 nt, Artificial Sequence
  Description of Artificial Sequence: Synthetic oligonucleotide
  Antisense strand to SEQ ID NO: 2087350
uucagaccgaguauuuguc

SEQ ID NO: 2087352 - RNA, 19 nt, Artificial Sequence
  Description of Artificial Sequence: Synthetic oligonucleotide
  Sense strand starting at position 1571 of SEQ ID NO: 1881999
aaauacucggucugaagau

SEQ ID NO: 2087353 - RNA, 19 nt, Artificial Sequence
  Description of Artificial Sequence: Synthetic oligonucleotide
  Antisense strand to SEQ ID NO: 2087352
aucuucagaccgaguauuu

SEQ ID NO: 2087354 - RNA, 19 nt, Artificial Sequence
  Description of Artificial Sequence: Synthetic oligonucleotide
  Sense strand starting at position 1609 of SEQ ID NO: 1881999
agucgcagauuuguaucau

SEQ ID NO: 2087355 - RNA, 19 nt, Artificial Sequence
  Description of Artificial Sequence: Synthetic oligonucleotide
  Antisense strand to SEQ ID NO: 2087354
augauacaaaucugcgacu

SEQ ID NO: 2087356 - RNA, 19 nt, Artificial Sequence
  Description of Artificial Sequence: Synthetic oligonucleotide
  Sense strand starting at position 2088 of SEQ ID NO: 1881999
uugcuaaaggcguuugcua

SEQ ID NO: 2087357 - RNA, 19 nt, Artificial Sequence
  Description of Artificial Sequence: Synthetic oligonucleotide
  Antisense strand to SEQ ID NO: 2087356
uagcaaacgccuuuagcaa

SEQ ID NO: 2087358 - RNA, 19 nt, Artificial Sequence
  Description of Artificial Sequence: Synthetic oligonucleotide
  Sense strand starting at position 2089 of SEQ ID NO: 1881999
ugcuaaaggcguuugcuaa

SEQ ID NO: 2087359 - RNA, 19 nt, Artificial Sequence
  Description of Artificial Sequence: Synthetic oligonucleotide
  Antisense strand to SEQ ID NO: 2087358
uuagcaaacgccuuuagca

SEQ ID NO: 2087360 - RNA, 19 nt, Artificial Sequence
  Description of Artificial Sequence: Synthetic oligonucleotide
  Sense strand starting at position 2288 of SEQ ID NO: 1881999
uccuguuuaggguauagga

SEQ ID NO: 2087361 - RNA, 19 nt, Artificial Sequence
  Description of Artificial Sequence: Synthetic oligonucleotide
  Antisense strand to SEQ ID NO: 2087360
uccuauacccuaaacagga

SEQ ID NO: 2087362 - RNA, 19 nt, Artificial Sequence
  Description of Artificial Sequence: Synthetic oligonucleotide
  Sense strand starting at position 2331 of SEQ ID NO: 1881999
uaacguuucccaguugcga

SEQ ID NO: 2087363 - RNA, 19 nt, Artificial Sequence
  Description of Artificial Sequence: Synthetic oligonucleotide
  Antisense strand to SEQ ID NO: 2087362
ucgcaacugggaaacguua

SEQ ID NO: 2087364 - RNA, 19 nt, Artificial Sequence
  Description of Artificial Sequence: Synthetic oligonucleotide
  Sense strand starting at position 2357 of SEQ ID NO: 1881999
uuuggaaaugugcauaaau

SEQ ID NO: 2087365 - RNA, 19 nt, Artificial Sequence
  Description of Artificial Sequence: Synthetic oligonucleotide
  Antisense strand to SEQ ID NO: 2087364
auuuaugcacauuuccaaa

SEQ ID NO: 2087366 - RNA, 19 nt, Artificial Sequence
  Description of Artificial Sequence: Synthetic oligonucleotide
  Sense strand starting at position 2512 of SEQ ID NO: 1881999
ggagaucugggaugcaaau

SEQ ID NO: 2087367 - RNA, 19 nt, Artificial Sequence
  Description of Artificial Sequence: Synthetic oligonucleotide
  Antisense strand to SEQ ID NO: 2087366
auuugcaucccagaucucc

SEQ ID NO: 2087368 - RNA, 19 nt, Artificial Sequence
  Description of Artificial Sequence: Synthetic oligonucleotide
  Sense strand starting at position 2605 of SEQ ID NO: 1881999
ugcugauaaagaggucaga

SEQ ID NO: 2087369 - RNA, 19 nt, Artificial Sequence
  Description of Artificial Sequence: Synthetic oligonucleotide
  Antisense strand to SEQ ID NO: 2087368
ucugaccucuuuaucagca

SEQ ID NO: 2087370 - RNA, 19 nt, Artificial Sequence
  Description of Artificial Sequence: Synthetic oligonucleotide
  Sense strand starting at position 2615 of SEQ ID NO: 1881999
gaggucagaaauggguaau

SEQ ID NO: 2087371 - RNA, 19 nt, Artificial Sequence
  Description of Artificial Sequence: Synthetic oligonucleotide
  Antisense strand to SEQ ID NO: 2087370
auuacccauuucugaccuc

SEQ ID NO: 2087372 - RNA, 19 nt, Artificial Sequence
  Description of Artificial Sequence: Synthetic oligonucleotide
  Sense strand starting at position 2616 of SEQ ID NO: 1881999
aggucagaaauggguaauu

SEQ ID NO: 2087373 - RNA, 19 nt, Artificial Sequence
  Description of Artificial Sequence: Synthetic oligonucleotide
  Antisense strand to SEQ ID NO: 2087372
aauuacccauuucugaccu

SEQ ID NO: 2087374 - RNA, 19 nt, Artificial Sequence
  Description of Artificial Sequence: Synthetic oligonucleotide
  Sense strand starting at position 2640 of SEQ ID NO: 1881999
gcagcaucauaauuagaaa

SEQ ID NO: 2087375 - RNA, 19 nt, Artificial Sequence
  Description of Artificial Sequence: Synthetic oligonucleotide
  Antisense strand to SEQ ID NO: 2087374
uuucuaauuaugaugcugc

SEQ ID NO: 2087376 - RNA, 19 nt, Artificial Sequence
  Description of Artificial Sequence: Synthetic oligonucleotide
  Sense strand starting at position 2694 of SEQ ID NO: 1881999
ccuugcaagcaucaagaaa

SEQ ID NO: 2087377 - RNA, 19 nt, Artificial Sequence
  Description of Artificial Sequence: Synthetic oligonucleotide
  Antisense strand to SEQ ID NO: 2087376
uuucuugaugcuugcaagg

SEQ ID NO: 2087378 - RNA, 19 nt, Artificial Sequence
  Description of Artificial Sequence: Synthetic oligonucleotide
  Sense strand starting at position 2790 of SEQ ID NO: 1881999
ccguguagccuuucagguu

SEQ ID NO: 2087379 - RNA, 19 nt, Artificial Sequence
  Description of Artificial Sequence: Synthetic oligonucleotide
  Antisense strand to SEQ ID NO: 2087378
aaccugaaaggcuacacgg

SEQ ID NO: 2087380 - RNA, 19 nt, Artificial Sequence
  Description of Artificial Sequence: Synthetic oligonucleotide
  Sense strand starting at position 2889 of SEQ ID NO: 1881999
gaucuauguuauucuaagg

SEQ ID NO: 2087381 - RNA, 19 nt, Artificial Sequence
  Description of Artificial Sequence: Synthetic oligonucleotide
  Antisense strand to SEQ ID NO: 2087380
ccuuagaauaacauagauc

SEQ ID NO: 2087382 - RNA, 19 nt, Artificial Sequence
  Description of Artificial Sequence: Synthetic oligonucleotide
  Sense strand starting at position 2962 of SEQ ID NO: 1881999
augcauucgauuugcagaa

SEQ ID NO: 2087383 - RNA, 19 nt, Artificial Sequence
  Description of Artificial Sequence: Synthetic oligonucleotide
  Antisense strand to SEQ ID NO: 2087382
uucugcaaaucgaaugcau

SEQ ID NO: 2087384 - RNA, 19 nt, Artificial Sequence
  Description of Artificial Sequence: Synthetic oligonucleotide
  Sense strand starting at position 2987 of SEQ ID NO: 1881999
acguaaugaagcgauuaaa

SEQ ID NO: 2087385 - RNA, 19 nt, Artificial Sequence
  Description of Artificial Sequence: Synthetic oligonucleotide
  Antisense strand to SEQ ID NO: 2087384
uuuaaucgcuucauuacgu

SEQ ID NO: 2087386 - RNA, 19 nt, Artificial Sequence
  Description of Artificial Sequence: Synthetic oligonucleotide
  Sense strand starting at position 3048 of SEQ ID NO: 1881999
cuagaugaucuuggaccuu

SEQ ID NO: 2087387 - RNA, 19 nt, Artificial Sequence
  Description of Artificial Sequence: Synthetic oligonucleotide
  Antisense strand to SEQ ID NO: 2087386
aagguccaagaucaucuag

SEQ ID NO: 2087388 - RNA, 19 nt, Artificial Sequence
  Description of Artificial Sequence: Synthetic oligonucleotide
  Sense strand starting at position 3173 of SEQ ID NO: 1881999
uugugaugauuucuugcua

SEQ ID NO: 2087389 - RNA, 19 nt, Artificial Sequence
  Description of Artificial Sequence: Synthetic oligonucleotide
  Antisense strand to SEQ ID NO: 2087388
uagcaagaaaucaucacaa

SEQ ID NO: 2087390 - RNA, 19 nt, Artificial Sequence
  Description of Artificial Sequence: Synthetic oligonucleotide
  Sense strand starting at position 3177 of SEQ ID NO: 1881999
gaugauuucuugcuagcua

SEQ ID NO: 2087391 - RNA, 19 nt, Artificial Sequence
  Description of Artificial Sequence: Synthetic oligonucleotide
  Antisense strand to SEQ ID NO: 2087390
uagcuagcaagaaaucauc

SEQ ID NO: 2087392 - RNA, 19 nt, Artificial Sequence
  Description of Artificial Sequence: Synthetic oligonucleotide
  Sense strand starting at position 3452 of SEQ ID NO: 1881999
agggcagucauaugggaac

SEQ ID NO: 2087393 - RNA, 19 nt, Artificial Sequence
  Description of Artificial Sequence: Synthetic oligonucleotide
  Antisense strand to SEQ ID NO: 2087392
guucccauaugacugcccu

SEQ ID NO: 2087394 - RNA, 19 nt, Artificial Sequence
  Description of Artificial Sequence: Synthetic oligonucleotide
  Sense strand starting at position 3704 of SEQ ID NO: 1881999
ccagguuugaaacgaagaa

SEQ ID NO: 2087395 - RNA, 19 nt, Artificial Sequence
  Description of Artificial Sequence: Synthetic oligonucleotide
  Antisense strand to SEQ ID NO: 2087394
uucuucguuucaaaccugg

SEQ ID NO: 2087396 - RNA, 19 nt, Artificial Sequence
  Description of Artificial Sequence: Synthetic oligonucleotide
  Sense strand starting at position 3928 of SEQ ID NO: 1881999
aggaaauuccagcauguuc

SEQ ID NO: 2087397 - RNA, 19 nt, Artificial Sequence
  Description of Artificial Sequence: Synthetic oligonucleotide
  Antisense strand to SEQ ID NO: 2087396
gaacaugcuggaauuuccu

SEQ ID NO: 2087398 - RNA, 19 nt, Artificial Sequence
  Description of Artificial Sequence: Synthetic oligonucleotide
  Sense strand starting at position 3966 of SEQ ID NO: 1881999
cuauguaguaggcagaaua

SEQ ID NO: 2087399 - RNA, 19 nt, Artificial Sequence
  Description of Artificial Sequence: Synthetic oligonucleotide
  Antisense strand to SEQ ID NO: 2087398
uauucugccuacuacauag

SEQ ID NO: 2087400 - RNA, 19 nt, Artificial Sequence
  Description of Artificial Sequence: Synthetic oligonucleotide
  Sense strand starting at position 195 of SEQ ID NO: 1882001
uuuaguuugggagauagua

SEQ ID NO: 2087401 - RNA, 19 nt, Artificial Sequence
  Description of Artificial Sequence: Synthetic oligonucleotide
  Antisense strand to SEQ ID NO: 2087400
uacuaucucccaaacuaaa

SEQ ID NO: 2087402 - RNA, 19 nt, Artificial Sequence
  Description of Artificial Sequence: Synthetic oligonucleotide
  Sense strand starting at position 197 of SEQ ID NO: 1882001
uaguuugggagauaguauu

SEQ ID NO: 2087403 - RNA, 19 nt, Artificial Sequence
  Description of Artificial Sequence: Synthetic oligonucleotide
  Antisense strand to SEQ ID NO: 2087402
aauacuaucucccaaacua

SEQ ID NO: 2087404 - RNA, 19 nt, Artificial Sequence
  Description of Artificial Sequence: Synthetic oligonucleotide
  Sense strand starting at position 260 of SEQ ID NO: 1882001
gaggaauacuuagcaguau

SEQ ID NO: 2087405 - RNA, 19 nt, Artificial Sequence
  Description of Artificial Sequence: Synthetic oligonucleotide
  Antisense strand to SEQ ID NO: 2087404
auacugcuaaguauuccuc

SEQ ID NO: 2087406 - RNA, 19 nt, Artificial Sequence
  Description of Artificial Sequence: Synthetic oligonucleotide
  Sense strand starting at position 322 of SEQ ID NO: 1882001
guugacuuucuguaagaug

SEQ ID NO: 2087407 - RNA, 19 nt, Artificial Sequence
  Description of Artificial Sequence: Synthetic oligonucleotide
  Antisense strand to SEQ ID NO: 2087406
caucuuacagaaagucaac

SEQ ID NO: 2087408 - RNA, 19 nt, Artificial Sequence
  Description of Artificial Sequence: Synthetic oligonucleotide
  Sense strand starting at position 534 of SEQ ID NO: 1882001
cugaaagucugacuuuaaa

SEQ ID NO: 2087409 - RNA, 19 nt, Artificial Sequence
  Description of Artificial Sequence: Synthetic oligonucleotide
  Antisense strand to SEQ ID NO: 2087408
uuuaaagucagacuuucag

SEQ ID NO: 2087410 - RNA, 19 nt, Artificial Sequence
  Description of Artificial Sequence: Synthetic oligonucleotide
  Sense strand starting at position 606 of SEQ ID NO: 1882001
gcugguaucagucauaaag

SEQ ID NO: 2087411 - RNA, 19 nt, Artificial Sequence
  Description of Artificial Sequence: Synthetic oligonucleotide
  Antisense strand to SEQ ID NO: 2087410
cuuuaugacugauaccagc

SEQ ID NO: 2087412 - RNA, 19 nt, Artificial Sequence
  Description of Artificial Sequence: Synthetic oligonucleotide
  Sense strand starting at position 679 of SEQ ID NO: 1882001
aguauucuccagcagaacu

SEQ ID NO: 2087413 - RNA, 19 nt, Artificial Sequence
  Description of Artificial Sequence: Synthetic oligonucleotide
  Antisense strand to SEQ ID NO: 2087412
aguucugcuggagaauacu

SEQ ID NO: 2087414 - RNA, 19 nt, Artificial Sequence
  Description of Artificial Sequence: Synthetic oligonucleotide
  Sense strand starting at position 694 of SEQ ID NO: 1882001
aacuuuaugcagugaugga

SEQ ID NO: 2087415 - RNA, 19 nt, Artificial Sequence
  Description of Artificial Sequence: Synthetic oligonucleotide
  Antisense strand to SEQ ID NO: 2087414
uccaucacugcauaaaguu

SEQ ID NO: 2087416 - RNA, 19 nt, Artificial Sequence
  Description of Artificial Sequence: Synthetic oligonucleotide
  Sense strand starting at position 695 of SEQ ID NO: 1882001
acuuuaugcagugauggaa

SEQ ID NO: 2087417 - RNA, 19 nt, Artificial Sequence
  Description of Artificial Sequence: Synthetic oligonucleotide
  Antisense strand to SEQ ID NO: 2087416
uuccaucacugcauaaagu

SEQ ID NO: 2087418 - RNA, 19 nt, Artificial Sequence
  Description of Artificial Sequence: Synthetic oligonucleotide
  Sense strand starting at position 707 of SEQ ID NO: 1882001
gauggaaacguuugacaug

SEQ ID NO: 2087419 - RNA, 19 nt, Artificial Sequence
  Description of Artificial Sequence: Synthetic oligonucleotide
  Antisense strand to SEQ ID NO: 2087418
caugucaaacguuuccauc

SEQ ID NO: 2087420 - RNA, 19 nt, Artificial Sequence
  Description of Artificial Sequence: Synthetic oligonucleotide
  Sense strand starting at position 719 of SEQ ID NO: 1882001
ugacaugucgcuguccagu

SEQ ID NO: 2087421 - RNA, 19 nt, Artificial Sequence
  Description of Artificial Sequence: Synthetic oligonucleotide
  Antisense strand to SEQ ID NO: 2087420
acuggacagcgacauguca

SEQ ID NO: 2087422 - RNA, 19 nt, Artificial Sequence
  Description of Artificial Sequence: Synthetic oligonucleotide
  Sense strand starting at position 776 of SEQ ID NO: 1882001
aaauauggccaguggaacu

SEQ ID NO: 2087423 - RNA, 19 nt, Artificial Sequence
  Description of Artificial Sequence: Synthetic oligonucleotide
  Antisense strand to SEQ ID NO: 2087422
aguuccacuggccauauuu

SEQ ID NO: 2087424 - RNA, 19 nt, Artificial Sequence
  Description of Artificial Sequence: Synthetic oligonucleotide
  Sense strand starting at position 905 of SEQ ID NO: 1882001
uucgauguaauugaguauu

SEQ ID NO: 2087425 - RNA, 19 nt, Artificial Sequence
  Description of Artificial Sequence: Synthetic oligonucleotide
  Antisense strand to SEQ ID NO: 2087424
aauacucaauuacaucgaa

SEQ ID NO: 2087426 - RNA, 19 nt, Artificial Sequence
  Description of Artificial Sequence: Synthetic oligonucleotide
  Sense strand starting at position 908 of SEQ ID NO: 1882001
gauguaauugaguauucca

SEQ ID NO: 2087427 - RNA, 19 nt, Artificial Sequence
  Description of Artificial Sequence: Synthetic oligonucleotide
  Antisense strand to SEQ ID NO: 2087426
uggaauacucaauuacauc

SEQ ID NO: 2087428 - RNA, 19 nt, Artificial Sequence
  Description of Artificial Sequence: Synthetic oligonucleotide
  Sense strand starting at position 911 of SEQ ID NO: 1882001
guaauugaguauuccacaa

SEQ ID NO: 2087429 - RNA, 19 nt, Artificial Sequence
  Description of Artificial Sequence: Synthetic oligonucleotide
  Antisense strand to SEQ ID NO: 2087428
uuguggaauacucaauuac

SEQ ID NO: 2087430 - RNA, 19 nt, Artificial Sequence
  Description of Artificial Sequence: Synthetic oligonucleotide
  Sense strand starting at position 1145 of SEQ ID NO: 1882001
gcuuaauagagcuaugagu

SEQ ID NO: 2087431 - RNA, 19 nt, Artificial Sequence
  Description of Artificial Sequence: Synthetic oligonucleotide
  Antisense strand to SEQ ID NO: 2087430
acucauagcucuauuaagc

SEQ ID NO: 2087432 - RNA, 19 nt, Artificial Sequence
  Description of Artificial Sequence: Synthetic oligonucleotide
  Sense strand starting at position 1147 of SEQ ID NO: 1882001
uuaauagagcuaugaguug

SEQ ID NO: 2087433 - RNA, 19 nt, Artificial Sequence
  Description of Artificial Sequence: Synthetic oligonucleotide
  Antisense strand to SEQ ID NO: 2087432
caacucauagcucuauuaa

SEQ ID NO: 2087434 - RNA, 19 nt, Artificial Sequence
  Description of Artificial Sequence: Synthetic oligonucleotide
  Sense strand starting at position 1231 of SEQ ID NO: 1882001
gcccguguucuuuccuauu

SEQ ID NO: 2087435 - RNA, 19 nt, Artificial Sequence
  Description of Artificial Sequence: Synthetic oligonucleotide
  Antisense strand to SEQ ID NO: 2087434
aauaggaaagaacacgggc

SEQ ID NO: 2087436 - RNA, 19 nt, Artificial Sequence
  Description of Artificial Sequence: Synthetic oligonucleotide
  Sense strand starting at position 2112 of SEQ ID NO: 1882001
gagugaguugcucaaacua

SEQ ID NO: 2087437 - RNA, 19 nt, Artificial Sequence
  Description of Artificial Sequence: Synthetic oligonucleotide
  Antisense strand to SEQ ID NO: 2087436
uaguuugagcaacucacuc

SEQ ID NO: 2087438 - RNA, 19 nt, Artificial Sequence
  Description of Artificial Sequence: Synthetic oligonucleotide
  Sense strand starting at position 2291 of SEQ ID NO: 1882001
auaguaagguaucuagaag

SEQ ID NO: 2087439 - RNA, 19 nt, Artificial Sequence
  Description of Artificial Sequence: Synthetic oligonucleotide
  Antisense strand to SEQ ID NO: 2087438
cuucuagauaccuuacuau

SEQ ID NO: 2087440 - RNA, 19 nt, Artificial Sequence
  Description of Artificial Sequence: Synthetic oligonucleotide
  Sense strand starting at position 2343 of SEQ ID NO: 1882001
ccuugaauugaagguuucu

SEQ ID NO: 2087441 - RNA, 19 nt, Artificial Sequence
  Description of Artificial Sequence: Synthetic oligonucleotide
  Antisense strand to SEQ ID NO: 2087440
agaaaccuucaauucaagg

SEQ ID NO: 2087442 - RNA, 19 nt, Artificial Sequence
  Description of Artificial Sequence: Synthetic oligonucleotide
  Sense strand starting at position 2348 of SEQ ID NO: 1882001
aauugaagguuucugugau

SEQ ID NO: 2087443 - RNA, 19 nt, Artificial Sequence
  Description of Artificial Sequence: Synthetic oligonucleotide
  Antisense strand to SEQ ID NO: 2087442
aucacagaaaccuucaauu

SEQ ID NO: 2087444 - RNA, 19 nt, Artificial Sequence
  Description of Artificial Sequence: Synthetic oligonucleotide
  Sense strand starting at position 2383 of SEQ ID NO: 1882001
uagaaucaauguucugaug

SEQ ID NO: 2087445 - RNA, 19 nt, Artificial Sequence
  Description of Artificial Sequence: Synthetic oligonucleotide
  Antisense strand to SEQ ID NO: 2087444
caucagaacauugauucua

SEQ ID NO: 2087446 - RNA, 19 nt, Artificial Sequence
  Description of Artificial Sequence: Synthetic oligonucleotide
  Sense strand starting at position 2549 of SEQ ID NO: 1882001
guaucauaauuuguagugu

SEQ ID NO: 2087447 - RNA, 19 nt, Artificial Sequence
  Description of Artificial Sequence: Synthetic oligonucleotide
  Antisense strand to SEQ ID NO: 2087446
acacuacaaauuaugauac

SEQ ID NO: 2087448 - RNA, 19 nt, Artificial Sequence
  Description of Artificial Sequence: Synthetic oligonucleotide
  Sense strand starting at position 2639 of SEQ ID NO: 1882001
gugaauaggcccugggaga

SEQ ID NO: 2087449 - RNA, 19 nt, Artificial Sequence
  Description of Artificial Sequence: Synthetic oligonucleotide
  Antisense strand to SEQ ID NO: 2087448
ucucccagggccuauucac

SEQ ID NO: 2087450 - RNA, 19 nt, Artificial Sequence
  Description of Artificial Sequence: Synthetic oligonucleotide
  Sense strand starting at position 2640 of SEQ ID NO: 1882001
ugaauaggcccugggagau

SEQ ID NO: 2087451 - RNA, 19 nt, Artificial Sequence
  Description of Artificial Sequence: Synthetic oligonucleotide
  Antisense strand to SEQ ID NO: 2087450
aucucccagggccuauuca

SEQ ID NO: 2087452 - RNA, 19 nt, Artificial Sequence
  Description of Artificial Sequence: Synthetic oligonucleotide
  Sense strand starting at position 2650 of SEQ ID NO: 1882001
cugggagauguguauuaug

SEQ ID NO: 2087453 - RNA, 19 nt, Artificial Sequence
  Description of Artificial Sequence: Synthetic oligonucleotide
  Antisense strand to SEQ ID NO: 2087452
cauaauacacaucucccag

SEQ ID NO: 2087454 - RNA, 19 nt, Artificial Sequence
  Description of Artificial Sequence: Synthetic oligonucleotide
  Sense strand starting at position 2661 of SEQ ID NO: 1882001
guauuaugauucucacuua

SEQ ID NO: 2087455 - RNA, 19 nt, Artificial Sequence
  Description of Artificial Sequence: Synthetic oligonucleotide
  Antisense strand to SEQ ID NO: 2087454
uaagugagaaucauaauac

SEQ ID NO: 2087456 - RNA, 19 nt, Artificial Sequence
  Description of Artificial Sequence: Synthetic oligonucleotide
  Sense strand starting at position 2722 of SEQ ID NO: 1882001
ccaaaucacuugguaguga

SEQ ID NO: 2087457 - RNA, 19 nt, Artificial Sequence
  Description of Artificial Sequence: Synthetic oligonucleotide
  Antisense strand to SEQ ID NO: 2087456
ucacuaccaagugauuugg

SEQ ID NO: 2087458 - RNA, 19 nt, Artificial Sequence
  Description of Artificial Sequence: Synthetic oligonucleotide
  Sense strand starting at position 2962 of SEQ ID NO: 1882001
ugaccauccuggucugaug

SEQ ID NO: 2087459 - RNA, 19 nt, Artificial Sequence
  Description of Artificial Sequence: Synthetic oligonucleotide
  Antisense strand to SEQ ID NO: 2087458
caucagaccaggaugguca

SEQ ID NO: 2087460 - RNA, 19 nt, Artificial Sequence
  Description of Artificial Sequence: Synthetic oligonucleotide
  Sense strand starting at position 3118 of SEQ ID NO: 1882001
guuaaacacugcuuggaaa

SEQ ID NO: 2087461 - RNA, 19 nt, Artificial Sequence
  Description of Artificial Sequence: Synthetic oligonucleotide
  Antisense strand to SEQ ID NO: 2087460
uuuccaagcaguguuuaac

SEQ ID NO: 2087462 - RNA, 19 nt, Artificial Sequence
  Description of Artificial Sequence: Synthetic oligonucleotide
  Sense strand starting at position 3140 of SEQ ID NO: 1882001
aagguauuauugguaauag

SEQ ID NO: 2087463 - RNA, 19 nt, Artificial Sequence
  Description of Artificial Sequence: Synthetic oligonucleotide
  Antisense strand to SEQ ID NO: 2087462
cuauuaccaauaauaccuu

SEQ ID NO: 2087464 - RNA, 19 nt, Artificial Sequence
  Description of Artificial Sequence: Synthetic oligonucleotide
  Sense strand starting at position 3290 of SEQ ID NO: 1882001
guuagcuucggauauaaug

SEQ ID NO: 2087465 - RNA, 19 nt, Artificial Sequence
  Description of Artificial Sequence: Synthetic oligonucleotide
  Antisense strand to SEQ ID NO: 2087464
cauuauauccgaagcuaac

SEQ ID NO: 2087466 - RNA, 19 nt, Artificial Sequence
  Description of Artificial Sequence: Synthetic oligonucleotide
  Sense strand starting at position 3379 of SEQ ID NO: 1882001
auccuuagauauguguaaa

SEQ ID NO: 2087467 - RNA, 19 nt, Artificial Sequence
  Description of Artificial Sequence: Synthetic oligonucleotide
  Antisense strand to SEQ ID NO: 2087466
uuuacacauaucuaaggau

SEQ ID NO: 2087468 - RNA, 19 nt, Artificial Sequence
  Description of Artificial Sequence: Synthetic oligonucleotide
  Sense strand starting at position 3382 of SEQ ID NO: 1882001
cuuagauauguguaaaccu

SEQ ID NO: 2087469 - RNA, 19 nt, Artificial Sequence
  Description of Artificial Sequence: Synthetic oligonucleotide
  Antisense strand to SEQ ID NO: 2087468
agguuuacacauaucuaag

SEQ ID NO: 2087470 - RNA, 19 nt, Artificial Sequence
  Description of Artificial Sequence: Synthetic oligonucleotide
  Sense strand starting at position 3392 of SEQ ID NO: 1882001
uguaaaccuugucuugaaa

SEQ ID NO: 2087471 - RNA, 19 nt, Artificial Sequence
  Description of Artificial Sequence: Synthetic oligonucleotide
  Antisense strand to SEQ ID NO: 2087470
uuucaagacaagguuuaca

SEQ ID NO: 2087472 - RNA, 19 nt, Artificial Sequence
  Description of Artificial Sequence: Synthetic oligonucleotide
  Sense strand starting at position 3703 of SEQ ID NO: 1882001
auuugaaggugccaaagaa

SEQ ID NO: 2087473 - RNA, 19 nt, Artificial Sequence
  Description of Artificial Sequence: Synthetic oligonucleotide
  Antisense strand to SEQ ID NO: 2087472
uucuuuggcaccuucaaau

SEQ ID NO: 2087474 - RNA, 19 nt, Artificial Sequence
  Description of Artificial Sequence: Synthetic oligonucleotide
  Sense strand starting at position 3891 of SEQ ID NO: 1882001
acagaauagacguguauaa

SEQ ID NO: 2087475 - RNA, 19 nt, Artificial Sequence
  Description of Artificial Sequence: Synthetic oligonucleotide
  Antisense strand to SEQ ID NO: 2087474
uuauacacgucuauucugu

SEQ ID NO: 2087476 - RNA, 19 nt, Artificial Sequence
  Description of Artificial Sequence: Synthetic oligonucleotide
  Sense strand starting at position 3895 of SEQ ID NO: 1882001
aauagacguguauaacaau

SEQ ID NO: 2087477 - RNA, 19 nt, Artificial Sequence
  Description of Artificial Sequence: Synthetic oligonucleotide
  Antisense strand to SEQ ID NO: 2087476
auuguuauacacgucuauu

SEQ ID NO: 2087478 - RNA, 19 nt, Artificial Sequence
  Description of Artificial Sequence: Synthetic oligonucleotide
  Sense strand starting at position 3970 of SEQ ID NO: 1882001
uugcuuaaagaucauguca

SEQ ID NO: 2087479 - RNA, 19 nt, Artificial Sequence
  Description of Artificial Sequence: Synthetic oligonucleotide
  Antisense strand to SEQ ID NO: 2087478
ugacaugaucuuuaagcaa

SEQ ID NO: 2087480 - RNA, 19 nt, Artificial Sequence
  Description of Artificial Sequence: Synthetic oligonucleotide
  Sense strand starting at position 145 of SEQ ID NO: 1882000
aauagucaucuggaggcau

SEQ ID NO: 2087481 - RNA, 19 nt, Artificial Sequence
  Description of Artificial Sequence: Synthetic oligonucleotide
  Antisense strand to SEQ ID NO: 2087480
augccuccagaugacuauu

SEQ ID NO: 2087482 - RNA, 19 nt, Artificial Sequence
  Description of Artificial Sequence: Synthetic oligonucleotide
  Sense strand starting at position 158 of SEQ ID NO: 1882000
aggcauauugcugaacuua

SEQ ID NO: 2087483 - RNA, 19 nt, Artificial Sequence
  Description of Artificial Sequence: Synthetic oligonucleotide
  Antisense strand to SEQ ID NO: 2087482
uaaguucagcaauaugccu

SEQ ID NO: 2087484 - RNA, 19 nt, Artificial Sequence
  Description of Artificial Sequence: Synthetic oligonucleotide
  Sense strand starting at position 408 of SEQ ID NO: 1882000
ucuauacuaguugauguau

SEQ ID NO: 2087485 - RNA, 19 nt, Artificial Sequence
  Description of Artificial Sequence: Synthetic oligonucleotide
  Antisense strand to SEQ ID NO: 2087484
auacaucaacuaguauaga

SEQ ID NO: 2087486 - RNA, 19 nt, Artificial Sequence
  Description of Artificial Sequence: Synthetic oligonucleotide
  Sense strand starting at position 443 of SEQ ID NO: 1882000
uugggcaugguauauauua

SEQ ID NO: 2087487 - RNA, 19 nt, Artificial Sequence
  Description of Artificial Sequence: Synthetic oligonucleotide
  Antisense strand to SEQ ID NO: 2087486
uaauauauaccaugcccaa

SEQ ID NO: 2087488 - RNA, 19 nt, Artificial Sequence
  Description of Artificial Sequence: Synthetic oligonucleotide
  Sense strand starting at position 445 of SEQ ID NO: 1882000
gggcaugguauauauuaac

SEQ ID NO: 2087489 - RNA, 19 nt, Artificial Sequence
  Description of Artificial Sequence: Synthetic oligonucleotide
  Antisense strand to SEQ ID NO: 2087488
guuaauauauaccaugccc

SEQ ID NO: 2087490 - RNA, 19 nt, Artificial Sequence
  Description of Artificial Sequence: Synthetic oligonucleotide
  Sense strand starting at position 690 of SEQ ID NO: 1882000
acauguuaaugaccuggau

SEQ ID NO: 2087491 - RNA, 19 nt, Artificial Sequence
  Description of Artificial Sequence: Synthetic oligonucleotide
  Antisense strand to SEQ ID NO: 2087490
auccaggucauuaacaugu

SEQ ID NO: 2087492 - RNA, 19 nt, Artificial Sequence
  Description of Artificial Sequence: Synthetic oligonucleotide
  Sense strand starting at position 692 of SEQ ID NO: 1882000
auguuaaugaccuggauga

SEQ ID NO: 2087493 - RNA, 19 nt, Artificial Sequence
  Description of Artificial Sequence: Synthetic oligonucleotide
  Antisense strand to SEQ ID NO: 2087492
ucauccaggucauuaacau

SEQ ID NO: 2087494 - RNA, 19 nt, Artificial Sequence
  Description of Artificial Sequence: Synthetic oligonucleotide
  Sense strand starting at position 693 of SEQ ID NO: 1882000
uguuaaugaccuggaugaa

SEQ ID NO: 2087495 - RNA, 19 nt, Artificial Sequence
  Description of Artificial Sequence: Synthetic oligonucleotide
  Antisense strand to SEQ ID NO: 2087494
uucauccaggucauuaaca

SEQ ID NO: 2087496 - RNA, 19 nt, Artificial Sequence
  Description of Artificial Sequence: Synthetic oligonucleotide
  Sense strand starting at position 706 of SEQ ID NO: 1882000
gaugaaguccaguaaggug

SEQ ID NO: 2087497 - RNA, 19 nt, Artificial Sequence
  Description of Artificial Sequence: Synthetic oligonucleotide
  Antisense strand to SEQ ID NO: 2087496
caccuuacuggacuucauc

SEQ ID NO: 2087498 - RNA, 19 nt, Artificial Sequence
  Description of Artificial Sequence: Synthetic oligonucleotide
  Sense strand starting at position 817 of SEQ ID NO: 1882000
cgaugaagucgagaucuca

SEQ ID NO: 2087499 - RNA, 19 nt, Artificial Sequence
  Description of Artificial Sequence: Synthetic oligonucleotide
  Antisense strand to SEQ ID NO: 2087498
ugagaucucgacuucaucg

SEQ ID NO: 2087500 - RNA, 19 nt, Artificial Sequence
  Description of Artificial Sequence: Synthetic oligonucleotide
  Sense strand starting at position 826 of SEQ ID NO: 1882000
cgagaucucaaauacuggu

SEQ ID NO: 2087501 - RNA, 19 nt, Artificial Sequence
  Description of Artificial Sequence: Synthetic oligonucleotide
  Antisense strand to SEQ ID NO: 2087500
accaguauuugagaucucg

SEQ ID NO: 2087502 - RNA, 19 nt, Artificial Sequence
  Description of Artificial Sequence: Synthetic oligonucleotide
  Sense strand starting at position 909 of SEQ ID NO: 1882000
ccaaccucucagggugaaa

SEQ ID NO: 2087503 - RNA, 19 nt, Artificial Sequence
  Description of Artificial Sequence: Synthetic oligonucleotide
  Antisense strand to SEQ ID NO: 2087502
uuucacccugagagguugg

SEQ ID NO: 2087504 - RNA, 19 nt, Artificial Sequence
  Description of Artificial Sequence: Synthetic oligonucleotide
  Sense strand starting at position 1045 of SEQ ID NO: 1882000
uggcuaacgcguguccaaa

SEQ ID NO: 2087505 - RNA, 19 nt, Artificial Sequence
  Description of Artificial Sequence: Synthetic oligonucleotide
  Antisense strand to SEQ ID NO: 2087504
uuuggacacgcguuagcca

SEQ ID NO: 2087506 - RNA, 19 nt, Artificial Sequence
  Description of Artificial Sequence: Synthetic oligonucleotide
  Sense strand starting at position 1100 of SEQ ID NO: 1882000
gcuccuauuggucagagga

SEQ ID NO: 2087507 - RNA, 19 nt, Artificial Sequence
  Description of Artificial Sequence: Synthetic oligonucleotide
  Antisense strand to SEQ ID NO: 2087506
uccucugaccaauaggagc

SEQ ID NO: 2087508 - RNA, 19 nt, Artificial Sequence
  Description of Artificial Sequence: Synthetic oligonucleotide
  Sense strand starting at position 1288 of SEQ ID NO: 1882000
aaagaauugucauuagguu

SEQ ID NO: 2087509 - RNA, 19 nt, Artificial Sequence
  Description of Artificial Sequence: Synthetic oligonucleotide
  Antisense strand to SEQ ID NO: 2087508
aaccuaaugacaauucuuu

SEQ ID NO: 2087510 - RNA, 19 nt, Artificial Sequence
  Description of Artificial Sequence: Synthetic oligonucleotide
  Sense strand starting at position 1289 of SEQ ID NO: 1882000
aagaauugucauuagguuu

SEQ ID NO: 2087511 - RNA, 19 nt, Artificial Sequence
  Description of Artificial Sequence: Synthetic oligonucleotide
  Antisense strand to SEQ ID NO: 2087510
aaaccuaaugacaauucuu

SEQ ID NO: 2087512 - RNA, 19 nt, Artificial Sequence
  Description of Artificial Sequence: Synthetic oligonucleotide
  Sense strand starting at position 1294 of SEQ ID NO: 1882000
uugucauuagguuugcgua

SEQ ID NO: 2087513 - RNA, 19 nt, Artificial Sequence
  Description of Artificial Sequence: Synthetic oligonucleotide
  Antisense strand to SEQ ID NO: 2087512
uacgcaaaccuaaugacaa

SEQ ID NO: 2087514 - RNA, 19 nt, Artificial Sequence
  Description of Artificial Sequence: Synthetic oligonucleotide
  Sense strand starting at position 1407 of SEQ ID NO: 1882000
gcuugauugagguacugau

SEQ ID NO: 2087515 - RNA, 19 nt, Artificial Sequence
  Description of Artificial Sequence: Synthetic oligonucleotide
  Antisense strand to SEQ ID NO: 2087514
aucaguaccucaaucaagc

SEQ ID NO: 2087516 - RNA, 19 nt, Artificial Sequence
  Description of Artificial Sequence: Synthetic oligonucleotide
  Sense strand starting at position 1431 of SEQ ID NO: 1882000
gugauuuauucugcauacc

SEQ ID NO: 2087517 - RNA, 19 nt, Artificial Sequence
  Description of Artificial Sequence: Synthetic oligonucleotide
  Antisense strand to SEQ ID NO: 2087516
gguaugcagaauaaaucac

SEQ ID NO: 2087518 - RNA, 19 nt, Artificial Sequence
  Description of Artificial Sequence: Synthetic oligonucleotide
  Sense strand starting at position 1483 of SEQ ID NO: 1882000
uuaucaaucuaguugagac

SEQ ID NO: 2087519 - RNA, 19 nt, Artificial Sequence
  Description of Artificial Sequence: Synthetic oligonucleotide
  Antisense strand to SEQ ID NO: 2087518
gucucaacuagauugauaa

SEQ ID NO: 2087520 - RNA, 19 nt, Artificial Sequence
  Description of Artificial Sequence: Synthetic oligonucleotide
  Sense strand starting at position 2200 of SEQ ID NO: 1882000
uuggauugacuuugaaggu

SEQ ID NO: 2087521 - RNA, 19 nt, Artificial Sequence
  Description of Artificial Sequence: Synthetic oligonucleotide
  Antisense strand to SEQ ID NO: 2087520
accuucaaagucaauccaa

SEQ ID NO: 2087522 - RNA, 19 nt, Artificial Sequence
  Description of Artificial Sequence: Synthetic oligonucleotide
  Sense strand starting at position 2233 of SEQ ID NO: 1882000
cguggcugcauguuugaau

SEQ ID NO: 2087523 - RNA, 19 nt, Artificial Sequence
  Description of Artificial Sequence: Synthetic oligonucleotide
  Antisense strand to SEQ ID NO: 2087522
auucaaacaugcagccacg

SEQ ID NO: 2087524 - RNA, 19 nt, Artificial Sequence
  Description of Artificial Sequence: Synthetic oligonucleotide
  Sense strand starting at position 2244 of SEQ ID NO: 1882000
guuugaaucagguggagaa

SEQ ID NO: 2087525 - RNA, 19 nt, Artificial Sequence
  Description of Artificial Sequence: Synthetic oligonucleotide
  Antisense strand to SEQ ID NO: 2087524
uucuccaccugauucaaac

SEQ ID NO: 2087526 - RNA, 19 nt, Artificial Sequence
  Description of Artificial Sequence: Synthetic oligonucleotide
  Sense strand starting at position 2279 of SEQ ID NO: 1882000
cgaaguaaagauuauuguu

SEQ ID NO: 2087527 - RNA, 19 nt, Artificial Sequence
  Description of Artificial Sequence: Synthetic oligonucleotide
  Antisense strand to SEQ ID NO: 2087526
aacaauaaucuuuacuucg

SEQ ID NO: 2087528 - RNA, 19 nt, Artificial Sequence
  Description of Artificial Sequence: Synthetic oligonucleotide
  Sense strand starting at position 2531 of SEQ ID NO: 1882000
ccaugauuuccuuguuugu

SEQ ID NO: 2087529 - RNA, 19 nt, Artificial Sequence
  Description of Artificial Sequence: Synthetic oligonucleotide
  Antisense strand to SEQ ID NO: 2087528
acaaacaaggaaaucaugg

SEQ ID NO: 2087530 - RNA, 19 nt, Artificial Sequence
  Description of Artificial Sequence: Synthetic oligonucleotide
  Sense strand starting at position 2620 of SEQ ID NO: 1882000
cugucacaccaguguauuu

SEQ ID NO: 2087531 - RNA, 19 nt, Artificial Sequence
  Description of Artificial Sequence: Synthetic oligonucleotide
  Antisense strand to SEQ ID NO: 2087530
aaauacacuggugugacag

SEQ ID NO: 2087532 - RNA, 19 nt, Artificial Sequence
  Description of Artificial Sequence: Synthetic oligonucleotide
  Sense strand starting at position 2747 of SEQ ID NO: 1882000
cgccuuaagauuuagcagu

SEQ ID NO: 2087533 - RNA, 19 nt, Artificial Sequence
  Description of Artificial Sequence: Synthetic oligonucleotide
  Antisense strand to SEQ ID NO: 2087532
acugcuaaaucuuaaggcg

SEQ ID NO: 2087534 - RNA, 19 nt, Artificial Sequence
  Description of Artificial Sequence: Synthetic oligonucleotide
  Sense strand starting at position 2810 of SEQ ID NO: 1882000
cugauuugcccuggguuau

SEQ ID NO: 2087535 - RNA, 19 nt, Artificial Sequence
  Description of Artificial Sequence: Synthetic oligonucleotide
  Antisense strand to SEQ ID NO: 2087534
auaacccagggcaaaucag

SEQ ID NO: 2087536 - RNA, 19 nt, Artificial Sequence
  Description of Artificial Sequence: Synthetic oligonucleotide
  Sense strand starting at position 2811 of SEQ ID NO: 1882000
ugauuugcccuggguuaug

SEQ ID NO: 2087537 - RNA, 19 nt, Artificial Sequence
  Description of Artificial Sequence: Synthetic oligonucleotide
  Antisense strand to SEQ ID NO: 2087536
cauaacccagggcaaauca

SEQ ID NO: 2087538 - RNA, 19 nt, Artificial Sequence
  Description of Artificial Sequence: Synthetic oligonucleotide
  Sense strand starting at position 2838 of SEQ ID NO: 1882000
ccacuaauucuugggauua

SEQ ID NO: 2087539 - RNA, 19 nt, Artificial Sequence
  Description of Artificial Sequence: Synthetic oligonucleotide
  Antisense strand to SEQ ID NO: 2087538
uaaucccaagaauuagugg

SEQ ID NO: 2087540 - RNA, 19 nt, Artificial Sequence
  Description of Artificial Sequence: Synthetic oligonucleotide
  Sense strand starting at position 2851 of SEQ ID NO: 1882000
ggauuaguuugaccuaaag

SEQ ID NO: 2087541 - RNA, 19 nt, Artificial Sequence
  Description of Artificial Sequence: Synthetic oligonucleotide
  Antisense strand to SEQ ID NO: 2087540
cuuuaggucaaacuaaucc

SEQ ID NO: 2087542 - RNA, 19 nt, Artificial Sequence
  Description of Artificial Sequence: Synthetic oligonucleotide
  Sense strand starting at position 3095 of SEQ ID NO: 1882000
cucuuuggacuuggaauga

SEQ ID NO: 2087543 - RNA, 19 nt, Artificial Sequence
  Description of Artificial Sequence: Synthetic oligonucleotide
  Antisense strand to SEQ ID NO: 2087542
ucauuccaaguccaaagag

SEQ ID NO: 2087544 - RNA, 19 nt, Artificial Sequence
  Description of Artificial Sequence: Synthetic oligonucleotide
  Sense strand starting at position 3116 of SEQ ID NO: 1882000
guuaccaaacucgaugaua

SEQ ID NO: 2087545 - RNA, 19 nt, Artificial Sequence
  Description of Artificial Sequence: Synthetic oligonucleotide
  Antisense strand to SEQ ID NO: 2087544
uaucaucgaguuugguaac

SEQ ID NO: 2087546 - RNA, 19 nt, Artificial Sequence
  Description of Artificial Sequence: Synthetic oligonucleotide
  Sense strand starting at position 3128 of SEQ ID NO: 1882000
gaugauaaaguuugucaca

SEQ ID NO: 2087547 - RNA, 19 nt, Artificial Sequence
  Description of Artificial Sequence: Synthetic oligonucleotide
  Antisense strand to SEQ ID NO: 2087546
ugugacaaacuuuaucauc

SEQ ID NO: 2087548 - RNA, 19 nt, Artificial Sequence
  Description of Artificial Sequence: Synthetic oligonucleotide
  Sense strand starting at position 3129 of SEQ ID NO: 1882000
augauaaaguuugucacaa

SEQ ID NO: 2087549 - RNA, 19 nt, Artificial Sequence
  Description of Artificial Sequence: Synthetic oligonucleotide
  Antisense strand to SEQ ID NO: 2087548
uugugacaaacuuuaucau

SEQ ID NO: 2087550 - RNA, 19 nt, Artificial Sequence
  Description of Artificial Sequence: Synthetic oligonucleotide
  Sense strand starting at position 3130 of SEQ ID NO: 1882000
ugauaaaguuugucacaaa

SEQ ID NO: 2087551 - RNA, 19 nt, Artificial Sequence
  Description of Artificial Sequence: Synthetic oligonucleotide
  Antisense strand to SEQ ID NO: 2087550
uuugugacaaacuuuauca

SEQ ID NO: 2087552 - RNA, 19 nt, Artificial Sequence
  Description of Artificial Sequence: Synthetic oligonucleotide
  Sense strand starting at position 3545 of SEQ ID NO: 1882000
uucuaagugcuauaaagga

SEQ ID NO: 2087553 - RNA, 19 nt, Artificial Sequence
  Description of Artificial Sequence: Synthetic oligonucleotide
  Antisense strand to SEQ ID NO: 2087552
uccuuuauagcacuuagaa

SEQ ID NO: 2087554 - RNA, 19 nt, Artificial Sequence
  Description of Artificial Sequence: Synthetic oligonucleotide
  Sense strand starting at position 3660 of SEQ ID NO: 1882000
gauguuuauguggaguaua

SEQ ID NO: 2087555 - RNA, 19 nt, Artificial Sequence
  Description of Artificial Sequence: Synthetic oligonucleotide
  Antisense strand to SEQ ID NO: 2087554
uauacuccacauaaacauc

SEQ ID NO: 2087556 - RNA, 19 nt, Artificial Sequence
  Description of Artificial Sequence: Synthetic oligonucleotide
  Sense strand starting at position 3663 of SEQ ID NO: 1882000
guuuauguggaguauaaua

SEQ ID NO: 2087557 - RNA, 19 nt, Artificial Sequence
  Description of Artificial Sequence: Synthetic oligonucleotide
  Antisense strand to SEQ ID NO: 2087556
uauuauacuccacauaaac

SEQ ID NO: 2087558 - RNA, 19 nt, Artificial Sequence
  Description of Artificial Sequence: Synthetic oligonucleotide
  Sense strand starting at position 3949 of SEQ ID NO: 1882000
caguguaugcaugaaauua

SEQ ID NO: 2087559 - RNA, 19 nt, Artificial Sequence
  Description of Artificial Sequence: Synthetic oligonucleotide
  Antisense strand to SEQ ID NO: 2087558
uaauuucaugcauacacug

SEQ ID NO: 2087560 - RNA, 19 nt, Artificial Sequence
  Description of Artificial Sequence: Synthetic oligonucleotide
  Sense strand starting at position 1748 of SEQ ID NO: 1882002
cagcccagguagucuuaau

SEQ ID NO: 2087561 - RNA, 19 nt, Artificial Sequence
  Description of Artificial Sequence: Synthetic oligonucleotide
  Antisense strand to SEQ ID NO: 2087560
auuaagacuaccugggcug

SEQ ID NO: 2087562 - RNA, 19 nt, Artificial Sequence
  Description of Artificial Sequence: Synthetic oligonucleotide
  Sense strand starting at position 1790 of SEQ ID NO: 1882002
gcacuaucagaccacaagu

SEQ ID NO: 2087563 - RNA, 19 nt, Artificial Sequence
  Description of Artificial Sequence: Synthetic oligonucleotide
  Antisense strand to SEQ ID NO: 2087562
acuuguggucugauagugc

SEQ ID NO: 2087564 - RNA, 19 nt, Artificial Sequence
  Description of Artificial Sequence: Synthetic oligonucleotide
  Sense strand starting at position 1806 of SEQ ID NO: 1882002
aguuacagauaucuuugaa

SEQ ID NO: 2087565 - RNA, 19 nt, Artificial Sequence
  Description of Artificial Sequence: Synthetic oligonucleotide
  Antisense strand to SEQ ID NO: 2087564
uucaaagauaucuguaacu

SEQ ID NO: 2087566 - RNA, 19 nt, Artificial Sequence
  Description of Artificial Sequence: Synthetic oligonucleotide
  Sense strand starting at position 1810 of SEQ ID NO: 1882002
acagauaucuuugaaugaa

SEQ ID NO: 2087567 - RNA, 19 nt, Artificial Sequence
  Description of Artificial Sequence: Synthetic oligonucleotide
  Antisense strand to SEQ ID NO: 2087566
uucauucaaagauaucugu

SEQ ID NO: 2087568 - RNA, 19 nt, Artificial Sequence
  Description of Artificial Sequence: Synthetic oligonucleotide
  Sense strand starting at position 1917 of SEQ ID NO: 1882002
acaggaguuaccugguuua

SEQ ID NO: 2087569 - RNA, 19 nt, Artificial Sequence
  Description of Artificial Sequence: Synthetic oligonucleotide
  Antisense strand to SEQ ID NO: 2087568
uaaaccagguaacuccugu

SEQ ID NO: 2087570 - RNA, 19 nt, Artificial Sequence
  Description of Artificial Sequence: Synthetic oligonucleotide
  Sense strand starting at position 1957 of SEQ ID NO: 1882002
ucuaauauggcuuguuaac

SEQ ID NO: 2087571 - RNA, 19 nt, Artificial Sequence
  Description of Artificial Sequence: Synthetic oligonucleotide
  Antisense strand to SEQ ID NO: 2087570
guuaacaagccauauuaga

SEQ ID NO: 2087572 - RNA, 19 nt, Artificial Sequence
  Description of Artificial Sequence: Synthetic oligonucleotide
  Sense strand starting at position 1996 of SEQ ID NO: 1882002
ggcauaaguguuuauggga

SEQ ID NO: 2087573 - RNA, 19 nt, Artificial Sequence
  Description of Artificial Sequence: Synthetic oligonucleotide
  Antisense strand to SEQ ID NO: 2087572
ucccauaaacacuuaugcc

SEQ ID NO: 2087574 - RNA, 19 nt, Artificial Sequence
  Description of Artificial Sequence: Synthetic oligonucleotide
  Sense strand starting at position 2039 of SEQ ID NO: 1882002
uuggacaugugacucauau

SEQ ID NO: 2087575 - RNA, 19 nt, Artificial Sequence
  Description of Artificial Sequence: Synthetic oligonucleotide
  Antisense strand to SEQ ID NO: 2087574
auaugagucacauguccaa

SEQ ID NO: 2087576 - RNA, 19 nt, Artificial Sequence
  Description of Artificial Sequence: Synthetic oligonucleotide
  Sense strand starting at position 2110 of SEQ ID NO: 1882002
aucauacuguucuugggaa

SEQ ID NO: 2087577 - RNA, 19 nt, Artificial Sequence
  Description of Artificial Sequence: Synthetic oligonucleotide
  Antisense strand to SEQ ID NO: 2087576
uucccaagaacaguaugau

SEQ ID NO: 2087578 - RNA, 19 nt, Artificial Sequence
  Description of Artificial Sequence: Synthetic oligonucleotide
  Sense strand starting at position 2112 of SEQ ID NO: 1882002
cauacuguucuugggaaac

SEQ ID NO: 2087579 - RNA, 19 nt, Artificial Sequence
  Description of Artificial Sequence: Synthetic oligonucleotide
  Antisense strand to SEQ ID NO: 2087578
guuucccaagaacaguaug

SEQ ID NO: 2087580 - RNA, 19 nt, Artificial Sequence
  Description of Artificial Sequence: Synthetic oligonucleotide
  Sense strand starting at position 2158 of SEQ ID NO: 1882002
gagaaauugcauugagcaa

SEQ ID NO: 2087581 - RNA, 19 nt, Artificial Sequence
  Description of Artificial Sequence: Synthetic oligonucleotide
  Antisense strand to SEQ ID NO: 2087580
uugcucaaugcaauuucuc

SEQ ID NO: 2087582 - RNA, 19 nt, Artificial Sequence
  Description of Artificial Sequence: Synthetic oligonucleotide
  Sense strand starting at position 2296 of SEQ ID NO: 1882002
ugaccugggauguguuuaa

SEQ ID NO: 2087583 - RNA, 19 nt, Artificial Sequence
  Description of Artificial Sequence: Synthetic oligonucleotide
  Antisense strand to SEQ ID NO: 2087582
uuaaacacaucccagguca

SEQ ID NO: 2087584 - RNA, 19 nt, Artificial Sequence
  Description of Artificial Sequence: Synthetic oligonucleotide
  Sense strand starting at position 2377 of SEQ ID NO: 1882002
accauagaaugagaaauau

SEQ ID NO: 2087585 - RNA, 19 nt, Artificial Sequence
  Description of Artificial Sequence: Synthetic oligonucleotide
  Antisense strand to SEQ ID NO: 2087584
auauuucucauucuauggu

SEQ ID NO: 2087586 - RNA, 19 nt, Artificial Sequence
  Description of Artificial Sequence: Synthetic oligonucleotide
  Sense strand starting at position 2982 of SEQ ID NO: 1882002
ucuagaaauugaucuggua

SEQ ID NO: 2087587 - RNA, 19 nt, Artificial Sequence
  Description of Artificial Sequence: Synthetic oligonucleotide
  Antisense strand to SEQ ID NO: 2087586
uaccagaucaauuucuaga

SEQ ID NO: 2087588 - RNA, 19 nt, Artificial Sequence
  Description of Artificial Sequence: Synthetic oligonucleotide
  Sense strand starting at position 3004 of SEQ ID NO: 1882002
agagaauucccuuaggcuu

SEQ ID NO: 2087589 - RNA, 19 nt, Artificial Sequence
  Description of Artificial Sequence: Synthetic oligonucleotide
  Antisense strand to SEQ ID NO: 2087588
aagccuaagggaauucucu

SEQ ID NO: 2087590 - RNA, 19 nt, Artificial Sequence
  Description of Artificial Sequence: Synthetic oligonucleotide
  Sense strand starting at position 3021 of SEQ ID NO: 1882002
uugguaggguagaggaaua

SEQ ID NO: 2087591 - RNA, 19 nt, Artificial Sequence
  Description of Artificial Sequence: Synthetic oligonucleotide
  Antisense strand to SEQ ID NO: 2087590
uauuccucuacccuaccaa

SEQ ID NO: 2087592 - RNA, 19 nt, Artificial Sequence
  Description of Artificial Sequence: Synthetic oligonucleotide
  Sense strand starting at position 3053 of SEQ ID NO: 1882002
ccacgugaugaauaugauc

SEQ ID NO: 2087593 - RNA, 19 nt, Artificial Sequence
  Description of Artificial Sequence: Synthetic oligonucleotide
  Antisense strand to SEQ ID NO: 2087592
gaucauauucaucacgugg

SEQ ID NO: 2087594 - RNA, 19 nt, Artificial Sequence
  Description of Artificial Sequence: Synthetic oligonucleotide
  Sense strand starting at position 3116 of SEQ ID NO: 1882002
ggguaagagcuguaacuuc

SEQ ID NO: 2087595 - RNA, 19 nt, Artificial Sequence
  Description of Artificial Sequence: Synthetic oligonucleotide
  Antisense strand to SEQ ID NO: 2087594
gaaguuacagcucuuaccc

SEQ ID NO: 2087596 - RNA, 19 nt, Artificial Sequence
  Description of Artificial Sequence: Synthetic oligonucleotide
  Sense strand starting at position 3209 of SEQ ID NO: 1882002
gauaaugaauguuugccuu

SEQ ID NO: 2087597 - RNA, 19 nt, Artificial Sequence
  Description of Artificial Sequence: Synthetic oligonucleotide
  Antisense strand to SEQ ID NO: 2087596
aaggcaaacauucauuauc

SEQ ID NO: 2087598 - RNA, 19 nt, Artificial Sequence
  Description of Artificial Sequence: Synthetic oligonucleotide
  Sense strand starting at position 3211 of SEQ ID NO: 1882002
uaaugaauguuugccuuga

SEQ ID NO: 2087599 - RNA, 19 nt, Artificial Sequence
  Description of Artificial Sequence: Synthetic oligonucleotide
  Antisense strand to SEQ ID NO: 2087598
ucaaggcaaacauucauua

SEQ ID NO: 2087600 - RNA, 19 nt, Artificial Sequence
  Description of Artificial Sequence: Synthetic oligonucleotide
  Sense strand starting at position 3213 of SEQ ID NO: 1882002
augaauguuugccuugaau

SEQ ID NO: 2087601 - RNA, 19 nt, Artificial Sequence
  Description of Artificial Sequence: Synthetic oligonucleotide
  Antisense strand to SEQ ID NO: 2087600
auucaaggcaaacauucau

SEQ ID NO: 2087602 - RNA, 19 nt, Artificial Sequence
  Description of Artificial Sequence: Synthetic oligonucleotide
  Sense strand starting at position 3216 of SEQ ID NO: 1882002
aauguuugccuugaaugac

SEQ ID NO: 2087603 - RNA, 19 nt, Artificial Sequence
  Description of Artificial Sequence: Synthetic oligonucleotide
  Antisense strand to SEQ ID NO: 2087602
gucauucaaggcaaacauu

SEQ ID NO: 2087604 - RNA, 19 nt, Artificial Sequence
  Description of Artificial Sequence: Synthetic oligonucleotide
  Sense strand starting at position 3232 of SEQ ID NO: 1882002
gacucauguugauuaaagu

SEQ ID NO: 2087605 - RNA, 19 nt, Artificial Sequence
  Description of Artificial Sequence: Synthetic oligonucleotide
  Antisense strand to SEQ ID NO: 2087604
acuuuaaucaacaugaguc

SEQ ID NO: 2087606 - RNA, 19 nt, Artificial Sequence
  Description of Artificial Sequence: Synthetic oligonucleotide
  Sense strand starting at position 3233 of SEQ ID NO: 1882002
acucauguugauuaaagua

SEQ ID NO: 2087607 - RNA, 19 nt, Artificial Sequence
  Description of Artificial Sequence: Synthetic oligonucleotide
  Antisense strand to SEQ ID NO: 2087606
uacuuuaaucaacaugagu

SEQ ID NO: 2087608 - RNA, 19 nt, Artificial Sequence
  Description of Artificial Sequence: Synthetic oligonucleotide
  Sense strand starting at position 3336 of SEQ ID NO: 1882002
ucuagaauuucuuggagaa

SEQ ID NO: 2087609 - RNA, 19 nt, Artificial Sequence
  Description of Artificial Sequence: Synthetic oligonucleotide
  Antisense strand to SEQ ID NO: 2087608
uucuccaagaaauucuaga

SEQ ID NO: 2087610 - RNA, 19 nt, Artificial Sequence
  Description of Artificial Sequence: Synthetic oligonucleotide
  Sense strand starting at position 3378 of SEQ ID NO: 1882002
aaugccagucauggacaau

SEQ ID NO: 2087611 - RNA, 19 nt, Artificial Sequence
  Description of Artificial Sequence: Synthetic oligonucleotide
  Antisense strand to SEQ ID NO: 2087610
auuguccaugacuggcauu

SEQ ID NO: 2087612 - RNA, 19 nt, Artificial Sequence
  Description of Artificial Sequence: Synthetic oligonucleotide
  Sense strand starting at position 3417 of SEQ ID NO: 1882002
uguagagaacauugucuca

SEQ ID NO: 2087613 - RNA, 19 nt, Artificial Sequence
  Description of Artificial Sequence: Synthetic oligonucleotide
  Antisense strand to SEQ ID NO: 2087612
ugagacaauguucucuaca

SEQ ID NO: 2087614 - RNA, 19 nt, Artificial Sequence
  Description of Artificial Sequence: Synthetic oligonucleotide
  Sense strand starting at position 3419 of SEQ ID NO: 1882002
uagagaacauugucucaug

SEQ ID NO: 2087615 - RNA, 19 nt, Artificial Sequence
  Description of Artificial Sequence: Synthetic oligonucleotide
  Antisense strand to SEQ ID NO: 2087614
caugagacaauguucucua

SEQ ID NO: 2087616 - RNA, 19 nt, Artificial Sequence
  Description of Artificial Sequence: Synthetic oligonucleotide
  Sense strand starting at position 3427 of SEQ ID NO: 1882002
auugucucaugguuuggaa

SEQ ID NO: 2087617 - RNA, 19 nt, Artificial Sequence
  Description of Artificial Sequence: Synthetic oligonucleotide
  Antisense strand to SEQ ID NO: 2087616
uuccaaaccaugagacaau

SEQ ID NO: 2087618 - RNA, 19 nt, Artificial Sequence
  Description of Artificial Sequence: Synthetic oligonucleotide
  Sense strand starting at position 3429 of SEQ ID NO: 1882002
ugucucaugguuuggaaua

SEQ ID NO: 2087619 - RNA, 19 nt, Artificial Sequence
  Description of Artificial Sequence: Synthetic oligonucleotide
  Antisense strand to SEQ ID NO: 2087618
uauuccaaaccaugagaca

SEQ ID NO: 2087620 - RNA, 19 nt, Artificial Sequence
  Description of Artificial Sequence: Synthetic oligonucleotide
  Sense strand starting at position 3462 of SEQ ID NO: 1882002
gcauauacaugacuagcau

SEQ ID NO: 2087621 - RNA, 19 nt, Artificial Sequence
  Description of Artificial Sequence: Synthetic oligonucleotide
  Antisense strand to SEQ ID NO: 2087620
augcuagucauguauaugc

SEQ ID NO: 2087622 - RNA, 19 nt, Artificial Sequence
  Description of Artificial Sequence: Synthetic oligonucleotide
  Sense strand starting at position 3548 of SEQ ID NO: 1882002
cuguguccuaauugaguga

SEQ ID NO: 2087623 - RNA, 19 nt, Artificial Sequence
  Description of Artificial Sequence: Synthetic oligonucleotide
  Antisense strand to SEQ ID NO: 2087622
ucacucaauuaggacacag

SEQ ID NO: 2087624 - RNA, 19 nt, Artificial Sequence
  Description of Artificial Sequence: Synthetic oligonucleotide
  Sense strand starting at position 3551 of SEQ ID NO: 1882002
uguccuaauugagugacau

SEQ ID NO: 2087625 - RNA, 19 nt, Artificial Sequence
  Description of Artificial Sequence: Synthetic oligonucleotide
  Antisense strand to SEQ ID NO: 2087624
augucacucaauuaggaca

SEQ ID NO: 2087626 - RNA, 19 nt, Artificial Sequence
  Description of Artificial Sequence: Synthetic oligonucleotide
  Sense strand starting at position 3552 of SEQ ID NO: 1882002
guccuaauugagugacauu

SEQ ID NO: 2087627 - RNA, 19 nt, Artificial Sequence
  Description of Artificial Sequence: Synthetic oligonucleotide
  Antisense strand to SEQ ID NO: 2087626
aaugucacucaauuaggac

SEQ ID NO: 2087628 - RNA, 19 nt, Artificial Sequence
  Description of Artificial Sequence: Synthetic oligonucleotide
  Sense strand starting at position 3563 of SEQ ID NO: 1882002
gugacauuggcagacugau

SEQ ID NO: 2087629 - RNA, 19 nt, Artificial Sequence
  Description of Artificial Sequence: Synthetic oligonucleotide
  Antisense strand to SEQ ID NO: 2087628
aucagucugccaaugucac

SEQ ID NO: 2087630 - RNA, 19 nt, Artificial Sequence
  Description of Artificial Sequence: Synthetic oligonucleotide
  Sense strand starting at position 3608 of SEQ ID NO: 1882002
ccuaucuaagcaggaguaa

SEQ ID NO: 2087631 - RNA, 19 nt, Artificial Sequence
  Description of Artificial Sequence: Synthetic oligonucleotide
  Antisense strand to SEQ ID NO: 2087630
uuacuccugcuuagauagg

SEQ ID NO: 2087632 - RNA, 19 nt, Artificial Sequence
  Description of Artificial Sequence: Synthetic oligonucleotide
  Sense strand starting at position 3609 of SEQ ID NO: 1882002
cuaucuaagcaggaguaau

SEQ ID NO: 2087633 - RNA, 19 nt, Artificial Sequence
  Description of Artificial Sequence: Synthetic oligonucleotide
  Antisense strand to SEQ ID NO: 2087632
auuacuccugcuuagauag

SEQ ID NO: 2087634 - RNA, 19 nt, Artificial Sequence
  Description of Artificial Sequence: Synthetic oligonucleotide
  Sense strand starting at position 3656 of SEQ ID NO: 1882002
uaggaaugcuggcucagua

SEQ ID NO: 2087635 - RNA, 19 nt, Artificial Sequence
  Description of Artificial Sequence: Synthetic oligonucleotide
  Antisense strand to SEQ ID NO: 2087634
uacugagccagcauuccua

SEQ ID NO: 2087636 - RNA, 19 nt, Artificial Sequence
  Description of Artificial Sequence: Synthetic oligonucleotide
  Sense strand starting at position 3678 of SEQ ID NO: 1882002
ucagauucucaguguucca

SEQ ID NO: 2087637 - RNA, 19 nt, Artificial Sequence
  Description of Artificial Sequence: Synthetic oligonucleotide
  Antisense strand to SEQ ID NO: 2087636
uggaacacugagaaucuga

SEQ ID NO: 2087638 - RNA, 19 nt, Artificial Sequence
  Description of Artificial Sequence: Synthetic oligonucleotide
  Sense strand starting at position 3710 of SEQ ID NO: 1882002
auccaaaugcuauauguga

SEQ ID NO: 2087639 - RNA, 19 nt, Artificial Sequence
  Description of Artificial Sequence: Synthetic oligonucleotide
  Antisense strand to SEQ ID NO: 2087638
ucacauauagcauuuggau

SEQ ID NO: 2087640 - RNA, 19 nt, Artificial Sequence
  Description of Artificial Sequence: Synthetic oligonucleotide
  Sense strand starting at position 288 of SEQ ID NO: 1882003
acaacuacgcuuuauuagu

SEQ ID NO: 2087641 - RNA, 19 nt, Artificial Sequence
  Description of Artificial Sequence: Synthetic oligonucleotide
  Antisense strand to SEQ ID NO: 2087640
acuaauaaagcguaguugu

SEQ ID NO: 2087642 - RNA, 19 nt, Artificial Sequence
  Description of Artificial Sequence: Synthetic oligonucleotide
  Sense strand starting at position 327 of SEQ ID NO: 1882003
ggcauauagcuguauaauc

SEQ ID NO: 2087643 - RNA, 19 nt, Artificial Sequence
  Description of Artificial Sequence: Synthetic oligonucleotide
  Antisense strand to SEQ ID NO: 2087642
gauuauacagcuauaugcc

SEQ ID NO: 2087644 - RNA, 19 nt, Artificial Sequence
  Description of Artificial Sequence: Synthetic oligonucleotide
  Sense strand starting at position 332 of SEQ ID NO: 1882003
auagcuguauaauccugaa

SEQ ID NO: 2087645 - RNA, 19 nt, Artificial Sequence
  Description of Artificial Sequence: Synthetic oligonucleotide
  Antisense strand to SEQ ID NO: 2087644
uucaggauuauacagcuau

SEQ ID NO: 2087646 - RNA, 19 nt, Artificial Sequence
  Description of Artificial Sequence: Synthetic oligonucleotide
  Sense strand starting at position 360 of SEQ ID NO: 1882003
auuaguucugcacacauca

SEQ ID NO: 2087647 - RNA, 19 nt, Artificial Sequence
  Description of Artificial Sequence: Synthetic oligonucleotide
  Antisense strand to SEQ ID NO: 2087646
ugaugugugcagaacuaau

SEQ ID NO: 2087648 - RNA, 19 nt, Artificial Sequence
  Description of Artificial Sequence: Synthetic oligonucleotide
  Sense strand starting at position 454 of SEQ ID NO: 1882003
aggguuauggacuguaaca

SEQ ID NO: 2087649 - RNA, 19 nt, Artificial Sequence
  Description of Artificial Sequence: Synthetic oligonucleotide
  Antisense strand to SEQ ID NO: 2087648
uguuacaguccauaacccu

SEQ ID NO: 2087650 - RNA, 19 nt, Artificial Sequence
  Description of Artificial Sequence: Synthetic oligonucleotide
  Sense strand starting at position 538 of SEQ ID NO: 1882003
ugggaacucacugagcuuu

SEQ ID NO: 2087651 - RNA, 19 nt, Artificial Sequence
  Description of Artificial Sequence: Synthetic oligonucleotide
  Antisense strand to SEQ ID NO: 2087650
aaagcucagugaguuccca

SEQ ID NO: 2087652 - RNA, 19 nt, Artificial Sequence
  Description of Artificial Sequence: Synthetic oligonucleotide
  Sense strand starting at position 634 of SEQ ID NO: 1882003
agcagaugauuucagguga

SEQ ID NO: 2087653 - RNA, 19 nt, Artificial Sequence
  Description of Artificial Sequence: Synthetic oligonucleotide
  Antisense strand to SEQ ID NO: 2087652
ucaccugaaaucaucugcu

SEQ ID NO: 2087654 - RNA, 19 nt, Artificial Sequence
  Description of Artificial Sequence: Synthetic oligonucleotide
  Sense strand starting at position 765 of SEQ ID NO: 1882003
uuuaguugauaaguagcaa

SEQ ID NO: 2087655 - RNA, 19 nt, Artificial Sequence
  Description of Artificial Sequence: Synthetic oligonucleotide
  Antisense strand to SEQ ID NO: 2087654
uugcuacuuaucaacuaaa

SEQ ID NO: 2087656 - RNA, 19 nt, Artificial Sequence
  Description of Artificial Sequence: Synthetic oligonucleotide
  Sense strand starting at position 817 of SEQ ID NO: 1882003
augacaugcaacuguggau

SEQ ID NO: 2087657 - RNA, 19 nt, Artificial Sequence
  Description of Artificial Sequence: Synthetic oligonucleotide
  Antisense strand to SEQ ID NO: 2087656
auccacaguugcaugucau

SEQ ID NO: 2087658 - RNA, 19 nt, Artificial Sequence
  Description of Artificial Sequence: Synthetic oligonucleotide
  Sense strand starting at position 967 of SEQ ID NO: 1882003
gguuucuuagauuaucucu

SEQ ID NO: 2087659 - RNA, 19 nt, Artificial Sequence
  Description of Artificial Sequence: Synthetic oligonucleotide
  Antisense strand to SEQ ID NO: 2087658
agagauaaucuaagaaacc

SEQ ID NO: 2087660 - RNA, 19 nt, Artificial Sequence
  Description of Artificial Sequence: Synthetic oligonucleotide
  Sense strand starting at position 975 of SEQ ID NO: 1882003
agauuaucucuaugauuag

SEQ ID NO: 2087661 - RNA, 19 nt, Artificial Sequence
  Description of Artificial Sequence: Synthetic oligonucleotide
  Antisense strand to SEQ ID NO: 2087660
cuaaucauagagauaaucu

SEQ ID NO: 2087662 - RNA, 19 nt, Artificial Sequence
  Description of Artificial Sequence: Synthetic oligonucleotide
  Sense strand starting at position 1008 of SEQ ID NO: 1882003
gggaacugguguuugaauc

SEQ ID NO: 2087663 - RNA, 19 nt, Artificial Sequence
  Description of Artificial Sequence: Synthetic oligonucleotide
  Antisense strand to SEQ ID NO: 2087662
gauucaaacaccaguuccc

SEQ ID NO: 2087664 - RNA, 19 nt, Artificial Sequence
  Description of Artificial Sequence: Synthetic oligonucleotide
  Sense strand starting at position 1009 of SEQ ID NO: 1882003
ggaacugguguuugaauca

SEQ ID NO: 2087665 - RNA, 19 nt, Artificial Sequence
  Description of Artificial Sequence: Synthetic oligonucleotide
  Antisense strand to SEQ ID NO: 2087664
ugauucaaacaccaguucc

SEQ ID NO: 2087666 - RNA, 19 nt, Artificial Sequence
  Description of Artificial Sequence: Synthetic oligonucleotide
  Sense strand starting at position 1014 of SEQ ID NO: 1882003
ugguguuugaaucaccaga

SEQ ID NO: 2087667 - RNA, 19 nt, Artificial Sequence
  Description of Artificial Sequence: Synthetic oligonucleotide
  Antisense strand to SEQ ID NO: 2087666
ucuggugauucaaacacca

SEQ ID NO: 2087668 - RNA, 19 nt, Artificial Sequence
  Description of Artificial Sequence: Synthetic oligonucleotide
  Sense strand starting at position 1016 of SEQ ID NO: 1882003
guguuugaaucaccagaaa

SEQ ID NO: 2087669 - RNA, 19 nt, Artificial Sequence
  Description of Artificial Sequence: Synthetic oligonucleotide
  Antisense strand to SEQ ID NO: 2087668
uuucuggugauucaaacac

SEQ ID NO: 2087670 - RNA, 19 nt, Artificial Sequence
  Description of Artificial Sequence: Synthetic oligonucleotide
  Sense strand starting at position 1069 of SEQ ID NO: 1882003
aguagaaaucuuuguacau

SEQ ID NO: 2087671 - RNA, 19 nt, Artificial Sequence
  Description of Artificial Sequence: Synthetic oligonucleotide
  Antisense strand to SEQ ID NO: 2087670
auguacaaagauuucuacu

SEQ ID NO: 2087672 - RNA, 19 nt, Artificial Sequence
  Description of Artificial Sequence: Synthetic oligonucleotide
  Sense strand starting at position 1070 of SEQ ID NO: 1882003
guagaaaucuuuguacaua

SEQ ID NO: 2087673 - RNA, 19 nt, Artificial Sequence
  Description of Artificial Sequence: Synthetic oligonucleotide
  Antisense strand to SEQ ID NO: 2087672
uauguacaaagauuucuac

SEQ ID NO: 2087674 - RNA, 19 nt, Artificial Sequence
  Description of Artificial Sequence: Synthetic oligonucleotide
  Sense strand starting at position 1080 of SEQ ID NO: 1882003
uuguacauaaguugggaua

SEQ ID NO: 2087675 - RNA, 19 nt, Artificial Sequence
  Description of Artificial Sequence: Synthetic oligonucleotide
  Antisense strand to SEQ ID NO: 2087674
uaucccaacuuauguacaa

SEQ ID NO: 2087676 - RNA, 19 nt, Artificial Sequence
  Description of Artificial Sequence: Synthetic oligonucleotide
  Sense strand starting at position 1100 of SEQ ID NO: 1882003
uguaaaccauggccuaaau

SEQ ID NO: 2087677 - RNA, 19 nt, Artificial Sequence
  Description of Artificial Sequence: Synthetic oligonucleotide
  Antisense strand to SEQ ID NO: 2087676
auuuaggccaugguuuaca

SEQ ID NO: 2087678 - RNA, 19 nt, Artificial Sequence
  Description of Artificial Sequence: Synthetic oligonucleotide
  Sense strand starting at position 1109 of SEQ ID NO: 1882003
uggccuaaauuauuguuaa

SEQ ID NO: 2087679 - RNA, 19 nt, Artificial Sequence
  Description of Artificial Sequence: Synthetic oligonucleotide
  Antisense strand to SEQ ID NO: 2087678
uuaacaauaauuuaggcca

SEQ ID NO: 2087680 - RNA, 19 nt, Artificial Sequence
  Description of Artificial Sequence: Synthetic oligonucleotide
  Sense strand starting at position 1129 of SEQ ID NO: 1882003
ucaauuggucaguggaaau

SEQ ID NO: 2087681 - RNA, 19 nt, Artificial Sequence
  Description of Artificial Sequence: Synthetic oligonucleotide
  Antisense strand to SEQ ID NO: 2087680
auuuccacugaccaauuga

SEQ ID NO: 2087682 - RNA, 19 nt, Artificial Sequence
  Description of Artificial Sequence: Synthetic oligonucleotide
  Sense strand starting at position 1139 of SEQ ID NO: 1882003
aguggaaauuuagacauaa

SEQ ID NO: 2087683 - RNA, 19 nt, Artificial Sequence
  Description of Artificial Sequence: Synthetic oligonucleotide
  Antisense strand to SEQ ID NO: 2087682
uuaugucuaaauuuccacu

SEQ ID NO: 2087684 - RNA, 19 nt, Artificial Sequence
  Description of Artificial Sequence: Synthetic oligonucleotide
  Sense strand starting at position 1231 of SEQ ID NO: 1882003
acacuuaaguuucuaaguu

SEQ ID NO: 2087685 - RNA, 19 nt, Artificial Sequence
  Description of Artificial Sequence: Synthetic oligonucleotide
  Antisense strand to SEQ ID NO: 2087684
aacuuagaaacuuaagugu

SEQ ID NO: 2087686 - RNA, 19 nt, Artificial Sequence
  Description of Artificial Sequence: Synthetic oligonucleotide
  Sense strand starting at position 1312 of SEQ ID NO: 1882003
auuuguucucucugcugga

SEQ ID NO: 2087687 - RNA, 19 nt, Artificial Sequence
  Description of Artificial Sequence: Synthetic oligonucleotide
  Antisense strand to SEQ ID NO: 2087686
uccagcagagagaacaaau

SEQ ID NO: 2087688 - RNA, 19 nt, Artificial Sequence
  Description of Artificial Sequence: Synthetic oligonucleotide
  Sense strand starting at position 1641 of SEQ ID NO: 1882003
ggcaucugguaaucaguaa

SEQ ID NO: 2087689 - RNA, 19 nt, Artificial Sequence
  Description of Artificial Sequence: Synthetic oligonucleotide
  Antisense strand to SEQ ID NO: 2087688
uuacugauuaccagaugcc

SEQ ID NO: 2087690 - RNA, 19 nt, Artificial Sequence
  Description of Artificial Sequence: Synthetic oligonucleotide
  Sense strand starting at position 1645 of SEQ ID NO: 1882003
ucugguaaucaguaaauau

SEQ ID NO: 2087691 - RNA, 19 nt, Artificial Sequence
  Description of Artificial Sequence: Synthetic oligonucleotide
  Antisense strand to SEQ ID NO: 2087690
auauuuacugauuaccaga

SEQ ID NO: 2087692 - RNA, 19 nt, Artificial Sequence
  Description of Artificial Sequence: Synthetic oligonucleotide
  Sense strand starting at position 1694 of SEQ ID NO: 1882003
aaugaaggguuccuucgaa

SEQ ID NO: 2087693 - RNA, 19 nt, Artificial Sequence
  Description of Artificial Sequence: Synthetic oligonucleotide
  Antisense strand to SEQ ID NO: 2087692
uucgaaggaacccuucauu

SEQ ID NO: 2087694 - RNA, 19 nt, Artificial Sequence
  Description of Artificial Sequence: Synthetic oligonucleotide
  Sense strand starting at position 1764 of SEQ ID NO: 1882003
gggcaaauauaucuauuau

SEQ ID NO: 2087695 - RNA, 19 nt, Artificial Sequence
  Description of Artificial Sequence: Synthetic oligonucleotide
  Antisense strand to SEQ ID NO: 2087694
auaauagauauauuugccc

SEQ ID NO: 2087696 - RNA, 19 nt, Artificial Sequence
  Description of Artificial Sequence: Synthetic oligonucleotide
  Sense strand starting at position 2035 of SEQ ID NO: 1882003
acauuaagcacugguggua

SEQ ID NO: 2087697 - RNA, 19 nt, Artificial Sequence
  Description of Artificial Sequence: Synthetic oligonucleotide
  Antisense strand to SEQ ID NO: 2087696
uaccaccagugcuuaaugu

SEQ ID NO: 2087698 - RNA, 19 nt, Artificial Sequence
  Description of Artificial Sequence: Synthetic oligonucleotide
  Sense strand starting at position 2126 of SEQ ID NO: 1882003
augucuuaugcuuagaacu

SEQ ID NO: 2087699 - RNA, 19 nt, Artificial Sequence
  Description of Artificial Sequence: Synthetic oligonucleotide
  Antisense strand to SEQ ID NO: 2087698
aguucuaagcauaagacau

SEQ ID NO: 2087700 - RNA, 19 nt, Artificial Sequence
  Description of Artificial Sequence: Synthetic oligonucleotide
  Sense strand starting at position 2448 of SEQ ID NO: 1882003
gaaccaauguuauugguga

SEQ ID NO: 2087701 - RNA, 19 nt, Artificial Sequence
  Description of Artificial Sequence: Synthetic oligonucleotide
  Antisense strand to SEQ ID NO: 2087700
ucaccaauaacauugguuc

SEQ ID NO: 2087702 - RNA, 19 nt, Artificial Sequence
  Description of Artificial Sequence: Synthetic oligonucleotide
  Sense strand starting at position 2453 of SEQ ID NO: 1882003
aauguuauuggugauagua

SEQ ID NO: 2087703 - RNA, 19 nt, Artificial Sequence
  Description of Artificial Sequence: Synthetic oligonucleotide
  Antisense strand to SEQ ID NO: 2087702
uacuaucaccaauaacauu

SEQ ID NO: 2087704 - RNA, 19 nt, Artificial Sequence
  Description of Artificial Sequence: Synthetic oligonucleotide
  Sense strand starting at position 2461 of SEQ ID NO: 1882003
uggugauaguaacuaaagu

SEQ ID NO: 2087705 - RNA, 19 nt, Artificial Sequence
  Description of Artificial Sequence: Synthetic oligonucleotide
  Antisense strand to SEQ ID NO: 2087704
acuuuaguuacuaucacca

SEQ ID NO: 2087706 - RNA, 19 nt, Artificial Sequence
  Description of Artificial Sequence: Synthetic oligonucleotide
  Sense strand starting at position 2922 of SEQ ID NO: 1882003
cuuugugcuggagacagau

SEQ ID NO: 2087707 - RNA, 19 nt, Artificial Sequence
  Description of Artificial Sequence: Synthetic oligonucleotide
  Antisense strand to SEQ ID NO: 2087706
aucugucuccagcacaaag

SEQ ID NO: 2087708 - RNA, 19 nt, Artificial Sequence
  Description of Artificial Sequence: Synthetic oligonucleotide
  Sense strand starting at position 2953 of SEQ ID NO: 1882003
agugaauuagucuagugca

SEQ ID NO: 2087709 - RNA, 19 nt, Artificial Sequence
  Description of Artificial Sequence: Synthetic oligonucleotide
  Antisense strand to SEQ ID NO: 2087708
ugcacuagacuaauucacu

SEQ ID NO: 2087710 - RNA, 19 nt, Artificial Sequence
  Description of Artificial Sequence: Synthetic oligonucleotide
  Sense strand starting at position 2968 of SEQ ID NO: 1882003
ugcagcacuguccaauaga

SEQ ID NO: 2087711 - RNA, 19 nt, Artificial Sequence
  Description of Artificial Sequence: Synthetic oligonucleotide
  Antisense strand to SEQ ID NO: 2087710
ucuauuggacagugcugca

SEQ ID NO: 2087712 - RNA, 19 nt, Artificial Sequence
  Description of Artificial Sequence: Synthetic oligonucleotide
  Sense strand starting at position 3158 of SEQ ID NO: 1882003
ggcuacuguaauggacaau

SEQ ID NO: 2087713 - RNA, 19 nt, Artificial Sequence
  Description of Artificial Sequence: Synthetic oligonucleotide
  Antisense strand to SEQ ID NO: 2087712
auuguccauuacaguagcc

SEQ ID NO: 2087714 - RNA, 19 nt, Artificial Sequence
  Description of Artificial Sequence: Synthetic oligonucleotide
  Sense strand starting at position 3887 of SEQ ID NO: 1882003
cuagcccuucuagagauua

SEQ ID NO: 2087715 - RNA, 19 nt, Artificial Sequence
  Description of Artificial Sequence: Synthetic oligonucleotide
  Antisense strand to SEQ ID NO: 2087714
uaaucucuagaagggcuag

SEQ ID NO: 2087716 - RNA, 19 nt, Artificial Sequence
  Description of Artificial Sequence: Synthetic oligonucleotide
  Sense strand starting at position 3923 of SEQ ID NO: 1882003
cucuauaaagcugaaagua

SEQ ID NO: 2087717 - RNA, 19 nt, Artificial Sequence
  Description of Artificial Sequence: Synthetic oligonucleotide
  Antisense strand to SEQ ID NO: 2087716
uacuuucagcuuuauagag

SEQ ID NO: 2087718 - RNA, 19 nt, Artificial Sequence
  Description of Artificial Sequence: Synthetic oligonucleotide
  Sense strand starting at position 3937 of SEQ ID NO: 1882003
aaguauaaugcugguacau

SEQ ID NO: 2087719 - RNA, 19 nt, Artificial Sequence
  Description of Artificial Sequence: Synthetic oligonucleotide
  Antisense strand to SEQ ID NO: 2087718
auguaccagcauuauacuu

SEQ ID NO: 2087720 - RNA, 19 nt, Artificial Sequence
  Description of Artificial Sequence: Synthetic oligonucleotide
  Sense strand starting at position 111 of SEQ ID NO: 1882004
uuggaaucucaguaaguuu

SEQ ID NO: 2087721 - RNA, 19 nt, Artificial Sequence
  Description of Artificial Sequence: Synthetic oligonucleotide
  Antisense strand to SEQ ID NO: 2087720
aaacuuacugagauuccaa

SEQ ID NO: 2087722 - RNA, 19 nt, Artificial Sequence
  Description of Artificial Sequence: Synthetic oligonucleotide
  Sense strand starting at position 170 of SEQ ID NO: 1882004
cuugcuguugaagaacuua

SEQ ID NO: 2087723 - RNA, 19 nt, Artificial Sequence
  Description of Artificial Sequence: Synthetic oligonucleotide
  Antisense strand to SEQ ID NO: 2087722
uaaguucuucaacagcaag

SEQ ID NO: 2087724 - RNA, 19 nt, Artificial Sequence
  Description of Artificial Sequence: Synthetic oligonucleotide
  Sense strand starting at position 1195 of SEQ ID NO: 1882004
accuuaauucuuugaaagg

SEQ ID NO: 2087725 - RNA, 19 nt, Artificial Sequence
  Description of Artificial Sequence: Synthetic oligonucleotide
  Antisense strand to SEQ ID NO: 2087724
ccuuucaaagaauuaaggu

SEQ ID NO: 2087726 - RNA, 19 nt, Artificial Sequence
  Description of Artificial Sequence: Synthetic oligonucleotide
  Sense strand starting at position 1302 of SEQ ID NO: 1882004
aaauauccagguuguagau

SEQ ID NO: 2087727 - RNA, 19 nt, Artificial Sequence
  Description of Artificial Sequence: Synthetic oligonucleotide
  Antisense strand to SEQ ID NO: 2087726
aucuacaaccuggauauuu

SEQ ID NO: 2087728 - RNA, 19 nt, Artificial Sequence
  Description of Artificial Sequence: Synthetic oligonucleotide
  Sense strand starting at position 1398 of SEQ ID NO: 1882004
uaugauuuauaaggagaag

SEQ ID NO: 2087729 - RNA, 19 nt, Artificial Sequence
  Description of Artificial Sequence: Synthetic oligonucleotide
  Antisense strand to SEQ ID NO: 2087728
cuucuccuuauaaaucaua

SEQ ID NO: 2087730 - RNA, 19 nt, Artificial Sequence
  Description of Artificial Sequence: Synthetic oligonucleotide
  Sense strand starting at position 1418 of SEQ ID NO: 1882004
gagaaucuguuaguaaaga

SEQ ID NO: 2087731 - RNA, 19 nt, Artificial Sequence
  Description of Artificial Sequence: Synthetic oligonucleotide
  Antisense strand to SEQ ID NO: 2087730
ucuuuacuaacagauucuc

SEQ ID NO: 2087732 - RNA, 19 nt, Artificial Sequence
  Description of Artificial Sequence: Synthetic oligonucleotide
  Sense strand starting at position 1760 of SEQ ID NO: 1882004
accuaaaucccuugaggau

SEQ ID NO: 2087733 - RNA, 19 nt, Artificial Sequence
  Description of Artificial Sequence: Synthetic oligonucleotide
  Antisense strand to SEQ ID NO: 2087732
auccucaagggauuuaggu

SEQ ID NO: 2087734 - RNA, 19 nt, Artificial Sequence
  Description of Artificial Sequence: Synthetic oligonucleotide
  Sense strand starting at position 1808 of SEQ ID NO: 1882004
uugagauacuuugugaaag

SEQ ID NO: 2087735 - RNA, 19 nt, Artificial Sequence
  Description of Artificial Sequence: Synthetic oligonucleotide
  Antisense strand to SEQ ID NO: 2087734
cuuucacaaaguaucucaa

SEQ ID NO: 2087736 - RNA, 19 nt, Artificial Sequence
  Description of Artificial Sequence: Synthetic oligonucleotide
  Sense strand starting at position 1895 of SEQ ID NO: 1882004
uguugcauuugauuaguga

SEQ ID NO: 2087737 - RNA, 19 nt, Artificial Sequence
  Description of Artificial Sequence: Synthetic oligonucleotide
  Antisense strand to SEQ ID NO: 2087736
ucacuaaucaaaugcaaca

SEQ ID NO: 2087738 - RNA, 19 nt, Artificial Sequence
  Description of Artificial Sequence: Synthetic oligonucleotide
  Sense strand starting at position 1909 of SEQ ID NO: 1882004
agugaaauucuuggaaguu

SEQ ID NO: 2087739 - RNA, 19 nt, Artificial Sequence
  Description of Artificial Sequence: Synthetic oligonucleotide
  Antisense strand to SEQ ID NO: 2087738
aacuuccaagaauuucacu

SEQ ID NO: 2087740 - RNA, 19 nt, Artificial Sequence
  Description of Artificial Sequence: Synthetic oligonucleotide
  Sense strand starting at position 2024 of SEQ ID NO: 1882004
ugauauuugagugguguuu

SEQ ID NO: 2087741 - RNA, 19 nt, Artificial Sequence
  Description of Artificial Sequence: Synthetic oligonucleotide
  Antisense strand to SEQ ID NO: 2087740
aaacaccacucaaauauca

SEQ ID NO: 2087742 - RNA, 19 nt, Artificial Sequence
  Description of Artificial Sequence: Synthetic oligonucleotide
  Sense strand starting at position 2074 of SEQ ID NO: 1882004
cuguuagauugaccauaua

SEQ ID NO: 2087743 - RNA, 19 nt, Artificial Sequence
  Description of Artificial Sequence: Synthetic oligonucleotide
  Antisense strand to SEQ ID NO: 2087742
uauauggucaaucuaacag

SEQ ID NO: 2087744 - RNA, 19 nt, Artificial Sequence
  Description of Artificial Sequence: Synthetic oligonucleotide
  Sense strand starting at position 2083 of SEQ ID NO: 1882004
ugaccauauaguugggauu

SEQ ID NO: 2087745 - RNA, 19 nt, Artificial Sequence
  Description of Artificial Sequence: Synthetic oligonucleotide
  Antisense strand to SEQ ID NO: 2087744
aaucccaacuauaugguca

SEQ ID NO: 2087746 - RNA, 19 nt, Artificial Sequence
  Description of Artificial Sequence: Synthetic oligonucleotide
  Sense strand starting at position 2095 of SEQ ID NO: 1882004
ugggauucuuuguuuggaa

SEQ ID NO: 2087747 - RNA, 19 nt, Artificial Sequence
  Description of Artificial Sequence: Synthetic oligonucleotide
  Antisense strand to SEQ ID NO: 2087746
uuccaaacaaagaauccca

SEQ ID NO: 2087748 - RNA, 19 nt, Artificial Sequence
  Description of Artificial Sequence: Synthetic oligonucleotide
  Sense strand starting at position 2096 of SEQ ID NO: 1882004
gggauucuuuguuuggaag

SEQ ID NO: 2087749 - RNA, 19 nt, Artificial Sequence
  Description of Artificial Sequence: Synthetic oligonucleotide
  Antisense strand to SEQ ID NO: 2087748
cuuccaaacaaagaauccc

SEQ ID NO: 2087750 - RNA, 19 nt, Artificial Sequence
  Description of Artificial Sequence: Synthetic oligonucleotide
  Sense strand starting at position 2097 of SEQ ID NO: 1882004
ggauucuuuguuuggaaga

SEQ ID NO: 2087751 - RNA, 19 nt, Artificial Sequence
  Description of Artificial Sequence: Synthetic oligonucleotide
  Antisense strand to SEQ ID NO: 2087750
ucuuccaaacaaagaaucc

SEQ ID NO: 2087752 - RNA, 19 nt, Artificial Sequence
  Description of Artificial Sequence: Synthetic oligonucleotide
  Sense strand starting at position 2154 of SEQ ID NO: 1882004
uagauauauuugcccguuu

SEQ ID NO: 2087753 - RNA, 19 nt, Artificial Sequence
  Description of Artificial Sequence: Synthetic oligonucleotide
  Antisense strand to SEQ ID NO: 2087752
aaacgggcaaauauaucua

SEQ ID NO: 2087754 - RNA, 19 nt, Artificial Sequence
  Description of Artificial Sequence: Synthetic oligonucleotide
  Sense strand starting at position 2155 of SEQ ID NO: 1882004
agauauauuugcccguuua

SEQ ID NO: 2087755 - RNA, 19 nt, Artificial Sequence
  Description of Artificial Sequence: Synthetic oligonucleotide
  Antisense strand to SEQ ID NO: 2087754
uaaacgggcaaauauaucu

SEQ ID NO: 2087756 - RNA, 19 nt, Artificial Sequence
  Description of Artificial Sequence: Synthetic oligonucleotide
  Sense strand starting at position 2156 of SEQ ID NO: 1882004
gauauauuugcccguuuaa

SEQ ID NO: 2087757 - RNA, 19 nt, Artificial Sequence
  Description of Artificial Sequence: Synthetic oligonucleotide
  Antisense strand to SEQ ID NO: 2087756
uuaaacgggcaaauauauc

SEQ ID NO: 2087758 - RNA, 19 nt, Artificial Sequence
  Description of Artificial Sequence: Synthetic oligonucleotide
  Sense strand starting at position 2293 of SEQ ID NO: 1882004
gacaucguucuggguauuu

SEQ ID NO: 2087759 - RNA, 19 nt, Artificial Sequence
  Description of Artificial Sequence: Synthetic oligonucleotide
  Antisense strand to SEQ ID NO: 2087758
aaauacccagaacgauguc

SEQ ID NO: 2087760 - RNA, 19 nt, Artificial Sequence
  Description of Artificial Sequence: Synthetic oligonucleotide
  Sense strand starting at position 2479 of SEQ ID NO: 1882004
gaggacaaauugcuaagua

SEQ ID NO: 2087761 - RNA, 19 nt, Artificial Sequence
  Description of Artificial Sequence: Synthetic oligonucleotide
  Antisense strand to SEQ ID NO: 2087760
uacuuagcaauuuguccuc

SEQ ID NO: 2087762 - RNA, 19 nt, Artificial Sequence
  Description of Artificial Sequence: Synthetic oligonucleotide
  Sense strand starting at position 2495 of SEQ ID NO: 1882004
guaauugagugguuaaagg

SEQ ID NO: 2087763 - RNA, 19 nt, Artificial Sequence
  Description of Artificial Sequence: Synthetic oligonucleotide
  Antisense strand to SEQ ID NO: 2087762
ccuuuaaccacucaauuac

SEQ ID NO: 2087764 - RNA, 19 nt, Artificial Sequence
  Description of Artificial Sequence: Synthetic oligonucleotide
  Sense strand starting at position 2531 of SEQ ID NO: 1882004
gugauucuuaggcagaggu

SEQ ID NO: 2087765 - RNA, 19 nt, Artificial Sequence
  Description of Artificial Sequence: Synthetic oligonucleotide
  Antisense strand to SEQ ID NO: 2087764
accucugccuaagaaucac

SEQ ID NO: 2087766 - RNA, 19 nt, Artificial Sequence
  Description of Artificial Sequence: Synthetic oligonucleotide
  Sense strand starting at position 2533 of SEQ ID NO: 1882004
gauucuuaggcagagguuu

SEQ ID NO: 2087767 - RNA, 19 nt, Artificial Sequence
  Description of Artificial Sequence: Synthetic oligonucleotide
  Antisense strand to SEQ ID NO: 2087766
aaaccucugccuaagaauc

SEQ ID NO: 2087768 - RNA, 19 nt, Artificial Sequence
  Description of Artificial Sequence: Synthetic oligonucleotide
  Sense strand starting at position 2707 of SEQ ID NO: 1882004
gguugauggaguuacuagu

SEQ ID NO: 2087769 - RNA, 19 nt, Artificial Sequence
  Description of Artificial Sequence: Synthetic oligonucleotide
  Antisense strand to SEQ ID NO: 2087768
acuaguaacuccaucaacc

SEQ ID NO: 2087770 - RNA, 19 nt, Artificial Sequence
  Description of Artificial Sequence: Synthetic oligonucleotide
  Sense strand starting at position 2792 of SEQ ID NO: 1882004
cugaccaauugaguuaaca

SEQ ID NO: 2087771 - RNA, 19 nt, Artificial Sequence
  Description of Artificial Sequence: Synthetic oligonucleotide
  Antisense strand to SEQ ID NO: 2087770
uguuaacucaauuggucag

SEQ ID NO: 2087772 - RNA, 19 nt, Artificial Sequence
  Description of Artificial Sequence: Synthetic oligonucleotide
  Sense strand starting at position 2963 of SEQ ID NO: 1882004
accaaauuaguguggaauc

SEQ ID NO: 2087773 - RNA, 19 nt, Artificial Sequence
  Description of Artificial Sequence: Synthetic oligonucleotide
  Antisense strand to SEQ ID NO: 2087772
gauuccacacuaauuuggu

SEQ ID NO: 2087774 - RNA, 19 nt, Artificial Sequence
  Description of Artificial Sequence: Synthetic oligonucleotide
  Sense strand starting at position 2965 of SEQ ID NO: 1882004
caaauuaguguggaaucuu

SEQ ID NO: 2087775 - RNA, 19 nt, Artificial Sequence
  Description of Artificial Sequence: Synthetic oligonucleotide
  Antisense strand to SEQ ID NO: 2087774
aagauuccacacuaauuug

SEQ ID NO: 2087776 - RNA, 19 nt, Artificial Sequence
  Description of Artificial Sequence: Synthetic oligonucleotide
  Sense strand starting at position 3206 of SEQ ID NO: 1882004
uuaaucacaucaguaaugu

SEQ ID NO: 2087777 - RNA, 19 nt, Artificial Sequence
  Description of Artificial Sequence: Synthetic oligonucleotide
  Antisense strand to SEQ ID NO: 2087776
acauuacugaugugauuaa

SEQ ID NO: 2087778 - RNA, 19 nt, Artificial Sequence
  Description of Artificial Sequence: Synthetic oligonucleotide
  Sense strand starting at position 3247 of SEQ ID NO: 1882004
gggcuauuuauuggccauu

SEQ ID NO: 2087779 - RNA, 19 nt, Artificial Sequence
  Description of Artificial Sequence: Synthetic oligonucleotide
  Antisense strand to SEQ ID NO: 2087778
aauggccaauaaauagccc

SEQ ID NO: 2087780 - RNA, 19 nt, Artificial Sequence
  Description of Artificial Sequence: Synthetic oligonucleotide
  Sense strand starting at position 3284 of SEQ ID NO: 1882004
cugaaaucaucugcuagag

SEQ ID NO: 2087781 - RNA, 19 nt, Artificial Sequence
  Description of Artificial Sequence: Synthetic oligonucleotide
  Antisense strand to SEQ ID NO: 2087780
cucuagcagaugauuucag

SEQ ID NO: 2087782 - RNA, 19 nt, Artificial Sequence
  Description of Artificial Sequence: Synthetic oligonucleotide
  Sense strand starting at position 3299 of SEQ ID NO: 1882004
agagucuuucuggaaccuu

SEQ ID NO: 2087783 - RNA, 19 nt, Artificial Sequence
  Description of Artificial Sequence: Synthetic oligonucleotide
  Antisense strand to SEQ ID NO: 2087782
aagguuccagaaagacucu

SEQ ID NO: 2087784 - RNA, 19 nt, Artificial Sequence
  Description of Artificial Sequence: Synthetic oligonucleotide
  Sense strand starting at position 3432 of SEQ ID NO: 1882004
cucagcaucccauaguaga

SEQ ID NO: 2087785 - RNA, 19 nt, Artificial Sequence
  Description of Artificial Sequence: Synthetic oligonucleotide
  Antisense strand to SEQ ID NO: 2087784
ucuacuaugggaugcugag

SEQ ID NO: 2087786 - RNA, 19 nt, Artificial Sequence
  Description of Artificial Sequence: Synthetic oligonucleotide
  Sense strand starting at position 3440 of SEQ ID NO: 1882004
cccauaguagagugaucau

SEQ ID NO: 2087787 - RNA, 19 nt, Artificial Sequence
  Description of Artificial Sequence: Synthetic oligonucleotide
  Antisense strand to SEQ ID NO: 2087786
augaucacucuacuauggg

SEQ ID NO: 2087788 - RNA, 19 nt, Artificial Sequence
  Description of Artificial Sequence: Synthetic oligonucleotide
  Sense strand starting at position 3551 of SEQ ID NO: 1882004
ggaugaugugugcagaacu

SEQ ID NO: 2087789 - RNA, 19 nt, Artificial Sequence
  Description of Artificial Sequence: Synthetic oligonucleotide
  Antisense strand to SEQ ID NO: 2087788
aguucugcacacaucaucc

SEQ ID NO: 2087790 - RNA, 19 nt, Artificial Sequence
  Description of Artificial Sequence: Synthetic oligonucleotide
  Sense strand starting at position 3596 of SEQ ID NO: 1882004
gcuauaugccaggaaugua

SEQ ID NO: 2087791 - RNA, 19 nt, Artificial Sequence
  Description of Artificial Sequence: Synthetic oligonucleotide
  Antisense strand to SEQ ID NO: 2087790
uacauuccuggcauauagc

SEQ ID NO: 2087792 - RNA, 19 nt, Artificial Sequence
  Description of Artificial Sequence: Synthetic oligonucleotide
  Sense strand starting at position 3814 of SEQ ID NO: 1882004
gcauaugcacuggauuacu

SEQ ID NO: 2087793 - RNA, 19 nt, Artificial Sequence
  Description of Artificial Sequence: Synthetic oligonucleotide
  Antisense strand to SEQ ID NO: 2087792
aguaauccagugcauaugc

SEQ ID NO: 2087794 - RNA, 19 nt, Artificial Sequence
  Description of Artificial Sequence: Synthetic oligonucleotide
  Sense strand starting at position 3858 of SEQ ID NO: 1882004
guuucuagaacaugaggua

SEQ ID NO: 2087795 - RNA, 19 nt, Artificial Sequence
  Description of Artificial Sequence: Synthetic oligonucleotide
  Antisense strand to SEQ ID NO: 2087794
uaccucauguucuagaaac

SEQ ID NO: 2087796 - RNA, 19 nt, Artificial Sequence
  Description of Artificial Sequence: Synthetic oligonucleotide
  Sense strand starting at position 3941 of SEQ ID NO: 1882004
ucacucaggcuugaguuua

SEQ ID NO: 2087797 - RNA, 19 nt, Artificial Sequence
  Description of Artificial Sequence: Synthetic oligonucleotide
  Antisense strand to SEQ ID NO: 2087796
uaaacucaagccugaguga

SEQ ID NO: 2087798 - RNA, 19 nt, Artificial Sequence
  Description of Artificial Sequence: Synthetic oligonucleotide
  Sense strand starting at position 3954 of SEQ ID NO: 1882004
aguuuaguggcacaaugau

SEQ ID NO: 2087799 - RNA, 19 nt, Artificial Sequence
  Description of Artificial Sequence: Synthetic oligonucleotide
  Antisense strand to SEQ ID NO: 2087798
aucauugugccacuaaacu

SEQ ID NO: 2087800 - RNA, 19 nt, Artificial Sequence
  Description of Artificial Sequence: Synthetic oligonucleotide
  Sense strand starting at position 654 of SEQ ID NO: 1882005
ggcggucucaaggaaaugu

SEQ ID NO: 2087801 - RNA, 19 nt, Artificial Sequence
  Description of Artificial Sequence: Synthetic oligonucleotide
  Antisense strand to SEQ ID NO: 2087800
acauuuccuugagaccgcc

SEQ ID NO: 2087802 - RNA, 19 nt, Artificial Sequence
  Description of Artificial Sequence: Synthetic oligonucleotide
  Sense strand starting at position 813 of SEQ ID NO: 1882005
ccuaaugugccagaggagu

SEQ ID NO: 2087803 - RNA, 19 nt, Artificial Sequence
  Description of Artificial Sequence: Synthetic oligonucleotide
  Antisense strand to SEQ ID NO: 2087802
acuccucuggcacauuagg

SEQ ID NO: 2087804 - RNA, 19 nt, Artificial Sequence
  Description of Artificial Sequence: Synthetic oligonucleotide
  Sense strand starting at position 971 of SEQ ID NO: 1882005
uaggcauuguggucccaga

SEQ ID NO: 2087805 - RNA, 19 nt, Artificial Sequence
  Description of Artificial Sequence: Synthetic oligonucleotide
  Antisense strand to SEQ ID NO: 2087804
ucugggaccacaaugccua

SEQ ID NO: 2087806 - RNA, 19 nt, Artificial Sequence
  Description of Artificial Sequence: Synthetic oligonucleotide
  Sense strand starting at position 984 of SEQ ID NO: 1882005
cccagauucugagcugguu

SEQ ID NO: 2087807 - RNA, 19 nt, Artificial Sequence
  Description of Artificial Sequence: Synthetic oligonucleotide
  Antisense strand to SEQ ID NO: 2087806
aaccagcucagaaucuggg

SEQ ID NO: 2087808 - RNA, 19 nt, Artificial Sequence
  Description of Artificial Sequence: Synthetic oligonucleotide
  Sense strand starting at position 1131 of SEQ ID NO: 1882005
gggaaaggucgcugcugau

SEQ ID NO: 2087809 - RNA, 19 nt, Artificial Sequence
  Description of Artificial Sequence: Synthetic oligonucleotide
  Antisense strand to SEQ ID NO: 2087808
aucagcagcgaccuuuccc

SEQ ID NO: 2087810 - RNA, 19 nt, Artificial Sequence
  Description of Artificial Sequence: Synthetic oligonucleotide
  Sense strand starting at position 1284 of SEQ ID NO: 1882005
aagucacgcucuuauagaa

SEQ ID NO: 2087811 - RNA, 19 nt, Artificial Sequence
  Description of Artificial Sequence: Synthetic oligonucleotide
  Antisense strand to SEQ ID NO: 2087810
uucuauaagagcgugacuu

SEQ ID NO: 2087812 - RNA, 19 nt, Artificial Sequence
  Description of Artificial Sequence: Synthetic oligonucleotide
  Sense strand starting at position 1299 of SEQ ID NO: 1882005
agaaguauauguggacuua

SEQ ID NO: 2087813 - RNA, 19 nt, Artificial Sequence
  Description of Artificial Sequence: Synthetic oligonucleotide
  Antisense strand to SEQ ID NO: 2087812
uaaguccacauauacuucu

SEQ ID NO: 2087814 - RNA, 19 nt, Artificial Sequence
  Description of Artificial Sequence: Synthetic oligonucleotide
  Sense strand starting at position 1368 of SEQ ID NO: 1882005
guauaugcauuccaguguu

SEQ ID NO: 2087815 - RNA, 19 nt, Artificial Sequence
  Description of Artificial Sequence: Synthetic oligonucleotide
  Antisense strand to SEQ ID NO: 2087814
aacacuggaaugcauauac

SEQ ID NO: 2087816 - RNA, 19 nt, Artificial Sequence
  Description of Artificial Sequence: Synthetic oligonucleotide
  Sense strand starting at position 1908 of SEQ ID NO: 1882005
cugccacucccuuguagaa

SEQ ID NO: 2087817 - RNA, 19 nt, Artificial Sequence
  Description of Artificial Sequence: Synthetic oligonucleotide
  Antisense strand to SEQ ID NO: 2087816
uucuacaagggaguggcag

SEQ ID NO: 2087818 - RNA, 19 nt, Artificial Sequence
  Description of Artificial Sequence: Synthetic oligonucleotide
  Sense strand starting at position 2181 of SEQ ID NO: 1882005
ccuccacagacguguugaa

SEQ ID NO: 2087819 - RNA, 19 nt, Artificial Sequence
  Description of Artificial Sequence: Synthetic oligonucleotide
  Antisense strand to SEQ ID NO: 2087818
uucaacacgucuguggagg

SEQ ID NO: 2087820 - RNA, 19 nt, Artificial Sequence
  Description of Artificial Sequence: Synthetic oligonucleotide
  Sense strand starting at position 2220 of SEQ ID NO: 1882005
cgauguucccacugcggaa

SEQ ID NO: 2087821 - RNA, 19 nt, Artificial Sequence
  Description of Artificial Sequence: Synthetic oligonucleotide
  Antisense strand to SEQ ID NO: 2087820
uuccgcagugggaacaucg

SEQ ID NO: 2087822 - RNA, 19 nt, Artificial Sequence
  Description of Artificial Sequence: Synthetic oligonucleotide
  Sense strand starting at position 2377 of SEQ ID NO: 1882005
gggccuuccucugggagga

SEQ ID NO: 2087823 - RNA, 19 nt, Artificial Sequence
  Description of Artificial Sequence: Synthetic oligonucleotide
  Antisense strand to SEQ ID NO: 2087822
uccucccagaggaaggccc

SEQ ID NO: 2087824 - RNA, 19 nt, Artificial Sequence
  Description of Artificial Sequence: Synthetic oligonucleotide
  Sense strand starting at position 2378 of SEQ ID NO: 1882005
ggccuuccucugggaggau

SEQ ID NO: 2087825 - RNA, 19 nt, Artificial Sequence
  Description of Artificial Sequence: Synthetic oligonucleotide
  Antisense strand to SEQ ID NO: 2087824
auccucccagaggaaggcc

SEQ ID NO: 2087826 - RNA, 19 nt, Artificial Sequence
  Description of Artificial Sequence: Synthetic oligonucleotide
  Sense strand starting at position 2390 of SEQ ID NO: 1882005
ggaggauggugacaggaaa

SEQ ID NO: 2087827 - RNA, 19 nt, Artificial Sequence
  Description of Artificial Sequence: Synthetic oligonucleotide
  Antisense strand to SEQ ID NO: 2087826
uuuccugucaccauccucc

SEQ ID NO: 2087828 - RNA, 19 nt, Artificial Sequence
  Description of Artificial Sequence: Synthetic oligonucleotide
  Sense strand starting at position 2403 of SEQ ID NO: 1882005
aggaaacaucccugagcuc

SEQ ID NO: 2087829 - RNA, 19 nt, Artificial Sequence
  Description of Artificial Sequence: Synthetic oligonucleotide
  Antisense strand to SEQ ID NO: 2087828
gagcucagggauguuuccu

SEQ ID NO: 2087830 - RNA, 19 nt, Artificial Sequence
  Description of Artificial Sequence: Synthetic oligonucleotide
  Sense strand starting at position 2500 of SEQ ID NO: 1882005
gaggauaacuugccgguga

SEQ ID NO: 2087831 - RNA, 19 nt, Artificial Sequence
  Description of Artificial Sequence: Synthetic oligonucleotide
  Antisense strand to SEQ ID NO: 2087830
ucaccggcaaguuauccuc

SEQ ID NO: 2087832 - RNA, 19 nt, Artificial Sequence
  Description of Artificial Sequence: Synthetic oligonucleotide
  Sense strand starting at position 2501 of SEQ ID NO: 1882005
aggauaacuugccggugaa

SEQ ID NO: 2087833 - RNA, 19 nt, Artificial Sequence
  Description of Artificial Sequence: Synthetic oligonucleotide
  Antisense strand to SEQ ID NO: 2087832
uucaccggcaaguuauccu

SEQ ID NO: 2087834 - RNA, 19 nt, Artificial Sequence
  Description of Artificial Sequence: Synthetic oligonucleotide
  Sense strand starting at position 2502 of SEQ ID NO: 1882005
ggauaacuugccggugaag

SEQ ID NO: 2087835 - RNA, 19 nt, Artificial Sequence
  Description of Artificial Sequence: Synthetic oligonucleotide
  Antisense strand to SEQ ID NO: 2087834
cuucaccggcaaguuaucc

SEQ ID NO: 2087836 - RNA, 19 nt, Artificial Sequence
  Description of Artificial Sequence: Synthetic oligonucleotide
  Sense strand starting at position 2585 of SEQ ID NO: 1882005
uccagucuuagagguugga

SEQ ID NO: 2087837 - RNA, 19 nt, Artificial Sequence
  Description of Artificial Sequence: Synthetic oligonucleotide
  Antisense strand to SEQ ID NO: 2087836
uccaaccucuaagacugga

SEQ ID NO: 2087838 - RNA, 19 nt, Artificial Sequence
  Description of Artificial Sequence: Synthetic oligonucleotide
  Sense strand starting at position 2588 of SEQ ID NO: 1882005
agucuuagagguuggaaga

SEQ ID NO: 2087839 - RNA, 19 nt, Artificial Sequence
  Description of Artificial Sequence: Synthetic oligonucleotide
  Antisense strand to SEQ ID NO: 2087838
ucuuccaaccucuaagacu

SEQ ID NO: 2087840 - RNA, 19 nt, Artificial Sequence
  Description of Artificial Sequence: Synthetic oligonucleotide
  Sense strand starting at position 2589 of SEQ ID NO: 1882005
gucuuagagguuggaagaa

SEQ ID NO: 2087841 - RNA, 19 nt, Artificial Sequence
  Description of Artificial Sequence: Synthetic oligonucleotide
  Antisense strand to SEQ ID NO: 2087840
uucuuccaaccucuaagac

SEQ ID NO: 2087842 - RNA, 19 nt, Artificial Sequence
  Description of Artificial Sequence: Synthetic oligonucleotide
  Sense strand starting at position 2652 of SEQ ID NO: 1882005
agaaguccucgcgcaggua

SEQ ID NO: 2087843 - RNA, 19 nt, Artificial Sequence
  Description of Artificial Sequence: Synthetic oligonucleotide
  Antisense strand to SEQ ID NO: 2087842
uaccugcgcgaggacuucu

SEQ ID NO: 2087844 - RNA, 19 nt, Artificial Sequence
  Description of Artificial Sequence: Synthetic oligonucleotide
  Sense strand starting at position 2670 of SEQ ID NO: 1882005
aggcuuucuccagggugaa

SEQ ID NO: 2087845 - RNA, 19 nt, Artificial Sequence
  Description of Artificial Sequence: Synthetic oligonucleotide
  Antisense strand to SEQ ID NO: 2087844
uucacccuggagaaagccu

SEQ ID NO: 2087846 - RNA, 19 nt, Artificial Sequence
  Description of Artificial Sequence: Synthetic oligonucleotide
  Sense strand starting at position 2671 of SEQ ID NO: 1882005
ggcuuucuccagggugaag

SEQ ID NO: 2087847 - RNA, 19 nt, Artificial Sequence
  Description of Artificial Sequence: Synthetic oligonucleotide
  Antisense strand to SEQ ID NO: 2087846
cuucacccuggagaaagcc

SEQ ID NO: 2087848 - RNA, 19 nt, Artificial Sequence
  Description of Artificial Sequence: Synthetic oligonucleotide
  Sense strand starting at position 2682 of SEQ ID NO: 1882005
gggugaagugcugguaugu

SEQ ID NO: 2087849 - RNA, 19 nt, Artificial Sequence
  Description of Artificial Sequence: Synthetic oligonucleotide
  Antisense strand to SEQ ID NO: 2087848
acauaccagcacuucaccc

SEQ ID NO: 2087850 - RNA, 19 nt, Artificial Sequence
  Description of Artificial Sequence: Synthetic oligonucleotide
  Sense strand starting at position 2691 of SEQ ID NO: 1882005
gcugguaugucuucaggcu

SEQ ID NO: 2087851 - RNA, 19 nt, Artificial Sequence
  Description of Artificial Sequence: Synthetic oligonucleotide
  Antisense strand to SEQ ID NO: 2087850
agccugaagacauaccagc

SEQ ID NO: 2087852 - RNA, 19 nt, Artificial Sequence
  Description of Artificial Sequence: Synthetic oligonucleotide
  Sense strand starting at position 2940 of SEQ ID NO: 1882005
uggcuuucugccggucaca

SEQ ID NO: 2087853 - RNA, 19 nt, Artificial Sequence
  Description of Artificial Sequence: Synthetic oligonucleotide
  Antisense strand to SEQ ID NO: 2087852
ugugaccggcagaaagcca

SEQ ID NO: 2087854 - RNA, 19 nt, Artificial Sequence
  Description of Artificial Sequence: Synthetic oligonucleotide
  Sense strand starting at position 2942 of SEQ ID NO: 1882005
gcuuucugccggucacagu

SEQ ID NO: 2087855 - RNA, 19 nt, Artificial Sequence
  Description of Artificial Sequence: Synthetic oligonucleotide
  Antisense strand to SEQ ID NO: 2087854
acugugaccggcagaaagc

SEQ ID NO: 2087856 - RNA, 19 nt, Artificial Sequence
  Description of Artificial Sequence: Synthetic oligonucleotide
  Sense strand starting at position 3052 of SEQ ID NO: 1882005
agcugacagugcucuaugu

SEQ ID NO: 2087857 - RNA, 19 nt, Artificial Sequence
  Description of Artificial Sequence: Synthetic oligonucleotide
  Antisense strand to SEQ ID NO: 2087856
acauagagcacugucagcu

SEQ ID NO: 2087858 - RNA, 19 nt, Artificial Sequence
  Description of Artificial Sequence: Synthetic oligonucleotide
  Sense strand starting at position 3054 of SEQ ID NO: 1882005
cugacagugcucuauguga

SEQ ID NO: 2087859 - RNA, 19 nt, Artificial Sequence
  Description of Artificial Sequence: Synthetic oligonucleotide
  Antisense strand to SEQ ID NO: 2087858
ucacauagagcacugucag

SEQ ID NO: 2087860 - RNA, 19 nt, Artificial Sequence
  Description of Artificial Sequence: Synthetic oligonucleotide
  Sense strand starting at position 3219 of SEQ ID NO: 1882005
ugggcuugucccgguagaa

SEQ ID NO: 2087861 - RNA, 19 nt, Artificial Sequence
  Description of Artificial Sequence: Synthetic oligonucleotide
  Antisense strand to SEQ ID NO: 2087860
uucuaccgggacaagccca

SEQ ID NO: 2087862 - RNA, 19 nt, Artificial Sequence
  Description of Artificial Sequence: Synthetic oligonucleotide
  Sense strand starting at position 3228 of SEQ ID NO: 1882005
cccgguagaacaugagaau

SEQ ID NO: 2087863 - RNA, 19 nt, Artificial Sequence
  Description of Artificial Sequence: Synthetic oligonucleotide
  Antisense strand to SEQ ID NO: 2087862
auucucauguucuaccggg

SEQ ID NO: 2087864 - RNA, 19 nt, Artificial Sequence
  Description of Artificial Sequence: Synthetic oligonucleotide
  Sense strand starting at position 3231 of SEQ ID NO: 1882005
gguagaacaugagaaugaa

SEQ ID NO: 2087865 - RNA, 19 nt, Artificial Sequence
  Description of Artificial Sequence: Synthetic oligonucleotide
  Antisense strand to SEQ ID NO: 2087864
uucauucucauguucuacc

SEQ ID NO: 2087866 - RNA, 19 nt, Artificial Sequence
  Description of Artificial Sequence: Synthetic oligonucleotide
  Sense strand starting at position 3267 of SEQ ID NO: 1882005
gguccagcgacuugaacau

SEQ ID NO: 2087867 - RNA, 19 nt, Artificial Sequence
  Description of Artificial Sequence: Synthetic oligonucleotide
  Antisense strand to SEQ ID NO: 2087866
auguucaagucgcuggacc

SEQ ID NO: 2087868 - RNA, 19 nt, Artificial Sequence
  Description of Artificial Sequence: Synthetic oligonucleotide
  Sense strand starting at position 3435 of SEQ ID NO: 1882005
ggcagacaugucugaugca

SEQ ID NO: 2087869 - RNA, 19 nt, Artificial Sequence
  Description of Artificial Sequence: Synthetic oligonucleotide
  Antisense strand to SEQ ID NO: 2087868
ugcaucagacaugucugcc

SEQ ID NO: 2087870 - RNA, 19 nt, Artificial Sequence
  Description of Artificial Sequence: Synthetic oligonucleotide
  Sense strand starting at position 3438 of SEQ ID NO: 1882005
agacaugucugaugcacag

SEQ ID NO: 2087871 - RNA, 19 nt, Artificial Sequence
  Description of Artificial Sequence: Synthetic oligonucleotide
  Antisense strand to SEQ ID NO: 2087870
cugugcaucagacaugucu

SEQ ID NO: 2087872 - RNA, 19 nt, Artificial Sequence
  Description of Artificial Sequence: Synthetic oligonucleotide
  Sense strand starting at position 3864 of SEQ ID NO: 1882005
gcgcguacaucaugaggaa

SEQ ID NO: 2087873 - RNA, 19 nt, Artificial Sequence
  Description of Artificial Sequence: Synthetic oligonucleotide
  Antisense strand to SEQ ID NO: 2087872
uuccucaugauguacgcgc

SEQ ID NO: 2087874 - RNA, 19 nt, Artificial Sequence
  Description of Artificial Sequence: Synthetic oligonucleotide
  Sense strand starting at position 3879 of SEQ ID NO: 1882005
ggaagcaguaaucgagguu

SEQ ID NO: 2087875 - RNA, 19 nt, Artificial Sequence
  Description of Artificial Sequence: Synthetic oligonucleotide
  Antisense strand to SEQ ID NO: 2087874
aaccucgauuacugcuucc

SEQ ID NO: 2087876 - RNA, 19 nt, Artificial Sequence
  Description of Artificial Sequence: Synthetic oligonucleotide
  Sense strand starting at position 184 of SEQ ID NO: 1882006
agcuccuggagucauagau

SEQ ID NO: 2087877 - RNA, 19 nt, Artificial Sequence
  Description of Artificial Sequence: Synthetic oligonucleotide
  Antisense strand to SEQ ID NO: 2087876
aucuaugacuccaggagcu

SEQ ID NO: 2087878 - RNA, 19 nt, Artificial Sequence
  Description of Artificial Sequence: Synthetic oligonucleotide
  Sense strand starting at position 259 of SEQ ID NO: 1882006
uguuucuugucuguugcua

SEQ ID NO: 2087879 - RNA, 19 nt, Artificial Sequence
  Description of Artificial Sequence: Synthetic oligonucleotide
  Antisense strand to SEQ ID NO: 2087878
uagcaacagacaagaaaca

SEQ ID NO: 2087880 - RNA, 19 nt, Artificial Sequence
  Description of Artificial Sequence: Synthetic oligonucleotide
  Sense strand starting at position 290 of SEQ ID NO: 1882006
guuugcucuugcuuuaguu

SEQ ID NO: 2087881 - RNA, 19 nt, Artificial Sequence
  Description of Artificial Sequence: Synthetic oligonucleotide
  Antisense strand to SEQ ID NO: 2087880
aacuaaagcaagagcaaac

SEQ ID NO: 2087882 - RNA, 19 nt, Artificial Sequence
  Description of Artificial Sequence: Synthetic oligonucleotide
  Sense strand starting at position 411 of SEQ ID NO: 1882006
cccagauauacugguacgu

SEQ ID NO: 2087883 - RNA, 19 nt, Artificial Sequence
  Description of Artificial Sequence: Synthetic oligonucleotide
  Antisense strand to SEQ ID NO: 2087882
acguaccaguauaucuggg

SEQ ID NO: 2087884 - RNA, 19 nt, Artificial Sequence
  Description of Artificial Sequence: Synthetic oligonucleotide
  Sense strand starting at position 525 of SEQ ID NO: 1882006
uccguguaguugugagguu

SEQ ID NO: 2087885 - RNA, 19 nt, Artificial Sequence
  Description of Artificial Sequence: Synthetic oligonucleotide
  Antisense strand to SEQ ID NO: 2087884
aaccucacaacuacacgga

SEQ ID NO: 2087886 - RNA, 19 nt, Artificial Sequence
  Description of Artificial Sequence: Synthetic oligonucleotide
  Sense strand starting at position 526 of SEQ ID NO: 1882006
ccguguaguugugagguuu

SEQ ID NO: 2087887 - RNA, 19 nt, Artificial Sequence
  Description of Artificial Sequence: Synthetic oligonucleotide
  Antisense strand to SEQ ID NO: 2087886
aaaccucacaacuacacgg

SEQ ID NO: 2087888 - RNA, 19 nt, Artificial Sequence
  Description of Artificial Sequence: Synthetic oligonucleotide
  Sense strand starting at position 798 of SEQ ID NO: 1882006
ucucauugaucgguccagu

SEQ ID NO: 2087889 - RNA, 19 nt, Artificial Sequence
  Description of Artificial Sequence: Synthetic oligonucleotide
  Antisense strand to SEQ ID NO: 2087888
acuggaccgaucaaugaga

SEQ ID NO: 2087890 - RNA, 19 nt, Artificial Sequence
  Description of Artificial Sequence: Synthetic oligonucleotide
  Sense strand starting at position 801 of SEQ ID NO: 1882006
cauugaucgguccaguauu

SEQ ID NO: 2087891 - RNA, 19 nt, Artificial Sequence
  Description of Artificial Sequence: Synthetic oligonucleotide
  Antisense strand to SEQ ID NO: 2087890
aauacuggaccgaucaaug

SEQ ID NO: 2087892 - RNA, 19 nt, Artificial Sequence
  Description of Artificial Sequence: Synthetic oligonucleotide
  Sense strand starting at position 859 of SEQ ID NO: 1882006
gagucuaagucucuuacag

SEQ ID NO: 2087893 - RNA, 19 nt, Artificial Sequence
  Description of Artificial Sequence: Synthetic oligonucleotide
  Antisense strand to SEQ ID NO: 2087892
cuguaagagacuuagacuc

SEQ ID NO: 2087894 - RNA, 19 nt, Artificial Sequence
  Description of Artificial Sequence: Synthetic oligonucleotide
  Sense strand starting at position 861 of SEQ ID NO: 1882006
gucuaagucucuuacagaa

SEQ ID NO: 2087895 - RNA, 19 nt, Artificial Sequence
  Description of Artificial Sequence: Synthetic oligonucleotide
  Antisense strand to SEQ ID NO: 2087894
uucuguaagagacuuagac

SEQ ID NO: 2087896 - RNA, 19 nt, Artificial Sequence
  Description of Artificial Sequence: Synthetic oligonucleotide
  Sense strand starting at position 889 of SEQ ID NO: 1882006
aaaggucaccagcgucaaa

SEQ ID NO: 2087897 - RNA, 19 nt, Artificial Sequence
  Description of Artificial Sequence: Synthetic oligonucleotide
  Antisense strand to SEQ ID NO: 2087896
uuugacgcuggugaccuuu

SEQ ID NO: 2087898 - RNA, 19 nt, Artificial Sequence
  Description of Artificial Sequence: Synthetic oligonucleotide
  Sense strand starting at position 1038 of SEQ ID NO: 1882006
ggagaaugaguuugaugua

SEQ ID NO: 2087899 - RNA, 19 nt, Artificial Sequence
  Description of Artificial Sequence: Synthetic oligonucleotide
  Antisense strand to SEQ ID NO: 2087898
uacaucaaacucauucucc

SEQ ID NO: 2087900 - RNA, 19 nt, Artificial Sequence
  Description of Artificial Sequence: Synthetic oligonucleotide
  Sense strand starting at position 1039 of SEQ ID NO: 1882006
gagaaugaguuugauguau

SEQ ID NO: 2087901 - RNA, 19 nt, Artificial Sequence
  Description of Artificial Sequence: Synthetic oligonucleotide
  Antisense strand to SEQ ID NO: 2087900
auacaucaaacucauucuc

SEQ ID NO: 2087902 - RNA, 19 nt, Artificial Sequence
  Description of Artificial Sequence: Synthetic oligonucleotide
  Sense strand starting at position 1076 of SEQ ID NO: 1882006
gaaaguggguaauaucaaa

SEQ ID NO: 2087903 - RNA, 19 nt, Artificial Sequence
  Description of Artificial Sequence: Synthetic oligonucleotide
  Antisense strand to SEQ ID NO: 2087902
uuugauauuacccacuuuc

SEQ ID NO: 2087904 - RNA, 19 nt, Artificial Sequence
  Description of Artificial Sequence: Synthetic oligonucleotide
  Sense strand starting at position 1089 of SEQ ID NO: 1882006
aucaaauuccuccgagcua

SEQ ID NO: 2087905 - RNA, 19 nt, Artificial Sequence
  Description of Artificial Sequence: Synthetic oligonucleotide
  Antisense strand to SEQ ID NO: 2087904
uagcucggaggaauuugau

SEQ ID NO: 2087906 - RNA, 19 nt, Artificial Sequence
  Description of Artificial Sequence: Synthetic oligonucleotide
  Sense strand starting at position 1090 of SEQ ID NO: 1882006
ucaaauuccuccgagcuaa

SEQ ID NO: 2087907 - RNA, 19 nt, Artificial Sequence
  Description of Artificial Sequence: Synthetic oligonucleotide
  Antisense strand to SEQ ID NO: 2087906
uuagcucggaggaauuuga

SEQ ID NO: 2087908 - RNA, 19 nt, Artificial Sequence
  Description of Artificial Sequence: Synthetic oligonucleotide
  Sense strand starting at position 1163 of SEQ ID NO: 1882006
acgaauugcuaaguagaau

SEQ ID NO: 2087909 - RNA, 19 nt, Artificial Sequence
  Description of Artificial Sequence: Synthetic oligonucleotide
  Antisense strand to SEQ ID NO: 2087908
auucuacuuagcaauucgu

SEQ ID NO: 2087910 - RNA, 19 nt, Artificial Sequence
  Description of Artificial Sequence: Synthetic oligonucleotide
  Sense strand starting at position 1164 of SEQ ID NO: 1882006
cgaauugcuaaguagaaua

SEQ ID NO: 2087911 - RNA, 19 nt, Artificial Sequence
  Description of Artificial Sequence: Synthetic oligonucleotide
  Antisense strand to SEQ ID NO: 2087910
uauucuacuuagcaauucg

SEQ ID NO: 2087912 - RNA, 19 nt, Artificial Sequence
  Description of Artificial Sequence: Synthetic oligonucleotide
  Sense strand starting at position 3539 of SEQ ID NO: 1882006
gacuguaaguuucugauaa

SEQ ID NO: 2087913 - RNA, 19 nt, Artificial Sequence
  Description of Artificial Sequence: Synthetic oligonucleotide
  Antisense strand to SEQ ID NO: 2087912
uuaucagaaacuuacaguc

SEQ ID NO: 2087914 - RNA, 19 nt, Artificial Sequence
  Description of Artificial Sequence: Synthetic oligonucleotide
  Sense strand starting at position 3540 of SEQ ID NO: 1882006
acuguaaguuucugauaaa

SEQ ID NO: 2087915 - RNA, 19 nt, Artificial Sequence
  Description of Artificial Sequence: Synthetic oligonucleotide
  Antisense strand to SEQ ID NO: 2087914
uuuaucagaaacuuacagu

SEQ ID NO: 2087916 - RNA, 19 nt, Artificial Sequence
  Description of Artificial Sequence: Synthetic oligonucleotide
  Sense strand starting at position 3698 of SEQ ID NO: 1882006
gccuuagaaucaugugguu

SEQ ID NO: 2087917 - RNA, 19 nt, Artificial Sequence
  Description of Artificial Sequence: Synthetic oligonucleotide
  Antisense strand to SEQ ID NO: 2087916
aaccacaugauucuaaggc

SEQ ID NO: 2087918 - RNA, 19 nt, Artificial Sequence
  Description of Artificial Sequence: Synthetic oligonucleotide
  Sense strand starting at position 3730 of SEQ ID NO: 1882006
uuguuuaugcggugaauua

SEQ ID NO: 2087919 - RNA, 19 nt, Artificial Sequence
  Description of Artificial Sequence: Synthetic oligonucleotide
  Antisense strand to SEQ ID NO: 2087918
uaauucaccgcauaaacaa

SEQ ID NO: 2087920 - RNA, 19 nt, Artificial Sequence
  Description of Artificial Sequence: Synthetic oligonucleotide
  Sense strand starting at position 3737 of SEQ ID NO: 1882006
ugcggugaauuacacuuau

SEQ ID NO: 2087921 - RNA, 19 nt, Artificial Sequence
  Description of Artificial Sequence: Synthetic oligonucleotide
  Antisense strand to SEQ ID NO: 2087920
auaaguguaauucaccgca

SEQ ID NO: 2087922 - RNA, 19 nt, Artificial Sequence
  Description of Artificial Sequence: Synthetic oligonucleotide
  Sense strand starting at position 3799 of SEQ ID NO: 1882006
ccaacuugaucaugacaga

SEQ ID NO: 2087923 - RNA, 19 nt, Artificial Sequence
  Description of Artificial Sequence: Synthetic oligonucleotide
  Antisense strand to SEQ ID NO: 2087922
ucugucaugaucaaguugg

SEQ ID NO: 2087924 - RNA, 19 nt, Artificial Sequence
  Description of Artificial Sequence: Synthetic oligonucleotide
  Sense strand starting at position 3890 of SEQ ID NO: 1882006
gggauauuggagggcaauu

SEQ ID NO: 2087925 - RNA, 19 nt, Artificial Sequence
  Description of Artificial Sequence: Synthetic oligonucleotide
  Antisense strand to SEQ ID NO: 2087924
aauugcccuccaauauccc

SEQ ID NO: 2087926 - RNA, 19 nt, Artificial Sequence
  Description of Artificial Sequence: Synthetic oligonucleotide
  Sense strand starting at position 184 of SEQ ID NO: 1882007
agcuccuggagucauagau

SEQ ID NO: 2087927 - RNA, 19 nt, Artificial Sequence
  Description of Artificial Sequence: Synthetic oligonucleotide
  Antisense strand to SEQ ID NO: 2087926
aucuaugacuccaggagcu

SEQ ID NO: 2087928 - RNA, 19 nt, Artificial Sequence
  Description of Artificial Sequence: Synthetic oligonucleotide
  Sense strand starting at position 259 of SEQ ID NO: 1882007
uguuucuugucuguugcua

SEQ ID NO: 2087929 - RNA, 19 nt, Artificial Sequence
  Description of Artificial Sequence: Synthetic oligonucleotide
  Antisense strand to SEQ ID NO: 2087928
uagcaacagacaagaaaca

SEQ ID NO: 2087930 - RNA, 19 nt, Artificial Sequence
  Description of Artificial Sequence: Synthetic oligonucleotide
  Sense strand starting at position 290 of SEQ ID NO: 1882007
guuugcucuugcuuuaguu

SEQ ID NO: 2087931 - RNA, 19 nt, Artificial Sequence
  Description of Artificial Sequence: Synthetic oligonucleotide
  Antisense strand to SEQ ID NO: 2087930
aacuaaagcaagagcaaac

SEQ ID NO: 2087932 - RNA, 19 nt, Artificial Sequence
  Description of Artificial Sequence: Synthetic oligonucleotide
  Sense strand starting at position 411 of SEQ ID NO: 1882007
cccagauauacugguacgu

SEQ ID NO: 2087933 - RNA, 19 nt, Artificial Sequence
  Description of Artificial Sequence: Synthetic oligonucleotide
  Antisense strand to SEQ ID NO: 2087932
acguaccaguauaucuggg

SEQ ID NO: 2087934 - RNA, 19 nt, Artificial Sequence
  Description of Artificial Sequence: Synthetic oligonucleotide
  Sense strand starting at position 525 of SEQ ID NO: 1882007
uccguguaguugugagguu

SEQ ID NO: 2087935 - RNA, 19 nt, Artificial Sequence
  Description of Artificial Sequence: Synthetic oligonucleotide
  Antisense strand to SEQ ID NO: 2087934
aaccucacaacuacacgga

SEQ ID NO: 2087936 - RNA, 19 nt, Artificial Sequence
  Description of Artificial Sequence: Synthetic oligonucleotide
  Sense strand starting at position 526 of SEQ ID NO: 1882007
ccguguaguugugagguuu

SEQ ID NO: 2087937 - RNA, 19 nt, Artificial Sequence
  Description of Artificial Sequence: Synthetic oligonucleotide
  Antisense strand to SEQ ID NO: 2087936
aaaccucacaacuacacgg

SEQ ID NO: 2087938 - RNA, 19 nt, Artificial Sequence
  Description of Artificial Sequence: Synthetic oligonucleotide
  Sense strand starting at position 798 of SEQ ID NO: 1882007
ucucauugaucgguccagu

SEQ ID NO: 2087939 - RNA, 19 nt, Artificial Sequence
  Description of Artificial Sequence: Synthetic oligonucleotide
  Antisense strand to SEQ ID NO: 2087938
acuggaccgaucaaugaga

SEQ ID NO: 2087940 - RNA, 19 nt, Artificial Sequence
  Description of Artificial Sequence: Synthetic oligonucleotide
  Sense strand starting at position 801 of SEQ ID NO: 1882007
cauugaucgguccaguauu

SEQ ID NO: 2087941 - RNA, 19 nt, Artificial Sequence
  Description of Artificial Sequence: Synthetic oligonucleotide
  Antisense strand to SEQ ID NO: 2087940
aauacuggaccgaucaaug

SEQ ID NO: 2087942 - RNA, 19 nt, Artificial Sequence
  Description of Artificial Sequence: Synthetic oligonucleotide
  Sense strand starting at position 859 of SEQ ID NO: 1882007
gagucuaagucucuuacag

SEQ ID NO: 2087943 - RNA, 19 nt, Artificial Sequence
  Description of Artificial Sequence: Synthetic oligonucleotide
  Antisense strand to SEQ ID NO: 2087942
cuguaagagacuuagacuc

SEQ ID NO: 2087944 - RNA, 19 nt, Artificial Sequence
  Description of Artificial Sequence: Synthetic oligonucleotide
  Sense strand starting at position 861 of SEQ ID NO: 1882007
gucuaagucucuuacagaa

SEQ ID NO: 2087945 - RNA, 19 nt, Artificial Sequence
  Description of Artificial Sequence: Synthetic oligonucleotide
  Antisense strand to SEQ ID NO: 2087944
uucuguaagagacuuagac

SEQ ID NO: 2087946 - RNA, 19 nt, Artificial Sequence
  Description of Artificial Sequence: Synthetic oligonucleotide
  Sense strand starting at position 889 of SEQ ID NO: 1882007
aaaggucaccagcgucaaa

SEQ ID NO: 2087947 - RNA, 19 nt, Artificial Sequence
  Description of Artificial Sequence: Synthetic oligonucleotide
  Antisense strand to SEQ ID NO: 2087946
uuugacgcuggugaccuuu

SEQ ID NO: 2087948 - RNA, 19 nt, Artificial Sequence
  Description of Artificial Sequence: Synthetic oligonucleotide
  Sense strand starting at position 1038 of SEQ ID NO: 1882007
ggagaaugaguuugaugua

SEQ ID NO: 2087949 - RNA, 19 nt, Artificial Sequence
  Description of Artificial Sequence: Synthetic oligonucleotide
  Antisense strand to SEQ ID NO: 2087948
uacaucaaacucauucucc

SEQ ID NO: 2087950 - RNA, 19 nt, Artificial Sequence
  Description of Artificial Sequence: Synthetic oligonucleotide
  Sense strand starting at position 1039 of SEQ ID NO: 1882007
gagaaugaguuugauguau

SEQ ID NO: 2087951 - RNA, 19 nt, Artificial Sequence
  Description of Artificial Sequence: Synthetic oligonucleotide
  Antisense strand to SEQ ID NO: 2087950
auacaucaaacucauucuc

SEQ ID NO: 2087952 - RNA, 19 nt, Artificial Sequence
  Description of Artificial Sequence: Synthetic oligonucleotide
  Sense strand starting at position 1076 of SEQ ID NO: 1882007
gaaaguggguaauaucaaa

SEQ ID NO: 2087953 - RNA, 19 nt, Artificial Sequence
  Description of Artificial Sequence: Synthetic oligonucleotide
  Antisense strand to SEQ ID NO: 2087952
uuugauauuacccacuuuc

SEQ ID NO: 2087954 - RNA, 19 nt, Artificial Sequence
  Description of Artificial Sequence: Synthetic oligonucleotide
  Sense strand starting at position 1089 of SEQ ID NO: 1882007
aucaaauuccuccgagcua

SEQ ID NO: 2087955 - RNA, 19 nt, Artificial Sequence
  Description of Artificial Sequence: Synthetic oligonucleotide
  Antisense strand to SEQ ID NO: 2087954
uagcucggaggaauuugau

SEQ ID NO: 2087956 - RNA, 19 nt, Artificial Sequence
  Description of Artificial Sequence: Synthetic oligonucleotide
  Sense strand starting at position 1090 of SEQ ID NO: 1882007
ucaaauuccuccgagcuaa

SEQ ID NO: 2087957 - RNA, 19 nt, Artificial Sequence
  Description of Artificial Sequence: Synthetic oligonucleotide
  Antisense strand to SEQ ID NO: 2087956
uuagcucggaggaauuuga

SEQ ID NO: 2087958 - RNA, 19 nt, Artificial Sequence
  Description of Artificial Sequence: Synthetic oligonucleotide
  Sense strand starting at position 1163 of SEQ ID NO: 1882007
acgaauugcuaaguagaau

SEQ ID NO: 2087959 - RNA, 19 nt, Artificial Sequence
  Description of Artificial Sequence: Synthetic oligonucleotide
  Antisense strand to SEQ ID NO: 2087958
auucuacuuagcaauucgu

SEQ ID NO: 2087960 - RNA, 19 nt, Artificial Sequence
  Description of Artificial Sequence: Synthetic oligonucleotide
  Sense strand starting at position 1164 of SEQ ID NO: 1882007
cgaauugcuaaguagaaua

SEQ ID NO: 2087961 - RNA, 19 nt, Artificial Sequence
  Description of Artificial Sequence: Synthetic oligonucleotide
  Antisense strand to SEQ ID NO: 2087960
uauucuacuuagcaauucg

SEQ ID NO: 2087962 - RNA, 19 nt, Artificial Sequence
  Description of Artificial Sequence: Synthetic oligonucleotide
  Sense strand starting at position 3539 of SEQ ID NO: 1882007
gacuguaaguuucugauaa

SEQ ID NO: 2087963 - RNA, 19 nt, Artificial Sequence
  Description of Artificial Sequence: Synthetic oligonucleotide
  Antisense strand to SEQ ID NO: 2087962
uuaucagaaacuuacaguc

SEQ ID NO: 2087964 - RNA, 19 nt, Artificial Sequence
  Description of Artificial Sequence: Synthetic oligonucleotide
  Sense strand starting at position 3540 of SEQ ID NO: 1882007
acuguaaguuucugauaaa

SEQ ID NO: 2087965 - RNA, 19 nt, Artificial Sequence
  Description of Artificial Sequence: Synthetic oligonucleotide
  Antisense strand to SEQ ID NO: 2087964
uuuaucagaaacuuacagu

SEQ ID NO: 2087966 - RNA, 19 nt, Artificial Sequence
  Description of Artificial Sequence: Synthetic oligonucleotide
  Sense strand starting at position 3698 of SEQ ID NO: 1882007
gccuuagaaucaugugguu

SEQ ID NO: 2087967 - RNA, 19 nt, Artificial Sequence
  Description of Artificial Sequence: Synthetic oligonucleotide
  Antisense strand to SEQ ID NO: 2087966
aaccacaugauucuaaggc

SEQ ID NO: 2087968 - RNA, 19 nt, Artificial Sequence
  Description of Artificial Sequence: Synthetic oligonucleotide
  Sense strand starting at position 3730 of SEQ ID NO: 1882007
uuguuuaugcggugaauua

SEQ ID NO: 2087969 - RNA, 19 nt, Artificial Sequence
  Description of Artificial Sequence: Synthetic oligonucleotide
  Antisense strand to SEQ ID NO: 2087968
uaauucaccgcauaaacaa

SEQ ID NO: 2087970 - RNA, 19 nt, Artificial Sequence
  Description of Artificial Sequence: Synthetic oligonucleotide
  Sense strand starting at position 3737 of SEQ ID NO: 1882007
ugcggugaauuacacuuau

SEQ ID NO: 2087971 - RNA, 19 nt, Artificial Sequence
  Description of Artificial Sequence: Synthetic oligonucleotide
  Antisense strand to SEQ ID NO: 2087970
auaaguguaauucaccgca

SEQ ID NO: 2087972 - RNA, 19 nt, Artificial Sequence
  Description of Artificial Sequence: Synthetic oligonucleotide
  Sense strand starting at position 3799 of SEQ ID NO: 1882007
ccaacuugaucaugacaga

SEQ ID NO: 2087973 - RNA, 19 nt, Artificial Sequence
  Description of Artificial Sequence: Synthetic oligonucleotide
  Antisense strand to SEQ ID NO: 2087972
ucugucaugaucaaguugg

SEQ ID NO: 2087974 - RNA, 19 nt, Artificial Sequence
  Description of Artificial Sequence: Synthetic oligonucleotide
  Sense strand starting at position 3890 of SEQ ID NO: 1882007
gggauauuggagggcaauu

SEQ ID NO: 2087975 - RNA, 19 nt, Artificial Sequence
  Description of Artificial Sequence: Synthetic oligonucleotide
  Antisense strand to SEQ ID NO: 2087974
aauugcccuccaauauccc

SEQ ID NO: 2087976 - RNA, 19 nt, Artificial Sequence
  Description of Artificial Sequence: Synthetic oligonucleotide
  Sense strand starting at position 184 of SEQ ID NO: 1882008
agcuccuggagucauagau

SEQ ID NO: 2087977 - RNA, 19 nt, Artificial Sequence
  Description of Artificial Sequence: Synthetic oligonucleotide
  Antisense strand to SEQ ID NO: 2087976
aucuaugacuccaggagcu

SEQ ID NO: 2087978 - RNA, 19 nt, Artificial Sequence
  Description of Artificial Sequence: Synthetic oligonucleotide
  Sense strand starting at position 259 of SEQ ID NO: 1882008
uguuucuugucuguugcua

SEQ ID NO: 2087979 - RNA, 19 nt, Artificial Sequence
  Description of Artificial Sequence: Synthetic oligonucleotide
  Antisense strand to SEQ ID NO: 2087978
uagcaacagacaagaaaca

SEQ ID NO: 2087980 - RNA, 19 nt, Artificial Sequence
  Description of Artificial Sequence: Synthetic oligonucleotide
  Sense strand starting at position 290 of SEQ ID NO: 1882008
guuugcucuugcuuuaguu

SEQ ID NO: 2087981 - RNA, 19 nt, Artificial Sequence
  Description of Artificial Sequence: Synthetic oligonucleotide
  Antisense strand to SEQ ID NO: 2087980
aacuaaagcaagagcaaac

SEQ ID NO: 2087982 - RNA, 19 nt, Artificial Sequence
  Description of Artificial Sequence: Synthetic oligonucleotide
  Sense strand starting at position 411 of SEQ ID NO: 1882008
cccagauauacugguacgu

SEQ ID NO: 2087983 - RNA, 19 nt, Artificial Sequence
  Description of Artificial Sequence: Synthetic oligonucleotide
  Antisense strand to SEQ ID NO: 2087982
acguaccaguauaucuggg

SEQ ID NO: 2087984 - RNA, 19 nt, Artificial Sequence
  Description of Artificial Sequence: Synthetic oligonucleotide
  Sense strand starting at position 525 of SEQ ID NO: 1882008
uccguguaguugugagguu

SEQ ID NO: 2087985 - RNA, 19 nt, Artificial Sequence
  Description of Artificial Sequence: Synthetic oligonucleotide
  Antisense strand to SEQ ID NO: 2087984
aaccucacaacuacacgga

SEQ ID NO: 2087986 - RNA, 19 nt, Artificial Sequence
  Description of Artificial Sequence: Synthetic oligonucleotide
  Sense strand starting at position 526 of SEQ ID NO: 1882008
ccguguaguugugagguuu

SEQ ID NO: 2087987 - RNA, 19 nt, Artificial Sequence
  Description of Artificial Sequence: Synthetic oligonucleotide
  Antisense strand to SEQ ID NO: 2087986
aaaccucacaacuacacgg

SEQ ID NO: 2087988 - RNA, 19 nt, Artificial Sequence
  Description of Artificial Sequence: Synthetic oligonucleotide
  Sense strand starting at position 798 of SEQ ID NO: 1882008
ucucauugaucgguccagu

SEQ ID NO: 2087989 - RNA, 19 nt, Artificial Sequence
  Description of Artificial Sequence: Synthetic oligonucleotide
  Antisense strand to SEQ ID NO: 2087988
acuggaccgaucaaugaga

SEQ ID NO: 2087990 - RNA, 19 nt, Artificial Sequence
  Description of Artificial Sequence: Synthetic oligonucleotide
  Sense strand starting at position 801 of SEQ ID NO: 1882008
cauugaucgguccaguauu

SEQ ID NO: 2087991 - RNA, 19 nt, Artificial Sequence
  Description of Artificial Sequence: Synthetic oligonucleotide
  Antisense strand to SEQ ID NO: 2087990
aauacuggaccgaucaaug

SEQ ID NO: 2087992 - RNA, 19 nt, Artificial Sequence
  Description of Artificial Sequence: Synthetic oligonucleotide
  Sense strand starting at position 859 of SEQ ID NO: 1882008
gagucuaagucucuuacag

SEQ ID NO: 2087993 - RNA, 19 nt, Artificial Sequence
  Description of Artificial Sequence: Synthetic oligonucleotide
  Antisense strand to SEQ ID NO: 2087992
cuguaagagacuuagacuc

SEQ ID NO: 2087994 - RNA, 19 nt, Artificial Sequence
  Description of Artificial Sequence: Synthetic oligonucleotide
  Sense strand starting at position 861 of SEQ ID NO: 1882008
gucuaagucucuuacagaa

SEQ ID NO: 2087995 - RNA, 19 nt, Artificial Sequence
  Description of Artificial Sequence: Synthetic oligonucleotide
  Antisense strand to SEQ ID NO: 2087994
uucuguaagagacuuagac

SEQ ID NO: 2087996 - RNA, 19 nt, Artificial Sequence
  Description of Artificial Sequence: Synthetic oligonucleotide
  Sense strand starting at position 889 of SEQ ID NO: 1882008
aaaggucaccagcgucaaa

SEQ ID NO: 2087997 - RNA, 19 nt, Artificial Sequence
  Description of Artificial Sequence: Synthetic oligonucleotide
  Antisense strand to SEQ ID NO: 2087996
uuugacgcuggugaccuuu

SEQ ID NO: 2087998 - RNA, 19 nt, Artificial Sequence
  Description of Artificial Sequence: Synthetic oligonucleotide
  Sense strand starting at position 1038 of SEQ ID NO: 1882008
ggagaaugaguuugaugua

SEQ ID NO: 2087999 - RNA, 19 nt, Artificial Sequence
  Description of Artificial Sequence: Synthetic oligonucleotide
  Antisense strand to SEQ ID NO: 2087998
uacaucaaacucauucucc

SEQ ID NO: 2088000 - RNA, 19 nt, Artificial Sequence
  Description of Artificial Sequence: Synthetic oligonucleotide
  Sense strand starting at position 1039 of SEQ ID NO: 1882008
gagaaugaguuugauguau

SEQ ID NO: 2088001 - RNA, 19 nt, Artificial Sequence
  Description of Artificial Sequence: Synthetic oligonucleotide
  Antisense strand to SEQ ID NO: 2088000
auacaucaaacucauucuc

SEQ ID NO: 2088002 - RNA, 19 nt, Artificial Sequence
  Description of Artificial Sequence: Synthetic oligonucleotide
  Sense strand starting at position 1076 of SEQ ID NO: 1882008
gaaaguggguaauaucaaa

SEQ ID NO: 2088003 - RNA, 19 nt, Artificial Sequence
  Description of Artificial Sequence: Synthetic oligonucleotide
  Antisense strand to SEQ ID NO: 2088002
uuugauauuacccacuuuc

SEQ ID NO: 2088004 - RNA, 19 nt, Artificial Sequence
  Description of Artificial Sequence: Synthetic oligonucleotide
  Sense strand starting at position 1089 of SEQ ID NO: 1882008
aucaaauuccuccgagcua

SEQ ID NO: 2088005 - RNA, 19 nt, Artificial Sequence
  Description of Artificial Sequence: Synthetic oligonucleotide
  Antisense strand to SEQ ID NO: 2088004
uagcucggaggaauuugau

SEQ ID NO: 2088006 - RNA, 19 nt, Artificial Sequence
  Description of Artificial Sequence: Synthetic oligonucleotide
  Sense strand starting at position 1090 of SEQ ID NO: 1882008
ucaaauuccuccgagcuaa

SEQ ID NO: 2088007 - RNA, 19 nt, Artificial Sequence
  Description of Artificial Sequence: Synthetic oligonucleotide
  Antisense strand to SEQ ID NO: 2088006
uuagcucggaggaauuuga

SEQ ID NO: 2088008 - RNA, 19 nt, Artificial Sequence
  Description of Artificial Sequence: Synthetic oligonucleotide
  Sense strand starting at position 1163 of SEQ ID NO: 1882008
acgaauugcuaaguagaau

SEQ ID NO: 2088009 - RNA, 19 nt, Artificial Sequence
  Description of Artificial Sequence: Synthetic oligonucleotide
  Antisense strand to SEQ ID NO: 2088008
auucuacuuagcaauucgu

SEQ ID NO: 2088010 - RNA, 19 nt, Artificial Sequence
  Description of Artificial Sequence: Synthetic oligonucleotide
  Sense strand starting at position 1164 of SEQ ID NO: 1882008
cgaauugcuaaguagaaua

SEQ ID NO: 2088011 - RNA, 19 nt, Artificial Sequence
  Description of Artificial Sequence: Synthetic oligonucleotide
  Antisense strand to SEQ ID NO: 2088010
uauucuacuuagcaauucg

SEQ ID NO: 2088012 - RNA, 19 nt, Artificial Sequence
  Description of Artificial Sequence: Synthetic oligonucleotide
  Sense strand starting at position 3539 of SEQ ID NO: 1882008
gacuguaaguuucugauaa

SEQ ID NO: 2088013 - RNA, 19 nt, Artificial Sequence
  Description of Artificial Sequence: Synthetic oligonucleotide
  Antisense strand to SEQ ID NO: 2088012
uuaucagaaacuuacaguc

SEQ ID NO: 2088014 - RNA, 19 nt, Artificial Sequence
  Description of Artificial Sequence: Synthetic oligonucleotide
  Sense strand starting at position 3540 of SEQ ID NO: 1882008
acuguaaguuucugauaaa

SEQ ID NO: 2088015 - RNA, 19 nt, Artificial Sequence
  Description of Artificial Sequence: Synthetic oligonucleotide
  Antisense strand to SEQ ID NO: 2088014
uuuaucagaaacuuacagu

SEQ ID NO: 2088016 - RNA, 19 nt, Artificial Sequence
  Description of Artificial Sequence: Synthetic oligonucleotide
  Sense strand starting at position 3698 of SEQ ID NO: 1882008
gccuuagaaucaugugguu

SEQ ID NO: 2088017 - RNA, 19 nt, Artificial Sequence
  Description of Artificial Sequence: Synthetic oligonucleotide
  Antisense strand to SEQ ID NO: 2088016
aaccacaugauucuaaggc

SEQ ID NO: 2088018 - RNA, 19 nt, Artificial Sequence
  Description of Artificial Sequence: Synthetic oligonucleotide
  Sense strand starting at position 3730 of SEQ ID NO: 1882008
uuguuuaugcggugaauua

SEQ ID NO: 2088019 - RNA, 19 nt, Artificial Sequence
  Description of Artificial Sequence: Synthetic oligonucleotide
  Antisense strand to SEQ ID NO: 2088018
uaauucaccgcauaaacaa

SEQ ID NO: 2088020 - RNA, 19 nt, Artificial Sequence
  Description of Artificial Sequence: Synthetic oligonucleotide
  Sense strand starting at position 3737 of SEQ ID NO: 1882008
ugcggugaauuacacuuau

SEQ ID NO: 2088021 - RNA, 19 nt, Artificial Sequence
  Description of Artificial Sequence: Synthetic oligonucleotide
  Antisense strand to SEQ ID NO: 2088020
auaaguguaauucaccgca

SEQ ID NO: 2088022 - RNA, 19 nt, Artificial Sequence
  Description of Artificial Sequence: Synthetic oligonucleotide
  Sense strand starting at position 3799 of SEQ ID NO: 1882008
ccaacuugaucaugacaga

SEQ ID NO: 2088023 - RNA, 19 nt, Artificial Sequence
  Description of Artificial Sequence: Synthetic oligonucleotide
  Antisense strand to SEQ ID NO: 2088022
ucugucaugaucaaguugg

SEQ ID NO: 2088024 - RNA, 19 nt, Artificial Sequence
  Description of Artificial Sequence: Synthetic oligonucleotide
  Sense strand starting at position 3890 of SEQ ID NO: 1882008
gggauauuggagggcaauu

SEQ ID NO: 2088025 - RNA, 19 nt, Artificial Sequence
  Description of Artificial Sequence: Synthetic oligonucleotide
  Antisense strand to SEQ ID NO: 2088024
aauugcccuccaauauccc

SEQ ID NO: 2088026 - RNA, 19 nt, Artificial Sequence
  Description of Artificial Sequence: Synthetic oligonucleotide
  Sense strand starting at position 184 of SEQ ID NO: 1882009
agcuccuggagucauagau

SEQ ID NO: 2088027 - RNA, 19 nt, Artificial Sequence
  Description of Artificial Sequence: Synthetic oligonucleotide
  Antisense strand to SEQ ID NO: 2088026
aucuaugacuccaggagcu

SEQ ID NO: 2088028 - RNA, 19 nt, Artificial Sequence
  Description of Artificial Sequence: Synthetic oligonucleotide
  Sense strand starting at position 259 of SEQ ID NO: 1882009
uguuucuugucuguugcua

SEQ ID NO: 2088029 - RNA, 19 nt, Artificial Sequence
  Description of Artificial Sequence: Synthetic oligonucleotide
  Antisense strand to SEQ ID NO: 2088028
uagcaacagacaagaaaca

SEQ ID NO: 2088030 - RNA, 19 nt, Artificial Sequence
  Description of Artificial Sequence: Synthetic oligonucleotide
  Sense strand starting at position 290 of SEQ ID NO: 1882009
guuugcucuugcuuuaguu

SEQ ID NO: 2088031 - RNA, 19 nt, Artificial Sequence
  Description of Artificial Sequence: Synthetic oligonucleotide
  Antisense strand to SEQ ID NO: 2088030
aacuaaagcaagagcaaac

SEQ ID NO: 2088032 - RNA, 19 nt, Artificial Sequence
  Description of Artificial Sequence: Synthetic oligonucleotide
  Sense strand starting at position 411 of SEQ ID NO: 1882009
cccagauauacugguacgu

SEQ ID NO: 2088033 - RNA, 19 nt, Artificial Sequence
  Description of Artificial Sequence: Synthetic oligonucleotide
  Antisense strand to SEQ ID NO: 2088032
acguaccaguauaucuggg

SEQ ID NO: 2088034 - RNA, 19 nt, Artificial Sequence
  Description of Artificial Sequence: Synthetic oligonucleotide
  Sense strand starting at position 525 of SEQ ID NO: 1882009
uccguguaguugugagguu

SEQ ID NO: 2088035 - RNA, 19 nt, Artificial Sequence
  Description of Artificial Sequence: Synthetic oligonucleotide
  Antisense strand to SEQ ID NO: 2088034
aaccucacaacuacacgga

SEQ ID NO: 2088036 - RNA, 19 nt, Artificial Sequence
  Description of Artificial Sequence: Synthetic oligonucleotide
  Sense strand starting at position 526 of SEQ ID NO: 1882009
ccguguaguugugagguuu

SEQ ID NO: 2088037 - RNA, 19 nt, Artificial Sequence
  Description of Artificial Sequence: Synthetic oligonucleotide
  Antisense strand to SEQ ID NO: 2088036
aaaccucacaacuacacgg

SEQ ID NO: 2088038 - RNA, 19 nt, Artificial Sequence
  Description of Artificial Sequence: Synthetic oligonucleotide
  Sense strand starting at position 798 of SEQ ID NO: 1882009
ucucauugaucgguccagu

SEQ ID NO: 2088039 - RNA, 19 nt, Artificial Sequence
  Description of Artificial Sequence: Synthetic oligonucleotide
  Antisense strand to SEQ ID NO: 2088038
acuggaccgaucaaugaga

SEQ ID NO: 2088040 - RNA, 19 nt, Artificial Sequence
  Description of Artificial Sequence: Synthetic oligonucleotide
  Sense strand starting at position 801 of SEQ ID NO: 1882009
cauugaucgguccaguauu

SEQ ID NO: 2088041 - RNA, 19 nt, Artificial Sequence
  Description of Artificial Sequence: Synthetic oligonucleotide
  Antisense strand to SEQ ID NO: 2088040
aauacuggaccgaucaaug

SEQ ID NO: 2088042 - RNA, 19 nt, Artificial Sequence
  Description of Artificial Sequence: Synthetic oligonucleotide
  Sense strand starting at position 859 of SEQ ID NO: 1882009
gagucuaagucucuuacag

SEQ ID NO: 2088043 - RNA, 19 nt, Artificial Sequence
  Description of Artificial Sequence: Synthetic oligonucleotide
  Antisense strand to SEQ ID NO: 2088042
cuguaagagacuuagacuc

SEQ ID NO: 2088044 - RNA, 19 nt, Artificial Sequence
  Description of Artificial Sequence: Synthetic oligonucleotide
  Sense strand starting at position 861 of SEQ ID NO: 1882009
gucuaagucucuuacagaa

SEQ ID NO: 2088045 - RNA, 19 nt, Artificial Sequence
  Description of Artificial Sequence: Synthetic oligonucleotide
  Antisense strand to SEQ ID NO: 2088044
uucuguaagagacuuagac

SEQ ID NO: 2088046 - RNA, 19 nt, Artificial Sequence
  Description of Artificial Sequence: Synthetic oligonucleotide
  Sense strand starting at position 889 of SEQ ID NO: 1882009
aaaggucaccagcgucaaa

SEQ ID NO: 2088047 - RNA, 19 nt, Artificial Sequence
  Description of Artificial Sequence: Synthetic oligonucleotide
  Antisense strand to SEQ ID NO: 2088046
uuugacgcuggugaccuuu

SEQ ID NO: 2088048 - RNA, 19 nt, Artificial Sequence
  Description of Artificial Sequence: Synthetic oligonucleotide
  Sense strand starting at position 1038 of SEQ ID NO: 1882009
ggagaaugaguuugaugua

SEQ ID NO: 2088049 - RNA, 19 nt, Artificial Sequence
  Description of Artificial Sequence: Synthetic oligonucleotide
  Antisense strand to SEQ ID NO: 2088048
uacaucaaacucauucucc

SEQ ID NO: 2088050 - RNA, 19 nt, Artificial Sequence
  Description of Artificial Sequence: Synthetic oligonucleotide
  Sense strand starting at position 1039 of SEQ ID NO: 1882009
gagaaugaguuugauguau

SEQ ID NO: 2088051 - RNA, 19 nt, Artificial Sequence
  Description of Artificial Sequence: Synthetic oligonucleotide
  Antisense strand to SEQ ID NO: 2088050
auacaucaaacucauucuc

SEQ ID NO: 2088052 - RNA, 19 nt, Artificial Sequence
  Description of Artificial Sequence: Synthetic oligonucleotide
  Sense strand starting at position 1076 of SEQ ID NO: 1882009
gaaaguggguaauaucaaa

SEQ ID NO: 2088053 - RNA, 19 nt, Artificial Sequence
  Description of Artificial Sequence: Synthetic oligonucleotide
  Antisense strand to SEQ ID NO: 2088052
uuugauauuacccacuuuc

SEQ ID NO: 2088054 - RNA, 19 nt, Artificial Sequence
  Description of Artificial Sequence: Synthetic oligonucleotide
  Sense strand starting at position 1089 of SEQ ID NO: 1882009
aucaaauuccuccgagcua

SEQ ID NO: 2088055 - RNA, 19 nt, Artificial Sequence
  Description of Artificial Sequence: Synthetic oligonucleotide
  Antisense strand to SEQ ID NO: 2088054
uagcucggaggaauuugau

SEQ ID NO: 2088056 - RNA, 19 nt, Artificial Sequence
  Description of Artificial Sequence: Synthetic oligonucleotide
  Sense strand starting at position 1090 of SEQ ID NO: 1882009
ucaaauuccuccgagcuaa

SEQ ID NO: 2088057 - RNA, 19 nt, Artificial Sequence
  Description of Artificial Sequence: Synthetic oligonucleotide
  Antisense strand to SEQ ID NO: 2088056
uuagcucggaggaauuuga

SEQ ID NO: 2088058 - RNA, 19 nt, Artificial Sequence
  Description of Artificial Sequence: Synthetic oligonucleotide
  Sense strand starting at position 1163 of SEQ ID NO: 1882009
acgaauugcuaaguagaau

SEQ ID NO: 2088059 - RNA, 19 nt, Artificial Sequence
  Description of Artificial Sequence: Synthetic oligonucleotide
  Antisense strand to SEQ ID NO: 2088058
auucuacuuagcaauucgu

SEQ ID NO: 2088060 - RNA, 19 nt, Artificial Sequence
  Description of Artificial Sequence: Synthetic oligonucleotide
  Sense strand starting at position 1164 of SEQ ID NO: 1882009
cgaauugcuaaguagaaua

SEQ ID NO: 2088061 - RNA, 19 nt, Artificial Sequence
  Description of Artificial Sequence: Synthetic oligonucleotide
  Antisense strand to SEQ ID NO: 2088060
uauucuacuuagcaauucg

SEQ ID NO: 2088062 - RNA, 19 nt, Artificial Sequence
  Description of Artificial Sequence: Synthetic oligonucleotide
  Sense strand starting at position 3539 of SEQ ID NO: 1882009
gacuguaaguuucugauaa

SEQ ID NO: 2088063 - RNA, 19 nt, Artificial Sequence
  Description of Artificial Sequence: Synthetic oligonucleotide
  Antisense strand to SEQ ID NO: 2088062
uuaucagaaacuuacaguc

SEQ ID NO: 2088064 - RNA, 19 nt, Artificial Sequence
  Description of Artificial Sequence: Synthetic oligonucleotide
  Sense strand starting at position 3540 of SEQ ID NO: 1882009
acuguaaguuucugauaaa

SEQ ID NO: 2088065 - RNA, 19 nt, Artificial Sequence
  Description of Artificial Sequence: Synthetic oligonucleotide
  Antisense strand to SEQ ID NO: 2088064
uuuaucagaaacuuacagu

SEQ ID NO: 2088066 - RNA, 19 nt, Artificial Sequence
  Description of Artificial Sequence: Synthetic oligonucleotide
  Sense strand starting at position 3698 of SEQ ID NO: 1882009
gccuuagaaucaugugguu

SEQ ID NO: 2088067 - RNA, 19 nt, Artificial Sequence
  Description of Artificial Sequence: Synthetic oligonucleotide
  Antisense strand to SEQ ID NO: 2088066
aaccacaugauucuaaggc

SEQ ID NO: 2088068 - RNA, 19 nt, Artificial Sequence
  Description of Artificial Sequence: Synthetic oligonucleotide
  Sense strand starting at position 3730 of SEQ ID NO: 1882009
uuguuuaugcggugaauua

SEQ ID NO: 2088069 - RNA, 19 nt, Artificial Sequence
  Description of Artificial Sequence: Synthetic oligonucleotide
  Antisense strand to SEQ ID NO: 2088068
uaauucaccgcauaaacaa

SEQ ID NO: 2088070 - RNA, 19 nt, Artificial Sequence
  Description of Artificial Sequence: Synthetic oligonucleotide
  Sense strand starting at position 3737 of SEQ ID NO: 1882009
ugcggugaauuacacuuau

SEQ ID NO: 2088071 - RNA, 19 nt, Artificial Sequence
  Description of Artificial Sequence: Synthetic oligonucleotide
  Antisense strand to SEQ ID NO: 2088070
auaaguguaauucaccgca

SEQ ID NO: 2088072 - RNA, 19 nt, Artificial Sequence
  Description of Artificial Sequence: Synthetic oligonucleotide
  Sense strand starting at position 3799 of SEQ ID NO: 1882009
ccaacuugaucaugacaga

SEQ ID NO: 2088073 - RNA, 19 nt, Artificial Sequence
  Description of Artificial Sequence: Synthetic oligonucleotide
  Antisense strand to SEQ ID NO: 2088072
ucugucaugaucaaguugg

SEQ ID NO: 2088074 - RNA, 19 nt, Artificial Sequence
  Description of Artificial Sequence: Synthetic oligonucleotide
  Sense strand starting at position 3890 of SEQ ID NO: 1882009
gggauauuggagggcaauu

SEQ ID NO: 2088075 - RNA, 19 nt, Artificial Sequence
  Description of Artificial Sequence: Synthetic oligonucleotide
  Antisense strand to SEQ ID NO: 2088074
aauugcccuccaauauccc

SEQ ID NO: 2088076 - RNA, 19 nt, Artificial Sequence
  Description of Artificial Sequence: Synthetic oligonucleotide
  Sense strand starting at position 230 of SEQ ID NO: 1882010
ucucaaaguguuggaggua

SEQ ID NO: 2088077 - RNA, 19 nt, Artificial Sequence
  Description of Artificial Sequence: Synthetic oligonucleotide
  Antisense strand to SEQ ID NO: 2088076
uaccuccaacacuuugaga

SEQ ID NO: 2088078 - RNA, 19 nt, Artificial Sequence
  Description of Artificial Sequence: Synthetic oligonucleotide
  Sense strand starting at position 294 of SEQ ID NO: 1882010
uguacaaccuuggaaagau

SEQ ID NO: 2088079 - RNA, 19 nt, Artificial Sequence
  Description of Artificial Sequence: Synthetic oligonucleotide
  Antisense strand to SEQ ID NO: 2088078
aucuuuccaagguuguaca

SEQ ID NO: 2088080 - RNA, 19 nt, Artificial Sequence
  Description of Artificial Sequence: Synthetic oligonucleotide
  Sense strand starting at position 303 of SEQ ID NO: 1882010
uuggaaagauuauaagacu

SEQ ID NO: 2088081 - RNA, 19 nt, Artificial Sequence
  Description of Artificial Sequence: Synthetic oligonucleotide
  Antisense strand to SEQ ID NO: 2088080
agucuuauaaucuuuccaa

SEQ ID NO: 2088082 - RNA, 19 nt, Artificial Sequence
  Description of Artificial Sequence: Synthetic oligonucleotide
  Sense strand starting at position 344 of SEQ ID NO: 1882010
ggaauagcaucccauacuu

SEQ ID NO: 2088083 - RNA, 19 nt, Artificial Sequence
  Description of Artificial Sequence: Synthetic oligonucleotide
  Antisense strand to SEQ ID NO: 2088082
aaguaugggaugcuauucc

SEQ ID NO: 2088084 - RNA, 19 nt, Artificial Sequence
  Description of Artificial Sequence: Synthetic oligonucleotide
  Sense strand starting at position 736 of SEQ ID NO: 1882010
ggaggcacuuaauaauuau

SEQ ID NO: 2088085 - RNA, 19 nt, Artificial Sequence
  Description of Artificial Sequence: Synthetic oligonucleotide
  Antisense strand to SEQ ID NO: 2088084
auaauuauuaagugccucc

SEQ ID NO: 2088086 - RNA, 19 nt, Artificial Sequence
  Description of Artificial Sequence: Synthetic oligonucleotide
  Sense strand starting at position 757 of SEQ ID NO: 1882010
uucucaucucuccagagua

SEQ ID NO: 2088087 - RNA, 19 nt, Artificial Sequence
  Description of Artificial Sequence: Synthetic oligonucleotide
  Antisense strand to SEQ ID NO: 2088086
uacucuggagagaugagaa

SEQ ID NO: 2088088 - RNA, 19 nt, Artificial Sequence
  Description of Artificial Sequence: Synthetic oligonucleotide
  Sense strand starting at position 1416 of SEQ ID NO: 1882010
gcaccagucuccucacuga

SEQ ID NO: 2088089 - RNA, 19 nt, Artificial Sequence
  Description of Artificial Sequence: Synthetic oligonucleotide
  Antisense strand to SEQ ID NO: 2088088
ucagugaggagacuggugc

SEQ ID NO: 2088090 - RNA, 19 nt, Artificial Sequence
  Description of Artificial Sequence: Synthetic oligonucleotide
  Sense strand starting at position 1603 of SEQ ID NO: 1882010
gucagugauggcugugaca

SEQ ID NO: 2088091 - RNA, 19 nt, Artificial Sequence
  Description of Artificial Sequence: Synthetic oligonucleotide
  Antisense strand to SEQ ID NO: 2088090
ugucacagccaucacugac

SEQ ID NO: 2088092 - RNA, 19 nt, Artificial Sequence
  Description of Artificial Sequence: Synthetic oligonucleotide
  Sense strand starting at position 1629 of SEQ ID NO: 1882010
ggaguccuauugucuagaa

SEQ ID NO: 2088093 - RNA, 19 nt, Artificial Sequence
  Description of Artificial Sequence: Synthetic oligonucleotide
  Antisense strand to SEQ ID NO: 2088092
uucuagacaauaggacucc

SEQ ID NO: 2088094 - RNA, 19 nt, Artificial Sequence
  Description of Artificial Sequence: Synthetic oligonucleotide
  Sense strand starting at position 1630 of SEQ ID NO: 1882010
gaguccuauugucuagaaa

SEQ ID NO: 2088095 - RNA, 19 nt, Artificial Sequence
  Description of Artificial Sequence: Synthetic oligonucleotide
  Antisense strand to SEQ ID NO: 2088094
uuucuagacaauaggacuc

SEQ ID NO: 2088096 - RNA, 19 nt, Artificial Sequence
  Description of Artificial Sequence: Synthetic oligonucleotide
  Sense strand starting at position 1832 of SEQ ID NO: 1882010
acccuaguguuucuggcua

SEQ ID NO: 2088097 - RNA, 19 nt, Artificial Sequence
  Description of Artificial Sequence: Synthetic oligonucleotide
  Antisense strand to SEQ ID NO: 2088096
uagccagaaacacuagggu

SEQ ID NO: 2088098 - RNA, 19 nt, Artificial Sequence
  Description of Artificial Sequence: Synthetic oligonucleotide
  Sense strand starting at position 1836 of SEQ ID NO: 1882010
uaguguuucuggcuauguu

SEQ ID NO: 2088099 - RNA, 19 nt, Artificial Sequence
  Description of Artificial Sequence: Synthetic oligonucleotide
  Antisense strand to SEQ ID NO: 2088098
aacauagccagaaacacua

SEQ ID NO: 2088100 - RNA, 19 nt, Artificial Sequence
  Description of Artificial Sequence: Synthetic oligonucleotide
  Sense strand starting at position 1837 of SEQ ID NO: 1882010
aguguuucuggcuauguuu

SEQ ID NO: 2088101 - RNA, 19 nt, Artificial Sequence
  Description of Artificial Sequence: Synthetic oligonucleotide
  Antisense strand to SEQ ID NO: 2088100
aaacauagccagaaacacu

SEQ ID NO: 2088102 - RNA, 19 nt, Artificial Sequence
  Description of Artificial Sequence: Synthetic oligonucleotide
  Sense strand starting at position 1848 of SEQ ID NO: 1882010
cuauguuucugacacuuga

SEQ ID NO: 2088103 - RNA, 19 nt, Artificial Sequence
  Description of Artificial Sequence: Synthetic oligonucleotide
  Antisense strand to SEQ ID NO: 2088102
ucaagugucagaaacauag

SEQ ID NO: 2088104 - RNA, 19 nt, Artificial Sequence
  Description of Artificial Sequence: Synthetic oligonucleotide
  Sense strand starting at position 1852 of SEQ ID NO: 1882010
guuucugacacuugaggau

SEQ ID NO: 2088105 - RNA, 19 nt, Artificial Sequence
  Description of Artificial Sequence: Synthetic oligonucleotide
  Antisense strand to SEQ ID NO: 2088104
auccucaagugucagaaac

SEQ ID NO: 2088106 - RNA, 19 nt, Artificial Sequence
  Description of Artificial Sequence: Synthetic oligonucleotide
  Sense strand starting at position 1864 of SEQ ID NO: 1882010
ugaggauucuaagcuguga

SEQ ID NO: 2088107 - RNA, 19 nt, Artificial Sequence
  Description of Artificial Sequence: Synthetic oligonucleotide
  Antisense strand to SEQ ID NO: 2088106
ucacagcuuagaauccuca

SEQ ID NO: 2088108 - RNA, 19 nt, Artificial Sequence
  Description of Artificial Sequence: Synthetic oligonucleotide
  Sense strand starting at position 1866 of SEQ ID NO: 1882010
aggauucuaagcugugaga

SEQ ID NO: 2088109 - RNA, 19 nt, Artificial Sequence
  Description of Artificial Sequence: Synthetic oligonucleotide
  Antisense strand to SEQ ID NO: 2088108
ucucacagcuuagaauccu

SEQ ID NO: 2088110 - RNA, 19 nt, Artificial Sequence
  Description of Artificial Sequence: Synthetic oligonucleotide
  Sense strand starting at position 1868 of SEQ ID NO: 1882010
gauucuaagcugugagagu

SEQ ID NO: 2088111 - RNA, 19 nt, Artificial Sequence
  Description of Artificial Sequence: Synthetic oligonucleotide
  Antisense strand to SEQ ID NO: 2088110
acucucacagcuuagaauc

SEQ ID NO: 2088112 - RNA, 19 nt, Artificial Sequence
  Description of Artificial Sequence: Synthetic oligonucleotide
  Sense strand starting at position 2173 of SEQ ID NO: 1882010
cuggguaggucucaucaag

SEQ ID NO: 2088113 - RNA, 19 nt, Artificial Sequence
  Description of Artificial Sequence: Synthetic oligonucleotide
  Antisense strand to SEQ ID NO: 2088112
cuugaugagaccuacccag

SEQ ID NO: 2088114 - RNA, 19 nt, Artificial Sequence
  Description of Artificial Sequence: Synthetic oligonucleotide
  Sense strand starting at position 2281 of SEQ ID NO: 1882010
gcuggaagugucugggaaa

SEQ ID NO: 2088115 - RNA, 19 nt, Artificial Sequence
  Description of Artificial Sequence: Synthetic oligonucleotide
  Antisense strand to SEQ ID NO: 2088114
uuucccagacacuuccagc

SEQ ID NO: 2088116 - RNA, 19 nt, Artificial Sequence
  Description of Artificial Sequence: Synthetic oligonucleotide
  Sense strand starting at position 2284 of SEQ ID NO: 1882010
ggaagugucugggaaacag

SEQ ID NO: 2088117 - RNA, 19 nt, Artificial Sequence
  Description of Artificial Sequence: Synthetic oligonucleotide
  Antisense strand to SEQ ID NO: 2088116
cuguuucccagacacuucc

SEQ ID NO: 2088118 - RNA, 19 nt, Artificial Sequence
  Description of Artificial Sequence: Synthetic oligonucleotide
  Sense strand starting at position 2431 of SEQ ID NO: 1882010
gagugacauuaccugacau

SEQ ID NO: 2088119 - RNA, 19 nt, Artificial Sequence
  Description of Artificial Sequence: Synthetic oligonucleotide
  Antisense strand to SEQ ID NO: 2088118
augucagguaaugucacuc

SEQ ID NO: 2088120 - RNA, 19 nt, Artificial Sequence
  Description of Artificial Sequence: Synthetic oligonucleotide
  Sense strand starting at position 2955 of SEQ ID NO: 1882010
gugggugaccuuggauuca

SEQ ID NO: 2088121 - RNA, 19 nt, Artificial Sequence
  Description of Artificial Sequence: Synthetic oligonucleotide
  Antisense strand to SEQ ID NO: 2088120
ugaauccaaggucacccac

SEQ ID NO: 2088122 - RNA, 19 nt, Artificial Sequence
  Description of Artificial Sequence: Synthetic oligonucleotide
  Sense strand starting at position 3003 of SEQ ID NO: 1882010
uggagauaacgaggguagu

SEQ ID NO: 2088123 - RNA, 19 nt, Artificial Sequence
  Description of Artificial Sequence: Synthetic oligonucleotide
  Antisense strand to SEQ ID NO: 2088122
acuacccucguuaucucca

SEQ ID NO: 2088124 - RNA, 19 nt, Artificial Sequence
  Description of Artificial Sequence: Synthetic oligonucleotide
  Sense strand starting at position 3014 of SEQ ID NO: 1882010
aggguagugaccgauucua

SEQ ID NO: 2088125 - RNA, 19 nt, Artificial Sequence
  Description of Artificial Sequence: Synthetic oligonucleotide
  Antisense strand to SEQ ID NO: 2088124
uagaaucggucacuacccu

SEQ ID NO: 2088126 - RNA, 19 nt, Artificial Sequence
  Description of Artificial Sequence: Synthetic oligonucleotide
  Sense strand starting at position 3073 of SEQ ID NO: 1882010
ccgucaagugcuuggcaua

SEQ ID NO: 2088127 - RNA, 19 nt, Artificial Sequence
  Description of Artificial Sequence: Synthetic oligonucleotide
  Antisense strand to SEQ ID NO: 2088126
uaugccaagcacuugacgg

SEQ ID NO: 2088128 - RNA, 19 nt, Artificial Sequence
  Description of Artificial Sequence: Synthetic oligonucleotide
  Sense strand starting at position 3074 of SEQ ID NO: 1882010
cgucaagugcuuggcauau

SEQ ID NO: 2088129 - RNA, 19 nt, Artificial Sequence
  Description of Artificial Sequence: Synthetic oligonucleotide
  Antisense strand to SEQ ID NO: 2088128
auaugccaagcacuugacg

SEQ ID NO: 2088130 - RNA, 19 nt, Artificial Sequence
  Description of Artificial Sequence: Synthetic oligonucleotide
  Sense strand starting at position 3078 of SEQ ID NO: 1882010
aagugcuuggcauaugaac

SEQ ID NO: 2088131 - RNA, 19 nt, Artificial Sequence
  Description of Artificial Sequence: Synthetic oligonucleotide
  Antisense strand to SEQ ID NO: 2088130
guucauaugccaagcacuu

SEQ ID NO: 2088132 - RNA, 19 nt, Artificial Sequence
  Description of Artificial Sequence: Synthetic oligonucleotide
  Sense strand starting at position 3102 of SEQ ID NO: 1882010
gcuguuaguaucucugugu

SEQ ID NO: 2088133 - RNA, 19 nt, Artificial Sequence
  Description of Artificial Sequence: Synthetic oligonucleotide
  Antisense strand to SEQ ID NO: 2088132
acacagagauacuaacagc

SEQ ID NO: 2088134 - RNA, 19 nt, Artificial Sequence
  Description of Artificial Sequence: Synthetic oligonucleotide
  Sense strand starting at position 3105 of SEQ ID NO: 1882010
guuaguaucucuguguuag

SEQ ID NO: 2088135 - RNA, 19 nt, Artificial Sequence
  Description of Artificial Sequence: Synthetic oligonucleotide
  Antisense strand to SEQ ID NO: 2088134
cuaacacagagauacuaac

SEQ ID NO: 2088136 - RNA, 19 nt, Artificial Sequence
  Description of Artificial Sequence: Synthetic oligonucleotide
  Sense strand starting at position 3106 of SEQ ID NO: 1882010
uuaguaucucuguguuagg

SEQ ID NO: 2088137 - RNA, 19 nt, Artificial Sequence
  Description of Artificial Sequence: Synthetic oligonucleotide
  Antisense strand to SEQ ID NO: 2088136
ccuaacacagagauacuaa

SEQ ID NO: 2088138 - RNA, 19 nt, Artificial Sequence
  Description of Artificial Sequence: Synthetic oligonucleotide
  Sense strand starting at position 3115 of SEQ ID NO: 1882010
cuguguuaggccuaucgac

SEQ ID NO: 2088139 - RNA, 19 nt, Artificial Sequence
  Description of Artificial Sequence: Synthetic oligonucleotide
  Antisense strand to SEQ ID NO: 2088138
gucgauaggccuaacacag

SEQ ID NO: 2088140 - RNA, 19 nt, Artificial Sequence
  Description of Artificial Sequence: Synthetic oligonucleotide
  Sense strand starting at position 3189 of SEQ ID NO: 1882010
cccuaaaugucagagcaca

SEQ ID NO: 2088141 - RNA, 19 nt, Artificial Sequence
  Description of Artificial Sequence: Synthetic oligonucleotide
  Antisense strand to SEQ ID NO: 2088140
ugugcucugacauuuaggg

SEQ ID NO: 2088142 - RNA, 19 nt, Artificial Sequence
  Description of Artificial Sequence: Synthetic oligonucleotide
  Sense strand starting at position 3262 of SEQ ID NO: 1882010
gaaugugcugcuuagacau

SEQ ID NO: 2088143 - RNA, 19 nt, Artificial Sequence
  Description of Artificial Sequence: Synthetic oligonucleotide
  Antisense strand to SEQ ID NO: 2088142
augucuaagcagcacauuc

SEQ ID NO: 2088144 - RNA, 19 nt, Artificial Sequence
  Description of Artificial Sequence: Synthetic oligonucleotide
  Sense strand starting at position 3313 of SEQ ID NO: 1882010
ccaggacugguccaguaga

SEQ ID NO: 2088145 - RNA, 19 nt, Artificial Sequence
  Description of Artificial Sequence: Synthetic oligonucleotide
  Antisense strand to SEQ ID NO: 2088144
ucuacuggaccaguccugg

SEQ ID NO: 2088146 - RNA, 19 nt, Artificial Sequence
  Description of Artificial Sequence: Synthetic oligonucleotide
  Sense strand starting at position 3613 of SEQ ID NO: 1882010
gaccuuucccgagggaaga

SEQ ID NO: 2088147 - RNA, 19 nt, Artificial Sequence
  Description of Artificial Sequence: Synthetic oligonucleotide
  Antisense strand to SEQ ID NO: 2088146
ucuucccucgggaaagguc

SEQ ID NO: 2088148 - RNA, 19 nt, Artificial Sequence
  Description of Artificial Sequence: Synthetic oligonucleotide
  Sense strand starting at position 3681 of SEQ ID NO: 1882010
gcaggcauggucuggauga

SEQ ID NO: 2088149 - RNA, 19 nt, Artificial Sequence
  Description of Artificial Sequence: Synthetic oligonucleotide
  Antisense strand to SEQ ID NO: 2088148
ucauccagaccaugccugc

SEQ ID NO: 2088150 - RNA, 19 nt, Artificial Sequence
  Description of Artificial Sequence: Synthetic oligonucleotide
  Sense strand starting at position 3683 of SEQ ID NO: 1882010
aggcauggucuggaugagu

SEQ ID NO: 2088151 - RNA, 19 nt, Artificial Sequence
  Description of Artificial Sequence: Synthetic oligonucleotide
  Antisense strand to SEQ ID NO: 2088150
acucauccagaccaugccu

SEQ ID NO: 2088152 - RNA, 19 nt, Artificial Sequence
  Description of Artificial Sequence: Synthetic oligonucleotide
  Sense strand starting at position 3712 of SEQ ID NO: 1882010
ccgccuuugcaguccugaa

SEQ ID NO: 2088153 - RNA, 19 nt, Artificial Sequence
  Description of Artificial Sequence: Synthetic oligonucleotide
  Antisense strand to SEQ ID NO: 2088152
uucaggacugcaaaggcgg

SEQ ID NO: 2088154 - RNA, 19 nt, Artificial Sequence
  Description of Artificial Sequence: Synthetic oligonucleotide
  Sense strand starting at position 3713 of SEQ ID NO: 1882010
cgccuuugcaguccugaau

SEQ ID NO: 2088155 - RNA, 19 nt, Artificial Sequence
  Description of Artificial Sequence: Synthetic oligonucleotide
  Antisense strand to SEQ ID NO: 2088154
auucaggacugcaaaggcg

SEQ ID NO: 2088156 - RNA, 19 nt, Artificial Sequence
  Description of Artificial Sequence: Synthetic oligonucleotide
  Sense strand starting at position 15 of SEQ ID NO: 1882011
uuccuacugugggugagau

SEQ ID NO: 2088157 - RNA, 19 nt, Artificial Sequence
  Description of Artificial Sequence: Synthetic oligonucleotide
  Antisense strand to SEQ ID NO: 2088156
aucucacccacaguaggaa

SEQ ID NO: 2088158 - RNA, 19 nt, Artificial Sequence
  Description of Artificial Sequence: Synthetic oligonucleotide
  Sense strand starting at position 528 of SEQ ID NO: 1882011
aaaggaaagucuuugccau

SEQ ID NO: 2088159 - RNA, 19 nt, Artificial Sequence
  Description of Artificial Sequence: Synthetic oligonucleotide
  Antisense strand to SEQ ID NO: 2088158
auggcaaagacuuuccuuu

SEQ ID NO: 2088160 - RNA, 19 nt, Artificial Sequence
  Description of Artificial Sequence: Synthetic oligonucleotide
  Sense strand starting at position 529 of SEQ ID NO: 1882011
aaggaaagucuuugccaug

SEQ ID NO: 2088161 - RNA, 19 nt, Artificial Sequence
  Description of Artificial Sequence: Synthetic oligonucleotide
  Antisense strand to SEQ ID NO: 2088160
cauggcaaagacuuuccuu

SEQ ID NO: 2088162 - RNA, 19 nt, Artificial Sequence
  Description of Artificial Sequence: Synthetic oligonucleotide
  Sense strand starting at position 535 of SEQ ID NO: 1882011
agucuuugccaugaaggga

SEQ ID NO: 2088163 - RNA, 19 nt, Artificial Sequence
  Description of Artificial Sequence: Synthetic oligonucleotide
  Antisense strand to SEQ ID NO: 2088162
ucccuucauggcaaagacu

SEQ ID NO: 2088164 - RNA, 19 nt, Artificial Sequence
  Description of Artificial Sequence: Synthetic oligonucleotide
  Sense strand starting at position 655 of SEQ ID NO: 1882011
uugggucuccugcauaaug

SEQ ID NO: 2088165 - RNA, 19 nt, Artificial Sequence
  Description of Artificial Sequence: Synthetic oligonucleotide
  Antisense strand to SEQ ID NO: 2088164
cauuaugcaggagacccaa

SEQ ID NO: 2088166 - RNA, 19 nt, Artificial Sequence
  Description of Artificial Sequence: Synthetic oligonucleotide
  Sense strand starting at position 666 of SEQ ID NO: 1882011
gcauaaugagcccauguca

SEQ ID NO: 2088167 - RNA, 19 nt, Artificial Sequence
  Description of Artificial Sequence: Synthetic oligonucleotide
  Antisense strand to SEQ ID NO: 2088166
ugacaugggcucauuaugc

SEQ ID NO: 2088168 - RNA, 19 nt, Artificial Sequence
  Description of Artificial Sequence: Synthetic oligonucleotide
  Sense strand starting at position 693 of SEQ ID NO: 1882011
ggguucugggcagaugaau

SEQ ID NO: 2088169 - RNA, 19 nt, Artificial Sequence
  Description of Artificial Sequence: Synthetic oligonucleotide
  Antisense strand to SEQ ID NO: 2088168
auucaucugcccagaaccc

SEQ ID NO: 2088170 - RNA, 19 nt, Artificial Sequence
  Description of Artificial Sequence: Synthetic oligonucleotide
  Sense strand starting at position 756 of SEQ ID NO: 1882011
ugaaguuggucuccagaca

SEQ ID NO: 2088171 - RNA, 19 nt, Artificial Sequence
  Description of Artificial Sequence: Synthetic oligonucleotide
  Antisense strand to SEQ ID NO: 2088170
ugucuggagaccaacuuca

SEQ ID NO: 2088172 - RNA, 19 nt, Artificial Sequence
  Description of Artificial Sequence: Synthetic oligonucleotide
  Sense strand starting at position 774 of SEQ ID NO: 1882011
agagaucauuaggaagaga

SEQ ID NO: 2088173 - RNA, 19 nt, Artificial Sequence
  Description of Artificial Sequence: Synthetic oligonucleotide
  Antisense strand to SEQ ID NO: 2088172
ucucuuccuaaugaucucu

SEQ ID NO: 2088174 - RNA, 19 nt, Artificial Sequence
  Description of Artificial Sequence: Synthetic oligonucleotide
  Sense strand starting at position 785 of SEQ ID NO: 1882011
ggaagagacuaacaauucu

SEQ ID NO: 2088175 - RNA, 19 nt, Artificial Sequence
  Description of Artificial Sequence: Synthetic oligonucleotide
  Antisense strand to SEQ ID NO: 2088174
agaauuguuagucucuucc

SEQ ID NO: 2088176 - RNA, 19 nt, Artificial Sequence
  Description of Artificial Sequence: Synthetic oligonucleotide
  Sense strand starting at position 1046 of SEQ ID NO: 1882011
uuaauaaugcacugauaga

SEQ ID NO: 2088177 - RNA, 19 nt, Artificial Sequence
  Description of Artificial Sequence: Synthetic oligonucleotide
  Antisense strand to SEQ ID NO: 2088176
ucuaucagugcauuauuaa

SEQ ID NO: 2088178 - RNA, 19 nt, Artificial Sequence
  Description of Artificial Sequence: Synthetic oligonucleotide
  Sense strand starting at position 1161 of SEQ ID NO: 1882011
caaguucugggaggaguaa

SEQ ID NO: 2088179 - RNA, 19 nt, Artificial Sequence
  Description of Artificial Sequence: Synthetic oligonucleotide
  Antisense strand to SEQ ID NO: 2088178
uuacuccucccagaacuug

SEQ ID NO: 2088180 - RNA, 19 nt, Artificial Sequence
  Description of Artificial Sequence: Synthetic oligonucleotide
  Sense strand starting at position 1170 of SEQ ID NO: 1882011
ggaggaguaagcugagauu

SEQ ID NO: 2088181 - RNA, 19 nt, Artificial Sequence
  Description of Artificial Sequence: Synthetic oligonucleotide
  Antisense strand to SEQ ID NO: 2088180
aaucucagcuuacuccucc

SEQ ID NO: 2088182 - RNA, 19 nt, Artificial Sequence
  Description of Artificial Sequence: Synthetic oligonucleotide
  Sense strand starting at position 1173 of SEQ ID NO: 1882011
ggaguaagcugagauuuca

SEQ ID NO: 2088183 - RNA, 19 nt, Artificial Sequence
  Description of Artificial Sequence: Synthetic oligonucleotide
  Antisense strand to SEQ ID NO: 2088182
ugaaaucucagcuuacucc

SEQ ID NO: 2088184 - RNA, 19 nt, Artificial Sequence
  Description of Artificial Sequence: Synthetic oligonucleotide
  Sense strand starting at position 1230 of SEQ ID NO: 1882011
cucaguguuccgucucuca

SEQ ID NO: 2088185 - RNA, 19 nt, Artificial Sequence
  Description of Artificial Sequence: Synthetic oligonucleotide
  Antisense strand to SEQ ID NO: 2088184
ugagagacggaacacugag

SEQ ID NO: 2088186 - RNA, 19 nt, Artificial Sequence
  Description of Artificial Sequence: Synthetic oligonucleotide
  Sense strand starting at position 1365 of SEQ ID NO: 1882011
caaugucaccacuggagaa

SEQ ID NO: 2088187 - RNA, 19 nt, Artificial Sequence
  Description of Artificial Sequence: Synthetic oligonucleotide
  Antisense strand to SEQ ID NO: 2088186
uucuccaguggugacauug

SEQ ID NO: 2088188 - RNA, 19 nt, Artificial Sequence
  Description of Artificial Sequence: Synthetic oligonucleotide
  Sense strand starting at position 1482 of SEQ ID NO: 1882011
accuauagagcauggauaa

SEQ ID NO: 2088189 - RNA, 19 nt, Artificial Sequence
  Description of Artificial Sequence: Synthetic oligonucleotide
  Antisense strand to SEQ ID NO: 2088188
uuauccaugcucuauaggu

SEQ ID NO: 2088190 - RNA, 19 nt, Artificial Sequence
  Description of Artificial Sequence: Synthetic oligonucleotide
  Sense strand starting at position 1564 of SEQ ID NO: 1882011
accagaaggugcucaguaa

SEQ ID NO: 2088191 - RNA, 19 nt, Artificial Sequence
  Description of Artificial Sequence: Synthetic oligonucleotide
  Antisense strand to SEQ ID NO: 2088190
uuacugagcaccuucuggu

SEQ ID NO: 2088192 - RNA, 19 nt, Artificial Sequence
  Description of Artificial Sequence: Synthetic oligonucleotide
  Sense strand starting at position 1622 of SEQ ID NO: 1882011
cccuguucucaaggaauga

SEQ ID NO: 2088193 - RNA, 19 nt, Artificial Sequence
  Description of Artificial Sequence: Synthetic oligonucleotide
  Antisense strand to SEQ ID NO: 2088192
ucauuccuugagaacaggg

SEQ ID NO: 2088194 - RNA, 19 nt, Artificial Sequence
  Description of Artificial Sequence: Synthetic oligonucleotide
  Sense strand starting at position 1756 of SEQ ID NO: 1882011
caggaaacuguugguaagu

SEQ ID NO: 2088195 - RNA, 19 nt, Artificial Sequence
  Description of Artificial Sequence: Synthetic oligonucleotide
  Antisense strand to SEQ ID NO: 2088194
acuuaccaacaguuuccug

SEQ ID NO: 2088196 - RNA, 19 nt, Artificial Sequence
  Description of Artificial Sequence: Synthetic oligonucleotide
  Sense strand starting at position 1840 of SEQ ID NO: 1882011
gagugcuuccagcaauuag

SEQ ID NO: 2088197 - RNA, 19 nt, Artificial Sequence
  Description of Artificial Sequence: Synthetic oligonucleotide
  Antisense strand to SEQ ID NO: 2088196
cuaauugcuggaagcacuc

SEQ ID NO: 2088198 - RNA, 19 nt, Artificial Sequence
  Description of Artificial Sequence: Synthetic oligonucleotide
  Sense strand starting at position 2309 of SEQ ID NO: 1882011
auaucaacuugugugaguu

SEQ ID NO: 2088199 - RNA, 19 nt, Artificial Sequence
  Description of Artificial Sequence: Synthetic oligonucleotide
  Antisense strand to SEQ ID NO: 2088198
aacucacacaaguugauau

SEQ ID NO: 2088200 - RNA, 19 nt, Artificial Sequence
  Description of Artificial Sequence: Synthetic oligonucleotide
  Sense strand starting at position 2313 of SEQ ID NO: 1882011
caacuugugugaguuggga

SEQ ID NO: 2088201 - RNA, 19 nt, Artificial Sequence
  Description of Artificial Sequence: Synthetic oligonucleotide
  Antisense strand to SEQ ID NO: 2088200
ucccaacucacacaaguug

SEQ ID NO: 2088202 - RNA, 19 nt, Artificial Sequence
  Description of Artificial Sequence: Synthetic oligonucleotide
  Sense strand starting at position 2336 of SEQ ID NO: 1882011
acaaguaaugugugaauaa

SEQ ID NO: 2088203 - RNA, 19 nt, Artificial Sequence
  Description of Artificial Sequence: Synthetic oligonucleotide
  Antisense strand to SEQ ID NO: 2088202
uuauucacacauuacuugu

SEQ ID NO: 2088204 - RNA, 19 nt, Artificial Sequence
  Description of Artificial Sequence: Synthetic oligonucleotide
  Sense strand starting at position 2362 of SEQ ID NO: 1882011
ucaggugugcugaguugga

SEQ ID NO: 2088205 - RNA, 19 nt, Artificial Sequence
  Description of Artificial Sequence: Synthetic oligonucleotide
  Antisense strand to SEQ ID NO: 2088204
uccaacucagcacaccuga

SEQ ID NO: 2088206 - RNA, 19 nt, Artificial Sequence
  Description of Artificial Sequence: Synthetic oligonucleotide
  Sense strand starting at position 2534 of SEQ ID NO: 1882011
cuggguaugccagacagau

SEQ ID NO: 2088207 - RNA, 19 nt, Artificial Sequence
  Description of Artificial Sequence: Synthetic oligonucleotide
  Antisense strand to SEQ ID NO: 2088206
aucugucuggcauacccag

SEQ ID NO: 2088208 - RNA, 19 nt, Artificial Sequence
  Description of Artificial Sequence: Synthetic oligonucleotide
  Sense strand starting at position 2540 of SEQ ID NO: 1882011
augccagacagaugaugua

SEQ ID NO: 2088209 - RNA, 19 nt, Artificial Sequence
  Description of Artificial Sequence: Synthetic oligonucleotide
  Antisense strand to SEQ ID NO: 2088208
uacaucaucugucuggcau

SEQ ID NO: 2088210 - RNA, 19 nt, Artificial Sequence
  Description of Artificial Sequence: Synthetic oligonucleotide
  Sense strand starting at position 2838 of SEQ ID NO: 1882011
gcaugagaccugugugaac

SEQ ID NO: 2088211 - RNA, 19 nt, Artificial Sequence
  Description of Artificial Sequence: Synthetic oligonucleotide
  Antisense strand to SEQ ID NO: 2088210
guucacacaggucucaugc

SEQ ID NO: 2088212 - RNA, 19 nt, Artificial Sequence
  Description of Artificial Sequence: Synthetic oligonucleotide
  Sense strand starting at position 3041 of SEQ ID NO: 1882011
uugcucuauggccacuaaa

SEQ ID NO: 2088213 - RNA, 19 nt, Artificial Sequence
  Description of Artificial Sequence: Synthetic oligonucleotide
  Antisense strand to SEQ ID NO: 2088212
uuuaguggccauagagcaa

SEQ ID NO: 2088214 - RNA, 19 nt, Artificial Sequence
  Description of Artificial Sequence: Synthetic oligonucleotide
  Sense strand starting at position 3253 of SEQ ID NO: 1882011
auaagugacugccuucuua

SEQ ID NO: 2088215 - RNA, 19 nt, Artificial Sequence
  Description of Artificial Sequence: Synthetic oligonucleotide
  Antisense strand to SEQ ID NO: 2088214
uaagaaggcagucacuuau

SEQ ID NO: 2088216 - RNA, 19 nt, Artificial Sequence
  Description of Artificial Sequence: Synthetic oligonucleotide
  Sense strand starting at position 3371 of SEQ ID NO: 1882011
agagcauuacccugugaaa

SEQ ID NO: 2088217 - RNA, 19 nt, Artificial Sequence
  Description of Artificial Sequence: Synthetic oligonucleotide
  Antisense strand to SEQ ID NO: 2088216
uuucacaggguaaugcucu

SEQ ID NO: 2088218 - RNA, 19 nt, Artificial Sequence
  Description of Artificial Sequence: Synthetic oligonucleotide
  Sense strand starting at position 3420 of SEQ ID NO: 1882011
cccagaugugguuaaacug

SEQ ID NO: 2088219 - RNA, 19 nt, Artificial Sequence
  Description of Artificial Sequence: Synthetic oligonucleotide
  Antisense strand to SEQ ID NO: 2088218
caguuuaaccacaucuggg

SEQ ID NO: 2088220 - RNA, 19 nt, Artificial Sequence
  Description of Artificial Sequence: Synthetic oligonucleotide
  Sense strand starting at position 3453 of SEQ ID NO: 1882011
ggcucacaucagcagaaau

SEQ ID NO: 2088221 - RNA, 19 nt, Artificial Sequence
  Description of Artificial Sequence: Synthetic oligonucleotide
  Antisense strand to SEQ ID NO: 2088220
auuucugcugaugugagcc

SEQ ID NO: 2088222 - RNA, 19 nt, Artificial Sequence
  Description of Artificial Sequence: Synthetic oligonucleotide
  Sense strand starting at position 3465 of SEQ ID NO: 1882011
cagaaaucugcucguagga

SEQ ID NO: 2088223 - RNA, 19 nt, Artificial Sequence
  Description of Artificial Sequence: Synthetic oligonucleotide
  Antisense strand to SEQ ID NO: 2088222
uccuacgagcagauuucug

SEQ ID NO: 2088224 - RNA, 19 nt, Artificial Sequence
  Description of Artificial Sequence: Synthetic oligonucleotide
  Sense strand starting at position 3601 of SEQ ID NO: 1882011
ccaaguucugcuuaaagug

SEQ ID NO: 2088225 - RNA, 19 nt, Artificial Sequence
  Description of Artificial Sequence: Synthetic oligonucleotide
  Antisense strand to SEQ ID NO: 2088224
cacuuuaagcagaacuugg

SEQ ID NO: 2088226 - RNA, 19 nt, Artificial Sequence
  Description of Artificial Sequence: Synthetic oligonucleotide
  Sense strand starting at position 3613 of SEQ ID NO: 1882011
uaaagugcccucuggaaau

SEQ ID NO: 2088227 - RNA, 19 nt, Artificial Sequence
  Description of Artificial Sequence: Synthetic oligonucleotide
  Antisense strand to SEQ ID NO: 2088226
auuuccagagggcacuuua

SEQ ID NO: 2088228 - RNA, 19 nt, Artificial Sequence
  Description of Artificial Sequence: Synthetic oligonucleotide
  Sense strand starting at position 3642 of SEQ ID NO: 1882011
acaacaaucucacaaggga

SEQ ID NO: 2088229 - RNA, 19 nt, Artificial Sequence
  Description of Artificial Sequence: Synthetic oligonucleotide
  Antisense strand to SEQ ID NO: 2088228
ucccuugugagauuguugu

SEQ ID NO: 2088230 - RNA, 19 nt, Artificial Sequence
  Description of Artificial Sequence: Synthetic oligonucleotide
  Sense strand starting at position 3818 of SEQ ID NO: 1882011
aagagaagauaucaggaau

SEQ ID NO: 2088231 - RNA, 19 nt, Artificial Sequence
  Description of Artificial Sequence: Synthetic oligonucleotide
  Antisense strand to SEQ ID NO: 2088230
auuccugauaucuucucuu

SEQ ID NO: 2088232 - RNA, 19 nt, Artificial Sequence
  Description of Artificial Sequence: Synthetic oligonucleotide
  Sense strand starting at position 3893 of SEQ ID NO: 1882011
cuguccucuugauugugaa

SEQ ID NO: 2088233 - RNA, 19 nt, Artificial Sequence
  Description of Artificial Sequence: Synthetic oligonucleotide
  Antisense strand to SEQ ID NO: 2088232
uucacaaucaagaggacag

SEQ ID NO: 2088234 - RNA, 19 nt, Artificial Sequence
  Description of Artificial Sequence: Synthetic oligonucleotide
  Sense strand starting at position 3943 of SEQ ID NO: 1882011
uuggauucccuguacuaug

SEQ ID NO: 2088235 - RNA, 19 nt, Artificial Sequence
  Description of Artificial Sequence: Synthetic oligonucleotide
  Antisense strand to SEQ ID NO: 2088234
cauaguacagggaauccaa

SEQ ID NO: 2088236 - RNA, 19 nt, Artificial Sequence
  Description of Artificial Sequence: Synthetic oligonucleotide
  Sense strand starting at position 139 of SEQ ID NO: 1882012
cuuauuccagcugaauuga

SEQ ID NO: 2088237 - RNA, 19 nt, Artificial Sequence
  Description of Artificial Sequence: Synthetic oligonucleotide
  Antisense strand to SEQ ID NO: 2088236
ucaauucagcuggaauaag

SEQ ID NO: 2088238 - RNA, 19 nt, Artificial Sequence
  Description of Artificial Sequence: Synthetic oligonucleotide
  Sense strand starting at position 231 of SEQ ID NO: 1882012
aagaguuugcaguaaggga

SEQ ID NO: 2088239 - RNA, 19 nt, Artificial Sequence
  Description of Artificial Sequence: Synthetic oligonucleotide
  Antisense strand to SEQ ID NO: 2088238
ucccuuacugcaaacucuu

SEQ ID NO: 2088240 - RNA, 19 nt, Artificial Sequence
  Description of Artificial Sequence: Synthetic oligonucleotide
  Sense strand starting at position 414 of SEQ ID NO: 1882012
agcacaaagaagugaugua

SEQ ID NO: 2088241 - RNA, 19 nt, Artificial Sequence
  Description of Artificial Sequence: Synthetic oligonucleotide
  Antisense strand to SEQ ID NO: 2088240
uacaucacuucuuugugcu

SEQ ID NO: 2088242 - RNA, 19 nt, Artificial Sequence
  Description of Artificial Sequence: Synthetic oligonucleotide
  Sense strand starting at position 711 of SEQ ID NO: 1882012
agcuuuaugguaugaauag

SEQ ID NO: 2088243 - RNA, 19 nt, Artificial Sequence
  Description of Artificial Sequence: Synthetic oligonucleotide
  Antisense strand to SEQ ID NO: 2088242
cuauucauaccauaaagcu

SEQ ID NO: 2088244 - RNA, 19 nt, Artificial Sequence
  Description of Artificial Sequence: Synthetic oligonucleotide
  Sense strand starting at position 732 of SEQ ID NO: 1882012
cgacuuggaggugauguaa

SEQ ID NO: 2088245 - RNA, 19 nt, Artificial Sequence
  Description of Artificial Sequence: Synthetic oligonucleotide
  Antisense strand to SEQ ID NO: 2088244
uuacaucaccuccaagucg

SEQ ID NO: 2088246 - RNA, 19 nt, Artificial Sequence
  Description of Artificial Sequence: Synthetic oligonucleotide
  Sense strand starting at position 978 of SEQ ID NO: 1882012
auacgauugaucuaaggca

SEQ ID NO: 2088247 - RNA, 19 nt, Artificial Sequence
  Description of Artificial Sequence: Synthetic oligonucleotide
  Antisense strand to SEQ ID NO: 2088246
ugccuuagaucaaucguau

SEQ ID NO: 2088248 - RNA, 19 nt, Artificial Sequence
  Description of Artificial Sequence: Synthetic oligonucleotide
  Sense strand starting at position 1080 of SEQ ID NO: 1882012
acagacagcucuuuaaaug

SEQ ID NO: 2088249 - RNA, 19 nt, Artificial Sequence
  Description of Artificial Sequence: Synthetic oligonucleotide
  Antisense strand to SEQ ID NO: 2088248
cauuuaaagagcugucugu

SEQ ID NO: 2088250 - RNA, 19 nt, Artificial Sequence
  Description of Artificial Sequence: Synthetic oligonucleotide
  Sense strand starting at position 1117 of SEQ ID NO: 1882012
acagccuuccagcagauaa

SEQ ID NO: 2088251 - RNA, 19 nt, Artificial Sequence
  Description of Artificial Sequence: Synthetic oligonucleotide
  Antisense strand to SEQ ID NO: 2088250
uuaucugcuggaaggcugu

SEQ ID NO: 2088252 - RNA, 19 nt, Artificial Sequence
  Description of Artificial Sequence: Synthetic oligonucleotide
  Sense strand starting at position 1119 of SEQ ID NO: 1882012
agccuuccagcagauaaua

SEQ ID NO: 2088253 - RNA, 19 nt, Artificial Sequence
  Description of Artificial Sequence: Synthetic oligonucleotide
  Antisense strand to SEQ ID NO: 2088252
uauuaucugcuggaaggcu

SEQ ID NO: 2088254 - RNA, 19 nt, Artificial Sequence
  Description of Artificial Sequence: Synthetic oligonucleotide
  Sense strand starting at position 1196 of SEQ ID NO: 1882012
cagugacaugaagguugaa

SEQ ID NO: 2088255 - RNA, 19 nt, Artificial Sequence
  Description of Artificial Sequence: Synthetic oligonucleotide
  Antisense strand to SEQ ID NO: 2088254
uucaaccuucaugucacug

SEQ ID NO: 2088256 - RNA, 19 nt, Artificial Sequence
  Description of Artificial Sequence: Synthetic oligonucleotide
  Sense strand starting at position 1310 of SEQ ID NO: 1882012
auuccuucuccuuauaggu

SEQ ID NO: 2088257 - RNA, 19 nt, Artificial Sequence
  Description of Artificial Sequence: Synthetic oligonucleotide
  Antisense strand to SEQ ID NO: 2088256
accuauaaggagaaggaau

SEQ ID NO: 2088258 - RNA, 19 nt, Artificial Sequence
  Description of Artificial Sequence: Synthetic oligonucleotide
  Sense strand starting at position 1315 of SEQ ID NO: 1882012
uucuccuuauaggugaaua

SEQ ID NO: 2088259 - RNA, 19 nt, Artificial Sequence
  Description of Artificial Sequence: Synthetic oligonucleotide
  Antisense strand to SEQ ID NO: 2088258
uauucaccuauaaggagaa

SEQ ID NO: 2088260 - RNA, 19 nt, Artificial Sequence
  Description of Artificial Sequence: Synthetic oligonucleotide
  Sense strand starting at position 1317 of SEQ ID NO: 1882012
cuccuuauaggugaauauu

SEQ ID NO: 2088261 - RNA, 19 nt, Artificial Sequence
  Description of Artificial Sequence: Synthetic oligonucleotide
  Antisense strand to SEQ ID NO: 2088260
aauauucaccuauaaggag

SEQ ID NO: 2088262 - RNA, 19 nt, Artificial Sequence
  Description of Artificial Sequence: Synthetic oligonucleotide
  Sense strand starting at position 1378 of SEQ ID NO: 1882012
cuaagagugaaugguucua

SEQ ID NO: 2088263 - RNA, 19 nt, Artificial Sequence
  Description of Artificial Sequence: Synthetic oligonucleotide
  Antisense strand to SEQ ID NO: 2088262
uagaaccauucacucuuag

SEQ ID NO: 2088264 - RNA, 19 nt, Artificial Sequence
  Description of Artificial Sequence: Synthetic oligonucleotide
  Sense strand starting at position 1380 of SEQ ID NO: 1882012
aagagugaaugguucuaug

SEQ ID NO: 2088265 - RNA, 19 nt, Artificial Sequence
  Description of Artificial Sequence: Synthetic oligonucleotide
  Antisense strand to SEQ ID NO: 2088264
cauagaaccauucacucuu

SEQ ID NO: 2088266 - RNA, 19 nt, Artificial Sequence
  Description of Artificial Sequence: Synthetic oligonucleotide
  Sense strand starting at position 1422 of SEQ ID NO: 1882012
ggcauuaaauccuuagaag

SEQ ID NO: 2088267 - RNA, 19 nt, Artificial Sequence
  Description of Artificial Sequence: Synthetic oligonucleotide
  Antisense strand to SEQ ID NO: 2088266
cuucuaaggauuuaaugcc

SEQ ID NO: 2088268 - RNA, 19 nt, Artificial Sequence
  Description of Artificial Sequence: Synthetic oligonucleotide
  Sense strand starting at position 1423 of SEQ ID NO: 1882012
gcauuaaauccuuagaagu

SEQ ID NO: 2088269 - RNA, 19 nt, Artificial Sequence
  Description of Artificial Sequence: Synthetic oligonucleotide
  Antisense strand to SEQ ID NO: 2088268
acuucuaaggauuuaaugc

SEQ ID NO: 2088270 - RNA, 19 nt, Artificial Sequence
  Description of Artificial Sequence: Synthetic oligonucleotide
  Sense strand starting at position 1775 of SEQ ID NO: 1882012
caggaaguagugcauaaua

SEQ ID NO: 2088271 - RNA, 19 nt, Artificial Sequence
  Description of Artificial Sequence: Synthetic oligonucleotide
  Antisense strand to SEQ ID NO: 2088270
uauuaugcacuacuuccug

SEQ ID NO: 2088272 - RNA, 19 nt, Artificial Sequence
  Description of Artificial Sequence: Synthetic oligonucleotide
  Sense strand starting at position 1777 of SEQ ID NO: 1882012
ggaaguagugcauaauagu

SEQ ID NO: 2088273 - RNA, 19 nt, Artificial Sequence
  Description of Artificial Sequence: Synthetic oligonucleotide
  Antisense strand to SEQ ID NO: 2088272
acuauuaugcacuacuucc

SEQ ID NO: 2088274 - RNA, 19 nt, Artificial Sequence
  Description of Artificial Sequence: Synthetic oligonucleotide
  Sense strand starting at position 1845 of SEQ ID NO: 1882012
ugcgcuuguccaguuuaca

SEQ ID NO: 2088275 - RNA, 19 nt, Artificial Sequence
  Description of Artificial Sequence: Synthetic oligonucleotide
  Antisense strand to SEQ ID NO: 2088274
uguaaacuggacaagcgca

SEQ ID NO: 2088276 - RNA, 19 nt, Artificial Sequence
  Description of Artificial Sequence: Synthetic oligonucleotide
  Sense strand starting at position 1846 of SEQ ID NO: 1882012
gcgcuuguccaguuuacac

SEQ ID NO: 2088277 - RNA, 19 nt, Artificial Sequence
  Description of Artificial Sequence: Synthetic oligonucleotide
  Antisense strand to SEQ ID NO: 2088276
guguaaacuggacaagcgc

SEQ ID NO: 2088278 - RNA, 19 nt, Artificial Sequence
  Description of Artificial Sequence: Synthetic oligonucleotide
  Sense strand starting at position 1999 of SEQ ID NO: 1882012
guguuaauaaauggugaca

SEQ ID NO: 2088279 - RNA, 19 nt, Artificial Sequence
  Description of Artificial Sequence: Synthetic oligonucleotide
  Antisense strand to SEQ ID NO: 2088278
ugucaccauuuauuaacac

SEQ ID NO: 2088280 - RNA, 19 nt, Artificial Sequence
  Description of Artificial Sequence: Synthetic oligonucleotide
  Sense strand starting at position 2123 of SEQ ID NO: 1882012
agaauuuccuagcaaggaa

SEQ ID NO: 2088281 - RNA, 19 nt, Artificial Sequence
  Description of Artificial Sequence: Synthetic oligonucleotide
  Antisense strand to SEQ ID NO: 2088280
uuccuugcuaggaaauucu

SEQ ID NO: 2088282 - RNA, 19 nt, Artificial Sequence
  Description of Artificial Sequence: Synthetic oligonucleotide
  Sense strand starting at position 2147 of SEQ ID NO: 1882012
ugguaucaagguugauaga

SEQ ID NO: 2088283 - RNA, 19 nt, Artificial Sequence
  Description of Artificial Sequence: Synthetic oligonucleotide
  Antisense strand to SEQ ID NO: 2088282
ucuaucaaccuugauacca

SEQ ID NO: 2088284 - RNA, 19 nt, Artificial Sequence
  Description of Artificial Sequence: Synthetic oligonucleotide
  Sense strand starting at position 2423 of SEQ ID NO: 1882012
guacuaccuauaggagagu

SEQ ID NO: 2088285 - RNA, 19 nt, Artificial Sequence
  Description of Artificial Sequence: Synthetic oligonucleotide
  Antisense strand to SEQ ID NO: 2088284
acucuccuauagguaguac

SEQ ID NO: 2088286 - RNA, 19 nt, Artificial Sequence
  Description of Artificial Sequence: Synthetic oligonucleotide
  Sense strand starting at position 2437 of SEQ ID NO: 1882012
agaguugcuggucauaaca

SEQ ID NO: 2088287 - RNA, 19 nt, Artificial Sequence
  Description of Artificial Sequence: Synthetic oligonucleotide
  Antisense strand to SEQ ID NO: 2088286
uguuaugaccagcaacucu

SEQ ID NO: 2088288 - RNA, 19 nt, Artificial Sequence
  Description of Artificial Sequence: Synthetic oligonucleotide
  Sense strand starting at position 2512 of SEQ ID NO: 1882012
cacauugagguauguccaa

SEQ ID NO: 2088289 - RNA, 19 nt, Artificial Sequence
  Description of Artificial Sequence: Synthetic oligonucleotide
  Antisense strand to SEQ ID NO: 2088288
uuggacauaccucaaugug

SEQ ID NO: 2088290 - RNA, 19 nt, Artificial Sequence
  Description of Artificial Sequence: Synthetic oligonucleotide
  Sense strand starting at position 2535 of SEQ ID NO: 1882012
cuugucaugagaugaaaug

SEQ ID NO: 2088291 - RNA, 19 nt, Artificial Sequence
  Description of Artificial Sequence: Synthetic oligonucleotide
  Antisense strand to SEQ ID NO: 2088290
cauuucaucucaugacaag

SEQ ID NO: 2088292 - RNA, 19 nt, Artificial Sequence
  Description of Artificial Sequence: Synthetic oligonucleotide
  Sense strand starting at position 2545 of SEQ ID NO: 1882012
gaugaaaugucuuuguuag

SEQ ID NO: 2088293 - RNA, 19 nt, Artificial Sequence
  Description of Artificial Sequence: Synthetic oligonucleotide
  Antisense strand to SEQ ID NO: 2088292
cuaacaaagacauuucauc

SEQ ID NO: 2088294 - RNA, 19 nt, Artificial Sequence
  Description of Artificial Sequence: Synthetic oligonucleotide
  Sense strand starting at position 2546 of SEQ ID NO: 1882012
augaaaugucuuuguuaga

SEQ ID NO: 2088295 - RNA, 19 nt, Artificial Sequence
  Description of Artificial Sequence: Synthetic oligonucleotide
  Antisense strand to SEQ ID NO: 2088294
ucuaacaaagacauuucau

SEQ ID NO: 2088296 - RNA, 19 nt, Artificial Sequence
  Description of Artificial Sequence: Synthetic oligonucleotide
  Sense strand starting at position 2602 of SEQ ID NO: 1882012
gcaugugcuguguuagcaa

SEQ ID NO: 2088297 - RNA, 19 nt, Artificial Sequence
  Description of Artificial Sequence: Synthetic oligonucleotide
  Antisense strand to SEQ ID NO: 2088296
uugcuaacacagcacaugc

SEQ ID NO: 2088298 - RNA, 19 nt, Artificial Sequence
  Description of Artificial Sequence: Synthetic oligonucleotide
  Sense strand starting at position 2649 of SEQ ID NO: 1882012
acuugaaugcacuagucaa

SEQ ID NO: 2088299 - RNA, 19 nt, Artificial Sequence
  Description of Artificial Sequence: Synthetic oligonucleotide
  Antisense strand to SEQ ID NO: 2088298
uugacuagugcauucaagu

SEQ ID NO: 2088300 - RNA, 19 nt, Artificial Sequence
  Description of Artificial Sequence: Synthetic oligonucleotide
  Sense strand starting at position 2656 of SEQ ID NO: 1882012
ugcacuagucaagaaaugu

SEQ ID NO: 2088301 - RNA, 19 nt, Artificial Sequence
  Description of Artificial Sequence: Synthetic oligonucleotide
  Antisense strand to SEQ ID NO: 2088300
acauuucuugacuagugca

SEQ ID NO: 2088302 - RNA, 19 nt, Artificial Sequence
  Description of Artificial Sequence: Synthetic oligonucleotide
  Sense strand starting at position 2673 of SEQ ID NO: 1882012
guuauuagagaaugagcuu

SEQ ID NO: 2088303 - RNA, 19 nt, Artificial Sequence
  Description of Artificial Sequence: Synthetic oligonucleotide
  Antisense strand to SEQ ID NO: 2088302
aagcucauucucuaauaac

SEQ ID NO: 2088304 - RNA, 19 nt, Artificial Sequence
  Description of Artificial Sequence: Synthetic oligonucleotide
  Sense strand starting at position 3378 of SEQ ID NO: 1882012
cagagaagucaagguugca

SEQ ID NO: 2088305 - RNA, 19 nt, Artificial Sequence
  Description of Artificial Sequence: Synthetic oligonucleotide
  Antisense strand to SEQ ID NO: 2088304
ugcaaccuugacuucucug

SEQ ID NO: 2088306 - RNA, 19 nt, Artificial Sequence
  Description of Artificial Sequence: Synthetic oligonucleotide
  Sense strand starting at position 3483 of SEQ ID NO: 1882012
gaaauuugcugcuuguaac

SEQ ID NO: 2088307 - RNA, 19 nt, Artificial Sequence
  Description of Artificial Sequence: Synthetic oligonucleotide
  Antisense strand to SEQ ID NO: 2088306
guuacaagcagcaaauuuc

SEQ ID NO: 2088308 - RNA, 19 nt, Artificial Sequence
  Description of Artificial Sequence: Synthetic oligonucleotide
  Sense strand starting at position 3495 of SEQ ID NO: 1882012
uuguaacaaccuggaugaa

SEQ ID NO: 2088309 - RNA, 19 nt, Artificial Sequence
  Description of Artificial Sequence: Synthetic oligonucleotide
  Antisense strand to SEQ ID NO: 2088308
uucauccagguuguuacaa

SEQ ID NO: 2088310 - RNA, 19 nt, Artificial Sequence
  Description of Artificial Sequence: Synthetic oligonucleotide
  Sense strand starting at position 3601 of SEQ ID NO: 1882012
uugaacucauaguuacaga

SEQ ID NO: 2088311 - RNA, 19 nt, Artificial Sequence
  Description of Artificial Sequence: Synthetic oligonucleotide
  Antisense strand to SEQ ID NO: 2088310
ucuguaacuaugaguucaa

SEQ ID NO: 2088312 - RNA, 19 nt, Artificial Sequence
  Description of Artificial Sequence: Synthetic oligonucleotide
  Sense strand starting at position 3658 of SEQ ID NO: 1882012
uagggagaugugggucaaa

SEQ ID NO: 2088313 - RNA, 19 nt, Artificial Sequence
  Description of Artificial Sequence: Synthetic oligonucleotide
  Antisense strand to SEQ ID NO: 2088312
uuugacccacaucucccua

SEQ ID NO: 2088314 - RNA, 19 nt, Artificial Sequence
  Description of Artificial Sequence: Synthetic oligonucleotide
  Sense strand starting at position 3817 of SEQ ID NO: 1882012
agcuaugggaggugaugaa

SEQ ID NO: 2088315 - RNA, 19 nt, Artificial Sequence
  Description of Artificial Sequence: Synthetic oligonucleotide
  Antisense strand to SEQ ID NO: 2088314
uucaucaccucccauagcu

SEQ ID NO: 2088316 - RNA, 19 nt, Artificial Sequence
  Description of Artificial Sequence: Synthetic oligonucleotide
  Sense strand starting at position 457 of SEQ ID NO: 1882013
auguuacaucuggguggga

SEQ ID NO: 2088317 - RNA, 19 nt, Artificial Sequence
  Description of Artificial Sequence: Synthetic oligonucleotide
  Antisense strand to SEQ ID NO: 2088316
ucccacccagauguaacau

SEQ ID NO: 2088318 - RNA, 19 nt, Artificial Sequence
  Description of Artificial Sequence: Synthetic oligonucleotide
  Sense strand starting at position 458 of SEQ ID NO: 1882013
uguuacaucugggugggaa

SEQ ID NO: 2088319 - RNA, 19 nt, Artificial Sequence
  Description of Artificial Sequence: Synthetic oligonucleotide
  Antisense strand to SEQ ID NO: 2088318
uucccacccagauguaaca

SEQ ID NO: 2088320 - RNA, 19 nt, Artificial Sequence
  Description of Artificial Sequence: Synthetic oligonucleotide
  Sense strand starting at position 459 of SEQ ID NO: 1882013
guuacaucugggugggaag

SEQ ID NO: 2088321 - RNA, 19 nt, Artificial Sequence
  Description of Artificial Sequence: Synthetic oligonucleotide
  Antisense strand to SEQ ID NO: 2088320
cuucccacccagauguaac

SEQ ID NO: 2088322 - RNA, 19 nt, Artificial Sequence
  Description of Artificial Sequence: Synthetic oligonucleotide
  Sense strand starting at position 462 of SEQ ID NO: 1882013
acaucugggugggaagauu

SEQ ID NO: 2088323 - RNA, 19 nt, Artificial Sequence
  Description of Artificial Sequence: Synthetic oligonucleotide
  Antisense strand to SEQ ID NO: 2088322
aaucuucccacccagaugu

SEQ ID NO: 2088324 - RNA, 19 nt, Artificial Sequence
  Description of Artificial Sequence: Synthetic oligonucleotide
  Sense strand starting at position 471 of SEQ ID NO: 1882013
ugggaagauuacuacagau

SEQ ID NO: 2088325 - RNA, 19 nt, Artificial Sequence
  Description of Artificial Sequence: Synthetic oligonucleotide
  Antisense strand to SEQ ID NO: 2088324
aucuguaguaaucuuccca

SEQ ID NO: 2088326 - RNA, 19 nt, Artificial Sequence
  Description of Artificial Sequence: Synthetic oligonucleotide
  Sense strand starting at position 642 of SEQ ID NO: 1882013
accuauguguccgcaauca

SEQ ID NO: 2088327 - RNA, 19 nt, Artificial Sequence
  Description of Artificial Sequence: Synthetic oligonucleotide
  Antisense strand to SEQ ID NO: 2088326
ugauugcggacacauaggu

SEQ ID NO: 2088328 - RNA, 19 nt, Artificial Sequence
  Description of Artificial Sequence: Synthetic oligonucleotide
  Sense strand starting at position 862 of SEQ ID NO: 1882013
gccugaaguuccuucuucu

SEQ ID NO: 2088329 - RNA, 19 nt, Artificial Sequence
  Description of Artificial Sequence: Synthetic oligonucleotide
  Antisense strand to SEQ ID NO: 2088328
agaagaaggaacuucaggc

SEQ ID NO: 2088330 - RNA, 19 nt, Artificial Sequence
  Description of Artificial Sequence: Synthetic oligonucleotide
  Sense strand starting at position 865 of SEQ ID NO: 1882013
ugaaguuccuucuucugaa

SEQ ID NO: 2088331 - RNA, 19 nt, Artificial Sequence
  Description of Artificial Sequence: Synthetic oligonucleotide
  Antisense strand to SEQ ID NO: 2088330
uucagaagaaggaacuuca

SEQ ID NO: 2088332 - RNA, 19 nt, Artificial Sequence
  Description of Artificial Sequence: Synthetic oligonucleotide
  Sense strand starting at position 914 of SEQ ID NO: 1882013
gacagugauccaugggacu

SEQ ID NO: 2088333 - RNA, 19 nt, Artificial Sequence
  Description of Artificial Sequence: Synthetic oligonucleotide
  Antisense strand to SEQ ID NO: 2088332
agucccauggaucacuguc

SEQ ID NO: 2088334 - RNA, 19 nt, Artificial Sequence
  Description of Artificial Sequence: Synthetic oligonucleotide
  Sense strand starting at position 969 of SEQ ID NO: 1882013
acuuaauuagcuggcauuu

SEQ ID NO: 2088335 - RNA, 19 nt, Artificial Sequence
  Description of Artificial Sequence: Synthetic oligonucleotide
  Antisense strand to SEQ ID NO: 2088334
aaaugccagcuaauuaagu

SEQ ID NO: 2088336 - RNA, 19 nt, Artificial Sequence
  Description of Artificial Sequence: Synthetic oligonucleotide
  Sense strand starting at position 971 of SEQ ID NO: 1882013
uuaauuagcuggcauuuaa

SEQ ID NO: 2088337 - RNA, 19 nt, Artificial Sequence
  Description of Artificial Sequence: Synthetic oligonucleotide
  Antisense strand to SEQ ID NO: 2088336
uuaaaugccagcuaauuaa

SEQ ID NO: 2088338 - RNA, 19 nt, Artificial Sequence
  Description of Artificial Sequence: Synthetic oligonucleotide
  Sense strand starting at position 992 of SEQ ID NO: 1882013
gucuguaggaucugaacca

SEQ ID NO: 2088339 - RNA, 19 nt, Artificial Sequence
  Description of Artificial Sequence: Synthetic oligonucleotide
  Antisense strand to SEQ ID NO: 2088338
ugguucagauccuacagac

SEQ ID NO: 2088340 - RNA, 19 nt, Artificial Sequence
  Description of Artificial Sequence: Synthetic oligonucleotide
  Sense strand starting at position 1102 of SEQ ID NO: 1882013
gugugaugcaauugggaaa

SEQ ID NO: 2088341 - RNA, 19 nt, Artificial Sequence
  Description of Artificial Sequence: Synthetic oligonucleotide
  Antisense strand to SEQ ID NO: 2088340
uuucccaauugcaucacac

SEQ ID NO: 2088342 - RNA, 19 nt, Artificial Sequence
  Description of Artificial Sequence: Synthetic oligonucleotide
  Sense strand starting at position 1269 of SEQ ID NO: 1882013
aaauaaauauuggcaggua

SEQ ID NO: 2088343 - RNA, 19 nt, Artificial Sequence
  Description of Artificial Sequence: Synthetic oligonucleotide
  Antisense strand to SEQ ID NO: 2088342
uaccugccaauauuuauuu

SEQ ID NO: 2088344 - RNA, 19 nt, Artificial Sequence
  Description of Artificial Sequence: Synthetic oligonucleotide
  Sense strand starting at position 1575 of SEQ ID NO: 1882013
agucuuagcuuuccuggua

SEQ ID NO: 2088345 - RNA, 19 nt, Artificial Sequence
  Description of Artificial Sequence: Synthetic oligonucleotide
  Antisense strand to SEQ ID NO: 2088344
uaccaggaaagcuaagacu

SEQ ID NO: 2088346 - RNA, 19 nt, Artificial Sequence
  Description of Artificial Sequence: Synthetic oligonucleotide
  Sense strand starting at position 1655 of SEQ ID NO: 1882013
cguacuaagcacuagugau

SEQ ID NO: 2088347 - RNA, 19 nt, Artificial Sequence
  Description of Artificial Sequence: Synthetic oligonucleotide
  Antisense strand to SEQ ID NO: 2088346
aucacuagugcuuaguacg

SEQ ID NO: 2088348 - RNA, 19 nt, Artificial Sequence
  Description of Artificial Sequence: Synthetic oligonucleotide
  Sense strand starting at position 1689 of SEQ ID NO: 1882013
auggauaugucuuugccuu

SEQ ID NO: 2088349 - RNA, 19 nt, Artificial Sequence
  Description of Artificial Sequence: Synthetic oligonucleotide
  Antisense strand to SEQ ID NO: 2088348
aaggcaaagacauauccau

SEQ ID NO: 2088350 - RNA, 19 nt, Artificial Sequence
  Description of Artificial Sequence: Synthetic oligonucleotide
  Sense strand starting at position 1690 of SEQ ID NO: 1882013
uggauaugucuuugccuug

SEQ ID NO: 2088351 - RNA, 19 nt, Artificial Sequence
  Description of Artificial Sequence: Synthetic oligonucleotide
  Antisense strand to SEQ ID NO: 2088350
caaggcaaagacauaucca

SEQ ID NO: 2088352 - RNA, 19 nt, Artificial Sequence
  Description of Artificial Sequence: Synthetic oligonucleotide
  Sense strand starting at position 1691 of SEQ ID NO: 1882013
ggauaugucuuugccuuga

SEQ ID NO: 2088353 - RNA, 19 nt, Artificial Sequence
  Description of Artificial Sequence: Synthetic oligonucleotide
  Antisense strand to SEQ ID NO: 2088352
ucaaggcaaagacauaucc

SEQ ID NO: 2088354 - RNA, 19 nt, Artificial Sequence
  Description of Artificial Sequence: Synthetic oligonucleotide
  Sense strand starting at position 1813 of SEQ ID NO: 1882013
agacuuaauccaggcaaag

SEQ ID NO: 2088355 - RNA, 19 nt, Artificial Sequence
  Description of Artificial Sequence: Synthetic oligonucleotide
  Antisense strand to SEQ ID NO: 2088354
cuuugccuggauuaagucu

SEQ ID NO: 2088356 - RNA, 19 nt, Artificial Sequence
  Description of Artificial Sequence: Synthetic oligonucleotide
  Sense strand starting at position 2106 of SEQ ID NO: 1882013
aaaggcaucguauagacua

SEQ ID NO: 2088357 - RNA, 19 nt, Artificial Sequence
  Description of Artificial Sequence: Synthetic oligonucleotide
  Antisense strand to SEQ ID NO: 2088356
uagucuauacgaugccuuu

SEQ ID NO: 2088358 - RNA, 19 nt, Artificial Sequence
  Description of Artificial Sequence: Synthetic oligonucleotide
  Sense strand starting at position 2111 of SEQ ID NO: 1882013
caucguauagacuagcaga

SEQ ID NO: 2088359 - RNA, 19 nt, Artificial Sequence
  Description of Artificial Sequence: Synthetic oligonucleotide
  Antisense strand to SEQ ID NO: 2088358
ucugcuagucuauacgaug

SEQ ID NO: 2088360 - RNA, 19 nt, Artificial Sequence
  Description of Artificial Sequence: Synthetic oligonucleotide
  Sense strand starting at position 2192 of SEQ ID NO: 1882013
cggugacuucccuauguac

SEQ ID NO: 2088361 - RNA, 19 nt, Artificial Sequence
  Description of Artificial Sequence: Synthetic oligonucleotide
  Antisense strand to SEQ ID NO: 2088360
guacauagggaagucaccg

SEQ ID NO: 2088362 - RNA, 19 nt, Artificial Sequence
  Description of Artificial Sequence: Synthetic oligonucleotide
  Sense strand starting at position 2194 of SEQ ID NO: 1882013
gugacuucccuauguacau

SEQ ID NO: 2088363 - RNA, 19 nt, Artificial Sequence
  Description of Artificial Sequence: Synthetic oligonucleotide
  Antisense strand to SEQ ID NO: 2088362
auguacauagggaagucac

SEQ ID NO: 2088364 - RNA, 19 nt, Artificial Sequence
  Description of Artificial Sequence: Synthetic oligonucleotide
  Sense strand starting at position 2249 of SEQ ID NO: 1882013
acgcuaaacccuuagacuu

SEQ ID NO: 2088365 - RNA, 19 nt, Artificial Sequence
  Description of Artificial Sequence: Synthetic oligonucleotide
  Antisense strand to SEQ ID NO: 2088364
aagucuaaggguuuagcgu

SEQ ID NO: 2088366 - RNA, 19 nt, Artificial Sequence
  Description of Artificial Sequence: Synthetic oligonucleotide
  Sense strand starting at position 2498 of SEQ ID NO: 1882013
cacauuaaggagugcaauu

SEQ ID NO: 2088367 - RNA, 19 nt, Artificial Sequence
  Description of Artificial Sequence: Synthetic oligonucleotide
  Antisense strand to SEQ ID NO: 2088366
aauugcacuccuuaaugug

SEQ ID NO: 2088368 - RNA, 19 nt, Artificial Sequence
  Description of Artificial Sequence: Synthetic oligonucleotide
  Sense strand starting at position 2532 of SEQ ID NO: 1882013
cugagauguugucucacuc

SEQ ID NO: 2088369 - RNA, 19 nt, Artificial Sequence
  Description of Artificial Sequence: Synthetic oligonucleotide
  Antisense strand to SEQ ID NO: 2088368
gagugagacaacaucucag

SEQ ID NO: 2088370 - RNA, 19 nt, Artificial Sequence
  Description of Artificial Sequence: Synthetic oligonucleotide
  Sense strand starting at position 2905 of SEQ ID NO: 1882013
gagagugcacaaugguaga

SEQ ID NO: 2088371 - RNA, 19 nt, Artificial Sequence
  Description of Artificial Sequence: Synthetic oligonucleotide
  Antisense strand to SEQ ID NO: 2088370
ucuaccauugugcacucuc

SEQ ID NO: 2088372 - RNA, 19 nt, Artificial Sequence
  Description of Artificial Sequence: Synthetic oligonucleotide
  Sense strand starting at position 2918 of SEQ ID NO: 1882013
gguagaaacuaucuuuaca

SEQ ID NO: 2088373 - RNA, 19 nt, Artificial Sequence
  Description of Artificial Sequence: Synthetic oligonucleotide
  Antisense strand to SEQ ID NO: 2088372
uguaaagauaguuucuacc

SEQ ID NO: 2088374 - RNA, 19 nt, Artificial Sequence
  Description of Artificial Sequence: Synthetic oligonucleotide
  Sense strand starting at position 3074 of SEQ ID NO: 1882013
aagguuagcugacuguuaa

SEQ ID NO: 2088375 - RNA, 19 nt, Artificial Sequence
  Description of Artificial Sequence: Synthetic oligonucleotide
  Antisense strand to SEQ ID NO: 2088374
uuaacagucagcuaaccuu

SEQ ID NO: 2088376 - RNA, 19 nt, Artificial Sequence
  Description of Artificial Sequence: Synthetic oligonucleotide
  Sense strand starting at position 3075 of SEQ ID NO: 1882013
agguuagcugacuguuaag

SEQ ID NO: 2088377 - RNA, 19 nt, Artificial Sequence
  Description of Artificial Sequence: Synthetic oligonucleotide
  Antisense strand to SEQ ID NO: 2088376
cuuaacagucagcuaaccu

SEQ ID NO: 2088378 - RNA, 19 nt, Artificial Sequence
  Description of Artificial Sequence: Synthetic oligonucleotide
  Sense strand starting at position 3159 of SEQ ID NO: 1882013
cagcaaugguacccaugaa

SEQ ID NO: 2088379 - RNA, 19 nt, Artificial Sequence
  Description of Artificial Sequence: Synthetic oligonucleotide
  Antisense strand to SEQ ID NO: 2088378
uucauggguaccauugcug

SEQ ID NO: 2088380 - RNA, 19 nt, Artificial Sequence
  Description of Artificial Sequence: Synthetic oligonucleotide
  Sense strand starting at position 3246 of SEQ ID NO: 1882013
cuggcaucaccuggaaguu

SEQ ID NO: 2088381 - RNA, 19 nt, Artificial Sequence
  Description of Artificial Sequence: Synthetic oligonucleotide
  Antisense strand to SEQ ID NO: 2088380
aacuuccaggugaugccag

SEQ ID NO: 2088382 - RNA, 19 nt, Artificial Sequence
  Description of Artificial Sequence: Synthetic oligonucleotide
  Sense strand starting at position 3247 of SEQ ID NO: 1882013
uggcaucaccuggaaguuu

SEQ ID NO: 2088383 - RNA, 19 nt, Artificial Sequence
  Description of Artificial Sequence: Synthetic oligonucleotide
  Antisense strand to SEQ ID NO: 2088382
aaacuuccaggugaugcca

SEQ ID NO: 2088384 - RNA, 19 nt, Artificial Sequence
  Description of Artificial Sequence: Synthetic oligonucleotide
  Sense strand starting at position 3255 of SEQ ID NO: 1882013
ccuggaaguuugucagaaa

SEQ ID NO: 2088385 - RNA, 19 nt, Artificial Sequence
  Description of Artificial Sequence: Synthetic oligonucleotide
  Antisense strand to SEQ ID NO: 2088384
uuucugacaaacuuccagg

SEQ ID NO: 2088386 - RNA, 19 nt, Artificial Sequence
  Description of Artificial Sequence: Synthetic oligonucleotide
  Sense strand starting at position 3262 of SEQ ID NO: 1882013
guuugucagaaaugcagga

SEQ ID NO: 2088387 - RNA, 19 nt, Artificial Sequence
  Description of Artificial Sequence: Synthetic oligonucleotide
  Antisense strand to SEQ ID NO: 2088386
uccugcauuucugacaaac

SEQ ID NO: 2088388 - RNA, 19 nt, Artificial Sequence
  Description of Artificial Sequence: Synthetic oligonucleotide
  Sense strand starting at position 3266 of SEQ ID NO: 1882013
gucagaaaugcaggaucuu

SEQ ID NO: 2088389 - RNA, 19 nt, Artificial Sequence
  Description of Artificial Sequence: Synthetic oligonucleotide
  Antisense strand to SEQ ID NO: 2088388
aagauccugcauuucugac

SEQ ID NO: 2088390 - RNA, 19 nt, Artificial Sequence
  Description of Artificial Sequence: Synthetic oligonucleotide
  Sense strand starting at position 3704 of SEQ ID NO: 1882013
cuuuguagcccuuaugcaa

SEQ ID NO: 2088391 - RNA, 19 nt, Artificial Sequence
  Description of Artificial Sequence: Synthetic oligonucleotide
  Antisense strand to SEQ ID NO: 2088390
uugcauaagggcuacaaag

SEQ ID NO: 2088392 - RNA, 19 nt, Artificial Sequence
  Description of Artificial Sequence: Synthetic oligonucleotide
  Sense strand starting at position 3717 of SEQ ID NO: 1882013
augcaacagugucucauaa

SEQ ID NO: 2088393 - RNA, 19 nt, Artificial Sequence
  Description of Artificial Sequence: Synthetic oligonucleotide
  Antisense strand to SEQ ID NO: 2088392
uuaugagacacuguugcau

SEQ ID NO: 2088394 - RNA, 19 nt, Artificial Sequence
  Description of Artificial Sequence: Synthetic oligonucleotide
  Sense strand starting at position 3887 of SEQ ID NO: 1882013
ugcuguaugcuccaaauca

SEQ ID NO: 2088395 - RNA, 19 nt, Artificial Sequence
  Description of Artificial Sequence: Synthetic oligonucleotide
  Antisense strand to SEQ ID NO: 2088394
ugauuuggagcauacagca

SEQ ID NO: 2088396 - RNA, 19 nt, Artificial Sequence
  Description of Artificial Sequence: Synthetic oligonucleotide
  Sense strand starting at position 9 of SEQ ID NO: 1882014
cagggauguuaugaaauag

SEQ ID NO: 2088397 - RNA, 19 nt, Artificial Sequence
  Description of Artificial Sequence: Synthetic oligonucleotide
  Antisense strand to SEQ ID NO: 2088396
cuauuucauaacaucccug

SEQ ID NO: 2088398 - RNA, 19 nt, Artificial Sequence
  Description of Artificial Sequence: Synthetic oligonucleotide
  Sense strand starting at position 91 of SEQ ID NO: 1882014
gggacagccuucuucuuga

SEQ ID NO: 2088399 - RNA, 19 nt, Artificial Sequence
  Description of Artificial Sequence: Synthetic oligonucleotide
  Antisense strand to SEQ ID NO: 2088398
ucaagaagaaggcuguccc

SEQ ID NO: 2088400 - RNA, 19 nt, Artificial Sequence
  Description of Artificial Sequence: Synthetic oligonucleotide
  Sense strand starting at position 169 of SEQ ID NO: 1882014
ggcaaauccagcugugaaa

SEQ ID NO: 2088401 - RNA, 19 nt, Artificial Sequence
  Description of Artificial Sequence: Synthetic oligonucleotide
  Antisense strand to SEQ ID NO: 2088400
uuucacagcuggauuugcc

SEQ ID NO: 2088402 - RNA, 19 nt, Artificial Sequence
  Description of Artificial Sequence: Synthetic oligonucleotide
  Sense strand starting at position 408 of SEQ ID NO: 1882014
gggaguagugaccggaacu

SEQ ID NO: 2088403 - RNA, 19 nt, Artificial Sequence
  Description of Artificial Sequence: Synthetic oligonucleotide
  Antisense strand to SEQ ID NO: 2088402
aguuccggucacuacuccc

SEQ ID NO: 2088404 - RNA, 19 nt, Artificial Sequence
  Description of Artificial Sequence: Synthetic oligonucleotide
  Sense strand starting at position 409 of SEQ ID NO: 1882014
ggaguagugaccggaacuu

SEQ ID NO: 2088405 - RNA, 19 nt, Artificial Sequence
  Description of Artificial Sequence: Synthetic oligonucleotide
  Antisense strand to SEQ ID NO: 2088404
aaguuccggucacuacucc

SEQ ID NO: 2088406 - RNA, 19 nt, Artificial Sequence
  Description of Artificial Sequence: Synthetic oligonucleotide
  Sense strand starting at position 705 of SEQ ID NO: 1882014
gaaggaagccuguaguauu

SEQ ID NO: 2088407 - RNA, 19 nt, Artificial Sequence
  Description of Artificial Sequence: Synthetic oligonucleotide
  Antisense strand to SEQ ID NO: 2088406
aauacuacaggcuuccuuc

SEQ ID NO: 2088408 - RNA, 19 nt, Artificial Sequence
  Description of Artificial Sequence: Synthetic oligonucleotide
  Sense strand starting at position 708 of SEQ ID NO: 1882014
ggaagccuguaguauuaau

SEQ ID NO: 2088409 - RNA, 19 nt, Artificial Sequence
  Description of Artificial Sequence: Synthetic oligonucleotide
  Antisense strand to SEQ ID NO: 2088408
auuaauacuacaggcuucc

SEQ ID NO: 2088410 - RNA, 19 nt, Artificial Sequence
  Description of Artificial Sequence: Synthetic oligonucleotide
  Sense strand starting at position 715 of SEQ ID NO: 1882014
uguaguauuaauggcaagu

SEQ ID NO: 2088411 - RNA, 19 nt, Artificial Sequence
  Description of Artificial Sequence: Synthetic oligonucleotide
  Antisense strand to SEQ ID NO: 2088410
acuugccauuaauacuaca

SEQ ID NO: 2088412 - RNA, 19 nt, Artificial Sequence
  Description of Artificial Sequence: Synthetic oligonucleotide
  Sense strand starting at position 736 of SEQ ID NO: 1882014
ccgggucugucuuugcuaa

SEQ ID NO: 2088413 - RNA, 19 nt, Artificial Sequence
  Description of Artificial Sequence: Synthetic oligonucleotide
  Antisense strand to SEQ ID NO: 2088412
uuagcaaagacagacccgg

SEQ ID NO: 2088414 - RNA, 19 nt, Artificial Sequence
  Description of Artificial Sequence: Synthetic oligonucleotide
  Sense strand starting at position 737 of SEQ ID NO: 1882014
cgggucugucuuugcuaaa

SEQ ID NO: 2088415 - RNA, 19 nt, Artificial Sequence
  Description of Artificial Sequence: Synthetic oligonucleotide
  Antisense strand to SEQ ID NO: 2088414
uuuagcaaagacagacccg

SEQ ID NO: 2088416 - RNA, 19 nt, Artificial Sequence
  Description of Artificial Sequence: Synthetic oligonucleotide
  Sense strand starting at position 915 of SEQ ID NO: 1882014
aggugagcugcuuaaauaa

SEQ ID NO: 2088417 - RNA, 19 nt, Artificial Sequence
  Description of Artificial Sequence: Synthetic oligonucleotide
  Antisense strand to SEQ ID NO: 2088416
uuauuuaagcagcucaccu

SEQ ID NO: 2088418 - RNA, 19 nt, Artificial Sequence
  Description of Artificial Sequence: Synthetic oligonucleotide
  Sense strand starting at position 999 of SEQ ID NO: 1882014
guuaaaugagacugugcuu

SEQ ID NO: 2088419 - RNA, 19 nt, Artificial Sequence
  Description of Artificial Sequence: Synthetic oligonucleotide
  Antisense strand to SEQ ID NO: 2088418
aagcacagucucauuuaac

SEQ ID NO: 2088420 - RNA, 19 nt, Artificial Sequence
  Description of Artificial Sequence: Synthetic oligonucleotide
  Sense strand starting at position 1039 of SEQ ID NO: 1882014
ugcucauugugcuucugaa

SEQ ID NO: 2088421 - RNA, 19 nt, Artificial Sequence
  Description of Artificial Sequence: Synthetic oligonucleotide
  Antisense strand to SEQ ID NO: 2088420
uucagaagcacaaugagca

SEQ ID NO: 2088422 - RNA, 19 nt, Artificial Sequence
  Description of Artificial Sequence: Synthetic oligonucleotide
  Sense strand starting at position 1051 of SEQ ID NO: 1882014
uucugaagccucugggaga

SEQ ID NO: 2088423 - RNA, 19 nt, Artificial Sequence
  Description of Artificial Sequence: Synthetic oligonucleotide
  Antisense strand to SEQ ID NO: 2088422
ucucccagaggcuucagaa

SEQ ID NO: 2088424 - RNA, 19 nt, Artificial Sequence
  Description of Artificial Sequence: Synthetic oligonucleotide
  Sense strand starting at position 1052 of SEQ ID NO: 1882014
ucugaagccucugggagaa

SEQ ID NO: 2088425 - RNA, 19 nt, Artificial Sequence
  Description of Artificial Sequence: Synthetic oligonucleotide
  Antisense strand to SEQ ID NO: 2088424
uucucccagaggcuucaga

SEQ ID NO: 2088426 - RNA, 19 nt, Artificial Sequence
  Description of Artificial Sequence: Synthetic oligonucleotide
  Sense strand starting at position 1136 of SEQ ID NO: 1882014
gagugaagacccugacuca

SEQ ID NO: 2088427 - RNA, 19 nt, Artificial Sequence
  Description of Artificial Sequence: Synthetic oligonucleotide
  Antisense strand to SEQ ID NO: 2088426
ugagucagggucuucacuc

SEQ ID NO: 2088428 - RNA, 19 nt, Artificial Sequence
  Description of Artificial Sequence: Synthetic oligonucleotide
  Sense strand starting at position 1192 of SEQ ID NO: 1882014
uuaggaauuguuugaucca

SEQ ID NO: 2088429 - RNA, 19 nt, Artificial Sequence
  Description of Artificial Sequence: Synthetic oligonucleotide
  Antisense strand to SEQ ID NO: 2088428
uggaucaaacaauuccuaa

SEQ ID NO: 2088430 - RNA, 19 nt, Artificial Sequence
  Description of Artificial Sequence: Synthetic oligonucleotide
  Sense strand starting at position 1193 of SEQ ID NO: 1882014
uaggaauuguuugauccac

SEQ ID NO: 2088431 - RNA, 19 nt, Artificial Sequence
  Description of Artificial Sequence: Synthetic oligonucleotide
  Antisense strand to SEQ ID NO: 2088430
guggaucaaacaauuccua

SEQ ID NO: 2088432 - RNA, 19 nt, Artificial Sequence
  Description of Artificial Sequence: Synthetic oligonucleotide
  Sense strand starting at position 1195 of SEQ ID NO: 1882014
ggaauuguuugauccacaa

SEQ ID NO: 2088433 - RNA, 19 nt, Artificial Sequence
  Description of Artificial Sequence: Synthetic oligonucleotide
  Antisense strand to SEQ ID NO: 2088432
uuguggaucaaacaauucc

SEQ ID NO: 2088434 - RNA, 19 nt, Artificial Sequence
  Description of Artificial Sequence: Synthetic oligonucleotide
  Sense strand starting at position 1259 of SEQ ID NO: 1882014
gggcucauuguugaggauu

SEQ ID NO: 2088435 - RNA, 19 nt, Artificial Sequence
  Description of Artificial Sequence: Synthetic oligonucleotide
  Antisense strand to SEQ ID NO: 2088434
aauccucaacaaugagccc

SEQ ID NO: 2088436 - RNA, 19 nt, Artificial Sequence
  Description of Artificial Sequence: Synthetic oligonucleotide
  Sense strand starting at position 1682 of SEQ ID NO: 1882014
augcuaacgccucaugcua

SEQ ID NO: 2088437 - RNA, 19 nt, Artificial Sequence
  Description of Artificial Sequence: Synthetic oligonucleotide
  Antisense strand to SEQ ID NO: 2088436
uagcaugaggcguuagcau

SEQ ID NO: 2088438 - RNA, 19 nt, Artificial Sequence
  Description of Artificial Sequence: Synthetic oligonucleotide
  Sense strand starting at position 1771 of SEQ ID NO: 1882014
gggaacuuguguagaggaa

SEQ ID NO: 2088439 - RNA, 19 nt, Artificial Sequence
  Description of Artificial Sequence: Synthetic oligonucleotide
  Antisense strand to SEQ ID NO: 2088438
uuccucuacacaaguuccc

SEQ ID NO: 2088440 - RNA, 19 nt, Artificial Sequence
  Description of Artificial Sequence: Synthetic oligonucleotide
  Sense strand starting at position 1800 of SEQ ID NO: 1882014
aucacaaguggcugauagu

SEQ ID NO: 2088441 - RNA, 19 nt, Artificial Sequence
  Description of Artificial Sequence: Synthetic oligonucleotide
  Antisense strand to SEQ ID NO: 2088440
acuaucagccacuugugau

SEQ ID NO: 2088442 - RNA, 19 nt, Artificial Sequence
  Description of Artificial Sequence: Synthetic oligonucleotide
  Sense strand starting at position 2104 of SEQ ID NO: 1882014
uguaauuccucacaacugu

SEQ ID NO: 2088443 - RNA, 19 nt, Artificial Sequence
  Description of Artificial Sequence: Synthetic oligonucleotide
  Antisense strand to SEQ ID NO: 2088442
acaguugugaggaauuaca

SEQ ID NO: 2088444 - RNA, 19 nt, Artificial Sequence
  Description of Artificial Sequence: Synthetic oligonucleotide
  Sense strand starting at position 2472 of SEQ ID NO: 1882014
ccuuuaugcuuggcgcauu

SEQ ID NO: 2088445 - RNA, 19 nt, Artificial Sequence
  Description of Artificial Sequence: Synthetic oligonucleotide
  Antisense strand to SEQ ID NO: 2088444
aaugcgccaagcauaaagg

SEQ ID NO: 2088446 - RNA, 19 nt, Artificial Sequence
  Description of Artificial Sequence: Synthetic oligonucleotide
  Sense strand starting at position 2751 of SEQ ID NO: 1882014
ugggcuacagcucauagau

SEQ ID NO: 2088447 - RNA, 19 nt, Artificial Sequence
  Description of Artificial Sequence: Synthetic oligonucleotide
  Antisense strand to SEQ ID NO: 2088446
aucuaugagcuguagccca

SEQ ID NO: 2088448 - RNA, 19 nt, Artificial Sequence
  Description of Artificial Sequence: Synthetic oligonucleotide
  Sense strand starting at position 2866 of SEQ ID NO: 1882014
ugugcuaggucucuaauca

SEQ ID NO: 2088449 - RNA, 19 nt, Artificial Sequence
  Description of Artificial Sequence: Synthetic oligonucleotide
  Antisense strand to SEQ ID NO: 2088448
ugauuagagaccuagcaca

SEQ ID NO: 2088450 - RNA, 19 nt, Artificial Sequence
  Description of Artificial Sequence: Synthetic oligonucleotide
  Sense strand starting at position 2867 of SEQ ID NO: 1882014
gugcuaggucucuaaucaa

SEQ ID NO: 2088451 - RNA, 19 nt, Artificial Sequence
  Description of Artificial Sequence: Synthetic oligonucleotide
  Antisense strand to SEQ ID NO: 2088450
uugauuagagaccuagcac

SEQ ID NO: 2088452 - RNA, 19 nt, Artificial Sequence
  Description of Artificial Sequence: Synthetic oligonucleotide
  Sense strand starting at position 2897 of SEQ ID NO: 1882014
gggaaacccuccuugacuu

SEQ ID NO: 2088453 - RNA, 19 nt, Artificial Sequence
  Description of Artificial Sequence: Synthetic oligonucleotide
  Antisense strand to SEQ ID NO: 2088452
aagucaaggaggguuuccc

SEQ ID NO: 2088454 - RNA, 19 nt, Artificial Sequence
  Description of Artificial Sequence: Synthetic oligonucleotide
  Sense strand starting at position 2898 of SEQ ID NO: 1882014
ggaaacccuccuugacuuu

SEQ ID NO: 2088455 - RNA, 19 nt, Artificial Sequence
  Description of Artificial Sequence: Synthetic oligonucleotide
  Antisense strand to SEQ ID NO: 2088454
aaagucaaggaggguuucc

SEQ ID NO: 2088456 - RNA, 19 nt, Artificial Sequence
  Description of Artificial Sequence: Synthetic oligonucleotide
  Sense strand starting at position 3401 of SEQ ID NO: 1882014
ugguguagaugccacauaa

SEQ ID NO: 2088457 - RNA, 19 nt, Artificial Sequence
  Description of Artificial Sequence: Synthetic oligonucleotide
  Antisense strand to SEQ ID NO: 2088456
uuauguggcaucuacacca

SEQ ID NO: 2088458 - RNA, 19 nt, Artificial Sequence
  Description of Artificial Sequence: Synthetic oligonucleotide
  Sense strand starting at position 3425 of SEQ ID NO: 1882014
gguugaauggcugaaucau

SEQ ID NO: 2088459 - RNA, 19 nt, Artificial Sequence
  Description of Artificial Sequence: Synthetic oligonucleotide
  Antisense strand to SEQ ID NO: 2088458
augauucagccauucaacc

SEQ ID NO: 2088460 - RNA, 19 nt, Artificial Sequence
  Description of Artificial Sequence: Synthetic oligonucleotide
  Sense strand starting at position 3461 of SEQ ID NO: 1882014
ucucuaguaucaguguuau

SEQ ID NO: 2088461 - RNA, 19 nt, Artificial Sequence
  Description of Artificial Sequence: Synthetic oligonucleotide
  Antisense strand to SEQ ID NO: 2088460
auaacacugauacuagaga

SEQ ID NO: 2088462 - RNA, 19 nt, Artificial Sequence
  Description of Artificial Sequence: Synthetic oligonucleotide
  Sense strand starting at position 3467 of SEQ ID NO: 1882014
guaucaguguuauuugugu

SEQ ID NO: 2088463 - RNA, 19 nt, Artificial Sequence
  Description of Artificial Sequence: Synthetic oligonucleotide
  Antisense strand to SEQ ID NO: 2088462
acacaaauaacacugauac

SEQ ID NO: 2088464 - RNA, 19 nt, Artificial Sequence
  Description of Artificial Sequence: Synthetic oligonucleotide
  Sense strand starting at position 3524 of SEQ ID NO: 1882014
agugccugugucuuguuaa

SEQ ID NO: 2088465 - RNA, 19 nt, Artificial Sequence
  Description of Artificial Sequence: Synthetic oligonucleotide
  Antisense strand to SEQ ID NO: 2088464
uuaacaagacacaggcacu

SEQ ID NO: 2088466 - RNA, 19 nt, Artificial Sequence
  Description of Artificial Sequence: Synthetic oligonucleotide
  Sense strand starting at position 3527 of SEQ ID NO: 1882014
gccugugucuuguuaauuu

SEQ ID NO: 2088467 - RNA, 19 nt, Artificial Sequence
  Description of Artificial Sequence: Synthetic oligonucleotide
  Antisense strand to SEQ ID NO: 2088466
aaauuaacaagacacaggc

SEQ ID NO: 2088468 - RNA, 19 nt, Artificial Sequence
  Description of Artificial Sequence: Synthetic oligonucleotide
  Sense strand starting at position 3568 of SEQ ID NO: 1882014
uggcuugguacaugaugau

SEQ ID NO: 2088469 - RNA, 19 nt, Artificial Sequence
  Description of Artificial Sequence: Synthetic oligonucleotide
  Antisense strand to SEQ ID NO: 2088468
aucaucauguaccaagcca

SEQ ID NO: 2088470 - RNA, 19 nt, Artificial Sequence
  Description of Artificial Sequence: Synthetic oligonucleotide
  Sense strand starting at position 3615 of SEQ ID NO: 1882014
auuggaugaccauguagau

SEQ ID NO: 2088471 - RNA, 19 nt, Artificial Sequence
  Description of Artificial Sequence: Synthetic oligonucleotide
  Antisense strand to SEQ ID NO: 2088470
aucuacauggucauccaau

SEQ ID NO: 2088472 - RNA, 19 nt, Artificial Sequence
  Description of Artificial Sequence: Synthetic oligonucleotide
  Sense strand starting at position 3776 of SEQ ID NO: 1882014
cuugauguuggaugacaua

SEQ ID NO: 2088473 - RNA, 19 nt, Artificial Sequence
  Description of Artificial Sequence: Synthetic oligonucleotide
  Antisense strand to SEQ ID NO: 2088472
uaugucauccaacaucaag

SEQ ID NO: 2088474 - RNA, 19 nt, Artificial Sequence
  Description of Artificial Sequence: Synthetic oligonucleotide
  Sense strand starting at position 3779 of SEQ ID NO: 1882014
gauguuggaugacauauau

SEQ ID NO: 2088475 - RNA, 19 nt, Artificial Sequence
  Description of Artificial Sequence: Synthetic oligonucleotide
  Antisense strand to SEQ ID NO: 2088474
auauaugucauccaacauc

SEQ ID NO: 2088476 - RNA, 19 nt, Artificial Sequence
  Description of Artificial Sequence: Synthetic oligonucleotide
  Sense strand starting at position 14 of SEQ ID NO: 1882015
gggugagugcacagugguu

SEQ ID NO: 2088477 - RNA, 19 nt, Artificial Sequence
  Description of Artificial Sequence: Synthetic oligonucleotide
  Antisense strand to SEQ ID NO: 2088476
aaccacugugcacucaccc

SEQ ID NO: 2088478 - RNA, 19 nt, Artificial Sequence
  Description of Artificial Sequence: Synthetic oligonucleotide
  Sense strand starting at position 414 of SEQ ID NO: 1882015
agggucacuuguccaguaa

SEQ ID NO: 2088479 - RNA, 19 nt, Artificial Sequence
  Description of Artificial Sequence: Synthetic oligonucleotide
  Antisense strand to SEQ ID NO: 2088478
uuacuggacaagugacccu

SEQ ID NO: 2088480 - RNA, 19 nt, Artificial Sequence
  Description of Artificial Sequence: Synthetic oligonucleotide
  Sense strand starting at position 415 of SEQ ID NO: 1882015
gggucacuuguccaguaag

SEQ ID NO: 2088481 - RNA, 19 nt, Artificial Sequence
  Description of Artificial Sequence: Synthetic oligonucleotide
  Antisense strand to SEQ ID NO: 2088480
cuuacuggacaagugaccc

SEQ ID NO: 2088482 - RNA, 19 nt, Artificial Sequence
  Description of Artificial Sequence: Synthetic oligonucleotide
  Sense strand starting at position 418 of SEQ ID NO: 1882015
ucacuuguccaguaaguaa

SEQ ID NO: 2088483 - RNA, 19 nt, Artificial Sequence
  Description of Artificial Sequence: Synthetic oligonucleotide
  Antisense strand to SEQ ID NO: 2088482
uuacuuacuggacaaguga

SEQ ID NO: 2088484 - RNA, 19 nt, Artificial Sequence
  Description of Artificial Sequence: Synthetic oligonucleotide
  Sense strand starting at position 580 of SEQ ID NO: 1882015
ggauguggccagaguguuu

SEQ ID NO: 2088485 - RNA, 19 nt, Artificial Sequence
  Description of Artificial Sequence: Synthetic oligonucleotide
  Antisense strand to SEQ ID NO: 2088484
aaacacucuggccacaucc

SEQ ID NO: 2088486 - RNA, 19 nt, Artificial Sequence
  Description of Artificial Sequence: Synthetic oligonucleotide
  Sense strand starting at position 784 of SEQ ID NO: 1882015
uccugugugguugaaucca

SEQ ID NO: 2088487 - RNA, 19 nt, Artificial Sequence
  Description of Artificial Sequence: Synthetic oligonucleotide
  Antisense strand to SEQ ID NO: 2088486
uggauucaaccacacagga

SEQ ID NO: 2088488 - RNA, 19 nt, Artificial Sequence
  Description of Artificial Sequence: Synthetic oligonucleotide
  Sense strand starting at position 789 of SEQ ID NO: 1882015
ugugguugaauccagagau

SEQ ID NO: 2088489 - RNA, 19 nt, Artificial Sequence
  Description of Artificial Sequence: Synthetic oligonucleotide
  Antisense strand to SEQ ID NO: 2088488
aucucuggauucaaccaca

SEQ ID NO: 2088490 - RNA, 19 nt, Artificial Sequence
  Description of Artificial Sequence: Synthetic oligonucleotide
  Sense strand starting at position 965 of SEQ ID NO: 1882015
caagcuuguggucaaaguu

SEQ ID NO: 2088491 - RNA, 19 nt, Artificial Sequence
  Description of Artificial Sequence: Synthetic oligonucleotide
  Antisense strand to SEQ ID NO: 2088490
aacuuugaccacaagcuug

SEQ ID NO: 2088492 - RNA, 19 nt, Artificial Sequence
  Description of Artificial Sequence: Synthetic oligonucleotide
  Sense strand starting at position 1086 of SEQ ID NO: 1882015
auggccuugcuauacagau

SEQ ID NO: 2088493 - RNA, 19 nt, Artificial Sequence
  Description of Artificial Sequence: Synthetic oligonucleotide
  Antisense strand to SEQ ID NO: 2088492
aucuguauagcaaggccau

SEQ ID NO: 2088494 - RNA, 19 nt, Artificial Sequence
  Description of Artificial Sequence: Synthetic oligonucleotide
  Sense strand starting at position 1092 of SEQ ID NO: 1882015
uugcuauacagaugggaaa

SEQ ID NO: 2088495 - RNA, 19 nt, Artificial Sequence
  Description of Artificial Sequence: Synthetic oligonucleotide
  Antisense strand to SEQ ID NO: 2088494
uuucccaucuguauagcaa

SEQ ID NO: 2088496 - RNA, 19 nt, Artificial Sequence
  Description of Artificial Sequence: Synthetic oligonucleotide
  Sense strand starting at position 1460 of SEQ ID NO: 1882015
gaagcuugggcugauagga

SEQ ID NO: 2088497 - RNA, 19 nt, Artificial Sequence
  Description of Artificial Sequence: Synthetic oligonucleotide
  Antisense strand to SEQ ID NO: 2088496
uccuaucagcccaagcuuc

SEQ ID NO: 2088498 - RNA, 19 nt, Artificial Sequence
  Description of Artificial Sequence: Synthetic oligonucleotide
  Sense strand starting at position 1579 of SEQ ID NO: 1882015
cuggauggaugcuuagaga

SEQ ID NO: 2088499 - RNA, 19 nt, Artificial Sequence
  Description of Artificial Sequence: Synthetic oligonucleotide
  Antisense strand to SEQ ID NO: 2088498
ucucuaagcauccauccag

SEQ ID NO: 2088500 - RNA, 19 nt, Artificial Sequence
  Description of Artificial Sequence: Synthetic oligonucleotide
  Sense strand starting at position 1639 of SEQ ID NO: 1882015
cagagaaucuguguccaga

SEQ ID NO: 2088501 - RNA, 19 nt, Artificial Sequence
  Description of Artificial Sequence: Synthetic oligonucleotide
  Antisense strand to SEQ ID NO: 2088500
ucuggacacagauucucug

SEQ ID NO: 2088502 - RNA, 19 nt, Artificial Sequence
  Description of Artificial Sequence: Synthetic oligonucleotide
  Sense strand starting at position 1641 of SEQ ID NO: 1882015
gagaaucuguguccagaaa

SEQ ID NO: 2088503 - RNA, 19 nt, Artificial Sequence
  Description of Artificial Sequence: Synthetic oligonucleotide
  Antisense strand to SEQ ID NO: 2088502
uuucuggacacagauucuc

SEQ ID NO: 2088504 - RNA, 19 nt, Artificial Sequence
  Description of Artificial Sequence: Synthetic oligonucleotide
  Sense strand starting at position 1989 of SEQ ID NO: 1882015
ccuuauaugagcugaagag

SEQ ID NO: 2088505 - RNA, 19 nt, Artificial Sequence
  Description of Artificial Sequence: Synthetic oligonucleotide
  Antisense strand to SEQ ID NO: 2088504
cucuucagcucauauaagg

SEQ ID NO: 2088506 - RNA, 19 nt, Artificial Sequence
  Description of Artificial Sequence: Synthetic oligonucleotide
  Sense strand starting at position 2225 of SEQ ID NO: 1882015
uguggaagucauuaagccu

SEQ ID NO: 2088507 - RNA, 19 nt, Artificial Sequence
  Description of Artificial Sequence: Synthetic oligonucleotide
  Antisense strand to SEQ ID NO: 2088506
aggcuuaaugacuuccaca

SEQ ID NO: 2088508 - RNA, 19 nt, Artificial Sequence
  Description of Artificial Sequence: Synthetic oligonucleotide
  Sense strand starting at position 2231 of SEQ ID NO: 1882015
agucauuaagccugagaag

SEQ ID NO: 2088509 - RNA, 19 nt, Artificial Sequence
  Description of Artificial Sequence: Synthetic oligonucleotide
  Antisense strand to SEQ ID NO: 2088508
cuucucaggcuuaaugacu

SEQ ID NO: 2088510 - RNA, 19 nt, Artificial Sequence
  Description of Artificial Sequence: Synthetic oligonucleotide
  Sense strand starting at position 2354 of SEQ ID NO: 1882015
aguugucagccugggaaca

SEQ ID NO: 2088511 - RNA, 19 nt, Artificial Sequence
  Description of Artificial Sequence: Synthetic oligonucleotide
  Antisense strand to SEQ ID NO: 2088510
uguucccaggcugacaacu

SEQ ID NO: 2088512 - RNA, 19 nt, Artificial Sequence
  Description of Artificial Sequence: Synthetic oligonucleotide
  Sense strand starting at position 2355 of SEQ ID NO: 1882015
guugucagccugggaacaa

SEQ ID NO: 2088513 - RNA, 19 nt, Artificial Sequence
  Description of Artificial Sequence: Synthetic oligonucleotide
  Antisense strand to SEQ ID NO: 2088512
uuguucccaggcugacaac

SEQ ID NO: 2088514 - RNA, 19 nt, Artificial Sequence
  Description of Artificial Sequence: Synthetic oligonucleotide
  Sense strand starting at position 2374 of SEQ ID NO: 1882015
gagcaaacucccugggaga

SEQ ID NO: 2088515 - RNA, 19 nt, Artificial Sequence
  Description of Artificial Sequence: Synthetic oligonucleotide
  Antisense strand to SEQ ID NO: 2088514
ucucccagggaguuugcuc

SEQ ID NO: 2088516 - RNA, 19 nt, Artificial Sequence
  Description of Artificial Sequence: Synthetic oligonucleotide
  Sense strand starting at position 2375 of SEQ ID NO: 1882015
agcaaacucccugggagaa

SEQ ID NO: 2088517 - RNA, 19 nt, Artificial Sequence
  Description of Artificial Sequence: Synthetic oligonucleotide
  Antisense strand to SEQ ID NO: 2088516
uucucccagggaguuugcu

SEQ ID NO: 2088518 - RNA, 19 nt, Artificial Sequence
  Description of Artificial Sequence: Synthetic oligonucleotide
  Sense strand starting at position 2376 of SEQ ID NO: 1882015
gcaaacucccugggagaaa

SEQ ID NO: 2088519 - RNA, 19 nt, Artificial Sequence
  Description of Artificial Sequence: Synthetic oligonucleotide
  Antisense strand to SEQ ID NO: 2088518
uuucucccagggaguuugc

SEQ ID NO: 2088520 - RNA, 19 nt, Artificial Sequence
  Description of Artificial Sequence: Synthetic oligonucleotide
  Sense strand starting at position 2387 of SEQ ID NO: 1882015
gggagaaagcugugugaga

SEQ ID NO: 2088521 - RNA, 19 nt, Artificial Sequence
  Description of Artificial Sequence: Synthetic oligonucleotide
  Antisense strand to SEQ ID NO: 2088520
ucucacacagcuuucuccc

SEQ ID NO: 2088522 - RNA, 19 nt, Artificial Sequence
  Description of Artificial Sequence: Synthetic oligonucleotide
  Sense strand starting at position 2388 of SEQ ID NO: 1882015
ggagaaagcugugugagaa

SEQ ID NO: 2088523 - RNA, 19 nt, Artificial Sequence
  Description of Artificial Sequence: Synthetic oligonucleotide
  Antisense strand to SEQ ID NO: 2088522
uucucacacagcuuucucc

SEQ ID NO: 2088524 - RNA, 19 nt, Artificial Sequence
  Description of Artificial Sequence: Synthetic oligonucleotide
  Sense strand starting at position 2389 of SEQ ID NO: 1882015
gagaaagcugugugagaau

SEQ ID NO: 2088525 - RNA, 19 nt, Artificial Sequence
  Description of Artificial Sequence: Synthetic oligonucleotide
  Antisense strand to SEQ ID NO: 2088524
auucucacacagcuuucuc

SEQ ID NO: 2088526 - RNA, 19 nt, Artificial Sequence
  Description of Artificial Sequence: Synthetic oligonucleotide
  Sense strand starting at position 2452 of SEQ ID NO: 1882015
uucugagacuuucugggaa

SEQ ID NO: 2088527 - RNA, 19 nt, Artificial Sequence
  Description of Artificial Sequence: Synthetic oligonucleotide
  Antisense strand to SEQ ID NO: 2088526
uucccagaaagucucagaa

SEQ ID NO: 2088528 - RNA, 19 nt, Artificial Sequence
  Description of Artificial Sequence: Synthetic oligonucleotide
  Sense strand starting at position 2455 of SEQ ID NO: 1882015
ugagacuuucugggaaccu

SEQ ID NO: 2088529 - RNA, 19 nt, Artificial Sequence
  Description of Artificial Sequence: Synthetic oligonucleotide
  Antisense strand to SEQ ID NO: 2088528
agguucccagaaagucuca

SEQ ID NO: 2088530 - RNA, 19 nt, Artificial Sequence
  Description of Artificial Sequence: Synthetic oligonucleotide
  Sense strand starting at position 2700 of SEQ ID NO: 1882015
caccgcaguccugagaaau

SEQ ID NO: 2088531 - RNA, 19 nt, Artificial Sequence
  Description of Artificial Sequence: Synthetic oligonucleotide
  Antisense strand to SEQ ID NO: 2088530
auuucucaggacugcggug

SEQ ID NO: 2088532 - RNA, 19 nt, Artificial Sequence
  Description of Artificial Sequence: Synthetic oligonucleotide
  Sense strand starting at position 2710 of SEQ ID NO: 1882015
cugagaaaugcccaucucu

SEQ ID NO: 2088533 - RNA, 19 nt, Artificial Sequence
  Description of Artificial Sequence: Synthetic oligonucleotide
  Antisense strand to SEQ ID NO: 2088532
agagaugggcauuucucag

SEQ ID NO: 2088534 - RNA, 19 nt, Artificial Sequence
  Description of Artificial Sequence: Synthetic oligonucleotide
  Sense strand starting at position 2772 of SEQ ID NO: 1882015
ccuacagauucuuuagugu

SEQ ID NO: 2088535 - RNA, 19 nt, Artificial Sequence
  Description of Artificial Sequence: Synthetic oligonucleotide
  Antisense strand to SEQ ID NO: 2088534
acacuaaagaaucuguagg

SEQ ID NO: 2088536 - RNA, 19 nt, Artificial Sequence
  Description of Artificial Sequence: Synthetic oligonucleotide
  Sense strand starting at position 2889 of SEQ ID NO: 1882015
ucagaagucuccucuggaa

SEQ ID NO: 2088537 - RNA, 19 nt, Artificial Sequence
  Description of Artificial Sequence: Synthetic oligonucleotide
  Antisense strand to SEQ ID NO: 2088536
uuccagaggagacuucuga

SEQ ID NO: 2088538 - RNA, 19 nt, Artificial Sequence
  Description of Artificial Sequence: Synthetic oligonucleotide
  Sense strand starting at position 2891 of SEQ ID NO: 1882015
agaagucuccucuggaaga

SEQ ID NO: 2088539 - RNA, 19 nt, Artificial Sequence
  Description of Artificial Sequence: Synthetic oligonucleotide
  Antisense strand to SEQ ID NO: 2088538
ucuuccagaggagacuucu

SEQ ID NO: 2088540 - RNA, 19 nt, Artificial Sequence
  Description of Artificial Sequence: Synthetic oligonucleotide
  Sense strand starting at position 3075 of SEQ ID NO: 1882015
ccuagagugucugugaaga

SEQ ID NO: 2088541 - RNA, 19 nt, Artificial Sequence
  Description of Artificial Sequence: Synthetic oligonucleotide
  Antisense strand to SEQ ID NO: 2088540
ucuucacagacacucuagg

SEQ ID NO: 2088542 - RNA, 19 nt, Artificial Sequence
  Description of Artificial Sequence: Synthetic oligonucleotide
  Sense strand starting at position 3576 of SEQ ID NO: 1882015
agaauucuguugguguuga

SEQ ID NO: 2088543 - RNA, 19 nt, Artificial Sequence
  Description of Artificial Sequence: Synthetic oligonucleotide
  Antisense strand to SEQ ID NO: 2088542
ucaacaccaacagaauucu

SEQ ID NO: 2088544 - RNA, 19 nt, Artificial Sequence
  Description of Artificial Sequence: Synthetic oligonucleotide
  Sense strand starting at position 3776 of SEQ ID NO: 1882015
gcaggacucgagugagacu

SEQ ID NO: 2088545 - RNA, 19 nt, Artificial Sequence
  Description of Artificial Sequence: Synthetic oligonucleotide
  Antisense strand to SEQ ID NO: 2088544
agucucacucgaguccugc

SEQ ID NO: 2088546 - RNA, 19 nt, Artificial Sequence
  Description of Artificial Sequence: Synthetic oligonucleotide
  Sense strand starting at position 3888 of SEQ ID NO: 1882015
cagagucaaugguugugaa

SEQ ID NO: 2088547 - RNA, 19 nt, Artificial Sequence
  Description of Artificial Sequence: Synthetic oligonucleotide
  Antisense strand to SEQ ID NO: 2088546
uucacaaccauugacucug

SEQ ID NO: 2088548 - RNA, 19 nt, Artificial Sequence
  Description of Artificial Sequence: Synthetic oligonucleotide
  Sense strand starting at position 3889 of SEQ ID NO: 1882015
agagucaaugguugugaag

SEQ ID NO: 2088549 - RNA, 19 nt, Artificial Sequence
  Description of Artificial Sequence: Synthetic oligonucleotide
  Antisense strand to SEQ ID NO: 2088548
cuucacaaccauugacucu

SEQ ID NO: 2088550 - RNA, 19 nt, Artificial Sequence
  Description of Artificial Sequence: Synthetic oligonucleotide
  Sense strand starting at position 3930 of SEQ ID NO: 1882015
gagugagugcuugaucgau

SEQ ID NO: 2088551 - RNA, 19 nt, Artificial Sequence
  Description of Artificial Sequence: Synthetic oligonucleotide
  Antisense strand to SEQ ID NO: 2088550
aucgaucaagcacucacuc

SEQ ID NO: 2088552 - RNA, 19 nt, Artificial Sequence
  Description of Artificial Sequence: Synthetic oligonucleotide
  Sense strand starting at position 3934 of SEQ ID NO: 1882015
gagugcuugaucgauguaa

SEQ ID NO: 2088553 - RNA, 19 nt, Artificial Sequence
  Description of Artificial Sequence: Synthetic oligonucleotide
  Antisense strand to SEQ ID NO: 2088552
uuacaucgaucaagcacuc

SEQ ID NO: 2088554 - RNA, 19 nt, Artificial Sequence
  Description of Artificial Sequence: Synthetic oligonucleotide
  Sense strand starting at position 3943 of SEQ ID NO: 1882015
aucgauguaagcuaugacu

SEQ ID NO: 2088555 - RNA, 19 nt, Artificial Sequence
  Description of Artificial Sequence: Synthetic oligonucleotide
  Antisense strand to SEQ ID NO: 2088554
agucauagcuuacaucgau

SEQ ID NO: 2088556 - RNA, 19 nt, Artificial Sequence
  Description of Artificial Sequence: Synthetic oligonucleotide
  Sense strand starting at position 119 of SEQ ID NO: 1882016
ggacaaggccuaugaaagu

SEQ ID NO: 2088557 - RNA, 19 nt, Artificial Sequence
  Description of Artificial Sequence: Synthetic oligonucleotide
  Antisense strand to SEQ ID NO: 2088556
acuuucauaggccuugucc

SEQ ID NO: 2088558 - RNA, 19 nt, Artificial Sequence
  Description of Artificial Sequence: Synthetic oligonucleotide
  Sense strand starting at position 125 of SEQ ID NO: 1882016
ggccuaugaaaguguuuag

SEQ ID NO: 2088559 - RNA, 19 nt, Artificial Sequence
  Description of Artificial Sequence: Synthetic oligonucleotide
  Antisense strand to SEQ ID NO: 2088558
cuaaacacuuucauaggcc

SEQ ID NO: 2088560 - RNA, 19 nt, Artificial Sequence
  Description of Artificial Sequence: Synthetic oligonucleotide
  Sense strand starting at position 128 of SEQ ID NO: 1882016
cuaugaaaguguuuagcac

SEQ ID NO: 2088561 - RNA, 19 nt, Artificial Sequence
  Description of Artificial Sequence: Synthetic oligonucleotide
  Antisense strand to SEQ ID NO: 2088560
gugcuaaacacuuucauag

SEQ ID NO: 2088562 - RNA, 19 nt, Artificial Sequence
  Description of Artificial Sequence: Synthetic oligonucleotide
  Sense strand starting at position 154 of SEQ ID NO: 1882016
ggcagaucgugaccaguca

SEQ ID NO: 2088563 - RNA, 19 nt, Artificial Sequence
  Description of Artificial Sequence: Synthetic oligonucleotide
  Antisense strand to SEQ ID NO: 2088562
ugacuggucacgaucugcc

SEQ ID NO: 2088564 - RNA, 19 nt, Artificial Sequence
  Description of Artificial Sequence: Synthetic oligonucleotide
  Sense strand starting at position 270 of SEQ ID NO: 1882016
uucaaugcggccugugaga

SEQ ID NO: 2088565 - RNA, 19 nt, Artificial Sequence
  Description of Artificial Sequence: Synthetic oligonucleotide
  Antisense strand to SEQ ID NO: 2088564
ucucacaggccgcauugaa

SEQ ID NO: 2088566 - RNA, 19 nt, Artificial Sequence
  Description of Artificial Sequence: Synthetic oligonucleotide
  Sense strand starting at position 272 of SEQ ID NO: 1882016
caaugcggccugugagaaa

SEQ ID NO: 2088567 - RNA, 19 nt, Artificial Sequence
  Description of Artificial Sequence: Synthetic oligonucleotide
  Antisense strand to SEQ ID NO: 2088566
uuucucacaggccgcauug

SEQ ID NO: 2088568 - RNA, 19 nt, Artificial Sequence
  Description of Artificial Sequence: Synthetic oligonucleotide
  Sense strand starting at position 315 of SEQ ID NO: 1882016
cugccuagucucuggcaau

SEQ ID NO: 2088569 - RNA, 19 nt, Artificial Sequence
  Description of Artificial Sequence: Synthetic oligonucleotide
  Antisense strand to SEQ ID NO: 2088568
auugccagagacuaggcag

SEQ ID NO: 2088570 - RNA, 19 nt, Artificial Sequence
  Description of Artificial Sequence: Synthetic oligonucleotide
  Sense strand starting at position 1046 of SEQ ID NO: 1882016
ggccauuggacuugaaauc

SEQ ID NO: 2088571 - RNA, 19 nt, Artificial Sequence
  Description of Artificial Sequence: Synthetic oligonucleotide
  Antisense strand to SEQ ID NO: 2088570
gauuucaaguccaauggcc

SEQ ID NO: 2088572 - RNA, 19 nt, Artificial Sequence
  Description of Artificial Sequence: Synthetic oligonucleotide
  Sense strand starting at position 1150 of SEQ ID NO: 1882016
uaaggagggcuuugaggau

SEQ ID NO: 2088573 - RNA, 19 nt, Artificial Sequence
  Description of Artificial Sequence: Synthetic oligonucleotide
  Antisense strand to SEQ ID NO: 2088572
auccucaaagcccuccuua

SEQ ID NO: 2088574 - RNA, 19 nt, Artificial Sequence
  Description of Artificial Sequence: Synthetic oligonucleotide
  Sense strand starting at position 1156 of SEQ ID NO: 1882016
gggcuuugaggaugaacca

SEQ ID NO: 2088575 - RNA, 19 nt, Artificial Sequence
  Description of Artificial Sequence: Synthetic oligonucleotide
  Antisense strand to SEQ ID NO: 2088574
ugguucauccucaaagccc

SEQ ID NO: 2088576 - RNA, 19 nt, Artificial Sequence
  Description of Artificial Sequence: Synthetic oligonucleotide
  Sense strand starting at position 1314 of SEQ ID NO: 1882016
guguguccaacgucuugua

SEQ ID NO: 2088577 - RNA, 19 nt, Artificial Sequence
  Description of Artificial Sequence: Synthetic oligonucleotide
  Antisense strand to SEQ ID NO: 2088576
uacaagacguuggacacac

SEQ ID NO: 2088578 - RNA, 19 nt, Artificial Sequence
  Description of Artificial Sequence: Synthetic oligonucleotide
  Sense strand starting at position 1340 of SEQ ID NO: 1882016
uagcaaucaccauguguag

SEQ ID NO: 2088579 - RNA, 19 nt, Artificial Sequence
  Description of Artificial Sequence: Synthetic oligonucleotide
  Antisense strand to SEQ ID NO: 2088578
cuacacauggugauugcua

SEQ ID NO: 2088580 - RNA, 19 nt, Artificial Sequence
  Description of Artificial Sequence: Synthetic oligonucleotide
  Sense strand starting at position 1366 of SEQ ID NO: 1882016
gccauaguguuccuagggu

SEQ ID NO: 2088581 - RNA, 19 nt, Artificial Sequence
  Description of Artificial Sequence: Synthetic oligonucleotide
  Antisense strand to SEQ ID NO: 2088580
acccuaggaacacuauggc

SEQ ID NO: 2088582 - RNA, 19 nt, Artificial Sequence
  Description of Artificial Sequence: Synthetic oligonucleotide
  Sense strand starting at position 1538 of SEQ ID NO: 1882016
uguguuuacuaguuuauca

SEQ ID NO: 2088583 - RNA, 19 nt, Artificial Sequence
  Description of Artificial Sequence: Synthetic oligonucleotide
  Antisense strand to SEQ ID NO: 2088582
ugauaaacuaguaaacaca

SEQ ID NO: 2088584 - RNA, 19 nt, Artificial Sequence
  Description of Artificial Sequence: Synthetic oligonucleotide
  Sense strand starting at position 1540 of SEQ ID NO: 1882016
uguuuacuaguuuaucagu

SEQ ID NO: 2088585 - RNA, 19 nt, Artificial Sequence
  Description of Artificial Sequence: Synthetic oligonucleotide
  Antisense strand to SEQ ID NO: 2088584
acugauaaacuaguaaaca

SEQ ID NO: 2088586 - RNA, 19 nt, Artificial Sequence
  Description of Artificial Sequence: Synthetic oligonucleotide
  Sense strand starting at position 1542 of SEQ ID NO: 1882016
uuuacuaguuuaucaguca

SEQ ID NO: 2088587 - RNA, 19 nt, Artificial Sequence
  Description of Artificial Sequence: Synthetic oligonucleotide
  Antisense strand to SEQ ID NO: 2088586
ugacugauaaacuaguaaa

SEQ ID NO: 2088588 - RNA, 19 nt, Artificial Sequence
  Description of Artificial Sequence: Synthetic oligonucleotide
  Sense strand starting at position 1545 of SEQ ID NO: 1882016
acuaguuuaucagucaugu

SEQ ID NO: 2088589 - RNA, 19 nt, Artificial Sequence
  Description of Artificial Sequence: Synthetic oligonucleotide
  Antisense strand to SEQ ID NO: 2088588
acaugacugauaaacuagu

SEQ ID NO: 2088590 - RNA, 19 nt, Artificial Sequence
  Description of Artificial Sequence: Synthetic oligonucleotide
  Sense strand starting at position 1553 of SEQ ID NO: 1882016
aucagucauguggaugcaa

SEQ ID NO: 2088591 - RNA, 19 nt, Artificial Sequence
  Description of Artificial Sequence: Synthetic oligonucleotide
  Antisense strand to SEQ ID NO: 2088590
uugcauccacaugacugau

SEQ ID NO: 2088592 - RNA, 19 nt, Artificial Sequence
  Description of Artificial Sequence: Synthetic oligonucleotide
  Sense strand starting at position 1555 of SEQ ID NO: 1882016
cagucauguggaugcaaua

SEQ ID NO: 2088593 - RNA, 19 nt, Artificial Sequence
  Description of Artificial Sequence: Synthetic oligonucleotide
  Antisense strand to SEQ ID NO: 2088592
uauugcauccacaugacug

SEQ ID NO: 2088594 - RNA, 19 nt, Artificial Sequence
  Description of Artificial Sequence: Synthetic oligonucleotide
  Sense strand starting at position 1685 of SEQ ID NO: 1882016
ggacaaauuucccaagagu

SEQ ID NO: 2088595 - RNA, 19 nt, Artificial Sequence
  Description of Artificial Sequence: Synthetic oligonucleotide
  Antisense strand to SEQ ID NO: 2088594
acucuugggaaauuugucc

SEQ ID NO: 2088596 - RNA, 19 nt, Artificial Sequence
  Description of Artificial Sequence: Synthetic oligonucleotide
  Sense strand starting at position 1737 of SEQ ID NO: 1882016
cagggauguuaugaaauag

SEQ ID NO: 2088597 - RNA, 19 nt, Artificial Sequence
  Description of Artificial Sequence: Synthetic oligonucleotide
  Antisense strand to SEQ ID NO: 2088596
cuauuucauaacaucccug

SEQ ID NO: 2088598 - RNA, 19 nt, Artificial Sequence
  Description of Artificial Sequence: Synthetic oligonucleotide
  Sense strand starting at position 1819 of SEQ ID NO: 1882016
gggacagccuucuucuuga

SEQ ID NO: 2088599 - RNA, 19 nt, Artificial Sequence
  Description of Artificial Sequence: Synthetic oligonucleotide
  Antisense strand to SEQ ID NO: 2088598
ucaagaagaaggcuguccc

SEQ ID NO: 2088600 - RNA, 19 nt, Artificial Sequence
  Description of Artificial Sequence: Synthetic oligonucleotide
  Sense strand starting at position 1897 of SEQ ID NO: 1882016
ggcaaauccagcugugaaa

SEQ ID NO: 2088601 - RNA, 19 nt, Artificial Sequence
  Description of Artificial Sequence: Synthetic oligonucleotide
  Antisense strand to SEQ ID NO: 2088600
uuucacagcuggauuugcc

SEQ ID NO: 2088602 - RNA, 19 nt, Artificial Sequence
  Description of Artificial Sequence: Synthetic oligonucleotide
  Sense strand starting at position 2136 of SEQ ID NO: 1882016
gggaguagugaccggaacu

SEQ ID NO: 2088603 - RNA, 19 nt, Artificial Sequence
  Description of Artificial Sequence: Synthetic oligonucleotide
  Antisense strand to SEQ ID NO: 2088602
aguuccggucacuacuccc

SEQ ID NO: 2088604 - RNA, 19 nt, Artificial Sequence
  Description of Artificial Sequence: Synthetic oligonucleotide
  Sense strand starting at position 2137 of SEQ ID NO: 1882016
ggaguagugaccggaacuu

SEQ ID NO: 2088605 - RNA, 19 nt, Artificial Sequence
  Description of Artificial Sequence: Synthetic oligonucleotide
  Antisense strand to SEQ ID NO: 2088604
aaguuccggucacuacucc

SEQ ID NO: 2088606 - RNA, 19 nt, Artificial Sequence
  Description of Artificial Sequence: Synthetic oligonucleotide
  Sense strand starting at position 2433 of SEQ ID NO: 1882016
gaaggaagccuguaguauu

SEQ ID NO: 2088607 - RNA, 19 nt, Artificial Sequence
  Description of Artificial Sequence: Synthetic oligonucleotide
  Antisense strand to SEQ ID NO: 2088606
aauacuacaggcuuccuuc

SEQ ID NO: 2088608 - RNA, 19 nt, Artificial Sequence
  Description of Artificial Sequence: Synthetic oligonucleotide
  Sense strand starting at position 2443 of SEQ ID NO: 1882016
uguaguauuaauggcaagu

SEQ ID NO: 2088609 - RNA, 19 nt, Artificial Sequence
  Description of Artificial Sequence: Synthetic oligonucleotide
  Antisense strand to SEQ ID NO: 2088608
acuugccauuaauacuaca

SEQ ID NO: 2088610 - RNA, 19 nt, Artificial Sequence
  Description of Artificial Sequence: Synthetic oligonucleotide
  Sense strand starting at position 2465 of SEQ ID NO: 1882016
cgggucugucuuugcuaaa

SEQ ID NO: 2088611 - RNA, 19 nt, Artificial Sequence
  Description of Artificial Sequence: Synthetic oligonucleotide
  Antisense strand to SEQ ID NO: 2088610
uuuagcaaagacagacccg

SEQ ID NO: 2088612 - RNA, 19 nt, Artificial Sequence
  Description of Artificial Sequence: Synthetic oligonucleotide
  Sense strand starting at position 2643 of SEQ ID NO: 1882016
aggugagcugcuuaaauaa

SEQ ID NO: 2088613 - RNA, 19 nt, Artificial Sequence
  Description of Artificial Sequence: Synthetic oligonucleotide
  Antisense strand to SEQ ID NO: 2088612
uuauuuaagcagcucaccu

SEQ ID NO: 2088614 - RNA, 19 nt, Artificial Sequence
  Description of Artificial Sequence: Synthetic oligonucleotide
  Sense strand starting at position 2727 of SEQ ID NO: 1882016
guuaaaugagacugugcuu

SEQ ID NO: 2088615 - RNA, 19 nt, Artificial Sequence
  Description of Artificial Sequence: Synthetic oligonucleotide
  Antisense strand to SEQ ID NO: 2088614
aagcacagucucauuuaac

SEQ ID NO: 2088616 - RNA, 19 nt, Artificial Sequence
  Description of Artificial Sequence: Synthetic oligonucleotide
  Sense strand starting at position 2767 of SEQ ID NO: 1882016
ugcucauugugcuucugaa

SEQ ID NO: 2088617 - RNA, 19 nt, Artificial Sequence
  Description of Artificial Sequence: Synthetic oligonucleotide
  Antisense strand to SEQ ID NO: 2088616
uucagaagcacaaugagca

SEQ ID NO: 2088618 - RNA, 19 nt, Artificial Sequence
  Description of Artificial Sequence: Synthetic oligonucleotide
  Sense strand starting at position 2779 of SEQ ID NO: 1882016
uucugaagccucugggaga

SEQ ID NO: 2088619 - RNA, 19 nt, Artificial Sequence
  Description of Artificial Sequence: Synthetic oligonucleotide
  Antisense strand to SEQ ID NO: 2088618
ucucccagaggcuucagaa

SEQ ID NO: 2088620 - RNA, 19 nt, Artificial Sequence
  Description of Artificial Sequence: Synthetic oligonucleotide
  Sense strand starting at position 2864 of SEQ ID NO: 1882016
gagugaagacccugacuca

SEQ ID NO: 2088621 - RNA, 19 nt, Artificial Sequence
  Description of Artificial Sequence: Synthetic oligonucleotide
  Antisense strand to SEQ ID NO: 2088620
ugagucagggucuucacuc

SEQ ID NO: 2088622 - RNA, 19 nt, Artificial Sequence
  Description of Artificial Sequence: Synthetic oligonucleotide
  Sense strand starting at position 2920 of SEQ ID NO: 1882016
uuaggaauuguuugaucca

SEQ ID NO: 2088623 - RNA, 19 nt, Artificial Sequence
  Description of Artificial Sequence: Synthetic oligonucleotide
  Antisense strand to SEQ ID NO: 2088622
uggaucaaacaauuccuaa

SEQ ID NO: 2088624 - RNA, 19 nt, Artificial Sequence
  Description of Artificial Sequence: Synthetic oligonucleotide
  Sense strand starting at position 2921 of SEQ ID NO: 1882016
uaggaauuguuugauccac

SEQ ID NO: 2088625 - RNA, 19 nt, Artificial Sequence
  Description of Artificial Sequence: Synthetic oligonucleotide
  Antisense strand to SEQ ID NO: 2088624
guggaucaaacaauuccua

SEQ ID NO: 2088626 - RNA, 19 nt, Artificial Sequence
  Description of Artificial Sequence: Synthetic oligonucleotide
  Sense strand starting at position 2923 of SEQ ID NO: 1882016
ggaauuguuugauccacaa

SEQ ID NO: 2088627 - RNA, 19 nt, Artificial Sequence
  Description of Artificial Sequence: Synthetic oligonucleotide
  Antisense strand to SEQ ID NO: 2088626
uuguggaucaaacaauucc

SEQ ID NO: 2088628 - RNA, 19 nt, Artificial Sequence
  Description of Artificial Sequence: Synthetic oligonucleotide
  Sense strand starting at position 2987 of SEQ ID NO: 1882016
gggcucauuguugaggauu

SEQ ID NO: 2088629 - RNA, 19 nt, Artificial Sequence
  Description of Artificial Sequence: Synthetic oligonucleotide
  Antisense strand to SEQ ID NO: 2088628
aauccucaacaaugagccc

SEQ ID NO: 2088630 - RNA, 19 nt, Artificial Sequence
  Description of Artificial Sequence: Synthetic oligonucleotide
  Sense strand starting at position 3410 of SEQ ID NO: 1882016
augcuaacgccucaugcua

SEQ ID NO: 2088631 - RNA, 19 nt, Artificial Sequence
  Description of Artificial Sequence: Synthetic oligonucleotide
  Antisense strand to SEQ ID NO: 2088630
uagcaugaggcguuagcau

SEQ ID NO: 2088632 - RNA, 19 nt, Artificial Sequence
  Description of Artificial Sequence: Synthetic oligonucleotide
  Sense strand starting at position 3499 of SEQ ID NO: 1882016
gggaacuuguguagaggaa

SEQ ID NO: 2088633 - RNA, 19 nt, Artificial Sequence
  Description of Artificial Sequence: Synthetic oligonucleotide
  Antisense strand to SEQ ID NO: 2088632
uuccucuacacaaguuccc

SEQ ID NO: 2088634 - RNA, 19 nt, Artificial Sequence
  Description of Artificial Sequence: Synthetic oligonucleotide
  Sense strand starting at position 3528 of SEQ ID NO: 1882016
aucacaaguggcugauagu

SEQ ID NO: 2088635 - RNA, 19 nt, Artificial Sequence
  Description of Artificial Sequence: Synthetic oligonucleotide
  Antisense strand to SEQ ID NO: 2088634
acuaucagccacuugugau

SEQ ID NO: 2088636 - RNA, 19 nt, Artificial Sequence
  Description of Artificial Sequence: Synthetic oligonucleotide
  Sense strand starting at position 36 of SEQ ID NO: 1882017
agauaaccauuguuagcaa

SEQ ID NO: 2088637 - RNA, 19 nt, Artificial Sequence
  Description of Artificial Sequence: Synthetic oligonucleotide
  Antisense strand to SEQ ID NO: 2088636
uugcuaacaaugguuaucu

SEQ ID NO: 2088638 - RNA, 19 nt, Artificial Sequence
  Description of Artificial Sequence: Synthetic oligonucleotide
  Sense strand starting at position 73 of SEQ ID NO: 1882017
acacacguauuccuacaua

SEQ ID NO: 2088639 - RNA, 19 nt, Artificial Sequence
  Description of Artificial Sequence: Synthetic oligonucleotide
  Antisense strand to SEQ ID NO: 2088638
uauguaggaauacgugugu

SEQ ID NO: 2088640 - RNA, 19 nt, Artificial Sequence
  Description of Artificial Sequence: Synthetic oligonucleotide
  Sense strand starting at position 353 of SEQ ID NO: 1882017
uuagguuugcuuuaggaag

SEQ ID NO: 2088641 - RNA, 19 nt, Artificial Sequence
  Description of Artificial Sequence: Synthetic oligonucleotide
  Antisense strand to SEQ ID NO: 2088640
cuuccuaaagcaaaccuaa

SEQ ID NO: 2088642 - RNA, 19 nt, Artificial Sequence
  Description of Artificial Sequence: Synthetic oligonucleotide
  Sense strand starting at position 411 of SEQ ID NO: 1882017
ggaguucugagccaaaguc

SEQ ID NO: 2088643 - RNA, 19 nt, Artificial Sequence
  Description of Artificial Sequence: Synthetic oligonucleotide
  Antisense strand to SEQ ID NO: 2088642
gacuuuggcucagaacucc

SEQ ID NO: 2088644 - RNA, 19 nt, Artificial Sequence
  Description of Artificial Sequence: Synthetic oligonucleotide
  Sense strand starting at position 449 of SEQ ID NO: 1882017
agcugaaacccagagcauu

SEQ ID NO: 2088645 - RNA, 19 nt, Artificial Sequence
  Description of Artificial Sequence: Synthetic oligonucleotide
  Antisense strand to SEQ ID NO: 2088644
aaugcucuggguuucagcu

SEQ ID NO: 2088646 - RNA, 19 nt, Artificial Sequence
  Description of Artificial Sequence: Synthetic oligonucleotide
  Sense strand starting at position 475 of SEQ ID NO: 1882017
ucuaguauauauucuggau

SEQ ID NO: 2088647 - RNA, 19 nt, Artificial Sequence
  Description of Artificial Sequence: Synthetic oligonucleotide
  Antisense strand to SEQ ID NO: 2088646
auccagaauauauacuaga

SEQ ID NO: 2088648 - RNA, 19 nt, Artificial Sequence
  Description of Artificial Sequence: Synthetic oligonucleotide
  Sense strand starting at position 558 of SEQ ID NO: 1882017
cugguucuggaaugaguca

SEQ ID NO: 2088649 - RNA, 19 nt, Artificial Sequence
  Description of Artificial Sequence: Synthetic oligonucleotide
  Antisense strand to SEQ ID NO: 2088648
ugacucauuccagaaccag

SEQ ID NO: 2088650 - RNA, 19 nt, Artificial Sequence
  Description of Artificial Sequence: Synthetic oligonucleotide
  Sense strand starting at position 565 of SEQ ID NO: 1882017
uggaaugagucacuggcua

SEQ ID NO: 2088651 - RNA, 19 nt, Artificial Sequence
  Description of Artificial Sequence: Synthetic oligonucleotide
  Antisense strand to SEQ ID NO: 2088650
uagccagugacucauucca

SEQ ID NO: 2088652 - RNA, 19 nt, Artificial Sequence
  Description of Artificial Sequence: Synthetic oligonucleotide
  Sense strand starting at position 578 of SEQ ID NO: 1882017
uggcuaagggucugauaag

SEQ ID NO: 2088653 - RNA, 19 nt, Artificial Sequence
  Description of Artificial Sequence: Synthetic oligonucleotide
  Antisense strand to SEQ ID NO: 2088652
cuuaucagacccuuagcca

SEQ ID NO: 2088654 - RNA, 19 nt, Artificial Sequence
  Description of Artificial Sequence: Synthetic oligonucleotide
  Sense strand starting at position 634 of SEQ ID NO: 1882017
ggagguccuugaucugauc

SEQ ID NO: 2088655 - RNA, 19 nt, Artificial Sequence
  Description of Artificial Sequence: Synthetic oligonucleotide
  Antisense strand to SEQ ID NO: 2088654
gaucagaucaaggaccucc

SEQ ID NO: 2088656 - RNA, 19 nt, Artificial Sequence
  Description of Artificial Sequence: Synthetic oligonucleotide
  Sense strand starting at position 640 of SEQ ID NO: 1882017
ccuugaucugaucaguaca

SEQ ID NO: 2088657 - RNA, 19 nt, Artificial Sequence
  Description of Artificial Sequence: Synthetic oligonucleotide
  Antisense strand to SEQ ID NO: 2088656
uguacugaucagaucaagg

SEQ ID NO: 2088658 - RNA, 19 nt, Artificial Sequence
  Description of Artificial Sequence: Synthetic oligonucleotide
  Sense strand starting at position 761 of SEQ ID NO: 1882017
gccauccuguuguuaauuu

SEQ ID NO: 2088659 - RNA, 19 nt, Artificial Sequence
  Description of Artificial Sequence: Synthetic oligonucleotide
  Antisense strand to SEQ ID NO: 2088658
aaauuaacaacaggauggc

SEQ ID NO: 2088660 - RNA, 19 nt, Artificial Sequence
  Description of Artificial Sequence: Synthetic oligonucleotide
  Sense strand starting at position 793 of SEQ ID NO: 1882017
agaugaggcuuggugagau

SEQ ID NO: 2088661 - RNA, 19 nt, Artificial Sequence
  Description of Artificial Sequence: Synthetic oligonucleotide
  Antisense strand to SEQ ID NO: 2088660
aucucaccaagccucaucu

SEQ ID NO: 2088662 - RNA, 19 nt, Artificial Sequence
  Description of Artificial Sequence: Synthetic oligonucleotide
  Sense strand starting at position 881 of SEQ ID NO: 1882017
cucggugucacugagaaga

SEQ ID NO: 2088663 - RNA, 19 nt, Artificial Sequence
  Description of Artificial Sequence: Synthetic oligonucleotide
  Antisense strand to SEQ ID NO: 2088662
ucuucucagugacaccgag

SEQ ID NO: 2088664 - RNA, 19 nt, Artificial Sequence
  Description of Artificial Sequence: Synthetic oligonucleotide
  Sense strand starting at position 976 of SEQ ID NO: 1882017
cuguaaugacauggaaauu

SEQ ID NO: 2088665 - RNA, 19 nt, Artificial Sequence
  Description of Artificial Sequence: Synthetic oligonucleotide
  Antisense strand to SEQ ID NO: 2088664
aauuuccaugucauuacag

SEQ ID NO: 2088666 - RNA, 19 nt, Artificial Sequence
  Description of Artificial Sequence: Synthetic oligonucleotide
  Sense strand starting at position 1100 of SEQ ID NO: 1882017
ucaugaggccucuaaccuu

SEQ ID NO: 2088667 - RNA, 19 nt, Artificial Sequence
  Description of Artificial Sequence: Synthetic oligonucleotide
  Antisense strand to SEQ ID NO: 2088666
aagguuagaggccucauga

SEQ ID NO: 2088668 - RNA, 19 nt, Artificial Sequence
  Description of Artificial Sequence: Synthetic oligonucleotide
  Sense strand starting at position 1224 of SEQ ID NO: 1882017
cugaccaugucagcaaaua

SEQ ID NO: 2088669 - RNA, 19 nt, Artificial Sequence
  Description of Artificial Sequence: Synthetic oligonucleotide
  Antisense strand to SEQ ID NO: 2088668
uauuugcugacauggucag

SEQ ID NO: 2088670 - RNA, 19 nt, Artificial Sequence
  Description of Artificial Sequence: Synthetic oligonucleotide
  Sense strand starting at position 1265 of SEQ ID NO: 1882017
auuccuguucccuggagaa

SEQ ID NO: 2088671 - RNA, 19 nt, Artificial Sequence
  Description of Artificial Sequence: Synthetic oligonucleotide
  Antisense strand to SEQ ID NO: 2088670
uucuccagggaacaggaau

SEQ ID NO: 2088672 - RNA, 19 nt, Artificial Sequence
  Description of Artificial Sequence: Synthetic oligonucleotide
  Sense strand starting at position 1267 of SEQ ID NO: 1882017
uccuguucccuggagaaac

SEQ ID NO: 2088673 - RNA, 19 nt, Artificial Sequence
  Description of Artificial Sequence: Synthetic oligonucleotide
  Antisense strand to SEQ ID NO: 2088672
guuucuccagggaacagga

SEQ ID NO: 2088674 - RNA, 19 nt, Artificial Sequence
  Description of Artificial Sequence: Synthetic oligonucleotide
  Sense strand starting at position 1281 of SEQ ID NO: 1882017
gaaacugaggauugcagua

SEQ ID NO: 2088675 - RNA, 19 nt, Artificial Sequence
  Description of Artificial Sequence: Synthetic oligonucleotide
  Antisense strand to SEQ ID NO: 2088674
uacugcaauccucaguuuc

SEQ ID NO: 2088676 - RNA, 19 nt, Artificial Sequence
  Description of Artificial Sequence: Synthetic oligonucleotide
  Sense strand starting at position 1296 of SEQ ID NO: 1882017
aguaaaguguaauuacaac

SEQ ID NO: 2088677 - RNA, 19 nt, Artificial Sequence
  Description of Artificial Sequence: Synthetic oligonucleotide
  Antisense strand to SEQ ID NO: 2088676
guuguaauuacacuuuacu

SEQ ID NO: 2088678 - RNA, 19 nt, Artificial Sequence
  Description of Artificial Sequence: Synthetic oligonucleotide
  Sense strand starting at position 1342 of SEQ ID NO: 1882017
gggacaauguagcccuaau

SEQ ID NO: 2088679 - RNA, 19 nt, Artificial Sequence
  Description of Artificial Sequence: Synthetic oligonucleotide
  Antisense strand to SEQ ID NO: 2088678
auuagggcuacauuguccc

SEQ ID NO: 2088680 - RNA, 19 nt, Artificial Sequence
  Description of Artificial Sequence: Synthetic oligonucleotide
  Sense strand starting at position 1485 of SEQ ID NO: 1882017
gcuaaagaaucauugucac

SEQ ID NO: 2088681 - RNA, 19 nt, Artificial Sequence
  Description of Artificial Sequence: Synthetic oligonucleotide
  Antisense strand to SEQ ID NO: 2088680
gugacaaugauucuuuagc

SEQ ID NO: 2088682 - RNA, 19 nt, Artificial Sequence
  Description of Artificial Sequence: Synthetic oligonucleotide
  Sense strand starting at position 1642 of SEQ ID NO: 1882017
gaaucaucguaaguaauca

SEQ ID NO: 2088683 - RNA, 19 nt, Artificial Sequence
  Description of Artificial Sequence: Synthetic oligonucleotide
  Antisense strand to SEQ ID NO: 2088682
ugauuacuuacgaugauuc

SEQ ID NO: 2088684 - RNA, 19 nt, Artificial Sequence
  Description of Artificial Sequence: Synthetic oligonucleotide
  Sense strand starting at position 1729 of SEQ ID NO: 1882017
cccugcuuagcauagaauu

SEQ ID NO: 2088685 - RNA, 19 nt, Artificial Sequence
  Description of Artificial Sequence: Synthetic oligonucleotide
  Antisense strand to SEQ ID NO: 2088684
aauucuaugcuaagcaggg

SEQ ID NO: 2088686 - RNA, 19 nt, Artificial Sequence
  Description of Artificial Sequence: Synthetic oligonucleotide
  Sense strand starting at position 2121 of SEQ ID NO: 1882017
ccuggcacucaugaguuau

SEQ ID NO: 2088687 - RNA, 19 nt, Artificial Sequence
  Description of Artificial Sequence: Synthetic oligonucleotide
  Antisense strand to SEQ ID NO: 2088686
auaacucaugagugccagg

SEQ ID NO: 2088688 - RNA, 19 nt, Artificial Sequence
  Description of Artificial Sequence: Synthetic oligonucleotide
  Sense strand starting at position 2123 of SEQ ID NO: 1882017
uggcacucaugaguuauaa

SEQ ID NO: 2088689 - RNA, 19 nt, Artificial Sequence
  Description of Artificial Sequence: Synthetic oligonucleotide
  Antisense strand to SEQ ID NO: 2088688
uuauaacucaugagugcca

SEQ ID NO: 2088690 - RNA, 19 nt, Artificial Sequence
  Description of Artificial Sequence: Synthetic oligonucleotide
  Sense strand starting at position 2693 of SEQ ID NO: 1882017
ugacaaagugcuggauaug

SEQ ID NO: 2088691 - RNA, 19 nt, Artificial Sequence
  Description of Artificial Sequence: Synthetic oligonucleotide
  Antisense strand to SEQ ID NO: 2088690
cauauccagcacuuuguca

SEQ ID NO: 2088692 - RNA, 19 nt, Artificial Sequence
  Description of Artificial Sequence: Synthetic oligonucleotide
  Sense strand starting at position 2702 of SEQ ID NO: 1882017
gcuggauaugagcaggagu

SEQ ID NO: 2088693 - RNA, 19 nt, Artificial Sequence
  Description of Artificial Sequence: Synthetic oligonucleotide
  Antisense strand to SEQ ID NO: 2088692
acuccugcucauauccagc

SEQ ID NO: 2088694 - RNA, 19 nt, Artificial Sequence
  Description of Artificial Sequence: Synthetic oligonucleotide
  Sense strand starting at position 2754 of SEQ ID NO: 1882017
aggcuuggacuguagacau

SEQ ID NO: 2088695 - RNA, 19 nt, Artificial Sequence
  Description of Artificial Sequence: Synthetic oligonucleotide
  Antisense strand to SEQ ID NO: 2088694
augucuacaguccaagccu

SEQ ID NO: 2088696 - RNA, 19 nt, Artificial Sequence
  Description of Artificial Sequence: Synthetic oligonucleotide
  Sense strand starting at position 2958 of SEQ ID NO: 1882017
guaagagcacuugaauguu

SEQ ID NO: 2088697 - RNA, 19 nt, Artificial Sequence
  Description of Artificial Sequence: Synthetic oligonucleotide
  Antisense strand to SEQ ID NO: 2088696
aacauucaagugcucuuac

SEQ ID NO: 2088698 - RNA, 19 nt, Artificial Sequence
  Description of Artificial Sequence: Synthetic oligonucleotide
  Sense strand starting at position 3480 of SEQ ID NO: 1882017
cuuauugagcuauagcuau

SEQ ID NO: 2088699 - RNA, 19 nt, Artificial Sequence
  Description of Artificial Sequence: Synthetic oligonucleotide
  Antisense strand to SEQ ID NO: 2088698
auagcuauagcucaauaag

SEQ ID NO: 2088700 - RNA, 19 nt, Artificial Sequence
  Description of Artificial Sequence: Synthetic oligonucleotide
  Sense strand starting at position 3668 of SEQ ID NO: 1882017
gggaaucacugaucuacgu

SEQ ID NO: 2088701 - RNA, 19 nt, Artificial Sequence
  Description of Artificial Sequence: Synthetic oligonucleotide
  Antisense strand to SEQ ID NO: 2088700
acguagaucagugauuccc

SEQ ID NO: 2088702 - RNA, 19 nt, Artificial Sequence
  Description of Artificial Sequence: Synthetic oligonucleotide
  Sense strand starting at position 3696 of SEQ ID NO: 1882017
auauaugcuggacaucuua

SEQ ID NO: 2088703 - RNA, 19 nt, Artificial Sequence
  Description of Artificial Sequence: Synthetic oligonucleotide
  Antisense strand to SEQ ID NO: 2088702
uaagauguccagcauauau

SEQ ID NO: 2088704 - RNA, 19 nt, Artificial Sequence
  Description of Artificial Sequence: Synthetic oligonucleotide
  Sense strand starting at position 3802 of SEQ ID NO: 1882017
aguacauccuuccuaugga

SEQ ID NO: 2088705 - RNA, 19 nt, Artificial Sequence
  Description of Artificial Sequence: Synthetic oligonucleotide
  Antisense strand to SEQ ID NO: 2088704
uccauaggaaggauguacu

SEQ ID NO: 2088706 - RNA, 19 nt, Artificial Sequence
  Description of Artificial Sequence: Synthetic oligonucleotide
  Sense strand starting at position 3805 of SEQ ID NO: 1882017
acauccuuccuauggauga

SEQ ID NO: 2088707 - RNA, 19 nt, Artificial Sequence
  Description of Artificial Sequence: Synthetic oligonucleotide
  Antisense strand to SEQ ID NO: 2088706
ucauccauaggaaggaugu

SEQ ID NO: 2088708 - RNA, 19 nt, Artificial Sequence
  Description of Artificial Sequence: Synthetic oligonucleotide
  Sense strand starting at position 3809 of SEQ ID NO: 1882017
ccuuccuauggaugaauaa

SEQ ID NO: 2088709 - RNA, 19 nt, Artificial Sequence
  Description of Artificial Sequence: Synthetic oligonucleotide
  Antisense strand to SEQ ID NO: 2088708
uuauucauccauaggaagg

SEQ ID NO: 2088710 - RNA, 19 nt, Artificial Sequence
  Description of Artificial Sequence: Synthetic oligonucleotide
  Sense strand starting at position 3824 of SEQ ID NO: 1882017
auaauauuccaucguuagg

SEQ ID NO: 2088711 - RNA, 19 nt, Artificial Sequence
  Description of Artificial Sequence: Synthetic oligonucleotide
  Antisense strand to SEQ ID NO: 2088710
ccuaacgauggaauauuau

SEQ ID NO: 2088712 - RNA, 19 nt, Artificial Sequence
  Description of Artificial Sequence: Synthetic oligonucleotide
  Sense strand starting at position 3826 of SEQ ID NO: 1882017
aauauuccaucguuaggau

SEQ ID NO: 2088713 - RNA, 19 nt, Artificial Sequence
  Description of Artificial Sequence: Synthetic oligonucleotide
  Antisense strand to SEQ ID NO: 2088712
auccuaacgauggaauauu

SEQ ID NO: 2088714 - RNA, 19 nt, Artificial Sequence
  Description of Artificial Sequence: Synthetic oligonucleotide
  Sense strand starting at position 3915 of SEQ ID NO: 1882017
ugcuucuaugaaugaauac

SEQ ID NO: 2088715 - RNA, 19 nt, Artificial Sequence
  Description of Artificial Sequence: Synthetic oligonucleotide
  Antisense strand to SEQ ID NO: 2088714
guauucauucauagaagca

SEQ ID NO: 2088716 - RNA, 19 nt, Artificial Sequence
  Description of Artificial Sequence: Synthetic oligonucleotide
  Sense strand starting at position 5 of SEQ ID NO: 1882018
ucccuaagaugaguggaau

SEQ ID NO: 2088717 - RNA, 19 nt, Artificial Sequence
  Description of Artificial Sequence: Synthetic oligonucleotide
  Antisense strand to SEQ ID NO: 2088716
auuccacucaucuuaggga

SEQ ID NO: 2088718 - RNA, 19 nt, Artificial Sequence
  Description of Artificial Sequence: Synthetic oligonucleotide
  Sense strand starting at position 101 of SEQ ID NO: 1882018
cagugaugugaauaagcaa

SEQ ID NO: 2088719 - RNA, 19 nt, Artificial Sequence
  Description of Artificial Sequence: Synthetic oligonucleotide
  Antisense strand to SEQ ID NO: 2088718
uugcuuauucacaucacug

SEQ ID NO: 2088720 - RNA, 19 nt, Artificial Sequence
  Description of Artificial Sequence: Synthetic oligonucleotide
  Sense strand starting at position 113 of SEQ ID NO: 1882018
uaagcaaagggucauaagu

SEQ ID NO: 2088721 - RNA, 19 nt, Artificial Sequence
  Description of Artificial Sequence: Synthetic oligonucleotide
  Antisense strand to SEQ ID NO: 2088720
acuuaugacccuuugcuua

SEQ ID NO: 2088722 - RNA, 19 nt, Artificial Sequence
  Description of Artificial Sequence: Synthetic oligonucleotide
  Sense strand starting at position 326 of SEQ ID NO: 1882018
gggaaauacccauggucug

SEQ ID NO: 2088723 - RNA, 19 nt, Artificial Sequence
  Description of Artificial Sequence: Synthetic oligonucleotide
  Antisense strand to SEQ ID NO: 2088722
cagaccauggguauuuccc

SEQ ID NO: 2088724 - RNA, 19 nt, Artificial Sequence
  Description of Artificial Sequence: Synthetic oligonucleotide
  Sense strand starting at position 327 of SEQ ID NO: 1882018
ggaaauacccauggucuga

SEQ ID NO: 2088725 - RNA, 19 nt, Artificial Sequence
  Description of Artificial Sequence: Synthetic oligonucleotide
  Antisense strand to SEQ ID NO: 2088724
ucagaccauggguauuucc

SEQ ID NO: 2088726 - RNA, 19 nt, Artificial Sequence
  Description of Artificial Sequence: Synthetic oligonucleotide
  Sense strand starting at position 383 of SEQ ID NO: 1882018
ccaguaaagcacugaugga

SEQ ID NO: 2088727 - RNA, 19 nt, Artificial Sequence
  Description of Artificial Sequence: Synthetic oligonucleotide
  Antisense strand to SEQ ID NO: 2088726
uccaucagugcuuuacugg

SEQ ID NO: 2088728 - RNA, 19 nt, Artificial Sequence
  Description of Artificial Sequence: Synthetic oligonucleotide
  Sense strand starting at position 517 of SEQ ID NO: 1882018
gaggauuugcucuguguua

SEQ ID NO: 2088729 - RNA, 19 nt, Artificial Sequence
  Description of Artificial Sequence: Synthetic oligonucleotide
  Antisense strand to SEQ ID NO: 2088728
uaacacagagcaaauccuc

SEQ ID NO: 2088730 - RNA, 19 nt, Artificial Sequence
  Description of Artificial Sequence: Synthetic oligonucleotide
  Sense strand starting at position 518 of SEQ ID NO: 1882018
aggauuugcucuguguuaa

SEQ ID NO: 2088731 - RNA, 19 nt, Artificial Sequence
  Description of Artificial Sequence: Synthetic oligonucleotide
  Antisense strand to SEQ ID NO: 2088730
uuaacacagagcaaauccu

SEQ ID NO: 2088732 - RNA, 19 nt, Artificial Sequence
  Description of Artificial Sequence: Synthetic oligonucleotide
  Sense strand starting at position 519 of SEQ ID NO: 1882018
ggauuugcucuguguuaaa

SEQ ID NO: 2088733 - RNA, 19 nt, Artificial Sequence
  Description of Artificial Sequence: Synthetic oligonucleotide
  Antisense strand to SEQ ID NO: 2088732
uuuaacacagagcaaaucc

SEQ ID NO: 2088734 - RNA, 19 nt, Artificial Sequence
  Description of Artificial Sequence: Synthetic oligonucleotide
  Sense strand starting at position 635 of SEQ ID NO: 1882018
gggagaguuuaagcaaauu

SEQ ID NO: 2088735 - RNA, 19 nt, Artificial Sequence
  Description of Artificial Sequence: Synthetic oligonucleotide
  Antisense strand to SEQ ID NO: 2088734
aauuugcuuaaacucuccc

SEQ ID NO: 2088736 - RNA, 19 nt, Artificial Sequence
  Description of Artificial Sequence: Synthetic oligonucleotide
  Sense strand starting at position 726 of SEQ ID NO: 1882018
uggguauuacagcaguaca

SEQ ID NO: 2088737 - RNA, 19 nt, Artificial Sequence
  Description of Artificial Sequence: Synthetic oligonucleotide
  Antisense strand to SEQ ID NO: 2088736
uguacugcuguaauaccca

SEQ ID NO: 2088738 - RNA, 19 nt, Artificial Sequence
  Description of Artificial Sequence: Synthetic oligonucleotide
  Sense strand starting at position 761 of SEQ ID NO: 1882018
aucagaugacccuggguaa

SEQ ID NO: 2088739 - RNA, 19 nt, Artificial Sequence
  Description of Artificial Sequence: Synthetic oligonucleotide
  Antisense strand to SEQ ID NO: 2088738
uuacccagggucaucugau

SEQ ID NO: 2088740 - RNA, 19 nt, Artificial Sequence
  Description of Artificial Sequence: Synthetic oligonucleotide
  Sense strand starting at position 764 of SEQ ID NO: 1882018
agaugacccuggguaaguu

SEQ ID NO: 2088741 - RNA, 19 nt, Artificial Sequence
  Description of Artificial Sequence: Synthetic oligonucleotide
  Antisense strand to SEQ ID NO: 2088740
aacuuacccagggucaucu

SEQ ID NO: 2088742 - RNA, 19 nt, Artificial Sequence
  Description of Artificial Sequence: Synthetic oligonucleotide
  Sense strand starting at position 957 of SEQ ID NO: 1882018
ucagauagacgagguaaua

SEQ ID NO: 2088743 - RNA, 19 nt, Artificial Sequence
  Description of Artificial Sequence: Synthetic oligonucleotide
  Antisense strand to SEQ ID NO: 2088742
uauuaccucgucuaucuga

SEQ ID NO: 2088744 - RNA, 19 nt, Artificial Sequence
  Description of Artificial Sequence: Synthetic oligonucleotide
  Sense strand starting at position 1259 of SEQ ID NO: 1882018
acguuaacugugcuuugca

SEQ ID NO: 2088745 - RNA, 19 nt, Artificial Sequence
  Description of Artificial Sequence: Synthetic oligonucleotide
  Antisense strand to SEQ ID NO: 2088744
ugcaaagcacaguuaacgu

SEQ ID NO: 2088746 - RNA, 19 nt, Artificial Sequence
  Description of Artificial Sequence: Synthetic oligonucleotide
  Sense strand starting at position 1335 of SEQ ID NO: 1882018
aaaguaugggaaugagguu

SEQ ID NO: 2088747 - RNA, 19 nt, Artificial Sequence
  Description of Artificial Sequence: Synthetic oligonucleotide
  Antisense strand to SEQ ID NO: 2088746
aaccucauucccauacuuu

SEQ ID NO: 2088748 - RNA, 19 nt, Artificial Sequence
  Description of Artificial Sequence: Synthetic oligonucleotide
  Sense strand starting at position 1601 of SEQ ID NO: 1882018
gagacacaguaguuucuga

SEQ ID NO: 2088749 - RNA, 19 nt, Artificial Sequence
  Description of Artificial Sequence: Synthetic oligonucleotide
  Antisense strand to SEQ ID NO: 2088748
ucagaaacuacugugucuc

SEQ ID NO: 2088750 - RNA, 19 nt, Artificial Sequence
  Description of Artificial Sequence: Synthetic oligonucleotide
  Sense strand starting at position 1612 of SEQ ID NO: 1882018
guuucugagcuugaaccua

SEQ ID NO: 2088751 - RNA, 19 nt, Artificial Sequence
  Description of Artificial Sequence: Synthetic oligonucleotide
  Antisense strand to SEQ ID NO: 2088750
uagguucaagcucagaaac

SEQ ID NO: 2088752 - RNA, 19 nt, Artificial Sequence
  Description of Artificial Sequence: Synthetic oligonucleotide
  Sense strand starting at position 1788 of SEQ ID NO: 1882018
gugaguugagacugggaga

SEQ ID NO: 2088753 - RNA, 19 nt, Artificial Sequence
  Description of Artificial Sequence: Synthetic oligonucleotide
  Antisense strand to SEQ ID NO: 2088752
ucucccagucucaacucac

SEQ ID NO: 2088754 - RNA, 19 nt, Artificial Sequence
  Description of Artificial Sequence: Synthetic oligonucleotide
  Sense strand starting at position 1915 of SEQ ID NO: 1882018
cggugcuugacagaaccau

SEQ ID NO: 2088755 - RNA, 19 nt, Artificial Sequence
  Description of Artificial Sequence: Synthetic oligonucleotide
  Antisense strand to SEQ ID NO: 2088754
augguucugucaagcaccg

SEQ ID NO: 2088756 - RNA, 19 nt, Artificial Sequence
  Description of Artificial Sequence: Synthetic oligonucleotide
  Sense strand starting at position 2250 of SEQ ID NO: 1882018
guuccuucccaaggaaaga

SEQ ID NO: 2088757 - RNA, 19 nt, Artificial Sequence
  Description of Artificial Sequence: Synthetic oligonucleotide
  Antisense strand to SEQ ID NO: 2088756
ucuuuccuugggaaggaac

SEQ ID NO: 2088758 - RNA, 19 nt, Artificial Sequence
  Description of Artificial Sequence: Synthetic oligonucleotide
  Sense strand starting at position 2293 of SEQ ID NO: 1882018
cuaucacaugccugaauug

SEQ ID NO: 2088759 - RNA, 19 nt, Artificial Sequence
  Description of Artificial Sequence: Synthetic oligonucleotide
  Antisense strand to SEQ ID NO: 2088758
caauucaggcaugugauag

SEQ ID NO: 2088760 - RNA, 19 nt, Artificial Sequence
  Description of Artificial Sequence: Synthetic oligonucleotide
  Sense strand starting at position 2498 of SEQ ID NO: 1882018
aaugcuguucuuuaggaaa

SEQ ID NO: 2088761 - RNA, 19 nt, Artificial Sequence
  Description of Artificial Sequence: Synthetic oligonucleotide
  Antisense strand to SEQ ID NO: 2088760
uuuccuaaagaacagcauu

SEQ ID NO: 2088762 - RNA, 19 nt, Artificial Sequence
  Description of Artificial Sequence: Synthetic oligonucleotide
  Sense strand starting at position 2541 of SEQ ID NO: 1882018
ucaggagucuccuuuauau

SEQ ID NO: 2088763 - RNA, 19 nt, Artificial Sequence
  Description of Artificial Sequence: Synthetic oligonucleotide
  Antisense strand to SEQ ID NO: 2088762
auauaaaggagacuccuga

SEQ ID NO: 2088764 - RNA, 19 nt, Artificial Sequence
  Description of Artificial Sequence: Synthetic oligonucleotide
  Sense strand starting at position 2561 of SEQ ID NO: 1882018
cuuugaggucagcaggaau

SEQ ID NO: 2088765 - RNA, 19 nt, Artificial Sequence
  Description of Artificial Sequence: Synthetic oligonucleotide
  Antisense strand to SEQ ID NO: 2088764
auuccugcugaccucaaag

SEQ ID NO: 2088766 - RNA, 19 nt, Artificial Sequence
  Description of Artificial Sequence: Synthetic oligonucleotide
  Sense strand starting at position 2616 of SEQ ID NO: 1882018
gguuuaauagaggagcagu

SEQ ID NO: 2088767 - RNA, 19 nt, Artificial Sequence
  Description of Artificial Sequence: Synthetic oligonucleotide
  Antisense strand to SEQ ID NO: 2088766
acugcuccucuauuaaacc

SEQ ID NO: 2088768 - RNA, 19 nt, Artificial Sequence
  Description of Artificial Sequence: Synthetic oligonucleotide
  Sense strand starting at position 2653 of SEQ ID NO: 1882018
auaucucucuagccagaga

SEQ ID NO: 2088769 - RNA, 19 nt, Artificial Sequence
  Description of Artificial Sequence: Synthetic oligonucleotide
  Antisense strand to SEQ ID NO: 2088768
ucucuggcuagagagauau

SEQ ID NO: 2088770 - RNA, 19 nt, Artificial Sequence
  Description of Artificial Sequence: Synthetic oligonucleotide
  Sense strand starting at position 2735 of SEQ ID NO: 1882018
guuugagaacacugacuuu

SEQ ID NO: 2088771 - RNA, 19 nt, Artificial Sequence
  Description of Artificial Sequence: Synthetic oligonucleotide
  Antisense strand to SEQ ID NO: 2088770
aaagucaguguucucaaac

SEQ ID NO: 2088772 - RNA, 19 nt, Artificial Sequence
  Description of Artificial Sequence: Synthetic oligonucleotide
  Sense strand starting at position 2871 of SEQ ID NO: 1882018
cuugauuucuuguucucuu

SEQ ID NO: 2088773 - RNA, 19 nt, Artificial Sequence
  Description of Artificial Sequence: Synthetic oligonucleotide
  Antisense strand to SEQ ID NO: 2088772
aagagaacaagaaaucaag

SEQ ID NO: 2088774 - RNA, 19 nt, Artificial Sequence
  Description of Artificial Sequence: Synthetic oligonucleotide
  Sense strand starting at position 2887 of SEQ ID NO: 1882018
cuuccuuagcuggaaauua

SEQ ID NO: 2088775 - RNA, 19 nt, Artificial Sequence
  Description of Artificial Sequence: Synthetic oligonucleotide
  Antisense strand to SEQ ID NO: 2088774
uaauuuccagcuaaggaag

SEQ ID NO: 2088776 - RNA, 19 nt, Artificial Sequence
  Description of Artificial Sequence: Synthetic oligonucleotide
  Sense strand starting at position 2998 of SEQ ID NO: 1882018
cagggucaguuuccaugaa

SEQ ID NO: 2088777 - RNA, 19 nt, Artificial Sequence
  Description of Artificial Sequence: Synthetic oligonucleotide
  Antisense strand to SEQ ID NO: 2088776
uucauggaaacugacccug

SEQ ID NO: 2088778 - RNA, 19 nt, Artificial Sequence
  Description of Artificial Sequence: Synthetic oligonucleotide
  Sense strand starting at position 3045 of SEQ ID NO: 1882018
ggcauuaggcuggagaugu

SEQ ID NO: 2088779 - RNA, 19 nt, Artificial Sequence
  Description of Artificial Sequence: Synthetic oligonucleotide
  Antisense strand to SEQ ID NO: 2088778
acaucuccagccuaaugcc

SEQ ID NO: 2088780 - RNA, 19 nt, Artificial Sequence
  Description of Artificial Sequence: Synthetic oligonucleotide
  Sense strand starting at position 3393 of SEQ ID NO: 1882018
augugaguuugauuaggac

SEQ ID NO: 2088781 - RNA, 19 nt, Artificial Sequence
  Description of Artificial Sequence: Synthetic oligonucleotide
  Antisense strand to SEQ ID NO: 2088780
guccuaaucaaacucacau

SEQ ID NO: 2088782 - RNA, 19 nt, Artificial Sequence
  Description of Artificial Sequence: Synthetic oligonucleotide
  Sense strand starting at position 3402 of SEQ ID NO: 1882018
ugauuaggacccugguaca

SEQ ID NO: 2088783 - RNA, 19 nt, Artificial Sequence
  Description of Artificial Sequence: Synthetic oligonucleotide
  Antisense strand to SEQ ID NO: 2088782
uguaccaggguccuaauca

SEQ ID NO: 2088784 - RNA, 19 nt, Artificial Sequence
  Description of Artificial Sequence: Synthetic oligonucleotide
  Sense strand starting at position 3530 of SEQ ID NO: 1882018
guagguaaauuaucaagag

SEQ ID NO: 2088785 - RNA, 19 nt, Artificial Sequence
  Description of Artificial Sequence: Synthetic oligonucleotide
  Antisense strand to SEQ ID NO: 2088784
cucuugauaauuuaccuac

SEQ ID NO: 2088786 - RNA, 19 nt, Artificial Sequence
  Description of Artificial Sequence: Synthetic oligonucleotide
  Sense strand starting at position 3534 of SEQ ID NO: 1882018
guaaauuaucaagagucuu

SEQ ID NO: 2088787 - RNA, 19 nt, Artificial Sequence
  Description of Artificial Sequence: Synthetic oligonucleotide
  Antisense strand to SEQ ID NO: 2088786
aagacucuugauaauuuac

SEQ ID NO: 2088788 - RNA, 19 nt, Artificial Sequence
  Description of Artificial Sequence: Synthetic oligonucleotide
  Sense strand starting at position 3692 of SEQ ID NO: 1882018
uucuguaauuccuugagag

SEQ ID NO: 2088789 - RNA, 19 nt, Artificial Sequence
  Description of Artificial Sequence: Synthetic oligonucleotide
  Antisense strand to SEQ ID NO: 2088788
cucucaaggaauuacagaa

SEQ ID NO: 2088790 - RNA, 19 nt, Artificial Sequence
  Description of Artificial Sequence: Synthetic oligonucleotide
  Sense strand starting at position 3694 of SEQ ID NO: 1882018
cuguaauuccuugagagcu

SEQ ID NO: 2088791 - RNA, 19 nt, Artificial Sequence
  Description of Artificial Sequence: Synthetic oligonucleotide
  Antisense strand to SEQ ID NO: 2088790
agcucucaaggaauuacag

SEQ ID NO: 2088792 - RNA, 19 nt, Artificial Sequence
  Description of Artificial Sequence: Synthetic oligonucleotide
  Sense strand starting at position 3895 of SEQ ID NO: 1882018
acuuaaucugauggucaga

SEQ ID NO: 2088793 - RNA, 19 nt, Artificial Sequence
  Description of Artificial Sequence: Synthetic oligonucleotide
  Antisense strand to SEQ ID NO: 2088792
ucugaccaucagauuaagu

SEQ ID NO: 2088794 - RNA, 19 nt, Artificial Sequence
  Description of Artificial Sequence: Synthetic oligonucleotide
  Sense strand starting at position 3897 of SEQ ID NO: 1882018
uuaaucugauggucagauu

SEQ ID NO: 2088795 - RNA, 19 nt, Artificial Sequence
  Description of Artificial Sequence: Synthetic oligonucleotide
  Antisense strand to SEQ ID NO: 2088794
aaucugaccaucagauuaa

SEQ ID NO: 2088796 - RNA, 19 nt, Artificial Sequence
  Description of Artificial Sequence: Synthetic oligonucleotide
  Sense strand starting at position 97 of SEQ ID NO: 1882019
ugauuugguuuauaaacag

SEQ ID NO: 2088797 - RNA, 19 nt, Artificial Sequence
  Description of Artificial Sequence: Synthetic oligonucleotide
  Antisense strand to SEQ ID NO: 2088796
cuguuuauaaaccaaauca

SEQ ID NO: 2088798 - RNA, 19 nt, Artificial Sequence
  Description of Artificial Sequence: Synthetic oligonucleotide
  Sense strand starting at position 142 of SEQ ID NO: 1882019
gcagaagcuucgccaauuu

SEQ ID NO: 2088799 - RNA, 19 nt, Artificial Sequence
  Description of Artificial Sequence: Synthetic oligonucleotide
  Antisense strand to SEQ ID NO: 2088798
aaauuggcgaagcuucugc

SEQ ID NO: 2088800 - RNA, 19 nt, Artificial Sequence
  Description of Artificial Sequence: Synthetic oligonucleotide
  Sense strand starting at position 301 of SEQ ID NO: 1882019
aaggaauguuugucccuca

SEQ ID NO: 2088801 - RNA, 19 nt, Artificial Sequence
  Description of Artificial Sequence: Synthetic oligonucleotide
  Antisense strand to SEQ ID NO: 2088800
ugagggacaaacauuccuu

SEQ ID NO: 2088802 - RNA, 19 nt, Artificial Sequence
  Description of Artificial Sequence: Synthetic oligonucleotide
  Sense strand starting at position 302 of SEQ ID NO: 1882019
aggaauguuugucccucaa

SEQ ID NO: 2088803 - RNA, 19 nt, Artificial Sequence
  Description of Artificial Sequence: Synthetic oligonucleotide
  Antisense strand to SEQ ID NO: 2088802
uugagggacaaacauuccu

SEQ ID NO: 2088804 - RNA, 19 nt, Artificial Sequence
  Description of Artificial Sequence: Synthetic oligonucleotide
  Sense strand starting at position 306 of SEQ ID NO: 1882019
auguuugucccucaacuaa

SEQ ID NO: 2088805 - RNA, 19 nt, Artificial Sequence
  Description of Artificial Sequence: Synthetic oligonucleotide
  Antisense strand to SEQ ID NO: 2088804
uuaguugagggacaaacau

SEQ ID NO: 2088806 - RNA, 19 nt, Artificial Sequence
  Description of Artificial Sequence: Synthetic oligonucleotide
  Sense strand starting at position 415 of SEQ ID NO: 1882019
acagacaaaugugcuugau

SEQ ID NO: 2088807 - RNA, 19 nt, Artificial Sequence
  Description of Artificial Sequence: Synthetic oligonucleotide
  Antisense strand to SEQ ID NO: 2088806
aucaagcacauuugucugu

SEQ ID NO: 2088808 - RNA, 19 nt, Artificial Sequence
  Description of Artificial Sequence: Synthetic oligonucleotide
  Sense strand starting at position 417 of SEQ ID NO: 1882019
agacaaaugugcuugaugu

SEQ ID NO: 2088809 - RNA, 19 nt, Artificial Sequence
  Description of Artificial Sequence: Synthetic oligonucleotide
  Antisense strand to SEQ ID NO: 2088808
acaucaagcacauuugucu

SEQ ID NO: 2088810 - RNA, 19 nt, Artificial Sequence
  Description of Artificial Sequence: Synthetic oligonucleotide
  Sense strand starting at position 595 of SEQ ID NO: 1882019
caaugaauguacuuguaug

SEQ ID NO: 2088811 - RNA, 19 nt, Artificial Sequence
  Description of Artificial Sequence: Synthetic oligonucleotide
  Antisense strand to SEQ ID NO: 2088810
cauacaaguacauucauug

SEQ ID NO: 2088812 - RNA, 19 nt, Artificial Sequence
  Description of Artificial Sequence: Synthetic oligonucleotide
  Sense strand starting at position 954 of SEQ ID NO: 1882019
caguguuggccacaucuua

SEQ ID NO: 2088813 - RNA, 19 nt, Artificial Sequence
  Description of Artificial Sequence: Synthetic oligonucleotide
  Antisense strand to SEQ ID NO: 2088812
uaagauguggccaacacug

SEQ ID NO: 2088814 - RNA, 19 nt, Artificial Sequence
  Description of Artificial Sequence: Synthetic oligonucleotide
  Sense strand starting at position 1017 of SEQ ID NO: 1882019
gaggaagcggagugcuaaa

SEQ ID NO: 2088815 - RNA, 19 nt, Artificial Sequence
  Description of Artificial Sequence: Synthetic oligonucleotide
  Antisense strand to SEQ ID NO: 2088814
uuuagcacuccgcuuccuc

SEQ ID NO: 2088816 - RNA, 19 nt, Artificial Sequence
  Description of Artificial Sequence: Synthetic oligonucleotide
  Sense strand starting at position 1170 of SEQ ID NO: 1882019
ucguuuccugaugacaaua

SEQ ID NO: 2088817 - RNA, 19 nt, Artificial Sequence
  Description of Artificial Sequence: Synthetic oligonucleotide
  Antisense strand to SEQ ID NO: 2088816
uauugucaucaggaaacga

SEQ ID NO: 2088818 - RNA, 19 nt, Artificial Sequence
  Description of Artificial Sequence: Synthetic oligonucleotide
  Sense strand starting at position 1211 of SEQ ID NO: 1882019
gccuaacuccaggaaagcu

SEQ ID NO: 2088819 - RNA, 19 nt, Artificial Sequence
  Description of Artificial Sequence: Synthetic oligonucleotide
  Antisense strand to SEQ ID NO: 2088818
agcuuuccuggaguuaggc

SEQ ID NO: 2088820 - RNA, 19 nt, Artificial Sequence
  Description of Artificial Sequence: Synthetic oligonucleotide
  Sense strand starting at position 1331 of SEQ ID NO: 1882019
aguacacauuauguguuua

SEQ ID NO: 2088821 - RNA, 19 nt, Artificial Sequence
  Description of Artificial Sequence: Synthetic oligonucleotide
  Antisense strand to SEQ ID NO: 2088820
uaaacacauaauguguacu

SEQ ID NO: 2088822 - RNA, 19 nt, Artificial Sequence
  Description of Artificial Sequence: Synthetic oligonucleotide
  Sense strand starting at position 1358 of SEQ ID NO: 1882019
agucaaucccagugauaac

SEQ ID NO: 2088823 - RNA, 19 nt, Artificial Sequence
  Description of Artificial Sequence: Synthetic oligonucleotide
  Antisense strand to SEQ ID NO: 2088822
guuaucacugggauugacu

SEQ ID NO: 2088824 - RNA, 19 nt, Artificial Sequence
  Description of Artificial Sequence: Synthetic oligonucleotide
  Sense strand starting at position 1368 of SEQ ID NO: 1882019
agugauaacaguuggaaau

SEQ ID NO: 2088825 - RNA, 19 nt, Artificial Sequence
  Description of Artificial Sequence: Synthetic oligonucleotide
  Antisense strand to SEQ ID NO: 2088824
auuuccaacuguuaucacu

SEQ ID NO: 2088826 - RNA, 19 nt, Artificial Sequence
  Description of Artificial Sequence: Synthetic oligonucleotide
  Sense strand starting at position 1369 of SEQ ID NO: 1882019
gugauaacaguuggaaauu

SEQ ID NO: 2088827 - RNA, 19 nt, Artificial Sequence
  Description of Artificial Sequence: Synthetic oligonucleotide
  Antisense strand to SEQ ID NO: 2088826
aauuuccaacuguuaucac

SEQ ID NO: 2088828 - RNA, 19 nt, Artificial Sequence
  Description of Artificial Sequence: Synthetic oligonucleotide
  Sense strand starting at position 1468 of SEQ ID NO: 1882019
cagagacuuguguaaacuc

SEQ ID NO: 2088829 - RNA, 19 nt, Artificial Sequence
  Description of Artificial Sequence: Synthetic oligonucleotide
  Antisense strand to SEQ ID NO: 2088828
gaguuuacacaagucucug

SEQ ID NO: 2088830 - RNA, 19 nt, Artificial Sequence
  Description of Artificial Sequence: Synthetic oligonucleotide
  Sense strand starting at position 1760 of SEQ ID NO: 1882019
ggaauagaaguuugcucca

SEQ ID NO: 2088831 - RNA, 19 nt, Artificial Sequence
  Description of Artificial Sequence: Synthetic oligonucleotide
  Antisense strand to SEQ ID NO: 2088830
uggagcaaacuucuauucc

SEQ ID NO: 2088832 - RNA, 19 nt, Artificial Sequence
  Description of Artificial Sequence: Synthetic oligonucleotide
  Sense strand starting at position 1762 of SEQ ID NO: 1882019
aauagaaguuugcuccagu

SEQ ID NO: 2088833 - RNA, 19 nt, Artificial Sequence
  Description of Artificial Sequence: Synthetic oligonucleotide
  Antisense strand to SEQ ID NO: 2088832
acuggagcaaacuucuauu

SEQ ID NO: 2088834 - RNA, 19 nt, Artificial Sequence
  Description of Artificial Sequence: Synthetic oligonucleotide
  Sense strand starting at position 1765 of SEQ ID NO: 1882019
agaaguuugcuccaguuga

SEQ ID NO: 2088835 - RNA, 19 nt, Artificial Sequence
  Description of Artificial Sequence: Synthetic oligonucleotide
  Antisense strand to SEQ ID NO: 2088834
ucaacuggagcaaacuucu

SEQ ID NO: 2088836 - RNA, 19 nt, Artificial Sequence
  Description of Artificial Sequence: Synthetic oligonucleotide
  Sense strand starting at position 1932 of SEQ ID NO: 1882019
gggcgcugucagccuuaau

SEQ ID NO: 2088837 - RNA, 19 nt, Artificial Sequence
  Description of Artificial Sequence: Synthetic oligonucleotide
  Antisense strand to SEQ ID NO: 2088836
auuaaggcugacagcgccc

SEQ ID NO: 2088838 - RNA, 19 nt, Artificial Sequence
  Description of Artificial Sequence: Synthetic oligonucleotide
  Sense strand starting at position 1933 of SEQ ID NO: 1882019
ggcgcugucagccuuaaug

SEQ ID NO: 2088839 - RNA, 19 nt, Artificial Sequence
  Description of Artificial Sequence: Synthetic oligonucleotide
  Antisense strand to SEQ ID NO: 2088838
cauuaaggcugacagcgcc

SEQ ID NO: 2088840 - RNA, 19 nt, Artificial Sequence
  Description of Artificial Sequence: Synthetic oligonucleotide
  Sense strand starting at position 2119 of SEQ ID NO: 1882019
gggaguccgcucgacacaa

SEQ ID NO: 2088841 - RNA, 19 nt, Artificial Sequence
  Description of Artificial Sequence: Synthetic oligonucleotide
  Antisense strand to SEQ ID NO: 2088840
uugugucgagcggacuccc

SEQ ID NO: 2088842 - RNA, 19 nt, Artificial Sequence
  Description of Artificial Sequence: Synthetic oligonucleotide
  Sense strand starting at position 2201 of SEQ ID NO: 1882019
acagcucuucgugcuugau

SEQ ID NO: 2088843 - RNA, 19 nt, Artificial Sequence
  Description of Artificial Sequence: Synthetic oligonucleotide
  Antisense strand to SEQ ID NO: 2088842
aucaagcacgaagagcugu

SEQ ID NO: 2088844 - RNA, 19 nt, Artificial Sequence
  Description of Artificial Sequence: Synthetic oligonucleotide
  Sense strand starting at position 2300 of SEQ ID NO: 1882019
acggaaagcucuuccagga

SEQ ID NO: 2088845 - RNA, 19 nt, Artificial Sequence
  Description of Artificial Sequence: Synthetic oligonucleotide
  Antisense strand to SEQ ID NO: 2088844
uccuggaagagcuuuccgu

SEQ ID NO: 2088846 - RNA, 19 nt, Artificial Sequence
  Description of Artificial Sequence: Synthetic oligonucleotide
  Sense strand starting at position 2304 of SEQ ID NO: 1882019
aaagcucuuccaggaaguu

SEQ ID NO: 2088847 - RNA, 19 nt, Artificial Sequence
  Description of Artificial Sequence: Synthetic oligonucleotide
  Antisense strand to SEQ ID NO: 2088846
aacuuccuggaagagcuuu

SEQ ID NO: 2088848 - RNA, 19 nt, Artificial Sequence
  Description of Artificial Sequence: Synthetic oligonucleotide
  Sense strand starting at position 2305 of SEQ ID NO: 1882019
aagcucuuccaggaaguua

SEQ ID NO: 2088849 - RNA, 19 nt, Artificial Sequence
  Description of Artificial Sequence: Synthetic oligonucleotide
  Antisense strand to SEQ ID NO: 2088848
uaacuuccuggaagagcuu

SEQ ID NO: 2088850 - RNA, 19 nt, Artificial Sequence
  Description of Artificial Sequence: Synthetic oligonucleotide
  Sense strand starting at position 2933 of SEQ ID NO: 1882019
acaauuaccucagcuaggu

SEQ ID NO: 2088851 - RNA, 19 nt, Artificial Sequence
  Description of Artificial Sequence: Synthetic oligonucleotide
  Antisense strand to SEQ ID NO: 2088850
accuagcugagguaauugu

SEQ ID NO: 2088852 - RNA, 19 nt, Artificial Sequence
  Description of Artificial Sequence: Synthetic oligonucleotide
  Sense strand starting at position 3002 of SEQ ID NO: 1882019
ggauuacgccuugaagugu

SEQ ID NO: 2088853 - RNA, 19 nt, Artificial Sequence
  Description of Artificial Sequence: Synthetic oligonucleotide
  Antisense strand to SEQ ID NO: 2088852
acacuucaaggcguaaucc

SEQ ID NO: 2088854 - RNA, 19 nt, Artificial Sequence
  Description of Artificial Sequence: Synthetic oligonucleotide
  Sense strand starting at position 3084 of SEQ ID NO: 1882019
caaagccgugacuacuaaa

SEQ ID NO: 2088855 - RNA, 19 nt, Artificial Sequence
  Description of Artificial Sequence: Synthetic oligonucleotide
  Antisense strand to SEQ ID NO: 2088854
uuuaguagucacggcuuug

SEQ ID NO: 2088856 - RNA, 19 nt, Artificial Sequence
  Description of Artificial Sequence: Synthetic oligonucleotide
  Sense strand starting at position 3152 of SEQ ID NO: 1882019
gcagguuaguugucaauuu

SEQ ID NO: 2088857 - RNA, 19 nt, Artificial Sequence
  Description of Artificial Sequence: Synthetic oligonucleotide
  Antisense strand to SEQ ID NO: 2088856
aaauugacaacuaaccugc

SEQ ID NO: 2088858 - RNA, 19 nt, Artificial Sequence
  Description of Artificial Sequence: Synthetic oligonucleotide
  Sense strand starting at position 3205 of SEQ ID NO: 1882019
gugguuucgauguaauacu

SEQ ID NO: 2088859 - RNA, 19 nt, Artificial Sequence
  Description of Artificial Sequence: Synthetic oligonucleotide
  Antisense strand to SEQ ID NO: 2088858
aguauuacaucgaaaccac

SEQ ID NO: 2088860 - RNA, 19 nt, Artificial Sequence
  Description of Artificial Sequence: Synthetic oligonucleotide
  Sense strand starting at position 3274 of SEQ ID NO: 1882019
gcggauaacacggaugcaa

SEQ ID NO: 2088861 - RNA, 19 nt, Artificial Sequence
  Description of Artificial Sequence: Synthetic oligonucleotide
  Antisense strand to SEQ ID NO: 2088860
uugcauccguguuauccgc

SEQ ID NO: 2088862 - RNA, 19 nt, Artificial Sequence
  Description of Artificial Sequence: Synthetic oligonucleotide
  Sense strand starting at position 3453 of SEQ ID NO: 1882019
guugaaaucucuuccuaga

SEQ ID NO: 2088863 - RNA, 19 nt, Artificial Sequence
  Description of Artificial Sequence: Synthetic oligonucleotide
  Antisense strand to SEQ ID NO: 2088862
ucuaggaagagauuucaac

SEQ ID NO: 2088864 - RNA, 19 nt, Artificial Sequence
  Description of Artificial Sequence: Synthetic oligonucleotide
  Sense strand starting at position 3472 of SEQ ID NO: 1882019
ucacucaauuaugcagaga

SEQ ID NO: 2088865 - RNA, 19 nt, Artificial Sequence
  Description of Artificial Sequence: Synthetic oligonucleotide
  Antisense strand to SEQ ID NO: 2088864
ucucugcauaauugaguga

SEQ ID NO: 2088866 - RNA, 19 nt, Artificial Sequence
  Description of Artificial Sequence: Synthetic oligonucleotide
  Sense strand starting at position 3548 of SEQ ID NO: 1882019
augauaauucuuuagucug

SEQ ID NO: 2088867 - RNA, 19 nt, Artificial Sequence
  Description of Artificial Sequence: Synthetic oligonucleotide
  Antisense strand to SEQ ID NO: 2088866
cagacuaaagaauuaucau

SEQ ID NO: 2088868 - RNA, 19 nt, Artificial Sequence
  Description of Artificial Sequence: Synthetic oligonucleotide
  Sense strand starting at position 3568 of SEQ ID NO: 1882019
aauaguaggucauugcuau

SEQ ID NO: 2088869 - RNA, 19 nt, Artificial Sequence
  Description of Artificial Sequence: Synthetic oligonucleotide
  Antisense strand to SEQ ID NO: 2088868
auagcaaugaccuacuauu

SEQ ID NO: 2088870 - RNA, 19 nt, Artificial Sequence
  Description of Artificial Sequence: Synthetic oligonucleotide
  Sense strand starting at position 3581 of SEQ ID NO: 1882019
ugcuaugguuacucuacaa

SEQ ID NO: 2088871 - RNA, 19 nt, Artificial Sequence
  Description of Artificial Sequence: Synthetic oligonucleotide
  Antisense strand to SEQ ID NO: 2088870
uuguagaguaaccauagca

SEQ ID NO: 2088872 - RNA, 19 nt, Artificial Sequence
  Description of Artificial Sequence: Synthetic oligonucleotide
  Sense strand starting at position 3720 of SEQ ID NO: 1882019
ggcugcugucggccagaga

SEQ ID NO: 2088873 - RNA, 19 nt, Artificial Sequence
  Description of Artificial Sequence: Synthetic oligonucleotide
  Antisense strand to SEQ ID NO: 2088872
ucucuggccgacagcagcc

SEQ ID NO: 2088874 - RNA, 19 nt, Artificial Sequence
  Description of Artificial Sequence: Synthetic oligonucleotide
  Sense strand starting at position 3773 of SEQ ID NO: 1882019
gggagcuggcccuacuaga

SEQ ID NO: 2088875 - RNA, 19 nt, Artificial Sequence
  Description of Artificial Sequence: Synthetic oligonucleotide
  Antisense strand to SEQ ID NO: 2088874
ucuaguagggccagcuccc

SEQ ID NO: 2088876 - RNA, 19 nt, Artificial Sequence
  Description of Artificial Sequence: Synthetic oligonucleotide
  Sense strand starting at position 79 of SEQ ID NO: 1882020
gcuagaucauaguuuauug

SEQ ID NO: 2088877 - RNA, 19 nt, Artificial Sequence
  Description of Artificial Sequence: Synthetic oligonucleotide
  Antisense strand to SEQ ID NO: 2088876
caauaaacuaugaucuagc

SEQ ID NO: 2088878 - RNA, 19 nt, Artificial Sequence
  Description of Artificial Sequence: Synthetic oligonucleotide
  Sense strand starting at position 703 of SEQ ID NO: 1882020
guauauucuggauguuacu

SEQ ID NO: 2088879 - RNA, 19 nt, Artificial Sequence
  Description of Artificial Sequence: Synthetic oligonucleotide
  Antisense strand to SEQ ID NO: 2088878
aguaacauccagaauauac

SEQ ID NO: 2088880 - RNA, 19 nt, Artificial Sequence
  Description of Artificial Sequence: Synthetic oligonucleotide
  Sense strand starting at position 709 of SEQ ID NO: 1882020
ucuggauguuacucccuua

SEQ ID NO: 2088881 - RNA, 19 nt, Artificial Sequence
  Description of Artificial Sequence: Synthetic oligonucleotide
  Antisense strand to SEQ ID NO: 2088880
uaagggaguaacauccaga

SEQ ID NO: 2088882 - RNA, 19 nt, Artificial Sequence
  Description of Artificial Sequence: Synthetic oligonucleotide
  Sense strand starting at position 716 of SEQ ID NO: 1882020
guuacucccuuaucagaua

SEQ ID NO: 2088883 - RNA, 19 nt, Artificial Sequence
  Description of Artificial Sequence: Synthetic oligonucleotide
  Antisense strand to SEQ ID NO: 2088882
uaucugauaagggaguaac

SEQ ID NO: 2088884 - RNA, 19 nt, Artificial Sequence
  Description of Artificial Sequence: Synthetic oligonucleotide
  Sense strand starting at position 753 of SEQ ID NO: 1882020
ucuucuauccuguaaguuu

SEQ ID NO: 2088885 - RNA, 19 nt, Artificial Sequence
  Description of Artificial Sequence: Synthetic oligonucleotide
  Antisense strand to SEQ ID NO: 2088884
aaacuuacaggauagaaga

SEQ ID NO: 2088886 - RNA, 19 nt, Artificial Sequence
  Description of Artificial Sequence: Synthetic oligonucleotide
  Sense strand starting at position 772 of SEQ ID NO: 1882020
uacucucuugauggugaga

SEQ ID NO: 2088887 - RNA, 19 nt, Artificial Sequence
  Description of Artificial Sequence: Synthetic oligonucleotide
  Antisense strand to SEQ ID NO: 2088886
ucucaccaucaagagagua

SEQ ID NO: 2088888 - RNA, 19 nt, Artificial Sequence
  Description of Artificial Sequence: Synthetic oligonucleotide
  Sense strand starting at position 1237 of SEQ ID NO: 1882020
uucuucuaagagugguaua

SEQ ID NO: 2088889 - RNA, 19 nt, Artificial Sequence
  Description of Artificial Sequence: Synthetic oligonucleotide
  Antisense strand to SEQ ID NO: 2088888
uauaccacucuuagaagaa

SEQ ID NO: 2088890 - RNA, 19 nt, Artificial Sequence
  Description of Artificial Sequence: Synthetic oligonucleotide
  Sense strand starting at position 1238 of SEQ ID NO: 1882020
ucuucuaagagugguauag

SEQ ID NO: 2088891 - RNA, 19 nt, Artificial Sequence
  Description of Artificial Sequence: Synthetic oligonucleotide
  Antisense strand to SEQ ID NO: 2088890
cuauaccacucuuagaaga

SEQ ID NO: 2088892 - RNA, 19 nt, Artificial Sequence
  Description of Artificial Sequence: Synthetic oligonucleotide
  Sense strand starting at position 1268 of SEQ ID NO: 1882020
aaguuuaggucuuugaucu

SEQ ID NO: 2088893 - RNA, 19 nt, Artificial Sequence
  Description of Artificial Sequence: Synthetic oligonucleotide
  Antisense strand to SEQ ID NO: 2088892
agaucaaagaccuaaacuu

SEQ ID NO: 2088894 - RNA, 19 nt, Artificial Sequence
  Description of Artificial Sequence: Synthetic oligonucleotide
  Sense strand starting at position 1269 of SEQ ID NO: 1882020
aguuuaggucuuugaucua

SEQ ID NO: 2088895 - RNA, 19 nt, Artificial Sequence
  Description of Artificial Sequence: Synthetic oligonucleotide
  Antisense strand to SEQ ID NO: 2088894
uagaucaaagaccuaaacu

SEQ ID NO: 2088896 - RNA, 19 nt, Artificial Sequence
  Description of Artificial Sequence: Synthetic oligonucleotide
  Sense strand starting at position 1439 of SEQ ID NO: 1882020
cucagagaaucacaggaaa

SEQ ID NO: 2088897 - RNA, 19 nt, Artificial Sequence
  Description of Artificial Sequence: Synthetic oligonucleotide
  Antisense strand to SEQ ID NO: 2088896
uuuccugugauucucugag

SEQ ID NO: 2088898 - RNA, 19 nt, Artificial Sequence
  Description of Artificial Sequence: Synthetic oligonucleotide
  Sense strand starting at position 1473 of SEQ ID NO: 1882020
uugaaauaagggcagcauu

SEQ ID NO: 2088899 - RNA, 19 nt, Artificial Sequence
  Description of Artificial Sequence: Synthetic oligonucleotide
  Antisense strand to SEQ ID NO: 2088898
aaugcugcccuuauuucaa

SEQ ID NO: 2088900 - RNA, 19 nt, Artificial Sequence
  Description of Artificial Sequence: Synthetic oligonucleotide
  Sense strand starting at position 1555 of SEQ ID NO: 1882020
augucagcugaucgaugaa

SEQ ID NO: 2088901 - RNA, 19 nt, Artificial Sequence
  Description of Artificial Sequence: Synthetic oligonucleotide
  Antisense strand to SEQ ID NO: 2088900
uucaucgaucagcugacau

SEQ ID NO: 2088902 - RNA, 19 nt, Artificial Sequence
  Description of Artificial Sequence: Synthetic oligonucleotide
  Sense strand starting at position 1790 of SEQ ID NO: 1882020
gcugauccuguuuaccaga

SEQ ID NO: 2088903 - RNA, 19 nt, Artificial Sequence
  Description of Artificial Sequence: Synthetic oligonucleotide
  Antisense strand to SEQ ID NO: 2088902
ucugguaaacaggaucagc

SEQ ID NO: 2088904 - RNA, 19 nt, Artificial Sequence
  Description of Artificial Sequence: Synthetic oligonucleotide
  Sense strand starting at position 1792 of SEQ ID NO: 1882020
ugauccuguuuaccagauu

SEQ ID NO: 2088905 - RNA, 19 nt, Artificial Sequence
  Description of Artificial Sequence: Synthetic oligonucleotide
  Antisense strand to SEQ ID NO: 2088904
aaucugguaaacaggauca

SEQ ID NO: 2088906 - RNA, 19 nt, Artificial Sequence
  Description of Artificial Sequence: Synthetic oligonucleotide
  Sense strand starting at position 1795 of SEQ ID NO: 1882020
uccuguuuaccagauuagu

SEQ ID NO: 2088907 - RNA, 19 nt, Artificial Sequence
  Description of Artificial Sequence: Synthetic oligonucleotide
  Antisense strand to SEQ ID NO: 2088906
acuaaucugguaaacagga

SEQ ID NO: 2088908 - RNA, 19 nt, Artificial Sequence
  Description of Artificial Sequence: Synthetic oligonucleotide
  Sense strand starting at position 1820 of SEQ ID NO: 1882020
ggugucuccguauaaauca

SEQ ID NO: 2088909 - RNA, 19 nt, Artificial Sequence
  Description of Artificial Sequence: Synthetic oligonucleotide
  Antisense strand to SEQ ID NO: 2088908
ugauuuauacggagacacc

SEQ ID NO: 2088910 - RNA, 19 nt, Artificial Sequence
  Description of Artificial Sequence: Synthetic oligonucleotide
  Sense strand starting at position 1831 of SEQ ID NO: 1882020
auaaaucacccagggugau

SEQ ID NO: 2088911 - RNA, 19 nt, Artificial Sequence
  Description of Artificial Sequence: Synthetic oligonucleotide
  Antisense strand to SEQ ID NO: 2088910
aucacccugggugauuuau

SEQ ID NO: 2088912 - RNA, 19 nt, Artificial Sequence
  Description of Artificial Sequence: Synthetic oligonucleotide
  Sense strand starting at position 1832 of SEQ ID NO: 1882020
uaaaucacccagggugauu

SEQ ID NO: 2088913 - RNA, 19 nt, Artificial Sequence
  Description of Artificial Sequence: Synthetic oligonucleotide
  Antisense strand to SEQ ID NO: 2088912
aaucacccugggugauuua

SEQ ID NO: 2088914 - RNA, 19 nt, Artificial Sequence
  Description of Artificial Sequence: Synthetic oligonucleotide
  Sense strand starting at position 1853 of SEQ ID NO: 1882020
cagggaggcccuggaaauu

SEQ ID NO: 2088915 - RNA, 19 nt, Artificial Sequence
  Description of Artificial Sequence: Synthetic oligonucleotide
  Antisense strand to SEQ ID NO: 2088914
aauuuccagggccucccug

SEQ ID NO: 2088916 - RNA, 19 nt, Artificial Sequence
  Description of Artificial Sequence: Synthetic oligonucleotide
  Sense strand starting at position 2007 of SEQ ID NO: 1882020
cuacaucccuguuuaaagu

SEQ ID NO: 2088917 - RNA, 19 nt, Artificial Sequence
  Description of Artificial Sequence: Synthetic oligonucleotide
  Antisense strand to SEQ ID NO: 2088916
acuuuaaacagggauguag

SEQ ID NO: 2088918 - RNA, 19 nt, Artificial Sequence
  Description of Artificial Sequence: Synthetic oligonucleotide
  Sense strand starting at position 2612 of SEQ ID NO: 1882020
gauagauaagguugcaauc

SEQ ID NO: 2088919 - RNA, 19 nt, Artificial Sequence
  Description of Artificial Sequence: Synthetic oligonucleotide
  Antisense strand to SEQ ID NO: 2088918
gauugcaaccuuaucuauc

SEQ ID NO: 2088920 - RNA, 19 nt, Artificial Sequence
  Description of Artificial Sequence: Synthetic oligonucleotide
  Sense strand starting at position 2936 of SEQ ID NO: 1882020
aguugcaaucuuuaugcaa

SEQ ID NO: 2088921 - RNA, 19 nt, Artificial Sequence
  Description of Artificial Sequence: Synthetic oligonucleotide
  Antisense strand to SEQ ID NO: 2088920
uugcauaaagauugcaacu

SEQ ID NO: 2088922 - RNA, 19 nt, Artificial Sequence
  Description of Artificial Sequence: Synthetic oligonucleotide
  Sense strand starting at position 3017 of SEQ ID NO: 1882020
ugacaugaaucauuguuua

SEQ ID NO: 2088923 - RNA, 19 nt, Artificial Sequence
  Description of Artificial Sequence: Synthetic oligonucleotide
  Antisense strand to SEQ ID NO: 2088922
uaaacaaugauucauguca

SEQ ID NO: 2088924 - RNA, 19 nt, Artificial Sequence
  Description of Artificial Sequence: Synthetic oligonucleotide
  Sense strand starting at position 3110 of SEQ ID NO: 1882020
gguuaauugacuugaccag

SEQ ID NO: 2088925 - RNA, 19 nt, Artificial Sequence
  Description of Artificial Sequence: Synthetic oligonucleotide
  Antisense strand to SEQ ID NO: 2088924
cuggucaagucaauuaacc

SEQ ID NO: 2088926 - RNA, 19 nt, Artificial Sequence
  Description of Artificial Sequence: Synthetic oligonucleotide
  Sense strand starting at position 3152 of SEQ ID NO: 1882020
cccaguagugaaggugaga

SEQ ID NO: 2088927 - RNA, 19 nt, Artificial Sequence
  Description of Artificial Sequence: Synthetic oligonucleotide
  Antisense strand to SEQ ID NO: 2088926
ucucaccuucacuacuggg

SEQ ID NO: 2088928 - RNA, 19 nt, Artificial Sequence
  Description of Artificial Sequence: Synthetic oligonucleotide
  Sense strand starting at position 3190 of SEQ ID NO: 1882020
cugucagagccaugaacuu

SEQ ID NO: 2088929 - RNA, 19 nt, Artificial Sequence
  Description of Artificial Sequence: Synthetic oligonucleotide
  Antisense strand to SEQ ID NO: 2088928
aaguucauggcucugacag

SEQ ID NO: 2088930 - RNA, 19 nt, Artificial Sequence
  Description of Artificial Sequence: Synthetic oligonucleotide
  Sense strand starting at position 3296 of SEQ ID NO: 1882020
ugguacaguguuuaagaga

SEQ ID NO: 2088931 - RNA, 19 nt, Artificial Sequence
  Description of Artificial Sequence: Synthetic oligonucleotide
  Antisense strand to SEQ ID NO: 2088930
ucucuuaaacacuguacca

SEQ ID NO: 2088932 - RNA, 19 nt, Artificial Sequence
  Description of Artificial Sequence: Synthetic oligonucleotide
  Sense strand starting at position 3301 of SEQ ID NO: 1882020
caguguuuaagagauggca

SEQ ID NO: 2088933 - RNA, 19 nt, Artificial Sequence
  Description of Artificial Sequence: Synthetic oligonucleotide
  Antisense strand to SEQ ID NO: 2088932
ugccaucucuuaaacacug

SEQ ID NO: 2088934 - RNA, 19 nt, Artificial Sequence
  Description of Artificial Sequence: Synthetic oligonucleotide
  Sense strand starting at position 3303 of SEQ ID NO: 1882020
guguuuaagagauggcauu

SEQ ID NO: 2088935 - RNA, 19 nt, Artificial Sequence
  Description of Artificial Sequence: Synthetic oligonucleotide
  Antisense strand to SEQ ID NO: 2088934
aaugccaucucuuaaacac

SEQ ID NO: 2088936 - RNA, 19 nt, Artificial Sequence
  Description of Artificial Sequence: Synthetic oligonucleotide
  Sense strand starting at position 3327 of SEQ ID NO: 1882020
uuggaaagccuaggaugua

SEQ ID NO: 2088937 - RNA, 19 nt, Artificial Sequence
  Description of Artificial Sequence: Synthetic oligonucleotide
  Antisense strand to SEQ ID NO: 2088936
uacauccuaggcuuuccaa

SEQ ID NO: 2088938 - RNA, 19 nt, Artificial Sequence
  Description of Artificial Sequence: Synthetic oligonucleotide
  Sense strand starting at position 3371 of SEQ ID NO: 1882020
uugugaugugggcaaauca

SEQ ID NO: 2088939 - RNA, 19 nt, Artificial Sequence
  Description of Artificial Sequence: Synthetic oligonucleotide
  Antisense strand to SEQ ID NO: 2088938
ugauuugcccacaucacaa

SEQ ID NO: 2088940 - RNA, 19 nt, Artificial Sequence
  Description of Artificial Sequence: Synthetic oligonucleotide
  Sense strand starting at position 3378 of SEQ ID NO: 1882020
gugggcaaaucacuuuauu

SEQ ID NO: 2088941 - RNA, 19 nt, Artificial Sequence
  Description of Artificial Sequence: Synthetic oligonucleotide
  Antisense strand to SEQ ID NO: 2088940
aauaaagugauuugcccac

SEQ ID NO: 2088942 - RNA, 19 nt, Artificial Sequence
  Description of Artificial Sequence: Synthetic oligonucleotide
  Sense strand starting at position 3464 of SEQ ID NO: 1882020
gcuggucuccugcugugua

SEQ ID NO: 2088943 - RNA, 19 nt, Artificial Sequence
  Description of Artificial Sequence: Synthetic oligonucleotide
  Antisense strand to SEQ ID NO: 2088942
uacacagcaggagaccagc

SEQ ID NO: 2088944 - RNA, 19 nt, Artificial Sequence
  Description of Artificial Sequence: Synthetic oligonucleotide
  Sense strand starting at position 3532 of SEQ ID NO: 1882020
ccaagcauguaguuaugaa

SEQ ID NO: 2088945 - RNA, 19 nt, Artificial Sequence
  Description of Artificial Sequence: Synthetic oligonucleotide
  Antisense strand to SEQ ID NO: 2088944
uucauaacuacaugcuugg

SEQ ID NO: 2088946 - RNA, 19 nt, Artificial Sequence
  Description of Artificial Sequence: Synthetic oligonucleotide
  Sense strand starting at position 3755 of SEQ ID NO: 1882020
agcuaugaaaccugaguga

SEQ ID NO: 2088947 - RNA, 19 nt, Artificial Sequence
  Description of Artificial Sequence: Synthetic oligonucleotide
  Antisense strand to SEQ ID NO: 2088946
ucacucagguuucauagcu

SEQ ID NO: 2088948 - RNA, 19 nt, Artificial Sequence
  Description of Artificial Sequence: Synthetic oligonucleotide
  Sense strand starting at position 3912 of SEQ ID NO: 1882020
auauuccuaucaguggaga

SEQ ID NO: 2088949 - RNA, 19 nt, Artificial Sequence
  Description of Artificial Sequence: Synthetic oligonucleotide
  Antisense strand to SEQ ID NO: 2088948
ucuccacugauaggaauau

SEQ ID NO: 2088950 - RNA, 19 nt, Artificial Sequence
  Description of Artificial Sequence: Synthetic oligonucleotide
  Sense strand starting at position 3913 of SEQ ID NO: 1882020
uauuccuaucaguggagau

SEQ ID NO: 2088951 - RNA, 19 nt, Artificial Sequence
  Description of Artificial Sequence: Synthetic oligonucleotide
  Antisense strand to SEQ ID NO: 2088950
aucuccacugauaggaaua

SEQ ID NO: 2088952 - RNA, 19 nt, Artificial Sequence
  Description of Artificial Sequence: Synthetic oligonucleotide
  Sense strand starting at position 3925 of SEQ ID NO: 1882020
uggagauaguaccuaauuc

SEQ ID NO: 2088953 - RNA, 19 nt, Artificial Sequence
  Description of Artificial Sequence: Synthetic oligonucleotide
  Antisense strand to SEQ ID NO: 2088952
gaauuagguacuaucucca

SEQ ID NO: 2088954 - RNA, 19 nt, Artificial Sequence
  Description of Artificial Sequence: Synthetic oligonucleotide
  Sense strand starting at position 3971 of SEQ ID NO: 1882020
augacugaaucauaacaga

SEQ ID NO: 2088955 - RNA, 19 nt, Artificial Sequence
  Description of Artificial Sequence: Synthetic oligonucleotide
  Antisense strand to SEQ ID NO: 2088954
ucuguuaugauucagucau

SEQ ID NO: 2088956 - RNA, 19 nt, Artificial Sequence
  Description of Artificial Sequence: Synthetic oligonucleotide
  Sense strand starting at position 124 of SEQ ID NO: 1882021
cuauaucuccagugaggca

SEQ ID NO: 2088957 - RNA, 19 nt, Artificial Sequence
  Description of Artificial Sequence: Synthetic oligonucleotide
  Antisense strand to SEQ ID NO: 2088956
ugccucacuggagauauag

SEQ ID NO: 2088958 - RNA, 19 nt, Artificial Sequence
  Description of Artificial Sequence: Synthetic oligonucleotide
  Sense strand starting at position 344 of SEQ ID NO: 1882021
gagcaauaugaaggucuuu

SEQ ID NO: 2088959 - RNA, 19 nt, Artificial Sequence
  Description of Artificial Sequence: Synthetic oligonucleotide
  Antisense strand to SEQ ID NO: 2088958
aaagaccuucauauugcuc

SEQ ID NO: 2088960 - RNA, 19 nt, Artificial Sequence
  Description of Artificial Sequence: Synthetic oligonucleotide
  Sense strand starting at position 389 of SEQ ID NO: 1882021
gcaugacugcuccauccau

SEQ ID NO: 2088961 - RNA, 19 nt, Artificial Sequence
  Description of Artificial Sequence: Synthetic oligonucleotide
  Antisense strand to SEQ ID NO: 2088960
auggauggagcagucaugc

SEQ ID NO: 2088962 - RNA, 19 nt, Artificial Sequence
  Description of Artificial Sequence: Synthetic oligonucleotide
  Sense strand starting at position 447 of SEQ ID NO: 1882021
guugcauuagaucaauaaa

SEQ ID NO: 2088963 - RNA, 19 nt, Artificial Sequence
  Description of Artificial Sequence: Synthetic oligonucleotide
  Antisense strand to SEQ ID NO: 2088962
uuuauugaucuaaugcaac

SEQ ID NO: 2088964 - RNA, 19 nt, Artificial Sequence
  Description of Artificial Sequence: Synthetic oligonucleotide
  Sense strand starting at position 490 of SEQ ID NO: 1882021
aguccuauuguguaacuau

SEQ ID NO: 2088965 - RNA, 19 nt, Artificial Sequence
  Description of Artificial Sequence: Synthetic oligonucleotide
  Antisense strand to SEQ ID NO: 2088964
auaguuacacaauaggacu

SEQ ID NO: 2088966 - RNA, 19 nt, Artificial Sequence
  Description of Artificial Sequence: Synthetic oligonucleotide
  Sense strand starting at position 500 of SEQ ID NO: 1882021
uguaacuauguugggcaaa

SEQ ID NO: 2088967 - RNA, 19 nt, Artificial Sequence
  Description of Artificial Sequence: Synthetic oligonucleotide
  Antisense strand to SEQ ID NO: 2088966
uuugcccaacauaguuaca

SEQ ID NO: 2088968 - RNA, 19 nt, Artificial Sequence
  Description of Artificial Sequence: Synthetic oligonucleotide
  Sense strand starting at position 502 of SEQ ID NO: 1882021
uaacuauguugggcaaaug

SEQ ID NO: 2088969 - RNA, 19 nt, Artificial Sequence
  Description of Artificial Sequence: Synthetic oligonucleotide
  Antisense strand to SEQ ID NO: 2088968
cauuugcccaacauaguua

SEQ ID NO: 2088970 - RNA, 19 nt, Artificial Sequence
  Description of Artificial Sequence: Synthetic oligonucleotide
  Sense strand starting at position 503 of SEQ ID NO: 1882021
aacuauguugggcaaaugu

SEQ ID NO: 2088971 - RNA, 19 nt, Artificial Sequence
  Description of Artificial Sequence: Synthetic oligonucleotide
  Antisense strand to SEQ ID NO: 2088970
acauuugcccaacauaguu

SEQ ID NO: 2088972 - RNA, 19 nt, Artificial Sequence
  Description of Artificial Sequence: Synthetic oligonucleotide
  Sense strand starting at position 518 of SEQ ID NO: 1882021
auguauaacuuguccuaug

SEQ ID NO: 2088973 - RNA, 19 nt, Artificial Sequence
  Description of Artificial Sequence: Synthetic oligonucleotide
  Antisense strand to SEQ ID NO: 2088972
cauaggacaaguuauacau

SEQ ID NO: 2088974 - RNA, 19 nt, Artificial Sequence
  Description of Artificial Sequence: Synthetic oligonucleotide
  Sense strand starting at position 519 of SEQ ID NO: 1882021
uguauaacuuguccuauga

SEQ ID NO: 2088975 - RNA, 19 nt, Artificial Sequence
  Description of Artificial Sequence: Synthetic oligonucleotide
  Antisense strand to SEQ ID NO: 2088974
ucauaggacaaguuauaca

SEQ ID NO: 2088976 - RNA, 19 nt, Artificial Sequence
  Description of Artificial Sequence: Synthetic oligonucleotide
  Sense strand starting at position 924 of SEQ ID NO: 1882021
uuagguaguaccuaacgua

SEQ ID NO: 2088977 - RNA, 19 nt, Artificial Sequence
  Description of Artificial Sequence: Synthetic oligonucleotide
  Antisense strand to SEQ ID NO: 2088976
uacguuagguacuaccuaa

SEQ ID NO: 2088978 - RNA, 19 nt, Artificial Sequence
  Description of Artificial Sequence: Synthetic oligonucleotide
  Sense strand starting at position 1083 of SEQ ID NO: 1882021
gugauccuccaguacugaa

SEQ ID NO: 2088979 - RNA, 19 nt, Artificial Sequence
  Description of Artificial Sequence: Synthetic oligonucleotide
  Antisense strand to SEQ ID NO: 2088978
uucaguacuggaggaucac

SEQ ID NO: 2088980 - RNA, 19 nt, Artificial Sequence
  Description of Artificial Sequence: Synthetic oligonucleotide
  Sense strand starting at position 1132 of SEQ ID NO: 1882021
cccuuauaaccaugaggug

SEQ ID NO: 2088981 - RNA, 19 nt, Artificial Sequence
  Description of Artificial Sequence: Synthetic oligonucleotide
  Antisense strand to SEQ ID NO: 2088980
caccucaugguuauaaggg

SEQ ID NO: 2088982 - RNA, 19 nt, Artificial Sequence
  Description of Artificial Sequence: Synthetic oligonucleotide
  Sense strand starting at position 1150 of SEQ ID NO: 1882021
gacuuccugcaaggugaaa

SEQ ID NO: 2088983 - RNA, 19 nt, Artificial Sequence
  Description of Artificial Sequence: Synthetic oligonucleotide
  Antisense strand to SEQ ID NO: 2088982
uuucaccuugcaggaaguc

SEQ ID NO: 2088984 - RNA, 19 nt, Artificial Sequence
  Description of Artificial Sequence: Synthetic oligonucleotide
  Sense strand starting at position 1297 of SEQ ID NO: 1882021
gcagaaacugauggcuaga

SEQ ID NO: 2088985 - RNA, 19 nt, Artificial Sequence
  Description of Artificial Sequence: Synthetic oligonucleotide
  Antisense strand to SEQ ID NO: 2088984
ucuagccaucaguuucugc

SEQ ID NO: 2088986 - RNA, 19 nt, Artificial Sequence
  Description of Artificial Sequence: Synthetic oligonucleotide
  Sense strand starting at position 1299 of SEQ ID NO: 1882021
agaaacugauggcuagauu

SEQ ID NO: 2088987 - RNA, 19 nt, Artificial Sequence
  Description of Artificial Sequence: Synthetic oligonucleotide
  Antisense strand to SEQ ID NO: 2088986
aaucuagccaucaguuucu

SEQ ID NO: 2088988 - RNA, 19 nt, Artificial Sequence
  Description of Artificial Sequence: Synthetic oligonucleotide
  Sense strand starting at position 1351 of SEQ ID NO: 1882021
ggucuuccagccuauacau

SEQ ID NO: 2088989 - RNA, 19 nt, Artificial Sequence
  Description of Artificial Sequence: Synthetic oligonucleotide
  Antisense strand to SEQ ID NO: 2088988
auguauaggcuggaagacc

SEQ ID NO: 2088990 - RNA, 19 nt, Artificial Sequence
  Description of Artificial Sequence: Synthetic oligonucleotide
  Sense strand starting at position 1513 of SEQ ID NO: 1882021
gggcacaagucccuccaua

SEQ ID NO: 2088991 - RNA, 19 nt, Artificial Sequence
  Description of Artificial Sequence: Synthetic oligonucleotide
  Antisense strand to SEQ ID NO: 2088990
uauggagggacuugugccc

SEQ ID NO: 2088992 - RNA, 19 nt, Artificial Sequence
  Description of Artificial Sequence: Synthetic oligonucleotide
  Sense strand starting at position 1588 of SEQ ID NO: 1882021
gaugcuuaccucuguggaa

SEQ ID NO: 2088993 - RNA, 19 nt, Artificial Sequence
  Description of Artificial Sequence: Synthetic oligonucleotide
  Antisense strand to SEQ ID NO: 2088992
uuccacagagguaagcauc

SEQ ID NO: 2088994 - RNA, 19 nt, Artificial Sequence
  Description of Artificial Sequence: Synthetic oligonucleotide
  Sense strand starting at position 1589 of SEQ ID NO: 1882021
augcuuaccucuguggaaa

SEQ ID NO: 2088995 - RNA, 19 nt, Artificial Sequence
  Description of Artificial Sequence: Synthetic oligonucleotide
  Antisense strand to SEQ ID NO: 2088994
uuuccacagagguaagcau

SEQ ID NO: 2088996 - RNA, 19 nt, Artificial Sequence
  Description of Artificial Sequence: Synthetic oligonucleotide
  Sense strand starting at position 1619 of SEQ ID NO: 1882021
uuccaaucuccagggaaua

SEQ ID NO: 2088997 - RNA, 19 nt, Artificial Sequence
  Description of Artificial Sequence: Synthetic oligonucleotide
  Antisense strand to SEQ ID NO: 2088996
uauucccuggagauuggaa

SEQ ID NO: 2088998 - RNA, 19 nt, Artificial Sequence
  Description of Artificial Sequence: Synthetic oligonucleotide
  Sense strand starting at position 1764 of SEQ ID NO: 1882021
cuuauuaggagugaggcua

SEQ ID NO: 2088999 - RNA, 19 nt, Artificial Sequence
  Description of Artificial Sequence: Synthetic oligonucleotide
  Antisense strand to SEQ ID NO: 2088998
uagccucacuccuaauaag

SEQ ID NO: 2089000 - RNA, 19 nt, Artificial Sequence
  Description of Artificial Sequence: Synthetic oligonucleotide
  Sense strand starting at position 2120 of SEQ ID NO: 1882021
gacuaagugcauuaaguga

SEQ ID NO: 2089001 - RNA, 19 nt, Artificial Sequence
  Description of Artificial Sequence: Synthetic oligonucleotide
  Antisense strand to SEQ ID NO: 2089000
ucacuuaaugcacuuaguc

SEQ ID NO: 2089002 - RNA, 19 nt, Artificial Sequence
  Description of Artificial Sequence: Synthetic oligonucleotide
  Sense strand starting at position 2417 of SEQ ID NO: 1882021
cugggugacuaaguaacau

SEQ ID NO: 2089003 - RNA, 19 nt, Artificial Sequence
  Description of Artificial Sequence: Synthetic oligonucleotide
  Antisense strand to SEQ ID NO: 2089002
auguuacuuagucacccag

SEQ ID NO: 2089004 - RNA, 19 nt, Artificial Sequence
  Description of Artificial Sequence: Synthetic oligonucleotide
  Sense strand starting at position 2501 of SEQ ID NO: 1882021
gguaaaugaacacggcauu

SEQ ID NO: 2089005 - RNA, 19 nt, Artificial Sequence
  Description of Artificial Sequence: Synthetic oligonucleotide
  Antisense strand to SEQ ID NO: 2089004
aaugccguguucauuuacc

SEQ ID NO: 2089006 - RNA, 19 nt, Artificial Sequence
  Description of Artificial Sequence: Synthetic oligonucleotide
  Sense strand starting at position 2530 of SEQ ID NO: 1882021
ucaaguuaaugagucaagu

SEQ ID NO: 2089007 - RNA, 19 nt, Artificial Sequence
  Description of Artificial Sequence: Synthetic oligonucleotide
  Antisense strand to SEQ ID NO: 2089006
acuugacucauuaacuuga

SEQ ID NO: 2089008 - RNA, 19 nt, Artificial Sequence
  Description of Artificial Sequence: Synthetic oligonucleotide
  Sense strand starting at position 2543 of SEQ ID NO: 1882021
ucaaguaaauccucagucu

SEQ ID NO: 2089009 - RNA, 19 nt, Artificial Sequence
  Description of Artificial Sequence: Synthetic oligonucleotide
  Antisense strand to SEQ ID NO: 2089008
agacugaggauuuacuuga

SEQ ID NO: 2089010 - RNA, 19 nt, Artificial Sequence
  Description of Artificial Sequence: Synthetic oligonucleotide
  Sense strand starting at position 2546 of SEQ ID NO: 1882021
aguaaauccucagucuucu

SEQ ID NO: 2089011 - RNA, 19 nt, Artificial Sequence
  Description of Artificial Sequence: Synthetic oligonucleotide
  Antisense strand to SEQ ID NO: 2089010
agaagacugaggauuuacu

SEQ ID NO: 2089012 - RNA, 19 nt, Artificial Sequence
  Description of Artificial Sequence: Synthetic oligonucleotide
  Sense strand starting at position 2558 of SEQ ID NO: 1882021
gucuucuccuuauccagau

SEQ ID NO: 2089013 - RNA, 19 nt, Artificial Sequence
  Description of Artificial Sequence: Synthetic oligonucleotide
  Antisense strand to SEQ ID NO: 2089012
aucuggauaaggagaagac

SEQ ID NO: 2089014 - RNA, 19 nt, Artificial Sequence
  Description of Artificial Sequence: Synthetic oligonucleotide
  Sense strand starting at position 2645 of SEQ ID NO: 1882021
agagcuggauugucaauua

SEQ ID NO: 2089015 - RNA, 19 nt, Artificial Sequence
  Description of Artificial Sequence: Synthetic oligonucleotide
  Antisense strand to SEQ ID NO: 2089014
uaauugacaauccagcucu

SEQ ID NO: 2089016 - RNA, 19 nt, Artificial Sequence
  Description of Artificial Sequence: Synthetic oligonucleotide
  Sense strand starting at position 2665 of SEQ ID NO: 1882021
aggccuguuaacuaacgaa

SEQ ID NO: 2089017 - RNA, 19 nt, Artificial Sequence
  Description of Artificial Sequence: Synthetic oligonucleotide
  Antisense strand to SEQ ID NO: 2089016
uucguuaguuaacaggccu

SEQ ID NO: 2089018 - RNA, 19 nt, Artificial Sequence
  Description of Artificial Sequence: Synthetic oligonucleotide
  Sense strand starting at position 2686 of SEQ ID NO: 1882021
gcuguucugcagcugcaaa

SEQ ID NO: 2089019 - RNA, 19 nt, Artificial Sequence
  Description of Artificial Sequence: Synthetic oligonucleotide
  Antisense strand to SEQ ID NO: 2089018
uuugcagcugcagaacagc

SEQ ID NO: 2089020 - RNA, 19 nt, Artificial Sequence
  Description of Artificial Sequence: Synthetic oligonucleotide
  Sense strand starting at position 2727 of SEQ ID NO: 1882021
ugacuuuaucaugggaguu

SEQ ID NO: 2089021 - RNA, 19 nt, Artificial Sequence
  Description of Artificial Sequence: Synthetic oligonucleotide
  Antisense strand to SEQ ID NO: 2089020
aacucccaugauaaaguca

SEQ ID NO: 2089022 - RNA, 19 nt, Artificial Sequence
  Description of Artificial Sequence: Synthetic oligonucleotide
  Sense strand starting at position 2879 of SEQ ID NO: 1882021
acgggaagucuaugggaua

SEQ ID NO: 2089023 - RNA, 19 nt, Artificial Sequence
  Description of Artificial Sequence: Synthetic oligonucleotide
  Antisense strand to SEQ ID NO: 2089022
uaucccauagacuucccgu

SEQ ID NO: 2089024 - RNA, 19 nt, Artificial Sequence
  Description of Artificial Sequence: Synthetic oligonucleotide
  Sense strand starting at position 3023 of SEQ ID NO: 1882021
gugaccaugccaggagaua

SEQ ID NO: 2089025 - RNA, 19 nt, Artificial Sequence
  Description of Artificial Sequence: Synthetic oligonucleotide
  Antisense strand to SEQ ID NO: 2089024
uaucuccuggcauggucac

SEQ ID NO: 2089026 - RNA, 19 nt, Artificial Sequence
  Description of Artificial Sequence: Synthetic oligonucleotide
  Sense strand starting at position 3129 of SEQ ID NO: 1882021
ggacuuccuccucagcuaa

SEQ ID NO: 2089027 - RNA, 19 nt, Artificial Sequence
  Description of Artificial Sequence: Synthetic oligonucleotide
  Antisense strand to SEQ ID NO: 2089026
uuagcugaggaggaagucc

SEQ ID NO: 2089028 - RNA, 19 nt, Artificial Sequence
  Description of Artificial Sequence: Synthetic oligonucleotide
  Sense strand starting at position 3229 of SEQ ID NO: 1882021
cggcauuaacaucaacacu

SEQ ID NO: 2089029 - RNA, 19 nt, Artificial Sequence
  Description of Artificial Sequence: Synthetic oligonucleotide
  Antisense strand to SEQ ID NO: 2089028
aguguugauguuaaugccg

SEQ ID NO: 2089030 - RNA, 19 nt, Artificial Sequence
  Description of Artificial Sequence: Synthetic oligonucleotide
  Sense strand starting at position 3247 of SEQ ID NO: 1882021
ugacuauaagucugauaag

SEQ ID NO: 2089031 - RNA, 19 nt, Artificial Sequence
  Description of Artificial Sequence: Synthetic oligonucleotide
  Antisense strand to SEQ ID NO: 2089030
cuuaucagacuuauaguca

SEQ ID NO: 2089032 - RNA, 19 nt, Artificial Sequence
  Description of Artificial Sequence: Synthetic oligonucleotide
  Sense strand starting at position 3665 of SEQ ID NO: 1882021
cucuguaaagccuaguacu

SEQ ID NO: 2089033 - RNA, 19 nt, Artificial Sequence
  Description of Artificial Sequence: Synthetic oligonucleotide
  Antisense strand to SEQ ID NO: 2089032
aguacuaggcuuuacagag

SEQ ID NO: 2089034 - RNA, 19 nt, Artificial Sequence
  Description of Artificial Sequence: Synthetic oligonucleotide
  Sense strand starting at position 3911 of SEQ ID NO: 1882021
guaugaaaucaauaugcac

SEQ ID NO: 2089035 - RNA, 19 nt, Artificial Sequence
  Description of Artificial Sequence: Synthetic oligonucleotide
  Antisense strand to SEQ ID NO: 2089034
gugcauauugauuucauac

SEQ ID NO: 2089036 - RNA, 19 nt, Artificial Sequence
  Description of Artificial Sequence: Synthetic oligonucleotide
  Sense strand starting at position 94 of SEQ ID NO: 1882022
uaauuuguugugugguacu

SEQ ID NO: 2089037 - RNA, 19 nt, Artificial Sequence
  Description of Artificial Sequence: Synthetic oligonucleotide
  Antisense strand to SEQ ID NO: 2089036
aguaccacacaacaaauua

SEQ ID NO: 2089038 - RNA, 19 nt, Artificial Sequence
  Description of Artificial Sequence: Synthetic oligonucleotide
  Sense strand starting at position 101 of SEQ ID NO: 1882022
uugugugguacuuaagacu

SEQ ID NO: 2089039 - RNA, 19 nt, Artificial Sequence
  Description of Artificial Sequence: Synthetic oligonucleotide
  Antisense strand to SEQ ID NO: 2089038
agucuuaaguaccacacaa

SEQ ID NO: 2089040 - RNA, 19 nt, Artificial Sequence
  Description of Artificial Sequence: Synthetic oligonucleotide
  Sense strand starting at position 249 of SEQ ID NO: 1882022
gcaagagaaguguaucaac

SEQ ID NO: 2089041 - RNA, 19 nt, Artificial Sequence
  Description of Artificial Sequence: Synthetic oligonucleotide
  Antisense strand to SEQ ID NO: 2089040
guugauacacuucucuugc

SEQ ID NO: 2089042 - RNA, 19 nt, Artificial Sequence
  Description of Artificial Sequence: Synthetic oligonucleotide
  Sense strand starting at position 258 of SEQ ID NO: 1882022
guguaucaacaucauggua

SEQ ID NO: 2089043 - RNA, 19 nt, Artificial Sequence
  Description of Artificial Sequence: Synthetic oligonucleotide
  Antisense strand to SEQ ID NO: 2089042
uaccaugauguugauacac

SEQ ID NO: 2089044 - RNA, 19 nt, Artificial Sequence
  Description of Artificial Sequence: Synthetic oligonucleotide
  Sense strand starting at position 263 of SEQ ID NO: 1882022
ucaacaucaugguagauuu

SEQ ID NO: 2089045 - RNA, 19 nt, Artificial Sequence
  Description of Artificial Sequence: Synthetic oligonucleotide
  Antisense strand to SEQ ID NO: 2089044
aaaucuaccaugauguuga

SEQ ID NO: 2089046 - RNA, 19 nt, Artificial Sequence
  Description of Artificial Sequence: Synthetic oligonucleotide
  Sense strand starting at position 383 of SEQ ID NO: 1882022
ugcacuaaucuaggaacau

SEQ ID NO: 2089047 - RNA, 19 nt, Artificial Sequence
  Description of Artificial Sequence: Synthetic oligonucleotide
  Antisense strand to SEQ ID NO: 2089046
auguuccuagauuagugca

SEQ ID NO: 2089048 - RNA, 19 nt, Artificial Sequence
  Description of Artificial Sequence: Synthetic oligonucleotide
  Sense strand starting at position 425 of SEQ ID NO: 1882022
gaacuagugccaggaacaa

SEQ ID NO: 2089049 - RNA, 19 nt, Artificial Sequence
  Description of Artificial Sequence: Synthetic oligonucleotide
  Antisense strand to SEQ ID NO: 2089048
uuguuccuggcacuaguuc

SEQ ID NO: 2089050 - RNA, 19 nt, Artificial Sequence
  Description of Artificial Sequence: Synthetic oligonucleotide
  Sense strand starting at position 563 of SEQ ID NO: 1882022
gggucuuauguccagacuu

SEQ ID NO: 2089051 - RNA, 19 nt, Artificial Sequence
  Description of Artificial Sequence: Synthetic oligonucleotide
  Antisense strand to SEQ ID NO: 2089050
aagucuggacauaagaccc

SEQ ID NO: 2089052 - RNA, 19 nt, Artificial Sequence
  Description of Artificial Sequence: Synthetic oligonucleotide
  Sense strand starting at position 565 of SEQ ID NO: 1882022
gucuuauguccagacuuga

SEQ ID NO: 2089053 - RNA, 19 nt, Artificial Sequence
  Description of Artificial Sequence: Synthetic oligonucleotide
  Antisense strand to SEQ ID NO: 2089052
ucaagucuggacauaagac

SEQ ID NO: 2089054 - RNA, 19 nt, Artificial Sequence
  Description of Artificial Sequence: Synthetic oligonucleotide
  Sense strand starting at position 703 of SEQ ID NO: 1882022
aacaguuguccagaggucu

SEQ ID NO: 2089055 - RNA, 19 nt, Artificial Sequence
  Description of Artificial Sequence: Synthetic oligonucleotide
  Antisense strand to SEQ ID NO: 2089054
agaccucuggacaacuguu

SEQ ID NO: 2089056 - RNA, 19 nt, Artificial Sequence
  Description of Artificial Sequence: Synthetic oligonucleotide
  Sense strand starting at position 744 of SEQ ID NO: 1882022
aguuaauuacgaggacagu

SEQ ID NO: 2089057 - RNA, 19 nt, Artificial Sequence
  Description of Artificial Sequence: Synthetic oligonucleotide
  Antisense strand to SEQ ID NO: 2089056
acuguccucguaauuaacu

SEQ ID NO: 2089058 - RNA, 19 nt, Artificial Sequence
  Description of Artificial Sequence: Synthetic oligonucleotide
  Sense strand starting at position 889 of SEQ ID NO: 1882022
ggaaauaacuucccacugu

SEQ ID NO: 2089059 - RNA, 19 nt, Artificial Sequence
  Description of Artificial Sequence: Synthetic oligonucleotide
  Antisense strand to SEQ ID NO: 2089058
acagugggaaguuauuucc

SEQ ID NO: 2089060 - RNA, 19 nt, Artificial Sequence
  Description of Artificial Sequence: Synthetic oligonucleotide
  Sense strand starting at position 1099 of SEQ ID NO: 1882022
uugaauaagguuuguacau

SEQ ID NO: 2089061 - RNA, 19 nt, Artificial Sequence
  Description of Artificial Sequence: Synthetic oligonucleotide
  Antisense strand to SEQ ID NO: 2089060
auguacaaaccuuauucaa

SEQ ID NO: 2089062 - RNA, 19 nt, Artificial Sequence
  Description of Artificial Sequence: Synthetic oligonucleotide
  Sense strand starting at position 1100 of SEQ ID NO: 1882022
ugaauaagguuuguacaua

SEQ ID NO: 2089063 - RNA, 19 nt, Artificial Sequence
  Description of Artificial Sequence: Synthetic oligonucleotide
  Antisense strand to SEQ ID NO: 2089062
uauguacaaaccuuauuca

SEQ ID NO: 2089064 - RNA, 19 nt, Artificial Sequence
  Description of Artificial Sequence: Synthetic oligonucleotide
  Sense strand starting at position 1111 of SEQ ID NO: 1882022
uguacauaucaauguaaac

SEQ ID NO: 2089065 - RNA, 19 nt, Artificial Sequence
  Description of Artificial Sequence: Synthetic oligonucleotide
  Antisense strand to SEQ ID NO: 2089064
guuuacauugauauguaca

SEQ ID NO: 2089066 - RNA, 19 nt, Artificial Sequence
  Description of Artificial Sequence: Synthetic oligonucleotide
  Sense strand starting at position 1689 of SEQ ID NO: 1882022
uuauuagaacagcaguuua

SEQ ID NO: 2089067 - RNA, 19 nt, Artificial Sequence
  Description of Artificial Sequence: Synthetic oligonucleotide
  Antisense strand to SEQ ID NO: 2089066
uaaacugcuguucuaauaa

SEQ ID NO: 2089068 - RNA, 19 nt, Artificial Sequence
  Description of Artificial Sequence: Synthetic oligonucleotide
  Sense strand starting at position 1790 of SEQ ID NO: 1882022
ugaaauaagaguugugauc

SEQ ID NO: 2089069 - RNA, 19 nt, Artificial Sequence
  Description of Artificial Sequence: Synthetic oligonucleotide
  Antisense strand to SEQ ID NO: 2089068
gaucacaacucuuauuuca

SEQ ID NO: 2089070 - RNA, 19 nt, Artificial Sequence
  Description of Artificial Sequence: Synthetic oligonucleotide
  Sense strand starting at position 1799 of SEQ ID NO: 1882022
aguugugaucaguaaauua

SEQ ID NO: 2089071 - RNA, 19 nt, Artificial Sequence
  Description of Artificial Sequence: Synthetic oligonucleotide
  Antisense strand to SEQ ID NO: 2089070
uaauuuacugaucacaacu

SEQ ID NO: 2089072 - RNA, 19 nt, Artificial Sequence
  Description of Artificial Sequence: Synthetic oligonucleotide
  Sense strand starting at position 1914 of SEQ ID NO: 1882022
cagguauggcuauaaagua

SEQ ID NO: 2089073 - RNA, 19 nt, Artificial Sequence
  Description of Artificial Sequence: Synthetic oligonucleotide
  Antisense strand to SEQ ID NO: 2089072
uacuuuauagccauaccug

SEQ ID NO: 2089074 - RNA, 19 nt, Artificial Sequence
  Description of Artificial Sequence: Synthetic oligonucleotide
  Sense strand starting at position 2007 of SEQ ID NO: 1882022
uuagaaaucaguugaggcu

SEQ ID NO: 2089075 - RNA, 19 nt, Artificial Sequence
  Description of Artificial Sequence: Synthetic oligonucleotide
  Antisense strand to SEQ ID NO: 2089074
agccucaacugauuucuaa

SEQ ID NO: 2089076 - RNA, 19 nt, Artificial Sequence
  Description of Artificial Sequence: Synthetic oligonucleotide
  Sense strand starting at position 2462 of SEQ ID NO: 1882022
cgggaaagcuguuugggaa

SEQ ID NO: 2089077 - RNA, 19 nt, Artificial Sequence
  Description of Artificial Sequence: Synthetic oligonucleotide
  Antisense strand to SEQ ID NO: 2089076
uucccaaacagcuuucccg

SEQ ID NO: 2089078 - RNA, 19 nt, Artificial Sequence
  Description of Artificial Sequence: Synthetic oligonucleotide
  Sense strand starting at position 2790 of SEQ ID NO: 1882022
acagaaucuggcgaaaguu

SEQ ID NO: 2089079 - RNA, 19 nt, Artificial Sequence
  Description of Artificial Sequence: Synthetic oligonucleotide
  Antisense strand to SEQ ID NO: 2089078
aacuuucgccagauucugu

SEQ ID NO: 2089080 - RNA, 19 nt, Artificial Sequence
  Description of Artificial Sequence: Synthetic oligonucleotide
  Sense strand starting at position 2800 of SEQ ID NO: 1882022
gcgaaaguuauauaggagu

SEQ ID NO: 2089081 - RNA, 19 nt, Artificial Sequence
  Description of Artificial Sequence: Synthetic oligonucleotide
  Antisense strand to SEQ ID NO: 2089080
acuccuauauaacuuucgc

SEQ ID NO: 2089082 - RNA, 19 nt, Artificial Sequence
  Description of Artificial Sequence: Synthetic oligonucleotide
  Sense strand starting at position 2874 of SEQ ID NO: 1882022
gcucaaagacccugaccua

SEQ ID NO: 2089083 - RNA, 19 nt, Artificial Sequence
  Description of Artificial Sequence: Synthetic oligonucleotide
  Antisense strand to SEQ ID NO: 2089082
uaggucagggucuuugagc

SEQ ID NO: 2089084 - RNA, 19 nt, Artificial Sequence
  Description of Artificial Sequence: Synthetic oligonucleotide
  Sense strand starting at position 3015 of SEQ ID NO: 1882022
gaauaauuagacuguaacg

SEQ ID NO: 2089085 - RNA, 19 nt, Artificial Sequence
  Description of Artificial Sequence: Synthetic oligonucleotide
  Antisense strand to SEQ ID NO: 2089084
cguuacagucuaauuauuc

SEQ ID NO: 2089086 - RNA, 19 nt, Artificial Sequence
  Description of Artificial Sequence: Synthetic oligonucleotide
  Sense strand starting at position 3160 of SEQ ID NO: 1882022
cuaacugucagagauggca

SEQ ID NO: 2089087 - RNA, 19 nt, Artificial Sequence
  Description of Artificial Sequence: Synthetic oligonucleotide
  Antisense strand to SEQ ID NO: 2089086
ugccaucucugacaguuag

SEQ ID NO: 2089088 - RNA, 19 nt, Artificial Sequence
  Description of Artificial Sequence: Synthetic oligonucleotide
  Sense strand starting at position 3253 of SEQ ID NO: 1882022
acaggaacuucuguuucca

SEQ ID NO: 2089089 - RNA, 19 nt, Artificial Sequence
  Description of Artificial Sequence: Synthetic oligonucleotide
  Antisense strand to SEQ ID NO: 2089088
uggaaacagaaguuccugu

SEQ ID NO: 2089090 - RNA, 19 nt, Artificial Sequence
  Description of Artificial Sequence: Synthetic oligonucleotide
  Sense strand starting at position 3255 of SEQ ID NO: 1882022
aggaacuucuguuuccaca

SEQ ID NO: 2089091 - RNA, 19 nt, Artificial Sequence
  Description of Artificial Sequence: Synthetic oligonucleotide
  Antisense strand to SEQ ID NO: 2089090
uguggaaacagaaguuccu

SEQ ID NO: 2089092 - RNA, 19 nt, Artificial Sequence
  Description of Artificial Sequence: Synthetic oligonucleotide
  Sense strand starting at position 3352 of SEQ ID NO: 1882022
guuccaauacugugagaac

SEQ ID NO: 2089093 - RNA, 19 nt, Artificial Sequence
  Description of Artificial Sequence: Synthetic oligonucleotide
  Antisense strand to SEQ ID NO: 2089092
guucucacaguauuggaac

SEQ ID NO: 2089094 - RNA, 19 nt, Artificial Sequence
  Description of Artificial Sequence: Synthetic oligonucleotide
  Sense strand starting at position 3551 of SEQ ID NO: 1882022
auuuaacccuguguucuuu

SEQ ID NO: 2089095 - RNA, 19 nt, Artificial Sequence
  Description of Artificial Sequence: Synthetic oligonucleotide
  Antisense strand to SEQ ID NO: 2089094
aaagaacacaggguuaaau

SEQ ID NO: 2089096 - RNA, 19 nt, Artificial Sequence
  Description of Artificial Sequence: Synthetic oligonucleotide
  Sense strand starting at position 3557 of SEQ ID NO: 1882022
cccuguguucuuuaauaga

SEQ ID NO: 2089097 - RNA, 19 nt, Artificial Sequence
  Description of Artificial Sequence: Synthetic oligonucleotide
  Antisense strand to SEQ ID NO: 2089096
ucuauuaaagaacacaggg

SEQ ID NO: 2089098 - RNA, 19 nt, Artificial Sequence
  Description of Artificial Sequence: Synthetic oligonucleotide
  Sense strand starting at position 3565 of SEQ ID NO: 1882022
ucuuuaauagaugguccau

SEQ ID NO: 2089099 - RNA, 19 nt, Artificial Sequence
  Description of Artificial Sequence: Synthetic oligonucleotide
  Antisense strand to SEQ ID NO: 2089098
auggaccaucuauuaaaga

SEQ ID NO: 2089100 - RNA, 19 nt, Artificial Sequence
  Description of Artificial Sequence: Synthetic oligonucleotide
  Sense strand starting at position 3589 of SEQ ID NO: 1882022
gguaucuguggugaugacu

SEQ ID NO: 2089101 - RNA, 19 nt, Artificial Sequence
  Description of Artificial Sequence: Synthetic oligonucleotide
  Antisense strand to SEQ ID NO: 2089100
agucaucaccacagauacc

SEQ ID NO: 2089102 - RNA, 19 nt, Artificial Sequence
  Description of Artificial Sequence: Synthetic oligonucleotide
  Sense strand starting at position 3592 of SEQ ID NO: 1882022
aucuguggugaugacuuua

SEQ ID NO: 2089103 - RNA, 19 nt, Artificial Sequence
  Description of Artificial Sequence: Synthetic oligonucleotide
  Antisense strand to SEQ ID NO: 2089102
uaaagucaucaccacagau

SEQ ID NO: 2089104 - RNA, 19 nt, Artificial Sequence
  Description of Artificial Sequence: Synthetic oligonucleotide
  Sense strand starting at position 3597 of SEQ ID NO: 1882022
uggugaugacuuuaauagc

SEQ ID NO: 2089105 - RNA, 19 nt, Artificial Sequence
  Description of Artificial Sequence: Synthetic oligonucleotide
  Antisense strand to SEQ ID NO: 2089104
gcuauuaaagucaucacca

SEQ ID NO: 2089106 - RNA, 19 nt, Artificial Sequence
  Description of Artificial Sequence: Synthetic oligonucleotide
  Sense strand starting at position 3691 of SEQ ID NO: 1882022
agucuccuuugaucuagaa

SEQ ID NO: 2089107 - RNA, 19 nt, Artificial Sequence
  Description of Artificial Sequence: Synthetic oligonucleotide
  Antisense strand to SEQ ID NO: 2089106
uucuagaucaaaggagacu

SEQ ID NO: 2089108 - RNA, 19 nt, Artificial Sequence
  Description of Artificial Sequence: Synthetic oligonucleotide
  Sense strand starting at position 3695 of SEQ ID NO: 1882022
uccuuugaucuagaauagu

SEQ ID NO: 2089109 - RNA, 19 nt, Artificial Sequence
  Description of Artificial Sequence: Synthetic oligonucleotide
  Antisense strand to SEQ ID NO: 2089108
acuauucuagaucaaagga

SEQ ID NO: 2089110 - RNA, 19 nt, Artificial Sequence
  Description of Artificial Sequence: Synthetic oligonucleotide
  Sense strand starting at position 3706 of SEQ ID NO: 1882022
agaauaguuccucagucac

SEQ ID NO: 2089111 - RNA, 19 nt, Artificial Sequence
  Description of Artificial Sequence: Synthetic oligonucleotide
  Antisense strand to SEQ ID NO: 2089110
gugacugaggaacuauucu

SEQ ID NO: 2089112 - RNA, 19 nt, Artificial Sequence
  Description of Artificial Sequence: Synthetic oligonucleotide
  Sense strand starting at position 3809 of SEQ ID NO: 1882022
guuuccuaaugauuagauc

SEQ ID NO: 2089113 - RNA, 19 nt, Artificial Sequence
  Description of Artificial Sequence: Synthetic oligonucleotide
  Antisense strand to SEQ ID NO: 2089112
gaucuaaucauuaggaaac

SEQ ID NO: 2089114 - RNA, 19 nt, Artificial Sequence
  Description of Artificial Sequence: Synthetic oligonucleotide
  Sense strand starting at position 3970 of SEQ ID NO: 1882022
guuuccucacuguaaauaa

SEQ ID NO: 2089115 - RNA, 19 nt, Artificial Sequence
  Description of Artificial Sequence: Synthetic oligonucleotide
  Antisense strand to SEQ ID NO: 2089114
uuauuuacagugaggaaac

SEQ ID NO: 2089116 - RNA, 19 nt, Artificial Sequence
  Description of Artificial Sequence: Synthetic oligonucleotide
  Sense strand starting at position 142 of SEQ ID NO: 1882023
ugagguaagccuuaccaua

SEQ ID NO: 2089117 - RNA, 19 nt, Artificial Sequence
  Description of Artificial Sequence: Synthetic oligonucleotide
  Antisense strand to SEQ ID NO: 2089116
uaugguaaggcuuaccuca

SEQ ID NO: 2089118 - RNA, 19 nt, Artificial Sequence
  Description of Artificial Sequence: Synthetic oligonucleotide
  Sense strand starting at position 144 of SEQ ID NO: 1882023
agguaagccuuaccauaau

SEQ ID NO: 2089119 - RNA, 19 nt, Artificial Sequence
  Description of Artificial Sequence: Synthetic oligonucleotide
  Antisense strand to SEQ ID NO: 2089118
auuaugguaaggcuuaccu

SEQ ID NO: 2089120 - RNA, 19 nt, Artificial Sequence
  Description of Artificial Sequence: Synthetic oligonucleotide
  Sense strand starting at position 213 of SEQ ID NO: 1882023
ucuacuuugagacggagua

SEQ ID NO: 2089121 - RNA, 19 nt, Artificial Sequence
  Description of Artificial Sequence: Synthetic oligonucleotide
  Antisense strand to SEQ ID NO: 2089120
uacuccgucucaaaguaga

SEQ ID NO: 2089122 - RNA, 19 nt, Artificial Sequence
  Description of Artificial Sequence: Synthetic oligonucleotide
  Sense strand starting at position 214 of SEQ ID NO: 1882023
cuacuuugagacggaguau

SEQ ID NO: 2089123 - RNA, 19 nt, Artificial Sequence
  Description of Artificial Sequence: Synthetic oligonucleotide
  Antisense strand to SEQ ID NO: 2089122
auacuccgucucaaaguag

SEQ ID NO: 2089124 - RNA, 19 nt, Artificial Sequence
  Description of Artificial Sequence: Synthetic oligonucleotide
  Sense strand starting at position 697 of SEQ ID NO: 1882023
ugaggcaguagucgagaaa

SEQ ID NO: 2089125 - RNA, 19 nt, Artificial Sequence
  Description of Artificial Sequence: Synthetic oligonucleotide
  Antisense strand to SEQ ID NO: 2089124
uuucucgacuacugccuca

SEQ ID NO: 2089126 - RNA, 19 nt, Artificial Sequence
  Description of Artificial Sequence: Synthetic oligonucleotide
  Sense strand starting at position 698 of SEQ ID NO: 1882023
gaggcaguagucgagaaac

SEQ ID NO: 2089127 - RNA, 19 nt, Artificial Sequence
  Description of Artificial Sequence: Synthetic oligonucleotide
  Antisense strand to SEQ ID NO: 2089126
guuucucgacuacugccuc

SEQ ID NO: 2089128 - RNA, 19 nt, Artificial Sequence
  Description of Artificial Sequence: Synthetic oligonucleotide
  Sense strand starting at position 700 of SEQ ID NO: 1882023
ggcaguagucgagaaacaa

SEQ ID NO: 2089129 - RNA, 19 nt, Artificial Sequence
  Description of Artificial Sequence: Synthetic oligonucleotide
  Antisense strand to SEQ ID NO: 2089128
uuguuucucgacuacugcc

SEQ ID NO: 2089130 - RNA, 19 nt, Artificial Sequence
  Description of Artificial Sequence: Synthetic oligonucleotide
  Sense strand starting at position 992 of SEQ ID NO: 1882023
cugguauuccaacagugag

SEQ ID NO: 2089131 - RNA, 19 nt, Artificial Sequence
  Description of Artificial Sequence: Synthetic oligonucleotide
  Antisense strand to SEQ ID NO: 2089130
cucacuguuggaauaccag

SEQ ID NO: 2089132 - RNA, 19 nt, Artificial Sequence
  Description of Artificial Sequence: Synthetic oligonucleotide
  Sense strand starting at position 1034 of SEQ ID NO: 1882023
guuacugucccacaucuua

SEQ ID NO: 2089133 - RNA, 19 nt, Artificial Sequence
  Description of Artificial Sequence: Synthetic oligonucleotide
  Antisense strand to SEQ ID NO: 2089132
uaagaugugggacaguaac

SEQ ID NO: 2089134 - RNA, 19 nt, Artificial Sequence
  Description of Artificial Sequence: Synthetic oligonucleotide
  Sense strand starting at position 1169 of SEQ ID NO: 1882023
ccauuucugcuaggcuaua

SEQ ID NO: 2089135 - RNA, 19 nt, Artificial Sequence
  Description of Artificial Sequence: Synthetic oligonucleotide
  Antisense strand to SEQ ID NO: 2089134
uauagccuagcagaaaugg

SEQ ID NO: 2089136 - RNA, 19 nt, Artificial Sequence
  Description of Artificial Sequence: Synthetic oligonucleotide
  Sense strand starting at position 1174 of SEQ ID NO: 1882023
ucugcuaggcuauaugaua

SEQ ID NO: 2089137 - RNA, 19 nt, Artificial Sequence
  Description of Artificial Sequence: Synthetic oligonucleotide
  Antisense strand to SEQ ID NO: 2089136
uaucauauagccuagcaga

SEQ ID NO: 2089138 - RNA, 19 nt, Artificial Sequence
  Description of Artificial Sequence: Synthetic oligonucleotide
  Sense strand starting at position 1653 of SEQ ID NO: 1882023
acuggaauguuacccaaau

SEQ ID NO: 2089139 - RNA, 19 nt, Artificial Sequence
  Description of Artificial Sequence: Synthetic oligonucleotide
  Antisense strand to SEQ ID NO: 2089138
auuuggguaacauuccagu

SEQ ID NO: 2089140 - RNA, 19 nt, Artificial Sequence
  Description of Artificial Sequence: Synthetic oligonucleotide
  Sense strand starting at position 1654 of SEQ ID NO: 1882023
cuggaauguuacccaaaua

SEQ ID NO: 2089141 - RNA, 19 nt, Artificial Sequence
  Description of Artificial Sequence: Synthetic oligonucleotide
  Antisense strand to SEQ ID NO: 2089140
uauuuggguaacauuccag

SEQ ID NO: 2089142 - RNA, 19 nt, Artificial Sequence
  Description of Artificial Sequence: Synthetic oligonucleotide
  Sense strand starting at position 1911 of SEQ ID NO: 1882023
uuucuaucaguuugaguag

SEQ ID NO: 2089143 - RNA, 19 nt, Artificial Sequence
  Description of Artificial Sequence: Synthetic oligonucleotide
  Antisense strand to SEQ ID NO: 2089142
cuacucaaacugauagaaa

SEQ ID NO: 2089144 - RNA, 19 nt, Artificial Sequence
  Description of Artificial Sequence: Synthetic oligonucleotide
  Sense strand starting at position 1920 of SEQ ID NO: 1882023
guuugaguaguacaucaga

SEQ ID NO: 2089145 - RNA, 19 nt, Artificial Sequence
  Description of Artificial Sequence: Synthetic oligonucleotide
  Antisense strand to SEQ ID NO: 2089144
ucugauguacuacucaaac

SEQ ID NO: 2089146 - RNA, 19 nt, Artificial Sequence
  Description of Artificial Sequence: Synthetic oligonucleotide
  Sense strand starting at position 2063 of SEQ ID NO: 1882023
ccuaguguucuauaguauu

SEQ ID NO: 2089147 - RNA, 19 nt, Artificial Sequence
  Description of Artificial Sequence: Synthetic oligonucleotide
  Antisense strand to SEQ ID NO: 2089146
aauacuauagaacacuagg

SEQ ID NO: 2089148 - RNA, 19 nt, Artificial Sequence
  Description of Artificial Sequence: Synthetic oligonucleotide
  Sense strand starting at position 2156 of SEQ ID NO: 1882023
gaacgacuccuuugagcau

SEQ ID NO: 2089149 - RNA, 19 nt, Artificial Sequence
  Description of Artificial Sequence: Synthetic oligonucleotide
  Antisense strand to SEQ ID NO: 2089148
augcucaaaggagucguuc

SEQ ID NO: 2089150 - RNA, 19 nt, Artificial Sequence
  Description of Artificial Sequence: Synthetic oligonucleotide
  Sense strand starting at position 2159 of SEQ ID NO: 1882023
cgacuccuuugagcauaua

SEQ ID NO: 2089151 - RNA, 19 nt, Artificial Sequence
  Description of Artificial Sequence: Synthetic oligonucleotide
  Antisense strand to SEQ ID NO: 2089150
uauaugcucaaaggagucg

SEQ ID NO: 2089152 - RNA, 19 nt, Artificial Sequence
  Description of Artificial Sequence: Synthetic oligonucleotide
  Sense strand starting at position 2630 of SEQ ID NO: 1882023
gugugaguucugcaacaag

SEQ ID NO: 2089153 - RNA, 19 nt, Artificial Sequence
  Description of Artificial Sequence: Synthetic oligonucleotide
  Antisense strand to SEQ ID NO: 2089152
cuuguugcagaacucacac

SEQ ID NO: 2089154 - RNA, 19 nt, Artificial Sequence
  Description of Artificial Sequence: Synthetic oligonucleotide
  Sense strand starting at position 2677 of SEQ ID NO: 1882023
ccauuauacuaguuaugag

SEQ ID NO: 2089155 - RNA, 19 nt, Artificial Sequence
  Description of Artificial Sequence: Synthetic oligonucleotide
  Antisense strand to SEQ ID NO: 2089154
cucauaacuaguauaaugg

SEQ ID NO: 2089156 - RNA, 19 nt, Artificial Sequence
  Description of Artificial Sequence: Synthetic oligonucleotide
  Sense strand starting at position 2748 of SEQ ID NO: 1882023
cucacaagcuugcuagaga

SEQ ID NO: 2089157 - RNA, 19 nt, Artificial Sequence
  Description of Artificial Sequence: Synthetic oligonucleotide
  Antisense strand to SEQ ID NO: 2089156
ucucuagcaagcuugugag

SEQ ID NO: 2089158 - RNA, 19 nt, Artificial Sequence
  Description of Artificial Sequence: Synthetic oligonucleotide
  Sense strand starting at position 2751 of SEQ ID NO: 1882023
acaagcuugcuagagaaca

SEQ ID NO: 2089159 - RNA, 19 nt, Artificial Sequence
  Description of Artificial Sequence: Synthetic oligonucleotide
  Antisense strand to SEQ ID NO: 2089158
uguucucuagcaagcuugu

SEQ ID NO: 2089160 - RNA, 19 nt, Artificial Sequence
  Description of Artificial Sequence: Synthetic oligonucleotide
  Sense strand starting at position 2769 of SEQ ID NO: 1882023
augagauaucgauguaaag

SEQ ID NO: 2089161 - RNA, 19 nt, Artificial Sequence
  Description of Artificial Sequence: Synthetic oligonucleotide
  Antisense strand to SEQ ID NO: 2089160
cuuuacaucgauaucucau

SEQ ID NO: 2089162 - RNA, 19 nt, Artificial Sequence
  Description of Artificial Sequence: Synthetic oligonucleotide
  Sense strand starting at position 2771 of SEQ ID NO: 1882023
gagauaucgauguaaagug

SEQ ID NO: 2089163 - RNA, 19 nt, Artificial Sequence
  Description of Artificial Sequence: Synthetic oligonucleotide
  Antisense strand to SEQ ID NO: 2089162
cacuuuacaucgauaucuc

SEQ ID NO: 2089164 - RNA, 19 nt, Artificial Sequence
  Description of Artificial Sequence: Synthetic oligonucleotide
  Sense strand starting at position 2778 of SEQ ID NO: 1882023
cgauguaaaguguaccuga

SEQ ID NO: 2089165 - RNA, 19 nt, Artificial Sequence
  Description of Artificial Sequence: Synthetic oligonucleotide
  Antisense strand to SEQ ID NO: 2089164
ucagguacacuuuacaucg

SEQ ID NO: 2089166 - RNA, 19 nt, Artificial Sequence
  Description of Artificial Sequence: Synthetic oligonucleotide
  Sense strand starting at position 2781 of SEQ ID NO: 1882023
uguaaaguguaccugauaa

SEQ ID NO: 2089167 - RNA, 19 nt, Artificial Sequence
  Description of Artificial Sequence: Synthetic oligonucleotide
  Antisense strand to SEQ ID NO: 2089166
uuaucagguacacuuuaca

SEQ ID NO: 2089168 - RNA, 19 nt, Artificial Sequence
  Description of Artificial Sequence: Synthetic oligonucleotide
  Sense strand starting at position 2792 of SEQ ID NO: 1882023
ccugauaagcaguaguauu

SEQ ID NO: 2089169 - RNA, 19 nt, Artificial Sequence
  Description of Artificial Sequence: Synthetic oligonucleotide
  Antisense strand to SEQ ID NO: 2089168
aauacuacugcuuaucagg

SEQ ID NO: 2089170 - RNA, 19 nt, Artificial Sequence
  Description of Artificial Sequence: Synthetic oligonucleotide
  Sense strand starting at position 2969 of SEQ ID NO: 1882023
cugcuuuaacaugauuaga

SEQ ID NO: 2089171 - RNA, 19 nt, Artificial Sequence
  Description of Artificial Sequence: Synthetic oligonucleotide
  Antisense strand to SEQ ID NO: 2089170
ucuaaucauguuaaagcag

SEQ ID NO: 2089172 - RNA, 19 nt, Artificial Sequence
  Description of Artificial Sequence: Synthetic oligonucleotide
  Sense strand starting at position 2971 of SEQ ID NO: 1882023
gcuuuaacaugauuagaaa

SEQ ID NO: 2089173 - RNA, 19 nt, Artificial Sequence
  Description of Artificial Sequence: Synthetic oligonucleotide
  Antisense strand to SEQ ID NO: 2089172
uuucuaaucauguuaaagc

SEQ ID NO: 2089174 - RNA, 19 nt, Artificial Sequence
  Description of Artificial Sequence: Synthetic oligonucleotide
  Sense strand starting at position 3136 of SEQ ID NO: 1882023
auggcaaauucuguuggaa

SEQ ID NO: 2089175 - RNA, 19 nt, Artificial Sequence
  Description of Artificial Sequence: Synthetic oligonucleotide
  Antisense strand to SEQ ID NO: 2089174
uuccaacagaauuugccau

SEQ ID NO: 2089176 - RNA, 19 nt, Artificial Sequence
  Description of Artificial Sequence: Synthetic oligonucleotide
  Sense strand starting at position 3222 of SEQ ID NO: 1882023
aggaaaugcuaguuauauu

SEQ ID NO: 2089177 - RNA, 19 nt, Artificial Sequence
  Description of Artificial Sequence: Synthetic oligonucleotide
  Antisense strand to SEQ ID NO: 2089176
aauauaacuagcauuuccu

SEQ ID NO: 2089178 - RNA, 19 nt, Artificial Sequence
  Description of Artificial Sequence: Synthetic oligonucleotide
  Sense strand starting at position 3251 of SEQ ID NO: 1882023
agguuaacauaugccauaa

SEQ ID NO: 2089179 - RNA, 19 nt, Artificial Sequence
  Description of Artificial Sequence: Synthetic oligonucleotide
  Antisense strand to SEQ ID NO: 2089178
uuauggcauauguuaaccu

SEQ ID NO: 2089180 - RNA, 19 nt, Artificial Sequence
  Description of Artificial Sequence: Synthetic oligonucleotide
  Sense strand starting at position 3381 of SEQ ID NO: 1882023
ugaggacucaaacgucaaa

SEQ ID NO: 2089181 - RNA, 19 nt, Artificial Sequence
  Description of Artificial Sequence: Synthetic oligonucleotide
  Antisense strand to SEQ ID NO: 2089180
uuugacguuugaguccuca

SEQ ID NO: 2089182 - RNA, 19 nt, Artificial Sequence
  Description of Artificial Sequence: Synthetic oligonucleotide
  Sense strand starting at position 3392 of SEQ ID NO: 1882023
acgucaaauagugagaagu

SEQ ID NO: 2089183 - RNA, 19 nt, Artificial Sequence
  Description of Artificial Sequence: Synthetic oligonucleotide
  Antisense strand to SEQ ID NO: 2089182
acuucucacuauuugacgu

SEQ ID NO: 2089184 - RNA, 19 nt, Artificial Sequence
  Description of Artificial Sequence: Synthetic oligonucleotide
  Sense strand starting at position 3402 of SEQ ID NO: 1882023
gugagaaguuucuuacuuu

SEQ ID NO: 2089185 - RNA, 19 nt, Artificial Sequence
  Description of Artificial Sequence: Synthetic oligonucleotide
  Antisense strand to SEQ ID NO: 2089184
aaaguaagaaacuucucac

SEQ ID NO: 2089186 - RNA, 19 nt, Artificial Sequence
  Description of Artificial Sequence: Synthetic oligonucleotide
  Sense strand starting at position 3405 of SEQ ID NO: 1882023
agaaguuucuuacuuuaga

SEQ ID NO: 2089187 - RNA, 19 nt, Artificial Sequence
  Description of Artificial Sequence: Synthetic oligonucleotide
  Antisense strand to SEQ ID NO: 2089186
ucuaaaguaagaaacuucu

SEQ ID NO: 2089188 - RNA, 19 nt, Artificial Sequence
  Description of Artificial Sequence: Synthetic oligonucleotide
  Sense strand starting at position 3463 of SEQ ID NO: 1882023
gauacauggcaauguuaag

SEQ ID NO: 2089189 - RNA, 19 nt, Artificial Sequence
  Description of Artificial Sequence: Synthetic oligonucleotide
  Antisense strand to SEQ ID NO: 2089188
cuuaacauugccauguauc

SEQ ID NO: 2089190 - RNA, 19 nt, Artificial Sequence
  Description of Artificial Sequence: Synthetic oligonucleotide
  Sense strand starting at position 3748 of SEQ ID NO: 1882023
cgccuuagccucccgauua

SEQ ID NO: 2089191 - RNA, 19 nt, Artificial Sequence
  Description of Artificial Sequence: Synthetic oligonucleotide
  Antisense strand to SEQ ID NO: 2089190
uaaucgggaggcuaaggcg

SEQ ID NO: 2089192 - RNA, 19 nt, Artificial Sequence
  Description of Artificial Sequence: Synthetic oligonucleotide
  Sense strand starting at position 3861 of SEQ ID NO: 1882023
gugacccuccgagauuguu

SEQ ID NO: 2089193 - RNA, 19 nt, Artificial Sequence
  Description of Artificial Sequence: Synthetic oligonucleotide
  Antisense strand to SEQ ID NO: 2089192
aacaaucucggagggucac

SEQ ID NO: 2089194 - RNA, 19 nt, Artificial Sequence
  Description of Artificial Sequence: Synthetic oligonucleotide
  Sense strand starting at position 3938 of SEQ ID NO: 1882023
aaggguuaguacuucuaac

SEQ ID NO: 2089195 - RNA, 19 nt, Artificial Sequence
  Description of Artificial Sequence: Synthetic oligonucleotide
  Antisense strand to SEQ ID NO: 2089194
guuagaaguacuaacccuu

SEQ ID NO: 2089196 - RNA, 19 nt, Artificial Sequence
  Description of Artificial Sequence: Synthetic oligonucleotide
  Sense strand starting at position 14 of SEQ ID NO: 1882024
agaaccgauuuccauauaa

SEQ ID NO: 2089197 - RNA, 19 nt, Artificial Sequence
  Description of Artificial Sequence: Synthetic oligonucleotide
  Antisense strand to SEQ ID NO: 2089196
uuauauggaaaucgguucu

SEQ ID NO: 2089198 - RNA, 19 nt, Artificial Sequence
  Description of Artificial Sequence: Synthetic oligonucleotide
  Sense strand starting at position 326 of SEQ ID NO: 1882024
ggguuuaaccaguacacca

SEQ ID NO: 2089199 - RNA, 19 nt, Artificial Sequence
  Description of Artificial Sequence: Synthetic oligonucleotide
  Antisense strand to SEQ ID NO: 2089198
ugguguacugguuaaaccc

SEQ ID NO: 2089200 - RNA, 19 nt, Artificial Sequence
  Description of Artificial Sequence: Synthetic oligonucleotide
  Sense strand starting at position 347 of SEQ ID NO: 1882024
uucggaaguuagcacauaa

SEQ ID NO: 2089201 - RNA, 19 nt, Artificial Sequence
  Description of Artificial Sequence: Synthetic oligonucleotide
  Antisense strand to SEQ ID NO: 2089200
uuaugugcuaacuuccgaa

SEQ ID NO: 2089202 - RNA, 19 nt, Artificial Sequence
  Description of Artificial Sequence: Synthetic oligonucleotide
  Sense strand starting at position 377 of SEQ ID NO: 1882024
agucaaaugcacuacggau

SEQ ID NO: 2089203 - RNA, 19 nt, Artificial Sequence
  Description of Artificial Sequence: Synthetic oligonucleotide
  Antisense strand to SEQ ID NO: 2089202
auccguagugcauuugacu

SEQ ID NO: 2089204 - RNA, 19 nt, Artificial Sequence
  Description of Artificial Sequence: Synthetic oligonucleotide
  Sense strand starting at position 460 of SEQ ID NO: 1882024
ggucaccucuccgaaggaa

SEQ ID NO: 2089205 - RNA, 19 nt, Artificial Sequence
  Description of Artificial Sequence: Synthetic oligonucleotide
  Antisense strand to SEQ ID NO: 2089204
uuccuucggagaggugacc

SEQ ID NO: 2089206 - RNA, 19 nt, Artificial Sequence
  Description of Artificial Sequence: Synthetic oligonucleotide
  Sense strand starting at position 3677 of SEQ ID NO: 1882024
gagguacaauuugaagagu

SEQ ID NO: 2089207 - RNA, 19 nt, Artificial Sequence
  Description of Artificial Sequence: Synthetic oligonucleotide
  Antisense strand to SEQ ID NO: 2089206
acucuucaaauuguaccuc

SEQ ID NO: 2089208 - RNA, 19 nt, Artificial Sequence
  Description of Artificial Sequence: Synthetic oligonucleotide
  Sense strand starting at position 3686 of SEQ ID NO: 1882024
uuugaagaguugcgguaua

SEQ ID NO: 2089209 - RNA, 19 nt, Artificial Sequence
  Description of Artificial Sequence: Synthetic oligonucleotide
  Antisense strand to SEQ ID NO: 2089208
uauaccgcaacucuucaaa

SEQ ID NO: 2089210 - RNA, 19 nt, Artificial Sequence
  Description of Artificial Sequence: Synthetic oligonucleotide
  Sense strand starting at position 3705 of SEQ ID NO: 1882024
cgcacuguuucgugaggaa

SEQ ID NO: 2089211 - RNA, 19 nt, Artificial Sequence
  Description of Artificial Sequence: Synthetic oligonucleotide
  Antisense strand to SEQ ID NO: 2089210
uuccucacgaaacagugcg

SEQ ID NO: 2089212 - RNA, 19 nt, Artificial Sequence
  Description of Artificial Sequence: Synthetic oligonucleotide
  Sense strand starting at position 3725 of SEQ ID NO: 1882024
aacggaguuucuguaacaa

SEQ ID NO: 2089213 - RNA, 19 nt, Artificial Sequence
  Description of Artificial Sequence: Synthetic oligonucleotide
  Antisense strand to SEQ ID NO: 2089212
uuguuacagaaacuccguu

SEQ ID NO: 2089214 - RNA, 19 nt, Artificial Sequence
  Description of Artificial Sequence: Synthetic oligonucleotide
  Sense strand starting at position 3729 of SEQ ID NO: 1882024
gaguuucuguaacaaagca

SEQ ID NO: 2089215 - RNA, 19 nt, Artificial Sequence
  Description of Artificial Sequence: Synthetic oligonucleotide
  Antisense strand to SEQ ID NO: 2089214
ugcuuuguuacagaaacuc

SEQ ID NO: 2089216 - RNA, 19 nt, Artificial Sequence
  Description of Artificial Sequence: Synthetic oligonucleotide
  Sense strand starting at position 3811 of SEQ ID NO: 1882024
gcugucugugcugucaaga

SEQ ID NO: 2089217 - RNA, 19 nt, Artificial Sequence
  Description of Artificial Sequence: Synthetic oligonucleotide
  Antisense strand to SEQ ID NO: 2089216
ucuugacagcacagacagc

SEQ ID NO: 2089218 - RNA, 19 nt, Artificial Sequence
  Description of Artificial Sequence: Synthetic oligonucleotide
  Sense strand starting at position 3816 of SEQ ID NO: 1882024
cugugcugucaagaauaaa

SEQ ID NO: 2089219 - RNA, 19 nt, Artificial Sequence
  Description of Artificial Sequence: Synthetic oligonucleotide
  Antisense strand to SEQ ID NO: 2089218
uuuauucuugacagcacag

SEQ ID NO: 2089220 - RNA, 19 nt, Artificial Sequence
  Description of Artificial Sequence: Synthetic oligonucleotide
  Sense strand starting at position 3907 of SEQ ID NO: 1882024
agucucauggauugagacu

SEQ ID NO: 2089221 - RNA, 19 nt, Artificial Sequence
  Description of Artificial Sequence: Synthetic oligonucleotide
  Antisense strand to SEQ ID NO: 2089220
agucucaauccaugagacu

SEQ ID NO: 2089222 - RNA, 19 nt, Artificial Sequence
  Description of Artificial Sequence: Synthetic oligonucleotide
  Sense strand starting at position 3930 of SEQ ID NO: 1882024
uuacuuacuuugucauaga

SEQ ID NO: 2089223 - RNA, 19 nt, Artificial Sequence
  Description of Artificial Sequence: Synthetic oligonucleotide
  Antisense strand to SEQ ID NO: 2089222
ucuaugacaaaguaaguaa

SEQ ID NO: 2089224 - RNA, 19 nt, Artificial Sequence
  Description of Artificial Sequence: Synthetic oligonucleotide
  Sense strand starting at position 3933 of SEQ ID NO: 1882024
cuuacuuugucauagacca

SEQ ID NO: 2089225 - RNA, 19 nt, Artificial Sequence
  Description of Artificial Sequence: Synthetic oligonucleotide
  Antisense strand to SEQ ID NO: 2089224
uggucuaugacaaaguaag

SEQ ID NO: 2089226 - RNA, 19 nt, Artificial Sequence
  Description of Artificial Sequence: Synthetic oligonucleotide
  Sense strand starting at position 3945 of SEQ ID NO: 1882024
uagaccagucuguguugua

SEQ ID NO: 2089227 - RNA, 19 nt, Artificial Sequence
  Description of Artificial Sequence: Synthetic oligonucleotide
  Antisense strand to SEQ ID NO: 2089226
uacaacacagacuggucua

SEQ ID NO: 2089228 - RNA, 19 nt, Artificial Sequence
  Description of Artificial Sequence: Synthetic oligonucleotide
  Sense strand starting at position 3946 of SEQ ID NO: 1882024
agaccagucuguguuguaa

SEQ ID NO: 2089229 - RNA, 19 nt, Artificial Sequence
  Description of Artificial Sequence: Synthetic oligonucleotide
  Antisense strand to SEQ ID NO: 2089228
uuacaacacagacuggucu

SEQ ID NO: 2089230 - RNA, 19 nt, Artificial Sequence
  Description of Artificial Sequence: Synthetic oligonucleotide
  Sense strand starting at position 3948 of SEQ ID NO: 1882024
accagucuguguuguaaau

SEQ ID NO: 2089231 - RNA, 19 nt, Artificial Sequence
  Description of Artificial Sequence: Synthetic oligonucleotide
  Antisense strand to SEQ ID NO: 2089230
auuuacaacacagacuggu

SEQ ID NO: 2089232 - RNA, 19 nt, Artificial Sequence
  Description of Artificial Sequence: Synthetic oligonucleotide
  Sense strand starting at position 3950 of SEQ ID NO: 1882024
cagucuguguuguaaauuc

SEQ ID NO: 2089233 - RNA, 19 nt, Artificial Sequence
  Description of Artificial Sequence: Synthetic oligonucleotide
  Antisense strand to SEQ ID NO: 2089232
gaauuuacaacacagacug

SEQ ID NO: 2089234 - RNA, 19 nt, Artificial Sequence
  Description of Artificial Sequence: Synthetic oligonucleotide
  Sense strand starting at position 1070 of SEQ ID NO: 1882025
guaauuacacaacacguau

SEQ ID NO: 2089235 - RNA, 19 nt, Artificial Sequence
  Description of Artificial Sequence: Synthetic oligonucleotide
  Antisense strand to SEQ ID NO: 2089234
auacguguuguguaauuac

SEQ ID NO: 2089236 - RNA, 19 nt, Artificial Sequence
  Description of Artificial Sequence: Synthetic oligonucleotide
  Sense strand starting at position 1108 of SEQ ID NO: 1882025
acaccuuuccugcaggaau

SEQ ID NO: 2089237 - RNA, 19 nt, Artificial Sequence
  Description of Artificial Sequence: Synthetic oligonucleotide
  Antisense strand to SEQ ID NO: 2089236
auuccugcaggaaaggugu

SEQ ID NO: 2089238 - RNA, 19 nt, Artificial Sequence
  Description of Artificial Sequence: Synthetic oligonucleotide
  Sense strand starting at position 1154 of SEQ ID NO: 1882025
gccugauccaguuaaggcu

SEQ ID NO: 2089239 - RNA, 19 nt, Artificial Sequence
  Description of Artificial Sequence: Synthetic oligonucleotide
  Antisense strand to SEQ ID NO: 2089238
agccuuaacuggaucaggc

SEQ ID NO: 2089240 - RNA, 19 nt, Artificial Sequence
  Description of Artificial Sequence: Synthetic oligonucleotide
  Sense strand starting at position 1184 of SEQ ID NO: 1882025
agggccagcggguauaauu

SEQ ID NO: 2089241 - RNA, 19 nt, Artificial Sequence
  Description of Artificial Sequence: Synthetic oligonucleotide
  Antisense strand to SEQ ID NO: 2089240
aauuauacccgcuggcccu

SEQ ID NO: 2089242 - RNA, 19 nt, Artificial Sequence
  Description of Artificial Sequence: Synthetic oligonucleotide
  Sense strand starting at position 1485 of SEQ ID NO: 1882025
gugucaacacaauguaaua

SEQ ID NO: 2089243 - RNA, 19 nt, Artificial Sequence
  Description of Artificial Sequence: Synthetic oligonucleotide
  Antisense strand to SEQ ID NO: 2089242
uauuacauuguguugacac

SEQ ID NO: 2089244 - RNA, 19 nt, Artificial Sequence
  Description of Artificial Sequence: Synthetic oligonucleotide
  Sense strand starting at position 1498 of SEQ ID NO: 1882025
guaauaagugcugaaauag

SEQ ID NO: 2089245 - RNA, 19 nt, Artificial Sequence
  Description of Artificial Sequence: Synthetic oligonucleotide
  Antisense strand to SEQ ID NO: 2089244
cuauuucagcacuuauuac

SEQ ID NO: 2089246 - RNA, 19 nt, Artificial Sequence
  Description of Artificial Sequence: Synthetic oligonucleotide
  Sense strand starting at position 1577 of SEQ ID NO: 1882025
agagaagacuuccggaaga

SEQ ID NO: 2089247 - RNA, 19 nt, Artificial Sequence
  Description of Artificial Sequence: Synthetic oligonucleotide
  Antisense strand to SEQ ID NO: 2089246
ucuuccggaagucuucucu

SEQ ID NO: 2089248 - RNA, 19 nt, Artificial Sequence
  Description of Artificial Sequence: Synthetic oligonucleotide
  Sense strand starting at position 2222 of SEQ ID NO: 1882025
gccugaagaccuggaauug

SEQ ID NO: 2089249 - RNA, 19 nt, Artificial Sequence
  Description of Artificial Sequence: Synthetic oligonucleotide
  Antisense strand to SEQ ID NO: 2089248
caauuccaggucuucaggc

SEQ ID NO: 2089250 - RNA, 19 nt, Artificial Sequence
  Description of Artificial Sequence: Synthetic oligonucleotide
  Sense strand starting at position 2239 of SEQ ID NO: 1882025
uggcgacuucgauauuaac

SEQ ID NO: 2089251 - RNA, 19 nt, Artificial Sequence
  Description of Artificial Sequence: Synthetic oligonucleotide
  Antisense strand to SEQ ID NO: 2089250
guuaauaucgaagucgcca

SEQ ID NO: 2089252 - RNA, 19 nt, Artificial Sequence
  Description of Artificial Sequence: Synthetic oligonucleotide
  Sense strand starting at position 2245 of SEQ ID NO: 1882025
cuucgauauuaacaaggau

SEQ ID NO: 2089253 - RNA, 19 nt, Artificial Sequence
  Description of Artificial Sequence: Synthetic oligonucleotide
  Antisense strand to SEQ ID NO: 2089252
auccuuguuaauaucgaag

SEQ ID NO: 2089254 - RNA, 19 nt, Artificial Sequence
  Description of Artificial Sequence: Synthetic oligonucleotide
  Sense strand starting at position 2414 of SEQ ID NO: 1882025
ccucgaccucccugaaguu

SEQ ID NO: 2089255 - RNA, 19 nt, Artificial Sequence
  Description of Artificial Sequence: Synthetic oligonucleotide
  Antisense strand to SEQ ID NO: 2089254
aacuucagggaggucgagg

SEQ ID NO: 2089256 - RNA, 19 nt, Artificial Sequence
  Description of Artificial Sequence: Synthetic oligonucleotide
  Sense strand starting at position 2538 of SEQ ID NO: 1882025
auccuaauccgcgaaugcu

SEQ ID NO: 2089257 - RNA, 19 nt, Artificial Sequence
  Description of Artificial Sequence: Synthetic oligonucleotide
  Antisense strand to SEQ ID NO: 2089256
agcauucgcggauuaggau

SEQ ID NO: 2089258 - RNA, 19 nt, Artificial Sequence
  Description of Artificial Sequence: Synthetic oligonucleotide
  Sense strand starting at position 2668 of SEQ ID NO: 1882025
ugcagaaacccguggagaa

SEQ ID NO: 2089259 - RNA, 19 nt, Artificial Sequence
  Description of Artificial Sequence: Synthetic oligonucleotide
  Antisense strand to SEQ ID NO: 2089258
uucuccacggguuucugca

SEQ ID NO: 2089260 - RNA, 19 nt, Artificial Sequence
  Description of Artificial Sequence: Synthetic oligonucleotide
  Sense strand starting at position 2669 of SEQ ID NO: 1882025
gcagaaacccguggagaaa

SEQ ID NO: 2089261 - RNA, 19 nt, Artificial Sequence
  Description of Artificial Sequence: Synthetic oligonucleotide
  Antisense strand to SEQ ID NO: 2089260
uuucuccacggguuucugc

SEQ ID NO: 2089262 - RNA, 19 nt, Artificial Sequence
  Description of Artificial Sequence: Synthetic oligonucleotide
  Sense strand starting at position 2697 of SEQ ID NO: 1882025
ggacuuuagccuugcuguu

SEQ ID NO: 2089263 - RNA, 19 nt, Artificial Sequence
  Description of Artificial Sequence: Synthetic oligonucleotide
  Antisense strand to SEQ ID NO: 2089262
aacagcaaggcuaaagucc

SEQ ID NO: 2089264 - RNA, 19 nt, Artificial Sequence
  Description of Artificial Sequence: Synthetic oligonucleotide
  Sense strand starting at position 2714 of SEQ ID NO: 1882025
uugaucuuguuuccaugaa

SEQ ID NO: 2089265 - RNA, 19 nt, Artificial Sequence
  Description of Artificial Sequence: Synthetic oligonucleotide
  Antisense strand to SEQ ID NO: 2089264
uucauggaaacaagaucaa

SEQ ID NO: 2089266 - RNA, 19 nt, Artificial Sequence
  Description of Artificial Sequence: Synthetic oligonucleotide
  Sense strand starting at position 2735 of SEQ ID NO: 1882025
aauuuauauucgcaggguu

SEQ ID NO: 2089267 - RNA, 19 nt, Artificial Sequence
  Description of Artificial Sequence: Synthetic oligonucleotide
  Antisense strand to SEQ ID NO: 2089266
aacccugcgaauauaaauu

SEQ ID NO: 2089268 - RNA, 19 nt, Artificial Sequence
  Description of Artificial Sequence: Synthetic oligonucleotide
  Sense strand starting at position 2737 of SEQ ID NO: 1882025
uuuauauucgcaggguuau

SEQ ID NO: 2089269 - RNA, 19 nt, Artificial Sequence
  Description of Artificial Sequence: Synthetic oligonucleotide
  Antisense strand to SEQ ID NO: 2089268
auaacccugcgaauauaaa

SEQ ID NO: 2089270 - RNA, 19 nt, Artificial Sequence
  Description of Artificial Sequence: Synthetic oligonucleotide
  Sense strand starting at position 2738 of SEQ ID NO: 1882025
uuauauucgcaggguuaua

SEQ ID NO: 2089271 - RNA, 19 nt, Artificial Sequence
  Description of Artificial Sequence: Synthetic oligonucleotide
  Antisense strand to SEQ ID NO: 2089270
uauaacccugcgaauauaa

SEQ ID NO: 2089272 - RNA, 19 nt, Artificial Sequence
  Description of Artificial Sequence: Synthetic oligonucleotide
  Sense strand starting at position 2764 of SEQ ID NO: 1882025
uuguauuccgggcaacaua

SEQ ID NO: 2089273 - RNA, 19 nt, Artificial Sequence
  Description of Artificial Sequence: Synthetic oligonucleotide
  Antisense strand to SEQ ID NO: 2089272
uauguugcccggaauacaa

SEQ ID NO: 2089274 - RNA, 19 nt, Artificial Sequence
  Description of Artificial Sequence: Synthetic oligonucleotide
  Sense strand starting at position 2858 of SEQ ID NO: 1882025
gagagaaguuagucaauau

SEQ ID NO: 2089275 - RNA, 19 nt, Artificial Sequence
  Description of Artificial Sequence: Synthetic oligonucleotide
  Antisense strand to SEQ ID NO: 2089274
auauugacuaacuucucuc

SEQ ID NO: 2089276 - RNA, 19 nt, Artificial Sequence
  Description of Artificial Sequence: Synthetic oligonucleotide
  Sense strand starting at position 2862 of SEQ ID NO: 1882025
gaaguuagucaauauaguu

SEQ ID NO: 2089277 - RNA, 19 nt, Artificial Sequence
  Description of Artificial Sequence: Synthetic oligonucleotide
  Antisense strand to SEQ ID NO: 2089276
aacuauauugacuaacuuc

SEQ ID NO: 2089278 - RNA, 19 nt, Artificial Sequence
  Description of Artificial Sequence: Synthetic oligonucleotide
  Sense strand starting at position 2910 of SEQ ID NO: 1882025
ccagguagugugugagaau

SEQ ID NO: 2089279 - RNA, 19 nt, Artificial Sequence
  Description of Artificial Sequence: Synthetic oligonucleotide
  Antisense strand to SEQ ID NO: 2089278
auucucacacacuaccugg

SEQ ID NO: 2089280 - RNA, 19 nt, Artificial Sequence
  Description of Artificial Sequence: Synthetic oligonucleotide
  Sense strand starting at position 3006 of SEQ ID NO: 1882025
gaggaagcguguucuucuu

SEQ ID NO: 2089281 - RNA, 19 nt, Artificial Sequence
  Description of Artificial Sequence: Synthetic oligonucleotide
  Antisense strand to SEQ ID NO: 2089280
aagaagaacacgcuuccuc

SEQ ID NO: 2089282 - RNA, 19 nt, Artificial Sequence
  Description of Artificial Sequence: Synthetic oligonucleotide
  Sense strand starting at position 3024 of SEQ ID NO: 1882025
uuucucacuguagagauua

SEQ ID NO: 2089283 - RNA, 19 nt, Artificial Sequence
  Description of Artificial Sequence: Synthetic oligonucleotide
  Antisense strand to SEQ ID NO: 2089282
uaaucucuacagugagaaa

SEQ ID NO: 2089284 - RNA, 19 nt, Artificial Sequence
  Description of Artificial Sequence: Synthetic oligonucleotide
  Sense strand starting at position 3095 of SEQ ID NO: 1882025
uuuagaugcagcuagaguu

SEQ ID NO: 2089285 - RNA, 19 nt, Artificial Sequence
  Description of Artificial Sequence: Synthetic oligonucleotide
  Antisense strand to SEQ ID NO: 2089284
aacucuagcugcaucuaaa

SEQ ID NO: 2089286 - RNA, 19 nt, Artificial Sequence
  Description of Artificial Sequence: Synthetic oligonucleotide
  Sense strand starting at position 3167 of SEQ ID NO: 1882025
cuaagacuggcauggcaau

SEQ ID NO: 2089287 - RNA, 19 nt, Artificial Sequence
  Description of Artificial Sequence: Synthetic oligonucleotide
  Antisense strand to SEQ ID NO: 2089286
auugccaugccagucuuag

SEQ ID NO: 2089288 - RNA, 19 nt, Artificial Sequence
  Description of Artificial Sequence: Synthetic oligonucleotide
  Sense strand starting at position 3225 of SEQ ID NO: 1882025
cauuguagguaugcaauaa

SEQ ID NO: 2089289 - RNA, 19 nt, Artificial Sequence
  Description of Artificial Sequence: Synthetic oligonucleotide
  Antisense strand to SEQ ID NO: 2089288
uuauugcauaccuacaaug

SEQ ID NO: 2089290 - RNA, 19 nt, Artificial Sequence
  Description of Artificial Sequence: Synthetic oligonucleotide
  Sense strand starting at position 3343 of SEQ ID NO: 1882025
gcagauugguucucagagu

SEQ ID NO: 2089291 - RNA, 19 nt, Artificial Sequence
  Description of Artificial Sequence: Synthetic oligonucleotide
  Antisense strand to SEQ ID NO: 2089290
acucugagaaccaaucugc

SEQ ID NO: 2089292 - RNA, 19 nt, Artificial Sequence
  Description of Artificial Sequence: Synthetic oligonucleotide
  Sense strand starting at position 3349 of SEQ ID NO: 1882025
ugguucucagaguagauau

SEQ ID NO: 2089293 - RNA, 19 nt, Artificial Sequence
  Description of Artificial Sequence: Synthetic oligonucleotide
  Antisense strand to SEQ ID NO: 2089292
auaucuacucugagaacca

SEQ ID NO: 2089294 - RNA, 19 nt, Artificial Sequence
  Description of Artificial Sequence: Synthetic oligonucleotide
  Sense strand starting at position 3357 of SEQ ID NO: 1882025
agaguagauaucugugaga

SEQ ID NO: 2089295 - RNA, 19 nt, Artificial Sequence
  Description of Artificial Sequence: Synthetic oligonucleotide
  Antisense strand to SEQ ID NO: 2089294
ucucacagauaucuacucu

SEQ ID NO: 2089296 - RNA, 19 nt, Artificial Sequence
  Description of Artificial Sequence: Synthetic oligonucleotide
  Sense strand starting at position 3359 of SEQ ID NO: 1882025
aguagauaucugugagaca

SEQ ID NO: 2089297 - RNA, 19 nt, Artificial Sequence
  Description of Artificial Sequence: Synthetic oligonucleotide
  Antisense strand to SEQ ID NO: 2089296
ugucucacagauaucuacu

SEQ ID NO: 2089298 - RNA, 19 nt, Artificial Sequence
  Description of Artificial Sequence: Synthetic oligonucleotide
  Sense strand starting at position 3465 of SEQ ID NO: 1882025
cgaguaacuuuaguguauu

SEQ ID NO: 2089299 - RNA, 19 nt, Artificial Sequence
  Description of Artificial Sequence: Synthetic oligonucleotide
  Antisense strand to SEQ ID NO: 2089298
aauacacuaaaguuacucg

SEQ ID NO: 2089300 - RNA, 19 nt, Artificial Sequence
  Description of Artificial Sequence: Synthetic oligonucleotide
  Sense strand starting at position 3478 of SEQ ID NO: 1882025
uguauugugcuggguauua

SEQ ID NO: 2089301 - RNA, 19 nt, Artificial Sequence
  Description of Artificial Sequence: Synthetic oligonucleotide
  Antisense strand to SEQ ID NO: 2089300
uaauacccagcacaauaca

SEQ ID NO: 2089302 - RNA, 19 nt, Artificial Sequence
  Description of Artificial Sequence: Synthetic oligonucleotide
  Sense strand starting at position 3875 of SEQ ID NO: 1882025
auacauugcucaccguagu

SEQ ID NO: 2089303 - RNA, 19 nt, Artificial Sequence
  Description of Artificial Sequence: Synthetic oligonucleotide
  Antisense strand to SEQ ID NO: 2089302
acuacggugagcaauguau

SEQ ID NO: 2089304 - RNA, 19 nt, Artificial Sequence
  Description of Artificial Sequence: Synthetic oligonucleotide
  Sense strand starting at position 3878 of SEQ ID NO: 1882025
cauugcucaccguaguuaa

SEQ ID NO: 2089305 - RNA, 19 nt, Artificial Sequence
  Description of Artificial Sequence: Synthetic oligonucleotide
  Antisense strand to SEQ ID NO: 2089304
uuaacuacggugagcaaug

SEQ ID NO: 2089306 - RNA, 19 nt, Artificial Sequence
  Description of Artificial Sequence: Synthetic oligonucleotide
  Sense strand starting at position 3881 of SEQ ID NO: 1882025
ugcucaccguaguuaauaa

SEQ ID NO: 2089307 - RNA, 19 nt, Artificial Sequence
  Description of Artificial Sequence: Synthetic oligonucleotide
  Antisense strand to SEQ ID NO: 2089306
uuauuaacuacggugagca

SEQ ID NO: 2089308 - RNA, 19 nt, Artificial Sequence
  Description of Artificial Sequence: Synthetic oligonucleotide
  Sense strand starting at position 3917 of SEQ ID NO: 1882025
cccgaaagcuucccugaaa

SEQ ID NO: 2089309 - RNA, 19 nt, Artificial Sequence
  Description of Artificial Sequence: Synthetic oligonucleotide
  Antisense strand to SEQ ID NO: 2089308
uuucagggaagcuuucggg

SEQ ID NO: 2089310 - RNA, 19 nt, Artificial Sequence
  Description of Artificial Sequence: Synthetic oligonucleotide
  Sense strand starting at position 3918 of SEQ ID NO: 1882025
ccgaaagcuucccugaaac

SEQ ID NO: 2089311 - RNA, 19 nt, Artificial Sequence
  Description of Artificial Sequence: Synthetic oligonucleotide
  Antisense strand to SEQ ID NO: 2089310
guuucagggaagcuuucgg

SEQ ID NO: 2089312 - RNA, 19 nt, Artificial Sequence
  Description of Artificial Sequence: Synthetic oligonucleotide
  Sense strand starting at position 3983 of SEQ ID NO: 1882025
gggcuuccuagauguguuu

SEQ ID NO: 2089313 - RNA, 19 nt, Artificial Sequence
  Description of Artificial Sequence: Synthetic oligonucleotide
  Antisense strand to SEQ ID NO: 2089312
aaacacaucuaggaagccc

SEQ ID NO: 2089314 - RNA, 19 nt, Artificial Sequence
  Description of Artificial Sequence: Synthetic oligonucleotide
  Sense strand starting at position 69 of SEQ ID NO: 1882026
ggagaccauuaauugucaa

SEQ ID NO: 2089315 - RNA, 19 nt, Artificial Sequence
  Description of Artificial Sequence: Synthetic oligonucleotide
  Antisense strand to SEQ ID NO: 2089314
uugacaauuaauggucucc

SEQ ID NO: 2089316 - RNA, 19 nt, Artificial Sequence
  Description of Artificial Sequence: Synthetic oligonucleotide
  Sense strand starting at position 253 of SEQ ID NO: 1882026
agaucugugccauacauua

SEQ ID NO: 2089317 - RNA, 19 nt, Artificial Sequence
  Description of Artificial Sequence: Synthetic oligonucleotide
  Antisense strand to SEQ ID NO: 2089316
uaauguauggcacagaucu

SEQ ID NO: 2089318 - RNA, 19 nt, Artificial Sequence
  Description of Artificial Sequence: Synthetic oligonucleotide
  Sense strand starting at position 412 of SEQ ID NO: 1882026
agaaaugucuuauuaggca

SEQ ID NO: 2089319 - RNA, 19 nt, Artificial Sequence
  Description of Artificial Sequence: Synthetic oligonucleotide
  Antisense strand to SEQ ID NO: 2089318
ugccuaauaagacauuucu

SEQ ID NO: 2089320 - RNA, 19 nt, Artificial Sequence
  Description of Artificial Sequence: Synthetic oligonucleotide
  Sense strand starting at position 436 of SEQ ID NO: 1882026
uguagauguuggucauuug

SEQ ID NO: 2089321 - RNA, 19 nt, Artificial Sequence
  Description of Artificial Sequence: Synthetic oligonucleotide
  Antisense strand to SEQ ID NO: 2089320
caaaugaccaacaucuaca

SEQ ID NO: 2089322 - RNA, 19 nt, Artificial Sequence
  Description of Artificial Sequence: Synthetic oligonucleotide
  Sense strand starting at position 439 of SEQ ID NO: 1882026
agauguuggucauuugcua

SEQ ID NO: 2089323 - RNA, 19 nt, Artificial Sequence
  Description of Artificial Sequence: Synthetic oligonucleotide
  Antisense strand to SEQ ID NO: 2089322
uagcaaaugaccaacaucu

SEQ ID NO: 2089324 - RNA, 19 nt, Artificial Sequence
  Description of Artificial Sequence: Synthetic oligonucleotide
  Sense strand starting at position 490 of SEQ ID NO: 1882026
acugaaugggucugcuaaa

SEQ ID NO: 2089325 - RNA, 19 nt, Artificial Sequence
  Description of Artificial Sequence: Synthetic oligonucleotide
  Antisense strand to SEQ ID NO: 2089324
uuuagcagacccauucagu

SEQ ID NO: 2089326 - RNA, 19 nt, Artificial Sequence
  Description of Artificial Sequence: Synthetic oligonucleotide
  Sense strand starting at position 658 of SEQ ID NO: 1882026
gcucaaggcagauauuaug

SEQ ID NO: 2089327 - RNA, 19 nt, Artificial Sequence
  Description of Artificial Sequence: Synthetic oligonucleotide
  Antisense strand to SEQ ID NO: 2089326
cauaauaucugccuugagc

SEQ ID NO: 2089328 - RNA, 19 nt, Artificial Sequence
  Description of Artificial Sequence: Synthetic oligonucleotide
  Sense strand starting at position 752 of SEQ ID NO: 1882026
cugaaacuuccaugguuau

SEQ ID NO: 2089329 - RNA, 19 nt, Artificial Sequence
  Description of Artificial Sequence: Synthetic oligonucleotide
  Antisense strand to SEQ ID NO: 2089328
auaaccauggaaguuucag

SEQ ID NO: 2089330 - RNA, 19 nt, Artificial Sequence
  Description of Artificial Sequence: Synthetic oligonucleotide
  Sense strand starting at position 753 of SEQ ID NO: 1882026
ugaaacuuccaugguuauu

SEQ ID NO: 2089331 - RNA, 19 nt, Artificial Sequence
  Description of Artificial Sequence: Synthetic oligonucleotide
  Antisense strand to SEQ ID NO: 2089330
aauaaccauggaaguuuca

SEQ ID NO: 2089332 - RNA, 19 nt, Artificial Sequence
  Description of Artificial Sequence: Synthetic oligonucleotide
  Sense strand starting at position 814 of SEQ ID NO: 1882026
acuuuauccucacuggagu

SEQ ID NO: 2089333 - RNA, 19 nt, Artificial Sequence
  Description of Artificial Sequence: Synthetic oligonucleotide
  Antisense strand to SEQ ID NO: 2089332
acuccagugaggauaaagu

SEQ ID NO: 2089334 - RNA, 19 nt, Artificial Sequence
  Description of Artificial Sequence: Synthetic oligonucleotide
  Sense strand starting at position 817 of SEQ ID NO: 1882026
uuauccucacuggaguuau

SEQ ID NO: 2089335 - RNA, 19 nt, Artificial Sequence
  Description of Artificial Sequence: Synthetic oligonucleotide
  Antisense strand to SEQ ID NO: 2089334
auaacuccagugaggauaa

SEQ ID NO: 2089336 - RNA, 19 nt, Artificial Sequence
  Description of Artificial Sequence: Synthetic oligonucleotide
  Sense strand starting at position 1212 of SEQ ID NO: 1882026
ucuuauuaugcauaccagu

SEQ ID NO: 2089337 - RNA, 19 nt, Artificial Sequence
  Description of Artificial Sequence: Synthetic oligonucleotide
  Antisense strand to SEQ ID NO: 2089336
acugguaugcauaauaaga

SEQ ID NO: 2089338 - RNA, 19 nt, Artificial Sequence
  Description of Artificial Sequence: Synthetic oligonucleotide
  Sense strand starting at position 1348 of SEQ ID NO: 1882026
aguuuacuacauugggauu

SEQ ID NO: 2089339 - RNA, 19 nt, Artificial Sequence
  Description of Artificial Sequence: Synthetic oligonucleotide
  Antisense strand to SEQ ID NO: 2089338
aaucccaauguaguaaacu

SEQ ID NO: 2089340 - RNA, 19 nt, Artificial Sequence
  Description of Artificial Sequence: Synthetic oligonucleotide
  Sense strand starting at position 1522 of SEQ ID NO: 1882026
aaguaagugccuuguauuu

SEQ ID NO: 2089341 - RNA, 19 nt, Artificial Sequence
  Description of Artificial Sequence: Synthetic oligonucleotide
  Antisense strand to SEQ ID NO: 2089340
aaauacaaggcacuuacuu

SEQ ID NO: 2089342 - RNA, 19 nt, Artificial Sequence
  Description of Artificial Sequence: Synthetic oligonucleotide
  Sense strand starting at position 1527 of SEQ ID NO: 1882026
agugccuuguauuugaaua

SEQ ID NO: 2089343 - RNA, 19 nt, Artificial Sequence
  Description of Artificial Sequence: Synthetic oligonucleotide
  Antisense strand to SEQ ID NO: 2089342
uauucaaauacaaggcacu

SEQ ID NO: 2089344 - RNA, 19 nt, Artificial Sequence
  Description of Artificial Sequence: Synthetic oligonucleotide
  Sense strand starting at position 1771 of SEQ ID NO: 1882026
cgagguucauuugugucau

SEQ ID NO: 2089345 - RNA, 19 nt, Artificial Sequence
  Description of Artificial Sequence: Synthetic oligonucleotide
  Antisense strand to SEQ ID NO: 2089344
augacacaaaugaaccucg

SEQ ID NO: 2089346 - RNA, 19 nt, Artificial Sequence
  Description of Artificial Sequence: Synthetic oligonucleotide
  Sense strand starting at position 1860 of SEQ ID NO: 1882026
ucugaaacuucgguaacaa

SEQ ID NO: 2089347 - RNA, 19 nt, Artificial Sequence
  Description of Artificial Sequence: Synthetic oligonucleotide
  Antisense strand to SEQ ID NO: 2089346
uuguuaccgaaguuucaga

SEQ ID NO: 2089348 - RNA, 19 nt, Artificial Sequence
  Description of Artificial Sequence: Synthetic oligonucleotide
  Sense strand starting at position 2210 of SEQ ID NO: 1882026
uccagaaauugccucugga

SEQ ID NO: 2089349 - RNA, 19 nt, Artificial Sequence
  Description of Artificial Sequence: Synthetic oligonucleotide
  Antisense strand to SEQ ID NO: 2089348
uccagaggcaauuucugga

SEQ ID NO: 2089350 - RNA, 19 nt, Artificial Sequence
  Description of Artificial Sequence: Synthetic oligonucleotide
  Sense strand starting at position 2213 of SEQ ID NO: 1882026
agaaauugccucuggaaua

SEQ ID NO: 2089351 - RNA, 19 nt, Artificial Sequence
  Description of Artificial Sequence: Synthetic oligonucleotide
  Antisense strand to SEQ ID NO: 2089350
uauuccagaggcaauuucu

SEQ ID NO: 2089352 - RNA, 19 nt, Artificial Sequence
  Description of Artificial Sequence: Synthetic oligonucleotide
  Sense strand starting at position 2218 of SEQ ID NO: 1882026
uugccucuggaauaucauu

SEQ ID NO: 2089353 - RNA, 19 nt, Artificial Sequence
  Description of Artificial Sequence: Synthetic oligonucleotide
  Antisense strand to SEQ ID NO: 2089352
aaugauauuccagaggcaa

SEQ ID NO: 2089354 - RNA, 19 nt, Artificial Sequence
  Description of Artificial Sequence: Synthetic oligonucleotide
  Sense strand starting at position 2471 of SEQ ID NO: 1882026
uaugcuagucccgaaauaa

SEQ ID NO: 2089355 - RNA, 19 nt, Artificial Sequence
  Description of Artificial Sequence: Synthetic oligonucleotide
  Antisense strand to SEQ ID NO: 2089354
uuauuucgggacuagcaua

SEQ ID NO: 2089356 - RNA, 19 nt, Artificial Sequence
  Description of Artificial Sequence: Synthetic oligonucleotide
  Sense strand starting at position 2573 of SEQ ID NO: 1882026
gcuuccuuucuagggaaga

SEQ ID NO: 2089357 - RNA, 19 nt, Artificial Sequence
  Description of Artificial Sequence: Synthetic oligonucleotide
  Antisense strand to SEQ ID NO: 2089356
ucuucccuagaaaggaagc

SEQ ID NO: 2089358 - RNA, 19 nt, Artificial Sequence
  Description of Artificial Sequence: Synthetic oligonucleotide
  Sense strand starting at position 2673 of SEQ ID NO: 1882026
acuugauaauuggcccuau

SEQ ID NO: 2089359 - RNA, 19 nt, Artificial Sequence
  Description of Artificial Sequence: Synthetic oligonucleotide
  Antisense strand to SEQ ID NO: 2089358
auagggccaauuaucaagu

SEQ ID NO: 2089360 - RNA, 19 nt, Artificial Sequence
  Description of Artificial Sequence: Synthetic oligonucleotide
  Sense strand starting at position 2727 of SEQ ID NO: 1882026
accugucauuuagaacaga

SEQ ID NO: 2089361 - RNA, 19 nt, Artificial Sequence
  Description of Artificial Sequence: Synthetic oligonucleotide
  Antisense strand to SEQ ID NO: 2089360
ucuguucuaaaugacaggu

SEQ ID NO: 2089362 - RNA, 19 nt, Artificial Sequence
  Description of Artificial Sequence: Synthetic oligonucleotide
  Sense strand starting at position 2767 of SEQ ID NO: 1882026
auuuaagcauaugagaacu

SEQ ID NO: 2089363 - RNA, 19 nt, Artificial Sequence
  Description of Artificial Sequence: Synthetic oligonucleotide
  Antisense strand to SEQ ID NO: 2089362
aguucucauaugcuuaaau

SEQ ID NO: 2089364 - RNA, 19 nt, Artificial Sequence
  Description of Artificial Sequence: Synthetic oligonucleotide
  Sense strand starting at position 2803 of SEQ ID NO: 1882026
aauuaucaugccgggaaca

SEQ ID NO: 2089365 - RNA, 19 nt, Artificial Sequence
  Description of Artificial Sequence: Synthetic oligonucleotide
  Antisense strand to SEQ ID NO: 2089364
uguucccggcaugauaauu

SEQ ID NO: 2089366 - RNA, 19 nt, Artificial Sequence
  Description of Artificial Sequence: Synthetic oligonucleotide
  Sense strand starting at position 2804 of SEQ ID NO: 1882026
auuaucaugccgggaacau

SEQ ID NO: 2089367 - RNA, 19 nt, Artificial Sequence
  Description of Artificial Sequence: Synthetic oligonucleotide
  Antisense strand to SEQ ID NO: 2089366
auguucccggcaugauaau

SEQ ID NO: 2089368 - RNA, 19 nt, Artificial Sequence
  Description of Artificial Sequence: Synthetic oligonucleotide
  Sense strand starting at position 2805 of SEQ ID NO: 1882026
uuaucaugccgggaacauu

SEQ ID NO: 2089369 - RNA, 19 nt, Artificial Sequence
  Description of Artificial Sequence: Synthetic oligonucleotide
  Antisense strand to SEQ ID NO: 2089368
aauguucccggcaugauaa

SEQ ID NO: 2089370 - RNA, 19 nt, Artificial Sequence
  Description of Artificial Sequence: Synthetic oligonucleotide
  Sense strand starting at position 2829 of SEQ ID NO: 1882026
cuuuauugcagaggaagua

SEQ ID NO: 2089371 - RNA, 19 nt, Artificial Sequence
  Description of Artificial Sequence: Synthetic oligonucleotide
  Antisense strand to SEQ ID NO: 2089370
uacuuccucugcaauaaag

SEQ ID NO: 2089372 - RNA, 19 nt, Artificial Sequence
  Description of Artificial Sequence: Synthetic oligonucleotide
  Sense strand starting at position 2830 of SEQ ID NO: 1882026
uuuauugcagaggaaguau

SEQ ID NO: 2089373 - RNA, 19 nt, Artificial Sequence
  Description of Artificial Sequence: Synthetic oligonucleotide
  Antisense strand to SEQ ID NO: 2089372
auacuuccucugcaauaaa

SEQ ID NO: 2089374 - RNA, 19 nt, Artificial Sequence
  Description of Artificial Sequence: Synthetic oligonucleotide
  Sense strand starting at position 2844 of SEQ ID NO: 1882026
aguauaaagccagacucuu

SEQ ID NO: 2089375 - RNA, 19 nt, Artificial Sequence
  Description of Artificial Sequence: Synthetic oligonucleotide
  Antisense strand to SEQ ID NO: 2089374
aagagucuggcuuuauacu

SEQ ID NO: 2089376 - RNA, 19 nt, Artificial Sequence
  Description of Artificial Sequence: Synthetic oligonucleotide
  Sense strand starting at position 2946 of SEQ ID NO: 1882026
cuuucuguugaggaguaaa

SEQ ID NO: 2089377 - RNA, 19 nt, Artificial Sequence
  Description of Artificial Sequence: Synthetic oligonucleotide
  Antisense strand to SEQ ID NO: 2089376
uuuacuccucaacagaaag

SEQ ID NO: 2089378 - RNA, 19 nt, Artificial Sequence
  Description of Artificial Sequence: Synthetic oligonucleotide
  Sense strand starting at position 3015 of SEQ ID NO: 1882026
cagaauagcuuggugaaac

SEQ ID NO: 2089379 - RNA, 19 nt, Artificial Sequence
  Description of Artificial Sequence: Synthetic oligonucleotide
  Antisense strand to SEQ ID NO: 2089378
guuucaccaagcuauucug

SEQ ID NO: 2089380 - RNA, 19 nt, Artificial Sequence
  Description of Artificial Sequence: Synthetic oligonucleotide
  Sense strand starting at position 3110 of SEQ ID NO: 1882026
uuuaaaggaguuugaucuu

SEQ ID NO: 2089381 - RNA, 19 nt, Artificial Sequence
  Description of Artificial Sequence: Synthetic oligonucleotide
  Antisense strand to SEQ ID NO: 2089380
aagaucaaacuccuuuaaa

SEQ ID NO: 2089382 - RNA, 19 nt, Artificial Sequence
  Description of Artificial Sequence: Synthetic oligonucleotide
  Sense strand starting at position 3297 of SEQ ID NO: 1882026
uguuguuaguauuuaguga

SEQ ID NO: 2089383 - RNA, 19 nt, Artificial Sequence
  Description of Artificial Sequence: Synthetic oligonucleotide
  Antisense strand to SEQ ID NO: 2089382
ucacuaaauacuaacaaca

SEQ ID NO: 2089384 - RNA, 19 nt, Artificial Sequence
  Description of Artificial Sequence: Synthetic oligonucleotide
  Sense strand starting at position 3588 of SEQ ID NO: 1882026
gccagaaugaaguaaguuu

SEQ ID NO: 2089385 - RNA, 19 nt, Artificial Sequence
  Description of Artificial Sequence: Synthetic oligonucleotide
  Antisense strand to SEQ ID NO: 2089384
aaacuuacuucauucuggc

SEQ ID NO: 2089386 - RNA, 19 nt, Artificial Sequence
  Description of Artificial Sequence: Synthetic oligonucleotide
  Sense strand starting at position 3628 of SEQ ID NO: 1882026
cuuuguagucucuacauca

SEQ ID NO: 2089387 - RNA, 19 nt, Artificial Sequence
  Description of Artificial Sequence: Synthetic oligonucleotide
  Antisense strand to SEQ ID NO: 2089386
ugauguagagacuacaaag

SEQ ID NO: 2089388 - RNA, 19 nt, Artificial Sequence
  Description of Artificial Sequence: Synthetic oligonucleotide
  Sense strand starting at position 3653 of SEQ ID NO: 1882026
uauaaugggugucugaaga

SEQ ID NO: 2089389 - RNA, 19 nt, Artificial Sequence
  Description of Artificial Sequence: Synthetic oligonucleotide
  Antisense strand to SEQ ID NO: 2089388
ucuucagacacccauuaua

SEQ ID NO: 2089390 - RNA, 19 nt, Artificial Sequence
  Description of Artificial Sequence: Synthetic oligonucleotide
  Sense strand starting at position 3855 of SEQ ID NO: 1882026
cugugaaagauacgcugaa

SEQ ID NO: 2089391 - RNA, 19 nt, Artificial Sequence
  Description of Artificial Sequence: Synthetic oligonucleotide
  Antisense strand to SEQ ID NO: 2089390
uucagcguaucuuucacag

SEQ ID NO: 2089392 - RNA, 19 nt, Artificial Sequence
  Description of Artificial Sequence: Synthetic oligonucleotide
  Sense strand starting at position 3856 of SEQ ID NO: 1882026
ugugaaagauacgcugaaa

SEQ ID NO: 2089393 - RNA, 19 nt, Artificial Sequence
  Description of Artificial Sequence: Synthetic oligonucleotide
  Antisense strand to SEQ ID NO: 2089392
uuucagcguaucuuucaca

SEQ ID NO: 2089394 - RNA, 19 nt, Artificial Sequence
  Description of Artificial Sequence: Synthetic oligonucleotide
  Sense strand starting at position 90 of SEQ ID NO: 1882027
ugguaaauuaaguauguga

SEQ ID NO: 2089395 - RNA, 19 nt, Artificial Sequence
  Description of Artificial Sequence: Synthetic oligonucleotide
  Antisense strand to SEQ ID NO: 2089394
ucacauacuuaauuuacca

SEQ ID NO: 2089396 - RNA, 19 nt, Artificial Sequence
  Description of Artificial Sequence: Synthetic oligonucleotide
  Sense strand starting at position 232 of SEQ ID NO: 1882027
cguugucuuggauaaagga

SEQ ID NO: 2089397 - RNA, 19 nt, Artificial Sequence
  Description of Artificial Sequence: Synthetic oligonucleotide
  Antisense strand to SEQ ID NO: 2089396
uccuuuauccaagacaacg

SEQ ID NO: 2089398 - RNA, 19 nt, Artificial Sequence
  Description of Artificial Sequence: Synthetic oligonucleotide
  Sense strand starting at position 375 of SEQ ID NO: 1882027
guggaaggguugccugaua

SEQ ID NO: 2089399 - RNA, 19 nt, Artificial Sequence
  Description of Artificial Sequence: Synthetic oligonucleotide
  Antisense strand to SEQ ID NO: 2089398
uaucaggcaacccuuccac

SEQ ID NO: 2089400 - RNA, 19 nt, Artificial Sequence
  Description of Artificial Sequence: Synthetic oligonucleotide
  Sense strand starting at position 453 of SEQ ID NO: 1882027
gguuaaauguucuuuggaa

SEQ ID NO: 2089401 - RNA, 19 nt, Artificial Sequence
  Description of Artificial Sequence: Synthetic oligonucleotide
  Antisense strand to SEQ ID NO: 2089400
uuccaaagaacauuuaacc

SEQ ID NO: 2089402 - RNA, 19 nt, Artificial Sequence
  Description of Artificial Sequence: Synthetic oligonucleotide
  Sense strand starting at position 454 of SEQ ID NO: 1882027
guuaaauguucuuuggaaa

SEQ ID NO: 2089403 - RNA, 19 nt, Artificial Sequence
  Description of Artificial Sequence: Synthetic oligonucleotide
  Antisense strand to SEQ ID NO: 2089402
uuuccaaagaacauuuaac

SEQ ID NO: 2089404 - RNA, 19 nt, Artificial Sequence
  Description of Artificial Sequence: Synthetic oligonucleotide
  Sense strand starting at position 539 of SEQ ID NO: 1882027
gccaguacuguugggagaa

SEQ ID NO: 2089405 - RNA, 19 nt, Artificial Sequence
  Description of Artificial Sequence: Synthetic oligonucleotide
  Antisense strand to SEQ ID NO: 2089404
uucucccaacaguacuggc

SEQ ID NO: 2089406 - RNA, 19 nt, Artificial Sequence
  Description of Artificial Sequence: Synthetic oligonucleotide
  Sense strand starting at position 714 of SEQ ID NO: 1882027
gguccaauccuaggguaua

SEQ ID NO: 2089407 - RNA, 19 nt, Artificial Sequence
  Description of Artificial Sequence: Synthetic oligonucleotide
  Antisense strand to SEQ ID NO: 2089406
uauacccuaggauuggacc

SEQ ID NO: 2089408 - RNA, 19 nt, Artificial Sequence
  Description of Artificial Sequence: Synthetic oligonucleotide
  Sense strand starting at position 750 of SEQ ID NO: 1882027
gcacguaucacagcugcuu

SEQ ID NO: 2089409 - RNA, 19 nt, Artificial Sequence
  Description of Artificial Sequence: Synthetic oligonucleotide
  Antisense strand to SEQ ID NO: 2089408
aagcagcugugauacgugc

SEQ ID NO: 2089410 - RNA, 19 nt, Artificial Sequence
  Description of Artificial Sequence: Synthetic oligonucleotide
  Sense strand starting at position 878 of SEQ ID NO: 1882027
gaauuaaacuuggaggaaa

SEQ ID NO: 2089411 - RNA, 19 nt, Artificial Sequence
  Description of Artificial Sequence: Synthetic oligonucleotide
  Antisense strand to SEQ ID NO: 2089410
uuuccuccaaguuuaauuc

SEQ ID NO: 2089412 - RNA, 19 nt, Artificial Sequence
  Description of Artificial Sequence: Synthetic oligonucleotide
  Sense strand starting at position 1074 of SEQ ID NO: 1882027
accuacgagugaccuaauu

SEQ ID NO: 2089413 - RNA, 19 nt, Artificial Sequence
  Description of Artificial Sequence: Synthetic oligonucleotide
  Antisense strand to SEQ ID NO: 2089412
aauuaggucacucguaggu

SEQ ID NO: 2089414 - RNA, 19 nt, Artificial Sequence
  Description of Artificial Sequence: Synthetic oligonucleotide
  Sense strand starting at position 1225 of SEQ ID NO: 1882027
gcaauucucguuuccguga

SEQ ID NO: 2089415 - RNA, 19 nt, Artificial Sequence
  Description of Artificial Sequence: Synthetic oligonucleotide
  Antisense strand to SEQ ID NO: 2089414
ucacggaaacgagaauugc

SEQ ID NO: 2089416 - RNA, 19 nt, Artificial Sequence
  Description of Artificial Sequence: Synthetic oligonucleotide
  Sense strand starting at position 1379 of SEQ ID NO: 1882027
cuggaauagugcucaggga

SEQ ID NO: 2089417 - RNA, 19 nt, Artificial Sequence
  Description of Artificial Sequence: Synthetic oligonucleotide
  Antisense strand to SEQ ID NO: 2089416
ucccugagcacuauuccag

SEQ ID NO: 2089418 - RNA, 19 nt, Artificial Sequence
  Description of Artificial Sequence: Synthetic oligonucleotide
  Sense strand starting at position 1380 of SEQ ID NO: 1882027
uggaauagugcucagggau

SEQ ID NO: 2089419 - RNA, 19 nt, Artificial Sequence
  Description of Artificial Sequence: Synthetic oligonucleotide
  Antisense strand to SEQ ID NO: 2089418
aucccugagcacuauucca

SEQ ID NO: 2089420 - RNA, 19 nt, Artificial Sequence
  Description of Artificial Sequence: Synthetic oligonucleotide
  Sense strand starting at position 1791 of SEQ ID NO: 1882027
gccagaaguacacgaggaa

SEQ ID NO: 2089421 - RNA, 19 nt, Artificial Sequence
  Description of Artificial Sequence: Synthetic oligonucleotide
  Antisense strand to SEQ ID NO: 2089420
uuccucguguacuucuggc

SEQ ID NO: 2089422 - RNA, 19 nt, Artificial Sequence
  Description of Artificial Sequence: Synthetic oligonucleotide
  Sense strand starting at position 1901 of SEQ ID NO: 1882027
acgagaagguguucaccaa

SEQ ID NO: 2089423 - RNA, 19 nt, Artificial Sequence
  Description of Artificial Sequence: Synthetic oligonucleotide
  Antisense strand to SEQ ID NO: 2089422
uuggugaacaccuucucgu

SEQ ID NO: 2089424 - RNA, 19 nt, Artificial Sequence
  Description of Artificial Sequence: Synthetic oligonucleotide
  Sense strand starting at position 2455 of SEQ ID NO: 1882027
ggccguaucccagaacaua

SEQ ID NO: 2089425 - RNA, 19 nt, Artificial Sequence
  Description of Artificial Sequence: Synthetic oligonucleotide
  Antisense strand to SEQ ID NO: 2089424
uauguucugggauacggcc

SEQ ID NO: 2089426 - RNA, 19 nt, Artificial Sequence
  Description of Artificial Sequence: Synthetic oligonucleotide
  Sense strand starting at position 2527 of SEQ ID NO: 1882027
agcgaucuucuccagaaau

SEQ ID NO: 2089427 - RNA, 19 nt, Artificial Sequence
  Description of Artificial Sequence: Synthetic oligonucleotide
  Antisense strand to SEQ ID NO: 2089426
auuucuggagaagaucgcu

SEQ ID NO: 2089428 - RNA, 19 nt, Artificial Sequence
  Description of Artificial Sequence: Synthetic oligonucleotide
  Sense strand starting at position 2651 of SEQ ID NO: 1882027
guuggaagaaaucgggaau

SEQ ID NO: 2089429 - RNA, 19 nt, Artificial Sequence
  Description of Artificial Sequence: Synthetic oligonucleotide
  Antisense strand to SEQ ID NO: 2089428
auucccgauuucuuccaac

SEQ ID NO: 2089430 - RNA, 19 nt, Artificial Sequence
  Description of Artificial Sequence: Synthetic oligonucleotide
  Sense strand starting at position 2731 of SEQ ID NO: 1882027
uuuauaugcugacucaaag

SEQ ID NO: 2089431 - RNA, 19 nt, Artificial Sequence
  Description of Artificial Sequence: Synthetic oligonucleotide
  Antisense strand to SEQ ID NO: 2089430
cuuugagucagcauauaaa

SEQ ID NO: 2089432 - RNA, 19 nt, Artificial Sequence
  Description of Artificial Sequence: Synthetic oligonucleotide
  Sense strand starting at position 2883 of SEQ ID NO: 1882027
uagugauaauaacugucga

SEQ ID NO: 2089433 - RNA, 19 nt, Artificial Sequence
  Description of Artificial Sequence: Synthetic oligonucleotide
  Antisense strand to SEQ ID NO: 2089432
ucgacaguuauuaucacua

SEQ ID NO: 2089434 - RNA, 19 nt, Artificial Sequence
  Description of Artificial Sequence: Synthetic oligonucleotide
  Sense strand starting at position 2891 of SEQ ID NO: 1882027
auaacugucgacugagauu

SEQ ID NO: 2089435 - RNA, 19 nt, Artificial Sequence
  Description of Artificial Sequence: Synthetic oligonucleotide
  Antisense strand to SEQ ID NO: 2089434
aaucucagucgacaguuau

SEQ ID NO: 2089436 - RNA, 19 nt, Artificial Sequence
  Description of Artificial Sequence: Synthetic oligonucleotide
  Sense strand starting at position 2902 of SEQ ID NO: 1882027
cugagauuguauuccagac

SEQ ID NO: 2089437 - RNA, 19 nt, Artificial Sequence
  Description of Artificial Sequence: Synthetic oligonucleotide
  Antisense strand to SEQ ID NO: 2089436
gucuggaauacaaucucag

SEQ ID NO: 2089438 - RNA, 19 nt, Artificial Sequence
  Description of Artificial Sequence: Synthetic oligonucleotide
  Sense strand starting at position 3056 of SEQ ID NO: 1882027
uagcuauuagcuuuguguu

SEQ ID NO: 2089439 - RNA, 19 nt, Artificial Sequence
  Description of Artificial Sequence: Synthetic oligonucleotide
  Antisense strand to SEQ ID NO: 2089438
aacacaaagcuaauagcua

SEQ ID NO: 2089440 - RNA, 19 nt, Artificial Sequence
  Description of Artificial Sequence: Synthetic oligonucleotide
  Sense strand starting at position 3169 of SEQ ID NO: 1882027
gcagcacgucacuuuagua

SEQ ID NO: 2089441 - RNA, 19 nt, Artificial Sequence
  Description of Artificial Sequence: Synthetic oligonucleotide
  Antisense strand to SEQ ID NO: 2089440
uacuaaagugacgugcugc

SEQ ID NO: 2089442 - RNA, 19 nt, Artificial Sequence
  Description of Artificial Sequence: Synthetic oligonucleotide
  Sense strand starting at position 3176 of SEQ ID NO: 1882027
gucacuuuaguacagaaua

SEQ ID NO: 2089443 - RNA, 19 nt, Artificial Sequence
  Description of Artificial Sequence: Synthetic oligonucleotide
  Antisense strand to SEQ ID NO: 2089442
uauucuguacuaaagugac

SEQ ID NO: 2089444 - RNA, 19 nt, Artificial Sequence
  Description of Artificial Sequence: Synthetic oligonucleotide
  Sense strand starting at position 3289 of SEQ ID NO: 1882027
augaguuugacguauaugu

SEQ ID NO: 2089445 - RNA, 19 nt, Artificial Sequence
  Description of Artificial Sequence: Synthetic oligonucleotide
  Antisense strand to SEQ ID NO: 2089444
acauauacgucaaacucau

SEQ ID NO: 2089446 - RNA, 19 nt, Artificial Sequence
  Description of Artificial Sequence: Synthetic oligonucleotide
  Sense strand starting at position 3338 of SEQ ID NO: 1882027
ugugaacaauuggaauuua

SEQ ID NO: 2089447 - RNA, 19 nt, Artificial Sequence
  Description of Artificial Sequence: Synthetic oligonucleotide
  Antisense strand to SEQ ID NO: 2089446
uaaauuccaauuguucaca

SEQ ID NO: 2089448 - RNA, 19 nt, Artificial Sequence
  Description of Artificial Sequence: Synthetic oligonucleotide
  Sense strand starting at position 3354 of SEQ ID NO: 1882027
uuaaguaagucagauuuag

SEQ ID NO: 2089449 - RNA, 19 nt, Artificial Sequence
  Description of Artificial Sequence: Synthetic oligonucleotide
  Antisense strand to SEQ ID NO: 2089448
cuaaaucugacuuacuuaa

SEQ ID NO: 2089450 - RNA, 19 nt, Artificial Sequence
  Description of Artificial Sequence: Synthetic oligonucleotide
  Sense strand starting at position 3423 of SEQ ID NO: 1882027
acaucaucuguuggagaug

SEQ ID NO: 2089451 - RNA, 19 nt, Artificial Sequence
  Description of Artificial Sequence: Synthetic oligonucleotide
  Antisense strand to SEQ ID NO: 2089450
caucuccaacagaugaugu

SEQ ID NO: 2089452 - RNA, 19 nt, Artificial Sequence
  Description of Artificial Sequence: Synthetic oligonucleotide
  Sense strand starting at position 3449 of SEQ ID NO: 1882027
augguagcgauguauugaa

SEQ ID NO: 2089453 - RNA, 19 nt, Artificial Sequence
  Description of Artificial Sequence: Synthetic oligonucleotide
  Antisense strand to SEQ ID NO: 2089452
uucaauacaucgcuaccau

SEQ ID NO: 2089454 - RNA, 19 nt, Artificial Sequence
  Description of Artificial Sequence: Synthetic oligonucleotide
  Sense strand starting at position 3492 of SEQ ID NO: 1882027
gucaaaugagguugguauu

SEQ ID NO: 2089455 - RNA, 19 nt, Artificial Sequence
  Description of Artificial Sequence: Synthetic oligonucleotide
  Antisense strand to SEQ ID NO: 2089454
aauaccaaccucauuugac

SEQ ID NO: 2089456 - RNA, 19 nt, Artificial Sequence
  Description of Artificial Sequence: Synthetic oligonucleotide
  Sense strand starting at position 3495 of SEQ ID NO: 1882027
aaaugagguugguauuuau

SEQ ID NO: 2089457 - RNA, 19 nt, Artificial Sequence
  Description of Artificial Sequence: Synthetic oligonucleotide
  Antisense strand to SEQ ID NO: 2089456
auaaauaccaaccucauuu

SEQ ID NO: 2089458 - RNA, 19 nt, Artificial Sequence
  Description of Artificial Sequence: Synthetic oligonucleotide
  Sense strand starting at position 3572 of SEQ ID NO: 1882027
agguacuguacaugaugau

SEQ ID NO: 2089459 - RNA, 19 nt, Artificial Sequence
  Description of Artificial Sequence: Synthetic oligonucleotide
  Antisense strand to SEQ ID NO: 2089458
aucaucauguacaguaccu

SEQ ID NO: 2089460 - RNA, 19 nt, Artificial Sequence
  Description of Artificial Sequence: Synthetic oligonucleotide
  Sense strand starting at position 3719 of SEQ ID NO: 1882027
gaguuagauuuggacauga

SEQ ID NO: 2089461 - RNA, 19 nt, Artificial Sequence
  Description of Artificial Sequence: Synthetic oligonucleotide
  Antisense strand to SEQ ID NO: 2089460
ucauguccaaaucuaacuc

SEQ ID NO: 2089462 - RNA, 19 nt, Artificial Sequence
  Description of Artificial Sequence: Synthetic oligonucleotide
  Sense strand starting at position 3744 of SEQ ID NO: 1882027
cugcucuuacuugaguaau

SEQ ID NO: 2089463 - RNA, 19 nt, Artificial Sequence
  Description of Artificial Sequence: Synthetic oligonucleotide
  Antisense strand to SEQ ID NO: 2089462
auuacucaaguaagagcag

SEQ ID NO: 2089464 - RNA, 19 nt, Artificial Sequence
  Description of Artificial Sequence: Synthetic oligonucleotide
  Sense strand starting at position 3747 of SEQ ID NO: 1882027
cucuuacuugaguaauugu

SEQ ID NO: 2089465 - RNA, 19 nt, Artificial Sequence
  Description of Artificial Sequence: Synthetic oligonucleotide
  Antisense strand to SEQ ID NO: 2089464
acaauuacucaaguaagag

SEQ ID NO: 2089466 - RNA, 19 nt, Artificial Sequence
  Description of Artificial Sequence: Synthetic oligonucleotide
  Sense strand starting at position 3758 of SEQ ID NO: 1882027
guaauugugacagacuuug

SEQ ID NO: 2089467 - RNA, 19 nt, Artificial Sequence
  Description of Artificial Sequence: Synthetic oligonucleotide
  Antisense strand to SEQ ID NO: 2089466
caaagucugucacaauuac

SEQ ID NO: 2089468 - RNA, 19 nt, Artificial Sequence
  Description of Artificial Sequence: Synthetic oligonucleotide
  Sense strand starting at position 3824 of SEQ ID NO: 1882027
guguucugagauuauacag

SEQ ID NO: 2089469 - RNA, 19 nt, Artificial Sequence
  Description of Artificial Sequence: Synthetic oligonucleotide
  Antisense strand to SEQ ID NO: 2089468
cuguauaaucucagaacac

SEQ ID NO: 2089470 - RNA, 19 nt, Artificial Sequence
  Description of Artificial Sequence: Synthetic oligonucleotide
  Sense strand starting at position 3949 of SEQ ID NO: 1882027
cuuauugucgaggagcuau

SEQ ID NO: 2089471 - RNA, 19 nt, Artificial Sequence
  Description of Artificial Sequence: Synthetic oligonucleotide
  Antisense strand to SEQ ID NO: 2089470
auagcuccucgacaauaag

SEQ ID NO: 2089472 - RNA, 19 nt, Artificial Sequence
  Description of Artificial Sequence: Synthetic oligonucleotide
  Sense strand starting at position 3964 of SEQ ID NO: 1882027
cuaugaaucuaguuugaaa

SEQ ID NO: 2089473 - RNA, 19 nt, Artificial Sequence
  Description of Artificial Sequence: Synthetic oligonucleotide
  Antisense strand to SEQ ID NO: 2089472
uuucaaacuagauucauag

SEQ ID NO: 2089474 - RNA, 19 nt, Artificial Sequence
  Description of Artificial Sequence: Synthetic oligonucleotide
  Sense strand starting at position 25 of SEQ ID NO: 1882028
agaauuuauugacgaacag

SEQ ID NO: 2089475 - RNA, 19 nt, Artificial Sequence
  Description of Artificial Sequence: Synthetic oligonucleotide
  Antisense strand to SEQ ID NO: 2089474
cuguucgucaauaaauucu

SEQ ID NO: 2089476 - RNA, 19 nt, Artificial Sequence
  Description of Artificial Sequence: Synthetic oligonucleotide
  Sense strand starting at position 34 of SEQ ID NO: 1882028
ugacgaacagacugguaaa

SEQ ID NO: 2089477 - RNA, 19 nt, Artificial Sequence
  Description of Artificial Sequence: Synthetic oligonucleotide
  Antisense strand to SEQ ID NO: 2089476
uuuaccagucuguucguca

SEQ ID NO: 2089478 - RNA, 19 nt, Artificial Sequence
  Description of Artificial Sequence: Synthetic oligonucleotide
  Sense strand starting at position 75 of SEQ ID NO: 1882028
aacaguuaucuggguauag

SEQ ID NO: 2089479 - RNA, 19 nt, Artificial Sequence
  Description of Artificial Sequence: Synthetic oligonucleotide
  Antisense strand to SEQ ID NO: 2089478
cuauacccagauaacuguu

SEQ ID NO: 2089480 - RNA, 19 nt, Artificial Sequence
  Description of Artificial Sequence: Synthetic oligonucleotide
  Sense strand starting at position 76 of SEQ ID NO: 1882028
acaguuaucuggguauagg

SEQ ID NO: 2089481 - RNA, 19 nt, Artificial Sequence
  Description of Artificial Sequence: Synthetic oligonucleotide
  Antisense strand to SEQ ID NO: 2089480
ccuauacccagauaacugu

SEQ ID NO: 2089482 - RNA, 19 nt, Artificial Sequence
  Description of Artificial Sequence: Synthetic oligonucleotide
  Sense strand starting at position 77 of SEQ ID NO: 1882028
caguuaucuggguauagga

SEQ ID NO: 2089483 - RNA, 19 nt, Artificial Sequence
  Description of Artificial Sequence: Synthetic oligonucleotide
  Antisense strand to SEQ ID NO: 2089482
uccuauacccagauaacug

SEQ ID NO: 2089484 - RNA, 19 nt, Artificial Sequence
  Description of Artificial Sequence: Synthetic oligonucleotide
  Sense strand starting at position 275 of SEQ ID NO: 1882028
aacguaaaugaguaacgau

SEQ ID NO: 2089485 - RNA, 19 nt, Artificial Sequence
  Description of Artificial Sequence: Synthetic oligonucleotide
  Antisense strand to SEQ ID NO: 2089484
aucguuacucauuuacguu

SEQ ID NO: 2089486 - RNA, 19 nt, Artificial Sequence
  Description of Artificial Sequence: Synthetic oligonucleotide
  Sense strand starting at position 365 of SEQ ID NO: 1882028
aauauuuacugauguggaa

SEQ ID NO: 2089487 - RNA, 19 nt, Artificial Sequence
  Description of Artificial Sequence: Synthetic oligonucleotide
  Antisense strand to SEQ ID NO: 2089486
uuccacaucaguaaauauu

SEQ ID NO: 2089488 - RNA, 19 nt, Artificial Sequence
  Description of Artificial Sequence: Synthetic oligonucleotide
  Sense strand starting at position 368 of SEQ ID NO: 1882028
auuuacugauguggaaaga

SEQ ID NO: 2089489 - RNA, 19 nt, Artificial Sequence
  Description of Artificial Sequence: Synthetic oligonucleotide
  Antisense strand to SEQ ID NO: 2089488
ucuuuccacaucaguaaau

SEQ ID NO: 2089490 - RNA, 19 nt, Artificial Sequence
  Description of Artificial Sequence: Synthetic oligonucleotide
  Sense strand starting at position 391 of SEQ ID NO: 1882028
cacagcauauuguuuggaa

SEQ ID NO: 2089491 - RNA, 19 nt, Artificial Sequence
  Description of Artificial Sequence: Synthetic oligonucleotide
  Antisense strand to SEQ ID NO: 2089490
uuccaaacaauaugcugug

SEQ ID NO: 2089492 - RNA, 19 nt, Artificial Sequence
  Description of Artificial Sequence: Synthetic oligonucleotide
  Sense strand starting at position 393 of SEQ ID NO: 1882028
cagcauauuguuuggaaga

SEQ ID NO: 2089493 - RNA, 19 nt, Artificial Sequence
  Description of Artificial Sequence: Synthetic oligonucleotide
  Antisense strand to SEQ ID NO: 2089492
ucuuccaaacaauaugcug

SEQ ID NO: 2089494 - RNA, 19 nt, Artificial Sequence
  Description of Artificial Sequence: Synthetic oligonucleotide
  Sense strand starting at position 428 of SEQ ID NO: 1882028
guuacagaacagugcaauu

SEQ ID NO: 2089495 - RNA, 19 nt, Artificial Sequence
  Description of Artificial Sequence: Synthetic oligonucleotide
  Antisense strand to SEQ ID NO: 2089494
aauugcacuguucuguaac

SEQ ID NO: 2089496 - RNA, 19 nt, Artificial Sequence
  Description of Artificial Sequence: Synthetic oligonucleotide
  Sense strand starting at position 451 of SEQ ID NO: 1882028
guuacaaaucaguauauuc

SEQ ID NO: 2089497 - RNA, 19 nt, Artificial Sequence
  Description of Artificial Sequence: Synthetic oligonucleotide
  Antisense strand to SEQ ID NO: 2089496
gaauauacugauuuguaac

SEQ ID NO: 2089498 - RNA, 19 nt, Artificial Sequence
  Description of Artificial Sequence: Synthetic oligonucleotide
  Sense strand starting at position 853 of SEQ ID NO: 1882028
acaauuaagugguuaucuu

SEQ ID NO: 2089499 - RNA, 19 nt, Artificial Sequence
  Description of Artificial Sequence: Synthetic oligonucleotide
  Antisense strand to SEQ ID NO: 2089498
aagauaaccacuuaauugu

SEQ ID NO: 2089500 - RNA, 19 nt, Artificial Sequence
  Description of Artificial Sequence: Synthetic oligonucleotide
  Sense strand starting at position 860 of SEQ ID NO: 1882028
agugguuaucuuuggguca

SEQ ID NO: 2089501 - RNA, 19 nt, Artificial Sequence
  Description of Artificial Sequence: Synthetic oligonucleotide
  Antisense strand to SEQ ID NO: 2089500
ugacccaaagauaaccacu

SEQ ID NO: 2089502 - RNA, 19 nt, Artificial Sequence
  Description of Artificial Sequence: Synthetic oligonucleotide
  Sense strand starting at position 863 of SEQ ID NO: 1882028
gguuaucuuugggucaugu

SEQ ID NO: 2089503 - RNA, 19 nt, Artificial Sequence
  Description of Artificial Sequence: Synthetic oligonucleotide
  Antisense strand to SEQ ID NO: 2089502
acaugacccaaagauaacc

SEQ ID NO: 2089504 - RNA, 19 nt, Artificial Sequence
  Description of Artificial Sequence: Synthetic oligonucleotide
  Sense strand starting at position 865 of SEQ ID NO: 1882028
uuaucuuugggucauguua

SEQ ID NO: 2089505 - RNA, 19 nt, Artificial Sequence
  Description of Artificial Sequence: Synthetic oligonucleotide
  Antisense strand to SEQ ID NO: 2089504
uaacaugacccaaagauaa

SEQ ID NO: 2089506 - RNA, 19 nt, Artificial Sequence
  Description of Artificial Sequence: Synthetic oligonucleotide
  Sense strand starting at position 872 of SEQ ID NO: 1882028
ugggucauguuacauauuu

SEQ ID NO: 2089507 - RNA, 19 nt, Artificial Sequence
  Description of Artificial Sequence: Synthetic oligonucleotide
  Antisense strand to SEQ ID NO: 2089506
aaauauguaacaugaccca

SEQ ID NO: 2089508 - RNA, 19 nt, Artificial Sequence
  Description of Artificial Sequence: Synthetic oligonucleotide
  Sense strand starting at position 901 of SEQ ID NO: 1882028
ucuuuaugcuuggcaguau

SEQ ID NO: 2089509 - RNA, 19 nt, Artificial Sequence
  Description of Artificial Sequence: Synthetic oligonucleotide
  Antisense strand to SEQ ID NO: 2089508
auacugccaagcauaaaga

SEQ ID NO: 2089510 - RNA, 19 nt, Artificial Sequence
  Description of Artificial Sequence: Synthetic oligonucleotide
  Sense strand starting at position 955 of SEQ ID NO: 1882028
aguuguuagaacugaugau

SEQ ID NO: 2089511 - RNA, 19 nt, Artificial Sequence
  Description of Artificial Sequence: Synthetic oligonucleotide
  Antisense strand to SEQ ID NO: 2089510
aucaucaguucuaacaacu

SEQ ID NO: 2089512 - RNA, 19 nt, Artificial Sequence
  Description of Artificial Sequence: Synthetic oligonucleotide
  Sense strand starting at position 956 of SEQ ID NO: 1882028
guuguuagaacugaugauu

SEQ ID NO: 2089513 - RNA, 19 nt, Artificial Sequence
  Description of Artificial Sequence: Synthetic oligonucleotide
  Antisense strand to SEQ ID NO: 2089512
aaucaucaguucuaacaac

SEQ ID NO: 2089514 - RNA, 19 nt, Artificial Sequence
  Description of Artificial Sequence: Synthetic oligonucleotide
  Sense strand starting at position 1292 of SEQ ID NO: 1882028
acccuagugcuagaaucuu

SEQ ID NO: 2089515 - RNA, 19 nt, Artificial Sequence
  Description of Artificial Sequence: Synthetic oligonucleotide
  Antisense strand to SEQ ID NO: 2089514
aagauucuagcacuagggu

SEQ ID NO: 2089516 - RNA, 19 nt, Artificial Sequence
  Description of Artificial Sequence: Synthetic oligonucleotide
  Sense strand starting at position 1300 of SEQ ID NO: 1882028
gcuagaaucuuacuggaca

SEQ ID NO: 2089517 - RNA, 19 nt, Artificial Sequence
  Description of Artificial Sequence: Synthetic oligonucleotide
  Antisense strand to SEQ ID NO: 2089516
uguccaguaagauucuagc

SEQ ID NO: 2089518 - RNA, 19 nt, Artificial Sequence
  Description of Artificial Sequence: Synthetic oligonucleotide
  Sense strand starting at position 1328 of SEQ ID NO: 1882028
cacaaagugcuugguugua

SEQ ID NO: 2089519 - RNA, 19 nt, Artificial Sequence
  Description of Artificial Sequence: Synthetic oligonucleotide
  Antisense strand to SEQ ID NO: 2089518
uacaaccaagcacuuugug

SEQ ID NO: 2089520 - RNA, 19 nt, Artificial Sequence
  Description of Artificial Sequence: Synthetic oligonucleotide
  Sense strand starting at position 1485 of SEQ ID NO: 1882028
cccacaguccuuugggauc

SEQ ID NO: 2089521 - RNA, 19 nt, Artificial Sequence
  Description of Artificial Sequence: Synthetic oligonucleotide
  Antisense strand to SEQ ID NO: 2089520
gaucccaaaggacuguggg

SEQ ID NO: 2089522 - RNA, 19 nt, Artificial Sequence
  Description of Artificial Sequence: Synthetic oligonucleotide
  Sense strand starting at position 1499 of SEQ ID NO: 1882028
ggauccaugccucaaagcu

SEQ ID NO: 2089523 - RNA, 19 nt, Artificial Sequence
  Description of Artificial Sequence: Synthetic oligonucleotide
  Antisense strand to SEQ ID NO: 2089522
agcuuugaggcauggaucc

SEQ ID NO: 2089524 - RNA, 19 nt, Artificial Sequence
  Description of Artificial Sequence: Synthetic oligonucleotide
  Sense strand starting at position 1546 of SEQ ID NO: 1882028
ugcuaaauuuccguacuuu

SEQ ID NO: 2089525 - RNA, 19 nt, Artificial Sequence
  Description of Artificial Sequence: Synthetic oligonucleotide
  Antisense strand to SEQ ID NO: 2089524
aaaguacggaaauuuagca

SEQ ID NO: 2089526 - RNA, 19 nt, Artificial Sequence
  Description of Artificial Sequence: Synthetic oligonucleotide
  Sense strand starting at position 2216 of SEQ ID NO: 1882028
ccugucaugugguuaaaua

SEQ ID NO: 2089527 - RNA, 19 nt, Artificial Sequence
  Description of Artificial Sequence: Synthetic oligonucleotide
  Antisense strand to SEQ ID NO: 2089526
uauuuaaccacaugacagg

SEQ ID NO: 2089528 - RNA, 19 nt, Artificial Sequence
  Description of Artificial Sequence: Synthetic oligonucleotide
  Sense strand starting at position 2217 of SEQ ID NO: 1882028
cugucaugugguuaaauaa

SEQ ID NO: 2089529 - RNA, 19 nt, Artificial Sequence
  Description of Artificial Sequence: Synthetic oligonucleotide
  Antisense strand to SEQ ID NO: 2089528
uuauuuaaccacaugacag

SEQ ID NO: 2089530 - RNA, 19 nt, Artificial Sequence
  Description of Artificial Sequence: Synthetic oligonucleotide
  Sense strand starting at position 2241 of SEQ ID NO: 1882028
gcaaaugucccagauuaac

SEQ ID NO: 2089531 - RNA, 19 nt, Artificial Sequence
  Description of Artificial Sequence: Synthetic oligonucleotide
  Antisense strand to SEQ ID NO: 2089530
guuaaucugggacauuugc

SEQ ID NO: 2089532 - RNA, 19 nt, Artificial Sequence
  Description of Artificial Sequence: Synthetic oligonucleotide
  Sense strand starting at position 2276 of SEQ ID NO: 1882028
cugcaaacaccugaguauu

SEQ ID NO: 2089533 - RNA, 19 nt, Artificial Sequence
  Description of Artificial Sequence: Synthetic oligonucleotide
  Antisense strand to SEQ ID NO: 2089532
aauacucagguguuugcag

SEQ ID NO: 2089534 - RNA, 19 nt, Artificial Sequence
  Description of Artificial Sequence: Synthetic oligonucleotide
  Sense strand starting at position 2302 of SEQ ID NO: 1882028
cuaguuuccuuaguugaaa

SEQ ID NO: 2089535 - RNA, 19 nt, Artificial Sequence
  Description of Artificial Sequence: Synthetic oligonucleotide
  Antisense strand to SEQ ID NO: 2089534
uuucaacuaaggaaacuag

SEQ ID NO: 2089536 - RNA, 19 nt, Artificial Sequence
  Description of Artificial Sequence: Synthetic oligonucleotide
  Sense strand starting at position 2305 of SEQ ID NO: 1882028
guuuccuuaguugaaauau

SEQ ID NO: 2089537 - RNA, 19 nt, Artificial Sequence
  Description of Artificial Sequence: Synthetic oligonucleotide
  Antisense strand to SEQ ID NO: 2089536
auauuucaacuaaggaaac

SEQ ID NO: 2089538 - RNA, 19 nt, Artificial Sequence
  Description of Artificial Sequence: Synthetic oligonucleotide
  Sense strand starting at position 2366 of SEQ ID NO: 1882028
uuaauuauugcugagccaa

SEQ ID NO: 2089539 - RNA, 19 nt, Artificial Sequence
  Description of Artificial Sequence: Synthetic oligonucleotide
  Antisense strand to SEQ ID NO: 2089538
uuggcucagcaauaauuaa

SEQ ID NO: 2089540 - RNA, 19 nt, Artificial Sequence
  Description of Artificial Sequence: Synthetic oligonucleotide
  Sense strand starting at position 2384 of SEQ ID NO: 1882028
aacacugaagaucgaguua

SEQ ID NO: 2089541 - RNA, 19 nt, Artificial Sequence
  Description of Artificial Sequence: Synthetic oligonucleotide
  Antisense strand to SEQ ID NO: 2089540
uaacucgaucuucaguguu

SEQ ID NO: 2089542 - RNA, 19 nt, Artificial Sequence
  Description of Artificial Sequence: Synthetic oligonucleotide
  Sense strand starting at position 2423 of SEQ ID NO: 1882028
agcggacaguucuugacau

SEQ ID NO: 2089543 - RNA, 19 nt, Artificial Sequence
  Description of Artificial Sequence: Synthetic oligonucleotide
  Antisense strand to SEQ ID NO: 2089542
augucaagaacuguccgcu

SEQ ID NO: 2089544 - RNA, 19 nt, Artificial Sequence
  Description of Artificial Sequence: Synthetic oligonucleotide
  Sense strand starting at position 2453 of SEQ ID NO: 1882028
cgagucuccggcuauuuca

SEQ ID NO: 2089545 - RNA, 19 nt, Artificial Sequence
  Description of Artificial Sequence: Synthetic oligonucleotide
  Antisense strand to SEQ ID NO: 2089544
ugaaauagccggagacucg

SEQ ID NO: 2089546 - RNA, 19 nt, Artificial Sequence
  Description of Artificial Sequence: Synthetic oligonucleotide
  Sense strand starting at position 2699 of SEQ ID NO: 1882028
cgcaguuucgucagaggua

SEQ ID NO: 2089547 - RNA, 19 nt, Artificial Sequence
  Description of Artificial Sequence: Synthetic oligonucleotide
  Antisense strand to SEQ ID NO: 2089546
uaccucugacgaaacugcg

SEQ ID NO: 2089548 - RNA, 19 nt, Artificial Sequence
  Description of Artificial Sequence: Synthetic oligonucleotide
  Sense strand starting at position 2702 of SEQ ID NO: 1882028
aguuucgucagagguaaag

SEQ ID NO: 2089549 - RNA, 19 nt, Artificial Sequence
  Description of Artificial Sequence: Synthetic oligonucleotide
  Antisense strand to SEQ ID NO: 2089548
cuuuaccucugacgaaacu

SEQ ID NO: 2089550 - RNA, 19 nt, Artificial Sequence
  Description of Artificial Sequence: Synthetic oligonucleotide
  Sense strand starting at position 2704 of SEQ ID NO: 1882028
uuucgucagagguaaaggu

SEQ ID NO: 2089551 - RNA, 19 nt, Artificial Sequence
  Description of Artificial Sequence: Synthetic oligonucleotide
  Antisense strand to SEQ ID NO: 2089550
accuuuaccucugacgaaa

SEQ ID NO: 2089552 - RNA, 19 nt, Artificial Sequence
  Description of Artificial Sequence: Synthetic oligonucleotide
  Sense strand starting at position 3149 of SEQ ID NO: 1882028
ggcagauuauaacaagaag

SEQ ID NO: 2089553 - RNA, 19 nt, Artificial Sequence
  Description of Artificial Sequence: Synthetic oligonucleotide
  Antisense strand to SEQ ID NO: 2089552
cuucuuguuauaaucugcc

SEQ ID NO: 2089554 - RNA, 19 nt, Artificial Sequence
  Description of Artificial Sequence: Synthetic oligonucleotide
  Sense strand starting at position 38 of SEQ ID NO: 1882029
acucuaagggcucgauaau

SEQ ID NO: 2089555 - RNA, 19 nt, Artificial Sequence
  Description of Artificial Sequence: Synthetic oligonucleotide
  Antisense strand to SEQ ID NO: 2089554
auuaucgagcccuuagagu

SEQ ID NO: 2089556 - RNA, 19 nt, Artificial Sequence
  Description of Artificial Sequence: Synthetic oligonucleotide
  Sense strand starting at position 39 of SEQ ID NO: 1882029
cucuaagggcucgauaaua

SEQ ID NO: 2089557 - RNA, 19 nt, Artificial Sequence
  Description of Artificial Sequence: Synthetic oligonucleotide
  Antisense strand to SEQ ID NO: 2089556
uauuaucgagcccuuagag

SEQ ID NO: 2089558 - RNA, 19 nt, Artificial Sequence
  Description of Artificial Sequence: Synthetic oligonucleotide
  Sense strand starting at position 345 of SEQ ID NO: 1882029
ggaaauugccagcacugua

SEQ ID NO: 2089559 - RNA, 19 nt, Artificial Sequence
  Description of Artificial Sequence: Synthetic oligonucleotide
  Antisense strand to SEQ ID NO: 2089558
uacagugcuggcaauuucc

SEQ ID NO: 2089560 - RNA, 19 nt, Artificial Sequence
  Description of Artificial Sequence: Synthetic oligonucleotide
  Sense strand starting at position 422 of SEQ ID NO: 1882029
cugacucagccagaauauu

SEQ ID NO: 2089561 - RNA, 19 nt, Artificial Sequence
  Description of Artificial Sequence: Synthetic oligonucleotide
  Antisense strand to SEQ ID NO: 2089560
aauauucuggcugagucag

SEQ ID NO: 2089562 - RNA, 19 nt, Artificial Sequence
  Description of Artificial Sequence: Synthetic oligonucleotide
  Sense strand starting at position 638 of SEQ ID NO: 1882029
ggucgagaggcucauugua

SEQ ID NO: 2089563 - RNA, 19 nt, Artificial Sequence
  Description of Artificial Sequence: Synthetic oligonucleotide
  Antisense strand to SEQ ID NO: 2089562
uacaaugagccucucgacc

SEQ ID NO: 2089564 - RNA, 19 nt, Artificial Sequence
  Description of Artificial Sequence: Synthetic oligonucleotide
  Sense strand starting at position 808 of SEQ ID NO: 1882029
guuccuaagccuuaggaga

SEQ ID NO: 2089565 - RNA, 19 nt, Artificial Sequence
  Description of Artificial Sequence: Synthetic oligonucleotide
  Antisense strand to SEQ ID NO: 2089564
ucuccuaaggcuuaggaac

SEQ ID NO: 2089566 - RNA, 19 nt, Artificial Sequence
  Description of Artificial Sequence: Synthetic oligonucleotide
  Sense strand starting at position 878 of SEQ ID NO: 1882029
ggagcaaguccuggagaug

SEQ ID NO: 2089567 - RNA, 19 nt, Artificial Sequence
  Description of Artificial Sequence: Synthetic oligonucleotide
  Antisense strand to SEQ ID NO: 2089566
caucuccaggacuugcucc

SEQ ID NO: 2089568 - RNA, 19 nt, Artificial Sequence
  Description of Artificial Sequence: Synthetic oligonucleotide
  Sense strand starting at position 965 of SEQ ID NO: 1882029
accacaggagcuuauuauu

SEQ ID NO: 2089569 - RNA, 19 nt, Artificial Sequence
  Description of Artificial Sequence: Synthetic oligonucleotide
  Antisense strand to SEQ ID NO: 2089568
aauaauaagcuccuguggu

SEQ ID NO: 2089570 - RNA, 19 nt, Artificial Sequence
  Description of Artificial Sequence: Synthetic oligonucleotide
  Sense strand starting at position 971 of SEQ ID NO: 1882029
ggagcuuauuauucccauu

SEQ ID NO: 2089571 - RNA, 19 nt, Artificial Sequence
  Description of Artificial Sequence: Synthetic oligonucleotide
  Antisense strand to SEQ ID NO: 2089570
aaugggaauaauaagcucc

SEQ ID NO: 2089572 - RNA, 19 nt, Artificial Sequence
  Description of Artificial Sequence: Synthetic oligonucleotide
  Sense strand starting at position 1015 of SEQ ID NO: 1882029
acucaugugauuuguguga

SEQ ID NO: 2089573 - RNA, 19 nt, Artificial Sequence
  Description of Artificial Sequence: Synthetic oligonucleotide
  Antisense strand to SEQ ID NO: 2089572
ucacacaaaucacaugagu

SEQ ID NO: 2089574 - RNA, 19 nt, Artificial Sequence
  Description of Artificial Sequence: Synthetic oligonucleotide
  Sense strand starting at position 1019 of SEQ ID NO: 1882029
augugauuugugugaaguc

SEQ ID NO: 2089575 - RNA, 19 nt, Artificial Sequence
  Description of Artificial Sequence: Synthetic oligonucleotide
  Antisense strand to SEQ ID NO: 2089574
gacuucacacaaaucacau

SEQ ID NO: 2089576 - RNA, 19 nt, Artificial Sequence
  Description of Artificial Sequence: Synthetic oligonucleotide
  Sense strand starting at position 1051 of SEQ ID NO: 1882029
gugguagagccaggaucaa

SEQ ID NO: 2089577 - RNA, 19 nt, Artificial Sequence
  Description of Artificial Sequence: Synthetic oligonucleotide
  Antisense strand to SEQ ID NO: 2089576
uugauccuggcucuaccac

SEQ ID NO: 2089578 - RNA, 19 nt, Artificial Sequence
  Description of Artificial Sequence: Synthetic oligonucleotide
  Sense strand starting at position 1404 of SEQ ID NO: 1882029
cccagagaacuguaaacgu

SEQ ID NO: 2089579 - RNA, 19 nt, Artificial Sequence
  Description of Artificial Sequence: Synthetic oligonucleotide
  Antisense strand to SEQ ID NO: 2089578
acguuuacaguucucuggg

SEQ ID NO: 2089580 - RNA, 19 nt, Artificial Sequence
  Description of Artificial Sequence: Synthetic oligonucleotide
  Sense strand starting at position 1827 of SEQ ID NO: 1882029
uuacauagcucugugaaca

SEQ ID NO: 2089581 - RNA, 19 nt, Artificial Sequence
  Description of Artificial Sequence: Synthetic oligonucleotide
  Antisense strand to SEQ ID NO: 2089580
uguucacagagcuauguaa

SEQ ID NO: 2089582 - RNA, 19 nt, Artificial Sequence
  Description of Artificial Sequence: Synthetic oligonucleotide
  Sense strand starting at position 1850 of SEQ ID NO: 1882029
aagagucaaugauuguaca

SEQ ID NO: 2089583 - RNA, 19 nt, Artificial Sequence
  Description of Artificial Sequence: Synthetic oligonucleotide
  Antisense strand to SEQ ID NO: 2089582
uguacaaucauugacucuu

SEQ ID NO: 2089584 - RNA, 19 nt, Artificial Sequence
  Description of Artificial Sequence: Synthetic oligonucleotide
  Sense strand starting at position 1860 of SEQ ID NO: 1882029
gauuguacacuuuggguaa

SEQ ID NO: 2089585 - RNA, 19 nt, Artificial Sequence
  Description of Artificial Sequence: Synthetic oligonucleotide
  Antisense strand to SEQ ID NO: 2089584
uuacccaaaguguacaauc

SEQ ID NO: 2089586 - RNA, 19 nt, Artificial Sequence
  Description of Artificial Sequence: Synthetic oligonucleotide
  Sense strand starting at position 1863 of SEQ ID NO: 1882029
uguacacuuuggguaaauu

SEQ ID NO: 2089587 - RNA, 19 nt, Artificial Sequence
  Description of Artificial Sequence: Synthetic oligonucleotide
  Antisense strand to SEQ ID NO: 2089586
aauuuacccaaaguguaca

SEQ ID NO: 2089588 - RNA, 19 nt, Artificial Sequence
  Description of Artificial Sequence: Synthetic oligonucleotide
  Sense strand starting at position 2087 of SEQ ID NO: 1882029
agggcccaccucugugaaa

SEQ ID NO: 2089589 - RNA, 19 nt, Artificial Sequence
  Description of Artificial Sequence: Synthetic oligonucleotide
  Antisense strand to SEQ ID NO: 2089588
uuucacagaggugggcccu

SEQ ID NO: 2089590 - RNA, 19 nt, Artificial Sequence
  Description of Artificial Sequence: Synthetic oligonucleotide
  Sense strand starting at position 2088 of SEQ ID NO: 1882029
gggcccaccucugugaaau

SEQ ID NO: 2089591 - RNA, 19 nt, Artificial Sequence
  Description of Artificial Sequence: Synthetic oligonucleotide
  Antisense strand to SEQ ID NO: 2089590
auuucacagaggugggccc

SEQ ID NO: 2089592 - RNA, 19 nt, Artificial Sequence
  Description of Artificial Sequence: Synthetic oligonucleotide
  Sense strand starting at position 2089 of SEQ ID NO: 1882029
ggcccaccucugugaaaug

SEQ ID NO: 2089593 - RNA, 19 nt, Artificial Sequence
  Description of Artificial Sequence: Synthetic oligonucleotide
  Antisense strand to SEQ ID NO: 2089592
cauuucacagaggugggcc

SEQ ID NO: 2089594 - RNA, 19 nt, Artificial Sequence
  Description of Artificial Sequence: Synthetic oligonucleotide
  Sense strand starting at position 2119 of SEQ ID NO: 1882029
gaguaagugugauuaaagg

SEQ ID NO: 2089595 - RNA, 19 nt, Artificial Sequence
  Description of Artificial Sequence: Synthetic oligonucleotide
  Antisense strand to SEQ ID NO: 2089594
ccuuuaaucacacuuacuc

SEQ ID NO: 2089596 - RNA, 19 nt, Artificial Sequence
  Description of Artificial Sequence: Synthetic oligonucleotide
  Sense strand starting at position 2371 of SEQ ID NO: 1882029
cagagagaaaugugagguu

SEQ ID NO: 2089597 - RNA, 19 nt, Artificial Sequence
  Description of Artificial Sequence: Synthetic oligonucleotide
  Antisense strand to SEQ ID NO: 2089596
aaccucacauuucucucug

SEQ ID NO: 2089598 - RNA, 19 nt, Artificial Sequence
  Description of Artificial Sequence: Synthetic oligonucleotide
  Sense strand starting at position 2380 of SEQ ID NO: 1882029
augugagguuucuuccaaa

SEQ ID NO: 2089599 - RNA, 19 nt, Artificial Sequence
  Description of Artificial Sequence: Synthetic oligonucleotide
  Antisense strand to SEQ ID NO: 2089598
uuuggaagaaaccucacau

SEQ ID NO: 2089600 - RNA, 19 nt, Artificial Sequence
  Description of Artificial Sequence: Synthetic oligonucleotide
  Sense strand starting at position 2665 of SEQ ID NO: 1882029
aaggcugagggcugaaauu

SEQ ID NO: 2089601 - RNA, 19 nt, Artificial Sequence
  Description of Artificial Sequence: Synthetic oligonucleotide
  Antisense strand to SEQ ID NO: 2089600
aauuucagcccucagccuu

SEQ ID NO: 2089602 - RNA, 19 nt, Artificial Sequence
  Description of Artificial Sequence: Synthetic oligonucleotide
  Sense strand starting at position 2674 of SEQ ID NO: 1882029
ggcugaaauuagucaauuc

SEQ ID NO: 2089603 - RNA, 19 nt, Artificial Sequence
  Description of Artificial Sequence: Synthetic oligonucleotide
  Antisense strand to SEQ ID NO: 2089602
gaauugacuaauuucagcc

SEQ ID NO: 2089604 - RNA, 19 nt, Artificial Sequence
  Description of Artificial Sequence: Synthetic oligonucleotide
  Sense strand starting at position 2820 of SEQ ID NO: 1882029
augggugauaacugcuaga

SEQ ID NO: 2089605 - RNA, 19 nt, Artificial Sequence
  Description of Artificial Sequence: Synthetic oligonucleotide
  Antisense strand to SEQ ID NO: 2089604
ucuagcaguuaucacccau

SEQ ID NO: 2089606 - RNA, 19 nt, Artificial Sequence
  Description of Artificial Sequence: Synthetic oligonucleotide
  Sense strand starting at position 2923 of SEQ ID NO: 1882029
cauguuauuugagcuuguu

SEQ ID NO: 2089607 - RNA, 19 nt, Artificial Sequence
  Description of Artificial Sequence: Synthetic oligonucleotide
  Antisense strand to SEQ ID NO: 2089606
aacaagcucaaauaacaug

SEQ ID NO: 2089608 - RNA, 19 nt, Artificial Sequence
  Description of Artificial Sequence: Synthetic oligonucleotide
  Sense strand starting at position 2954 of SEQ ID NO: 1882029
auagaaauuucgcagaaac

SEQ ID NO: 2089609 - RNA, 19 nt, Artificial Sequence
  Description of Artificial Sequence: Synthetic oligonucleotide
  Antisense strand to SEQ ID NO: 2089608
guuucugcgaaauuucuau

SEQ ID NO: 2089610 - RNA, 19 nt, Artificial Sequence
  Description of Artificial Sequence: Synthetic oligonucleotide
  Sense strand starting at position 3186 of SEQ ID NO: 1882029
ccuaguuccagauguggaa

SEQ ID NO: 2089611 - RNA, 19 nt, Artificial Sequence
  Description of Artificial Sequence: Synthetic oligonucleotide
  Antisense strand to SEQ ID NO: 2089610
uuccacaucuggaacuagg

SEQ ID NO: 2089612 - RNA, 19 nt, Artificial Sequence
  Description of Artificial Sequence: Synthetic oligonucleotide
  Sense strand starting at position 3389 of SEQ ID NO: 1882029
gaacgagucugucugagaa

SEQ ID NO: 2089613 - RNA, 19 nt, Artificial Sequence
  Description of Artificial Sequence: Synthetic oligonucleotide
  Antisense strand to SEQ ID NO: 2089612
uucucagacagacucguuc

SEQ ID NO: 2089614 - RNA, 19 nt, Artificial Sequence
  Description of Artificial Sequence: Synthetic oligonucleotide
  Sense strand starting at position 3517 of SEQ ID NO: 1882029
agcucaucuguguauauau

SEQ ID NO: 2089615 - RNA, 19 nt, Artificial Sequence
  Description of Artificial Sequence: Synthetic oligonucleotide
  Antisense strand to SEQ ID NO: 2089614
auauauacacagaugagcu

SEQ ID NO: 2089616 - RNA, 19 nt, Artificial Sequence
  Description of Artificial Sequence: Synthetic oligonucleotide
  Sense strand starting at position 3519 of SEQ ID NO: 1882029
cucaucuguguauauauca

SEQ ID NO: 2089617 - RNA, 19 nt, Artificial Sequence
  Description of Artificial Sequence: Synthetic oligonucleotide
  Antisense strand to SEQ ID NO: 2089616
ugauauauacacagaugag

SEQ ID NO: 2089618 - RNA, 19 nt, Artificial Sequence
  Description of Artificial Sequence: Synthetic oligonucleotide
  Sense strand starting at position 3539 of SEQ ID NO: 1882029
ccaguuugaauuggaguuu

SEQ ID NO: 2089619 - RNA, 19 nt, Artificial Sequence
  Description of Artificial Sequence: Synthetic oligonucleotide
  Antisense strand to SEQ ID NO: 2089618
aaacuccaauucaaacugg

SEQ ID NO: 2089620 - RNA, 19 nt, Artificial Sequence
  Description of Artificial Sequence: Synthetic oligonucleotide
  Sense strand starting at position 3661 of SEQ ID NO: 1882029
cagauuagguaagugauca

SEQ ID NO: 2089621 - RNA, 19 nt, Artificial Sequence
  Description of Artificial Sequence: Synthetic oligonucleotide
  Antisense strand to SEQ ID NO: 2089620
ugaucacuuaccuaaucug

SEQ ID NO: 2089622 - RNA, 19 nt, Artificial Sequence
  Description of Artificial Sequence: Synthetic oligonucleotide
  Sense strand starting at position 3662 of SEQ ID NO: 1882029
agauuagguaagugaucag

SEQ ID NO: 2089623 - RNA, 19 nt, Artificial Sequence
  Description of Artificial Sequence: Synthetic oligonucleotide
  Antisense strand to SEQ ID NO: 2089622
cugaucacuuaccuaaucu

SEQ ID NO: 2089624 - RNA, 19 nt, Artificial Sequence
  Description of Artificial Sequence: Synthetic oligonucleotide
  Sense strand starting at position 3665 of SEQ ID NO: 1882029
uuagguaagugaucagaaa

SEQ ID NO: 2089625 - RNA, 19 nt, Artificial Sequence
  Description of Artificial Sequence: Synthetic oligonucleotide
  Antisense strand to SEQ ID NO: 2089624
uuucugaucacuuaccuaa

SEQ ID NO: 2089626 - RNA, 19 nt, Artificial Sequence
  Description of Artificial Sequence: Synthetic oligonucleotide
  Sense strand starting at position 3673 of SEQ ID NO: 1882029
gugaucagaaagcaaguau

SEQ ID NO: 2089627 - RNA, 19 nt, Artificial Sequence
  Description of Artificial Sequence: Synthetic oligonucleotide
  Antisense strand to SEQ ID NO: 2089626
auacuugcuuucugaucac

SEQ ID NO: 2089628 - RNA, 19 nt, Artificial Sequence
  Description of Artificial Sequence: Synthetic oligonucleotide
  Sense strand starting at position 3867 of SEQ ID NO: 1882029
uuaguauuauacccugaag

SEQ ID NO: 2089629 - RNA, 19 nt, Artificial Sequence
  Description of Artificial Sequence: Synthetic oligonucleotide
  Antisense strand to SEQ ID NO: 2089628
cuucaggguauaauacuaa

SEQ ID NO: 2089630 - RNA, 19 nt, Artificial Sequence
  Description of Artificial Sequence: Synthetic oligonucleotide
  Sense strand starting at position 3869 of SEQ ID NO: 1882029
aguauuauacccugaagag

SEQ ID NO: 2089631 - RNA, 19 nt, Artificial Sequence
  Description of Artificial Sequence: Synthetic oligonucleotide
  Antisense strand to SEQ ID NO: 2089630
cucuucaggguauaauacu

SEQ ID NO: 2089632 - RNA, 19 nt, Artificial Sequence
  Description of Artificial Sequence: Synthetic oligonucleotide
  Sense strand starting at position 3870 of SEQ ID NO: 1882029
guauuauacccugaagagu

SEQ ID NO: 2089633 - RNA, 19 nt, Artificial Sequence
  Description of Artificial Sequence: Synthetic oligonucleotide
  Antisense strand to SEQ ID NO: 2089632
acucuucaggguauaauac

SEQ ID NO: 2089634 - RNA, 19 nt, Artificial Sequence
  Description of Artificial Sequence: Synthetic oligonucleotide
  Sense strand starting at position 97 of SEQ ID NO: 1882030
gggauuaaguuuccugacu

SEQ ID NO: 2089635 - RNA, 19 nt, Artificial Sequence
  Description of Artificial Sequence: Synthetic oligonucleotide
  Antisense strand to SEQ ID NO: 2089634
agucaggaaacuuaauccc

SEQ ID NO: 2089636 - RNA, 19 nt, Artificial Sequence
  Description of Artificial Sequence: Synthetic oligonucleotide
  Sense strand starting at position 98 of SEQ ID NO: 1882030
ggauuaaguuuccugacug

SEQ ID NO: 2089637 - RNA, 19 nt, Artificial Sequence
  Description of Artificial Sequence: Synthetic oligonucleotide
  Antisense strand to SEQ ID NO: 2089636
cagucaggaaacuuaaucc

SEQ ID NO: 2089638 - RNA, 19 nt, Artificial Sequence
  Description of Artificial Sequence: Synthetic oligonucleotide
  Sense strand starting at position 306 of SEQ ID NO: 1882030
ccuugaagguugucccuau

SEQ ID NO: 2089639 - RNA, 19 nt, Artificial Sequence
  Description of Artificial Sequence: Synthetic oligonucleotide
  Antisense strand to SEQ ID NO: 2089638
auagggacaaccuucaagg

SEQ ID NO: 2089640 - RNA, 19 nt, Artificial Sequence
  Description of Artificial Sequence: Synthetic oligonucleotide
  Sense strand starting at position 351 of SEQ ID NO: 1882030
ccuuaaauggccuguccaa

SEQ ID NO: 2089641 - RNA, 19 nt, Artificial Sequence
  Description of Artificial Sequence: Synthetic oligonucleotide
  Antisense strand to SEQ ID NO: 2089640
uuggacaggccauuuaagg

SEQ ID NO: 2089642 - RNA, 19 nt, Artificial Sequence
  Description of Artificial Sequence: Synthetic oligonucleotide
  Sense strand starting at position 411 of SEQ ID NO: 1882030
cuaagaccucccuggcaaa

SEQ ID NO: 2089643 - RNA, 19 nt, Artificial Sequence
  Description of Artificial Sequence: Synthetic oligonucleotide
  Antisense strand to SEQ ID NO: 2089642
uuugccagggaggucuuag

SEQ ID NO: 2089644 - RNA, 19 nt, Artificial Sequence
  Description of Artificial Sequence: Synthetic oligonucleotide
  Sense strand starting at position 429 of SEQ ID NO: 1882030
agaaaugucuaggaugaag

SEQ ID NO: 2089645 - RNA, 19 nt, Artificial Sequence
  Description of Artificial Sequence: Synthetic oligonucleotide
  Antisense strand to SEQ ID NO: 2089644
cuucauccuagacauuucu

SEQ ID NO: 2089646 - RNA, 19 nt, Artificial Sequence
  Description of Artificial Sequence: Synthetic oligonucleotide
  Sense strand starting at position 464 of SEQ ID NO: 1882030
aaaguauguucuguuaguc

SEQ ID NO: 2089647 - RNA, 19 nt, Artificial Sequence
  Description of Artificial Sequence: Synthetic oligonucleotide
  Antisense strand to SEQ ID NO: 2089646
gacuaacagaacauacuuu

SEQ ID NO: 2089648 - RNA, 19 nt, Artificial Sequence
  Description of Artificial Sequence: Synthetic oligonucleotide
  Sense strand starting at position 583 of SEQ ID NO: 1882030
ucuauuggugguugacaca

SEQ ID NO: 2089649 - RNA, 19 nt, Artificial Sequence
  Description of Artificial Sequence: Synthetic oligonucleotide
  Antisense strand to SEQ ID NO: 2089648
ugugucaaccaccaauaga

SEQ ID NO: 2089650 - RNA, 19 nt, Artificial Sequence
  Description of Artificial Sequence: Synthetic oligonucleotide
  Sense strand starting at position 632 of SEQ ID NO: 1882030
cgaauucaggucggcaaga

SEQ ID NO: 2089651 - RNA, 19 nt, Artificial Sequence
  Description of Artificial Sequence: Synthetic oligonucleotide
  Antisense strand to SEQ ID NO: 2089650
ucuugccgaccugaauucg

SEQ ID NO: 2089652 - RNA, 19 nt, Artificial Sequence
  Description of Artificial Sequence: Synthetic oligonucleotide
  Sense strand starting at position 671 of SEQ ID NO: 1882030
gcaacuucuggucaaagca

SEQ ID NO: 2089653 - RNA, 19 nt, Artificial Sequence
  Description of Artificial Sequence: Synthetic oligonucleotide
  Antisense strand to SEQ ID NO: 2089652
ugcuuugaccagaaguugc

SEQ ID NO: 2089654 - RNA, 19 nt, Artificial Sequence
  Description of Artificial Sequence: Synthetic oligonucleotide
  Sense strand starting at position 751 of SEQ ID NO: 1882030
gccagugugagccaaguua

SEQ ID NO: 2089655 - RNA, 19 nt, Artificial Sequence
  Description of Artificial Sequence: Synthetic oligonucleotide
  Antisense strand to SEQ ID NO: 2089654
uaacuuggcucacacuggc

SEQ ID NO: 2089656 - RNA, 19 nt, Artificial Sequence
  Description of Artificial Sequence: Synthetic oligonucleotide
  Sense strand starting at position 786 of SEQ ID NO: 1882030
cccaguuuagaagguuaaa

SEQ ID NO: 2089657 - RNA, 19 nt, Artificial Sequence
  Description of Artificial Sequence: Synthetic oligonucleotide
  Antisense strand to SEQ ID NO: 2089656
uuuaaccuucuaaacuggg

SEQ ID NO: 2089658 - RNA, 19 nt, Artificial Sequence
  Description of Artificial Sequence: Synthetic oligonucleotide
  Sense strand starting at position 998 of SEQ ID NO: 1882030
gcuagaauauggguaacag

SEQ ID NO: 2089659 - RNA, 19 nt, Artificial Sequence
  Description of Artificial Sequence: Synthetic oligonucleotide
  Antisense strand to SEQ ID NO: 2089658
cuguuacccauauucuagc

SEQ ID NO: 2089660 - RNA, 19 nt, Artificial Sequence
  Description of Artificial Sequence: Synthetic oligonucleotide
  Sense strand starting at position 1055 of SEQ ID NO: 1882030
ggauaacuccacuguaaua

SEQ ID NO: 2089661 - RNA, 19 nt, Artificial Sequence
  Description of Artificial Sequence: Synthetic oligonucleotide
  Antisense strand to SEQ ID NO: 2089660
uauuacaguggaguuaucc

SEQ ID NO: 2089662 - RNA, 19 nt, Artificial Sequence
  Description of Artificial Sequence: Synthetic oligonucleotide
  Sense strand starting at position 1065 of SEQ ID NO: 1882030
acuguaauagacggauagu

SEQ ID NO: 2089663 - RNA, 19 nt, Artificial Sequence
  Description of Artificial Sequence: Synthetic oligonucleotide
  Antisense strand to SEQ ID NO: 2089662
acuauccgucuauuacagu

SEQ ID NO: 2089664 - RNA, 19 nt, Artificial Sequence
  Description of Artificial Sequence: Synthetic oligonucleotide
  Sense strand starting at position 1066 of SEQ ID NO: 1882030
cuguaauagacggauagua

SEQ ID NO: 2089665 - RNA, 19 nt, Artificial Sequence
  Description of Artificial Sequence: Synthetic oligonucleotide
  Antisense strand to SEQ ID NO: 2089664
uacuauccgucuauuacag

SEQ ID NO: 2089666 - RNA, 19 nt, Artificial Sequence
  Description of Artificial Sequence: Synthetic oligonucleotide
  Sense strand starting at position 1068 of SEQ ID NO: 1882030
guaauagacggauaguaug

SEQ ID NO: 2089667 - RNA, 19 nt, Artificial Sequence
  Description of Artificial Sequence: Synthetic oligonucleotide
  Antisense strand to SEQ ID NO: 2089666
cauacuauccgucuauuac

SEQ ID NO: 2089668 - RNA, 19 nt, Artificial Sequence
  Description of Artificial Sequence: Synthetic oligonucleotide
  Sense strand starting at position 1141 of SEQ ID NO: 1882030
acucaauucgaccaauagu

SEQ ID NO: 2089669 - RNA, 19 nt, Artificial Sequence
  Description of Artificial Sequence: Synthetic oligonucleotide
  Antisense strand to SEQ ID NO: 2089668
acuauuggucgaauugagu

SEQ ID NO: 2089670 - RNA, 19 nt, Artificial Sequence
  Description of Artificial Sequence: Synthetic oligonucleotide
  Sense strand starting at position 1345 of SEQ ID NO: 1882030
cuggcuucuuucccagaca

SEQ ID NO: 2089671 - RNA, 19 nt, Artificial Sequence
  Description of Artificial Sequence: Synthetic oligonucleotide
  Antisense strand to SEQ ID NO: 2089670
ugucugggaaagaagccag

SEQ ID NO: 2089672 - RNA, 19 nt, Artificial Sequence
  Description of Artificial Sequence: Synthetic oligonucleotide
  Sense strand starting at position 1348 of SEQ ID NO: 1882030
gcuucuuucccagacaaga

SEQ ID NO: 2089673 - RNA, 19 nt, Artificial Sequence
  Description of Artificial Sequence: Synthetic oligonucleotide
  Antisense strand to SEQ ID NO: 2089672
ucuugucugggaaagaagc

SEQ ID NO: 2089674 - RNA, 19 nt, Artificial Sequence
  Description of Artificial Sequence: Synthetic oligonucleotide
  Sense strand starting at position 1623 of SEQ ID NO: 1882030
ugugcuugguccuugagaa

SEQ ID NO: 2089675 - RNA, 19 nt, Artificial Sequence
  Description of Artificial Sequence: Synthetic oligonucleotide
  Antisense strand to SEQ ID NO: 2089674
uucucaaggaccaagcaca

SEQ ID NO: 2089676 - RNA, 19 nt, Artificial Sequence
  Description of Artificial Sequence: Synthetic oligonucleotide
  Sense strand starting at position 1624 of SEQ ID NO: 1882030
gugcuugguccuugagaac

SEQ ID NO: 2089677 - RNA, 19 nt, Artificial Sequence
  Description of Artificial Sequence: Synthetic oligonucleotide
  Antisense strand to SEQ ID NO: 2089676
guucucaaggaccaagcac

SEQ ID NO: 2089678 - RNA, 19 nt, Artificial Sequence
  Description of Artificial Sequence: Synthetic oligonucleotide
  Sense strand starting at position 1729 of SEQ ID NO: 1882030
ugaggaaacagagguguua

SEQ ID NO: 2089679 - RNA, 19 nt, Artificial Sequence
  Description of Artificial Sequence: Synthetic oligonucleotide
  Antisense strand to SEQ ID NO: 2089678
uaacaccucuguuuccuca

SEQ ID NO: 2089680 - RNA, 19 nt, Artificial Sequence
  Description of Artificial Sequence: Synthetic oligonucleotide
  Sense strand starting at position 1738 of SEQ ID NO: 1882030
agagguguuacacggguaa

SEQ ID NO: 2089681 - RNA, 19 nt, Artificial Sequence
  Description of Artificial Sequence: Synthetic oligonucleotide
  Antisense strand to SEQ ID NO: 2089680
uuacccguguaacaccucu

SEQ ID NO: 2089682 - RNA, 19 nt, Artificial Sequence
  Description of Artificial Sequence: Synthetic oligonucleotide
  Sense strand starting at position 1740 of SEQ ID NO: 1882030
agguguuacacggguaaac

SEQ ID NO: 2089683 - RNA, 19 nt, Artificial Sequence
  Description of Artificial Sequence: Synthetic oligonucleotide
  Antisense strand to SEQ ID NO: 2089682
guuuacccguguaacaccu

SEQ ID NO: 2089684 - RNA, 19 nt, Artificial Sequence
  Description of Artificial Sequence: Synthetic oligonucleotide
  Sense strand starting at position 1742 of SEQ ID NO: 1882030
guguuacacggguaaacua

SEQ ID NO: 2089685 - RNA, 19 nt, Artificial Sequence
  Description of Artificial Sequence: Synthetic oligonucleotide
  Antisense strand to SEQ ID NO: 2089684
uaguuuacccguguaacac

SEQ ID NO: 2089686 - RNA, 19 nt, Artificial Sequence
  Description of Artificial Sequence: Synthetic oligonucleotide
  Sense strand starting at position 1801 of SEQ ID NO: 1882030
uuaauuggcucuccagaau

SEQ ID NO: 2089687 - RNA, 19 nt, Artificial Sequence
  Description of Artificial Sequence: Synthetic oligonucleotide
  Antisense strand to SEQ ID NO: 2089686
auucuggagagccaauuaa

SEQ ID NO: 2089688 - RNA, 19 nt, Artificial Sequence
  Description of Artificial Sequence: Synthetic oligonucleotide
  Sense strand starting at position 1804 of SEQ ID NO: 1882030
auuggcucuccagaauauu

SEQ ID NO: 2089689 - RNA, 19 nt, Artificial Sequence
  Description of Artificial Sequence: Synthetic oligonucleotide
  Antisense strand to SEQ ID NO: 2089688
aauauucuggagagccaau

SEQ ID NO: 2089690 - RNA, 19 nt, Artificial Sequence
  Description of Artificial Sequence: Synthetic oligonucleotide
  Sense strand starting at position 1867 of SEQ ID NO: 1882030
gcuacauuggaagauguca

SEQ ID NO: 2089691 - RNA, 19 nt, Artificial Sequence
  Description of Artificial Sequence: Synthetic oligonucleotide
  Antisense strand to SEQ ID NO: 2089690
ugacaucuuccaauguagc

SEQ ID NO: 2089692 - RNA, 19 nt, Artificial Sequence
  Description of Artificial Sequence: Synthetic oligonucleotide
  Sense strand starting at position 1875 of SEQ ID NO: 1882030
ggaagaugucauugcauuc

SEQ ID NO: 2089693 - RNA, 19 nt, Artificial Sequence
  Description of Artificial Sequence: Synthetic oligonucleotide
  Antisense strand to SEQ ID NO: 2089692
gaaugcaaugacaucuucc

SEQ ID NO: 2089694 - RNA, 19 nt, Artificial Sequence
  Description of Artificial Sequence: Synthetic oligonucleotide
  Sense strand starting at position 1911 of SEQ ID NO: 1882030
agaaauguccagugacuag

SEQ ID NO: 2089695 - RNA, 19 nt, Artificial Sequence
  Description of Artificial Sequence: Synthetic oligonucleotide
  Antisense strand to SEQ ID NO: 2089694
cuagucacuggacauuucu

SEQ ID NO: 2089696 - RNA, 19 nt, Artificial Sequence
  Description of Artificial Sequence: Synthetic oligonucleotide
  Sense strand starting at position 2052 of SEQ ID NO: 1882030
ccauuuaaucuuuggcugu

SEQ ID NO: 2089697 - RNA, 19 nt, Artificial Sequence
  Description of Artificial Sequence: Synthetic oligonucleotide
  Antisense strand to SEQ ID NO: 2089696
acagccaaagauuaaaugg

SEQ ID NO: 2089698 - RNA, 19 nt, Artificial Sequence
  Description of Artificial Sequence: Synthetic oligonucleotide
  Sense strand starting at position 2054 of SEQ ID NO: 1882030
auuuaaucuuuggcuguuu

SEQ ID NO: 2089699 - RNA, 19 nt, Artificial Sequence
  Description of Artificial Sequence: Synthetic oligonucleotide
  Antisense strand to SEQ ID NO: 2089698
aaacagccaaagauuaaau

SEQ ID NO: 2089700 - RNA, 19 nt, Artificial Sequence
  Description of Artificial Sequence: Synthetic oligonucleotide
  Sense strand starting at position 2129 of SEQ ID NO: 1882030
cugaaugcuaccugguguu

SEQ ID NO: 2089701 - RNA, 19 nt, Artificial Sequence
  Description of Artificial Sequence: Synthetic oligonucleotide
  Antisense strand to SEQ ID NO: 2089700
aacaccagguagcauucag

SEQ ID NO: 2089702 - RNA, 19 nt, Artificial Sequence
  Description of Artificial Sequence: Synthetic oligonucleotide
  Sense strand starting at position 2418 of SEQ ID NO: 1882030
gcaugccuggaggagaauu

SEQ ID NO: 2089703 - RNA, 19 nt, Artificial Sequence
  Description of Artificial Sequence: Synthetic oligonucleotide
  Antisense strand to SEQ ID NO: 2089702
aauucuccuccaggcaugc

SEQ ID NO: 2089704 - RNA, 19 nt, Artificial Sequence
  Description of Artificial Sequence: Synthetic oligonucleotide
  Sense strand starting at position 3011 of SEQ ID NO: 1882030
guacuacauccaggaaaug

SEQ ID NO: 2089705 - RNA, 19 nt, Artificial Sequence
  Description of Artificial Sequence: Synthetic oligonucleotide
  Antisense strand to SEQ ID NO: 2089704
cauuuccuggauguaguac

SEQ ID NO: 2089706 - RNA, 19 nt, Artificial Sequence
  Description of Artificial Sequence: Synthetic oligonucleotide
  Sense strand starting at position 3102 of SEQ ID NO: 1882030
uauuacaaacgugguaaau

SEQ ID NO: 2089707 - RNA, 19 nt, Artificial Sequence
  Description of Artificial Sequence: Synthetic oligonucleotide
  Antisense strand to SEQ ID NO: 2089706
auuuaccacguuuguaaua

SEQ ID NO: 2089708 - RNA, 19 nt, Artificial Sequence
  Description of Artificial Sequence: Synthetic oligonucleotide
  Sense strand starting at position 3104 of SEQ ID NO: 1882030
uuacaaacgugguaaauuu

SEQ ID NO: 2089709 - RNA, 19 nt, Artificial Sequence
  Description of Artificial Sequence: Synthetic oligonucleotide
  Antisense strand to SEQ ID NO: 2089708
aaauuuaccacguuuguaa

SEQ ID NO: 2089710 - RNA, 19 nt, Artificial Sequence
  Description of Artificial Sequence: Synthetic oligonucleotide
  Sense strand starting at position 3178 of SEQ ID NO: 1882030
gugguugcucacuacugua

SEQ ID NO: 2089711 - RNA, 19 nt, Artificial Sequence
  Description of Artificial Sequence: Synthetic oligonucleotide
  Antisense strand to SEQ ID NO: 2089710
uacaguagugagcaaccac

SEQ ID NO: 2089712 - RNA, 19 nt, Artificial Sequence
  Description of Artificial Sequence: Synthetic oligonucleotide
  Sense strand starting at position 3968 of SEQ ID NO: 1882030
gugagauccucucucacaa

SEQ ID NO: 2089713 - RNA, 19 nt, Artificial Sequence
  Description of Artificial Sequence: Synthetic oligonucleotide
  Antisense strand to SEQ ID NO: 2089712
uugugagagaggaucucac

SEQ ID NO: 2089714 - RNA, 19 nt, Artificial Sequence
  Description of Artificial Sequence: Synthetic oligonucleotide
  Sense strand starting at position 154 of SEQ ID NO: 1882031
gagacagcuuuaguaaaua

SEQ ID NO: 2089715 - RNA, 19 nt, Artificial Sequence
  Description of Artificial Sequence: Synthetic oligonucleotide
  Antisense strand to SEQ ID NO: 2089714
uauuuacuaaagcugucuc

SEQ ID NO: 2089716 - RNA, 19 nt, Artificial Sequence
  Description of Artificial Sequence: Synthetic oligonucleotide
  Sense strand starting at position 165 of SEQ ID NO: 1882031
aguaaauaucuuuguaccu

SEQ ID NO: 2089717 - RNA, 19 nt, Artificial Sequence
  Description of Artificial Sequence: Synthetic oligonucleotide
  Antisense strand to SEQ ID NO: 2089716
agguacaaagauauuuacu

SEQ ID NO: 2089718 - RNA, 19 nt, Artificial Sequence
  Description of Artificial Sequence: Synthetic oligonucleotide
  Sense strand starting at position 166 of SEQ ID NO: 1882031
guaaauaucuuuguaccua

SEQ ID NO: 2089719 - RNA, 19 nt, Artificial Sequence
  Description of Artificial Sequence: Synthetic oligonucleotide
  Antisense strand to SEQ ID NO: 2089718
uagguacaaagauauuuac

SEQ ID NO: 2089720 - RNA, 19 nt, Artificial Sequence
  Description of Artificial Sequence: Synthetic oligonucleotide
  Sense strand starting at position 211 of SEQ ID NO: 1882031
uuuguagaguauucuaaga

SEQ ID NO: 2089721 - RNA, 19 nt, Artificial Sequence
  Description of Artificial Sequence: Synthetic oligonucleotide
  Antisense strand to SEQ ID NO: 2089720
ucuuagaauacucuacaaa

SEQ ID NO: 2089722 - RNA, 19 nt, Artificial Sequence
  Description of Artificial Sequence: Synthetic oligonucleotide
  Sense strand starting at position 213 of SEQ ID NO: 1882031
uguagaguauucuaagaaa

SEQ ID NO: 2089723 - RNA, 19 nt, Artificial Sequence
  Description of Artificial Sequence: Synthetic oligonucleotide
  Antisense strand to SEQ ID NO: 2089722
uuucuuagaauacucuaca

SEQ ID NO: 2089724 - RNA, 19 nt, Artificial Sequence
  Description of Artificial Sequence: Synthetic oligonucleotide
  Sense strand starting at position 369 of SEQ ID NO: 1882031
agaguaguggugugaacau

SEQ ID NO: 2089725 - RNA, 19 nt, Artificial Sequence
  Description of Artificial Sequence: Synthetic oligonucleotide
  Antisense strand to SEQ ID NO: 2089724
auguucacaccacuacucu

SEQ ID NO: 2089726 - RNA, 19 nt, Artificial Sequence
  Description of Artificial Sequence: Synthetic oligonucleotide
  Sense strand starting at position 492 of SEQ ID NO: 1882031
uucuguuuguuuguagaaa

SEQ ID NO: 2089727 - RNA, 19 nt, Artificial Sequence
  Description of Artificial Sequence: Synthetic oligonucleotide
  Antisense strand to SEQ ID NO: 2089726
uuucuacaaacaaacagaa

SEQ ID NO: 2089728 - RNA, 19 nt, Artificial Sequence
  Description of Artificial Sequence: Synthetic oligonucleotide
  Sense strand starting at position 686 of SEQ ID NO: 1882031
auagcuaucuuuccaggau

SEQ ID NO: 2089729 - RNA, 19 nt, Artificial Sequence
  Description of Artificial Sequence: Synthetic oligonucleotide
  Antisense strand to SEQ ID NO: 2089728
auccuggaaagauagcuau

SEQ ID NO: 2089730 - RNA, 19 nt, Artificial Sequence
  Description of Artificial Sequence: Synthetic oligonucleotide
  Sense strand starting at position 689 of SEQ ID NO: 1882031
gcuaucuuuccaggauaua

SEQ ID NO: 2089731 - RNA, 19 nt, Artificial Sequence
  Description of Artificial Sequence: Synthetic oligonucleotide
  Antisense strand to SEQ ID NO: 2089730
uauauccuggaaagauagc

SEQ ID NO: 2089732 - RNA, 19 nt, Artificial Sequence
  Description of Artificial Sequence: Synthetic oligonucleotide
  Sense strand starting at position 757 of SEQ ID NO: 1882031
aggauaaacugauauacca

SEQ ID NO: 2089733 - RNA, 19 nt, Artificial Sequence
  Description of Artificial Sequence: Synthetic oligonucleotide
  Antisense strand to SEQ ID NO: 2089732
ugguauaucaguuuauccu

SEQ ID NO: 2089734 - RNA, 19 nt, Artificial Sequence
  Description of Artificial Sequence: Synthetic oligonucleotide
  Sense strand starting at position 985 of SEQ ID NO: 1882031
uuuaaagucucagauaagg

SEQ ID NO: 2089735 - RNA, 19 nt, Artificial Sequence
  Description of Artificial Sequence: Synthetic oligonucleotide
  Antisense strand to SEQ ID NO: 2089734
ccuuaucugagacuuuaaa

SEQ ID NO: 2089736 - RNA, 19 nt, Artificial Sequence
  Description of Artificial Sequence: Synthetic oligonucleotide
  Sense strand starting at position 1485 of SEQ ID NO: 1882031
ggcagaacucgugagucag

SEQ ID NO: 2089737 - RNA, 19 nt, Artificial Sequence
  Description of Artificial Sequence: Synthetic oligonucleotide
  Antisense strand to SEQ ID NO: 2089736
cugacucacgaguucugcc

SEQ ID NO: 2089738 - RNA, 19 nt, Artificial Sequence
  Description of Artificial Sequence: Synthetic oligonucleotide
  Sense strand starting at position 1489 of SEQ ID NO: 1882031
gaacucgugagucagagau

SEQ ID NO: 2089739 - RNA, 19 nt, Artificial Sequence
  Description of Artificial Sequence: Synthetic oligonucleotide
  Antisense strand to SEQ ID NO: 2089738
aucucugacucacgaguuc

SEQ ID NO: 2089740 - RNA, 19 nt, Artificial Sequence
  Description of Artificial Sequence: Synthetic oligonucleotide
  Sense strand starting at position 1493 of SEQ ID NO: 1882031
ucgugagucagagaucuug

SEQ ID NO: 2089741 - RNA, 19 nt, Artificial Sequence
  Description of Artificial Sequence: Synthetic oligonucleotide
  Antisense strand to SEQ ID NO: 2089740
caagaucucugacucacga

SEQ ID NO: 2089742 - RNA, 19 nt, Artificial Sequence
  Description of Artificial Sequence: Synthetic oligonucleotide
  Sense strand starting at position 1763 of SEQ ID NO: 1882031
gguugcauccagcggagau

SEQ ID NO: 2089743 - RNA, 19 nt, Artificial Sequence
  Description of Artificial Sequence: Synthetic oligonucleotide
  Antisense strand to SEQ ID NO: 2089742
aucuccgcuggaugcaacc

SEQ ID NO: 2089744 - RNA, 19 nt, Artificial Sequence
  Description of Artificial Sequence: Synthetic oligonucleotide
  Sense strand starting at position 1864 of SEQ ID NO: 1882031
gacucaaagcuuuauguga

SEQ ID NO: 2089745 - RNA, 19 nt, Artificial Sequence
  Description of Artificial Sequence: Synthetic oligonucleotide
  Antisense strand to SEQ ID NO: 2089744
ucacauaaagcuuugaguc

SEQ ID NO: 2089746 - RNA, 19 nt, Artificial Sequence
  Description of Artificial Sequence: Synthetic oligonucleotide
  Sense strand starting at position 1871 of SEQ ID NO: 1882031
agcuuuaugugacacagga

SEQ ID NO: 2089747 - RNA, 19 nt, Artificial Sequence
  Description of Artificial Sequence: Synthetic oligonucleotide
  Antisense strand to SEQ ID NO: 2089746
uccugugucacauaaagcu

SEQ ID NO: 2089748 - RNA, 19 nt, Artificial Sequence
  Description of Artificial Sequence: Synthetic oligonucleotide
  Sense strand starting at position 1923 of SEQ ID NO: 1882031
uccauauuaugcguuagua

SEQ ID NO: 2089749 - RNA, 19 nt, Artificial Sequence
  Description of Artificial Sequence: Synthetic oligonucleotide
  Antisense strand to SEQ ID NO: 2089748
uacuaacgcauaauaugga

SEQ ID NO: 2089750 - RNA, 19 nt, Artificial Sequence
  Description of Artificial Sequence: Synthetic oligonucleotide
  Sense strand starting at position 1935 of SEQ ID NO: 1882031
guuaguauguguccacaac

SEQ ID NO: 2089751 - RNA, 19 nt, Artificial Sequence
  Description of Artificial Sequence: Synthetic oligonucleotide
  Antisense strand to SEQ ID NO: 2089750
guuguggacacauacuaac

SEQ ID NO: 2089752 - RNA, 19 nt, Artificial Sequence
  Description of Artificial Sequence: Synthetic oligonucleotide
  Sense strand starting at position 1936 of SEQ ID NO: 1882031
uuaguauguguccacaacu

SEQ ID NO: 2089753 - RNA, 19 nt, Artificial Sequence
  Description of Artificial Sequence: Synthetic oligonucleotide
  Antisense strand to SEQ ID NO: 2089752
aguuguggacacauacuaa

SEQ ID NO: 2089754 - RNA, 19 nt, Artificial Sequence
  Description of Artificial Sequence: Synthetic oligonucleotide
  Sense strand starting at position 2010 of SEQ ID NO: 1882031
cugaaaucgucucuauaau

SEQ ID NO: 2089755 - RNA, 19 nt, Artificial Sequence
  Description of Artificial Sequence: Synthetic oligonucleotide
  Antisense strand to SEQ ID NO: 2089754
auuauagagacgauuucag

SEQ ID NO: 2089756 - RNA, 19 nt, Artificial Sequence
  Description of Artificial Sequence: Synthetic oligonucleotide
  Sense strand starting at position 2011 of SEQ ID NO: 1882031
ugaaaucgucucuauaauu

SEQ ID NO: 2089757 - RNA, 19 nt, Artificial Sequence
  Description of Artificial Sequence: Synthetic oligonucleotide
  Antisense strand to SEQ ID NO: 2089756
aauuauagagacgauuuca

SEQ ID NO: 2089758 - RNA, 19 nt, Artificial Sequence
  Description of Artificial Sequence: Synthetic oligonucleotide
  Sense strand starting at position 2068 of SEQ ID NO: 1882031
ccuuucugaggcuaucauu

SEQ ID NO: 2089759 - RNA, 19 nt, Artificial Sequence
  Description of Artificial Sequence: Synthetic oligonucleotide
  Antisense strand to SEQ ID NO: 2089758
aaugauagccucagaaagg

SEQ ID NO: 2089760 - RNA, 19 nt, Artificial Sequence
  Description of Artificial Sequence: Synthetic oligonucleotide
  Sense strand starting at position 2110 of SEQ ID NO: 1882031
guuugauauguugaggcuu

SEQ ID NO: 2089761 - RNA, 19 nt, Artificial Sequence
  Description of Artificial Sequence: Synthetic oligonucleotide
  Antisense strand to SEQ ID NO: 2089760
aagccucaacauaucaaac

SEQ ID NO: 2089762 - RNA, 19 nt, Artificial Sequence
  Description of Artificial Sequence: Synthetic oligonucleotide
  Sense strand starting at position 2190 of SEQ ID NO: 1882031
ggaguuugucaagguguag

SEQ ID NO: 2089763 - RNA, 19 nt, Artificial Sequence
  Description of Artificial Sequence: Synthetic oligonucleotide
  Antisense strand to SEQ ID NO: 2089762
cuacaccuugacaaacucc

SEQ ID NO: 2089764 - RNA, 19 nt, Artificial Sequence
  Description of Artificial Sequence: Synthetic oligonucleotide
  Sense strand starting at position 2233 of SEQ ID NO: 1882031
gcucccaaauauucgaauu

SEQ ID NO: 2089765 - RNA, 19 nt, Artificial Sequence
  Description of Artificial Sequence: Synthetic oligonucleotide
  Antisense strand to SEQ ID NO: 2089764
aauucgaauauuugggagc

SEQ ID NO: 2089766 - RNA, 19 nt, Artificial Sequence
  Description of Artificial Sequence: Synthetic oligonucleotide
  Sense strand starting at position 2304 of SEQ ID NO: 1882031
aagauuaagagcggcaaga

SEQ ID NO: 2089767 - RNA, 19 nt, Artificial Sequence
  Description of Artificial Sequence: Synthetic oligonucleotide
  Antisense strand to SEQ ID NO: 2089766
ucuugccgcucuuaaucuu

SEQ ID NO: 2089768 - RNA, 19 nt, Artificial Sequence
  Description of Artificial Sequence: Synthetic oligonucleotide
  Sense strand starting at position 2356 of SEQ ID NO: 1882031
gggcgauguccuugcuaau

SEQ ID NO: 2089769 - RNA, 19 nt, Artificial Sequence
  Description of Artificial Sequence: Synthetic oligonucleotide
  Antisense strand to SEQ ID NO: 2089768
auuagcaaggacaucgccc

SEQ ID NO: 2089770 - RNA, 19 nt, Artificial Sequence
  Description of Artificial Sequence: Synthetic oligonucleotide
  Sense strand starting at position 2464 of SEQ ID NO: 1882031
aacaaaguuccguaagucu

SEQ ID NO: 2089771 - RNA, 19 nt, Artificial Sequence
  Description of Artificial Sequence: Synthetic oligonucleotide
  Antisense strand to SEQ ID NO: 2089770
agacuuacggaacuuuguu

SEQ ID NO: 2089772 - RNA, 19 nt, Artificial Sequence
  Description of Artificial Sequence: Synthetic oligonucleotide
  Sense strand starting at position 2473 of SEQ ID NO: 1882031
ccguaagucuggccgguaa

SEQ ID NO: 2089773 - RNA, 19 nt, Artificial Sequence
  Description of Artificial Sequence: Synthetic oligonucleotide
  Antisense strand to SEQ ID NO: 2089772
uuaccggccagacuuacgg

SEQ ID NO: 2089774 - RNA, 19 nt, Artificial Sequence
  Description of Artificial Sequence: Synthetic oligonucleotide
  Sense strand starting at position 2475 of SEQ ID NO: 1882031
guaagucuggccgguaacu

SEQ ID NO: 2089775 - RNA, 19 nt, Artificial Sequence
  Description of Artificial Sequence: Synthetic oligonucleotide
  Antisense strand to SEQ ID NO: 2089774
aguuaccggccagacuuac

SEQ ID NO: 2089776 - RNA, 19 nt, Artificial Sequence
  Description of Artificial Sequence: Synthetic oligonucleotide
  Sense strand starting at position 2604 of SEQ ID NO: 1882031
ugaagugauuacgccuguu

SEQ ID NO: 2089777 - RNA, 19 nt, Artificial Sequence
  Description of Artificial Sequence: Synthetic oligonucleotide
  Antisense strand to SEQ ID NO: 2089776
aacaggcguaaucacuuca

SEQ ID NO: 2089778 - RNA, 19 nt, Artificial Sequence
  Description of Artificial Sequence: Synthetic oligonucleotide
  Sense strand starting at position 2692 of SEQ ID NO: 1882031
gcuaacccgccauaucuua

SEQ ID NO: 2089779 - RNA, 19 nt, Artificial Sequence
  Description of Artificial Sequence: Synthetic oligonucleotide
  Antisense strand to SEQ ID NO: 2089778
uaagauauggcggguuagc

SEQ ID NO: 2089780 - RNA, 19 nt, Artificial Sequence
  Description of Artificial Sequence: Synthetic oligonucleotide
  Sense strand starting at position 2821 of SEQ ID NO: 1882031
gcgcguuacgacuggaaag

SEQ ID NO: 2089781 - RNA, 19 nt, Artificial Sequence
  Description of Artificial Sequence: Synthetic oligonucleotide
  Antisense strand to SEQ ID NO: 2089780
cuuuccagucguaacgcgc

SEQ ID NO: 2089782 - RNA, 19 nt, Artificial Sequence
  Description of Artificial Sequence: Synthetic oligonucleotide
  Sense strand starting at position 3561 of SEQ ID NO: 1882031
gcuccaggcgugguuuauu

SEQ ID NO: 2089783 - RNA, 19 nt, Artificial Sequence
  Description of Artificial Sequence: Synthetic oligonucleotide
  Antisense strand to SEQ ID NO: 2089782
aauaaaccacgccuggagc

SEQ ID NO: 2089784 - RNA, 19 nt, Artificial Sequence
  Description of Artificial Sequence: Synthetic oligonucleotide
  Sense strand starting at position 3641 of SEQ ID NO: 1882031
uggguucaccgggaagcau

SEQ ID NO: 2089785 - RNA, 19 nt, Artificial Sequence
  Description of Artificial Sequence: Synthetic oligonucleotide
  Antisense strand to SEQ ID NO: 2089784
augcuucccggugaaccca

SEQ ID NO: 2089786 - RNA, 19 nt, Artificial Sequence
  Description of Artificial Sequence: Synthetic oligonucleotide
  Sense strand starting at position 3696 of SEQ ID NO: 1882031
gcguuauucuggccucaga

SEQ ID NO: 2089787 - RNA, 19 nt, Artificial Sequence
  Description of Artificial Sequence: Synthetic oligonucleotide
  Antisense strand to SEQ ID NO: 2089786
ucugaggccagaauaacgc

SEQ ID NO: 2089788 - RNA, 19 nt, Artificial Sequence
  Description of Artificial Sequence: Synthetic oligonucleotide
  Sense strand starting at position 3744 of SEQ ID NO: 1882031
cgcgugcuucggccaguua

SEQ ID NO: 2089789 - RNA, 19 nt, Artificial Sequence
  Description of Artificial Sequence: Synthetic oligonucleotide
  Antisense strand to SEQ ID NO: 2089788
uaacuggccgaagcacgcg

SEQ ID NO: 2089790 - RNA, 19 nt, Artificial Sequence
  Description of Artificial Sequence: Synthetic oligonucleotide
  Sense strand starting at position 3876 of SEQ ID NO: 1882031
ggcguguugccacucguga

SEQ ID NO: 2089791 - RNA, 19 nt, Artificial Sequence
  Description of Artificial Sequence: Synthetic oligonucleotide
  Antisense strand to SEQ ID NO: 2089790
ucacgaguggcaacacgcc

SEQ ID NO: 2089792 - RNA, 19 nt, Artificial Sequence
  Description of Artificial Sequence: Synthetic oligonucleotide
  Sense strand starting at position 3911 of SEQ ID NO: 1882031
cucuguugaagugggaaau

SEQ ID NO: 2089793 - RNA, 19 nt, Artificial Sequence
  Description of Artificial Sequence: Synthetic oligonucleotide
  Antisense strand to SEQ ID NO: 2089792
auuucccacuucaacagag

SEQ ID NO: 2089794 - RNA, 19 nt, Artificial Sequence
  Description of Artificial Sequence: Synthetic oligonucleotide
  Sense strand starting at position 20 of SEQ ID NO: 1882032
gcugcucuucugcuuagua

SEQ ID NO: 2089795 - RNA, 19 nt, Artificial Sequence
  Description of Artificial Sequence: Synthetic oligonucleotide
  Antisense strand to SEQ ID NO: 2089794
uacuaagcagaagagcagc

SEQ ID NO: 2089796 - RNA, 19 nt, Artificial Sequence
  Description of Artificial Sequence: Synthetic oligonucleotide
  Sense strand starting at position 22 of SEQ ID NO: 1882032
ugcucuucugcuuaguaca

SEQ ID NO: 2089797 - RNA, 19 nt, Artificial Sequence
  Description of Artificial Sequence: Synthetic oligonucleotide
  Antisense strand to SEQ ID NO: 2089796
uguacuaagcagaagagca

SEQ ID NO: 2089798 - RNA, 19 nt, Artificial Sequence
  Description of Artificial Sequence: Synthetic oligonucleotide
  Sense strand starting at position 61 of SEQ ID NO: 1882032
augacagauuccuucucgu

SEQ ID NO: 2089799 - RNA, 19 nt, Artificial Sequence
  Description of Artificial Sequence: Synthetic oligonucleotide
  Antisense strand to SEQ ID NO: 2089798
acgagaaggaaucugucau

SEQ ID NO: 2089800 - RNA, 19 nt, Artificial Sequence
  Description of Artificial Sequence: Synthetic oligonucleotide
  Sense strand starting at position 84 of SEQ ID NO: 1882032
ugccucucagcucagauau

SEQ ID NO: 2089801 - RNA, 19 nt, Artificial Sequence
  Description of Artificial Sequence: Synthetic oligonucleotide
  Antisense strand to SEQ ID NO: 2089800
auaucugagcugagaggca

SEQ ID NO: 2089802 - RNA, 19 nt, Artificial Sequence
  Description of Artificial Sequence: Synthetic oligonucleotide
  Sense strand starting at position 195 of SEQ ID NO: 1882032
ggcaauuaccacuacuuga

SEQ ID NO: 2089803 - RNA, 19 nt, Artificial Sequence
  Description of Artificial Sequence: Synthetic oligonucleotide
  Antisense strand to SEQ ID NO: 2089802
ucaaguagugguaauugcc

SEQ ID NO: 2089804 - RNA, 19 nt, Artificial Sequence
  Description of Artificial Sequence: Synthetic oligonucleotide
  Sense strand starting at position 326 of SEQ ID NO: 1882032
caguguuuggcacacauca

SEQ ID NO: 2089805 - RNA, 19 nt, Artificial Sequence
  Description of Artificial Sequence: Synthetic oligonucleotide
  Antisense strand to SEQ ID NO: 2089804
ugaugugugccaaacacug

SEQ ID NO: 2089806 - RNA, 19 nt, Artificial Sequence
  Description of Artificial Sequence: Synthetic oligonucleotide
  Sense strand starting at position 328 of SEQ ID NO: 1882032
guguuuggcacacaucagu

SEQ ID NO: 2089807 - RNA, 19 nt, Artificial Sequence
  Description of Artificial Sequence: Synthetic oligonucleotide
  Antisense strand to SEQ ID NO: 2089806
acugaugugugccaaacac

SEQ ID NO: 2089808 - RNA, 19 nt, Artificial Sequence
  Description of Artificial Sequence: Synthetic oligonucleotide
  Sense strand starting at position 355 of SEQ ID NO: 1882032
auguuugccaaaugaacga

SEQ ID NO: 2089809 - RNA, 19 nt, Artificial Sequence
  Description of Artificial Sequence: Synthetic oligonucleotide
  Antisense strand to SEQ ID NO: 2089808
ucguucauuuggcaaacau

SEQ ID NO: 2089810 - RNA, 19 nt, Artificial Sequence
  Description of Artificial Sequence: Synthetic oligonucleotide
  Sense strand starting at position 589 of SEQ ID NO: 1882032
caaauaggauggucaaguu

SEQ ID NO: 2089811 - RNA, 19 nt, Artificial Sequence
  Description of Artificial Sequence: Synthetic oligonucleotide
  Antisense strand to SEQ ID NO: 2089810
aacuugaccauccuauuug

SEQ ID NO: 2089812 - RNA, 19 nt, Artificial Sequence
  Description of Artificial Sequence: Synthetic oligonucleotide
  Sense strand starting at position 598 of SEQ ID NO: 1882032
uggucaaguuuguugcaau

SEQ ID NO: 2089813 - RNA, 19 nt, Artificial Sequence
  Description of Artificial Sequence: Synthetic oligonucleotide
  Antisense strand to SEQ ID NO: 2089812
auugcaacaaacuugacca

SEQ ID NO: 2089814 - RNA, 19 nt, Artificial Sequence
  Description of Artificial Sequence: Synthetic oligonucleotide
  Sense strand starting at position 892 of SEQ ID NO: 1882032
ugugcaauccaacagaauu

SEQ ID NO: 2089815 - RNA, 19 nt, Artificial Sequence
  Description of Artificial Sequence: Synthetic oligonucleotide
  Antisense strand to SEQ ID NO: 2089814
aauucuguuggauugcaca

SEQ ID NO: 2089816 - RNA, 19 nt, Artificial Sequence
  Description of Artificial Sequence: Synthetic oligonucleotide
  Sense strand starting at position 937 of SEQ ID NO: 1882032
gcucuacucugcccaaaug

SEQ ID NO: 2089817 - RNA, 19 nt, Artificial Sequence
  Description of Artificial Sequence: Synthetic oligonucleotide
  Antisense strand to SEQ ID NO: 2089816
cauuugggcagaguagagc

SEQ ID NO: 2089818 - RNA, 19 nt, Artificial Sequence
  Description of Artificial Sequence: Synthetic oligonucleotide
  Sense strand starting at position 986 of SEQ ID NO: 1882032
uugggauauugucugauga

SEQ ID NO: 2089819 - RNA, 19 nt, Artificial Sequence
  Description of Artificial Sequence: Synthetic oligonucleotide
  Antisense strand to SEQ ID NO: 2089818
ucaucagacaauaucccaa

SEQ ID NO: 2089820 - RNA, 19 nt, Artificial Sequence
  Description of Artificial Sequence: Synthetic oligonucleotide
  Sense strand starting at position 987 of SEQ ID NO: 1882032
ugggauauugucugaugac

SEQ ID NO: 2089821 - RNA, 19 nt, Artificial Sequence
  Description of Artificial Sequence: Synthetic oligonucleotide
  Antisense strand to SEQ ID NO: 2089820
gucaucagacaauauccca

SEQ ID NO: 2089822 - RNA, 19 nt, Artificial Sequence
  Description of Artificial Sequence: Synthetic oligonucleotide
  Sense strand starting at position 1026 of SEQ ID NO: 1882032
cuccacucuugggucauau

SEQ ID NO: 2089823 - RNA, 19 nt, Artificial Sequence
  Description of Artificial Sequence: Synthetic oligonucleotide
  Antisense strand to SEQ ID NO: 2089822
auaugacccaagaguggag

SEQ ID NO: 2089824 - RNA, 19 nt, Artificial Sequence
  Description of Artificial Sequence: Synthetic oligonucleotide
  Sense strand starting at position 1028 of SEQ ID NO: 1882032
ccacucuugggucauauaa

SEQ ID NO: 2089825 - RNA, 19 nt, Artificial Sequence
  Description of Artificial Sequence: Synthetic oligonucleotide
  Antisense strand to SEQ ID NO: 2089824
uuauaugacccaagagugg

SEQ ID NO: 2089826 - RNA, 19 nt, Artificial Sequence
  Description of Artificial Sequence: Synthetic oligonucleotide
  Sense strand starting at position 1066 of SEQ ID NO: 1882032
ggcaaauaaugucuuacag

SEQ ID NO: 2089827 - RNA, 19 nt, Artificial Sequence
  Description of Artificial Sequence: Synthetic oligonucleotide
  Antisense strand to SEQ ID NO: 2089826
cuguaagacauuauuugcc

SEQ ID NO: 2089828 - RNA, 19 nt, Artificial Sequence
  Description of Artificial Sequence: Synthetic oligonucleotide
  Sense strand starting at position 1206 of SEQ ID NO: 1882032
accagaaacugagacauaa

SEQ ID NO: 2089829 - RNA, 19 nt, Artificial Sequence
  Description of Artificial Sequence: Synthetic oligonucleotide
  Antisense strand to SEQ ID NO: 2089828
uuaugucucaguuucuggu

SEQ ID NO: 2089830 - RNA, 19 nt, Artificial Sequence
  Description of Artificial Sequence: Synthetic oligonucleotide
  Sense strand starting at position 1765 of SEQ ID NO: 1882032
ucagaaguucgucauagau

SEQ ID NO: 2089831 - RNA, 19 nt, Artificial Sequence
  Description of Artificial Sequence: Synthetic oligonucleotide
  Antisense strand to SEQ ID NO: 2089830
aucuaugacgaacuucuga

SEQ ID NO: 2089832 - RNA, 19 nt, Artificial Sequence
  Description of Artificial Sequence: Synthetic oligonucleotide
  Sense strand starting at position 1771 of SEQ ID NO: 1882032
guucgucauagauaagaaa

SEQ ID NO: 2089833 - RNA, 19 nt, Artificial Sequence
  Description of Artificial Sequence: Synthetic oligonucleotide
  Antisense strand to SEQ ID NO: 2089832
uuucuuaucuaugacgaac

SEQ ID NO: 2089834 - RNA, 19 nt, Artificial Sequence
  Description of Artificial Sequence: Synthetic oligonucleotide
  Sense strand starting at position 1774 of SEQ ID NO: 1882032
cgucauagauaagaaauga

SEQ ID NO: 2089835 - RNA, 19 nt, Artificial Sequence
  Description of Artificial Sequence: Synthetic oligonucleotide
  Antisense strand to SEQ ID NO: 2089834
ucauuucuuaucuaugacg

SEQ ID NO: 2089836 - RNA, 19 nt, Artificial Sequence
  Description of Artificial Sequence: Synthetic oligonucleotide
  Sense strand starting at position 1979 of SEQ ID NO: 1882032
cuggacagaugcucugaau

SEQ ID NO: 2089837 - RNA, 19 nt, Artificial Sequence
  Description of Artificial Sequence: Synthetic oligonucleotide
  Antisense strand to SEQ ID NO: 2089836
auucagagcaucuguccag

SEQ ID NO: 2089838 - RNA, 19 nt, Artificial Sequence
  Description of Artificial Sequence: Synthetic oligonucleotide
  Sense strand starting at position 2424 of SEQ ID NO: 1882032
cuacauaacguccagacau

SEQ ID NO: 2089839 - RNA, 19 nt, Artificial Sequence
  Description of Artificial Sequence: Synthetic oligonucleotide
  Antisense strand to SEQ ID NO: 2089838
augucuggacguuauguag

SEQ ID NO: 2089840 - RNA, 19 nt, Artificial Sequence
  Description of Artificial Sequence: Synthetic oligonucleotide
  Sense strand starting at position 2520 of SEQ ID NO: 1882032
gcuaauauuuaguuuguag

SEQ ID NO: 2089841 - RNA, 19 nt, Artificial Sequence
  Description of Artificial Sequence: Synthetic oligonucleotide
  Antisense strand to SEQ ID NO: 2089840
cuacaaacuaaauauuagc

SEQ ID NO: 2089842 - RNA, 19 nt, Artificial Sequence
  Description of Artificial Sequence: Synthetic oligonucleotide
  Sense strand starting at position 2617 of SEQ ID NO: 1882032
agcucacaagcuuggaauu

SEQ ID NO: 2089843 - RNA, 19 nt, Artificial Sequence
  Description of Artificial Sequence: Synthetic oligonucleotide
  Antisense strand to SEQ ID NO: 2089842
aauuccaagcuugugagcu

SEQ ID NO: 2089844 - RNA, 19 nt, Artificial Sequence
  Description of Artificial Sequence: Synthetic oligonucleotide
  Sense strand starting at position 2649 of SEQ ID NO: 1882032
auugaauauuggucuuucu

SEQ ID NO: 2089845 - RNA, 19 nt, Artificial Sequence
  Description of Artificial Sequence: Synthetic oligonucleotide
  Antisense strand to SEQ ID NO: 2089844
agaaagaccaauauucaau

SEQ ID NO: 2089846 - RNA, 19 nt, Artificial Sequence
  Description of Artificial Sequence: Synthetic oligonucleotide
  Sense strand starting at position 2656 of SEQ ID NO: 1882032
auuggucuuucuucuauca

SEQ ID NO: 2089847 - RNA, 19 nt, Artificial Sequence
  Description of Artificial Sequence: Synthetic oligonucleotide
  Antisense strand to SEQ ID NO: 2089846
ugauagaagaaagaccaau

SEQ ID NO: 2089848 - RNA, 19 nt, Artificial Sequence
  Description of Artificial Sequence: Synthetic oligonucleotide
  Sense strand starting at position 2961 of SEQ ID NO: 1882032
cacuuaacugagugguucu

SEQ ID NO: 2089849 - RNA, 19 nt, Artificial Sequence
  Description of Artificial Sequence: Synthetic oligonucleotide
  Antisense strand to SEQ ID NO: 2089848
agaaccacucaguuaagug

SEQ ID NO: 2089850 - RNA, 19 nt, Artificial Sequence
  Description of Artificial Sequence: Synthetic oligonucleotide
  Sense strand starting at position 2974 of SEQ ID NO: 1882032
gguucugguccagaagacu

SEQ ID NO: 2089851 - RNA, 19 nt, Artificial Sequence
  Description of Artificial Sequence: Synthetic oligonucleotide
  Antisense strand to SEQ ID NO: 2089850
agucuucuggaccagaacc

SEQ ID NO: 2089852 - RNA, 19 nt, Artificial Sequence
  Description of Artificial Sequence: Synthetic oligonucleotide
  Sense strand starting at position 2983 of SEQ ID NO: 1882032
ccagaagacucucaugaag

SEQ ID NO: 2089853 - RNA, 19 nt, Artificial Sequence
  Description of Artificial Sequence: Synthetic oligonucleotide
  Antisense strand to SEQ ID NO: 2089852
cuucaugagagucuucugg

SEQ ID NO: 2089854 - RNA, 19 nt, Artificial Sequence
  Description of Artificial Sequence: Synthetic oligonucleotide
  Sense strand starting at position 3008 of SEQ ID NO: 1882032
ucaagcugucaguagucau

SEQ ID NO: 2089855 - RNA, 19 nt, Artificial Sequence
  Description of Artificial Sequence: Synthetic oligonucleotide
  Antisense strand to SEQ ID NO: 2089854
augacuacugacagcuuga

SEQ ID NO: 2089856 - RNA, 19 nt, Artificial Sequence
  Description of Artificial Sequence: Synthetic oligonucleotide
  Sense strand starting at position 3085 of SEQ ID NO: 1882032
ggccucaguuccucauuaa

SEQ ID NO: 2089857 - RNA, 19 nt, Artificial Sequence
  Description of Artificial Sequence: Synthetic oligonucleotide
  Antisense strand to SEQ ID NO: 2089856
uuaaugaggaacugaggcc

SEQ ID NO: 2089858 - RNA, 19 nt, Artificial Sequence
  Description of Artificial Sequence: Synthetic oligonucleotide
  Sense strand starting at position 3089 of SEQ ID NO: 1882032
ucaguuccucauuaaaugu

SEQ ID NO: 2089859 - RNA, 19 nt, Artificial Sequence
  Description of Artificial Sequence: Synthetic oligonucleotide
  Antisense strand to SEQ ID NO: 2089858
acauuuaaugaggaacuga

SEQ ID NO: 2089860 - RNA, 19 nt, Artificial Sequence
  Description of Artificial Sequence: Synthetic oligonucleotide
  Sense strand starting at position 3097 of SEQ ID NO: 1882032
ucauuaaauguuggcuaga

SEQ ID NO: 2089861 - RNA, 19 nt, Artificial Sequence
  Description of Artificial Sequence: Synthetic oligonucleotide
  Antisense strand to SEQ ID NO: 2089860
ucuagccaacauuuaauga

SEQ ID NO: 2089862 - RNA, 19 nt, Artificial Sequence
  Description of Artificial Sequence: Synthetic oligonucleotide
  Sense strand starting at position 3102 of SEQ ID NO: 1882032
aaauguuggcuagagacuu

SEQ ID NO: 2089863 - RNA, 19 nt, Artificial Sequence
  Description of Artificial Sequence: Synthetic oligonucleotide
  Antisense strand to SEQ ID NO: 2089862
aagucucuagccaacauuu

SEQ ID NO: 2089864 - RNA, 19 nt, Artificial Sequence
  Description of Artificial Sequence: Synthetic oligonucleotide
  Sense strand starting at position 3260 of SEQ ID NO: 1882032
ucacuaaugcuguaugcuu

SEQ ID NO: 2089865 - RNA, 19 nt, Artificial Sequence
  Description of Artificial Sequence: Synthetic oligonucleotide
  Antisense strand to SEQ ID NO: 2089864
aagcauacagcauuaguga

SEQ ID NO: 2089866 - RNA, 19 nt, Artificial Sequence
  Description of Artificial Sequence: Synthetic oligonucleotide
  Sense strand starting at position 3386 of SEQ ID NO: 1882032
cccugaacuguaggguuau

SEQ ID NO: 2089867 - RNA, 19 nt, Artificial Sequence
  Description of Artificial Sequence: Synthetic oligonucleotide
  Antisense strand to SEQ ID NO: 2089866
auaacccuacaguucaggg

SEQ ID NO: 2089868 - RNA, 19 nt, Artificial Sequence
  Description of Artificial Sequence: Synthetic oligonucleotide
  Sense strand starting at position 3481 of SEQ ID NO: 1882032
ggccucagguaacugauua

SEQ ID NO: 2089869 - RNA, 19 nt, Artificial Sequence
  Description of Artificial Sequence: Synthetic oligonucleotide
  Antisense strand to SEQ ID NO: 2089868
uaaucaguuaccugaggcc

SEQ ID NO: 2089870 - RNA, 19 nt, Artificial Sequence
  Description of Artificial Sequence: Synthetic oligonucleotide
  Sense strand starting at position 3485 of SEQ ID NO: 1882032
ucagguaacugauuaagau

SEQ ID NO: 2089871 - RNA, 19 nt, Artificial Sequence
  Description of Artificial Sequence: Synthetic oligonucleotide
  Antisense strand to SEQ ID NO: 2089870
aucuuaaucaguuaccuga

SEQ ID NO: 2089872 - RNA, 19 nt, Artificial Sequence
  Description of Artificial Sequence: Synthetic oligonucleotide
  Sense strand starting at position 3933 of SEQ ID NO: 1882032
agccaucuaugacaaauag

SEQ ID NO: 2089873 - RNA, 19 nt, Artificial Sequence
  Description of Artificial Sequence: Synthetic oligonucleotide
  Antisense strand to SEQ ID NO: 2089872
cuauuugucauagauggcu

SEQ ID NO: 2089874 - RNA, 19 nt, Artificial Sequence
  Description of Artificial Sequence: Synthetic oligonucleotide
  Sense strand starting at position 539 of SEQ ID NO: 1882033
guauuauacuucccugaag

SEQ ID NO: 2089875 - RNA, 19 nt, Artificial Sequence
  Description of Artificial Sequence: Synthetic oligonucleotide
  Antisense strand to SEQ ID NO: 2089874
cuucagggaaguauaauac

SEQ ID NO: 2089876 - RNA, 19 nt, Artificial Sequence
  Description of Artificial Sequence: Synthetic oligonucleotide
  Sense strand starting at position 833 of SEQ ID NO: 1882033
ggauauuguuuaucuugaa

SEQ ID NO: 2089877 - RNA, 19 nt, Artificial Sequence
  Description of Artificial Sequence: Synthetic oligonucleotide
  Antisense strand to SEQ ID NO: 2089876
uucaagauaaacaauaucc

SEQ ID NO: 2089878 - RNA, 19 nt, Artificial Sequence
  Description of Artificial Sequence: Synthetic oligonucleotide
  Sense strand starting at position 848 of SEQ ID NO: 1882033
ugaaauucuaugggugcaa

SEQ ID NO: 2089879 - RNA, 19 nt, Artificial Sequence
  Description of Artificial Sequence: Synthetic oligonucleotide
  Antisense strand to SEQ ID NO: 2089878
uugcacccauagaauuuca

SEQ ID NO: 2089880 - RNA, 19 nt, Artificial Sequence
  Description of Artificial Sequence: Synthetic oligonucleotide
  Sense strand starting at position 850 of SEQ ID NO: 1882033
aaauucuaugggugcaaga

SEQ ID NO: 2089881 - RNA, 19 nt, Artificial Sequence
  Description of Artificial Sequence: Synthetic oligonucleotide
  Antisense strand to SEQ ID NO: 2089880
ucuugcacccauagaauuu

SEQ ID NO: 2089882 - RNA, 19 nt, Artificial Sequence
  Description of Artificial Sequence: Synthetic oligonucleotide
  Sense strand starting at position 1081 of SEQ ID NO: 1882033
caagguaggcauuauugau

SEQ ID NO: 2089883 - RNA, 19 nt, Artificial Sequence
  Description of Artificial Sequence: Synthetic oligonucleotide
  Antisense strand to SEQ ID NO: 2089882
aucaauaaugccuaccuug

SEQ ID NO: 2089884 - RNA, 19 nt, Artificial Sequence
  Description of Artificial Sequence: Synthetic oligonucleotide
  Sense strand starting at position 1150 of SEQ ID NO: 1882033
aggagugcacaguaaauau

SEQ ID NO: 2089885 - RNA, 19 nt, Artificial Sequence
  Description of Artificial Sequence: Synthetic oligonucleotide
  Antisense strand to SEQ ID NO: 2089884
auauuuacugugcacuccu

SEQ ID NO: 2089886 - RNA, 19 nt, Artificial Sequence
  Description of Artificial Sequence: Synthetic oligonucleotide
  Sense strand starting at position 1181 of SEQ ID NO: 1882033
ugaagaaugcuccauccca

SEQ ID NO: 2089887 - RNA, 19 nt, Artificial Sequence
  Description of Artificial Sequence: Synthetic oligonucleotide
  Antisense strand to SEQ ID NO: 2089886
ugggauggagcauucuuca

SEQ ID NO: 2089888 - RNA, 19 nt, Artificial Sequence
  Description of Artificial Sequence: Synthetic oligonucleotide
  Sense strand starting at position 1455 of SEQ ID NO: 1882033
cccuccaaaugguugagau

SEQ ID NO: 2089889 - RNA, 19 nt, Artificial Sequence
  Description of Artificial Sequence: Synthetic oligonucleotide
  Antisense strand to SEQ ID NO: 2089888
aucucaaccauuuggaggg

SEQ ID NO: 2089890 - RNA, 19 nt, Artificial Sequence
  Description of Artificial Sequence: Synthetic oligonucleotide
  Sense strand starting at position 1456 of SEQ ID NO: 1882033
ccuccaaaugguugagauu

SEQ ID NO: 2089891 - RNA, 19 nt, Artificial Sequence
  Description of Artificial Sequence: Synthetic oligonucleotide
  Antisense strand to SEQ ID NO: 2089890
aaucucaaccauuuggagg

SEQ ID NO: 2089892 - RNA, 19 nt, Artificial Sequence
  Description of Artificial Sequence: Synthetic oligonucleotide
  Sense strand starting at position 1507 of SEQ ID NO: 1882033
uguuuauuucuaugcccuu

SEQ ID NO: 2089893 - RNA, 19 nt, Artificial Sequence
  Description of Artificial Sequence: Synthetic oligonucleotide
  Antisense strand to SEQ ID NO: 2089892
aagggcauagaaauaaaca

SEQ ID NO: 2089894 - RNA, 19 nt, Artificial Sequence
  Description of Artificial Sequence: Synthetic oligonucleotide
  Sense strand starting at position 1620 of SEQ ID NO: 1882033
auucuuauggguuauauac

SEQ ID NO: 2089895 - RNA, 19 nt, Artificial Sequence
  Description of Artificial Sequence: Synthetic oligonucleotide
  Antisense strand to SEQ ID NO: 2089894
guauauaacccauaagaau

SEQ ID NO: 2089896 - RNA, 19 nt, Artificial Sequence
  Description of Artificial Sequence: Synthetic oligonucleotide
  Sense strand starting at position 1866 of SEQ ID NO: 1882033
agcuaugauguugaugaua

SEQ ID NO: 2089897 - RNA, 19 nt, Artificial Sequence
  Description of Artificial Sequence: Synthetic oligonucleotide
  Antisense strand to SEQ ID NO: 2089896
uaucaucaacaucauagcu

SEQ ID NO: 2089898 - RNA, 19 nt, Artificial Sequence
  Description of Artificial Sequence: Synthetic oligonucleotide
  Sense strand starting at position 1997 of SEQ ID NO: 1882033
cacaauguagacugugaau

SEQ ID NO: 2089899 - RNA, 19 nt, Artificial Sequence
  Description of Artificial Sequence: Synthetic oligonucleotide
  Antisense strand to SEQ ID NO: 2089898
auucacagucuacauugug

SEQ ID NO: 2089900 - RNA, 19 nt, Artificial Sequence
  Description of Artificial Sequence: Synthetic oligonucleotide
  Sense strand starting at position 2012 of SEQ ID NO: 1882033
gaaugucauuagucugaua

SEQ ID NO: 2089901 - RNA, 19 nt, Artificial Sequence
  Description of Artificial Sequence: Synthetic oligonucleotide
  Antisense strand to SEQ ID NO: 2089900
uaucagacuaaugacauuc

SEQ ID NO: 2089902 - RNA, 19 nt, Artificial Sequence
  Description of Artificial Sequence: Synthetic oligonucleotide
  Sense strand starting at position 2014 of SEQ ID NO: 1882033
augucauuagucugauaga

SEQ ID NO: 2089903 - RNA, 19 nt, Artificial Sequence
  Description of Artificial Sequence: Synthetic oligonucleotide
  Antisense strand to SEQ ID NO: 2089902
ucuaucagacuaaugacau

SEQ ID NO: 2089904 - RNA, 19 nt, Artificial Sequence
  Description of Artificial Sequence: Synthetic oligonucleotide
  Sense strand starting at position 2063 of SEQ ID NO: 1882033
ugauucuaugcugagcuaa

SEQ ID NO: 2089905 - RNA, 19 nt, Artificial Sequence
  Description of Artificial Sequence: Synthetic oligonucleotide
  Antisense strand to SEQ ID NO: 2089904
uuagcucagcauagaauca

SEQ ID NO: 2089906 - RNA, 19 nt, Artificial Sequence
  Description of Artificial Sequence: Synthetic oligonucleotide
  Sense strand starting at position 2251 of SEQ ID NO: 1882033
gguugaagacauuaacgua

SEQ ID NO: 2089907 - RNA, 19 nt, Artificial Sequence
  Description of Artificial Sequence: Synthetic oligonucleotide
  Antisense strand to SEQ ID NO: 2089906
uacguuaaugucuucaacc

SEQ ID NO: 2089908 - RNA, 19 nt, Artificial Sequence
  Description of Artificial Sequence: Synthetic oligonucleotide
  Sense strand starting at position 2258 of SEQ ID NO: 1882033
gacauuaacguagauaucu

SEQ ID NO: 2089909 - RNA, 19 nt, Artificial Sequence
  Description of Artificial Sequence: Synthetic oligonucleotide
  Antisense strand to SEQ ID NO: 2089908
agauaucuacguuaauguc

SEQ ID NO: 2089910 - RNA, 19 nt, Artificial Sequence
  Description of Artificial Sequence: Synthetic oligonucleotide
  Sense strand starting at position 2333 of SEQ ID NO: 1882033
agugauguggcgcuuuguu

SEQ ID NO: 2089911 - RNA, 19 nt, Artificial Sequence
  Description of Artificial Sequence: Synthetic oligonucleotide
  Antisense strand to SEQ ID NO: 2089910
aacaaagcgccacaucacu

SEQ ID NO: 2089912 - RNA, 19 nt, Artificial Sequence
  Description of Artificial Sequence: Synthetic oligonucleotide
  Sense strand starting at position 2335 of SEQ ID NO: 1882033
ugauguggcgcuuuguuua

SEQ ID NO: 2089913 - RNA, 19 nt, Artificial Sequence
  Description of Artificial Sequence: Synthetic oligonucleotide
  Antisense strand to SEQ ID NO: 2089912
uaaacaaagcgccacauca

SEQ ID NO: 2089914 - RNA, 19 nt, Artificial Sequence
  Description of Artificial Sequence: Synthetic oligonucleotide
  Sense strand starting at position 2372 of SEQ ID NO: 1882033
ucuucucuccuagauugga

SEQ ID NO: 2089915 - RNA, 19 nt, Artificial Sequence
  Description of Artificial Sequence: Synthetic oligonucleotide
  Antisense strand to SEQ ID NO: 2089914
uccaaucuaggagagaaga

SEQ ID NO: 2089916 - RNA, 19 nt, Artificial Sequence
  Description of Artificial Sequence: Synthetic oligonucleotide
  Sense strand starting at position 2455 of SEQ ID NO: 1882033
augugucuggcacauuaaa

SEQ ID NO: 2089917 - RNA, 19 nt, Artificial Sequence
  Description of Artificial Sequence: Synthetic oligonucleotide
  Antisense strand to SEQ ID NO: 2089916
uuuaaugugccagacacau

SEQ ID NO: 2089918 - RNA, 19 nt, Artificial Sequence
  Description of Artificial Sequence: Synthetic oligonucleotide
  Sense strand starting at position 2486 of SEQ ID NO: 1882033
auaauugaugugugaauuc

SEQ ID NO: 2089919 - RNA, 19 nt, Artificial Sequence
  Description of Artificial Sequence: Synthetic oligonucleotide
  Antisense strand to SEQ ID NO: 2089918
gaauucacacaucaauuau

SEQ ID NO: 2089920 - RNA, 19 nt, Artificial Sequence
  Description of Artificial Sequence: Synthetic oligonucleotide
  Sense strand starting at position 2665 of SEQ ID NO: 1882033
gggaaagugccuuauagca

SEQ ID NO: 2089921 - RNA, 19 nt, Artificial Sequence
  Description of Artificial Sequence: Synthetic oligonucleotide
  Antisense strand to SEQ ID NO: 2089920
ugcuauaaggcacuuuccc

SEQ ID NO: 2089922 - RNA, 19 nt, Artificial Sequence
  Description of Artificial Sequence: Synthetic oligonucleotide
  Sense strand starting at position 2811 of SEQ ID NO: 1882033
auauguucuguugaccuaa

SEQ ID NO: 2089923 - RNA, 19 nt, Artificial Sequence
  Description of Artificial Sequence: Synthetic oligonucleotide
  Antisense strand to SEQ ID NO: 2089922
uuaggucaacagaacauau

SEQ ID NO: 2089924 - RNA, 19 nt, Artificial Sequence
  Description of Artificial Sequence: Synthetic oligonucleotide
  Sense strand starting at position 2823 of SEQ ID NO: 1882033
gaccuaaugugagcauaca

SEQ ID NO: 2089925 - RNA, 19 nt, Artificial Sequence
  Description of Artificial Sequence: Synthetic oligonucleotide
  Antisense strand to SEQ ID NO: 2089924
uguaugcucacauuagguc

SEQ ID NO: 2089926 - RNA, 19 nt, Artificial Sequence
  Description of Artificial Sequence: Synthetic oligonucleotide
  Sense strand starting at position 2824 of SEQ ID NO: 1882033
accuaaugugagcauacau

SEQ ID NO: 2089927 - RNA, 19 nt, Artificial Sequence
  Description of Artificial Sequence: Synthetic oligonucleotide
  Antisense strand to SEQ ID NO: 2089926
auguaugcucacauuaggu

SEQ ID NO: 2089928 - RNA, 19 nt, Artificial Sequence
  Description of Artificial Sequence: Synthetic oligonucleotide
  Sense strand starting at position 2835 of SEQ ID NO: 1882033
gcauacauuuggccaagua

SEQ ID NO: 2089929 - RNA, 19 nt, Artificial Sequence
  Description of Artificial Sequence: Synthetic oligonucleotide
  Antisense strand to SEQ ID NO: 2089928
uacuuggccaaauguaugc

SEQ ID NO: 2089930 - RNA, 19 nt, Artificial Sequence
  Description of Artificial Sequence: Synthetic oligonucleotide
  Sense strand starting at position 2913 of SEQ ID NO: 1882033
ugcuuugguuuauuugaca

SEQ ID NO: 2089931 - RNA, 19 nt, Artificial Sequence
  Description of Artificial Sequence: Synthetic oligonucleotide
  Antisense strand to SEQ ID NO: 2089930
ugucaaauaaaccaaagca

SEQ ID NO: 2089932 - RNA, 19 nt, Artificial Sequence
  Description of Artificial Sequence: Synthetic oligonucleotide
  Sense strand starting at position 2984 of SEQ ID NO: 1882033
auuucucuucccugaguuc

SEQ ID NO: 2089933 - RNA, 19 nt, Artificial Sequence
  Description of Artificial Sequence: Synthetic oligonucleotide
  Antisense strand to SEQ ID NO: 2089932
gaacucagggaagagaaau

SEQ ID NO: 2089934 - RNA, 19 nt, Artificial Sequence
  Description of Artificial Sequence: Synthetic oligonucleotide
  Sense strand starting at position 3002 of SEQ ID NO: 1882033
caguaauugucaucugaag

SEQ ID NO: 2089935 - RNA, 19 nt, Artificial Sequence
  Description of Artificial Sequence: Synthetic oligonucleotide
  Antisense strand to SEQ ID NO: 2089934
cuucagaugacaauuacug

SEQ ID NO: 2089936 - RNA, 19 nt, Artificial Sequence
  Description of Artificial Sequence: Synthetic oligonucleotide
  Sense strand starting at position 3046 of SEQ ID NO: 1882033
uugauuguuugguuaaaga

SEQ ID NO: 2089937 - RNA, 19 nt, Artificial Sequence
  Description of Artificial Sequence: Synthetic oligonucleotide
  Antisense strand to SEQ ID NO: 2089936
ucuuuaaccaaacaaucaa

SEQ ID NO: 2089938 - RNA, 19 nt, Artificial Sequence
  Description of Artificial Sequence: Synthetic oligonucleotide
  Sense strand starting at position 3248 of SEQ ID NO: 1882033
cuguaaggacuuuggaaug

SEQ ID NO: 2089939 - RNA, 19 nt, Artificial Sequence
  Description of Artificial Sequence: Synthetic oligonucleotide
  Antisense strand to SEQ ID NO: 2089938
cauuccaaaguccuuacag

SEQ ID NO: 2089940 - RNA, 19 nt, Artificial Sequence
  Description of Artificial Sequence: Synthetic oligonucleotide
  Sense strand starting at position 3399 of SEQ ID NO: 1882033
cugagaucacuugagcuua

SEQ ID NO: 2089941 - RNA, 19 nt, Artificial Sequence
  Description of Artificial Sequence: Synthetic oligonucleotide
  Antisense strand to SEQ ID NO: 2089940
uaagcucaagugaucucag

SEQ ID NO: 2089942 - RNA, 19 nt, Artificial Sequence
  Description of Artificial Sequence: Synthetic oligonucleotide
  Sense strand starting at position 3438 of SEQ ID NO: 1882033
gcugaugagaauuagucau

SEQ ID NO: 2089943 - RNA, 19 nt, Artificial Sequence
  Description of Artificial Sequence: Synthetic oligonucleotide
  Antisense strand to SEQ ID NO: 2089942
augacuaauucucaucagc

SEQ ID NO: 2089944 - RNA, 19 nt, Artificial Sequence
  Description of Artificial Sequence: Synthetic oligonucleotide
  Sense strand starting at position 3444 of SEQ ID NO: 1882033
gagaauuagucauccauga

SEQ ID NO: 2089945 - RNA, 19 nt, Artificial Sequence
  Description of Artificial Sequence: Synthetic oligonucleotide
  Antisense strand to SEQ ID NO: 2089944
ucauggaugacuaauucuc

SEQ ID NO: 2089946 - RNA, 19 nt, Artificial Sequence
  Description of Artificial Sequence: Synthetic oligonucleotide
  Sense strand starting at position 3458 of SEQ ID NO: 1882033
caugaaugugauuaugggu

SEQ ID NO: 2089947 - RNA, 19 nt, Artificial Sequence
  Description of Artificial Sequence: Synthetic oligonucleotide
  Antisense strand to SEQ ID NO: 2089946
acccauaaucacauucaug

SEQ ID NO: 2089948 - RNA, 19 nt, Artificial Sequence
  Description of Artificial Sequence: Synthetic oligonucleotide
  Sense strand starting at position 3463 of SEQ ID NO: 1882033
augugauuaugggugauaa

SEQ ID NO: 2089949 - RNA, 19 nt, Artificial Sequence
  Description of Artificial Sequence: Synthetic oligonucleotide
  Antisense strand to SEQ ID NO: 2089948
uuaucacccauaaucacau

SEQ ID NO: 2089950 - RNA, 19 nt, Artificial Sequence
  Description of Artificial Sequence: Synthetic oligonucleotide
  Sense strand starting at position 3464 of SEQ ID NO: 1882033
ugugauuaugggugauaau

SEQ ID NO: 2089951 - RNA, 19 nt, Artificial Sequence
  Description of Artificial Sequence: Synthetic oligonucleotide
  Antisense strand to SEQ ID NO: 2089950
auuaucacccauaaucaca

SEQ ID NO: 2089952 - RNA, 19 nt, Artificial Sequence
  Description of Artificial Sequence: Synthetic oligonucleotide
  Sense strand starting at position 3936 of SEQ ID NO: 1882033
aguuuauuaagcgaguaaa

SEQ ID NO: 2089953 - RNA, 19 nt, Artificial Sequence
  Description of Artificial Sequence: Synthetic oligonucleotide
  Antisense strand to SEQ ID NO: 2089952
uuuacucgcuuaauaaacu

SEQ ID NO: 2089954 - RNA, 19 nt, Artificial Sequence
  Description of Artificial Sequence: Synthetic oligonucleotide
  Sense strand starting at position 395 of SEQ ID NO: 1882034
gcaguuggucuugagguga

SEQ ID NO: 2089955 - RNA, 19 nt, Artificial Sequence
  Description of Artificial Sequence: Synthetic oligonucleotide
  Antisense strand to SEQ ID NO: 2089954
ucaccucaagaccaacugc

SEQ ID NO: 2089956 - RNA, 19 nt, Artificial Sequence
  Description of Artificial Sequence: Synthetic oligonucleotide
  Sense strand starting at position 425 of SEQ ID NO: 1882034
caggacacauuguuugaaa

SEQ ID NO: 2089957 - RNA, 19 nt, Artificial Sequence
  Description of Artificial Sequence: Synthetic oligonucleotide
  Antisense strand to SEQ ID NO: 2089956
uuucaaacaauguguccug

SEQ ID NO: 2089958 - RNA, 19 nt, Artificial Sequence
  Description of Artificial Sequence: Synthetic oligonucleotide
  Sense strand starting at position 426 of SEQ ID NO: 1882034
aggacacauuguuugaaac

SEQ ID NO: 2089959 - RNA, 19 nt, Artificial Sequence
  Description of Artificial Sequence: Synthetic oligonucleotide
  Antisense strand to SEQ ID NO: 2089958
guuucaaacaauguguccu

SEQ ID NO: 2089960 - RNA, 19 nt, Artificial Sequence
  Description of Artificial Sequence: Synthetic oligonucleotide
  Sense strand starting at position 427 of SEQ ID NO: 1882034
ggacacauuguuugaaacu

SEQ ID NO: 2089961 - RNA, 19 nt, Artificial Sequence
  Description of Artificial Sequence: Synthetic oligonucleotide
  Antisense strand to SEQ ID NO: 2089960
aguuucaaacaaugugucc

SEQ ID NO: 2089962 - RNA, 19 nt, Artificial Sequence
  Description of Artificial Sequence: Synthetic oligonucleotide
  Sense strand starting at position 433 of SEQ ID NO: 1882034
auuguuugaaacuggugaa

SEQ ID NO: 2089963 - RNA, 19 nt, Artificial Sequence
  Description of Artificial Sequence: Synthetic oligonucleotide
  Antisense strand to SEQ ID NO: 2089962
uucaccaguuucaaacaau

SEQ ID NO: 2089964 - RNA, 19 nt, Artificial Sequence
  Description of Artificial Sequence: Synthetic oligonucleotide
  Sense strand starting at position 434 of SEQ ID NO: 1882034
uuguuugaaacuggugaag

SEQ ID NO: 2089965 - RNA, 19 nt, Artificial Sequence
  Description of Artificial Sequence: Synthetic oligonucleotide
  Antisense strand to SEQ ID NO: 2089964
cuucaccaguuucaaacaa

SEQ ID NO: 2089966 - RNA, 19 nt, Artificial Sequence
  Description of Artificial Sequence: Synthetic oligonucleotide
  Sense strand starting at position 478 of SEQ ID NO: 1882034
gaagacauguggccuuauu

SEQ ID NO: 2089967 - RNA, 19 nt, Artificial Sequence
  Description of Artificial Sequence: Synthetic oligonucleotide
  Antisense strand to SEQ ID NO: 2089966
aauaaggccacaugucuuc

SEQ ID NO: 2089968 - RNA, 19 nt, Artificial Sequence
  Description of Artificial Sequence: Synthetic oligonucleotide
  Sense strand starting at position 490 of SEQ ID NO: 1882034
ccuuauuucccaugcgaug

SEQ ID NO: 2089969 - RNA, 19 nt, Artificial Sequence
  Description of Artificial Sequence: Synthetic oligonucleotide
  Antisense strand to SEQ ID NO: 2089968
caucgcaugggaaauaagg

SEQ ID NO: 2089970 - RNA, 19 nt, Artificial Sequence
  Description of Artificial Sequence: Synthetic oligonucleotide
  Sense strand starting at position 985 of SEQ ID NO: 1882034
uccucuuuaccaggaagaa

SEQ ID NO: 2089971 - RNA, 19 nt, Artificial Sequence
  Description of Artificial Sequence: Synthetic oligonucleotide
  Antisense strand to SEQ ID NO: 2089970
uucuuccugguaaagagga

SEQ ID NO: 2089972 - RNA, 19 nt, Artificial Sequence
  Description of Artificial Sequence: Synthetic oligonucleotide
  Sense strand starting at position 997 of SEQ ID NO: 1882034
ggaagaaauguuuguagua

SEQ ID NO: 2089973 - RNA, 19 nt, Artificial Sequence
  Description of Artificial Sequence: Synthetic oligonucleotide
  Antisense strand to SEQ ID NO: 2089972
uacuacaaacauuucuucc

SEQ ID NO: 2089974 - RNA, 19 nt, Artificial Sequence
  Description of Artificial Sequence: Synthetic oligonucleotide
  Sense strand starting at position 998 of SEQ ID NO: 1882034
gaagaaauguuuguaguaa

SEQ ID NO: 2089975 - RNA, 19 nt, Artificial Sequence
  Description of Artificial Sequence: Synthetic oligonucleotide
  Antisense strand to SEQ ID NO: 2089974
uuacuacaaacauuucuuc

SEQ ID NO: 2089976 - RNA, 19 nt, Artificial Sequence
  Description of Artificial Sequence: Synthetic oligonucleotide
  Sense strand starting at position 1076 of SEQ ID NO: 1882034
cuggguuucccagaugcaa

SEQ ID NO: 2089977 - RNA, 19 nt, Artificial Sequence
  Description of Artificial Sequence: Synthetic oligonucleotide
  Antisense strand to SEQ ID NO: 2089976
uugcaucugggaaacccag

SEQ ID NO: 2089978 - RNA, 19 nt, Artificial Sequence
  Description of Artificial Sequence: Synthetic oligonucleotide
  Sense strand starting at position 1078 of SEQ ID NO: 1882034
ggguuucccagaugcaaag

SEQ ID NO: 2089979 - RNA, 19 nt, Artificial Sequence
  Description of Artificial Sequence: Synthetic oligonucleotide
  Antisense strand to SEQ ID NO: 2089978
cuuugcaucugggaaaccc

SEQ ID NO: 2089980 - RNA, 19 nt, Artificial Sequence
  Description of Artificial Sequence: Synthetic oligonucleotide
  Sense strand starting at position 1088 of SEQ ID NO: 1882034
gaugcaaaguuugcacauu

SEQ ID NO: 2089981 - RNA, 19 nt, Artificial Sequence
  Description of Artificial Sequence: Synthetic oligonucleotide
  Antisense strand to SEQ ID NO: 2089980
aaugugcaaacuuugcauc

SEQ ID NO: 2089982 - RNA, 19 nt, Artificial Sequence
  Description of Artificial Sequence: Synthetic oligonucleotide
  Sense strand starting at position 1130 of SEQ ID NO: 1882034
gugcauacaugaucgagaa

SEQ ID NO: 2089983 - RNA, 19 nt, Artificial Sequence
  Description of Artificial Sequence: Synthetic oligonucleotide
  Antisense strand to SEQ ID NO: 2089982
uucucgaucauguaugcac

SEQ ID NO: 2089984 - RNA, 19 nt, Artificial Sequence
  Description of Artificial Sequence: Synthetic oligonucleotide
  Sense strand starting at position 1131 of SEQ ID NO: 1882034
ugcauacaugaucgagaag

SEQ ID NO: 2089985 - RNA, 19 nt, Artificial Sequence
  Description of Artificial Sequence: Synthetic oligonucleotide
  Antisense strand to SEQ ID NO: 2089984
cuucucgaucauguaugca

SEQ ID NO: 2089986 - RNA, 19 nt, Artificial Sequence
  Description of Artificial Sequence: Synthetic oligonucleotide
  Sense strand starting at position 1132 of SEQ ID NO: 1882034
gcauacaugaucgagaagu

SEQ ID NO: 2089987 - RNA, 19 nt, Artificial Sequence
  Description of Artificial Sequence: Synthetic oligonucleotide
  Antisense strand to SEQ ID NO: 2089986
acuucucgaucauguaugc

SEQ ID NO: 2089988 - RNA, 19 nt, Artificial Sequence
  Description of Artificial Sequence: Synthetic oligonucleotide
  Sense strand starting at position 1134 of SEQ ID NO: 1882034
auacaugaucgagaagugu

SEQ ID NO: 2089989 - RNA, 19 nt, Artificial Sequence
  Description of Artificial Sequence: Synthetic oligonucleotide
  Antisense strand to SEQ ID NO: 2089988
acacuucucgaucauguau

SEQ ID NO: 2089990 - RNA, 19 nt, Artificial Sequence
  Description of Artificial Sequence: Synthetic oligonucleotide
  Sense strand starting at position 1185 of SEQ ID NO: 1882034
ugccaauguguacauggua

SEQ ID NO: 2089991 - RNA, 19 nt, Artificial Sequence
  Description of Artificial Sequence: Synthetic oligonucleotide
  Antisense strand to SEQ ID NO: 2089990
uaccauguacacauuggca

SEQ ID NO: 2089992 - RNA, 19 nt, Artificial Sequence
  Description of Artificial Sequence: Synthetic oligonucleotide
  Sense strand starting at position 1264 of SEQ ID NO: 1882034
guauguuauguguuguguu

SEQ ID NO: 2089993 - RNA, 19 nt, Artificial Sequence
  Description of Artificial Sequence: Synthetic oligonucleotide
  Antisense strand to SEQ ID NO: 2089992
aacacaacacauaacauac

SEQ ID NO: 2089994 - RNA, 19 nt, Artificial Sequence
  Description of Artificial Sequence: Synthetic oligonucleotide
  Sense strand starting at position 1355 of SEQ ID NO: 1882034
cuguguugugugcccauau

SEQ ID NO: 2089995 - RNA, 19 nt, Artificial Sequence
  Description of Artificial Sequence: Synthetic oligonucleotide
  Antisense strand to SEQ ID NO: 2089994
auaugggcacacaacacag

SEQ ID NO: 2089996 - RNA, 19 nt, Artificial Sequence
  Description of Artificial Sequence: Synthetic oligonucleotide
  Sense strand starting at position 1370 of SEQ ID NO: 1882034
auaucuaugugauugguca

SEQ ID NO: 2089997 - RNA, 19 nt, Artificial Sequence
  Description of Artificial Sequence: Synthetic oligonucleotide
  Antisense strand to SEQ ID NO: 2089996
ugaccaaucacauagauau

SEQ ID NO: 2089998 - RNA, 19 nt, Artificial Sequence
  Description of Artificial Sequence: Synthetic oligonucleotide
  Sense strand starting at position 1424 of SEQ ID NO: 1882034
ucgcuaugugugucgaguu

SEQ ID NO: 2089999 - RNA, 19 nt, Artificial Sequence
  Description of Artificial Sequence: Synthetic oligonucleotide
  Antisense strand to SEQ ID NO: 2089998
aacucgacacacauagcga

SEQ ID NO: 2090000 - RNA, 19 nt, Artificial Sequence
  Description of Artificial Sequence: Synthetic oligonucleotide
  Sense strand starting at position 1429 of SEQ ID NO: 1882034
augugugucgaguuuaugu

SEQ ID NO: 2090001 - RNA, 19 nt, Artificial Sequence
  Description of Artificial Sequence: Synthetic oligonucleotide
  Antisense strand to SEQ ID NO: 2090000
acauaaacucgacacacau

SEQ ID NO: 2090002 - RNA, 19 nt, Artificial Sequence
  Description of Artificial Sequence: Synthetic oligonucleotide
  Sense strand starting at position 1466 of SEQ ID NO: 1882034
uggagcuuugugggaauga

SEQ ID NO: 2090003 - RNA, 19 nt, Artificial Sequence
  Description of Artificial Sequence: Synthetic oligonucleotide
  Antisense strand to SEQ ID NO: 2090002
ucauucccacaaagcucca

SEQ ID NO: 2090004 - RNA, 19 nt, Artificial Sequence
  Description of Artificial Sequence: Synthetic oligonucleotide
  Sense strand starting at position 1617 of SEQ ID NO: 1882034
cagcauaugugauugauga

SEQ ID NO: 2090005 - RNA, 19 nt, Artificial Sequence
  Description of Artificial Sequence: Synthetic oligonucleotide
  Antisense strand to SEQ ID NO: 2090004
ucaucaaucacauaugcug

SEQ ID NO: 2090006 - RNA, 19 nt, Artificial Sequence
  Description of Artificial Sequence: Synthetic oligonucleotide
  Sense strand starting at position 1618 of SEQ ID NO: 1882034
agcauaugugauugaugaa

SEQ ID NO: 2090007 - RNA, 19 nt, Artificial Sequence
  Description of Artificial Sequence: Synthetic oligonucleotide
  Antisense strand to SEQ ID NO: 2090006
uucaucaaucacauaugcu

SEQ ID NO: 2090008 - RNA, 19 nt, Artificial Sequence
  Description of Artificial Sequence: Synthetic oligonucleotide
  Sense strand starting at position 1767 of SEQ ID NO: 1882034
gccacacuugagugggaua

SEQ ID NO: 2090009 - RNA, 19 nt, Artificial Sequence
  Description of Artificial Sequence: Synthetic oligonucleotide
  Antisense strand to SEQ ID NO: 2090008
uaucccacucaaguguggc

SEQ ID NO: 2090010 - RNA, 19 nt, Artificial Sequence
  Description of Artificial Sequence: Synthetic oligonucleotide
  Sense strand starting at position 1768 of SEQ ID NO: 1882034
ccacacuugagugggauau

SEQ ID NO: 2090011 - RNA, 19 nt, Artificial Sequence
  Description of Artificial Sequence: Synthetic oligonucleotide
  Antisense strand to SEQ ID NO: 2090010
auaucccacucaagugugg

SEQ ID NO: 2090012 - RNA, 19 nt, Artificial Sequence
  Description of Artificial Sequence: Synthetic oligonucleotide
  Sense strand starting at position 1897 of SEQ ID NO: 1882034
ggcagcuuugucuagacau

SEQ ID NO: 2090013 - RNA, 19 nt, Artificial Sequence
  Description of Artificial Sequence: Synthetic oligonucleotide
  Antisense strand to SEQ ID NO: 2090012
augucuagacaaagcugcc

SEQ ID NO: 2090014 - RNA, 19 nt, Artificial Sequence
  Description of Artificial Sequence: Synthetic oligonucleotide
  Sense strand starting at position 2316 of SEQ ID NO: 1882034
gucccaucuggccacaauu

SEQ ID NO: 2090015 - RNA, 19 nt, Artificial Sequence
  Description of Artificial Sequence: Synthetic oligonucleotide
  Antisense strand to SEQ ID NO: 2090014
aauuguggccagaugggac

SEQ ID NO: 2090016 - RNA, 19 nt, Artificial Sequence
  Description of Artificial Sequence: Synthetic oligonucleotide
  Sense strand starting at position 2385 of SEQ ID NO: 1882034
ggcagugacccaugacaga

SEQ ID NO: 2090017 - RNA, 19 nt, Artificial Sequence
  Description of Artificial Sequence: Synthetic oligonucleotide
  Antisense strand to SEQ ID NO: 2090016
ucugucaugggucacugcc

SEQ ID NO: 2090018 - RNA, 19 nt, Artificial Sequence
  Description of Artificial Sequence: Synthetic oligonucleotide
  Sense strand starting at position 2453 of SEQ ID NO: 1882034
gagaaucucugagccauga

SEQ ID NO: 2090019 - RNA, 19 nt, Artificial Sequence
  Description of Artificial Sequence: Synthetic oligonucleotide
  Antisense strand to SEQ ID NO: 2090018
ucauggcucagagauucuc

SEQ ID NO: 2090020 - RNA, 19 nt, Artificial Sequence
  Description of Artificial Sequence: Synthetic oligonucleotide
  Sense strand starting at position 2457 of SEQ ID NO: 1882034
aucucugagccaugacaca

SEQ ID NO: 2090021 - RNA, 19 nt, Artificial Sequence
  Description of Artificial Sequence: Synthetic oligonucleotide
  Antisense strand to SEQ ID NO: 2090020
ugugucauggcucagagau

SEQ ID NO: 2090022 - RNA, 19 nt, Artificial Sequence
  Description of Artificial Sequence: Synthetic oligonucleotide
  Sense strand starting at position 2550 of SEQ ID NO: 1882034
gaaagugaccuuugcccua

SEQ ID NO: 2090023 - RNA, 19 nt, Artificial Sequence
  Description of Artificial Sequence: Synthetic oligonucleotide
  Antisense strand to SEQ ID NO: 2090022
uagggcaaaggucacuuuc

SEQ ID NO: 2090024 - RNA, 19 nt, Artificial Sequence
  Description of Artificial Sequence: Synthetic oligonucleotide
  Sense strand starting at position 2757 of SEQ ID NO: 1882034
ggcaaaguugaauacgcau

SEQ ID NO: 2090025 - RNA, 19 nt, Artificial Sequence
  Description of Artificial Sequence: Synthetic oligonucleotide
  Antisense strand to SEQ ID NO: 2090024
augcguauucaacuuugcc

SEQ ID NO: 2090026 - RNA, 19 nt, Artificial Sequence
  Description of Artificial Sequence: Synthetic oligonucleotide
  Sense strand starting at position 2843 of SEQ ID NO: 1882034
ucagguucugccuaacaaa

SEQ ID NO: 2090027 - RNA, 19 nt, Artificial Sequence
  Description of Artificial Sequence: Synthetic oligonucleotide
  Antisense strand to SEQ ID NO: 2090026
uuuguuaggcagaaccuga

SEQ ID NO: 2090028 - RNA, 19 nt, Artificial Sequence
  Description of Artificial Sequence: Synthetic oligonucleotide
  Sense strand starting at position 2908 of SEQ ID NO: 1882034
caacguuguccuuggacaa

SEQ ID NO: 2090029 - RNA, 19 nt, Artificial Sequence
  Description of Artificial Sequence: Synthetic oligonucleotide
  Antisense strand to SEQ ID NO: 2090028
uuguccaaggacaacguug

SEQ ID NO: 2090030 - RNA, 19 nt, Artificial Sequence
  Description of Artificial Sequence: Synthetic oligonucleotide
  Sense strand starting at position 3181 of SEQ ID NO: 1882034
gucaaagaaauggguuaca

SEQ ID NO: 2090031 - RNA, 19 nt, Artificial Sequence
  Description of Artificial Sequence: Synthetic oligonucleotide
  Antisense strand to SEQ ID NO: 2090030
uguaacccauuucuuugac

SEQ ID NO: 2090032 - RNA, 19 nt, Artificial Sequence
  Description of Artificial Sequence: Synthetic oligonucleotide
  Sense strand starting at position 3404 of SEQ ID NO: 1882034
gggcuugauuagguaaacu

SEQ ID NO: 2090033 - RNA, 19 nt, Artificial Sequence
  Description of Artificial Sequence: Synthetic oligonucleotide
  Antisense strand to SEQ ID NO: 2090032
aguuuaccuaaucaagccc

SEQ ID NO: 2090034 - RNA, 19 nt, Artificial Sequence
  Description of Artificial Sequence: Synthetic oligonucleotide
  Sense strand starting at position 51 of SEQ ID NO: 1882035
cugugacuaguacauauau

SEQ ID NO: 2090035 - RNA, 19 nt, Artificial Sequence
  Description of Artificial Sequence: Synthetic oligonucleotide
  Antisense strand to SEQ ID NO: 2090034
auauauguacuagucacag

SEQ ID NO: 2090036 - RNA, 19 nt, Artificial Sequence
  Description of Artificial Sequence: Synthetic oligonucleotide
  Sense strand starting at position 358 of SEQ ID NO: 1882035
ugcucuucuccagaaugac

SEQ ID NO: 2090037 - RNA, 19 nt, Artificial Sequence
  Description of Artificial Sequence: Synthetic oligonucleotide
  Antisense strand to SEQ ID NO: 2090036
gucauucuggagaagagca

SEQ ID NO: 2090038 - RNA, 19 nt, Artificial Sequence
  Description of Artificial Sequence: Synthetic oligonucleotide
  Sense strand starting at position 629 of SEQ ID NO: 1882035
agaucucaucauugaagug

SEQ ID NO: 2090039 - RNA, 19 nt, Artificial Sequence
  Description of Artificial Sequence: Synthetic oligonucleotide
  Antisense strand to SEQ ID NO: 2090038
cacuucaaugaugagaucu

SEQ ID NO: 2090040 - RNA, 19 nt, Artificial Sequence
  Description of Artificial Sequence: Synthetic oligonucleotide
  Sense strand starting at position 816 of SEQ ID NO: 1882035
aagugugaugcccagaaug

SEQ ID NO: 2090041 - RNA, 19 nt, Artificial Sequence
  Description of Artificial Sequence: Synthetic oligonucleotide
  Antisense strand to SEQ ID NO: 2090040
cauucugggcaucacacuu

SEQ ID NO: 2090042 - RNA, 19 nt, Artificial Sequence
  Description of Artificial Sequence: Synthetic oligonucleotide
  Sense strand starting at position 818 of SEQ ID NO: 1882035
gugugaugcccagaaugga

SEQ ID NO: 2090043 - RNA, 19 nt, Artificial Sequence
  Description of Artificial Sequence: Synthetic oligonucleotide
  Antisense strand to SEQ ID NO: 2090042
uccauucugggcaucacac

SEQ ID NO: 2090044 - RNA, 19 nt, Artificial Sequence
  Description of Artificial Sequence: Synthetic oligonucleotide
  Sense strand starting at position 1197 of SEQ ID NO: 1882035
uuguucccugaguguauuu

SEQ ID NO: 2090045 - RNA, 19 nt, Artificial Sequence
  Description of Artificial Sequence: Synthetic oligonucleotide
  Antisense strand to SEQ ID NO: 2090044
aaauacacucagggaacaa

SEQ ID NO: 2090046 - RNA, 19 nt, Artificial Sequence
  Description of Artificial Sequence: Synthetic oligonucleotide
  Sense strand starting at position 1204 of SEQ ID NO: 1882035
cugaguguauuucugguua

SEQ ID NO: 2090047 - RNA, 19 nt, Artificial Sequence
  Description of Artificial Sequence: Synthetic oligonucleotide
  Antisense strand to SEQ ID NO: 2090046
uaaccagaaauacacucag

SEQ ID NO: 2090048 - RNA, 19 nt, Artificial Sequence
  Description of Artificial Sequence: Synthetic oligonucleotide
  Sense strand starting at position 1208 of SEQ ID NO: 1882035
guguauuucugguuaugac

SEQ ID NO: 2090049 - RNA, 19 nt, Artificial Sequence
  Description of Artificial Sequence: Synthetic oligonucleotide
  Antisense strand to SEQ ID NO: 2090048
gucauaaccagaaauacac

SEQ ID NO: 2090050 - RNA, 19 nt, Artificial Sequence
  Description of Artificial Sequence: Synthetic oligonucleotide
  Sense strand starting at position 1340 of SEQ ID NO: 1882035
gacugcaguguggagauau

SEQ ID NO: 2090051 - RNA, 19 nt, Artificial Sequence
  Description of Artificial Sequence: Synthetic oligonucleotide
  Antisense strand to SEQ ID NO: 2090050
auaucuccacacugcaguc

SEQ ID NO: 2090052 - RNA, 19 nt, Artificial Sequence
  Description of Artificial Sequence: Synthetic oligonucleotide
  Sense strand starting at position 1384 of SEQ ID NO: 1882035
uucugucugggaugaugga

SEQ ID NO: 2090053 - RNA, 19 nt, Artificial Sequence
  Description of Artificial Sequence: Synthetic oligonucleotide
  Antisense strand to SEQ ID NO: 2090052
uccaucaucccagacagaa

SEQ ID NO: 2090054 - RNA, 19 nt, Artificial Sequence
  Description of Artificial Sequence: Synthetic oligonucleotide
  Sense strand starting at position 1563 of SEQ ID NO: 1882035
augaguguuuacuuaauug

SEQ ID NO: 2090055 - RNA, 19 nt, Artificial Sequence
  Description of Artificial Sequence: Synthetic oligonucleotide
  Antisense strand to SEQ ID NO: 2090054
caauuaaguaaacacucau

SEQ ID NO: 2090056 - RNA, 19 nt, Artificial Sequence
  Description of Artificial Sequence: Synthetic oligonucleotide
  Sense strand starting at position 1567 of SEQ ID NO: 1882035
guguuuacuuaauugaaug

SEQ ID NO: 2090057 - RNA, 19 nt, Artificial Sequence
  Description of Artificial Sequence: Synthetic oligonucleotide
  Antisense strand to SEQ ID NO: 2090056
cauucaauuaaguaaacac

SEQ ID NO: 2090058 - RNA, 19 nt, Artificial Sequence
  Description of Artificial Sequence: Synthetic oligonucleotide
  Sense strand starting at position 1785 of SEQ ID NO: 1882035
augacaaauugcuuucuga

SEQ ID NO: 2090059 - RNA, 19 nt, Artificial Sequence
  Description of Artificial Sequence: Synthetic oligonucleotide
  Antisense strand to SEQ ID NO: 2090058
ucagaaagcaauuugucau

SEQ ID NO: 2090060 - RNA, 19 nt, Artificial Sequence
  Description of Artificial Sequence: Synthetic oligonucleotide
  Sense strand starting at position 1788 of SEQ ID NO: 1882035
acaaauugcuuucugagaa

SEQ ID NO: 2090061 - RNA, 19 nt, Artificial Sequence
  Description of Artificial Sequence: Synthetic oligonucleotide
  Antisense strand to SEQ ID NO: 2090060
uucucagaaagcaauuugu

SEQ ID NO: 2090062 - RNA, 19 nt, Artificial Sequence
  Description of Artificial Sequence: Synthetic oligonucleotide
  Sense strand starting at position 1832 of SEQ ID NO: 1882035
gccagagacuuguccauaa

SEQ ID NO: 2090063 - RNA, 19 nt, Artificial Sequence
  Description of Artificial Sequence: Synthetic oligonucleotide
  Antisense strand to SEQ ID NO: 2090062
uuauggacaagucucuggc

SEQ ID NO: 2090064 - RNA, 19 nt, Artificial Sequence
  Description of Artificial Sequence: Synthetic oligonucleotide
  Sense strand starting at position 1902 of SEQ ID NO: 1882035
uuauuagaguccucaugau

SEQ ID NO: 2090065 - RNA, 19 nt, Artificial Sequence
  Description of Artificial Sequence: Synthetic oligonucleotide
  Antisense strand to SEQ ID NO: 2090064
aucaugaggacucuaauaa

SEQ ID NO: 2090066 - RNA, 19 nt, Artificial Sequence
  Description of Artificial Sequence: Synthetic oligonucleotide
  Sense strand starting at position 1906 of SEQ ID NO: 1882035
uagaguccucaugauguua

SEQ ID NO: 2090067 - RNA, 19 nt, Artificial Sequence
  Description of Artificial Sequence: Synthetic oligonucleotide
  Antisense strand to SEQ ID NO: 2090066
uaacaucaugaggacucua

SEQ ID NO: 2090068 - RNA, 19 nt, Artificial Sequence
  Description of Artificial Sequence: Synthetic oligonucleotide
  Sense strand starting at position 1914 of SEQ ID NO: 1882035
ucaugauguuaccuuagau

SEQ ID NO: 2090069 - RNA, 19 nt, Artificial Sequence
  Description of Artificial Sequence: Synthetic oligonucleotide
  Antisense strand to SEQ ID NO: 2090068
aucuaagguaacaucauga

SEQ ID NO: 2090070 - RNA, 19 nt, Artificial Sequence
  Description of Artificial Sequence: Synthetic oligonucleotide
  Sense strand starting at position 1991 of SEQ ID NO: 1882035
gguguuagaugauuacagu

SEQ ID NO: 2090071 - RNA, 19 nt, Artificial Sequence
  Description of Artificial Sequence: Synthetic oligonucleotide
  Antisense strand to SEQ ID NO: 2090070
acuguaaucaucuaacacc

SEQ ID NO: 2090072 - RNA, 19 nt, Artificial Sequence
  Description of Artificial Sequence: Synthetic oligonucleotide
  Sense strand starting at position 1992 of SEQ ID NO: 1882035
guguuagaugauuacagua

SEQ ID NO: 2090073 - RNA, 19 nt, Artificial Sequence
  Description of Artificial Sequence: Synthetic oligonucleotide
  Antisense strand to SEQ ID NO: 2090072
uacuguaaucaucuaacac

SEQ ID NO: 2090074 - RNA, 19 nt, Artificial Sequence
  Description of Artificial Sequence: Synthetic oligonucleotide
  Sense strand starting at position 2004 of SEQ ID NO: 1882035
uacaguaucacggaaacgu

SEQ ID NO: 2090075 - RNA, 19 nt, Artificial Sequence
  Description of Artificial Sequence: Synthetic oligonucleotide
  Antisense strand to SEQ ID NO: 2090074
acguuuccgugauacugua

SEQ ID NO: 2090076 - RNA, 19 nt, Artificial Sequence
  Description of Artificial Sequence: Synthetic oligonucleotide
  Sense strand starting at position 2098 of SEQ ID NO: 1882035
gccagaccucugcaucaca

SEQ ID NO: 2090077 - RNA, 19 nt, Artificial Sequence
  Description of Artificial Sequence: Synthetic oligonucleotide
  Antisense strand to SEQ ID NO: 2090076
ugugaugcagaggucuggc

SEQ ID NO: 2090078 - RNA, 19 nt, Artificial Sequence
  Description of Artificial Sequence: Synthetic oligonucleotide
  Sense strand starting at position 2101 of SEQ ID NO: 1882035
agaccucugcaucacagau

SEQ ID NO: 2090079 - RNA, 19 nt, Artificial Sequence
  Description of Artificial Sequence: Synthetic oligonucleotide
  Antisense strand to SEQ ID NO: 2090078
aucugugaugcagaggucu

SEQ ID NO: 2090080 - RNA, 19 nt, Artificial Sequence
  Description of Artificial Sequence: Synthetic oligonucleotide
  Sense strand starting at position 2289 of SEQ ID NO: 1882035
agauaaagagcuugucuug

SEQ ID NO: 2090081 - RNA, 19 nt, Artificial Sequence
  Description of Artificial Sequence: Synthetic oligonucleotide
  Antisense strand to SEQ ID NO: 2090080
caagacaagcucuuuaucu

SEQ ID NO: 2090082 - RNA, 19 nt, Artificial Sequence
  Description of Artificial Sequence: Synthetic oligonucleotide
  Sense strand starting at position 2316 of SEQ ID NO: 1882035
uguuccuccagggaauguu

SEQ ID NO: 2090083 - RNA, 19 nt, Artificial Sequence
  Description of Artificial Sequence: Synthetic oligonucleotide
  Antisense strand to SEQ ID NO: 2090082
aacauucccuggaggaaca

SEQ ID NO: 2090084 - RNA, 19 nt, Artificial Sequence
  Description of Artificial Sequence: Synthetic oligonucleotide
  Sense strand starting at position 2370 of SEQ ID NO: 1882035
aagagcgaagccuauaaau

SEQ ID NO: 2090085 - RNA, 19 nt, Artificial Sequence
  Description of Artificial Sequence: Synthetic oligonucleotide
  Antisense strand to SEQ ID NO: 2090084
auuuauaggcuucgcucuu

SEQ ID NO: 2090086 - RNA, 19 nt, Artificial Sequence
  Description of Artificial Sequence: Synthetic oligonucleotide
  Sense strand starting at position 2372 of SEQ ID NO: 1882035
gagcgaagccuauaaauac

SEQ ID NO: 2090087 - RNA, 19 nt, Artificial Sequence
  Description of Artificial Sequence: Synthetic oligonucleotide
  Antisense strand to SEQ ID NO: 2090086
guauuuauaggcuucgcuc

SEQ ID NO: 2090088 - RNA, 19 nt, Artificial Sequence
  Description of Artificial Sequence: Synthetic oligonucleotide
  Sense strand starting at position 2499 of SEQ ID NO: 1882035
auguuucuuccugagguuu

SEQ ID NO: 2090089 - RNA, 19 nt, Artificial Sequence
  Description of Artificial Sequence: Synthetic oligonucleotide
  Antisense strand to SEQ ID NO: 2090088
aaaccucaggaagaaacau

SEQ ID NO: 2090090 - RNA, 19 nt, Artificial Sequence
  Description of Artificial Sequence: Synthetic oligonucleotide
  Sense strand starting at position 2652 of SEQ ID NO: 1882035
uucugauugucacuggaaa

SEQ ID NO: 2090091 - RNA, 19 nt, Artificial Sequence
  Description of Artificial Sequence: Synthetic oligonucleotide
  Antisense strand to SEQ ID NO: 2090090
uuuccagugacaaucagaa

SEQ ID NO: 2090092 - RNA, 19 nt, Artificial Sequence
  Description of Artificial Sequence: Synthetic oligonucleotide
  Sense strand starting at position 2653 of SEQ ID NO: 1882035
ucugauugucacuggaaag

SEQ ID NO: 2090093 - RNA, 19 nt, Artificial Sequence
  Description of Artificial Sequence: Synthetic oligonucleotide
  Antisense strand to SEQ ID NO: 2090092
cuuuccagugacaaucaga

SEQ ID NO: 2090094 - RNA, 19 nt, Artificial Sequence
  Description of Artificial Sequence: Synthetic oligonucleotide
  Sense strand starting at position 2654 of SEQ ID NO: 1882035
cugauugucacuggaaagc

SEQ ID NO: 2090095 - RNA, 19 nt, Artificial Sequence
  Description of Artificial Sequence: Synthetic oligonucleotide
  Antisense strand to SEQ ID NO: 2090094
gcuuuccagugacaaucag

SEQ ID NO: 2090096 - RNA, 19 nt, Artificial Sequence
  Description of Artificial Sequence: Synthetic oligonucleotide
  Sense strand starting at position 2788 of SEQ ID NO: 1882035
uccugaaagucugaaauuu

SEQ ID NO: 2090097 - RNA, 19 nt, Artificial Sequence
  Description of Artificial Sequence: Synthetic oligonucleotide
  Antisense strand to SEQ ID NO: 2090096
aaauuucagacuuucagga

SEQ ID NO: 2090098 - RNA, 19 nt, Artificial Sequence
  Description of Artificial Sequence: Synthetic oligonucleotide
  Sense strand starting at position 2846 of SEQ ID NO: 1882035
guuaaauugugguuaacaa

SEQ ID NO: 2090099 - RNA, 19 nt, Artificial Sequence
  Description of Artificial Sequence: Synthetic oligonucleotide
  Antisense strand to SEQ ID NO: 2090098
uuguuaaccacaauuuaac

SEQ ID NO: 2090100 - RNA, 19 nt, Artificial Sequence
  Description of Artificial Sequence: Synthetic oligonucleotide
  Sense strand starting at position 3089 of SEQ ID NO: 1882035
guguaagaaugauucuuag

SEQ ID NO: 2090101 - RNA, 19 nt, Artificial Sequence
  Description of Artificial Sequence: Synthetic oligonucleotide
  Antisense strand to SEQ ID NO: 2090100
cuaagaaucauucuuacac

SEQ ID NO: 2090102 - RNA, 19 nt, Artificial Sequence
  Description of Artificial Sequence: Synthetic oligonucleotide
  Sense strand starting at position 3210 of SEQ ID NO: 1882035
aguuguucugaugaacaua

SEQ ID NO: 2090103 - RNA, 19 nt, Artificial Sequence
  Description of Artificial Sequence: Synthetic oligonucleotide
  Antisense strand to SEQ ID NO: 2090102
uauguucaucagaacaacu

SEQ ID NO: 2090104 - RNA, 19 nt, Artificial Sequence
  Description of Artificial Sequence: Synthetic oligonucleotide
  Sense strand starting at position 3297 of SEQ ID NO: 1882035
cucugucuugguuaaagau

SEQ ID NO: 2090105 - RNA, 19 nt, Artificial Sequence
  Description of Artificial Sequence: Synthetic oligonucleotide
  Antisense strand to SEQ ID NO: 2090104
aucuuuaaccaagacagag

SEQ ID NO: 2090106 - RNA, 19 nt, Artificial Sequence
  Description of Artificial Sequence: Synthetic oligonucleotide
  Sense strand starting at position 3532 of SEQ ID NO: 1882035
cuaacauucucauugugga

SEQ ID NO: 2090107 - RNA, 19 nt, Artificial Sequence
  Description of Artificial Sequence: Synthetic oligonucleotide
  Antisense strand to SEQ ID NO: 2090106
uccacaaugagaauguuag

SEQ ID NO: 2090108 - RNA, 19 nt, Artificial Sequence
  Description of Artificial Sequence: Synthetic oligonucleotide
  Sense strand starting at position 3595 of SEQ ID NO: 1882035
ugauguacaguccaaguga

SEQ ID NO: 2090109 - RNA, 19 nt, Artificial Sequence
  Description of Artificial Sequence: Synthetic oligonucleotide
  Antisense strand to SEQ ID NO: 2090108
ucacuuggacuguacauca

SEQ ID NO: 2090110 - RNA, 19 nt, Artificial Sequence
  Description of Artificial Sequence: Synthetic oligonucleotide
  Sense strand starting at position 3719 of SEQ ID NO: 1882035
agagcaaugaagugaaacu

SEQ ID NO: 2090111 - RNA, 19 nt, Artificial Sequence
  Description of Artificial Sequence: Synthetic oligonucleotide
  Antisense strand to SEQ ID NO: 2090110
aguuucacuucauugcucu

SEQ ID NO: 2090112 - RNA, 19 nt, Artificial Sequence
  Description of Artificial Sequence: Synthetic oligonucleotide
  Sense strand starting at position 3921 of SEQ ID NO: 1882035
aaagcacuguccucaggau

SEQ ID NO: 2090113 - RNA, 19 nt, Artificial Sequence
  Description of Artificial Sequence: Synthetic oligonucleotide
  Antisense strand to SEQ ID NO: 2090112
auccugaggacagugcuuu

SEQ ID NO: 2090114 - RNA, 19 nt, Artificial Sequence
  Description of Artificial Sequence: Synthetic oligonucleotide
  Sense strand starting at position 132 of SEQ ID NO: 1882036
aggugaguuccaggaaguu

SEQ ID NO: 2090115 - RNA, 19 nt, Artificial Sequence
  Description of Artificial Sequence: Synthetic oligonucleotide
  Antisense strand to SEQ ID NO: 2090114
aacuuccuggaacucaccu

SEQ ID NO: 2090116 - RNA, 19 nt, Artificial Sequence
  Description of Artificial Sequence: Synthetic oligonucleotide
  Sense strand starting at position 144 of SEQ ID NO: 1882036
ggaaguuacccacacgauc

SEQ ID NO: 2090117 - RNA, 19 nt, Artificial Sequence
  Description of Artificial Sequence: Synthetic oligonucleotide
  Antisense strand to SEQ ID NO: 2090116
gaucguguggguaacuucc

SEQ ID NO: 2090118 - RNA, 19 nt, Artificial Sequence
  Description of Artificial Sequence: Synthetic oligonucleotide
  Sense strand starting at position 363 of SEQ ID NO: 1882036
ggguauugggauggcuaga

SEQ ID NO: 2090119 - RNA, 19 nt, Artificial Sequence
  Description of Artificial Sequence: Synthetic oligonucleotide
  Antisense strand to SEQ ID NO: 2090118
ucuagccaucccaauaccc

SEQ ID NO: 2090120 - RNA, 19 nt, Artificial Sequence
  Description of Artificial Sequence: Synthetic oligonucleotide
  Sense strand starting at position 468 of SEQ ID NO: 1882036
gacuuaaguccggauacua

SEQ ID NO: 2090121 - RNA, 19 nt, Artificial Sequence
  Description of Artificial Sequence: Synthetic oligonucleotide
  Antisense strand to SEQ ID NO: 2090120
uaguauccggacuuaaguc

SEQ ID NO: 2090122 - RNA, 19 nt, Artificial Sequence
  Description of Artificial Sequence: Synthetic oligonucleotide
  Sense strand starting at position 551 of SEQ ID NO: 1882036
gaacuagguuaugucaaua

SEQ ID NO: 2090123 - RNA, 19 nt, Artificial Sequence
  Description of Artificial Sequence: Synthetic oligonucleotide
  Antisense strand to SEQ ID NO: 2090122
uauugacauaaccuaguuc

SEQ ID NO: 2090124 - RNA, 19 nt, Artificial Sequence
  Description of Artificial Sequence: Synthetic oligonucleotide
  Sense strand starting at position 842 of SEQ ID NO: 1882036
ucucuugaacccggaagau

SEQ ID NO: 2090125 - RNA, 19 nt, Artificial Sequence
  Description of Artificial Sequence: Synthetic oligonucleotide
  Antisense strand to SEQ ID NO: 2090124
aucuuccggguucaagaga

SEQ ID NO: 2090126 - RNA, 19 nt, Artificial Sequence
  Description of Artificial Sequence: Synthetic oligonucleotide
  Sense strand starting at position 1015 of SEQ ID NO: 1882036
aacaaaggaccuugugagu

SEQ ID NO: 2090127 - RNA, 19 nt, Artificial Sequence
  Description of Artificial Sequence: Synthetic oligonucleotide
  Antisense strand to SEQ ID NO: 2090126
acucacaagguccuuuguu

SEQ ID NO: 2090128 - RNA, 19 nt, Artificial Sequence
  Description of Artificial Sequence: Synthetic oligonucleotide
  Sense strand starting at position 1021 of SEQ ID NO: 1882036
ggaccuugugaguauugga

SEQ ID NO: 2090129 - RNA, 19 nt, Artificial Sequence
  Description of Artificial Sequence: Synthetic oligonucleotide
  Antisense strand to SEQ ID NO: 2090128
uccaauacucacaaggucc

SEQ ID NO: 2090130 - RNA, 19 nt, Artificial Sequence
  Description of Artificial Sequence: Synthetic oligonucleotide
  Sense strand starting at position 1331 of SEQ ID NO: 1882036
cuaguacuugucuacaaug

SEQ ID NO: 2090131 - RNA, 19 nt, Artificial Sequence
  Description of Artificial Sequence: Synthetic oligonucleotide
  Antisense strand to SEQ ID NO: 2090130
cauuguagacaaguacuag

SEQ ID NO: 2090132 - RNA, 19 nt, Artificial Sequence
  Description of Artificial Sequence: Synthetic oligonucleotide
  Sense strand starting at position 1333 of SEQ ID NO: 1882036
aguacuugucuacaaugga

SEQ ID NO: 2090133 - RNA, 19 nt, Artificial Sequence
  Description of Artificial Sequence: Synthetic oligonucleotide
  Antisense strand to SEQ ID NO: 2090132
uccauuguagacaaguacu

SEQ ID NO: 2090134 - RNA, 19 nt, Artificial Sequence
  Description of Artificial Sequence: Synthetic oligonucleotide
  Sense strand starting at position 1336 of SEQ ID NO: 1882036
acuugucuacaauggaagu

SEQ ID NO: 2090135 - RNA, 19 nt, Artificial Sequence
  Description of Artificial Sequence: Synthetic oligonucleotide
  Antisense strand to SEQ ID NO: 2090134
acuuccauuguagacaagu

SEQ ID NO: 2090136 - RNA, 19 nt, Artificial Sequence
  Description of Artificial Sequence: Synthetic oligonucleotide
  Sense strand starting at position 1379 of SEQ ID NO: 1882036
guuguaaauuuggugucau

SEQ ID NO: 2090137 - RNA, 19 nt, Artificial Sequence
  Description of Artificial Sequence: Synthetic oligonucleotide
  Antisense strand to SEQ ID NO: 2090136
augacaccaaauuuacaac

SEQ ID NO: 2090138 - RNA, 19 nt, Artificial Sequence
  Description of Artificial Sequence: Synthetic oligonucleotide
  Sense strand starting at position 1463 of SEQ ID NO: 1882036
uuugcauuuggaugcaauu

SEQ ID NO: 2090139 - RNA, 19 nt, Artificial Sequence
  Description of Artificial Sequence: Synthetic oligonucleotide
  Antisense strand to SEQ ID NO: 2090138
aauugcauccaaaugcaaa

SEQ ID NO: 2090140 - RNA, 19 nt, Artificial Sequence
  Description of Artificial Sequence: Synthetic oligonucleotide
  Sense strand starting at position 1539 of SEQ ID NO: 1882036
ucaggucacugaguggaaa

SEQ ID NO: 2090141 - RNA, 19 nt, Artificial Sequence
  Description of Artificial Sequence: Synthetic oligonucleotide
  Antisense strand to SEQ ID NO: 2090140
uuuccacucagugaccuga

SEQ ID NO: 2090142 - RNA, 19 nt, Artificial Sequence
  Description of Artificial Sequence: Synthetic oligonucleotide
  Sense strand starting at position 1542 of SEQ ID NO: 1882036
ggucacugaguggaaaguu

SEQ ID NO: 2090143 - RNA, 19 nt, Artificial Sequence
  Description of Artificial Sequence: Synthetic oligonucleotide
  Antisense strand to SEQ ID NO: 2090142
aacuuuccacucagugacc

SEQ ID NO: 2090144 - RNA, 19 nt, Artificial Sequence
  Description of Artificial Sequence: Synthetic oligonucleotide
  Sense strand starting at position 1592 of SEQ ID NO: 1882036
aguuaugugaaguacacau

SEQ ID NO: 2090145 - RNA, 19 nt, Artificial Sequence
  Description of Artificial Sequence: Synthetic oligonucleotide
  Antisense strand to SEQ ID NO: 2090144
auguguacuucacauaacu

SEQ ID NO: 2090146 - RNA, 19 nt, Artificial Sequence
  Description of Artificial Sequence: Synthetic oligonucleotide
  Sense strand starting at position 1722 of SEQ ID NO: 1882036
aagagcugaucugcagaua

SEQ ID NO: 2090147 - RNA, 19 nt, Artificial Sequence
  Description of Artificial Sequence: Synthetic oligonucleotide
  Antisense strand to SEQ ID NO: 2090146
uaucugcagaucagcucuu

SEQ ID NO: 2090148 - RNA, 19 nt, Artificial Sequence
  Description of Artificial Sequence: Synthetic oligonucleotide
  Sense strand starting at position 1804 of SEQ ID NO: 1882036
auuagaaccguuuauagca

SEQ ID NO: 2090149 - RNA, 19 nt, Artificial Sequence
  Description of Artificial Sequence: Synthetic oligonucleotide
  Antisense strand to SEQ ID NO: 2090148
ugcuauaaacgguucuaau

SEQ ID NO: 2090150 - RNA, 19 nt, Artificial Sequence
  Description of Artificial Sequence: Synthetic oligonucleotide
  Sense strand starting at position 1970 of SEQ ID NO: 1882036
gagagaaucugcuccucag

SEQ ID NO: 2090151 - RNA, 19 nt, Artificial Sequence
  Description of Artificial Sequence: Synthetic oligonucleotide
  Antisense strand to SEQ ID NO: 2090150
cugaggagcagauucucuc

SEQ ID NO: 2090152 - RNA, 19 nt, Artificial Sequence
  Description of Artificial Sequence: Synthetic oligonucleotide
  Sense strand starting at position 2057 of SEQ ID NO: 1882036
guuaauaacccaggacuuu

SEQ ID NO: 2090153 - RNA, 19 nt, Artificial Sequence
  Description of Artificial Sequence: Synthetic oligonucleotide
  Antisense strand to SEQ ID NO: 2090152
aaaguccuggguuauuaac

SEQ ID NO: 2090154 - RNA, 19 nt, Artificial Sequence
  Description of Artificial Sequence: Synthetic oligonucleotide
  Sense strand starting at position 2195 of SEQ ID NO: 1882036
gggagaccugaguggugaa

SEQ ID NO: 2090155 - RNA, 19 nt, Artificial Sequence
  Description of Artificial Sequence: Synthetic oligonucleotide
  Antisense strand to SEQ ID NO: 2090154
uucaccacucaggucuccc

SEQ ID NO: 2090156 - RNA, 19 nt, Artificial Sequence
  Description of Artificial Sequence: Synthetic oligonucleotide
  Sense strand starting at position 2251 of SEQ ID NO: 1882036
cuuccaaggguuuauuauu

SEQ ID NO: 2090157 - RNA, 19 nt, Artificial Sequence
  Description of Artificial Sequence: Synthetic oligonucleotide
  Antisense strand to SEQ ID NO: 2090156
aauaauaaacccuuggaag

SEQ ID NO: 2090158 - RNA, 19 nt, Artificial Sequence
  Description of Artificial Sequence: Synthetic oligonucleotide
  Sense strand starting at position 2320 of SEQ ID NO: 1882036
uugaauugugcugauaucu

SEQ ID NO: 2090159 - RNA, 19 nt, Artificial Sequence
  Description of Artificial Sequence: Synthetic oligonucleotide
  Antisense strand to SEQ ID NO: 2090158
agauaucagcacaauucaa

SEQ ID NO: 2090160 - RNA, 19 nt, Artificial Sequence
  Description of Artificial Sequence: Synthetic oligonucleotide
  Sense strand starting at position 2330 of SEQ ID NO: 1882036
cugauaucugcccaagcaa

SEQ ID NO: 2090161 - RNA, 19 nt, Artificial Sequence
  Description of Artificial Sequence: Synthetic oligonucleotide
  Antisense strand to SEQ ID NO: 2090160
uugcuugggcagauaucag

SEQ ID NO: 2090162 - RNA, 19 nt, Artificial Sequence
  Description of Artificial Sequence: Synthetic oligonucleotide
  Sense strand starting at position 2587 of SEQ ID NO: 1882036
caacgaggugcucacuaau

SEQ ID NO: 2090163 - RNA, 19 nt, Artificial Sequence
  Description of Artificial Sequence: Synthetic oligonucleotide
  Antisense strand to SEQ ID NO: 2090162
auuagugagcaccucguug

SEQ ID NO: 2090164 - RNA, 19 nt, Artificial Sequence
  Description of Artificial Sequence: Synthetic oligonucleotide
  Sense strand starting at position 2638 of SEQ ID NO: 1882036
guauaacagcugugaaaua

SEQ ID NO: 2090165 - RNA, 19 nt, Artificial Sequence
  Description of Artificial Sequence: Synthetic oligonucleotide
  Antisense strand to SEQ ID NO: 2090164
uauuucacagcuguuauac

SEQ ID NO: 2090166 - RNA, 19 nt, Artificial Sequence
  Description of Artificial Sequence: Synthetic oligonucleotide
  Sense strand starting at position 2724 of SEQ ID NO: 1882036
gccucugcucggcuucuaa

SEQ ID NO: 2090167 - RNA, 19 nt, Artificial Sequence
  Description of Artificial Sequence: Synthetic oligonucleotide
  Antisense strand to SEQ ID NO: 2090166
uuagaagccgagcagaggc

SEQ ID NO: 2090168 - RNA, 19 nt, Artificial Sequence
  Description of Artificial Sequence: Synthetic oligonucleotide
  Sense strand starting at position 2751 of SEQ ID NO: 1882036
auuggaaagcagugugaaa

SEQ ID NO: 2090169 - RNA, 19 nt, Artificial Sequence
  Description of Artificial Sequence: Synthetic oligonucleotide
  Antisense strand to SEQ ID NO: 2090168
uuucacacugcuuuccaau

SEQ ID NO: 2090170 - RNA, 19 nt, Artificial Sequence
  Description of Artificial Sequence: Synthetic oligonucleotide
  Sense strand starting at position 2764 of SEQ ID NO: 1882036
gugaaagugaagugugaau

SEQ ID NO: 2090171 - RNA, 19 nt, Artificial Sequence
  Description of Artificial Sequence: Synthetic oligonucleotide
  Antisense strand to SEQ ID NO: 2090170
auucacacuucacuuucac

SEQ ID NO: 2090172 - RNA, 19 nt, Artificial Sequence
  Description of Artificial Sequence: Synthetic oligonucleotide
  Sense strand starting at position 2784 of SEQ ID NO: 1882036
cugaauauuugucauggag

SEQ ID NO: 2090173 - RNA, 19 nt, Artificial Sequence
  Description of Artificial Sequence: Synthetic oligonucleotide
  Antisense strand to SEQ ID NO: 2090172
cuccaugacaaauauucag

SEQ ID NO: 2090174 - RNA, 19 nt, Artificial Sequence
  Description of Artificial Sequence: Synthetic oligonucleotide
  Sense strand starting at position 2920 of SEQ ID NO: 1882036
uuugauucccaugauugua

SEQ ID NO: 2090175 - RNA, 19 nt, Artificial Sequence
  Description of Artificial Sequence: Synthetic oligonucleotide
  Antisense strand to SEQ ID NO: 2090174
uacaaucaugggaaucaaa

SEQ ID NO: 2090176 - RNA, 19 nt, Artificial Sequence
  Description of Artificial Sequence: Synthetic oligonucleotide
  Sense strand starting at position 2952 of SEQ ID NO: 1882036
guguuccuuccguugucaa

SEQ ID NO: 2090177 - RNA, 19 nt, Artificial Sequence
  Description of Artificial Sequence: Synthetic oligonucleotide
  Antisense strand to SEQ ID NO: 2090176
uugacaacggaaggaacac

SEQ ID NO: 2090178 - RNA, 19 nt, Artificial Sequence
  Description of Artificial Sequence: Synthetic oligonucleotide
  Sense strand starting at position 3156 of SEQ ID NO: 1882036
gcguguggucagccugaga

SEQ ID NO: 2090179 - RNA, 19 nt, Artificial Sequence
  Description of Artificial Sequence: Synthetic oligonucleotide
  Antisense strand to SEQ ID NO: 2090178
ucucaggcugaccacacgc

SEQ ID NO: 2090180 - RNA, 19 nt, Artificial Sequence
  Description of Artificial Sequence: Synthetic oligonucleotide
  Sense strand starting at position 3159 of SEQ ID NO: 1882036
uguggucagccugagaaga

SEQ ID NO: 2090181 - RNA, 19 nt, Artificial Sequence
  Description of Artificial Sequence: Synthetic oligonucleotide
  Antisense strand to SEQ ID NO: 2090180
ucuucucaggcugaccaca

SEQ ID NO: 2090182 - RNA, 19 nt, Artificial Sequence
  Description of Artificial Sequence: Synthetic oligonucleotide
  Sense strand starting at position 3222 of SEQ ID NO: 1882036
gccugaauccuggaacugu

SEQ ID NO: 2090183 - RNA, 19 nt, Artificial Sequence
  Description of Artificial Sequence: Synthetic oligonucleotide
  Antisense strand to SEQ ID NO: 2090182
acaguuccaggauucaggc

SEQ ID NO: 2090184 - RNA, 19 nt, Artificial Sequence
  Description of Artificial Sequence: Synthetic oligonucleotide
  Sense strand starting at position 3459 of SEQ ID NO: 1882036
ucucuuuccgugugauuuc

SEQ ID NO: 2090185 - RNA, 19 nt, Artificial Sequence
  Description of Artificial Sequence: Synthetic oligonucleotide
  Antisense strand to SEQ ID NO: 2090184
gaaaucacacggaaagaga

SEQ ID NO: 2090186 - RNA, 19 nt, Artificial Sequence
  Description of Artificial Sequence: Synthetic oligonucleotide
  Sense strand starting at position 3466 of SEQ ID NO: 1882036
ccgugugauuucucagcau

SEQ ID NO: 2090187 - RNA, 19 nt, Artificial Sequence
  Description of Artificial Sequence: Synthetic oligonucleotide
  Antisense strand to SEQ ID NO: 2090186
augcugagaaaucacacgg

SEQ ID NO: 2090188 - RNA, 19 nt, Artificial Sequence
  Description of Artificial Sequence: Synthetic oligonucleotide
  Sense strand starting at position 3469 of SEQ ID NO: 1882036
ugugauuucucagcauuac

SEQ ID NO: 2090189 - RNA, 19 nt, Artificial Sequence
  Description of Artificial Sequence: Synthetic oligonucleotide
  Antisense strand to SEQ ID NO: 2090188
guaaugcugagaaaucaca

SEQ ID NO: 2090190 - RNA, 19 nt, Artificial Sequence
  Description of Artificial Sequence: Synthetic oligonucleotide
  Sense strand starting at position 3782 of SEQ ID NO: 1882036
uggccugggagcuaagaau

SEQ ID NO: 2090191 - RNA, 19 nt, Artificial Sequence
  Description of Artificial Sequence: Synthetic oligonucleotide
  Antisense strand to SEQ ID NO: 2090190
auucuuagcucccaggcca

SEQ ID NO: 2090192 - RNA, 19 nt, Artificial Sequence
  Description of Artificial Sequence: Synthetic oligonucleotide
  Sense strand starting at position 3868 of SEQ ID NO: 1882036
ccuauccgaucuuuagaaa

SEQ ID NO: 2090193 - RNA, 19 nt, Artificial Sequence
  Description of Artificial Sequence: Synthetic oligonucleotide
  Antisense strand to SEQ ID NO: 2090192
uuucuaaagaucggauagg

SEQ ID NO: 2090194 - RNA, 19 nt, Artificial Sequence
  Description of Artificial Sequence: Synthetic oligonucleotide
  Sense strand starting at position 199 of SEQ ID NO: 1882037
cguugagagcaggaaaucu

SEQ ID NO: 2090195 - RNA, 19 nt, Artificial Sequence
  Description of Artificial Sequence: Synthetic oligonucleotide
  Antisense strand to SEQ ID NO: 2090194
agauuuccugcucucaacg

SEQ ID NO: 2090196 - RNA, 19 nt, Artificial Sequence
  Description of Artificial Sequence: Synthetic oligonucleotide
  Sense strand starting at position 361 of SEQ ID NO: 1882037
guacuugguguacaugaaa

SEQ ID NO: 2090197 - RNA, 19 nt, Artificial Sequence
  Description of Artificial Sequence: Synthetic oligonucleotide
  Antisense strand to SEQ ID NO: 2090196
uuucauguacaccaaguac

SEQ ID NO: 2090198 - RNA, 19 nt, Artificial Sequence
  Description of Artificial Sequence: Synthetic oligonucleotide
  Sense strand starting at position 426 of SEQ ID NO: 1882037
uuuguugaaaguugacaga

SEQ ID NO: 2090199 - RNA, 19 nt, Artificial Sequence
  Description of Artificial Sequence: Synthetic oligonucleotide
  Antisense strand to SEQ ID NO: 2090198
ucugucaacuuucaacaaa

SEQ ID NO: 2090200 - RNA, 19 nt, Artificial Sequence
  Description of Artificial Sequence: Synthetic oligonucleotide
  Sense strand starting at position 493 of SEQ ID NO: 1882037
aucuccacacagugagaau

SEQ ID NO: 2090201 - RNA, 19 nt, Artificial Sequence
  Description of Artificial Sequence: Synthetic oligonucleotide
  Antisense strand to SEQ ID NO: 2090200
auucucacuguguggagau

SEQ ID NO: 2090202 - RNA, 19 nt, Artificial Sequence
  Description of Artificial Sequence: Synthetic oligonucleotide
  Sense strand starting at position 627 of SEQ ID NO: 1882037
uaaauaugggacuggguuu

SEQ ID NO: 2090203 - RNA, 19 nt, Artificial Sequence
  Description of Artificial Sequence: Synthetic oligonucleotide
  Antisense strand to SEQ ID NO: 2090202
aaacccagucccauauuua

SEQ ID NO: 2090204 - RNA, 19 nt, Artificial Sequence
  Description of Artificial Sequence: Synthetic oligonucleotide
  Sense strand starting at position 649 of SEQ ID NO: 1882037
aggccauguguugaacauu

SEQ ID NO: 2090205 - RNA, 19 nt, Artificial Sequence
  Description of Artificial Sequence: Synthetic oligonucleotide
  Antisense strand to SEQ ID NO: 2090204
aauguucaacacauggccu

SEQ ID NO: 2090206 - RNA, 19 nt, Artificial Sequence
  Description of Artificial Sequence: Synthetic oligonucleotide
  Sense strand starting at position 659 of SEQ ID NO: 1882037
uugaacauuugggaauauu

SEQ ID NO: 2090207 - RNA, 19 nt, Artificial Sequence
  Description of Artificial Sequence: Synthetic oligonucleotide
  Antisense strand to SEQ ID NO: 2090206
aauauucccaaauguucaa

SEQ ID NO: 2090208 - RNA, 19 nt, Artificial Sequence
  Description of Artificial Sequence: Synthetic oligonucleotide
  Sense strand starting at position 748 of SEQ ID NO: 1882037
ugugguaccuuucuaaaga

SEQ ID NO: 2090209 - RNA, 19 nt, Artificial Sequence
  Description of Artificial Sequence: Synthetic oligonucleotide
  Antisense strand to SEQ ID NO: 2090208
ucuuuagaaagguaccaca

SEQ ID NO: 2090210 - RNA, 19 nt, Artificial Sequence
  Description of Artificial Sequence: Synthetic oligonucleotide
  Sense strand starting at position 809 of SEQ ID NO: 1882037
guugguauuacaugguaaa

SEQ ID NO: 2090211 - RNA, 19 nt, Artificial Sequence
  Description of Artificial Sequence: Synthetic oligonucleotide
  Antisense strand to SEQ ID NO: 2090210
uuuaccauguaauaccaac

SEQ ID NO: 2090212 - RNA, 19 nt, Artificial Sequence
  Description of Artificial Sequence: Synthetic oligonucleotide
  Sense strand starting at position 810 of SEQ ID NO: 1882037
uugguauuacaugguaaag

SEQ ID NO: 2090213 - RNA, 19 nt, Artificial Sequence
  Description of Artificial Sequence: Synthetic oligonucleotide
  Antisense strand to SEQ ID NO: 2090212
cuuuaccauguaauaccaa

SEQ ID NO: 2090214 - RNA, 19 nt, Artificial Sequence
  Description of Artificial Sequence: Synthetic oligonucleotide
  Sense strand starting at position 1433 of SEQ ID NO: 1882037
uugauacuauccucaguuu

SEQ ID NO: 2090215 - RNA, 19 nt, Artificial Sequence
  Description of Artificial Sequence: Synthetic oligonucleotide
  Antisense strand to SEQ ID NO: 2090214
aaacugaggauaguaucaa

SEQ ID NO: 2090216 - RNA, 19 nt, Artificial Sequence
  Description of Artificial Sequence: Synthetic oligonucleotide
  Sense strand starting at position 1510 of SEQ ID NO: 1882037
auuggauugucuuugacuu

SEQ ID NO: 2090217 - RNA, 19 nt, Artificial Sequence
  Description of Artificial Sequence: Synthetic oligonucleotide
  Antisense strand to SEQ ID NO: 2090216
aagucaaagacaauccaau

SEQ ID NO: 2090218 - RNA, 19 nt, Artificial Sequence
  Description of Artificial Sequence: Synthetic oligonucleotide
  Sense strand starting at position 2033 of SEQ ID NO: 1882037
uugacuuccugugucauuu

SEQ ID NO: 2090219 - RNA, 19 nt, Artificial Sequence
  Description of Artificial Sequence: Synthetic oligonucleotide
  Antisense strand to SEQ ID NO: 2090218
aaaugacacaggaagucaa

SEQ ID NO: 2090220 - RNA, 19 nt, Artificial Sequence
  Description of Artificial Sequence: Synthetic oligonucleotide
  Sense strand starting at position 2056 of SEQ ID NO: 1882037
gucuguucugcacaaugga

SEQ ID NO: 2090221 - RNA, 19 nt, Artificial Sequence
  Description of Artificial Sequence: Synthetic oligonucleotide
  Antisense strand to SEQ ID NO: 2090220
uccauugugcagaacagac

SEQ ID NO: 2090222 - RNA, 19 nt, Artificial Sequence
  Description of Artificial Sequence: Synthetic oligonucleotide
  Sense strand starting at position 2065 of SEQ ID NO: 1882037
gcacaauggaaaugagugu

SEQ ID NO: 2090223 - RNA, 19 nt, Artificial Sequence
  Description of Artificial Sequence: Synthetic oligonucleotide
  Antisense strand to SEQ ID NO: 2090222
acacucauuuccauugugc

SEQ ID NO: 2090224 - RNA, 19 nt, Artificial Sequence
  Description of Artificial Sequence: Synthetic oligonucleotide
  Sense strand starting at position 2097 of SEQ ID NO: 1882037
cugcuaaauaaacguggaa

SEQ ID NO: 2090225 - RNA, 19 nt, Artificial Sequence
  Description of Artificial Sequence: Synthetic oligonucleotide
  Antisense strand to SEQ ID NO: 2090224
uuccacguuuauuuagcag

SEQ ID NO: 2090226 - RNA, 19 nt, Artificial Sequence
  Description of Artificial Sequence: Synthetic oligonucleotide
  Sense strand starting at position 2099 of SEQ ID NO: 1882037
gcuaaauaaacguggaaca

SEQ ID NO: 2090227 - RNA, 19 nt, Artificial Sequence
  Description of Artificial Sequence: Synthetic oligonucleotide
  Antisense strand to SEQ ID NO: 2090226
uguuccacguuuauuuagc

SEQ ID NO: 2090228 - RNA, 19 nt, Artificial Sequence
  Description of Artificial Sequence: Synthetic oligonucleotide
  Sense strand starting at position 2443 of SEQ ID NO: 1882037
gauaaaugacacuguguau

SEQ ID NO: 2090229 - RNA, 19 nt, Artificial Sequence
  Description of Artificial Sequence: Synthetic oligonucleotide
  Antisense strand to SEQ ID NO: 2090228
auacacagugucauuuauc

SEQ ID NO: 2090230 - RNA, 19 nt, Artificial Sequence
  Description of Artificial Sequence: Synthetic oligonucleotide
  Sense strand starting at position 2450 of SEQ ID NO: 1882037
gacacuguguaucuaaagu

SEQ ID NO: 2090231 - RNA, 19 nt, Artificial Sequence
  Description of Artificial Sequence: Synthetic oligonucleotide
  Antisense strand to SEQ ID NO: 2090230
acuuuagauacacaguguc

SEQ ID NO: 2090232 - RNA, 19 nt, Artificial Sequence
  Description of Artificial Sequence: Synthetic oligonucleotide
  Sense strand starting at position 3020 of SEQ ID NO: 1882037
augcuuugauuugucuagu

SEQ ID NO: 2090233 - RNA, 19 nt, Artificial Sequence
  Description of Artificial Sequence: Synthetic oligonucleotide
  Antisense strand to SEQ ID NO: 2090232
acuagacaaaucaaagcau

SEQ ID NO: 2090234 - RNA, 19 nt, Artificial Sequence
  Description of Artificial Sequence: Synthetic oligonucleotide
  Sense strand starting at position 3021 of SEQ ID NO: 1882037
ugcuuugauuugucuaguu

SEQ ID NO: 2090235 - RNA, 19 nt, Artificial Sequence
  Description of Artificial Sequence: Synthetic oligonucleotide
  Antisense strand to SEQ ID NO: 2090234
aacuagacaaaucaaagca

SEQ ID NO: 2090236 - RNA, 19 nt, Artificial Sequence
  Description of Artificial Sequence: Synthetic oligonucleotide
  Sense strand starting at position 3026 of SEQ ID NO: 1882037
ugauuugucuaguugccuu

SEQ ID NO: 2090237 - RNA, 19 nt, Artificial Sequence
  Description of Artificial Sequence: Synthetic oligonucleotide
  Antisense strand to SEQ ID NO: 2090236
aaggcaacuagacaaauca

SEQ ID NO: 2090238 - RNA, 19 nt, Artificial Sequence
  Description of Artificial Sequence: Synthetic oligonucleotide
  Sense strand starting at position 3081 of SEQ ID NO: 1882037
ccugcagaguuaucacaca

SEQ ID NO: 2090239 - RNA, 19 nt, Artificial Sequence
  Description of Artificial Sequence: Synthetic oligonucleotide
  Antisense strand to SEQ ID NO: 2090238
ugugugauaacucugcagg

SEQ ID NO: 2090240 - RNA, 19 nt, Artificial Sequence
  Description of Artificial Sequence: Synthetic oligonucleotide
  Sense strand starting at position 3181 of SEQ ID NO: 1882037
gcauuucguucuccuuuga

SEQ ID NO: 2090241 - RNA, 19 nt, Artificial Sequence
  Description of Artificial Sequence: Synthetic oligonucleotide
  Antisense strand to SEQ ID NO: 2090240
ucaaaggagaacgaaaugc

SEQ ID NO: 2090242 - RNA, 19 nt, Artificial Sequence
  Description of Artificial Sequence: Synthetic oligonucleotide
  Sense strand starting at position 3217 of SEQ ID NO: 1882037
cacagaggcuuaucagagu

SEQ ID NO: 2090243 - RNA, 19 nt, Artificial Sequence
  Description of Artificial Sequence: Synthetic oligonucleotide
  Antisense strand to SEQ ID NO: 2090242
acucugauaagccucugug

SEQ ID NO: 2090244 - RNA, 19 nt, Artificial Sequence
  Description of Artificial Sequence: Synthetic oligonucleotide
  Sense strand starting at position 3223 of SEQ ID NO: 1882037
ggcuuaucagagugaaaca

SEQ ID NO: 2090245 - RNA, 19 nt, Artificial Sequence
  Description of Artificial Sequence: Synthetic oligonucleotide
  Antisense strand to SEQ ID NO: 2090244
uguuucacucugauaagcc

SEQ ID NO: 2090246 - RNA, 19 nt, Artificial Sequence
  Description of Artificial Sequence: Synthetic oligonucleotide
  Sense strand starting at position 3267 of SEQ ID NO: 1882037
gagcgagaucagcaguaac

SEQ ID NO: 2090247 - RNA, 19 nt, Artificial Sequence
  Description of Artificial Sequence: Synthetic oligonucleotide
  Antisense strand to SEQ ID NO: 2090246
guuacugcugaucucgcuc

SEQ ID NO: 2090248 - RNA, 19 nt, Artificial Sequence
  Description of Artificial Sequence: Synthetic oligonucleotide
  Sense strand starting at position 3278 of SEQ ID NO: 1882037
gcaguaacucgccuguuau

SEQ ID NO: 2090249 - RNA, 19 nt, Artificial Sequence
  Description of Artificial Sequence: Synthetic oligonucleotide
  Antisense strand to SEQ ID NO: 2090248
auaacaggcgaguuacugc

SEQ ID NO: 2090250 - RNA, 19 nt, Artificial Sequence
  Description of Artificial Sequence: Synthetic oligonucleotide
  Sense strand starting at position 3502 of SEQ ID NO: 1882037
aaagucagucaaugcuaga

SEQ ID NO: 2090251 - RNA, 19 nt, Artificial Sequence
  Description of Artificial Sequence: Synthetic oligonucleotide
  Antisense strand to SEQ ID NO: 2090250
ucuagcauugacugacuuu

SEQ ID NO: 2090252 - RNA, 19 nt, Artificial Sequence
  Description of Artificial Sequence: Synthetic oligonucleotide
  Sense strand starting at position 3576 of SEQ ID NO: 1882037
uccugcuugcuacagauau

SEQ ID NO: 2090253 - RNA, 19 nt, Artificial Sequence
  Description of Artificial Sequence: Synthetic oligonucleotide
  Antisense strand to SEQ ID NO: 2090252
auaucuguagcaagcagga

SEQ ID NO: 2090254 - RNA, 19 nt, Artificial Sequence
  Description of Artificial Sequence: Synthetic oligonucleotide
  Sense strand starting at position 3719 of SEQ ID NO: 1882037
cuugauauaugacuguaag

SEQ ID NO: 2090255 - RNA, 19 nt, Artificial Sequence
  Description of Artificial Sequence: Synthetic oligonucleotide
  Antisense strand to SEQ ID NO: 2090254
cuuacagucauauaucaag

SEQ ID NO: 2090256 - RNA, 19 nt, Artificial Sequence
  Description of Artificial Sequence: Synthetic oligonucleotide
  Sense strand starting at position 3720 of SEQ ID NO: 1882037
uugauauaugacuguaagu

SEQ ID NO: 2090257 - RNA, 19 nt, Artificial Sequence
  Description of Artificial Sequence: Synthetic oligonucleotide
  Antisense strand to SEQ ID NO: 2090256
acuuacagucauauaucaa

SEQ ID NO: 2090258 - RNA, 19 nt, Artificial Sequence
  Description of Artificial Sequence: Synthetic oligonucleotide
  Sense strand starting at position 3743 of SEQ ID NO: 1882037
ugugacaaaucuuuggacu

SEQ ID NO: 2090259 - RNA, 19 nt, Artificial Sequence
  Description of Artificial Sequence: Synthetic oligonucleotide
  Antisense strand to SEQ ID NO: 2090258
aguccaaagauuugucaca

SEQ ID NO: 2090260 - RNA, 19 nt, Artificial Sequence
  Description of Artificial Sequence: Synthetic oligonucleotide
  Sense strand starting at position 3744 of SEQ ID NO: 1882037
gugacaaaucuuuggacuu

SEQ ID NO: 2090261 - RNA, 19 nt, Artificial Sequence
  Description of Artificial Sequence: Synthetic oligonucleotide
  Antisense strand to SEQ ID NO: 2090260
aaguccaaagauuugucac

SEQ ID NO: 2090262 - RNA, 19 nt, Artificial Sequence
  Description of Artificial Sequence: Synthetic oligonucleotide
  Sense strand starting at position 3798 of SEQ ID NO: 1882037
auuccuauggguuggaaca

SEQ ID NO: 2090263 - RNA, 19 nt, Artificial Sequence
  Description of Artificial Sequence: Synthetic oligonucleotide
  Antisense strand to SEQ ID NO: 2090262
uguuccaacccauaggaau

SEQ ID NO: 2090264 - RNA, 19 nt, Artificial Sequence
  Description of Artificial Sequence: Synthetic oligonucleotide
  Sense strand starting at position 3799 of SEQ ID NO: 1882037
uuccuauggguuggaacau

SEQ ID NO: 2090265 - RNA, 19 nt, Artificial Sequence
  Description of Artificial Sequence: Synthetic oligonucleotide
  Antisense strand to SEQ ID NO: 2090264
auguuccaacccauaggaa

SEQ ID NO: 2090266 - RNA, 19 nt, Artificial Sequence
  Description of Artificial Sequence: Synthetic oligonucleotide
  Sense strand starting at position 3805 of SEQ ID NO: 1882037
uggguuggaacaugaucau

SEQ ID NO: 2090267 - RNA, 19 nt, Artificial Sequence
  Description of Artificial Sequence: Synthetic oligonucleotide
  Antisense strand to SEQ ID NO: 2090266
augaucauguuccaaccca

SEQ ID NO: 2090268 - RNA, 19 nt, Artificial Sequence
  Description of Artificial Sequence: Synthetic oligonucleotide
  Sense strand starting at position 3812 of SEQ ID NO: 1882037
gaacaugaucaugguacua

SEQ ID NO: 2090269 - RNA, 19 nt, Artificial Sequence
  Description of Artificial Sequence: Synthetic oligonucleotide
  Antisense strand to SEQ ID NO: 2090268
uaguaccaugaucauguuc

SEQ ID NO: 2090270 - RNA, 19 nt, Artificial Sequence
  Description of Artificial Sequence: Synthetic oligonucleotide
  Sense strand starting at position 3871 of SEQ ID NO: 1882037
aggagaagaacucgucuau

SEQ ID NO: 2090271 - RNA, 19 nt, Artificial Sequence
  Description of Artificial Sequence: Synthetic oligonucleotide
  Antisense strand to SEQ ID NO: 2090270
auagacgaguucuucuccu

SEQ ID NO: 2090272 - RNA, 19 nt, Artificial Sequence
  Description of Artificial Sequence: Synthetic oligonucleotide
  Sense strand starting at position 3875 of SEQ ID NO: 1882037
gaagaacucgucuauuacu

SEQ ID NO: 2090273 - RNA, 19 nt, Artificial Sequence
  Description of Artificial Sequence: Synthetic oligonucleotide
  Antisense strand to SEQ ID NO: 2090272
aguaauagacgaguucuuc

SEQ ID NO: 2090274 - RNA, 19 nt, Artificial Sequence
  Description of Artificial Sequence: Synthetic oligonucleotide
  Sense strand starting at position 79 of SEQ ID NO: 1882038
gaguaucccgucugacaau

SEQ ID NO: 2090275 - RNA, 19 nt, Artificial Sequence
  Description of Artificial Sequence: Synthetic oligonucleotide
  Antisense strand to SEQ ID NO: 2090274
auugucagacgggauacuc

SEQ ID NO: 2090276 - RNA, 19 nt, Artificial Sequence
  Description of Artificial Sequence: Synthetic oligonucleotide
  Sense strand starting at position 90 of SEQ ID NO: 1882038
cugacaauuuggcaacaca

SEQ ID NO: 2090277 - RNA, 19 nt, Artificial Sequence
  Description of Artificial Sequence: Synthetic oligonucleotide
  Antisense strand to SEQ ID NO: 2090276
uguguugccaaauugucag

SEQ ID NO: 2090278 - RNA, 19 nt, Artificial Sequence
  Description of Artificial Sequence: Synthetic oligonucleotide
  Sense strand starting at position 427 of SEQ ID NO: 1882038
cugccuaggccuugagaaa

SEQ ID NO: 2090279 - RNA, 19 nt, Artificial Sequence
  Description of Artificial Sequence: Synthetic oligonucleotide
  Antisense strand to SEQ ID NO: 2090278
uuucucaaggccuaggcag

SEQ ID NO: 2090280 - RNA, 19 nt, Artificial Sequence
  Description of Artificial Sequence: Synthetic oligonucleotide
  Sense strand starting at position 428 of SEQ ID NO: 1882038
ugccuaggccuugagaaau

SEQ ID NO: 2090281 - RNA, 19 nt, Artificial Sequence
  Description of Artificial Sequence: Synthetic oligonucleotide
  Antisense strand to SEQ ID NO: 2090280
auuucucaaggccuaggca

SEQ ID NO: 2090282 - RNA, 19 nt, Artificial Sequence
  Description of Artificial Sequence: Synthetic oligonucleotide
  Sense strand starting at position 630 of SEQ ID NO: 1882038
ggcuuuaacuuguaggaac

SEQ ID NO: 2090283 - RNA, 19 nt, Artificial Sequence
  Description of Artificial Sequence: Synthetic oligonucleotide
  Antisense strand to SEQ ID NO: 2090282
guuccuacaaguuaaagcc

SEQ ID NO: 2090284 - RNA, 19 nt, Artificial Sequence
  Description of Artificial Sequence: Synthetic oligonucleotide
  Sense strand starting at position 728 of SEQ ID NO: 1882038
ggccaagucuauuaucaga

SEQ ID NO: 2090285 - RNA, 19 nt, Artificial Sequence
  Description of Artificial Sequence: Synthetic oligonucleotide
  Antisense strand to SEQ ID NO: 2090284
ucugauaauagacuuggcc

SEQ ID NO: 2090286 - RNA, 19 nt, Artificial Sequence
  Description of Artificial Sequence: Synthetic oligonucleotide
  Sense strand starting at position 730 of SEQ ID NO: 1882038
ccaagucuauuaucagaga

SEQ ID NO: 2090287 - RNA, 19 nt, Artificial Sequence
  Description of Artificial Sequence: Synthetic oligonucleotide
  Antisense strand to SEQ ID NO: 2090286
ucucugauaauagacuugg

SEQ ID NO: 2090288 - RNA, 19 nt, Artificial Sequence
  Description of Artificial Sequence: Synthetic oligonucleotide
  Sense strand starting at position 938 of SEQ ID NO: 1882038
ggcccaagugaccguucua

SEQ ID NO: 2090289 - RNA, 19 nt, Artificial Sequence
  Description of Artificial Sequence: Synthetic oligonucleotide
  Antisense strand to SEQ ID NO: 2090288
uagaacggucacuugggcc

SEQ ID NO: 2090290 - RNA, 19 nt, Artificial Sequence
  Description of Artificial Sequence: Synthetic oligonucleotide
  Sense strand starting at position 990 of SEQ ID NO: 1882038
gucucucguggccaugaua

SEQ ID NO: 2090291 - RNA, 19 nt, Artificial Sequence
  Description of Artificial Sequence: Synthetic oligonucleotide
  Antisense strand to SEQ ID NO: 2090290
uaucauggccacgagagac

SEQ ID NO: 2090292 - RNA, 19 nt, Artificial Sequence
  Description of Artificial Sequence: Synthetic oligonucleotide
  Sense strand starting at position 993 of SEQ ID NO: 1882038
ucucguggccaugauaaca

SEQ ID NO: 2090293 - RNA, 19 nt, Artificial Sequence
  Description of Artificial Sequence: Synthetic oligonucleotide
  Antisense strand to SEQ ID NO: 2090292
uguuaucauggccacgaga

SEQ ID NO: 2090294 - RNA, 19 nt, Artificial Sequence
  Description of Artificial Sequence: Synthetic oligonucleotide
  Sense strand starting at position 1151 of SEQ ID NO: 1882038
cccucuuauuacucaggga

SEQ ID NO: 2090295 - RNA, 19 nt, Artificial Sequence
  Description of Artificial Sequence: Synthetic oligonucleotide
  Antisense strand to SEQ ID NO: 2090294
ucccugaguaauaagaggg

SEQ ID NO: 2090296 - RNA, 19 nt, Artificial Sequence
  Description of Artificial Sequence: Synthetic oligonucleotide
  Sense strand starting at position 1154 of SEQ ID NO: 1882038
ucuuauuacucagggauga

SEQ ID NO: 2090297 - RNA, 19 nt, Artificial Sequence
  Description of Artificial Sequence: Synthetic oligonucleotide
  Antisense strand to SEQ ID NO: 2090296
ucaucccugaguaauaaga

SEQ ID NO: 2090298 - RNA, 19 nt, Artificial Sequence
  Description of Artificial Sequence: Synthetic oligonucleotide
  Sense strand starting at position 1213 of SEQ ID NO: 1882038
gcugaaaugcucuguauca

SEQ ID NO: 2090299 - RNA, 19 nt, Artificial Sequence
  Description of Artificial Sequence: Synthetic oligonucleotide
  Antisense strand to SEQ ID NO: 2090298
ugauacagagcauuucagc

SEQ ID NO: 2090300 - RNA, 19 nt, Artificial Sequence
  Description of Artificial Sequence: Synthetic oligonucleotide
  Sense strand starting at position 1214 of SEQ ID NO: 1882038
cugaaaugcucuguaucac

SEQ ID NO: 2090301 - RNA, 19 nt, Artificial Sequence
  Description of Artificial Sequence: Synthetic oligonucleotide
  Antisense strand to SEQ ID NO: 2090300
gugauacagagcauuucag

SEQ ID NO: 2090302 - RNA, 19 nt, Artificial Sequence
  Description of Artificial Sequence: Synthetic oligonucleotide
  Sense strand starting at position 1377 of SEQ ID NO: 1882038
ccuggccuuucuucugaua

SEQ ID NO: 2090303 - RNA, 19 nt, Artificial Sequence
  Description of Artificial Sequence: Synthetic oligonucleotide
  Antisense strand to SEQ ID NO: 2090302
uaucagaagaaaggccagg

SEQ ID NO: 2090304 - RNA, 19 nt, Artificial Sequence
  Description of Artificial Sequence: Synthetic oligonucleotide
  Sense strand starting at position 1380 of SEQ ID NO: 1882038
ggccuuucuucugauacca

SEQ ID NO: 2090305 - RNA, 19 nt, Artificial Sequence
  Description of Artificial Sequence: Synthetic oligonucleotide
  Antisense strand to SEQ ID NO: 2090304
ugguaucagaagaaaggcc

SEQ ID NO: 2090306 - RNA, 19 nt, Artificial Sequence
  Description of Artificial Sequence: Synthetic oligonucleotide
  Sense strand starting at position 1602 of SEQ ID NO: 1882038
gggcaagguacuuagaucu

SEQ ID NO: 2090307 - RNA, 19 nt, Artificial Sequence
  Description of Artificial Sequence: Synthetic oligonucleotide
  Antisense strand to SEQ ID NO: 2090306
agaucuaaguaccuugccc

SEQ ID NO: 2090308 - RNA, 19 nt, Artificial Sequence
  Description of Artificial Sequence: Synthetic oligonucleotide
  Sense strand starting at position 1609 of SEQ ID NO: 1882038
guacuuagaucucugggaa

SEQ ID NO: 2090309 - RNA, 19 nt, Artificial Sequence
  Description of Artificial Sequence: Synthetic oligonucleotide
  Antisense strand to SEQ ID NO: 2090308
uucccagagaucuaaguac

SEQ ID NO: 2090310 - RNA, 19 nt, Artificial Sequence
  Description of Artificial Sequence: Synthetic oligonucleotide
  Sense strand starting at position 1635 of SEQ ID NO: 1882038
uucccuuaccuguagaaug

SEQ ID NO: 2090311 - RNA, 19 nt, Artificial Sequence
  Description of Artificial Sequence: Synthetic oligonucleotide
  Antisense strand to SEQ ID NO: 2090310
cauucuacagguaagggaa

SEQ ID NO: 2090312 - RNA, 19 nt, Artificial Sequence
  Description of Artificial Sequence: Synthetic oligonucleotide
  Sense strand starting at position 1646 of SEQ ID NO: 1882038
guagaaugggccgaagcau

SEQ ID NO: 2090313 - RNA, 19 nt, Artificial Sequence
  Description of Artificial Sequence: Synthetic oligonucleotide
  Antisense strand to SEQ ID NO: 2090312
augcuucggcccauucuac

SEQ ID NO: 2090314 - RNA, 19 nt, Artificial Sequence
  Description of Artificial Sequence: Synthetic oligonucleotide
  Sense strand starting at position 1657 of SEQ ID NO: 1882038
cgaagcauuacaugaggaa

SEQ ID NO: 2090315 - RNA, 19 nt, Artificial Sequence
  Description of Artificial Sequence: Synthetic oligonucleotide
  Antisense strand to SEQ ID NO: 2090314
uuccucauguaaugcuucg

SEQ ID NO: 2090316 - RNA, 19 nt, Artificial Sequence
  Description of Artificial Sequence: Synthetic oligonucleotide
  Sense strand starting at position 1660 of SEQ ID NO: 1882038
agcauuacaugaggaaaug

SEQ ID NO: 2090317 - RNA, 19 nt, Artificial Sequence
  Description of Artificial Sequence: Synthetic oligonucleotide
  Antisense strand to SEQ ID NO: 2090316
cauuuccucauguaaugcu

SEQ ID NO: 2090318 - RNA, 19 nt, Artificial Sequence
  Description of Artificial Sequence: Synthetic oligonucleotide
  Sense strand starting at position 1672 of SEQ ID NO: 1882038
ggaaauggauguuaugaca

SEQ ID NO: 2090319 - RNA, 19 nt, Artificial Sequence
  Description of Artificial Sequence: Synthetic oligonucleotide
  Antisense strand to SEQ ID NO: 2090318
ugucauaacauccauuucc

SEQ ID NO: 2090320 - RNA, 19 nt, Artificial Sequence
  Description of Artificial Sequence: Synthetic oligonucleotide
  Sense strand starting at position 1675 of SEQ ID NO: 1882038
aauggauguuaugacauuu

SEQ ID NO: 2090321 - RNA, 19 nt, Artificial Sequence
  Description of Artificial Sequence: Synthetic oligonucleotide
  Antisense strand to SEQ ID NO: 2090320
aaaugucauaacauccauu

SEQ ID NO: 2090322 - RNA, 19 nt, Artificial Sequence
  Description of Artificial Sequence: Synthetic oligonucleotide
  Sense strand starting at position 1698 of SEQ ID NO: 1882038
caguacuuggcauacagaa

SEQ ID NO: 2090323 - RNA, 19 nt, Artificial Sequence
  Description of Artificial Sequence: Synthetic oligonucleotide
  Antisense strand to SEQ ID NO: 2090322
uucuguaugccaaguacug

SEQ ID NO: 2090324 - RNA, 19 nt, Artificial Sequence
  Description of Artificial Sequence: Synthetic oligonucleotide
  Sense strand starting at position 2345 of SEQ ID NO: 1882038
guccuagcguccuugaaac

SEQ ID NO: 2090325 - RNA, 19 nt, Artificial Sequence
  Description of Artificial Sequence: Synthetic oligonucleotide
  Antisense strand to SEQ ID NO: 2090324
guuucaaggacgcuaggac

SEQ ID NO: 2090326 - RNA, 19 nt, Artificial Sequence
  Description of Artificial Sequence: Synthetic oligonucleotide
  Sense strand starting at position 2379 of SEQ ID NO: 1882038
gggccacugccucgguuau

SEQ ID NO: 2090327 - RNA, 19 nt, Artificial Sequence
  Description of Artificial Sequence: Synthetic oligonucleotide
  Antisense strand to SEQ ID NO: 2090326
auaaccgaggcaguggccc

SEQ ID NO: 2090328 - RNA, 19 nt, Artificial Sequence
  Description of Artificial Sequence: Synthetic oligonucleotide
  Sense strand starting at position 2435 of SEQ ID NO: 1882038
gcuggguucggcgcgaaua

SEQ ID NO: 2090329 - RNA, 19 nt, Artificial Sequence
  Description of Artificial Sequence: Synthetic oligonucleotide
  Antisense strand to SEQ ID NO: 2090328
uauucgcgccgaacccagc

SEQ ID NO: 2090330 - RNA, 19 nt, Artificial Sequence
  Description of Artificial Sequence: Synthetic oligonucleotide
  Sense strand starting at position 2436 of SEQ ID NO: 1882038
cuggguucggcgcgaauau

SEQ ID NO: 2090331 - RNA, 19 nt, Artificial Sequence
  Description of Artificial Sequence: Synthetic oligonucleotide
  Antisense strand to SEQ ID NO: 2090330
auauucgcgccgaacccag

SEQ ID NO: 2090332 - RNA, 19 nt, Artificial Sequence
  Description of Artificial Sequence: Synthetic oligonucleotide
  Sense strand starting at position 2627 of SEQ ID NO: 1882038
accggagcauacucacaua

SEQ ID NO: 2090333 - RNA, 19 nt, Artificial Sequence
  Description of Artificial Sequence: Synthetic oligonucleotide
  Antisense strand to SEQ ID NO: 2090332
uaugugaguaugcuccggu

SEQ ID NO: 2090334 - RNA, 19 nt, Artificial Sequence
  Description of Artificial Sequence: Synthetic oligonucleotide
  Sense strand starting at position 3161 of SEQ ID NO: 1882038
gccguaagacucgcguagu

SEQ ID NO: 2090335 - RNA, 19 nt, Artificial Sequence
  Description of Artificial Sequence: Synthetic oligonucleotide
  Antisense strand to SEQ ID NO: 2090334
acuacgcgagucuuacggc

SEQ ID NO: 2090336 - RNA, 19 nt, Artificial Sequence
  Description of Artificial Sequence: Synthetic oligonucleotide
  Sense strand starting at position 3173 of SEQ ID NO: 1882038
gcguagucuguugggaguu

SEQ ID NO: 2090337 - RNA, 19 nt, Artificial Sequence
  Description of Artificial Sequence: Synthetic oligonucleotide
  Antisense strand to SEQ ID NO: 2090336
aacucccaacagacuacgc

SEQ ID NO: 2090338 - RNA, 19 nt, Artificial Sequence
  Description of Artificial Sequence: Synthetic oligonucleotide
  Sense strand starting at position 3552 of SEQ ID NO: 1882038
gucauuacagcuuguaagu

SEQ ID NO: 2090339 - RNA, 19 nt, Artificial Sequence
  Description of Artificial Sequence: Synthetic oligonucleotide
  Antisense strand to SEQ ID NO: 2090338
acuuacaagcuguaaugac

SEQ ID NO: 2090340 - RNA, 19 nt, Artificial Sequence
  Description of Artificial Sequence: Synthetic oligonucleotide
  Sense strand starting at position 3559 of SEQ ID NO: 1882038
cagcuuguaaguugugaag

SEQ ID NO: 2090341 - RNA, 19 nt, Artificial Sequence
  Description of Artificial Sequence: Synthetic oligonucleotide
  Antisense strand to SEQ ID NO: 2090340
cuucacaacuuacaagcug

SEQ ID NO: 2090342 - RNA, 19 nt, Artificial Sequence
  Description of Artificial Sequence: Synthetic oligonucleotide
  Sense strand starting at position 3574 of SEQ ID NO: 1882038
gaagguaacggugauguaa

SEQ ID NO: 2090343 - RNA, 19 nt, Artificial Sequence
  Description of Artificial Sequence: Synthetic oligonucleotide
  Antisense strand to SEQ ID NO: 2090342
uuacaucaccguuaccuuc

SEQ ID NO: 2090344 - RNA, 19 nt, Artificial Sequence
  Description of Artificial Sequence: Synthetic oligonucleotide
  Sense strand starting at position 3652 of SEQ ID NO: 1882038
ggugaauuguagcagagac

SEQ ID NO: 2090345 - RNA, 19 nt, Artificial Sequence
  Description of Artificial Sequence: Synthetic oligonucleotide
  Antisense strand to SEQ ID NO: 2090344
gucucugcuacaauucacc

SEQ ID NO: 2090346 - RNA, 19 nt, Artificial Sequence
  Description of Artificial Sequence: Synthetic oligonucleotide
  Sense strand starting at position 3878 of SEQ ID NO: 1882038
cucaguugguucuaugaua

SEQ ID NO: 2090347 - RNA, 19 nt, Artificial Sequence
  Description of Artificial Sequence: Synthetic oligonucleotide
  Antisense strand to SEQ ID NO: 2090346
uaucauagaaccaacugag

SEQ ID NO: 2090348 - RNA, 19 nt, Artificial Sequence
  Description of Artificial Sequence: Synthetic oligonucleotide
  Sense strand starting at position 3883 of SEQ ID NO: 1882038
uugguucuaugauagaauu

SEQ ID NO: 2090349 - RNA, 19 nt, Artificial Sequence
  Description of Artificial Sequence: Synthetic oligonucleotide
  Antisense strand to SEQ ID NO: 2090348
aauucuaucauagaaccaa

SEQ ID NO: 2090350 - RNA, 19 nt, Artificial Sequence
  Description of Artificial Sequence: Synthetic oligonucleotide
  Sense strand starting at position 3891 of SEQ ID NO: 1882038
augauagaauuaugcccaa

SEQ ID NO: 2090351 - RNA, 19 nt, Artificial Sequence
  Description of Artificial Sequence: Synthetic oligonucleotide
  Antisense strand to SEQ ID NO: 2090350
uugggcauaauucuaucau

SEQ ID NO: 2090352 - RNA, 19 nt, Artificial Sequence
  Description of Artificial Sequence: Synthetic oligonucleotide
  Sense strand starting at position 3913 of SEQ ID NO: 1882038
gcuguaguaucccagagga

SEQ ID NO: 2090353 - RNA, 19 nt, Artificial Sequence
  Description of Artificial Sequence: Synthetic oligonucleotide
  Antisense strand to SEQ ID NO: 2090352
uccucugggauacuacagc

SEQ ID NO: 2090354 - RNA, 19 nt, Artificial Sequence
  Description of Artificial Sequence: Synthetic oligonucleotide
  Sense strand starting at position 69 of SEQ ID NO: 1882039
uuagguaagcucugaugca

SEQ ID NO: 2090355 - RNA, 19 nt, Artificial Sequence
  Description of Artificial Sequence: Synthetic oligonucleotide
  Antisense strand to SEQ ID NO: 2090354
ugcaucagagcuuaccuaa

SEQ ID NO: 2090356 - RNA, 19 nt, Artificial Sequence
  Description of Artificial Sequence: Synthetic oligonucleotide
  Sense strand starting at position 111 of SEQ ID NO: 1882039
gaaagaucaugcuaaugag

SEQ ID NO: 2090357 - RNA, 19 nt, Artificial Sequence
  Description of Artificial Sequence: Synthetic oligonucleotide
  Antisense strand to SEQ ID NO: 2090356
cucauuagcaugaucuuuc

SEQ ID NO: 2090358 - RNA, 19 nt, Artificial Sequence
  Description of Artificial Sequence: Synthetic oligonucleotide
  Sense strand starting at position 118 of SEQ ID NO: 1882039
caugcuaaugaggaguuau

SEQ ID NO: 2090359 - RNA, 19 nt, Artificial Sequence
  Description of Artificial Sequence: Synthetic oligonucleotide
  Antisense strand to SEQ ID NO: 2090358
auaacuccucauuagcaug

SEQ ID NO: 2090360 - RNA, 19 nt, Artificial Sequence
  Description of Artificial Sequence: Synthetic oligonucleotide
  Sense strand starting at position 303 of SEQ ID NO: 1882039
guaaauuaggcccauuagu

SEQ ID NO: 2090361 - RNA, 19 nt, Artificial Sequence
  Description of Artificial Sequence: Synthetic oligonucleotide
  Antisense strand to SEQ ID NO: 2090360
acuaaugggccuaauuuac

SEQ ID NO: 2090362 - RNA, 19 nt, Artificial Sequence
  Description of Artificial Sequence: Synthetic oligonucleotide
  Sense strand starting at position 449 of SEQ ID NO: 1882039
aaaggcaaggucugaucaa

SEQ ID NO: 2090363 - RNA, 19 nt, Artificial Sequence
  Description of Artificial Sequence: Synthetic oligonucleotide
  Antisense strand to SEQ ID NO: 2090362
uugaucagaccuugccuuu

SEQ ID NO: 2090364 - RNA, 19 nt, Artificial Sequence
  Description of Artificial Sequence: Synthetic oligonucleotide
  Sense strand starting at position 473 of SEQ ID NO: 1882039
gucaucuuacugcauauca

SEQ ID NO: 2090365 - RNA, 19 nt, Artificial Sequence
  Description of Artificial Sequence: Synthetic oligonucleotide
  Antisense strand to SEQ ID NO: 2090364
ugauaugcaguaagaugac

SEQ ID NO: 2090366 - RNA, 19 nt, Artificial Sequence
  Description of Artificial Sequence: Synthetic oligonucleotide
  Sense strand starting at position 501 of SEQ ID NO: 1882039
uaaugugaucaugauugua

SEQ ID NO: 2090367 - RNA, 19 nt, Artificial Sequence
  Description of Artificial Sequence: Synthetic oligonucleotide
  Antisense strand to SEQ ID NO: 2090366
uacaaucaugaucacauua

SEQ ID NO: 2090368 - RNA, 19 nt, Artificial Sequence
  Description of Artificial Sequence: Synthetic oligonucleotide
  Sense strand starting at position 503 of SEQ ID NO: 1882039
augugaucaugauuguauu

SEQ ID NO: 2090369 - RNA, 19 nt, Artificial Sequence
  Description of Artificial Sequence: Synthetic oligonucleotide
  Antisense strand to SEQ ID NO: 2090368
aauacaaucaugaucacau

SEQ ID NO: 2090370 - RNA, 19 nt, Artificial Sequence
  Description of Artificial Sequence: Synthetic oligonucleotide
  Sense strand starting at position 506 of SEQ ID NO: 1882039
ugaucaugauuguauuugu

SEQ ID NO: 2090371 - RNA, 19 nt, Artificial Sequence
  Description of Artificial Sequence: Synthetic oligonucleotide
  Antisense strand to SEQ ID NO: 2090370
acaaauacaaucaugauca

SEQ ID NO: 2090372 - RNA, 19 nt, Artificial Sequence
  Description of Artificial Sequence: Synthetic oligonucleotide
  Sense strand starting at position 550 of SEQ ID NO: 1882039
guaguaacagauuaucacu

SEQ ID NO: 2090373 - RNA, 19 nt, Artificial Sequence
  Description of Artificial Sequence: Synthetic oligonucleotide
  Antisense strand to SEQ ID NO: 2090372
agugauaaucuguuacuac

SEQ ID NO: 2090374 - RNA, 19 nt, Artificial Sequence
  Description of Artificial Sequence: Synthetic oligonucleotide
  Sense strand starting at position 553 of SEQ ID NO: 1882039
guaacagauuaucacugau

SEQ ID NO: 2090375 - RNA, 19 nt, Artificial Sequence
  Description of Artificial Sequence: Synthetic oligonucleotide
  Antisense strand to SEQ ID NO: 2090374
aucagugauaaucuguuac

SEQ ID NO: 2090376 - RNA, 19 nt, Artificial Sequence
  Description of Artificial Sequence: Synthetic oligonucleotide
  Sense strand starting at position 571 of SEQ ID NO: 1882039
ugcgguaugugcaagggaa

SEQ ID NO: 2090377 - RNA, 19 nt, Artificial Sequence
  Description of Artificial Sequence: Synthetic oligonucleotide
  Antisense strand to SEQ ID NO: 2090376
uucccuugcacauaccgca

SEQ ID NO: 2090378 - RNA, 19 nt, Artificial Sequence
  Description of Artificial Sequence: Synthetic oligonucleotide
  Sense strand starting at position 590 of SEQ ID NO: 1882039
aauguccucgguuguuaaa

SEQ ID NO: 2090379 - RNA, 19 nt, Artificial Sequence
  Description of Artificial Sequence: Synthetic oligonucleotide
  Antisense strand to SEQ ID NO: 2090378
uuuaacaaccgaggacauu

SEQ ID NO: 2090380 - RNA, 19 nt, Artificial Sequence
  Description of Artificial Sequence: Synthetic oligonucleotide
  Sense strand starting at position 600 of SEQ ID NO: 1882039
guuguuaaacucugguauu

SEQ ID NO: 2090381 - RNA, 19 nt, Artificial Sequence
  Description of Artificial Sequence: Synthetic oligonucleotide
  Antisense strand to SEQ ID NO: 2090380
aauaccagaguuuaacaac

SEQ ID NO: 2090382 - RNA, 19 nt, Artificial Sequence
  Description of Artificial Sequence: Synthetic oligonucleotide
  Sense strand starting at position 637 of SEQ ID NO: 1882039
acuaaacucugguauuaga

SEQ ID NO: 2090383 - RNA, 19 nt, Artificial Sequence
  Description of Artificial Sequence: Synthetic oligonucleotide
  Antisense strand to SEQ ID NO: 2090382
ucuaauaccagaguuuagu

SEQ ID NO: 2090384 - RNA, 19 nt, Artificial Sequence
  Description of Artificial Sequence: Synthetic oligonucleotide
  Sense strand starting at position 666 of SEQ ID NO: 1882039
gaaauaaacugaguguggu

SEQ ID NO: 2090385 - RNA, 19 nt, Artificial Sequence
  Description of Artificial Sequence: Synthetic oligonucleotide
  Antisense strand to SEQ ID NO: 2090384
accacacucaguuuauuuc

SEQ ID NO: 2090386 - RNA, 19 nt, Artificial Sequence
  Description of Artificial Sequence: Synthetic oligonucleotide
  Sense strand starting at position 667 of SEQ ID NO: 1882039
aaauaaacugaguguggua

SEQ ID NO: 2090387 - RNA, 19 nt, Artificial Sequence
  Description of Artificial Sequence: Synthetic oligonucleotide
  Antisense strand to SEQ ID NO: 2090386
uaccacacucaguuuauuu

SEQ ID NO: 2090388 - RNA, 19 nt, Artificial Sequence
  Description of Artificial Sequence: Synthetic oligonucleotide
  Sense strand starting at position 680 of SEQ ID NO: 1882039
gugguaugugcugucuguu

SEQ ID NO: 2090389 - RNA, 19 nt, Artificial Sequence
  Description of Artificial Sequence: Synthetic oligonucleotide
  Antisense strand to SEQ ID NO: 2090388
aacagacagcacauaccac

SEQ ID NO: 2090390 - RNA, 19 nt, Artificial Sequence
  Description of Artificial Sequence: Synthetic oligonucleotide
  Sense strand starting at position 692 of SEQ ID NO: 1882039
gucuguugcccaugaaaga

SEQ ID NO: 2090391 - RNA, 19 nt, Artificial Sequence
  Description of Artificial Sequence: Synthetic oligonucleotide
  Antisense strand to SEQ ID NO: 2090390
ucuuucaugggcaacagac

SEQ ID NO: 2090392 - RNA, 19 nt, Artificial Sequence
  Description of Artificial Sequence: Synthetic oligonucleotide
  Sense strand starting at position 710 of SEQ ID NO: 1882039
acuggauguccucaugauc

SEQ ID NO: 2090393 - RNA, 19 nt, Artificial Sequence
  Description of Artificial Sequence: Synthetic oligonucleotide
  Antisense strand to SEQ ID NO: 2090392
gaucaugaggacauccagu

SEQ ID NO: 2090394 - RNA, 19 nt, Artificial Sequence
  Description of Artificial Sequence: Synthetic oligonucleotide
  Sense strand starting at position 737 of SEQ ID NO: 1882039
gagcuaaugucauucucug

SEQ ID NO: 2090395 - RNA, 19 nt, Artificial Sequence
  Description of Artificial Sequence: Synthetic oligonucleotide
  Antisense strand to SEQ ID NO: 2090394
cagagaaugacauuagcuc

SEQ ID NO: 2090396 - RNA, 19 nt, Artificial Sequence
  Description of Artificial Sequence: Synthetic oligonucleotide
  Sense strand starting at position 743 of SEQ ID NO: 1882039
augucauucucugcauaug

SEQ ID NO: 2090397 - RNA, 19 nt, Artificial Sequence
  Description of Artificial Sequence: Synthetic oligonucleotide
  Antisense strand to SEQ ID NO: 2090396
cauaugcagagaaugacau

SEQ ID NO: 2090398 - RNA, 19 nt, Artificial Sequence
  Description of Artificial Sequence: Synthetic oligonucleotide
  Sense strand starting at position 754 of SEQ ID NO: 1882039
ugcauauggcauugaagaa

SEQ ID NO: 2090399 - RNA, 19 nt, Artificial Sequence
  Description of Artificial Sequence: Synthetic oligonucleotide
  Antisense strand to SEQ ID NO: 2090398
uucuucaaugccauaugca

SEQ ID NO: 2090400 - RNA, 19 nt, Artificial Sequence
  Description of Artificial Sequence: Synthetic oligonucleotide
  Sense strand starting at position 779 of SEQ ID NO: 1882039
cgaugcaugaaaggaaaua

SEQ ID NO: 2090401 - RNA, 19 nt, Artificial Sequence
  Description of Artificial Sequence: Synthetic oligonucleotide
  Antisense strand to SEQ ID NO: 2090400
uauuuccuuucaugcaucg

SEQ ID NO: 2090402 - RNA, 19 nt, Artificial Sequence
  Description of Artificial Sequence: Synthetic oligonucleotide
  Sense strand starting at position 860 of SEQ ID NO: 1882039
gguggugucaaaugaacuu

SEQ ID NO: 2090403 - RNA, 19 nt, Artificial Sequence
  Description of Artificial Sequence: Synthetic oligonucleotide
  Antisense strand to SEQ ID NO: 2090402
aaguucauuugacaccacc

SEQ ID NO: 2090404 - RNA, 19 nt, Artificial Sequence
  Description of Artificial Sequence: Synthetic oligonucleotide
  Sense strand starting at position 1004 of SEQ ID NO: 1882039
caaugugaaguuggccaua

SEQ ID NO: 2090405 - RNA, 19 nt, Artificial Sequence
  Description of Artificial Sequence: Synthetic oligonucleotide
  Antisense strand to SEQ ID NO: 2090404
uauggccaacuucacauug

SEQ ID NO: 2090406 - RNA, 19 nt, Artificial Sequence
  Description of Artificial Sequence: Synthetic oligonucleotide
  Sense strand starting at position 1034 of SEQ ID NO: 1882039
uuucuacugcucuagagaa

SEQ ID NO: 2090407 - RNA, 19 nt, Artificial Sequence
  Description of Artificial Sequence: Synthetic oligonucleotide
  Antisense strand to SEQ ID NO: 2090406
uucucuagagcaguagaaa

SEQ ID NO: 2090408 - RNA, 19 nt, Artificial Sequence
  Description of Artificial Sequence: Synthetic oligonucleotide
  Sense strand starting at position 1036 of SEQ ID NO: 1882039
ucuacugcucuagagaagu

SEQ ID NO: 2090409 - RNA, 19 nt, Artificial Sequence
  Description of Artificial Sequence: Synthetic oligonucleotide
  Antisense strand to SEQ ID NO: 2090408
acuucucuagagcaguaga

SEQ ID NO: 2090410 - RNA, 19 nt, Artificial Sequence
  Description of Artificial Sequence: Synthetic oligonucleotide
  Sense strand starting at position 1145 of SEQ ID NO: 1882039
aagggucucuucuuuguua

SEQ ID NO: 2090411 - RNA, 19 nt, Artificial Sequence
  Description of Artificial Sequence: Synthetic oligonucleotide
  Antisense strand to SEQ ID NO: 2090410
uaacaaagaagagacccuu

SEQ ID NO: 2090412 - RNA, 19 nt, Artificial Sequence
  Description of Artificial Sequence: Synthetic oligonucleotide
  Sense strand starting at position 1146 of SEQ ID NO: 1882039
agggucucuucuuuguuaa

SEQ ID NO: 2090413 - RNA, 19 nt, Artificial Sequence
  Description of Artificial Sequence: Synthetic oligonucleotide
  Antisense strand to SEQ ID NO: 2090412
uuaacaaagaagagacccu

SEQ ID NO: 2090414 - RNA, 19 nt, Artificial Sequence
  Description of Artificial Sequence: Synthetic oligonucleotide
  Sense strand starting at position 1147 of SEQ ID NO: 1882039
gggucucuucuuuguuaag

SEQ ID NO: 2090415 - RNA, 19 nt, Artificial Sequence
  Description of Artificial Sequence: Synthetic oligonucleotide
  Antisense strand to SEQ ID NO: 2090414
cuuaacaaagaagagaccc

SEQ ID NO: 2090416 - RNA, 19 nt, Artificial Sequence
  Description of Artificial Sequence: Synthetic oligonucleotide
  Sense strand starting at position 1156 of SEQ ID NO: 1882039
cuuuguuaagccugugaga

SEQ ID NO: 2090417 - RNA, 19 nt, Artificial Sequence
  Description of Artificial Sequence: Synthetic oligonucleotide
  Antisense strand to SEQ ID NO: 2090416
ucucacaggcuuaacaaag

SEQ ID NO: 2090418 - RNA, 19 nt, Artificial Sequence
  Description of Artificial Sequence: Synthetic oligonucleotide
  Sense strand starting at position 1158 of SEQ ID NO: 1882039
uuguuaagccugugagauu

SEQ ID NO: 2090419 - RNA, 19 nt, Artificial Sequence
  Description of Artificial Sequence: Synthetic oligonucleotide
  Antisense strand to SEQ ID NO: 2090418
aaucucacaggcuuaacaa

SEQ ID NO: 2090420 - RNA, 19 nt, Artificial Sequence
  Description of Artificial Sequence: Synthetic oligonucleotide
  Sense strand starting at position 1269 of SEQ ID NO: 1882039
aucuguauaucuuucugau

SEQ ID NO: 2090421 - RNA, 19 nt, Artificial Sequence
  Description of Artificial Sequence: Synthetic oligonucleotide
  Antisense strand to SEQ ID NO: 2090420
aucagaaagauauacagau

SEQ ID NO: 2090422 - RNA, 19 nt, Artificial Sequence
  Description of Artificial Sequence: Synthetic oligonucleotide
  Sense strand starting at position 1271 of SEQ ID NO: 1882039
cuguauaucuuucugauga

SEQ ID NO: 2090423 - RNA, 19 nt, Artificial Sequence
  Description of Artificial Sequence: Synthetic oligonucleotide
  Antisense strand to SEQ ID NO: 2090422
ucaucagaaagauauacag

SEQ ID NO: 2090424 - RNA, 19 nt, Artificial Sequence
  Description of Artificial Sequence: Synthetic oligonucleotide
  Sense strand starting at position 1276 of SEQ ID NO: 1882039
uaucuuucugaugagaugu

SEQ ID NO: 2090425 - RNA, 19 nt, Artificial Sequence
  Description of Artificial Sequence: Synthetic oligonucleotide
  Antisense strand to SEQ ID NO: 2090424
acaucucaucagaaagaua

SEQ ID NO: 2090426 - RNA, 19 nt, Artificial Sequence
  Description of Artificial Sequence: Synthetic oligonucleotide
  Sense strand starting at position 1284 of SEQ ID NO: 1882039
ugaugagauguuuguaaag

SEQ ID NO: 2090427 - RNA, 19 nt, Artificial Sequence
  Description of Artificial Sequence: Synthetic oligonucleotide
  Antisense strand to SEQ ID NO: 2090426
cuuuacaaacaucucauca

SEQ ID NO: 2090428 - RNA, 19 nt, Artificial Sequence
  Description of Artificial Sequence: Synthetic oligonucleotide
  Sense strand starting at position 1380 of SEQ ID NO: 1882039
acugucauuugucagauau

SEQ ID NO: 2090429 - RNA, 19 nt, Artificial Sequence
  Description of Artificial Sequence: Synthetic oligonucleotide
  Antisense strand to SEQ ID NO: 2090428
auaucugacaaaugacagu

SEQ ID NO: 2090430 - RNA, 19 nt, Artificial Sequence
  Description of Artificial Sequence: Synthetic oligonucleotide
  Sense strand starting at position 1382 of SEQ ID NO: 1882039
ugucauuugucagauauuu

SEQ ID NO: 2090431 - RNA, 19 nt, Artificial Sequence
  Description of Artificial Sequence: Synthetic oligonucleotide
  Antisense strand to SEQ ID NO: 2090430
aaauaucugacaaaugaca

SEQ ID NO: 2090432 - RNA, 19 nt, Artificial Sequence
  Description of Artificial Sequence: Synthetic oligonucleotide
  Sense strand starting at position 1514 of SEQ ID NO: 1882039
agugaaucauacuuauugu

SEQ ID NO: 2090433 - RNA, 19 nt, Artificial Sequence
  Description of Artificial Sequence: Synthetic oligonucleotide
  Antisense strand to SEQ ID NO: 2090432
acaauaaguaugauucacu

SEQ ID NO: 2090434 - RNA, 19 nt, Artificial Sequence
  Description of Artificial Sequence: Synthetic oligonucleotide
  Sense strand starting at position 16 of SEQ ID NO: 1882040
ggauuuauguucugccauu

SEQ ID NO: 2090435 - RNA, 19 nt, Artificial Sequence
  Description of Artificial Sequence: Synthetic oligonucleotide
  Antisense strand to SEQ ID NO: 2090434
aauggcagaacauaaaucc

SEQ ID NO: 2090436 - RNA, 19 nt, Artificial Sequence
  Description of Artificial Sequence: Synthetic oligonucleotide
  Sense strand starting at position 17 of SEQ ID NO: 1882040
gauuuauguucugccauug

SEQ ID NO: 2090437 - RNA, 19 nt, Artificial Sequence
  Description of Artificial Sequence: Synthetic oligonucleotide
  Antisense strand to SEQ ID NO: 2090436
caauggcagaacauaaauc

SEQ ID NO: 2090438 - RNA, 19 nt, Artificial Sequence
  Description of Artificial Sequence: Synthetic oligonucleotide
  Sense strand starting at position 29 of SEQ ID NO: 1882040
gccauugaaugcuccucaa

SEQ ID NO: 2090439 - RNA, 19 nt, Artificial Sequence
  Description of Artificial Sequence: Synthetic oligonucleotide
  Antisense strand to SEQ ID NO: 2090438
uugaggagcauucaauggc

SEQ ID NO: 2090440 - RNA, 19 nt, Artificial Sequence
  Description of Artificial Sequence: Synthetic oligonucleotide
  Sense strand starting at position 96 of SEQ ID NO: 1882040
cugacuaucuuagcaaaug

SEQ ID NO: 2090441 - RNA, 19 nt, Artificial Sequence
  Description of Artificial Sequence: Synthetic oligonucleotide
  Antisense strand to SEQ ID NO: 2090440
cauuugcuaagauagucag

SEQ ID NO: 2090442 - RNA, 19 nt, Artificial Sequence
  Description of Artificial Sequence: Synthetic oligonucleotide
  Sense strand starting at position 122 of SEQ ID NO: 1882040
guaagaacauaaugauuag

SEQ ID NO: 2090443 - RNA, 19 nt, Artificial Sequence
  Description of Artificial Sequence: Synthetic oligonucleotide
  Antisense strand to SEQ ID NO: 2090442
cuaaucauuauguucuuac

SEQ ID NO: 2090444 - RNA, 19 nt, Artificial Sequence
  Description of Artificial Sequence: Synthetic oligonucleotide
  Sense strand starting at position 153 of SEQ ID NO: 1882040
gucuauguggcuuaggaga

SEQ ID NO: 2090445 - RNA, 19 nt, Artificial Sequence
  Description of Artificial Sequence: Synthetic oligonucleotide
  Antisense strand to SEQ ID NO: 2090444
ucuccuaagccacauagac

SEQ ID NO: 2090446 - RNA, 19 nt, Artificial Sequence
  Description of Artificial Sequence: Synthetic oligonucleotide
  Sense strand starting at position 155 of SEQ ID NO: 1882040
cuauguggcuuaggagaca

SEQ ID NO: 2090447 - RNA, 19 nt, Artificial Sequence
  Description of Artificial Sequence: Synthetic oligonucleotide
  Antisense strand to SEQ ID NO: 2090446
ugucuccuaagccacauag

SEQ ID NO: 2090448 - RNA, 19 nt, Artificial Sequence
  Description of Artificial Sequence: Synthetic oligonucleotide
  Sense strand starting at position 197 of SEQ ID NO: 1882040
gcuuuaaaggauuauccuu

SEQ ID NO: 2090449 - RNA, 19 nt, Artificial Sequence
  Description of Artificial Sequence: Synthetic oligonucleotide
  Antisense strand to SEQ ID NO: 2090448
aaggauaauccuuuaaagc

SEQ ID NO: 2090450 - RNA, 19 nt, Artificial Sequence
  Description of Artificial Sequence: Synthetic oligonucleotide
  Sense strand starting at position 220 of SEQ ID NO: 1882040
gcaacuacuuagguauuga

SEQ ID NO: 2090451 - RNA, 19 nt, Artificial Sequence
  Description of Artificial Sequence: Synthetic oligonucleotide
  Antisense strand to SEQ ID NO: 2090450
ucaauaccuaaguaguugc

SEQ ID NO: 2090452 - RNA, 19 nt, Artificial Sequence
  Description of Artificial Sequence: Synthetic oligonucleotide
  Sense strand starting at position 224 of SEQ ID NO: 1882040
cuacuuagguauugaaaca

SEQ ID NO: 2090453 - RNA, 19 nt, Artificial Sequence
  Description of Artificial Sequence: Synthetic oligonucleotide
  Antisense strand to SEQ ID NO: 2090452
uguuucaauaccuaaguag

SEQ ID NO: 2090454 - RNA, 19 nt, Artificial Sequence
  Description of Artificial Sequence: Synthetic oligonucleotide
  Sense strand starting at position 285 of SEQ ID NO: 1882040
cuguccugucaugacaacu

SEQ ID NO: 2090455 - RNA, 19 nt, Artificial Sequence
  Description of Artificial Sequence: Synthetic oligonucleotide
  Antisense strand to SEQ ID NO: 2090454
aguugucaugacaggacag

SEQ ID NO: 2090456 - RNA, 19 nt, Artificial Sequence
  Description of Artificial Sequence: Synthetic oligonucleotide
  Sense strand starting at position 308 of SEQ ID NO: 1882040
cuuugaggaucugaaauau

SEQ ID NO: 2090457 - RNA, 19 nt, Artificial Sequence
  Description of Artificial Sequence: Synthetic oligonucleotide
  Antisense strand to SEQ ID NO: 2090456
auauuucagauccucaaag

SEQ ID NO: 2090458 - RNA, 19 nt, Artificial Sequence
  Description of Artificial Sequence: Synthetic oligonucleotide
  Sense strand starting at position 363 of SEQ ID NO: 1882040
aaaguuaugucaggugauu

SEQ ID NO: 2090459 - RNA, 19 nt, Artificial Sequence
  Description of Artificial Sequence: Synthetic oligonucleotide
  Antisense strand to SEQ ID NO: 2090458
aaucaccugacauaacuuu

SEQ ID NO: 2090460 - RNA, 19 nt, Artificial Sequence
  Description of Artificial Sequence: Synthetic oligonucleotide
  Sense strand starting at position 372 of SEQ ID NO: 1882040
ucaggugauuuacagaaug

SEQ ID NO: 2090461 - RNA, 19 nt, Artificial Sequence
  Description of Artificial Sequence: Synthetic oligonucleotide
  Antisense strand to SEQ ID NO: 2090460
cauucuguaaaucaccuga

SEQ ID NO: 2090462 - RNA, 19 nt, Artificial Sequence
  Description of Artificial Sequence: Synthetic oligonucleotide
  Sense strand starting at position 406 of SEQ ID NO: 1882040
agaggagcaucagacauuu

SEQ ID NO: 2090463 - RNA, 19 nt, Artificial Sequence
  Description of Artificial Sequence: Synthetic oligonucleotide
  Antisense strand to SEQ ID NO: 2090462
aaaugucugaugcuccucu

SEQ ID NO: 2090464 - RNA, 19 nt, Artificial Sequence
  Description of Artificial Sequence: Synthetic oligonucleotide
  Sense strand starting at position 485 of SEQ ID NO: 1882040
gcucauguguggugggagu

SEQ ID NO: 2090465 - RNA, 19 nt, Artificial Sequence
  Description of Artificial Sequence: Synthetic oligonucleotide
  Antisense strand to SEQ ID NO: 2090464
acucccaccacacaugagc

SEQ ID NO: 2090466 - RNA, 19 nt, Artificial Sequence
  Description of Artificial Sequence: Synthetic oligonucleotide
  Sense strand starting at position 500 of SEQ ID NO: 1882040
gaguacucccgagacccau

SEQ ID NO: 2090467 - RNA, 19 nt, Artificial Sequence
  Description of Artificial Sequence: Synthetic oligonucleotide
  Antisense strand to SEQ ID NO: 2090466
augggucucgggaguacuc

SEQ ID NO: 2090468 - RNA, 19 nt, Artificial Sequence
  Description of Artificial Sequence: Synthetic oligonucleotide
  Sense strand starting at position 566 of SEQ ID NO: 1882040
acuguuucucccugacugu

SEQ ID NO: 2090469 - RNA, 19 nt, Artificial Sequence
  Description of Artificial Sequence: Synthetic oligonucleotide
  Antisense strand to SEQ ID NO: 2090468
acagucagggagaaacagu

SEQ ID NO: 2090470 - RNA, 19 nt, Artificial Sequence
  Description of Artificial Sequence: Synthetic oligonucleotide
  Sense strand starting at position 567 of SEQ ID NO: 1882040
cuguuucucccugacugua

SEQ ID NO: 2090471 - RNA, 19 nt, Artificial Sequence
  Description of Artificial Sequence: Synthetic oligonucleotide
  Antisense strand to SEQ ID NO: 2090470
uacagucagggagaaacag

SEQ ID NO: 2090472 - RNA, 19 nt, Artificial Sequence
  Description of Artificial Sequence: Synthetic oligonucleotide
  Sense strand starting at position 635 of SEQ ID NO: 1882040
ccaggcuuauggugguaau

SEQ ID NO: 2090473 - RNA, 19 nt, Artificial Sequence
  Description of Artificial Sequence: Synthetic oligonucleotide
  Antisense strand to SEQ ID NO: 2090472
auuaccaccauaagccugg

SEQ ID NO: 2090474 - RNA, 19 nt, Artificial Sequence
  Description of Artificial Sequence: Synthetic oligonucleotide
  Sense strand starting at position 636 of SEQ ID NO: 1882040
caggcuuauggugguaauu

SEQ ID NO: 2090475 - RNA, 19 nt, Artificial Sequence
  Description of Artificial Sequence: Synthetic oligonucleotide
  Antisense strand to SEQ ID NO: 2090474
aauuaccaccauaagccug

SEQ ID NO: 2090476 - RNA, 19 nt, Artificial Sequence
  Description of Artificial Sequence: Synthetic oligonucleotide
  Sense strand starting at position 700 of SEQ ID NO: 1882040
accaguggauucuaacagu

SEQ ID NO: 2090477 - RNA, 19 nt, Artificial Sequence
  Description of Artificial Sequence: Synthetic oligonucleotide
  Antisense strand to SEQ ID NO: 2090476
acuguuagaauccacuggu

SEQ ID NO: 2090478 - RNA, 19 nt, Artificial Sequence
  Description of Artificial Sequence: Synthetic oligonucleotide
  Sense strand starting at position 703 of SEQ ID NO: 1882040
aguggauucuaacaguguu

SEQ ID NO: 2090479 - RNA, 19 nt, Artificial Sequence
  Description of Artificial Sequence: Synthetic oligonucleotide
  Antisense strand to SEQ ID NO: 2090478
aacacuguuagaauccacu

SEQ ID NO: 2090480 - RNA, 19 nt, Artificial Sequence
  Description of Artificial Sequence: Synthetic oligonucleotide
  Sense strand starting at position 709 of SEQ ID NO: 1882040
uucuaacaguguuuggcaa

SEQ ID NO: 2090481 - RNA, 19 nt, Artificial Sequence
  Description of Artificial Sequence: Synthetic oligonucleotide
  Antisense strand to SEQ ID NO: 2090480
uugccaaacacuguuagaa

SEQ ID NO: 2090482 - RNA, 19 nt, Artificial Sequence
  Description of Artificial Sequence: Synthetic oligonucleotide
  Sense strand starting at position 831 of SEQ ID NO: 1882040
uggagaugauagcccuaaa

SEQ ID NO: 2090483 - RNA, 19 nt, Artificial Sequence
  Description of Artificial Sequence: Synthetic oligonucleotide
  Antisense strand to SEQ ID NO: 2090482
uuuagggcuaucaucucca

SEQ ID NO: 2090484 - RNA, 19 nt, Artificial Sequence
  Description of Artificial Sequence: Synthetic oligonucleotide
  Sense strand starting at position 862 of SEQ ID NO: 1882040
ccuggaacaucaucuggau

SEQ ID NO: 2090485 - RNA, 19 nt, Artificial Sequence
  Description of Artificial Sequence: Synthetic oligonucleotide
  Antisense strand to SEQ ID NO: 2090484
auccagaugauguuccagg

SEQ ID NO: 2090486 - RNA, 19 nt, Artificial Sequence
  Description of Artificial Sequence: Synthetic oligonucleotide
  Sense strand starting at position 871 of SEQ ID NO: 1882040
ucaucuggauuguuuacau

SEQ ID NO: 2090487 - RNA, 19 nt, Artificial Sequence
  Description of Artificial Sequence: Synthetic oligonucleotide
  Antisense strand to SEQ ID NO: 2090486
auguaaacaauccagauga

SEQ ID NO: 2090488 - RNA, 19 nt, Artificial Sequence
  Description of Artificial Sequence: Synthetic oligonucleotide
  Sense strand starting at position 911 of SEQ ID NO: 1882040
aguuacagguacuuagaga

SEQ ID NO: 2090489 - RNA, 19 nt, Artificial Sequence
  Description of Artificial Sequence: Synthetic oligonucleotide
  Antisense strand to SEQ ID NO: 2090488
ucucuaaguaccuguaacu

SEQ ID NO: 2090490 - RNA, 19 nt, Artificial Sequence
  Description of Artificial Sequence: Synthetic oligonucleotide
  Sense strand starting at position 1146 of SEQ ID NO: 1882040
gauuacaaauucuguggau

SEQ ID NO: 2090491 - RNA, 19 nt, Artificial Sequence
  Description of Artificial Sequence: Synthetic oligonucleotide
  Antisense strand to SEQ ID NO: 2090490
auccacagaauuuguaauc

SEQ ID NO: 2090492 - RNA, 19 nt, Artificial Sequence
  Description of Artificial Sequence: Synthetic oligonucleotide
  Sense strand starting at position 1148 of SEQ ID NO: 1882040
uuacaaauucuguggaugu

SEQ ID NO: 2090493 - RNA, 19 nt, Artificial Sequence
  Description of Artificial Sequence: Synthetic oligonucleotide
  Antisense strand to SEQ ID NO: 2090492
acauccacagaauuuguaa

SEQ ID NO: 2090494 - RNA, 19 nt, Artificial Sequence
  Description of Artificial Sequence: Synthetic oligonucleotide
  Sense strand starting at position 1161 of SEQ ID NO: 1882040
ggaugugguccaggcauuu

SEQ ID NO: 2090495 - RNA, 19 nt, Artificial Sequence
  Description of Artificial Sequence: Synthetic oligonucleotide
  Antisense strand to SEQ ID NO: 2090494
aaaugccuggaccacaucc

SEQ ID NO: 2090496 - RNA, 19 nt, Artificial Sequence
  Description of Artificial Sequence: Synthetic oligonucleotide
  Sense strand starting at position 2832 of SEQ ID NO: 1882040
aaacaaacucgacaguagu

SEQ ID NO: 2090497 - RNA, 19 nt, Artificial Sequence
  Description of Artificial Sequence: Synthetic oligonucleotide
  Antisense strand to SEQ ID NO: 2090496
acuacugucgaguuuguuu

SEQ ID NO: 2090498 - RNA, 19 nt, Artificial Sequence
  Description of Artificial Sequence: Synthetic oligonucleotide
  Sense strand starting at position 2981 of SEQ ID NO: 1882040
agucucugugcccaaugaa

SEQ ID NO: 2090499 - RNA, 19 nt, Artificial Sequence
  Description of Artificial Sequence: Synthetic oligonucleotide
  Antisense strand to SEQ ID NO: 2090498
uucauugggcacagagacu

SEQ ID NO: 2090500 - RNA, 19 nt, Artificial Sequence
  Description of Artificial Sequence: Synthetic oligonucleotide
  Sense strand starting at position 2984 of SEQ ID NO: 1882040
cucugugcccaaugaaacu

SEQ ID NO: 2090501 - RNA, 19 nt, Artificial Sequence
  Description of Artificial Sequence: Synthetic oligonucleotide
  Antisense strand to SEQ ID NO: 2090500
aguuucauugggcacagag

SEQ ID NO: 2090502 - RNA, 19 nt, Artificial Sequence
  Description of Artificial Sequence: Synthetic oligonucleotide
  Sense strand starting at position 410 of SEQ ID NO: 1882041
acacaucaagcuuguagau

SEQ ID NO: 2090503 - RNA, 19 nt, Artificial Sequence
  Description of Artificial Sequence: Synthetic oligonucleotide
  Antisense strand to SEQ ID NO: 2090502
aucuacaagcuugaugugu

SEQ ID NO: 2090504 - RNA, 19 nt, Artificial Sequence
  Description of Artificial Sequence: Synthetic oligonucleotide
  Sense strand starting at position 412 of SEQ ID NO: 1882041
acaucaagcuuguagauuu

SEQ ID NO: 2090505 - RNA, 19 nt, Artificial Sequence
  Description of Artificial Sequence: Synthetic oligonucleotide
  Antisense strand to SEQ ID NO: 2090504
aaaucuacaagcuugaugu

SEQ ID NO: 2090506 - RNA, 19 nt, Artificial Sequence
  Description of Artificial Sequence: Synthetic oligonucleotide
  Sense strand starting at position 1235 of SEQ ID NO: 1882041
ucuguuauuccauguaguu

SEQ ID NO: 2090507 - RNA, 19 nt, Artificial Sequence
  Description of Artificial Sequence: Synthetic oligonucleotide
  Antisense strand to SEQ ID NO: 2090506
aacuacauggaauaacaga

SEQ ID NO: 2090508 - RNA, 19 nt, Artificial Sequence
  Description of Artificial Sequence: Synthetic oligonucleotide
  Sense strand starting at position 1570 of SEQ ID NO: 1882041
gugacuugcacguauacuc

SEQ ID NO: 2090509 - RNA, 19 nt, Artificial Sequence
  Description of Artificial Sequence: Synthetic oligonucleotide
  Antisense strand to SEQ ID NO: 2090508
gaguauacgugcaagucac

SEQ ID NO: 2090510 - RNA, 19 nt, Artificial Sequence
  Description of Artificial Sequence: Synthetic oligonucleotide
  Sense strand starting at position 2222 of SEQ ID NO: 1882041
agaggauaauuauuguugu

SEQ ID NO: 2090511 - RNA, 19 nt, Artificial Sequence
  Description of Artificial Sequence: Synthetic oligonucleotide
  Antisense strand to SEQ ID NO: 2090510
acaacaauaauuauccucu

SEQ ID NO: 2090512 - RNA, 19 nt, Artificial Sequence
  Description of Artificial Sequence: Synthetic oligonucleotide
  Sense strand starting at position 2245 of SEQ ID NO: 1882041
gcuguuauggcagcacagu

SEQ ID NO: 2090513 - RNA, 19 nt, Artificial Sequence
  Description of Artificial Sequence: Synthetic oligonucleotide
  Antisense strand to SEQ ID NO: 2090512
acugugcugccauaacagc

SEQ ID NO: 2090514 - RNA, 19 nt, Artificial Sequence
  Description of Artificial Sequence: Synthetic oligonucleotide
  Sense strand starting at position 2325 of SEQ ID NO: 1882041
uugggugcccgaugacuuu

SEQ ID NO: 2090515 - RNA, 19 nt, Artificial Sequence
  Description of Artificial Sequence: Synthetic oligonucleotide
  Antisense strand to SEQ ID NO: 2090514
aaagucaucgggcacccaa

SEQ ID NO: 2090516 - RNA, 19 nt, Artificial Sequence
  Description of Artificial Sequence: Synthetic oligonucleotide
  Sense strand starting at position 2328 of SEQ ID NO: 1882041
ggugcccgaugacuuuaaa

SEQ ID NO: 2090517 - RNA, 19 nt, Artificial Sequence
  Description of Artificial Sequence: Synthetic oligonucleotide
  Antisense strand to SEQ ID NO: 2090516
uuuaaagucaucgggcacc

SEQ ID NO: 2090518 - RNA, 19 nt, Artificial Sequence
  Description of Artificial Sequence: Synthetic oligonucleotide
  Sense strand starting at position 2331 of SEQ ID NO: 1882041
gcccgaugacuuuaaagag

SEQ ID NO: 2090519 - RNA, 19 nt, Artificial Sequence
  Description of Artificial Sequence: Synthetic oligonucleotide
  Antisense strand to SEQ ID NO: 2090518
cucuuuaaagucaucgggc

SEQ ID NO: 2090520 - RNA, 19 nt, Artificial Sequence
  Description of Artificial Sequence: Synthetic oligonucleotide
  Sense strand starting at position 2345 of SEQ ID NO: 1882041
aagagacuguuucuuugua

SEQ ID NO: 2090521 - RNA, 19 nt, Artificial Sequence
  Description of Artificial Sequence: Synthetic oligonucleotide
  Antisense strand to SEQ ID NO: 2090520
uacaaagaaacagucucuu

SEQ ID NO: 2090522 - RNA, 19 nt, Artificial Sequence
  Description of Artificial Sequence: Synthetic oligonucleotide
  Sense strand starting at position 2347 of SEQ ID NO: 1882041
gagacuguuucuuuguaga

SEQ ID NO: 2090523 - RNA, 19 nt, Artificial Sequence
  Description of Artificial Sequence: Synthetic oligonucleotide
  Antisense strand to SEQ ID NO: 2090522
ucuacaaagaaacagucuc

SEQ ID NO: 2090524 - RNA, 19 nt, Artificial Sequence
  Description of Artificial Sequence: Synthetic oligonucleotide
  Sense strand starting at position 2368 of SEQ ID NO: 1882041
guggaaugagcuuaaaggu

SEQ ID NO: 2090525 - RNA, 19 nt, Artificial Sequence
  Description of Artificial Sequence: Synthetic oligonucleotide
  Antisense strand to SEQ ID NO: 2090524
accuuuaagcucauuccac

SEQ ID NO: 2090526 - RNA, 19 nt, Artificial Sequence
  Description of Artificial Sequence: Synthetic oligonucleotide
  Sense strand starting at position 2374 of SEQ ID NO: 1882041
ugagcuuaaaggugagagu

SEQ ID NO: 2090527 - RNA, 19 nt, Artificial Sequence
  Description of Artificial Sequence: Synthetic oligonucleotide
  Antisense strand to SEQ ID NO: 2090526
acucucaccuuuaagcuca

SEQ ID NO: 2090528 - RNA, 19 nt, Artificial Sequence
  Description of Artificial Sequence: Synthetic oligonucleotide
  Sense strand starting at position 2381 of SEQ ID NO: 1882041
aaaggugagagucauguuu

SEQ ID NO: 2090529 - RNA, 19 nt, Artificial Sequence
  Description of Artificial Sequence: Synthetic oligonucleotide
  Antisense strand to SEQ ID NO: 2090528
aaacaugacucucaccuuu

SEQ ID NO: 2090530 - RNA, 19 nt, Artificial Sequence
  Description of Artificial Sequence: Synthetic oligonucleotide
  Sense strand starting at position 2613 of SEQ ID NO: 1882041
cuaaauagauuccagaaga

SEQ ID NO: 2090531 - RNA, 19 nt, Artificial Sequence
  Description of Artificial Sequence: Synthetic oligonucleotide
  Antisense strand to SEQ ID NO: 2090530
ucuucuggaaucuauuuag

SEQ ID NO: 2090532 - RNA, 19 nt, Artificial Sequence
  Description of Artificial Sequence: Synthetic oligonucleotide
  Sense strand starting at position 2629 of SEQ ID NO: 1882041
agaugcgauuaccuagaua

SEQ ID NO: 2090533 - RNA, 19 nt, Artificial Sequence
  Description of Artificial Sequence: Synthetic oligonucleotide
  Antisense strand to SEQ ID NO: 2090532
uaucuagguaaucgcaucu

SEQ ID NO: 2090534 - RNA, 19 nt, Artificial Sequence
  Description of Artificial Sequence: Synthetic oligonucleotide
  Sense strand starting at position 2770 of SEQ ID NO: 1882041
uugcaugaguccucccuua

SEQ ID NO: 2090535 - RNA, 19 nt, Artificial Sequence
  Description of Artificial Sequence: Synthetic oligonucleotide
  Antisense strand to SEQ ID NO: 2090534
uaagggaggacucaugcaa

SEQ ID NO: 2090536 - RNA, 19 nt, Artificial Sequence
  Description of Artificial Sequence: Synthetic oligonucleotide
  Sense strand starting at position 2775 of SEQ ID NO: 1882041
ugaguccucccuuaugcua

SEQ ID NO: 2090537 - RNA, 19 nt, Artificial Sequence
  Description of Artificial Sequence: Synthetic oligonucleotide
  Antisense strand to SEQ ID NO: 2090536
uagcauaagggaggacuca

SEQ ID NO: 2090538 - RNA, 19 nt, Artificial Sequence
  Description of Artificial Sequence: Synthetic oligonucleotide
  Sense strand starting at position 2791 of SEQ ID NO: 1882041
cuaacuguuccacaaagua

SEQ ID NO: 2090539 - RNA, 19 nt, Artificial Sequence
  Description of Artificial Sequence: Synthetic oligonucleotide
  Antisense strand to SEQ ID NO: 2090538
uacuuuguggaacaguuag

SEQ ID NO: 2090540 - RNA, 19 nt, Artificial Sequence
  Description of Artificial Sequence: Synthetic oligonucleotide
  Sense strand starting at position 2887 of SEQ ID NO: 1882041
ccauauguaccaugaagua

SEQ ID NO: 2090541 - RNA, 19 nt, Artificial Sequence
  Description of Artificial Sequence: Synthetic oligonucleotide
  Antisense strand to SEQ ID NO: 2090540
uacuucaugguacauaugg

SEQ ID NO: 2090542 - RNA, 19 nt, Artificial Sequence
  Description of Artificial Sequence: Synthetic oligonucleotide
  Sense strand starting at position 2943 of SEQ ID NO: 1882041
ucagcaguauaauuaugaa

SEQ ID NO: 2090543 - RNA, 19 nt, Artificial Sequence
  Description of Artificial Sequence: Synthetic oligonucleotide
  Antisense strand to SEQ ID NO: 2090542
uucauaauuauacugcuga

SEQ ID NO: 2090544 - RNA, 19 nt, Artificial Sequence
  Description of Artificial Sequence: Synthetic oligonucleotide
  Sense strand starting at position 3001 of SEQ ID NO: 1882041
caaagaguggcauaacagu

SEQ ID NO: 2090545 - RNA, 19 nt, Artificial Sequence
  Description of Artificial Sequence: Synthetic oligonucleotide
  Antisense strand to SEQ ID NO: 2090544
acuguuaugccacucuuug

SEQ ID NO: 2090546 - RNA, 19 nt, Artificial Sequence
  Description of Artificial Sequence: Synthetic oligonucleotide
  Sense strand starting at position 3074 of SEQ ID NO: 1882041
gaacauaucgauuguaaau

SEQ ID NO: 2090547 - RNA, 19 nt, Artificial Sequence
  Description of Artificial Sequence: Synthetic oligonucleotide
  Antisense strand to SEQ ID NO: 2090546
auuuacaaucgauauguuc

SEQ ID NO: 2090548 - RNA, 19 nt, Artificial Sequence
  Description of Artificial Sequence: Synthetic oligonucleotide
  Sense strand starting at position 3134 of SEQ ID NO: 1882041
uguagaacuuuaguaaagu

SEQ ID NO: 2090549 - RNA, 19 nt, Artificial Sequence
  Description of Artificial Sequence: Synthetic oligonucleotide
  Antisense strand to SEQ ID NO: 2090548
acuuuacuaaaguucuaca

SEQ ID NO: 2090550 - RNA, 19 nt, Artificial Sequence
  Description of Artificial Sequence: Synthetic oligonucleotide
  Sense strand starting at position 3150 of SEQ ID NO: 1882041
aguagaagaugagaaguau

SEQ ID NO: 2090551 - RNA, 19 nt, Artificial Sequence
  Description of Artificial Sequence: Synthetic oligonucleotide
  Antisense strand to SEQ ID NO: 2090550
auacuucucaucuucuacu

SEQ ID NO: 2090552 - RNA, 19 nt, Artificial Sequence
  Description of Artificial Sequence: Synthetic oligonucleotide
  Sense strand starting at position 3193 of SEQ ID NO: 1882041
auuuguaaaugggagaauu

SEQ ID NO: 2090553 - RNA, 19 nt, Artificial Sequence
  Description of Artificial Sequence: Synthetic oligonucleotide
  Antisense strand to SEQ ID NO: 2090552
aauucucccauuuacaaau

SEQ ID NO: 2090554 - RNA, 19 nt, Artificial Sequence
  Description of Artificial Sequence: Synthetic oligonucleotide
  Sense strand starting at position 3304 of SEQ ID NO: 1882041
guauguaaggagugaaaca

SEQ ID NO: 2090555 - RNA, 19 nt, Artificial Sequence
  Description of Artificial Sequence: Synthetic oligonucleotide
  Antisense strand to SEQ ID NO: 2090554
uguuucacuccuuacauac

SEQ ID NO: 2090556 - RNA, 19 nt, Artificial Sequence
  Description of Artificial Sequence: Synthetic oligonucleotide
  Sense strand starting at position 3333 of SEQ ID NO: 1882041
augugucauaauuguagac

SEQ ID NO: 2090557 - RNA, 19 nt, Artificial Sequence
  Description of Artificial Sequence: Synthetic oligonucleotide
  Antisense strand to SEQ ID NO: 2090556
gucuacaauuaugacacau

SEQ ID NO: 2090558 - RNA, 19 nt, Artificial Sequence
  Description of Artificial Sequence: Synthetic oligonucleotide
  Sense strand starting at position 3337 of SEQ ID NO: 1882041
gucauaauuguagacuguu

SEQ ID NO: 2090559 - RNA, 19 nt, Artificial Sequence
  Description of Artificial Sequence: Synthetic oligonucleotide
  Antisense strand to SEQ ID NO: 2090558
aacagucuacaauuaugac

SEQ ID NO: 2090560 - RNA, 19 nt, Artificial Sequence
  Description of Artificial Sequence: Synthetic oligonucleotide
  Sense strand starting at position 3340 of SEQ ID NO: 1882041
auaauuguagacuguugaa

SEQ ID NO: 2090561 - RNA, 19 nt, Artificial Sequence
  Description of Artificial Sequence: Synthetic oligonucleotide
  Antisense strand to SEQ ID NO: 2090560
uucaacagucuacaauuau

SEQ ID NO: 2090562 - RNA, 19 nt, Artificial Sequence
  Description of Artificial Sequence: Synthetic oligonucleotide
  Sense strand starting at position 3480 of SEQ ID NO: 1882041
ucacaauagcaacgauaau

SEQ ID NO: 2090563 - RNA, 19 nt, Artificial Sequence
  Description of Artificial Sequence: Synthetic oligonucleotide
  Antisense strand to SEQ ID NO: 2090562
auuaucguugcuauuguga

SEQ ID NO: 2090564 - RNA, 19 nt, Artificial Sequence
  Description of Artificial Sequence: Synthetic oligonucleotide
  Sense strand starting at position 3537 of SEQ ID NO: 1882041
gcacuuaauggaugauacu

SEQ ID NO: 2090565 - RNA, 19 nt, Artificial Sequence
  Description of Artificial Sequence: Synthetic oligonucleotide
  Antisense strand to SEQ ID NO: 2090564
aguaucauccauuaagugc

SEQ ID NO: 2090566 - RNA, 19 nt, Artificial Sequence
  Description of Artificial Sequence: Synthetic oligonucleotide
  Sense strand starting at position 3714 of SEQ ID NO: 1882041
uguaaacaaugagaugaaa

SEQ ID NO: 2090567 - RNA, 19 nt, Artificial Sequence
  Description of Artificial Sequence: Synthetic oligonucleotide
  Antisense strand to SEQ ID NO: 2090566
uuucaucucauuguuuaca

SEQ ID NO: 2090568 - RNA, 19 nt, Artificial Sequence
  Description of Artificial Sequence: Synthetic oligonucleotide
  Sense strand starting at position 3781 of SEQ ID NO: 1882041
aguauaauauggguaaagu

SEQ ID NO: 2090569 - RNA, 19 nt, Artificial Sequence
  Description of Artificial Sequence: Synthetic oligonucleotide
  Antisense strand to SEQ ID NO: 2090568
acuuuacccauauuauacu

SEQ ID NO: 2090570 - RNA, 19 nt, Artificial Sequence
  Description of Artificial Sequence: Synthetic oligonucleotide
  Sense strand starting at position 3782 of SEQ ID NO: 1882041
guauaauauggguaaaguc

SEQ ID NO: 2090571 - RNA, 19 nt, Artificial Sequence
  Description of Artificial Sequence: Synthetic oligonucleotide
  Antisense strand to SEQ ID NO: 2090570
gacuuuacccauauuauac

SEQ ID NO: 2090572 - RNA, 19 nt, Artificial Sequence
  Description of Artificial Sequence: Synthetic oligonucleotide
  Sense strand starting at position 3790 of SEQ ID NO: 1882041
uggguaaagucauagagaa

SEQ ID NO: 2090573 - RNA, 19 nt, Artificial Sequence
  Description of Artificial Sequence: Synthetic oligonucleotide
  Antisense strand to SEQ ID NO: 2090572
uucucuaugacuuuaccca

SEQ ID NO: 2090574 - RNA, 19 nt, Artificial Sequence
  Description of Artificial Sequence: Synthetic oligonucleotide
  Sense strand starting at position 3822 of SEQ ID NO: 1882041
uguauuuauuucuaccugu

SEQ ID NO: 2090575 - RNA, 19 nt, Artificial Sequence
  Description of Artificial Sequence: Synthetic oligonucleotide
  Antisense strand to SEQ ID NO: 2090574
acagguagaaauaaauaca

SEQ ID NO: 2090576 - RNA, 19 nt, Artificial Sequence
  Description of Artificial Sequence: Synthetic oligonucleotide
  Sense strand starting at position 3829 of SEQ ID NO: 1882041
auuucuaccuguuugucua

SEQ ID NO: 2090577 - RNA, 19 nt, Artificial Sequence
  Description of Artificial Sequence: Synthetic oligonucleotide
  Antisense strand to SEQ ID NO: 2090576
uagacaaacagguagaaau

SEQ ID NO: 2090578 - RNA, 19 nt, Artificial Sequence
  Description of Artificial Sequence: Synthetic oligonucleotide
  Sense strand starting at position 3830 of SEQ ID NO: 1882041
uuucuaccuguuugucuaa

SEQ ID NO: 2090579 - RNA, 19 nt, Artificial Sequence
  Description of Artificial Sequence: Synthetic oligonucleotide
  Antisense strand to SEQ ID NO: 2090578
uuagacaaacagguagaaa

SEQ ID NO: 2090580 - RNA, 19 nt, Artificial Sequence
  Description of Artificial Sequence: Synthetic oligonucleotide
  Sense strand starting at position 3833 of SEQ ID NO: 1882041
cuaccuguuugucuaacua

SEQ ID NO: 2090581 - RNA, 19 nt, Artificial Sequence
  Description of Artificial Sequence: Synthetic oligonucleotide
  Antisense strand to SEQ ID NO: 2090580
uaguuagacaaacagguag

SEQ ID NO: 2090582 - RNA, 19 nt, Artificial Sequence
  Description of Artificial Sequence: Synthetic oligonucleotide
  Sense strand starting at position 35 of SEQ ID NO: 1882042
aguggaaaguucccacaga

SEQ ID NO: 2090583 - RNA, 19 nt, Artificial Sequence
  Description of Artificial Sequence: Synthetic oligonucleotide
  Antisense strand to SEQ ID NO: 2090582
ucugugggaacuuuccacu

SEQ ID NO: 2090584 - RNA, 19 nt, Artificial Sequence
  Description of Artificial Sequence: Synthetic oligonucleotide
  Sense strand starting at position 80 of SEQ ID NO: 1882042
gcggaauuccuaggcagag

SEQ ID NO: 2090585 - RNA, 19 nt, Artificial Sequence
  Description of Artificial Sequence: Synthetic oligonucleotide
  Antisense strand to SEQ ID NO: 2090584
cucugccuaggaauuccgc

SEQ ID NO: 2090586 - RNA, 19 nt, Artificial Sequence
  Description of Artificial Sequence: Synthetic oligonucleotide
  Sense strand starting at position 104 of SEQ ID NO: 1882042
cgcucauuugcacacauua

SEQ ID NO: 2090587 - RNA, 19 nt, Artificial Sequence
  Description of Artificial Sequence: Synthetic oligonucleotide
  Antisense strand to SEQ ID NO: 2090586
uaaugugugcaaaugagcg

SEQ ID NO: 2090588 - RNA, 19 nt, Artificial Sequence
  Description of Artificial Sequence: Synthetic oligonucleotide
  Sense strand starting at position 839 of SEQ ID NO: 1882042
cgaggacauccugaguuga

SEQ ID NO: 2090589 - RNA, 19 nt, Artificial Sequence
  Description of Artificial Sequence: Synthetic oligonucleotide
  Antisense strand to SEQ ID NO: 2090588
ucaacucaggauguccucg

SEQ ID NO: 2090590 - RNA, 19 nt, Artificial Sequence
  Description of Artificial Sequence: Synthetic oligonucleotide
  Sense strand starting at position 885 of SEQ ID NO: 1882042
uccagacuccugcgagaaa

SEQ ID NO: 2090591 - RNA, 19 nt, Artificial Sequence
  Description of Artificial Sequence: Synthetic oligonucleotide
  Antisense strand to SEQ ID NO: 2090590
uuucucgcaggagucugga

SEQ ID NO: 2090592 - RNA, 19 nt, Artificial Sequence
  Description of Artificial Sequence: Synthetic oligonucleotide
  Sense strand starting at position 1170 of SEQ ID NO: 1882042
ugaggauggcuugggagau

SEQ ID NO: 2090593 - RNA, 19 nt, Artificial Sequence
  Description of Artificial Sequence: Synthetic oligonucleotide
  Antisense strand to SEQ ID NO: 2090592
aucucccaagccauccuca

SEQ ID NO: 2090594 - RNA, 19 nt, Artificial Sequence
  Description of Artificial Sequence: Synthetic oligonucleotide
  Sense strand starting at position 1218 of SEQ ID NO: 1882042
gccacaucucccuguggga

SEQ ID NO: 2090595 - RNA, 19 nt, Artificial Sequence
  Description of Artificial Sequence: Synthetic oligonucleotide
  Antisense strand to SEQ ID NO: 2090594
ucccacagggagauguggc

SEQ ID NO: 2090596 - RNA, 19 nt, Artificial Sequence
  Description of Artificial Sequence: Synthetic oligonucleotide
  Sense strand starting at position 1480 of SEQ ID NO: 1882042
uuugcagucggacaucauu

SEQ ID NO: 2090597 - RNA, 19 nt, Artificial Sequence
  Description of Artificial Sequence: Synthetic oligonucleotide
  Antisense strand to SEQ ID NO: 2090596
aaugauguccgacugcaaa

SEQ ID NO: 2090598 - RNA, 19 nt, Artificial Sequence
  Description of Artificial Sequence: Synthetic oligonucleotide
  Sense strand starting at position 1932 of SEQ ID NO: 1882042
gagggagacuugucuugug

SEQ ID NO: 2090599 - RNA, 19 nt, Artificial Sequence
  Description of Artificial Sequence: Synthetic oligonucleotide
  Antisense strand to SEQ ID NO: 2090598
cacaagacaagucucccuc

SEQ ID NO: 2090600 - RNA, 19 nt, Artificial Sequence
  Description of Artificial Sequence: Synthetic oligonucleotide
  Sense strand starting at position 1993 of SEQ ID NO: 1882042
agguucaugggauguaaua

SEQ ID NO: 2090601 - RNA, 19 nt, Artificial Sequence
  Description of Artificial Sequence: Synthetic oligonucleotide
  Antisense strand to SEQ ID NO: 2090600
uauuacaucccaugaaccu

SEQ ID NO: 2090602 - RNA, 19 nt, Artificial Sequence
  Description of Artificial Sequence: Synthetic oligonucleotide
  Sense strand starting at position 2005 of SEQ ID NO: 1882042
uguaauacggagcaagagu

SEQ ID NO: 2090603 - RNA, 19 nt, Artificial Sequence
  Description of Artificial Sequence: Synthetic oligonucleotide
  Antisense strand to SEQ ID NO: 2090602
acucuugcuccguauuaca

SEQ ID NO: 2090604 - RNA, 19 nt, Artificial Sequence
  Description of Artificial Sequence: Synthetic oligonucleotide
  Sense strand starting at position 2110 of SEQ ID NO: 1882042
gacagcuuuggguggaaga

SEQ ID NO: 2090605 - RNA, 19 nt, Artificial Sequence
  Description of Artificial Sequence: Synthetic oligonucleotide
  Antisense strand to SEQ ID NO: 2090604
ucuuccacccaaagcuguc

SEQ ID NO: 2090606 - RNA, 19 nt, Artificial Sequence
  Description of Artificial Sequence: Synthetic oligonucleotide
  Sense strand starting at position 2112 of SEQ ID NO: 1882042
cagcuuuggguggaagaca

SEQ ID NO: 2090607 - RNA, 19 nt, Artificial Sequence
  Description of Artificial Sequence: Synthetic oligonucleotide
  Antisense strand to SEQ ID NO: 2090606
ugucuuccacccaaagcug

SEQ ID NO: 2090608 - RNA, 19 nt, Artificial Sequence
  Description of Artificial Sequence: Synthetic oligonucleotide
  Sense strand starting at position 2164 of SEQ ID NO: 1882042
agaagugcuuccuugacag

SEQ ID NO: 2090609 - RNA, 19 nt, Artificial Sequence
  Description of Artificial Sequence: Synthetic oligonucleotide
  Antisense strand to SEQ ID NO: 2090608
cugucaaggaagcacuucu

SEQ ID NO: 2090610 - RNA, 19 nt, Artificial Sequence
  Description of Artificial Sequence: Synthetic oligonucleotide
  Sense strand starting at position 2240 of SEQ ID NO: 1882042
cuuugcuugccaggaaaug

SEQ ID NO: 2090611 - RNA, 19 nt, Artificial Sequence
  Description of Artificial Sequence: Synthetic oligonucleotide
  Antisense strand to SEQ ID NO: 2090610
cauuuccuggcaagcaaag

SEQ ID NO: 2090612 - RNA, 19 nt, Artificial Sequence
  Description of Artificial Sequence: Synthetic oligonucleotide
  Sense strand starting at position 2408 of SEQ ID NO: 1882042
caaaguggacucugucaca

SEQ ID NO: 2090613 - RNA, 19 nt, Artificial Sequence
  Description of Artificial Sequence: Synthetic oligonucleotide
  Antisense strand to SEQ ID NO: 2090612
ugugacagaguccacuuug

SEQ ID NO: 2090614 - RNA, 19 nt, Artificial Sequence
  Description of Artificial Sequence: Synthetic oligonucleotide
  Sense strand starting at position 2495 of SEQ ID NO: 1882042
guuagugauucugugacuc

SEQ ID NO: 2090615 - RNA, 19 nt, Artificial Sequence
  Description of Artificial Sequence: Synthetic oligonucleotide
  Antisense strand to SEQ ID NO: 2090614
gagucacagaaucacuaac

SEQ ID NO: 2090616 - RNA, 19 nt, Artificial Sequence
  Description of Artificial Sequence: Synthetic oligonucleotide
  Sense strand starting at position 2527 of SEQ ID NO: 1882042
gagcguugugcguuaguga

SEQ ID NO: 2090617 - RNA, 19 nt, Artificial Sequence
  Description of Artificial Sequence: Synthetic oligonucleotide
  Antisense strand to SEQ ID NO: 2090616
ucacuaacgcacaacgcuc

SEQ ID NO: 2090618 - RNA, 19 nt, Artificial Sequence
  Description of Artificial Sequence: Synthetic oligonucleotide
  Sense strand starting at position 2571 of SEQ ID NO: 1882042
guccguuguguauuaguga

SEQ ID NO: 2090619 - RNA, 19 nt, Artificial Sequence
  Description of Artificial Sequence: Synthetic oligonucleotide
  Antisense strand to SEQ ID NO: 2090618
ucacuaauacacaacggac

SEQ ID NO: 2090620 - RNA, 19 nt, Artificial Sequence
  Description of Artificial Sequence: Synthetic oligonucleotide
  Sense strand starting at position 2701 of SEQ ID NO: 1882042
gagcguuguguguuaguga

SEQ ID NO: 2090621 - RNA, 19 nt, Artificial Sequence
  Description of Artificial Sequence: Synthetic oligonucleotide
  Antisense strand to SEQ ID NO: 2090620
ucacuaacacacaacgcuc

SEQ ID NO: 2090622 - RNA, 19 nt, Artificial Sequence
  Description of Artificial Sequence: Synthetic oligonucleotide
  Sense strand starting at position 2714 of SEQ ID NO: 1882042
uagugauucggugagucug

SEQ ID NO: 2090623 - RNA, 19 nt, Artificial Sequence
  Description of Artificial Sequence: Synthetic oligonucleotide
  Antisense strand to SEQ ID NO: 2090622
cagacucaccgaaucacua

SEQ ID NO: 2090624 - RNA, 19 nt, Artificial Sequence
  Description of Artificial Sequence: Synthetic oligonucleotide
  Sense strand starting at position 2728 of SEQ ID NO: 1882042
gucugacuuucucccugaa

SEQ ID NO: 2090625 - RNA, 19 nt, Artificial Sequence
  Description of Artificial Sequence: Synthetic oligonucleotide
  Antisense strand to SEQ ID NO: 2090624
uucagggagaaagucagac

SEQ ID NO: 2090626 - RNA, 19 nt, Artificial Sequence
  Description of Artificial Sequence: Synthetic oligonucleotide
  Sense strand starting at position 2731 of SEQ ID NO: 1882042
ugacuuucucccugaacgu

SEQ ID NO: 2090627 - RNA, 19 nt, Artificial Sequence
  Description of Artificial Sequence: Synthetic oligonucleotide
  Antisense strand to SEQ ID NO: 2090626
acguucagggagaaaguca

SEQ ID NO: 2090628 - RNA, 19 nt, Artificial Sequence
  Description of Artificial Sequence: Synthetic oligonucleotide
  Sense strand starting at position 2732 of SEQ ID NO: 1882042
gacuuucucccugaacguu

SEQ ID NO: 2090629 - RNA, 19 nt, Artificial Sequence
  Description of Artificial Sequence: Synthetic oligonucleotide
  Antisense strand to SEQ ID NO: 2090628
aacguucagggagaaaguc

SEQ ID NO: 2090630 - RNA, 19 nt, Artificial Sequence
  Description of Artificial Sequence: Synthetic oligonucleotide
  Sense strand starting at position 2827 of SEQ ID NO: 1882042
gagcguugugugucaguga

SEQ ID NO: 2090631 - RNA, 19 nt, Artificial Sequence
  Description of Artificial Sequence: Synthetic oligonucleotide
  Antisense strand to SEQ ID NO: 2090630
ucacugacacacaacgcuc

SEQ ID NO: 2090632 - RNA, 19 nt, Artificial Sequence
  Description of Artificial Sequence: Synthetic oligonucleotide
  Sense strand starting at position 2870 of SEQ ID NO: 1882042
gagcguuguguguugguga

SEQ ID NO: 2090633 - RNA, 19 nt, Artificial Sequence
  Description of Artificial Sequence: Synthetic oligonucleotide
  Antisense strand to SEQ ID NO: 2090632
ucaccaacacacaacgcuc

SEQ ID NO: 2090634 - RNA, 19 nt, Artificial Sequence
  Description of Artificial Sequence: Synthetic oligonucleotide
  Sense strand starting at position 2987 of SEQ ID NO: 1882042
gccuuucucccugagcauu

SEQ ID NO: 2090635 - RNA, 19 nt, Artificial Sequence
  Description of Artificial Sequence: Synthetic oligonucleotide
  Antisense strand to SEQ ID NO: 2090634
aaugcucagggagaaaggc

SEQ ID NO: 2090636 - RNA, 19 nt, Artificial Sequence
  Description of Artificial Sequence: Synthetic oligonucleotide
  Sense strand starting at position 2998 of SEQ ID NO: 1882042
ugagcauugugacuuagug

SEQ ID NO: 2090637 - RNA, 19 nt, Artificial Sequence
  Description of Artificial Sequence: Synthetic oligonucleotide
  Antisense strand to SEQ ID NO: 2090636
cacuaagucacaaugcuca

SEQ ID NO: 2090638 - RNA, 19 nt, Artificial Sequence
  Description of Artificial Sequence: Synthetic oligonucleotide
  Sense strand starting at position 3000 of SEQ ID NO: 1882042
agcauugugacuuagugau

SEQ ID NO: 2090639 - RNA, 19 nt, Artificial Sequence
  Description of Artificial Sequence: Synthetic oligonucleotide
  Antisense strand to SEQ ID NO: 2090638
aucacuaagucacaaugcu

SEQ ID NO: 2090640 - RNA, 19 nt, Artificial Sequence
  Description of Artificial Sequence: Synthetic oligonucleotide
  Sense strand starting at position 3002 of SEQ ID NO: 1882042
cauugugacuuagugauuc

SEQ ID NO: 2090641 - RNA, 19 nt, Artificial Sequence
  Description of Artificial Sequence: Synthetic oligonucleotide
  Antisense strand to SEQ ID NO: 2090640
gaaucacuaagucacaaug

SEQ ID NO: 2090642 - RNA, 19 nt, Artificial Sequence
  Description of Artificial Sequence: Synthetic oligonucleotide
  Sense strand starting at position 3006 of SEQ ID NO: 1882042
gugacuuagugauucuaug

SEQ ID NO: 2090643 - RNA, 19 nt, Artificial Sequence
  Description of Artificial Sequence: Synthetic oligonucleotide
  Antisense strand to SEQ ID NO: 2090642
cauagaaucacuaagucac

SEQ ID NO: 2090644 - RNA, 19 nt, Artificial Sequence
  Description of Artificial Sequence: Synthetic oligonucleotide
  Sense strand starting at position 3017 of SEQ ID NO: 1882042
auucuaugagucuggcuuu

SEQ ID NO: 2090645 - RNA, 19 nt, Artificial Sequence
  Description of Artificial Sequence: Synthetic oligonucleotide
  Antisense strand to SEQ ID NO: 2090644
aaagccagacucauagaau

SEQ ID NO: 2090646 - RNA, 19 nt, Artificial Sequence
  Description of Artificial Sequence: Synthetic oligonucleotide
  Sense strand starting at position 3043 of SEQ ID NO: 1882042
gagcguugugcauuagcga

SEQ ID NO: 2090647 - RNA, 19 nt, Artificial Sequence
  Description of Artificial Sequence: Synthetic oligonucleotide
  Antisense strand to SEQ ID NO: 2090646
ucgcuaaugcacaacgcuc

SEQ ID NO: 2090648 - RNA, 19 nt, Artificial Sequence
  Description of Artificial Sequence: Synthetic oligonucleotide
  Sense strand starting at position 3304 of SEQ ID NO: 1882042
gagcguuguguguuagcga

SEQ ID NO: 2090649 - RNA, 19 nt, Artificial Sequence
  Description of Artificial Sequence: Synthetic oligonucleotide
  Antisense strand to SEQ ID NO: 2090648
ucgcuaacacacaacgcuc

SEQ ID NO: 2090650 - RNA, 19 nt, Artificial Sequence
  Description of Artificial Sequence: Synthetic oligonucleotide
  Sense strand starting at position 3311 of SEQ ID NO: 1882042
guguguuagcgauucugug

SEQ ID NO: 2090651 - RNA, 19 nt, Artificial Sequence
  Description of Artificial Sequence: Synthetic oligonucleotide
  Antisense strand to SEQ ID NO: 2090650
cacagaaucgcuaacacac

SEQ ID NO: 2090652 - RNA, 19 nt, Artificial Sequence
  Description of Artificial Sequence: Synthetic oligonucleotide
  Sense strand starting at position 3577 of SEQ ID NO: 1882042
ccugucuaccgugaauaca

SEQ ID NO: 2090653 - RNA, 19 nt, Artificial Sequence
  Description of Artificial Sequence: Synthetic oligonucleotide
  Antisense strand to SEQ ID NO: 2090652
uguauucacgguagacagg

SEQ ID NO: 2090654 - RNA, 19 nt, Artificial Sequence
  Description of Artificial Sequence: Synthetic oligonucleotide
  Sense strand starting at position 3595 of SEQ ID NO: 1882042
acucauugcucagucucua

SEQ ID NO: 2090655 - RNA, 19 nt, Artificial Sequence
  Description of Artificial Sequence: Synthetic oligonucleotide
  Antisense strand to SEQ ID NO: 2090654
uagagacugagcaaugagu

SEQ ID NO: 2090656 - RNA, 19 nt, Artificial Sequence
  Description of Artificial Sequence: Synthetic oligonucleotide
  Sense strand starting at position 3623 of SEQ ID NO: 1882042
uuuagagacugaguauuau

SEQ ID NO: 2090657 - RNA, 19 nt, Artificial Sequence
  Description of Artificial Sequence: Synthetic oligonucleotide
  Antisense strand to SEQ ID NO: 2090656
auaauacucagucucuaaa

SEQ ID NO: 2090658 - RNA, 19 nt, Artificial Sequence
  Description of Artificial Sequence: Synthetic oligonucleotide
  Sense strand starting at position 3703 of SEQ ID NO: 1882042
ucaucugauaccuguggga

SEQ ID NO: 2090659 - RNA, 19 nt, Artificial Sequence
  Description of Artificial Sequence: Synthetic oligonucleotide
  Antisense strand to SEQ ID NO: 2090658
ucccacagguaucagauga

SEQ ID NO: 2090660 - RNA, 19 nt, Artificial Sequence
  Description of Artificial Sequence: Synthetic oligonucleotide
  Sense strand starting at position 3705 of SEQ ID NO: 1882042
aucugauaccugugggaac

SEQ ID NO: 2090661 - RNA, 19 nt, Artificial Sequence
  Description of Artificial Sequence: Synthetic oligonucleotide
  Antisense strand to SEQ ID NO: 2090660
guucccacagguaucagau

SEQ ID NO: 2090662 - RNA, 19 nt, Artificial Sequence
  Description of Artificial Sequence: Synthetic oligonucleotide
  Sense strand starting at position 1027 of SEQ ID NO: 1882043
uuguguuuccuacaagaaa

SEQ ID NO: 2090663 - RNA, 19 nt, Artificial Sequence
  Description of Artificial Sequence: Synthetic oligonucleotide
  Antisense strand to SEQ ID NO: 2090662
uuucuuguaggaaacacaa

SEQ ID NO: 2090664 - RNA, 19 nt, Artificial Sequence
  Description of Artificial Sequence: Synthetic oligonucleotide
  Sense strand starting at position 1038 of SEQ ID NO: 1882043
acaagaaaucuguauuguu

SEQ ID NO: 2090665 - RNA, 19 nt, Artificial Sequence
  Description of Artificial Sequence: Synthetic oligonucleotide
  Antisense strand to SEQ ID NO: 2090664
aacaauacagauuucuugu

SEQ ID NO: 2090666 - RNA, 19 nt, Artificial Sequence
  Description of Artificial Sequence: Synthetic oligonucleotide
  Sense strand starting at position 1136 of SEQ ID NO: 1882043
auuugacugugauauaacu

SEQ ID NO: 2090667 - RNA, 19 nt, Artificial Sequence
  Description of Artificial Sequence: Synthetic oligonucleotide
  Antisense strand to SEQ ID NO: 2090666
aguuauaucacagucaaau

SEQ ID NO: 2090668 - RNA, 19 nt, Artificial Sequence
  Description of Artificial Sequence: Synthetic oligonucleotide
  Sense strand starting at position 1304 of SEQ ID NO: 1882043
auauguaaggccgauggaa

SEQ ID NO: 2090669 - RNA, 19 nt, Artificial Sequence
  Description of Artificial Sequence: Synthetic oligonucleotide
  Antisense strand to SEQ ID NO: 2090668
uuccaucggccuuacauau

SEQ ID NO: 2090670 - RNA, 19 nt, Artificial Sequence
  Description of Artificial Sequence: Synthetic oligonucleotide
  Sense strand starting at position 1316 of SEQ ID NO: 1882043
gauggaacuucugcugaag

SEQ ID NO: 2090671 - RNA, 19 nt, Artificial Sequence
  Description of Artificial Sequence: Synthetic oligonucleotide
  Antisense strand to SEQ ID NO: 2090670
cuucagcagaaguuccauc

SEQ ID NO: 2090672 - RNA, 19 nt, Artificial Sequence
  Description of Artificial Sequence: Synthetic oligonucleotide
  Sense strand starting at position 1402 of SEQ ID NO: 1882043
uguugcuguguguucaaau

SEQ ID NO: 2090673 - RNA, 19 nt, Artificial Sequence
  Description of Artificial Sequence: Synthetic oligonucleotide
  Antisense strand to SEQ ID NO: 2090672
auuugaacacacagcaaca

SEQ ID NO: 2090674 - RNA, 19 nt, Artificial Sequence
  Description of Artificial Sequence: Synthetic oligonucleotide
  Sense strand starting at position 1502 of SEQ ID NO: 1882043
gucuguagauguuugacaa

SEQ ID NO: 2090675 - RNA, 19 nt, Artificial Sequence
  Description of Artificial Sequence: Synthetic oligonucleotide
  Antisense strand to SEQ ID NO: 2090674
uugucaaacaucuacagac

SEQ ID NO: 2090676 - RNA, 19 nt, Artificial Sequence
  Description of Artificial Sequence: Synthetic oligonucleotide
  Sense strand starting at position 1503 of SEQ ID NO: 1882043
ucuguagauguuugacaag

SEQ ID NO: 2090677 - RNA, 19 nt, Artificial Sequence
  Description of Artificial Sequence: Synthetic oligonucleotide
  Antisense strand to SEQ ID NO: 2090676
cuugucaaacaucuacaga

SEQ ID NO: 2090678 - RNA, 19 nt, Artificial Sequence
  Description of Artificial Sequence: Synthetic oligonucleotide
  Sense strand starting at position 1509 of SEQ ID NO: 1882043
gauguuugacaaggaucuu

SEQ ID NO: 2090679 - RNA, 19 nt, Artificial Sequence
  Description of Artificial Sequence: Synthetic oligonucleotide
  Antisense strand to SEQ ID NO: 2090678
aagauccuugucaaacauc

SEQ ID NO: 2090680 - RNA, 19 nt, Artificial Sequence
  Description of Artificial Sequence: Synthetic oligonucleotide
  Sense strand starting at position 1578 of SEQ ID NO: 1882043
cuugaacacgcggaauaaa

SEQ ID NO: 2090681 - RNA, 19 nt, Artificial Sequence
  Description of Artificial Sequence: Synthetic oligonucleotide
  Antisense strand to SEQ ID NO: 2090680
uuuauuccgcguguucaag

SEQ ID NO: 2090682 - RNA, 19 nt, Artificial Sequence
  Description of Artificial Sequence: Synthetic oligonucleotide
  Sense strand starting at position 1587 of SEQ ID NO: 1882043
gcggaauaaaggugaucaa

SEQ ID NO: 2090683 - RNA, 19 nt, Artificial Sequence
  Description of Artificial Sequence: Synthetic oligonucleotide
  Antisense strand to SEQ ID NO: 2090682
uugaucaccuuuauuccgc

SEQ ID NO: 2090684 - RNA, 19 nt, Artificial Sequence
  Description of Artificial Sequence: Synthetic oligonucleotide
  Sense strand starting at position 1594 of SEQ ID NO: 1882043
aaaggugaucaacggguuu

SEQ ID NO: 2090685 - RNA, 19 nt, Artificial Sequence
  Description of Artificial Sequence: Synthetic oligonucleotide
  Antisense strand to SEQ ID NO: 2090684
aaacccguugaucaccuuu

SEQ ID NO: 2090686 - RNA, 19 nt, Artificial Sequence
  Description of Artificial Sequence: Synthetic oligonucleotide
  Sense strand starting at position 1596 of SEQ ID NO: 1882043
aggugaucaacggguuuaa

SEQ ID NO: 2090687 - RNA, 19 nt, Artificial Sequence
  Description of Artificial Sequence: Synthetic oligonucleotide
  Antisense strand to SEQ ID NO: 2090686
uuaaacccguugaucaccu

SEQ ID NO: 2090688 - RNA, 19 nt, Artificial Sequence
  Description of Artificial Sequence: Synthetic oligonucleotide
  Sense strand starting at position 1623 of SEQ ID NO: 1882043
ucuacuaauucugucaugu

SEQ ID NO: 2090689 - RNA, 19 nt, Artificial Sequence
  Description of Artificial Sequence: Synthetic oligonucleotide
  Antisense strand to SEQ ID NO: 2090688
acaugacagaauuaguaga

SEQ ID NO: 2090690 - RNA, 19 nt, Artificial Sequence
  Description of Artificial Sequence: Synthetic oligonucleotide
  Sense strand starting at position 1685 of SEQ ID NO: 1882043
aggaauuguuuccuugcuu

SEQ ID NO: 2090691 - RNA, 19 nt, Artificial Sequence
  Description of Artificial Sequence: Synthetic oligonucleotide
  Antisense strand to SEQ ID NO: 2090690
aagcaaggaaacaauuccu

SEQ ID NO: 2090692 - RNA, 19 nt, Artificial Sequence
  Description of Artificial Sequence: Synthetic oligonucleotide
  Sense strand starting at position 1808 of SEQ ID NO: 1882043
acaguuacauuccuuggaa

SEQ ID NO: 2090693 - RNA, 19 nt, Artificial Sequence
  Description of Artificial Sequence: Synthetic oligonucleotide
  Antisense strand to SEQ ID NO: 2090692
uuccaaggaauguaacugu

SEQ ID NO: 2090694 - RNA, 19 nt, Artificial Sequence
  Description of Artificial Sequence: Synthetic oligonucleotide
  Sense strand starting at position 1919 of SEQ ID NO: 1882043
aggccagacucuucugaau

SEQ ID NO: 2090695 - RNA, 19 nt, Artificial Sequence
  Description of Artificial Sequence: Synthetic oligonucleotide
  Antisense strand to SEQ ID NO: 2090694
auucagaagagucuggccu

SEQ ID NO: 2090696 - RNA, 19 nt, Artificial Sequence
  Description of Artificial Sequence: Synthetic oligonucleotide
  Sense strand starting at position 1930 of SEQ ID NO: 1882043
uucugaauacgccagucaa

SEQ ID NO: 2090697 - RNA, 19 nt, Artificial Sequence
  Description of Artificial Sequence: Synthetic oligonucleotide
  Antisense strand to SEQ ID NO: 2090696
uugacuggcguauucagaa

SEQ ID NO: 2090698 - RNA, 19 nt, Artificial Sequence
  Description of Artificial Sequence: Synthetic oligonucleotide
  Sense strand starting at position 1940 of SEQ ID NO: 1882043
gccagucaauaccuuguga

SEQ ID NO: 2090699 - RNA, 19 nt, Artificial Sequence
  Description of Artificial Sequence: Synthetic oligonucleotide
  Antisense strand to SEQ ID NO: 2090698
ucacaagguauugacuggc

SEQ ID NO: 2090700 - RNA, 19 nt, Artificial Sequence
  Description of Artificial Sequence: Synthetic oligonucleotide
  Sense strand starting at position 1978 of SEQ ID NO: 1882043
cacgguauugacuggagua

SEQ ID NO: 2090701 - RNA, 19 nt, Artificial Sequence
  Description of Artificial Sequence: Synthetic oligonucleotide
  Antisense strand to SEQ ID NO: 2090700
uacuccagucaauaccgug

SEQ ID NO: 2090702 - RNA, 19 nt, Artificial Sequence
  Description of Artificial Sequence: Synthetic oligonucleotide
  Sense strand starting at position 1979 of SEQ ID NO: 1882043
acgguauugacuggaguac

SEQ ID NO: 2090703 - RNA, 19 nt, Artificial Sequence
  Description of Artificial Sequence: Synthetic oligonucleotide
  Antisense strand to SEQ ID NO: 2090702
guacuccagucaauaccgu

SEQ ID NO: 2090704 - RNA, 19 nt, Artificial Sequence
  Description of Artificial Sequence: Synthetic oligonucleotide
  Sense strand starting at position 1980 of SEQ ID NO: 1882043
cgguauugacuggaguacu

SEQ ID NO: 2090705 - RNA, 19 nt, Artificial Sequence
  Description of Artificial Sequence: Synthetic oligonucleotide
  Antisense strand to SEQ ID NO: 2090704
aguacuccagucaauaccg

SEQ ID NO: 2090706 - RNA, 19 nt, Artificial Sequence
  Description of Artificial Sequence: Synthetic oligonucleotide
  Sense strand starting at position 2013 of SEQ ID NO: 1882043
ugccaagauaauugacguu

SEQ ID NO: 2090707 - RNA, 19 nt, Artificial Sequence
  Description of Artificial Sequence: Synthetic oligonucleotide
  Antisense strand to SEQ ID NO: 2090706
aacgucaauuaucuuggca

SEQ ID NO: 2090708 - RNA, 19 nt, Artificial Sequence
  Description of Artificial Sequence: Synthetic oligonucleotide
  Sense strand starting at position 2329 of SEQ ID NO: 1882043
ggcucuacugaguacucca

SEQ ID NO: 2090709 - RNA, 19 nt, Artificial Sequence
  Description of Artificial Sequence: Synthetic oligonucleotide
  Antisense strand to SEQ ID NO: 2090708
uggaguacucaguagagcc

SEQ ID NO: 2090710 - RNA, 19 nt, Artificial Sequence
  Description of Artificial Sequence: Synthetic oligonucleotide
  Sense strand starting at position 2346 of SEQ ID NO: 1882043
cagucaauaccuggugaau

SEQ ID NO: 2090711 - RNA, 19 nt, Artificial Sequence
  Description of Artificial Sequence: Synthetic oligonucleotide
  Antisense strand to SEQ ID NO: 2090710
auucaccagguauugacug

SEQ ID NO: 2090712 - RNA, 19 nt, Artificial Sequence
  Description of Artificial Sequence: Synthetic oligonucleotide
  Sense strand starting at position 2581 of SEQ ID NO: 1882043
aagacauugcagugaguca

SEQ ID NO: 2090713 - RNA, 19 nt, Artificial Sequence
  Description of Artificial Sequence: Synthetic oligonucleotide
  Antisense strand to SEQ ID NO: 2090712
ugacucacugcaaugucuu

SEQ ID NO: 2090714 - RNA, 19 nt, Artificial Sequence
  Description of Artificial Sequence: Synthetic oligonucleotide
  Sense strand starting at position 2619 of SEQ ID NO: 1882043
cagccuuagcaauagagua

SEQ ID NO: 2090715 - RNA, 19 nt, Artificial Sequence
  Description of Artificial Sequence: Synthetic oligonucleotide
  Antisense strand to SEQ ID NO: 2090714
uacucuauugcuaaggcug

SEQ ID NO: 2090716 - RNA, 19 nt, Artificial Sequence
  Description of Artificial Sequence: Synthetic oligonucleotide
  Sense strand starting at position 2746 of SEQ ID NO: 1882043
gcacuauugcugugggaac

SEQ ID NO: 2090717 - RNA, 19 nt, Artificial Sequence
  Description of Artificial Sequence: Synthetic oligonucleotide
  Antisense strand to SEQ ID NO: 2090716
guucccacagcaauagugc

SEQ ID NO: 2090718 - RNA, 19 nt, Artificial Sequence
  Description of Artificial Sequence: Synthetic oligonucleotide
  Sense strand starting at position 2780 of SEQ ID NO: 1882043
ccuauuggguuguucuuau

SEQ ID NO: 2090719 - RNA, 19 nt, Artificial Sequence
  Description of Artificial Sequence: Synthetic oligonucleotide
  Antisense strand to SEQ ID NO: 2090718
auaagaacaacccaauagg

SEQ ID NO: 2090720 - RNA, 19 nt, Artificial Sequence
  Description of Artificial Sequence: Synthetic oligonucleotide
  Sense strand starting at position 3002 of SEQ ID NO: 1882043
cggacagucuucccaggua

SEQ ID NO: 2090721 - RNA, 19 nt, Artificial Sequence
  Description of Artificial Sequence: Synthetic oligonucleotide
  Antisense strand to SEQ ID NO: 2090720
uaccugggaagacuguccg

SEQ ID NO: 2090722 - RNA, 19 nt, Artificial Sequence
  Description of Artificial Sequence: Synthetic oligonucleotide
  Sense strand starting at position 3092 of SEQ ID NO: 1882043
gaucuuuagggcugugauu

SEQ ID NO: 2090723 - RNA, 19 nt, Artificial Sequence
  Description of Artificial Sequence: Synthetic oligonucleotide
  Antisense strand to SEQ ID NO: 2090722
aaucacagcccuaaagauc

SEQ ID NO: 2090724 - RNA, 19 nt, Artificial Sequence
  Description of Artificial Sequence: Synthetic oligonucleotide
  Sense strand starting at position 3094 of SEQ ID NO: 1882043
ucuuuagggcugugauuuc

SEQ ID NO: 2090725 - RNA, 19 nt, Artificial Sequence
  Description of Artificial Sequence: Synthetic oligonucleotide
  Antisense strand to SEQ ID NO: 2090724
gaaaucacagcccuaaaga

SEQ ID NO: 2090726 - RNA, 19 nt, Artificial Sequence
  Description of Artificial Sequence: Synthetic oligonucleotide
  Sense strand starting at position 3198 of SEQ ID NO: 1882043
aagugaaaguuccuagaac

SEQ ID NO: 2090727 - RNA, 19 nt, Artificial Sequence
  Description of Artificial Sequence: Synthetic oligonucleotide
  Antisense strand to SEQ ID NO: 2090726
guucuaggaacuuucacuu

SEQ ID NO: 2090728 - RNA, 19 nt, Artificial Sequence
  Description of Artificial Sequence: Synthetic oligonucleotide
  Sense strand starting at position 3247 of SEQ ID NO: 1882043
gcucuaaagguaugaaaug

SEQ ID NO: 2090729 - RNA, 19 nt, Artificial Sequence
  Description of Artificial Sequence: Synthetic oligonucleotide
  Antisense strand to SEQ ID NO: 2090728
cauuucauaccuuuagagc

SEQ ID NO: 2090730 - RNA, 19 nt, Artificial Sequence
  Description of Artificial Sequence: Synthetic oligonucleotide
  Sense strand starting at position 3529 of SEQ ID NO: 1882043
ugagccagugguaguguua

SEQ ID NO: 2090731 - RNA, 19 nt, Artificial Sequence
  Description of Artificial Sequence: Synthetic oligonucleotide
  Antisense strand to SEQ ID NO: 2090730
uaacacuaccacuggcuca

SEQ ID NO: 2090732 - RNA, 19 nt, Artificial Sequence
  Description of Artificial Sequence: Synthetic oligonucleotide
  Sense strand starting at position 3540 of SEQ ID NO: 1882043
uaguguuaccaguggaggu

SEQ ID NO: 2090733 - RNA, 19 nt, Artificial Sequence
  Description of Artificial Sequence: Synthetic oligonucleotide
  Antisense strand to SEQ ID NO: 2090732
accuccacugguaacacua

SEQ ID NO: 2090734 - RNA, 19 nt, Artificial Sequence
  Description of Artificial Sequence: Synthetic oligonucleotide
  Sense strand starting at position 3541 of SEQ ID NO: 1882043
aguguuaccaguggagguu

SEQ ID NO: 2090735 - RNA, 19 nt, Artificial Sequence
  Description of Artificial Sequence: Synthetic oligonucleotide
  Antisense strand to SEQ ID NO: 2090734
aaccuccacugguaacacu

SEQ ID NO: 2090736 - RNA, 19 nt, Artificial Sequence
  Description of Artificial Sequence: Synthetic oligonucleotide
  Sense strand starting at position 3810 of SEQ ID NO: 1882043
cgaacaaucagaggcugaa

SEQ ID NO: 2090737 - RNA, 19 nt, Artificial Sequence
  Description of Artificial Sequence: Synthetic oligonucleotide
  Antisense strand to SEQ ID NO: 2090736
uucagccucugauuguucg

SEQ ID NO: 2090738 - RNA, 19 nt, Artificial Sequence
  Description of Artificial Sequence: Synthetic oligonucleotide
  Sense strand starting at position 3901 of SEQ ID NO: 1882043
ggacucaucagagguacuu

SEQ ID NO: 2090739 - RNA, 19 nt, Artificial Sequence
  Description of Artificial Sequence: Synthetic oligonucleotide
  Antisense strand to SEQ ID NO: 2090738
aaguaccucugaugagucc

SEQ ID NO: 2090740 - RNA, 19 nt, Artificial Sequence
  Description of Artificial Sequence: Synthetic oligonucleotide
  Sense strand starting at position 3954 of SEQ ID NO: 1882043
agguauugcaaagggaaua

SEQ ID NO: 2090741 - RNA, 19 nt, Artificial Sequence
  Description of Artificial Sequence: Synthetic oligonucleotide
  Antisense strand to SEQ ID NO: 2090740
uauucccuuugcaauaccu

SEQ ID NO: 2090742 - RNA, 19 nt, Artificial Sequence
  Description of Artificial Sequence: Synthetic oligonucleotide
  Sense strand starting at position 3197 of SEQ ID NO: 1882044
cagugauaguucuaaguug

SEQ ID NO: 2090743 - RNA, 19 nt, Artificial Sequence
  Description of Artificial Sequence: Synthetic oligonucleotide
  Antisense strand to SEQ ID NO: 2090742
caacuuagaacuaucacug

SEQ ID NO: 2090744 - RNA, 19 nt, Artificial Sequence
  Description of Artificial Sequence: Synthetic oligonucleotide
  Sense strand starting at position 3262 of SEQ ID NO: 1882044
cuacuucccgcagagugaa

SEQ ID NO: 2090745 - RNA, 19 nt, Artificial Sequence
  Description of Artificial Sequence: Synthetic oligonucleotide
  Antisense strand to SEQ ID NO: 2090744
uucacucugcgggaaguag

SEQ ID NO: 2090746 - RNA, 19 nt, Artificial Sequence
  Description of Artificial Sequence: Synthetic oligonucleotide
  Sense strand starting at position 3281 of SEQ ID NO: 1882044
gccugaacucuuuaauagg

SEQ ID NO: 2090747 - RNA, 19 nt, Artificial Sequence
  Description of Artificial Sequence: Synthetic oligonucleotide
  Antisense strand to SEQ ID NO: 2090746
ccuauuaaagaguucaggc

SEQ ID NO: 2090748 - RNA, 19 nt, Artificial Sequence
  Description of Artificial Sequence: Synthetic oligonucleotide
  Sense strand starting at position 3284 of SEQ ID NO: 1882044
ugaacucuuuaauaggcau

SEQ ID NO: 2090749 - RNA, 19 nt, Artificial Sequence
  Description of Artificial Sequence: Synthetic oligonucleotide
  Antisense strand to SEQ ID NO: 2090748
augccuauuaaagaguuca

SEQ ID NO: 2090750 - RNA, 19 nt, Artificial Sequence
  Description of Artificial Sequence: Synthetic oligonucleotide
  Sense strand starting at position 3319 of SEQ ID NO: 1882044
ggauccuguuaaccuguua

SEQ ID NO: 2090751 - RNA, 19 nt, Artificial Sequence
  Description of Artificial Sequence: Synthetic oligonucleotide
  Antisense strand to SEQ ID NO: 2090750
uaacagguuaacaggaucc

SEQ ID NO: 2090752 - RNA, 19 nt, Artificial Sequence
  Description of Artificial Sequence: Synthetic oligonucleotide
  Sense strand starting at position 3388 of SEQ ID NO: 1882044
ggacuuaacucauugugaa

SEQ ID NO: 2090753 - RNA, 19 nt, Artificial Sequence
  Description of Artificial Sequence: Synthetic oligonucleotide
  Antisense strand to SEQ ID NO: 2090752
uucacaaugaguuaagucc

SEQ ID NO: 2090754 - RNA, 19 nt, Artificial Sequence
  Description of Artificial Sequence: Synthetic oligonucleotide
  Sense strand starting at position 3391 of SEQ ID NO: 1882044
cuuaacucauugugaaagu

SEQ ID NO: 2090755 - RNA, 19 nt, Artificial Sequence
  Description of Artificial Sequence: Synthetic oligonucleotide
  Antisense strand to SEQ ID NO: 2090754
acuuucacaaugaguuaag

SEQ ID NO: 2090756 - RNA, 19 nt, Artificial Sequence
  Description of Artificial Sequence: Synthetic oligonucleotide
  Sense strand starting at position 3392 of SEQ ID NO: 1882044
uuaacucauugugaaagua

SEQ ID NO: 2090757 - RNA, 19 nt, Artificial Sequence
  Description of Artificial Sequence: Synthetic oligonucleotide
  Antisense strand to SEQ ID NO: 2090756
uacuuucacaaugaguuaa

SEQ ID NO: 2090758 - RNA, 19 nt, Artificial Sequence
  Description of Artificial Sequence: Synthetic oligonucleotide
  Sense strand starting at position 3400 of SEQ ID NO: 1882044
uugugaaaguacuaagccu

SEQ ID NO: 2090759 - RNA, 19 nt, Artificial Sequence
  Description of Artificial Sequence: Synthetic oligonucleotide
  Antisense strand to SEQ ID NO: 2090758
aggcuuaguacuuucacaa

SEQ ID NO: 2090760 - RNA, 19 nt, Artificial Sequence
  Description of Artificial Sequence: Synthetic oligonucleotide
  Sense strand starting at position 3407 of SEQ ID NO: 1882044
aguacuaagccuugaugua

SEQ ID NO: 2090761 - RNA, 19 nt, Artificial Sequence
  Description of Artificial Sequence: Synthetic oligonucleotide
  Antisense strand to SEQ ID NO: 2090760
uacaucaaggcuuaguacu

SEQ ID NO: 2090762 - RNA, 19 nt, Artificial Sequence
  Description of Artificial Sequence: Synthetic oligonucleotide
  Sense strand starting at position 3408 of SEQ ID NO: 1882044
guacuaagccuugauguau

SEQ ID NO: 2090763 - RNA, 19 nt, Artificial Sequence
  Description of Artificial Sequence: Synthetic oligonucleotide
  Antisense strand to SEQ ID NO: 2090762
auacaucaaggcuuaguac

SEQ ID NO: 2090764 - RNA, 19 nt, Artificial Sequence
  Description of Artificial Sequence: Synthetic oligonucleotide
  Sense strand starting at position 3417 of SEQ ID NO: 1882044
cuugauguaucuuuaggaa

SEQ ID NO: 2090765 - RNA, 19 nt, Artificial Sequence
  Description of Artificial Sequence: Synthetic oligonucleotide
  Antisense strand to SEQ ID NO: 2090764
uuccuaaagauacaucaag

SEQ ID NO: 2090766 - RNA, 19 nt, Artificial Sequence
  Description of Artificial Sequence: Synthetic oligonucleotide
  Sense strand starting at position 3473 of SEQ ID NO: 1882044
aagcauagcuuagugguua

SEQ ID NO: 2090767 - RNA, 19 nt, Artificial Sequence
  Description of Artificial Sequence: Synthetic oligonucleotide
  Antisense strand to SEQ ID NO: 2090766
uaaccacuaagcuaugcuu

SEQ ID NO: 2090768 - RNA, 19 nt, Artificial Sequence
  Description of Artificial Sequence: Synthetic oligonucleotide
  Sense strand starting at position 3474 of SEQ ID NO: 1882044
agcauagcuuagugguuaa

SEQ ID NO: 2090769 - RNA, 19 nt, Artificial Sequence
  Description of Artificial Sequence: Synthetic oligonucleotide
  Antisense strand to SEQ ID NO: 2090768
uuaaccacuaagcuaugcu

SEQ ID NO: 2090770 - RNA, 19 nt, Artificial Sequence
  Description of Artificial Sequence: Synthetic oligonucleotide
  Sense strand starting at position 3478 of SEQ ID NO: 1882044
uagcuuagugguuaaccua

SEQ ID NO: 2090771 - RNA, 19 nt, Artificial Sequence
  Description of Artificial Sequence: Synthetic oligonucleotide
  Antisense strand to SEQ ID NO: 2090770
uagguuaaccacuaagcua

SEQ ID NO: 2090772 - RNA, 19 nt, Artificial Sequence
  Description of Artificial Sequence: Synthetic oligonucleotide
  Sense strand starting at position 3481 of SEQ ID NO: 1882044
cuuagugguuaaccuacau

SEQ ID NO: 2090773 - RNA, 19 nt, Artificial Sequence
  Description of Artificial Sequence: Synthetic oligonucleotide
  Antisense strand to SEQ ID NO: 2090772
auguagguuaaccacuaag

SEQ ID NO: 2090774 - RNA, 19 nt, Artificial Sequence
  Description of Artificial Sequence: Synthetic oligonucleotide
  Sense strand starting at position 3618 of SEQ ID NO: 1882044
auacaaugcucccguaugu

SEQ ID NO: 2090775 - RNA, 19 nt, Artificial Sequence
  Description of Artificial Sequence: Synthetic oligonucleotide
  Antisense strand to SEQ ID NO: 2090774
acauacgggagcauuguau

SEQ ID NO: 2090776 - RNA, 19 nt, Artificial Sequence
  Description of Artificial Sequence: Synthetic oligonucleotide
  Sense strand starting at position 3627 of SEQ ID NO: 1882044
ucccguauguuacagagga

SEQ ID NO: 2090777 - RNA, 19 nt, Artificial Sequence
  Description of Artificial Sequence: Synthetic oligonucleotide
  Antisense strand to SEQ ID NO: 2090776
uccucuguaacauacggga

SEQ ID NO: 2090778 - RNA, 19 nt, Artificial Sequence
  Description of Artificial Sequence: Synthetic oligonucleotide
  Sense strand starting at position 3699 of SEQ ID NO: 1882044
guaggauggauccgcaacu

SEQ ID NO: 2090779 - RNA, 19 nt, Artificial Sequence
  Description of Artificial Sequence: Synthetic oligonucleotide
  Antisense strand to SEQ ID NO: 2090778
aguugcggauccauccuac

SEQ ID NO: 2090780 - RNA, 19 nt, Artificial Sequence
  Description of Artificial Sequence: Synthetic oligonucleotide
  Sense strand starting at position 3700 of SEQ ID NO: 1882044
uaggauggauccgcaacua

SEQ ID NO: 2090781 - RNA, 19 nt, Artificial Sequence
  Description of Artificial Sequence: Synthetic oligonucleotide
  Antisense strand to SEQ ID NO: 2090780
uaguugcggauccauccua

SEQ ID NO: 2090782 - RNA, 19 nt, Artificial Sequence
  Description of Artificial Sequence: Synthetic oligonucleotide
  Sense strand starting at position 3724 of SEQ ID NO: 1882044
cuggaaauaugcuaaauua

SEQ ID NO: 2090783 - RNA, 19 nt, Artificial Sequence
  Description of Artificial Sequence: Synthetic oligonucleotide
  Antisense strand to SEQ ID NO: 2090782
uaauuuagcauauuuccag

SEQ ID NO: 2090784 - RNA, 19 nt, Artificial Sequence
  Description of Artificial Sequence: Synthetic oligonucleotide
  Sense strand starting at position 3737 of SEQ ID NO: 1882044
aaauuaggguucugauuag

SEQ ID NO: 2090785 - RNA, 19 nt, Artificial Sequence
  Description of Artificial Sequence: Synthetic oligonucleotide
  Antisense strand to SEQ ID NO: 2090784
cuaaucagaacccuaauuu

SEQ ID NO: 2090786 - RNA, 19 nt, Artificial Sequence
  Description of Artificial Sequence: Synthetic oligonucleotide
  Sense strand starting at position 3741 of SEQ ID NO: 1882044
uaggguucugauuagaguu

SEQ ID NO: 2090787 - RNA, 19 nt, Artificial Sequence
  Description of Artificial Sequence: Synthetic oligonucleotide
  Antisense strand to SEQ ID NO: 2090786
aacucuaaucagaacccua

SEQ ID NO: 2090788 - RNA, 19 nt, Artificial Sequence
  Description of Artificial Sequence: Synthetic oligonucleotide
  Sense strand starting at position 3743 of SEQ ID NO: 1882044
ggguucugauuagaguuaa

SEQ ID NO: 2090789 - RNA, 19 nt, Artificial Sequence
  Description of Artificial Sequence: Synthetic oligonucleotide
  Antisense strand to SEQ ID NO: 2090788
uuaacucuaaucagaaccc

SEQ ID NO: 2090790 - RNA, 19 nt, Artificial Sequence
  Description of Artificial Sequence: Synthetic oligonucleotide
  Sense strand starting at position 3763 of SEQ ID NO: 1882044
ggaauuaacuugggugaga

SEQ ID NO: 2090791 - RNA, 19 nt, Artificial Sequence
  Description of Artificial Sequence: Synthetic oligonucleotide
  Antisense strand to SEQ ID NO: 2090790
ucucacccaaguuaauucc

SEQ ID NO: 2090792 - RNA, 19 nt, Artificial Sequence
  Description of Artificial Sequence: Synthetic oligonucleotide
  Sense strand starting at position 3875 of SEQ ID NO: 1882044
augggcuugaucugggaau

SEQ ID NO: 2090793 - RNA, 19 nt, Artificial Sequence
  Description of Artificial Sequence: Synthetic oligonucleotide
  Antisense strand to SEQ ID NO: 2090792
auucccagaucaagcccau

SEQ ID NO: 2090794 - RNA, 19 nt, Artificial Sequence
  Description of Artificial Sequence: Synthetic oligonucleotide
  Sense strand starting at position 3876 of SEQ ID NO: 1882044
ugggcuugaucugggaaug

SEQ ID NO: 2090795 - RNA, 19 nt, Artificial Sequence
  Description of Artificial Sequence: Synthetic oligonucleotide
  Antisense strand to SEQ ID NO: 2090794
cauucccagaucaagccca

SEQ ID NO: 2090796 - RNA, 19 nt, Artificial Sequence
  Description of Artificial Sequence: Synthetic oligonucleotide
  Sense strand starting at position 3877 of SEQ ID NO: 1882044
gggcuugaucugggaaugu

SEQ ID NO: 2090797 - RNA, 19 nt, Artificial Sequence
  Description of Artificial Sequence: Synthetic oligonucleotide
  Antisense strand to SEQ ID NO: 2090796
acauucccagaucaagccc

SEQ ID NO: 2090798 - RNA, 19 nt, Artificial Sequence
  Description of Artificial Sequence: Synthetic oligonucleotide
  Sense strand starting at position 3886 of SEQ ID NO: 1882044
cugggaaugugcccuuuau

SEQ ID NO: 2090799 - RNA, 19 nt, Artificial Sequence
  Description of Artificial Sequence: Synthetic oligonucleotide
  Antisense strand to SEQ ID NO: 2090798
auaaagggcacauucccag

SEQ ID NO: 2090800 - RNA, 19 nt, Artificial Sequence
  Description of Artificial Sequence: Synthetic oligonucleotide
  Sense strand starting at position 3890 of SEQ ID NO: 1882044
gaaugugcccuuuauuaga

SEQ ID NO: 2090801 - RNA, 19 nt, Artificial Sequence
  Description of Artificial Sequence: Synthetic oligonucleotide
  Antisense strand to SEQ ID NO: 2090800
ucuaauaaagggcacauuc

SEQ ID NO: 2090802 - RNA, 19 nt, Artificial Sequence
  Description of Artificial Sequence: Synthetic oligonucleotide
  Sense strand starting at position 3901 of SEQ ID NO: 1882044
uuauuagacguguaaccuu

SEQ ID NO: 2090803 - RNA, 19 nt, Artificial Sequence
  Description of Artificial Sequence: Synthetic oligonucleotide
  Antisense strand to SEQ ID NO: 2090802
aagguuacacgucuaauaa

SEQ ID NO: 2090804 - RNA, 19 nt, Artificial Sequence
  Description of Artificial Sequence: Synthetic oligonucleotide
  Sense strand starting at position 3934 of SEQ ID NO: 1882044
cugaauaggucuucgauuc

SEQ ID NO: 2090805 - RNA, 19 nt, Artificial Sequence
  Description of Artificial Sequence: Synthetic oligonucleotide
  Antisense strand to SEQ ID NO: 2090804
gaaucgaagaccuauucag

SEQ ID NO: 2090806 - RNA, 19 nt, Artificial Sequence
  Description of Artificial Sequence: Synthetic oligonucleotide
  Sense strand starting at position 3942 of SEQ ID NO: 1882044
gucuucgauuccucaugga

SEQ ID NO: 2090807 - RNA, 19 nt, Artificial Sequence
  Description of Artificial Sequence: Synthetic oligonucleotide
  Antisense strand to SEQ ID NO: 2090806
uccaugaggaaucgaagac

SEQ ID NO: 2090808 - RNA, 19 nt, Artificial Sequence
  Description of Artificial Sequence: Synthetic oligonucleotide
  Sense strand starting at position 3945 of SEQ ID NO: 1882044
uucgauuccucauggaaug

SEQ ID NO: 2090809 - RNA, 19 nt, Artificial Sequence
  Description of Artificial Sequence: Synthetic oligonucleotide
  Antisense strand to SEQ ID NO: 2090808
cauuccaugaggaaucgaa

SEQ ID NO: 2090810 - RNA, 19 nt, Artificial Sequence
  Description of Artificial Sequence: Synthetic oligonucleotide
  Sense strand starting at position 3946 of SEQ ID NO: 1882044
ucgauuccucauggaauga

SEQ ID NO: 2090811 - RNA, 19 nt, Artificial Sequence
  Description of Artificial Sequence: Synthetic oligonucleotide
  Antisense strand to SEQ ID NO: 2090810
ucauuccaugaggaaucga

SEQ ID NO: 2090812 - RNA, 19 nt, Artificial Sequence
  Description of Artificial Sequence: Synthetic oligonucleotide
  Sense strand starting at position 3950 of SEQ ID NO: 1882044
uuccucauggaaugaauau

SEQ ID NO: 2090813 - RNA, 19 nt, Artificial Sequence
  Description of Artificial Sequence: Synthetic oligonucleotide
  Antisense strand to SEQ ID NO: 2090812
auauucauuccaugaggaa

SEQ ID NO: 2090814 - RNA, 19 nt, Artificial Sequence
  Description of Artificial Sequence: Synthetic oligonucleotide
  Sense strand starting at position 3973 of SEQ ID NO: 1882044
agaucugaugaaugcaauu

SEQ ID NO: 2090815 - RNA, 19 nt, Artificial Sequence
  Description of Artificial Sequence: Synthetic oligonucleotide
  Antisense strand to SEQ ID NO: 2090814
aauugcauucaucagaucu

SEQ ID NO: 2090816 - RNA, 19 nt, Artificial Sequence
  Description of Artificial Sequence: Synthetic oligonucleotide
  Sense strand starting at position 24 of SEQ ID NO: 1882045
cuacuucccgcagagugaa

SEQ ID NO: 2090817 - RNA, 19 nt, Artificial Sequence
  Description of Artificial Sequence: Synthetic oligonucleotide
  Antisense strand to SEQ ID NO: 2090816
uucacucugcgggaaguag

SEQ ID NO: 2090818 - RNA, 19 nt, Artificial Sequence
  Description of Artificial Sequence: Synthetic oligonucleotide
  Sense strand starting at position 43 of SEQ ID NO: 1882045
gccugaacucuuuaauagg

SEQ ID NO: 2090819 - RNA, 19 nt, Artificial Sequence
  Description of Artificial Sequence: Synthetic oligonucleotide
  Antisense strand to SEQ ID NO: 2090818
ccuauuaaagaguucaggc

SEQ ID NO: 2090820 - RNA, 19 nt, Artificial Sequence
  Description of Artificial Sequence: Synthetic oligonucleotide
  Sense strand starting at position 150 of SEQ ID NO: 1882045
ggacuuaacucauugugaa

SEQ ID NO: 2090821 - RNA, 19 nt, Artificial Sequence
  Description of Artificial Sequence: Synthetic oligonucleotide
  Antisense strand to SEQ ID NO: 2090820
uucacaaugaguuaagucc

SEQ ID NO: 2090822 - RNA, 19 nt, Artificial Sequence
  Description of Artificial Sequence: Synthetic oligonucleotide
  Sense strand starting at position 170 of SEQ ID NO: 1882045
guacuaagccuugauguau

SEQ ID NO: 2090823 - RNA, 19 nt, Artificial Sequence
  Description of Artificial Sequence: Synthetic oligonucleotide
  Antisense strand to SEQ ID NO: 2090822
auacaucaaggcuuaguac

SEQ ID NO: 2090824 - RNA, 19 nt, Artificial Sequence
  Description of Artificial Sequence: Synthetic oligonucleotide
  Sense strand starting at position 179 of SEQ ID NO: 1882045
cuugauguaucuuuaggaa

SEQ ID NO: 2090825 - RNA, 19 nt, Artificial Sequence
  Description of Artificial Sequence: Synthetic oligonucleotide
  Antisense strand to SEQ ID NO: 2090824
uuccuaaagauacaucaag

SEQ ID NO: 2090826 - RNA, 19 nt, Artificial Sequence
  Description of Artificial Sequence: Synthetic oligonucleotide
  Sense strand starting at position 240 of SEQ ID NO: 1882045
uagcuuagugguuaaccua

SEQ ID NO: 2090827 - RNA, 19 nt, Artificial Sequence
  Description of Artificial Sequence: Synthetic oligonucleotide
  Antisense strand to SEQ ID NO: 2090826
uagguuaaccacuaagcua

SEQ ID NO: 2090828 - RNA, 19 nt, Artificial Sequence
  Description of Artificial Sequence: Synthetic oligonucleotide
  Sense strand starting at position 243 of SEQ ID NO: 1882045
cuuagugguuaaccuacau

SEQ ID NO: 2090829 - RNA, 19 nt, Artificial Sequence
  Description of Artificial Sequence: Synthetic oligonucleotide
  Antisense strand to SEQ ID NO: 2090828
auguagguuaaccacuaag

SEQ ID NO: 2090830 - RNA, 19 nt, Artificial Sequence
  Description of Artificial Sequence: Synthetic oligonucleotide
  Sense strand starting at position 462 of SEQ ID NO: 1882045
uaggauggauccgcaacua

SEQ ID NO: 2090831 - RNA, 19 nt, Artificial Sequence
  Description of Artificial Sequence: Synthetic oligonucleotide
  Antisense strand to SEQ ID NO: 2090830
uaguugcggauccauccua

SEQ ID NO: 2090832 - RNA, 19 nt, Artificial Sequence
  Description of Artificial Sequence: Synthetic oligonucleotide
  Sense strand starting at position 503 of SEQ ID NO: 1882045
uaggguucugauuagaguu

SEQ ID NO: 2090833 - RNA, 19 nt, Artificial Sequence
  Description of Artificial Sequence: Synthetic oligonucleotide
  Antisense strand to SEQ ID NO: 2090832
aacucuaaucagaacccua

SEQ ID NO: 2090834 - RNA, 19 nt, Artificial Sequence
  Description of Artificial Sequence: Synthetic oligonucleotide
  Sense strand starting at position 637 of SEQ ID NO: 1882045
augggcuugaucugggaau

SEQ ID NO: 2090835 - RNA, 19 nt, Artificial Sequence
  Description of Artificial Sequence: Synthetic oligonucleotide
  Antisense strand to SEQ ID NO: 2090834
auucccagaucaagcccau

SEQ ID NO: 2090836 - RNA, 19 nt, Artificial Sequence
  Description of Artificial Sequence: Synthetic oligonucleotide
  Sense strand starting at position 639 of SEQ ID NO: 1882045
gggcuugaucugggaaugu

SEQ ID NO: 2090837 - RNA, 19 nt, Artificial Sequence
  Description of Artificial Sequence: Synthetic oligonucleotide
  Antisense strand to SEQ ID NO: 2090836
acauucccagaucaagccc

SEQ ID NO: 2090838 - RNA, 19 nt, Artificial Sequence
  Description of Artificial Sequence: Synthetic oligonucleotide
  Sense strand starting at position 652 of SEQ ID NO: 1882045
gaaugugcccuuuauuaga

SEQ ID NO: 2090839 - RNA, 19 nt, Artificial Sequence
  Description of Artificial Sequence: Synthetic oligonucleotide
  Antisense strand to SEQ ID NO: 2090838
ucuaauaaagggcacauuc

SEQ ID NO: 2090840 - RNA, 19 nt, Artificial Sequence
  Description of Artificial Sequence: Synthetic oligonucleotide
  Sense strand starting at position 663 of SEQ ID NO: 1882045
uuauuagacguguaaccuu

SEQ ID NO: 2090841 - RNA, 19 nt, Artificial Sequence
  Description of Artificial Sequence: Synthetic oligonucleotide
  Antisense strand to SEQ ID NO: 2090840
aagguuacacgucuaauaa

SEQ ID NO: 2090842 - RNA, 19 nt, Artificial Sequence
  Description of Artificial Sequence: Synthetic oligonucleotide
  Sense strand starting at position 708 of SEQ ID NO: 1882045
ucgauuccucauggaauga

SEQ ID NO: 2090843 - RNA, 19 nt, Artificial Sequence
  Description of Artificial Sequence: Synthetic oligonucleotide
  Antisense strand to SEQ ID NO: 2090842
ucauuccaugaggaaucga

SEQ ID NO: 2090844 - RNA, 19 nt, Artificial Sequence
  Description of Artificial Sequence: Synthetic oligonucleotide
  Sense strand starting at position 712 of SEQ ID NO: 1882045
uuccucauggaaugaauau

SEQ ID NO: 2090845 - RNA, 19 nt, Artificial Sequence
  Description of Artificial Sequence: Synthetic oligonucleotide
  Antisense strand to SEQ ID NO: 2090844
auauucauuccaugaggaa

SEQ ID NO: 2090846 - RNA, 19 nt, Artificial Sequence
  Description of Artificial Sequence: Synthetic oligonucleotide
  Sense strand starting at position 735 of SEQ ID NO: 1882045
agaucugaugaaugcaauu

SEQ ID NO: 2090847 - RNA, 19 nt, Artificial Sequence
  Description of Artificial Sequence: Synthetic oligonucleotide
  Antisense strand to SEQ ID NO: 2090846
aauugcauucaucagaucu

SEQ ID NO: 2090848 - RNA, 19 nt, Artificial Sequence
  Description of Artificial Sequence: Synthetic oligonucleotide
  Sense strand starting at position 752 of SEQ ID NO: 1882045
uuagacagugccugaaaca

SEQ ID NO: 2090849 - RNA, 19 nt, Artificial Sequence
  Description of Artificial Sequence: Synthetic oligonucleotide
  Antisense strand to SEQ ID NO: 2090848
uguuucaggcacugucuaa

SEQ ID NO: 2090850 - RNA, 19 nt, Artificial Sequence
  Description of Artificial Sequence: Synthetic oligonucleotide
  Sense strand starting at position 763 of SEQ ID NO: 1882045
cugaaacaguagucuuaag

SEQ ID NO: 2090851 - RNA, 19 nt, Artificial Sequence
  Description of Artificial Sequence: Synthetic oligonucleotide
  Antisense strand to SEQ ID NO: 2090850
cuuaagacuacuguuucag

SEQ ID NO: 2090852 - RNA, 19 nt, Artificial Sequence
  Description of Artificial Sequence: Synthetic oligonucleotide
  Sense strand starting at position 770 of SEQ ID NO: 1882045
aguagucuuaaguagguau

SEQ ID NO: 2090853 - RNA, 19 nt, Artificial Sequence
  Description of Artificial Sequence: Synthetic oligonucleotide
  Antisense strand to SEQ ID NO: 2090852
auaccuacuuaagacuacu

SEQ ID NO: 2090854 - RNA, 19 nt, Artificial Sequence
  Description of Artificial Sequence: Synthetic oligonucleotide
  Sense strand starting at position 892 of SEQ ID NO: 1882045
aagugaaauugccuagacu

SEQ ID NO: 2090855 - RNA, 19 nt, Artificial Sequence
  Description of Artificial Sequence: Synthetic oligonucleotide
  Antisense strand to SEQ ID NO: 2090854
agucuaggcaauuucacuu

SEQ ID NO: 2090856 - RNA, 19 nt, Artificial Sequence
  Description of Artificial Sequence: Synthetic oligonucleotide
  Sense strand starting at position 893 of SEQ ID NO: 1882045
agugaaauugccuagacuc

SEQ ID NO: 2090857 - RNA, 19 nt, Artificial Sequence
  Description of Artificial Sequence: Synthetic oligonucleotide
  Antisense strand to SEQ ID NO: 2090856
gagucuaggcaauuucacu

SEQ ID NO: 2090858 - RNA, 19 nt, Artificial Sequence
  Description of Artificial Sequence: Synthetic oligonucleotide
  Sense strand starting at position 1327 of SEQ ID NO: 1882045
acuauuagaaggcgauaua

SEQ ID NO: 2090859 - RNA, 19 nt, Artificial Sequence
  Description of Artificial Sequence: Synthetic oligonucleotide
  Antisense strand to SEQ ID NO: 2090858
uauaucgccuucuaauagu

SEQ ID NO: 2090860 - RNA, 19 nt, Artificial Sequence
  Description of Artificial Sequence: Synthetic oligonucleotide
  Sense strand starting at position 1330 of SEQ ID NO: 1882045
auuagaaggcgauauaguu

SEQ ID NO: 2090861 - RNA, 19 nt, Artificial Sequence
  Description of Artificial Sequence: Synthetic oligonucleotide
  Antisense strand to SEQ ID NO: 2090860
aacuauaucgccuucuaau

SEQ ID NO: 2090862 - RNA, 19 nt, Artificial Sequence
  Description of Artificial Sequence: Synthetic oligonucleotide
  Sense strand starting at position 1336 of SEQ ID NO: 1882045
aggcgauauaguuauuaug

SEQ ID NO: 2090863 - RNA, 19 nt, Artificial Sequence
  Description of Artificial Sequence: Synthetic oligonucleotide
  Antisense strand to SEQ ID NO: 2090862
cauaauaacuauaucgccu

SEQ ID NO: 2090864 - RNA, 19 nt, Artificial Sequence
  Description of Artificial Sequence: Synthetic oligonucleotide
  Sense strand starting at position 1356 of SEQ ID NO: 1882045
ccaaguucugcggaaacau

SEQ ID NO: 2090865 - RNA, 19 nt, Artificial Sequence
  Description of Artificial Sequence: Synthetic oligonucleotide
  Antisense strand to SEQ ID NO: 2090864
auguuuccgcagaacuugg

SEQ ID NO: 2090866 - RNA, 19 nt, Artificial Sequence
  Description of Artificial Sequence: Synthetic oligonucleotide
  Sense strand starting at position 2473 of SEQ ID NO: 1882045
cgacauaucugacauuuga

SEQ ID NO: 2090867 - RNA, 19 nt, Artificial Sequence
  Description of Artificial Sequence: Synthetic oligonucleotide
  Antisense strand to SEQ ID NO: 2090866
ucaaaugucagauaugucg

SEQ ID NO: 2090868 - RNA, 19 nt, Artificial Sequence
  Description of Artificial Sequence: Synthetic oligonucleotide
  Sense strand starting at position 2639 of SEQ ID NO: 1882045
cuacuaauuuguguugucu

SEQ ID NO: 2090869 - RNA, 19 nt, Artificial Sequence
  Description of Artificial Sequence: Synthetic oligonucleotide
  Antisense strand to SEQ ID NO: 2090868
agacaacacaaauuaguag

SEQ ID NO: 2090870 - RNA, 19 nt, Artificial Sequence
  Description of Artificial Sequence: Synthetic oligonucleotide
  Sense strand starting at position 2643 of SEQ ID NO: 1882045
uaauuuguguugucucgga

SEQ ID NO: 2090871 - RNA, 19 nt, Artificial Sequence
  Description of Artificial Sequence: Synthetic oligonucleotide
  Antisense strand to SEQ ID NO: 2090870
uccgagacaacacaaauua

SEQ ID NO: 2090872 - RNA, 19 nt, Artificial Sequence
  Description of Artificial Sequence: Synthetic oligonucleotide
  Sense strand starting at position 2651 of SEQ ID NO: 1882045
guugucucggaauauuauc

SEQ ID NO: 2090873 - RNA, 19 nt, Artificial Sequence
  Description of Artificial Sequence: Synthetic oligonucleotide
  Antisense strand to SEQ ID NO: 2090872
gauaauauuccgagacaac

SEQ ID NO: 2090874 - RNA, 19 nt, Artificial Sequence
  Description of Artificial Sequence: Synthetic oligonucleotide
  Sense strand starting at position 2656 of SEQ ID NO: 1882045
cucggaauauuaucuaauc

SEQ ID NO: 2090875 - RNA, 19 nt, Artificial Sequence
  Description of Artificial Sequence: Synthetic oligonucleotide
  Antisense strand to SEQ ID NO: 2090874
gauuagauaauauuccgag

SEQ ID NO: 2090876 - RNA, 19 nt, Artificial Sequence
  Description of Artificial Sequence: Synthetic oligonucleotide
  Sense strand starting at position 2856 of SEQ ID NO: 1882045
agagaucaaugucccugau

SEQ ID NO: 2090877 - RNA, 19 nt, Artificial Sequence
  Description of Artificial Sequence: Synthetic oligonucleotide
  Antisense strand to SEQ ID NO: 2090876
aucagggacauugaucucu

SEQ ID NO: 2090878 - RNA, 19 nt, Artificial Sequence
  Description of Artificial Sequence: Synthetic oligonucleotide
  Sense strand starting at position 2858 of SEQ ID NO: 1882045
agaucaaugucccugaugu

SEQ ID NO: 2090879 - RNA, 19 nt, Artificial Sequence
  Description of Artificial Sequence: Synthetic oligonucleotide
  Antisense strand to SEQ ID NO: 2090878
acaucagggacauugaucu

SEQ ID NO: 2090880 - RNA, 19 nt, Artificial Sequence
  Description of Artificial Sequence: Synthetic oligonucleotide
  Sense strand starting at position 3032 of SEQ ID NO: 1882045
gguacuguugagggaaagu

SEQ ID NO: 2090881 - RNA, 19 nt, Artificial Sequence
  Description of Artificial Sequence: Synthetic oligonucleotide
  Antisense strand to SEQ ID NO: 2090880
acuuucccucaacaguacc

SEQ ID NO: 2090882 - RNA, 19 nt, Artificial Sequence
  Description of Artificial Sequence: Synthetic oligonucleotide
  Sense strand starting at position 3187 of SEQ ID NO: 1882045
accauaguucagggugaga

SEQ ID NO: 2090883 - RNA, 19 nt, Artificial Sequence
  Description of Artificial Sequence: Synthetic oligonucleotide
  Antisense strand to SEQ ID NO: 2090882
ucucacccugaacuauggu

SEQ ID NO: 2090884 - RNA, 19 nt, Artificial Sequence
  Description of Artificial Sequence: Synthetic oligonucleotide
  Sense strand starting at position 3371 of SEQ ID NO: 1882045
agaacaacugcuugauauu

SEQ ID NO: 2090885 - RNA, 19 nt, Artificial Sequence
  Description of Artificial Sequence: Synthetic oligonucleotide
  Antisense strand to SEQ ID NO: 2090884
aauaucaagcaguuguucu

SEQ ID NO: 2090886 - RNA, 19 nt, Artificial Sequence
  Description of Artificial Sequence: Synthetic oligonucleotide
  Sense strand starting at position 3381 of SEQ ID NO: 1882045
cuugauauucuacagcagu

SEQ ID NO: 2090887 - RNA, 19 nt, Artificial Sequence
  Description of Artificial Sequence: Synthetic oligonucleotide
  Antisense strand to SEQ ID NO: 2090886
acugcuguagaauaucaag

SEQ ID NO: 2090888 - RNA, 19 nt, Artificial Sequence
  Description of Artificial Sequence: Synthetic oligonucleotide
  Sense strand starting at position 3405 of SEQ ID NO: 1882045
agguuucugaaguggaaga

SEQ ID NO: 2090889 - RNA, 19 nt, Artificial Sequence
  Description of Artificial Sequence: Synthetic oligonucleotide
  Antisense strand to SEQ ID NO: 2090888
ucuuccacuucagaaaccu

SEQ ID NO: 2090890 - RNA, 19 nt, Artificial Sequence
  Description of Artificial Sequence: Synthetic oligonucleotide
  Sense strand starting at position 3406 of SEQ ID NO: 1882045
gguuucugaaguggaagaa

SEQ ID NO: 2090891 - RNA, 19 nt, Artificial Sequence
  Description of Artificial Sequence: Synthetic oligonucleotide
  Antisense strand to SEQ ID NO: 2090890
uucuuccacuucagaaacc

SEQ ID NO: 2090892 - RNA, 19 nt, Artificial Sequence
  Description of Artificial Sequence: Synthetic oligonucleotide
  Sense strand starting at position 3721 of SEQ ID NO: 1882045
ggaagaauuuaccacacac

SEQ ID NO: 2090893 - RNA, 19 nt, Artificial Sequence
  Description of Artificial Sequence: Synthetic oligonucleotide
  Antisense strand to SEQ ID NO: 2090892
gugugugguaaauucuucc

SEQ ID NO: 2090894 - RNA, 19 nt, Artificial Sequence
  Description of Artificial Sequence: Synthetic oligonucleotide
  Sense strand starting at position 3975 of SEQ ID NO: 1882045
ccagaucuugcaggaacuu

SEQ ID NO: 2090895 - RNA, 19 nt, Artificial Sequence
  Description of Artificial Sequence: Synthetic oligonucleotide
  Antisense strand to SEQ ID NO: 2090894
aaguuccugcaagaucugg

SEQ ID NO: 2090896 - RNA, 19 nt, Artificial Sequence
  Description of Artificial Sequence: Synthetic oligonucleotide
  Sense strand starting at position 14 of SEQ ID NO: 1882046
auggaaauagucuaguggu

SEQ ID NO: 2090897 - RNA, 19 nt, Artificial Sequence
  Description of Artificial Sequence: Synthetic oligonucleotide
  Antisense strand to SEQ ID NO: 2090896
accacuagacuauuuccau

SEQ ID NO: 2090898 - RNA, 19 nt, Artificial Sequence
  Description of Artificial Sequence: Synthetic oligonucleotide
  Sense strand starting at position 27 of SEQ ID NO: 1882046
aguggugucuccuuauaaa

SEQ ID NO: 2090899 - RNA, 19 nt, Artificial Sequence
  Description of Artificial Sequence: Synthetic oligonucleotide
  Antisense strand to SEQ ID NO: 2090898
uuuauaaggagacaccacu

SEQ ID NO: 2090900 - RNA, 19 nt, Artificial Sequence
  Description of Artificial Sequence: Synthetic oligonucleotide
  Sense strand starting at position 64 of SEQ ID NO: 1882046
cugugaucagcucagauua

SEQ ID NO: 2090901 - RNA, 19 nt, Artificial Sequence
  Description of Artificial Sequence: Synthetic oligonucleotide
  Antisense strand to SEQ ID NO: 2090900
uaaucugagcugaucacag

SEQ ID NO: 2090902 - RNA, 19 nt, Artificial Sequence
  Description of Artificial Sequence: Synthetic oligonucleotide
  Sense strand starting at position 591 of SEQ ID NO: 1882046
ugggaaauccugugucucu

SEQ ID NO: 2090903 - RNA, 19 nt, Artificial Sequence
  Description of Artificial Sequence: Synthetic oligonucleotide
  Antisense strand to SEQ ID NO: 2090902
agagacacaggauuuccca

SEQ ID NO: 2090904 - RNA, 19 nt, Artificial Sequence
  Description of Artificial Sequence: Synthetic oligonucleotide
  Sense strand starting at position 592 of SEQ ID NO: 1882046
gggaaauccugugucucua

SEQ ID NO: 2090905 - RNA, 19 nt, Artificial Sequence
  Description of Artificial Sequence: Synthetic oligonucleotide
  Antisense strand to SEQ ID NO: 2090904
uagagacacaggauuuccc

SEQ ID NO: 2090906 - RNA, 19 nt, Artificial Sequence
  Description of Artificial Sequence: Synthetic oligonucleotide
  Sense strand starting at position 756 of SEQ ID NO: 1882046
uggcuauaaucauuucugu

SEQ ID NO: 2090907 - RNA, 19 nt, Artificial Sequence
  Description of Artificial Sequence: Synthetic oligonucleotide
  Antisense strand to SEQ ID NO: 2090906
acagaaaugauuauagcca

SEQ ID NO: 2090908 - RNA, 19 nt, Artificial Sequence
  Description of Artificial Sequence: Synthetic oligonucleotide
  Sense strand starting at position 852 of SEQ ID NO: 1882046
auccaagaguaagcuaaua

SEQ ID NO: 2090909 - RNA, 19 nt, Artificial Sequence
  Description of Artificial Sequence: Synthetic oligonucleotide
  Antisense strand to SEQ ID NO: 2090908
uauuagcuuacucuuggau

SEQ ID NO: 2090910 - RNA, 19 nt, Artificial Sequence
  Description of Artificial Sequence: Synthetic oligonucleotide
  Sense strand starting at position 966 of SEQ ID NO: 1882046
aaguuugaugcauaaagcu

SEQ ID NO: 2090911 - RNA, 19 nt, Artificial Sequence
  Description of Artificial Sequence: Synthetic oligonucleotide
  Antisense strand to SEQ ID NO: 2090910
agcuuuaugcaucaaacuu

SEQ ID NO: 2090912 - RNA, 19 nt, Artificial Sequence
  Description of Artificial Sequence: Synthetic oligonucleotide
  Sense strand starting at position 984 of SEQ ID NO: 1882046
uauugaaaucuaugugagc

SEQ ID NO: 2090913 - RNA, 19 nt, Artificial Sequence
  Description of Artificial Sequence: Synthetic oligonucleotide
  Antisense strand to SEQ ID NO: 2090912
gcucacauagauuucaaua

SEQ ID NO: 2090914 - RNA, 19 nt, Artificial Sequence
  Description of Artificial Sequence: Synthetic oligonucleotide
  Sense strand starting at position 985 of SEQ ID NO: 1882046
auugaaaucuaugugagcu

SEQ ID NO: 2090915 - RNA, 19 nt, Artificial Sequence
  Description of Artificial Sequence: Synthetic oligonucleotide
  Antisense strand to SEQ ID NO: 2090914
agcucacauagauuucaau

SEQ ID NO: 2090916 - RNA, 19 nt, Artificial Sequence
  Description of Artificial Sequence: Synthetic oligonucleotide
  Sense strand starting at position 989 of SEQ ID NO: 1882046
aaaucuaugugagcuuaag

SEQ ID NO: 2090917 - RNA, 19 nt, Artificial Sequence
  Description of Artificial Sequence: Synthetic oligonucleotide
  Antisense strand to SEQ ID NO: 2090916
cuuaagcucacauagauuu

SEQ ID NO: 2090918 - RNA, 19 nt, Artificial Sequence
  Description of Artificial Sequence: Synthetic oligonucleotide
  Sense strand starting at position 1005 of SEQ ID NO: 1882046
aagugucuuucccugauga

SEQ ID NO: 2090919 - RNA, 19 nt, Artificial Sequence
  Description of Artificial Sequence: Synthetic oligonucleotide
  Antisense strand to SEQ ID NO: 2090918
ucaucagggaaagacacuu

SEQ ID NO: 2090920 - RNA, 19 nt, Artificial Sequence
  Description of Artificial Sequence: Synthetic oligonucleotide
  Sense strand starting at position 1006 of SEQ ID NO: 1882046
agugucuuucccugaugaa

SEQ ID NO: 2090921 - RNA, 19 nt, Artificial Sequence
  Description of Artificial Sequence: Synthetic oligonucleotide
  Antisense strand to SEQ ID NO: 2090920
uucaucagggaaagacacu

SEQ ID NO: 2090922 - RNA, 19 nt, Artificial Sequence
  Description of Artificial Sequence: Synthetic oligonucleotide
  Sense strand starting at position 1033 of SEQ ID NO: 1882046
aagacaauugccuguguua

SEQ ID NO: 2090923 - RNA, 19 nt, Artificial Sequence
  Description of Artificial Sequence: Synthetic oligonucleotide
  Antisense strand to SEQ ID NO: 2090922
uaacacaggcaauugucuu

SEQ ID NO: 2090924 - RNA, 19 nt, Artificial Sequence
  Description of Artificial Sequence: Synthetic oligonucleotide
  Sense strand starting at position 1072 of SEQ ID NO: 1882046
ucagaacugucaguuucua

SEQ ID NO: 2090925 - RNA, 19 nt, Artificial Sequence
  Description of Artificial Sequence: Synthetic oligonucleotide
  Antisense strand to SEQ ID NO: 2090924
uagaaacugacaguucuga

SEQ ID NO: 2090926 - RNA, 19 nt, Artificial Sequence
  Description of Artificial Sequence: Synthetic oligonucleotide
  Sense strand starting at position 1122 of SEQ ID NO: 1882046
guauuagaggcagagugaa

SEQ ID NO: 2090927 - RNA, 19 nt, Artificial Sequence
  Description of Artificial Sequence: Synthetic oligonucleotide
  Antisense strand to SEQ ID NO: 2090926
uucacucugccucuaauac

SEQ ID NO: 2090928 - RNA, 19 nt, Artificial Sequence
  Description of Artificial Sequence: Synthetic oligonucleotide
  Sense strand starting at position 1462 of SEQ ID NO: 1882046
acagaaugauucuuaguac

SEQ ID NO: 2090929 - RNA, 19 nt, Artificial Sequence
  Description of Artificial Sequence: Synthetic oligonucleotide
  Antisense strand to SEQ ID NO: 2090928
guacuaagaaucauucugu

SEQ ID NO: 2090930 - RNA, 19 nt, Artificial Sequence
  Description of Artificial Sequence: Synthetic oligonucleotide
  Sense strand starting at position 1465 of SEQ ID NO: 1882046
gaaugauucuuaguacaga

SEQ ID NO: 2090931 - RNA, 19 nt, Artificial Sequence
  Description of Artificial Sequence: Synthetic oligonucleotide
  Antisense strand to SEQ ID NO: 2090930
ucuguacuaagaaucauuc

SEQ ID NO: 2090932 - RNA, 19 nt, Artificial Sequence
  Description of Artificial Sequence: Synthetic oligonucleotide
  Sense strand starting at position 1673 of SEQ ID NO: 1882046
cuguuauugucacuagaca

SEQ ID NO: 2090933 - RNA, 19 nt, Artificial Sequence
  Description of Artificial Sequence: Synthetic oligonucleotide
  Antisense strand to SEQ ID NO: 2090932
ugucuagugacaauaacag

SEQ ID NO: 2090934 - RNA, 19 nt, Artificial Sequence
  Description of Artificial Sequence: Synthetic oligonucleotide
  Sense strand starting at position 1674 of SEQ ID NO: 1882046
uguuauugucacuagacaa

SEQ ID NO: 2090935 - RNA, 19 nt, Artificial Sequence
  Description of Artificial Sequence: Synthetic oligonucleotide
  Antisense strand to SEQ ID NO: 2090934
uugucuagugacaauaaca

SEQ ID NO: 2090936 - RNA, 19 nt, Artificial Sequence
  Description of Artificial Sequence: Synthetic oligonucleotide
  Sense strand starting at position 1873 of SEQ ID NO: 1882046
aacagucuuuggguuaaua

SEQ ID NO: 2090937 - RNA, 19 nt, Artificial Sequence
  Description of Artificial Sequence: Synthetic oligonucleotide
  Antisense strand to SEQ ID NO: 2090936
uauuaacccaaagacuguu

SEQ ID NO: 2090938 - RNA, 19 nt, Artificial Sequence
  Description of Artificial Sequence: Synthetic oligonucleotide
  Sense strand starting at position 1875 of SEQ ID NO: 1882046
cagucuuuggguuaauaau

SEQ ID NO: 2090939 - RNA, 19 nt, Artificial Sequence
  Description of Artificial Sequence: Synthetic oligonucleotide
  Antisense strand to SEQ ID NO: 2090938
auuauuaacccaaagacug

SEQ ID NO: 2090940 - RNA, 19 nt, Artificial Sequence
  Description of Artificial Sequence: Synthetic oligonucleotide
  Sense strand starting at position 2414 of SEQ ID NO: 1882046
uauguaucugaauaagugu

SEQ ID NO: 2090941 - RNA, 19 nt, Artificial Sequence
  Description of Artificial Sequence: Synthetic oligonucleotide
  Antisense strand to SEQ ID NO: 2090940
acacuuauucagauacaua

SEQ ID NO: 2090942 - RNA, 19 nt, Artificial Sequence
  Description of Artificial Sequence: Synthetic oligonucleotide
  Sense strand starting at position 2960 of SEQ ID NO: 1882046
uugaaauagugacaaagaa

SEQ ID NO: 2090943 - RNA, 19 nt, Artificial Sequence
  Description of Artificial Sequence: Synthetic oligonucleotide
  Antisense strand to SEQ ID NO: 2090942
uucuuugucacuauuucaa

SEQ ID NO: 2090944 - RNA, 19 nt, Artificial Sequence
  Description of Artificial Sequence: Synthetic oligonucleotide
  Sense strand starting at position 3083 of SEQ ID NO: 1882046
cugacaucucguuacaaug

SEQ ID NO: 2090945 - RNA, 19 nt, Artificial Sequence
  Description of Artificial Sequence: Synthetic oligonucleotide
  Antisense strand to SEQ ID NO: 2090944
cauuguaacgagaugucag

SEQ ID NO: 2090946 - RNA, 19 nt, Artificial Sequence
  Description of Artificial Sequence: Synthetic oligonucleotide
  Sense strand starting at position 3115 of SEQ ID NO: 1882046
auagauuguggagguauau

SEQ ID NO: 2090947 - RNA, 19 nt, Artificial Sequence
  Description of Artificial Sequence: Synthetic oligonucleotide
  Antisense strand to SEQ ID NO: 2090946
auauaccuccacaaucuau

SEQ ID NO: 2090948 - RNA, 19 nt, Artificial Sequence
  Description of Artificial Sequence: Synthetic oligonucleotide
  Sense strand starting at position 3183 of SEQ ID NO: 1882046
guuaauagaguccaaugua

SEQ ID NO: 2090949 - RNA, 19 nt, Artificial Sequence
  Description of Artificial Sequence: Synthetic oligonucleotide
  Antisense strand to SEQ ID NO: 2090948
uacauuggacucuauuaac

SEQ ID NO: 2090950 - RNA, 19 nt, Artificial Sequence
  Description of Artificial Sequence: Synthetic oligonucleotide
  Sense strand starting at position 3186 of SEQ ID NO: 1882046
aauagaguccaauguagga

SEQ ID NO: 2090951 - RNA, 19 nt, Artificial Sequence
  Description of Artificial Sequence: Synthetic oligonucleotide
  Antisense strand to SEQ ID NO: 2090950
uccuacauuggacucuauu

SEQ ID NO: 2090952 - RNA, 19 nt, Artificial Sequence
  Description of Artificial Sequence: Synthetic oligonucleotide
  Sense strand starting at position 3249 of SEQ ID NO: 1882046
ggaggaagacaucagcguu

SEQ ID NO: 2090953 - RNA, 19 nt, Artificial Sequence
  Description of Artificial Sequence: Synthetic oligonucleotide
  Antisense strand to SEQ ID NO: 2090952
aacgcugaugucuuccucc

SEQ ID NO: 2090954 - RNA, 19 nt, Artificial Sequence
  Description of Artificial Sequence: Synthetic oligonucleotide
  Sense strand starting at position 3252 of SEQ ID NO: 1882046
ggaagacaucagcguuaau

SEQ ID NO: 2090955 - RNA, 19 nt, Artificial Sequence
  Description of Artificial Sequence: Synthetic oligonucleotide
  Antisense strand to SEQ ID NO: 2090954
auuaacgcugaugucuucc

SEQ ID NO: 2090956 - RNA, 19 nt, Artificial Sequence
  Description of Artificial Sequence: Synthetic oligonucleotide
  Sense strand starting at position 3328 of SEQ ID NO: 1882046
gccacauaaucugucugaa

SEQ ID NO: 2090957 - RNA, 19 nt, Artificial Sequence
  Description of Artificial Sequence: Synthetic oligonucleotide
  Antisense strand to SEQ ID NO: 2090956
uucagacagauuauguggc

SEQ ID NO: 2090958 - RNA, 19 nt, Artificial Sequence
  Description of Artificial Sequence: Synthetic oligonucleotide
  Sense strand starting at position 3331 of SEQ ID NO: 1882046
acauaaucugucugaagca

SEQ ID NO: 2090959 - RNA, 19 nt, Artificial Sequence
  Description of Artificial Sequence: Synthetic oligonucleotide
  Antisense strand to SEQ ID NO: 2090958
ugcuucagacagauuaugu

SEQ ID NO: 2090960 - RNA, 19 nt, Artificial Sequence
  Description of Artificial Sequence: Synthetic oligonucleotide
  Sense strand starting at position 3378 of SEQ ID NO: 1882046
aguggugacuucuuauuag

SEQ ID NO: 2090961 - RNA, 19 nt, Artificial Sequence
  Description of Artificial Sequence: Synthetic oligonucleotide
  Antisense strand to SEQ ID NO: 2090960
cuaauaagaagucaccacu

SEQ ID NO: 2090962 - RNA, 19 nt, Artificial Sequence
  Description of Artificial Sequence: Synthetic oligonucleotide
  Sense strand starting at position 3392 of SEQ ID NO: 1882046
auuagcuucccuuaugaga

SEQ ID NO: 2090963 - RNA, 19 nt, Artificial Sequence
  Description of Artificial Sequence: Synthetic oligonucleotide
  Antisense strand to SEQ ID NO: 2090962
ucucauaagggaagcuaau

SEQ ID NO: 2090964 - RNA, 19 nt, Artificial Sequence
  Description of Artificial Sequence: Synthetic oligonucleotide
  Sense strand starting at position 3617 of SEQ ID NO: 1882046
cuucucaaacugugauguu

SEQ ID NO: 2090965 - RNA, 19 nt, Artificial Sequence
  Description of Artificial Sequence: Synthetic oligonucleotide
  Antisense strand to SEQ ID NO: 2090964
aacaucacaguuugagaag

SEQ ID NO: 2090966 - RNA, 19 nt, Artificial Sequence
  Description of Artificial Sequence: Synthetic oligonucleotide
  Sense strand starting at position 3669 of SEQ ID NO: 1882046
augaaugugguaggaauau

SEQ ID NO: 2090967 - RNA, 19 nt, Artificial Sequence
  Description of Artificial Sequence: Synthetic oligonucleotide
  Antisense strand to SEQ ID NO: 2090966
auauuccuaccacauucau

SEQ ID NO: 2090968 - RNA, 19 nt, Artificial Sequence
  Description of Artificial Sequence: Synthetic oligonucleotide
  Sense strand starting at position 3815 of SEQ ID NO: 1882046
uauagcaguggcuaugaaa

SEQ ID NO: 2090969 - RNA, 19 nt, Artificial Sequence
  Description of Artificial Sequence: Synthetic oligonucleotide
  Antisense strand to SEQ ID NO: 2090968
uuucauagccacugcuaua

SEQ ID NO: 2090970 - RNA, 19 nt, Artificial Sequence
  Description of Artificial Sequence: Synthetic oligonucleotide
  Sense strand starting at position 3868 of SEQ ID NO: 1882046
gacacugagccauaaaugu

SEQ ID NO: 2090971 - RNA, 19 nt, Artificial Sequence
  Description of Artificial Sequence: Synthetic oligonucleotide
  Antisense strand to SEQ ID NO: 2090970
acauuuauggcucaguguc

SEQ ID NO: 2090972 - RNA, 19 nt, Artificial Sequence
  Description of Artificial Sequence: Synthetic oligonucleotide
  Sense strand starting at position 3942 of SEQ ID NO: 1882046
ggaauuugguugucuaugu

SEQ ID NO: 2090973 - RNA, 19 nt, Artificial Sequence
  Description of Artificial Sequence: Synthetic oligonucleotide
  Antisense strand to SEQ ID NO: 2090972
acauagacaaccaaauucc

SEQ ID NO: 2090974 - RNA, 19 nt, Artificial Sequence
  Description of Artificial Sequence: Synthetic oligonucleotide
  Sense strand starting at position 3976 of SEQ ID NO: 1882046
gaaacaugaugcucacugu

SEQ ID NO: 2090975 - RNA, 19 nt, Artificial Sequence
  Description of Artificial Sequence: Synthetic oligonucleotide
  Antisense strand to SEQ ID NO: 2090974
acagugagcaucauguuuc

SEQ ID NO: 2090976 - RNA, 19 nt, Artificial Sequence
  Description of Artificial Sequence: Synthetic oligonucleotide
  Sense strand starting at position 360 of SEQ ID NO: 1882047
caaccaauugccgaugaga

SEQ ID NO: 2090977 - RNA, 19 nt, Artificial Sequence
  Description of Artificial Sequence: Synthetic oligonucleotide
  Antisense strand to SEQ ID NO: 2090976
ucucaucggcaauugguug

SEQ ID NO: 2090978 - RNA, 19 nt, Artificial Sequence
  Description of Artificial Sequence: Synthetic oligonucleotide
  Sense strand starting at position 362 of SEQ ID NO: 1882047
accaauugccgaugagaaa

SEQ ID NO: 2090979 - RNA, 19 nt, Artificial Sequence
  Description of Artificial Sequence: Synthetic oligonucleotide
  Antisense strand to SEQ ID NO: 2090978
uuucucaucggcaauuggu

SEQ ID NO: 2090980 - RNA, 19 nt, Artificial Sequence
  Description of Artificial Sequence: Synthetic oligonucleotide
  Sense strand starting at position 628 of SEQ ID NO: 1882047
agagcaaagaacuguaugu

SEQ ID NO: 2090981 - RNA, 19 nt, Artificial Sequence
  Description of Artificial Sequence: Synthetic oligonucleotide
  Antisense strand to SEQ ID NO: 2090980
acauacaguucuuugcucu

SEQ ID NO: 2090982 - RNA, 19 nt, Artificial Sequence
  Description of Artificial Sequence: Synthetic oligonucleotide
  Sense strand starting at position 683 of SEQ ID NO: 1882047
ugaauugacuucuccaagu

SEQ ID NO: 2090983 - RNA, 19 nt, Artificial Sequence
  Description of Artificial Sequence: Synthetic oligonucleotide
  Antisense strand to SEQ ID NO: 2090982
acuuggagaagucaauuca

SEQ ID NO: 2090984 - RNA, 19 nt, Artificial Sequence
  Description of Artificial Sequence: Synthetic oligonucleotide
  Sense strand starting at position 712 of SEQ ID NO: 1882047
guaccugucccauauguaa

SEQ ID NO: 2090985 - RNA, 19 nt, Artificial Sequence
  Description of Artificial Sequence: Synthetic oligonucleotide
  Antisense strand to SEQ ID NO: 2090984
uuacauaugggacagguac

SEQ ID NO: 2090986 - RNA, 19 nt, Artificial Sequence
  Description of Artificial Sequence: Synthetic oligonucleotide
  Sense strand starting at position 828 of SEQ ID NO: 1882047
uacugcauuccagaguguu

SEQ ID NO: 2090987 - RNA, 19 nt, Artificial Sequence
  Description of Artificial Sequence: Synthetic oligonucleotide
  Antisense strand to SEQ ID NO: 2090986
aacacucuggaaugcagua

SEQ ID NO: 2090988 - RNA, 19 nt, Artificial Sequence
  Description of Artificial Sequence: Synthetic oligonucleotide
  Sense strand starting at position 834 of SEQ ID NO: 1882047
auuccagaguguucuuaga

SEQ ID NO: 2090989 - RNA, 19 nt, Artificial Sequence
  Description of Artificial Sequence: Synthetic oligonucleotide
  Antisense strand to SEQ ID NO: 2090988
ucuaagaacacucuggaau

SEQ ID NO: 2090990 - RNA, 19 nt, Artificial Sequence
  Description of Artificial Sequence: Synthetic oligonucleotide
  Sense strand starting at position 890 of SEQ ID NO: 1882047
gcauuaucauggcucaaga

SEQ ID NO: 2090991 - RNA, 19 nt, Artificial Sequence
  Description of Artificial Sequence: Synthetic oligonucleotide
  Antisense strand to SEQ ID NO: 2090990
ucuugagccaugauaaugc

SEQ ID NO: 2090992 - RNA, 19 nt, Artificial Sequence
  Description of Artificial Sequence: Synthetic oligonucleotide
  Sense strand starting at position 974 of SEQ ID NO: 1882047
acuccuggaguuugaguaa

SEQ ID NO: 2090993 - RNA, 19 nt, Artificial Sequence
  Description of Artificial Sequence: Synthetic oligonucleotide
  Antisense strand to SEQ ID NO: 2090992
uuacucaaacuccaggagu

SEQ ID NO: 2090994 - RNA, 19 nt, Artificial Sequence
  Description of Artificial Sequence: Synthetic oligonucleotide
  Sense strand starting at position 977 of SEQ ID NO: 1882047
ccuggaguuugaguaaacu

SEQ ID NO: 2090995 - RNA, 19 nt, Artificial Sequence
  Description of Artificial Sequence: Synthetic oligonucleotide
  Antisense strand to SEQ ID NO: 2090994
aguuuacucaaacuccagg

SEQ ID NO: 2090996 - RNA, 19 nt, Artificial Sequence
  Description of Artificial Sequence: Synthetic oligonucleotide
  Sense strand starting at position 987 of SEQ ID NO: 1882047
gaguaaacuccagguucca

SEQ ID NO: 2090997 - RNA, 19 nt, Artificial Sequence
  Description of Artificial Sequence: Synthetic oligonucleotide
  Antisense strand to SEQ ID NO: 2090996
uggaaccuggaguuuacuc

SEQ ID NO: 2090998 - RNA, 19 nt, Artificial Sequence
  Description of Artificial Sequence: Synthetic oligonucleotide
  Sense strand starting at position 1881 of SEQ ID NO: 1882047
accucuauccagcaagguu

SEQ ID NO: 2090999 - RNA, 19 nt, Artificial Sequence
  Description of Artificial Sequence: Synthetic oligonucleotide
  Antisense strand to SEQ ID NO: 2090998
aaccuugcuggauagaggu

SEQ ID NO: 2091000 - RNA, 19 nt, Artificial Sequence
  Description of Artificial Sequence: Synthetic oligonucleotide
  Sense strand starting at position 1946 of SEQ ID NO: 1882047
ccuuuaucacugcaaagag

SEQ ID NO: 2091001 - RNA, 19 nt, Artificial Sequence
  Description of Artificial Sequence: Synthetic oligonucleotide
  Antisense strand to SEQ ID NO: 2091000
cucuuugcagugauaaagg

SEQ ID NO: 2091002 - RNA, 19 nt, Artificial Sequence
  Description of Artificial Sequence: Synthetic oligonucleotide
  Sense strand starting at position 2021 of SEQ ID NO: 1882047
gucuguuaauucuuaucaa

SEQ ID NO: 2091003 - RNA, 19 nt, Artificial Sequence
  Description of Artificial Sequence: Synthetic oligonucleotide
  Antisense strand to SEQ ID NO: 2091002
uugauaagaauuaacagac

SEQ ID NO: 2091004 - RNA, 19 nt, Artificial Sequence
  Description of Artificial Sequence: Synthetic oligonucleotide
  Sense strand starting at position 2024 of SEQ ID NO: 1882047
uguuaauucuuaucaaggu

SEQ ID NO: 2091005 - RNA, 19 nt, Artificial Sequence
  Description of Artificial Sequence: Synthetic oligonucleotide
  Antisense strand to SEQ ID NO: 2091004
accuugauaagaauuaaca

SEQ ID NO: 2091006 - RNA, 19 nt, Artificial Sequence
  Description of Artificial Sequence: Synthetic oligonucleotide
  Sense strand starting at position 2125 of SEQ ID NO: 1882047
accagagaaugucuaaugu

SEQ ID NO: 2091007 - RNA, 19 nt, Artificial Sequence
  Description of Artificial Sequence: Synthetic oligonucleotide
  Antisense strand to SEQ ID NO: 2091006
acauuagacauucucuggu

SEQ ID NO: 2091008 - RNA, 19 nt, Artificial Sequence
  Description of Artificial Sequence: Synthetic oligonucleotide
  Sense strand starting at position 2405 of SEQ ID NO: 1882047
cuugucauaccuugugaga

SEQ ID NO: 2091009 - RNA, 19 nt, Artificial Sequence
  Description of Artificial Sequence: Synthetic oligonucleotide
  Antisense strand to SEQ ID NO: 2091008
ucucacaagguaugacaag

SEQ ID NO: 2091010 - RNA, 19 nt, Artificial Sequence
  Description of Artificial Sequence: Synthetic oligonucleotide
  Sense strand starting at position 2569 of SEQ ID NO: 1882047
acuguaucaccacaguacu

SEQ ID NO: 2091011 - RNA, 19 nt, Artificial Sequence
  Description of Artificial Sequence: Synthetic oligonucleotide
  Antisense strand to SEQ ID NO: 2091010
aguacuguggugauacagu

SEQ ID NO: 2091012 - RNA, 19 nt, Artificial Sequence
  Description of Artificial Sequence: Synthetic oligonucleotide
  Sense strand starting at position 2715 of SEQ ID NO: 1882047
acugaacauuuguaagaua

SEQ ID NO: 2091013 - RNA, 19 nt, Artificial Sequence
  Description of Artificial Sequence: Synthetic oligonucleotide
  Antisense strand to SEQ ID NO: 2091012
uaucuuacaaauguucagu

SEQ ID NO: 2091014 - RNA, 19 nt, Artificial Sequence
  Description of Artificial Sequence: Synthetic oligonucleotide
  Sense strand starting at position 2912 of SEQ ID NO: 1882047
cagagcugucauuaaagcu

SEQ ID NO: 2091015 - RNA, 19 nt, Artificial Sequence
  Description of Artificial Sequence: Synthetic oligonucleotide
  Antisense strand to SEQ ID NO: 2091014
agcuuuaaugacagcucug

SEQ ID NO: 2091016 - RNA, 19 nt, Artificial Sequence
  Description of Artificial Sequence: Synthetic oligonucleotide
  Sense strand starting at position 2968 of SEQ ID NO: 1882047
uuuguauauguugagaucu

SEQ ID NO: 2091017 - RNA, 19 nt, Artificial Sequence
  Description of Artificial Sequence: Synthetic oligonucleotide
  Antisense strand to SEQ ID NO: 2091016
agaucucaacauauacaaa

SEQ ID NO: 2091018 - RNA, 19 nt, Artificial Sequence
  Description of Artificial Sequence: Synthetic oligonucleotide
  Sense strand starting at position 3040 of SEQ ID NO: 1882047
uuacaagauugggucaacu

SEQ ID NO: 2091019 - RNA, 19 nt, Artificial Sequence
  Description of Artificial Sequence: Synthetic oligonucleotide
  Antisense strand to SEQ ID NO: 2091018
aguugacccaaucuuguaa

SEQ ID NO: 2091020 - RNA, 19 nt, Artificial Sequence
  Description of Artificial Sequence: Synthetic oligonucleotide
  Sense strand starting at position 3060 of SEQ ID NO: 1882047
auauaaagcccuggauucu

SEQ ID NO: 2091021 - RNA, 19 nt, Artificial Sequence
  Description of Artificial Sequence: Synthetic oligonucleotide
  Antisense strand to SEQ ID NO: 2091020
agaauccagggcuuuauau

SEQ ID NO: 2091022 - RNA, 19 nt, Artificial Sequence
  Description of Artificial Sequence: Synthetic oligonucleotide
  Sense strand starting at position 3098 of SEQ ID NO: 1882047
uuugauguuggagguuauu

SEQ ID NO: 2091023 - RNA, 19 nt, Artificial Sequence
  Description of Artificial Sequence: Synthetic oligonucleotide
  Antisense strand to SEQ ID NO: 2091022
aauaaccuccaacaucaaa

SEQ ID NO: 2091024 - RNA, 19 nt, Artificial Sequence
  Description of Artificial Sequence: Synthetic oligonucleotide
  Sense strand starting at position 3180 of SEQ ID NO: 1882047
caauuaccuggaugaugua

SEQ ID NO: 2091025 - RNA, 19 nt, Artificial Sequence
  Description of Artificial Sequence: Synthetic oligonucleotide
  Antisense strand to SEQ ID NO: 2091024
uacaucauccagguaauug

SEQ ID NO: 2091026 - RNA, 19 nt, Artificial Sequence
  Description of Artificial Sequence: Synthetic oligonucleotide
  Sense strand starting at position 3189 of SEQ ID NO: 1882047
ggaugauguauugguagaa

SEQ ID NO: 2091027 - RNA, 19 nt, Artificial Sequence
  Description of Artificial Sequence: Synthetic oligonucleotide
  Antisense strand to SEQ ID NO: 2091026
uucuaccaauacaucaucc

SEQ ID NO: 2091028 - RNA, 19 nt, Artificial Sequence
  Description of Artificial Sequence: Synthetic oligonucleotide
  Sense strand starting at position 3190 of SEQ ID NO: 1882047
gaugauguauugguagaau

SEQ ID NO: 2091029 - RNA, 19 nt, Artificial Sequence
  Description of Artificial Sequence: Synthetic oligonucleotide
  Antisense strand to SEQ ID NO: 2091028
auucuaccaauacaucauc

SEQ ID NO: 2091030 - RNA, 19 nt, Artificial Sequence
  Description of Artificial Sequence: Synthetic oligonucleotide
  Sense strand starting at position 3309 of SEQ ID NO: 1882047
aagguuugauguuugauaa

SEQ ID NO: 2091031 - RNA, 19 nt, Artificial Sequence
  Description of Artificial Sequence: Synthetic oligonucleotide
  Antisense strand to SEQ ID NO: 2091030
uuaucaaacaucaaaccuu

SEQ ID NO: 2091032 - RNA, 19 nt, Artificial Sequence
  Description of Artificial Sequence: Synthetic oligonucleotide
  Sense strand starting at position 3310 of SEQ ID NO: 1882047
agguuugauguuugauaau

SEQ ID NO: 2091033 - RNA, 19 nt, Artificial Sequence
  Description of Artificial Sequence: Synthetic oligonucleotide
  Antisense strand to SEQ ID NO: 2091032
auuaucaaacaucaaaccu

SEQ ID NO: 2091034 - RNA, 19 nt, Artificial Sequence
  Description of Artificial Sequence: Synthetic oligonucleotide
  Sense strand starting at position 3376 of SEQ ID NO: 1882047
gggaaacauuggcuguuga

SEQ ID NO: 2091035 - RNA, 19 nt, Artificial Sequence
  Description of Artificial Sequence: Synthetic oligonucleotide
  Antisense strand to SEQ ID NO: 2091034
ucaacagccaauguuuccc

SEQ ID NO: 2091036 - RNA, 19 nt, Artificial Sequence
  Description of Artificial Sequence: Synthetic oligonucleotide
  Sense strand starting at position 3456 of SEQ ID NO: 1882047
ucugcauauuuagaagaaa

SEQ ID NO: 2091037 - RNA, 19 nt, Artificial Sequence
  Description of Artificial Sequence: Synthetic oligonucleotide
  Antisense strand to SEQ ID NO: 2091036
uuucuucuaaauaugcaga

SEQ ID NO: 2091038 - RNA, 19 nt, Artificial Sequence
  Description of Artificial Sequence: Synthetic oligonucleotide
  Sense strand starting at position 3488 of SEQ ID NO: 1882047
aggaaauaugugugcauga

SEQ ID NO: 2091039 - RNA, 19 nt, Artificial Sequence
  Description of Artificial Sequence: Synthetic oligonucleotide
  Antisense strand to SEQ ID NO: 2091038
ucaugcacacauauuuccu

SEQ ID NO: 2091040 - RNA, 19 nt, Artificial Sequence
  Description of Artificial Sequence: Synthetic oligonucleotide
  Sense strand starting at position 3489 of SEQ ID NO: 1882047
ggaaauaugugugcaugau

SEQ ID NO: 2091041 - RNA, 19 nt, Artificial Sequence
  Description of Artificial Sequence: Synthetic oligonucleotide
  Antisense strand to SEQ ID NO: 2091040
aucaugcacacauauuucc

SEQ ID NO: 2091042 - RNA, 19 nt, Artificial Sequence
  Description of Artificial Sequence: Synthetic oligonucleotide
  Sense strand starting at position 3490 of SEQ ID NO: 1882047
gaaauaugugugcaugaug

SEQ ID NO: 2091043 - RNA, 19 nt, Artificial Sequence
  Description of Artificial Sequence: Synthetic oligonucleotide
  Antisense strand to SEQ ID NO: 2091042
caucaugcacacauauuuc

SEQ ID NO: 2091044 - RNA, 19 nt, Artificial Sequence
  Description of Artificial Sequence: Synthetic oligonucleotide
  Sense strand starting at position 3512 of SEQ ID NO: 1882047
auguguaugcaagagagau

SEQ ID NO: 2091045 - RNA, 19 nt, Artificial Sequence
  Description of Artificial Sequence: Synthetic oligonucleotide
  Antisense strand to SEQ ID NO: 2091044
aucucucuugcauacacau

SEQ ID NO: 2091046 - RNA, 19 nt, Artificial Sequence
  Description of Artificial Sequence: Synthetic oligonucleotide
  Sense strand starting at position 3634 of SEQ ID NO: 1882047
uguugauuaaaguggcaua

SEQ ID NO: 2091047 - RNA, 19 nt, Artificial Sequence
  Description of Artificial Sequence: Synthetic oligonucleotide
  Antisense strand to SEQ ID NO: 2091046
uaugccacuuuaaucaaca

SEQ ID NO: 2091048 - RNA, 19 nt, Artificial Sequence
  Description of Artificial Sequence: Synthetic oligonucleotide
  Sense strand starting at position 3635 of SEQ ID NO: 1882047
guugauuaaaguggcauau

SEQ ID NO: 2091049 - RNA, 19 nt, Artificial Sequence
  Description of Artificial Sequence: Synthetic oligonucleotide
  Antisense strand to SEQ ID NO: 2091048
auaugccacuuuaaucaac

SEQ ID NO: 2091050 - RNA, 19 nt, Artificial Sequence
  Description of Artificial Sequence: Synthetic oligonucleotide
  Sense strand starting at position 3764 of SEQ ID NO: 1882047
gagacaacuugagccugau

SEQ ID NO: 2091051 - RNA, 19 nt, Artificial Sequence
  Description of Artificial Sequence: Synthetic oligonucleotide
  Antisense strand to SEQ ID NO: 2091050
aucaggcucaaguugucuc

SEQ ID NO: 2091052 - RNA, 19 nt, Artificial Sequence
  Description of Artificial Sequence: Synthetic oligonucleotide
  Sense strand starting at position 3829 of SEQ ID NO: 1882047
agucaugaaauugguguua

SEQ ID NO: 2091053 - RNA, 19 nt, Artificial Sequence
  Description of Artificial Sequence: Synthetic oligonucleotide
  Antisense strand to SEQ ID NO: 2091052
uaacaccaauuucaugacu

SEQ ID NO: 2091054 - RNA, 19 nt, Artificial Sequence
  Description of Artificial Sequence: Synthetic oligonucleotide
  Sense strand starting at position 3890 of SEQ ID NO: 1882047
cuuccuggucuauaugcau

SEQ ID NO: 2091055 - RNA, 19 nt, Artificial Sequence
  Description of Artificial Sequence: Synthetic oligonucleotide
  Antisense strand to SEQ ID NO: 2091054
augcauauagaccaggaag

SEQ ID NO: 2091056 - RNA, 19 nt, Artificial Sequence
  Description of Artificial Sequence: Synthetic oligonucleotide
  Sense strand starting at position 11 of SEQ ID NO: 1882048
gcucuaagaugcuuaauua

SEQ ID NO: 2091057 - RNA, 19 nt, Artificial Sequence
  Description of Artificial Sequence: Synthetic oligonucleotide
  Antisense strand to SEQ ID NO: 2091056
uaauuaagcaucuuagagc

SEQ ID NO: 2091058 - RNA, 19 nt, Artificial Sequence
  Description of Artificial Sequence: Synthetic oligonucleotide
  Sense strand starting at position 290 of SEQ ID NO: 1882048
cacuguacucaaggcuaga

SEQ ID NO: 2091059 - RNA, 19 nt, Artificial Sequence
  Description of Artificial Sequence: Synthetic oligonucleotide
  Antisense strand to SEQ ID NO: 2091058
ucuagccuugaguacagug

SEQ ID NO: 2091060 - RNA, 19 nt, Artificial Sequence
  Description of Artificial Sequence: Synthetic oligonucleotide
  Sense strand starting at position 293 of SEQ ID NO: 1882048
uguacucaaggcuagauga

SEQ ID NO: 2091061 - RNA, 19 nt, Artificial Sequence
  Description of Artificial Sequence: Synthetic oligonucleotide
  Antisense strand to SEQ ID NO: 2091060
ucaucuagccuugaguaca

SEQ ID NO: 2091062 - RNA, 19 nt, Artificial Sequence
  Description of Artificial Sequence: Synthetic oligonucleotide
  Sense strand starting at position 383 of SEQ ID NO: 1882048
aguauaagucuaggaauga

SEQ ID NO: 2091063 - RNA, 19 nt, Artificial Sequence
  Description of Artificial Sequence: Synthetic oligonucleotide
  Antisense strand to SEQ ID NO: 2091062
ucauuccuagacuuauacu

SEQ ID NO: 2091064 - RNA, 19 nt, Artificial Sequence
  Description of Artificial Sequence: Synthetic oligonucleotide
  Sense strand starting at position 426 of SEQ ID NO: 1882048
cagacuaaugucugagacu

SEQ ID NO: 2091065 - RNA, 19 nt, Artificial Sequence
  Description of Artificial Sequence: Synthetic oligonucleotide
  Antisense strand to SEQ ID NO: 2091064
agucucagacauuagucug

SEQ ID NO: 2091066 - RNA, 19 nt, Artificial Sequence
  Description of Artificial Sequence: Synthetic oligonucleotide
  Sense strand starting at position 441 of SEQ ID NO: 1882048
gacuaccaggucuguauaa

SEQ ID NO: 2091067 - RNA, 19 nt, Artificial Sequence
  Description of Artificial Sequence: Synthetic oligonucleotide
  Antisense strand to SEQ ID NO: 2091066
uuauacagaccugguaguc

SEQ ID NO: 2091068 - RNA, 19 nt, Artificial Sequence
  Description of Artificial Sequence: Synthetic oligonucleotide
  Sense strand starting at position 442 of SEQ ID NO: 1882048
acuaccaggucuguauaaa

SEQ ID NO: 2091069 - RNA, 19 nt, Artificial Sequence
  Description of Artificial Sequence: Synthetic oligonucleotide
  Antisense strand to SEQ ID NO: 2091068
uuuauacagaccugguagu

SEQ ID NO: 2091070 - RNA, 19 nt, Artificial Sequence
  Description of Artificial Sequence: Synthetic oligonucleotide
  Sense strand starting at position 443 of SEQ ID NO: 1882048
cuaccaggucuguauaaag

SEQ ID NO: 2091071 - RNA, 19 nt, Artificial Sequence
  Description of Artificial Sequence: Synthetic oligonucleotide
  Antisense strand to SEQ ID NO: 2091070
cuuuauacagaccugguag

SEQ ID NO: 2091072 - RNA, 19 nt, Artificial Sequence
  Description of Artificial Sequence: Synthetic oligonucleotide
  Sense strand starting at position 452 of SEQ ID NO: 1882048
cuguauaaagcauaagauc

SEQ ID NO: 2091073 - RNA, 19 nt, Artificial Sequence
  Description of Artificial Sequence: Synthetic oligonucleotide
  Antisense strand to SEQ ID NO: 2091072
gaucuuaugcuuuauacag

SEQ ID NO: 2091074 - RNA, 19 nt, Artificial Sequence
  Description of Artificial Sequence: Synthetic oligonucleotide
  Sense strand starting at position 584 of SEQ ID NO: 1882048
cuuggugucucagcagaau

SEQ ID NO: 2091075 - RNA, 19 nt, Artificial Sequence
  Description of Artificial Sequence: Synthetic oligonucleotide
  Antisense strand to SEQ ID NO: 2091074
auucugcugagacaccaag

SEQ ID NO: 2091076 - RNA, 19 nt, Artificial Sequence
  Description of Artificial Sequence: Synthetic oligonucleotide
  Sense strand starting at position 945 of SEQ ID NO: 1882048
cuucuugagucaucucauc

SEQ ID NO: 2091077 - RNA, 19 nt, Artificial Sequence
  Description of Artificial Sequence: Synthetic oligonucleotide
  Antisense strand to SEQ ID NO: 2091076
gaugagaugacucaagaag

SEQ ID NO: 2091078 - RNA, 19 nt, Artificial Sequence
  Description of Artificial Sequence: Synthetic oligonucleotide
  Sense strand starting at position 950 of SEQ ID NO: 1882048
ugagucaucucaucuauua

SEQ ID NO: 2091079 - RNA, 19 nt, Artificial Sequence
  Description of Artificial Sequence: Synthetic oligonucleotide
  Antisense strand to SEQ ID NO: 2091078
uaauagaugagaugacuca

SEQ ID NO: 2091080 - RNA, 19 nt, Artificial Sequence
  Description of Artificial Sequence: Synthetic oligonucleotide
  Sense strand starting at position 1089 of SEQ ID NO: 1882048
cuccuuaaacaguguccaa

SEQ ID NO: 2091081 - RNA, 19 nt, Artificial Sequence
  Description of Artificial Sequence: Synthetic oligonucleotide
  Antisense strand to SEQ ID NO: 2091080
uuggacacuguuuaaggag

SEQ ID NO: 2091082 - RNA, 19 nt, Artificial Sequence
  Description of Artificial Sequence: Synthetic oligonucleotide
  Sense strand starting at position 1209 of SEQ ID NO: 1882048
gcccgaaaucugggaguca

SEQ ID NO: 2091083 - RNA, 19 nt, Artificial Sequence
  Description of Artificial Sequence: Synthetic oligonucleotide
  Antisense strand to SEQ ID NO: 2091082
ugacucccagauuucgggc

SEQ ID NO: 2091084 - RNA, 19 nt, Artificial Sequence
  Description of Artificial Sequence: Synthetic oligonucleotide
  Sense strand starting at position 1600 of SEQ ID NO: 1882048
cuaagucuggccuacgaau

SEQ ID NO: 2091085 - RNA, 19 nt, Artificial Sequence
  Description of Artificial Sequence: Synthetic oligonucleotide
  Antisense strand to SEQ ID NO: 2091084
auucguaggccagacuuag

SEQ ID NO: 2091086 - RNA, 19 nt, Artificial Sequence
  Description of Artificial Sequence: Synthetic oligonucleotide
  Sense strand starting at position 1606 of SEQ ID NO: 1882048
cuggccuacgaaugauuau

SEQ ID NO: 2091087 - RNA, 19 nt, Artificial Sequence
  Description of Artificial Sequence: Synthetic oligonucleotide
  Antisense strand to SEQ ID NO: 2091086
auaaucauucguaggccag

SEQ ID NO: 2091088 - RNA, 19 nt, Artificial Sequence
  Description of Artificial Sequence: Synthetic oligonucleotide
  Sense strand starting at position 1607 of SEQ ID NO: 1882048
uggccuacgaaugauuaua

SEQ ID NO: 2091089 - RNA, 19 nt, Artificial Sequence
  Description of Artificial Sequence: Synthetic oligonucleotide
  Antisense strand to SEQ ID NO: 2091088
uauaaucauucguaggcca

SEQ ID NO: 2091090 - RNA, 19 nt, Artificial Sequence
  Description of Artificial Sequence: Synthetic oligonucleotide
  Sense strand starting at position 1609 of SEQ ID NO: 1882048
gccuacgaaugauuauaaa

SEQ ID NO: 2091091 - RNA, 19 nt, Artificial Sequence
  Description of Artificial Sequence: Synthetic oligonucleotide
  Antisense strand to SEQ ID NO: 2091090
uuuauaaucauucguaggc

SEQ ID NO: 2091092 - RNA, 19 nt, Artificial Sequence
  Description of Artificial Sequence: Synthetic oligonucleotide
  Sense strand starting at position 1630 of SEQ ID NO: 1882048
ggguuagacugagccgaau

SEQ ID NO: 2091093 - RNA, 19 nt, Artificial Sequence
  Description of Artificial Sequence: Synthetic oligonucleotide
  Antisense strand to SEQ ID NO: 2091092
auucggcucagucuaaccc

SEQ ID NO: 2091094 - RNA, 19 nt, Artificial Sequence
  Description of Artificial Sequence: Synthetic oligonucleotide
  Sense strand starting at position 1639 of SEQ ID NO: 1882048
ugagccgaauugguauaua

SEQ ID NO: 2091095 - RNA, 19 nt, Artificial Sequence
  Description of Artificial Sequence: Synthetic oligonucleotide
  Antisense strand to SEQ ID NO: 2091094
uauauaccaauucggcuca

SEQ ID NO: 2091096 - RNA, 19 nt, Artificial Sequence
  Description of Artificial Sequence: Synthetic oligonucleotide
  Sense strand starting at position 1642 of SEQ ID NO: 1882048
gccgaauugguauauaguu

SEQ ID NO: 2091097 - RNA, 19 nt, Artificial Sequence
  Description of Artificial Sequence: Synthetic oligonucleotide
  Antisense strand to SEQ ID NO: 2091096
aacuauauaccaauucggc

SEQ ID NO: 2091098 - RNA, 19 nt, Artificial Sequence
  Description of Artificial Sequence: Synthetic oligonucleotide
  Sense strand starting at position 1668 of SEQ ID NO: 1882048
aacgaaugauuucgacuca

SEQ ID NO: 2091099 - RNA, 19 nt, Artificial Sequence
  Description of Artificial Sequence: Synthetic oligonucleotide
  Antisense strand to SEQ ID NO: 2091098
ugagucgaaaucauucguu

SEQ ID NO: 2091100 - RNA, 19 nt, Artificial Sequence
  Description of Artificial Sequence: Synthetic oligonucleotide
  Sense strand starting at position 1669 of SEQ ID NO: 1882048
acgaaugauuucgacucau

SEQ ID NO: 2091101 - RNA, 19 nt, Artificial Sequence
  Description of Artificial Sequence: Synthetic oligonucleotide
  Antisense strand to SEQ ID NO: 2091100
augagucgaaaucauucgu

SEQ ID NO: 2091102 - RNA, 19 nt, Artificial Sequence
  Description of Artificial Sequence: Synthetic oligonucleotide
  Sense strand starting at position 1887 of SEQ ID NO: 1882048
uguaccuaucgccauacua

SEQ ID NO: 2091103 - RNA, 19 nt, Artificial Sequence
  Description of Artificial Sequence: Synthetic oligonucleotide
  Antisense strand to SEQ ID NO: 2091102
uaguauggcgauagguaca

SEQ ID NO: 2091104 - RNA, 19 nt, Artificial Sequence
  Description of Artificial Sequence: Synthetic oligonucleotide
  Sense strand starting at position 1904 of SEQ ID NO: 1882048
uagucuuugcugccugcaa

SEQ ID NO: 2091105 - RNA, 19 nt, Artificial Sequence
  Description of Artificial Sequence: Synthetic oligonucleotide
  Antisense strand to SEQ ID NO: 2091104
uugcaggcagcaaagacua

SEQ ID NO: 2091106 - RNA, 19 nt, Artificial Sequence
  Description of Artificial Sequence: Synthetic oligonucleotide
  Sense strand starting at position 2439 of SEQ ID NO: 1882048
gguacauacuuccuauucu

SEQ ID NO: 2091107 - RNA, 19 nt, Artificial Sequence
  Description of Artificial Sequence: Synthetic oligonucleotide
  Antisense strand to SEQ ID NO: 2091106
agaauaggaaguauguacc

SEQ ID NO: 2091108 - RNA, 19 nt, Artificial Sequence
  Description of Artificial Sequence: Synthetic oligonucleotide
  Sense strand starting at position 2511 of SEQ ID NO: 1882048
acccuaggcucacugaaua

SEQ ID NO: 2091109 - RNA, 19 nt, Artificial Sequence
  Description of Artificial Sequence: Synthetic oligonucleotide
  Antisense strand to SEQ ID NO: 2091108
uauucagugagccuagggu

SEQ ID NO: 2091110 - RNA, 19 nt, Artificial Sequence
  Description of Artificial Sequence: Synthetic oligonucleotide
  Sense strand starting at position 2516 of SEQ ID NO: 1882048
aggcucacugaauauucua

SEQ ID NO: 2091111 - RNA, 19 nt, Artificial Sequence
  Description of Artificial Sequence: Synthetic oligonucleotide
  Antisense strand to SEQ ID NO: 2091110
uagaauauucagugagccu

SEQ ID NO: 2091112 - RNA, 19 nt, Artificial Sequence
  Description of Artificial Sequence: Synthetic oligonucleotide
  Sense strand starting at position 2581 of SEQ ID NO: 1882048
acuuaauauggcuagcgua

SEQ ID NO: 2091113 - RNA, 19 nt, Artificial Sequence
  Description of Artificial Sequence: Synthetic oligonucleotide
  Antisense strand to SEQ ID NO: 2091112
uacgcuagccauauuaagu

SEQ ID NO: 2091114 - RNA, 19 nt, Artificial Sequence
  Description of Artificial Sequence: Synthetic oligonucleotide
  Sense strand starting at position 2790 of SEQ ID NO: 1882048
guacuaucccugugaggca

SEQ ID NO: 2091115 - RNA, 19 nt, Artificial Sequence
  Description of Artificial Sequence: Synthetic oligonucleotide
  Antisense strand to SEQ ID NO: 2091114
ugccucacagggauaguac

SEQ ID NO: 2091116 - RNA, 19 nt, Artificial Sequence
  Description of Artificial Sequence: Synthetic oligonucleotide
  Sense strand starting at position 2797 of SEQ ID NO: 1882048
cccugugaggcauaauuau

SEQ ID NO: 2091117 - RNA, 19 nt, Artificial Sequence
  Description of Artificial Sequence: Synthetic oligonucleotide
  Antisense strand to SEQ ID NO: 2091116
auaauuaugccucacaggg

SEQ ID NO: 2091118 - RNA, 19 nt, Artificial Sequence
  Description of Artificial Sequence: Synthetic oligonucleotide
  Sense strand starting at position 2823 of SEQ ID NO: 1882048
uccaucugccugcgacaaa

SEQ ID NO: 2091119 - RNA, 19 nt, Artificial Sequence
  Description of Artificial Sequence: Synthetic oligonucleotide
  Antisense strand to SEQ ID NO: 2091118
uuugucgcaggcagaugga

SEQ ID NO: 2091120 - RNA, 19 nt, Artificial Sequence
  Description of Artificial Sequence: Synthetic oligonucleotide
  Sense strand starting at position 2878 of SEQ ID NO: 1882048
gccacauagcccucguagu

SEQ ID NO: 2091121 - RNA, 19 nt, Artificial Sequence
  Description of Artificial Sequence: Synthetic oligonucleotide
  Antisense strand to SEQ ID NO: 2091120
acuacgagggcuauguggc

SEQ ID NO: 2091122 - RNA, 19 nt, Artificial Sequence
  Description of Artificial Sequence: Synthetic oligonucleotide
  Sense strand starting at position 3118 of SEQ ID NO: 1882048
cuauuaaccuacuaggaga

SEQ ID NO: 2091123 - RNA, 19 nt, Artificial Sequence
  Description of Artificial Sequence: Synthetic oligonucleotide
  Antisense strand to SEQ ID NO: 2091122
ucuccuaguagguuaauag

SEQ ID NO: 2091124 - RNA, 19 nt, Artificial Sequence
  Description of Artificial Sequence: Synthetic oligonucleotide
  Sense strand starting at position 3131 of SEQ ID NO: 1882048
aggagaacucucugugcua

SEQ ID NO: 2091125 - RNA, 19 nt, Artificial Sequence
  Description of Artificial Sequence: Synthetic oligonucleotide
  Antisense strand to SEQ ID NO: 2091124
uagcacagagaguucuccu

SEQ ID NO: 2091126 - RNA, 19 nt, Artificial Sequence
  Description of Artificial Sequence: Synthetic oligonucleotide
  Sense strand starting at position 3132 of SEQ ID NO: 1882048
ggagaacucucugugcuag

SEQ ID NO: 2091127 - RNA, 19 nt, Artificial Sequence
  Description of Artificial Sequence: Synthetic oligonucleotide
  Antisense strand to SEQ ID NO: 2091126
cuagcacagagaguucucc

SEQ ID NO: 2091128 - RNA, 19 nt, Artificial Sequence
  Description of Artificial Sequence: Synthetic oligonucleotide
  Sense strand starting at position 3133 of SEQ ID NO: 1882048
gagaacucucugugcuagu

SEQ ID NO: 2091129 - RNA, 19 nt, Artificial Sequence
  Description of Artificial Sequence: Synthetic oligonucleotide
  Antisense strand to SEQ ID NO: 2091128
acuagcacagagaguucuc

SEQ ID NO: 2091130 - RNA, 19 nt, Artificial Sequence
  Description of Artificial Sequence: Synthetic oligonucleotide
  Sense strand starting at position 3134 of SEQ ID NO: 1882048
agaacucucugugcuagua

SEQ ID NO: 2091131 - RNA, 19 nt, Artificial Sequence
  Description of Artificial Sequence: Synthetic oligonucleotide
  Antisense strand to SEQ ID NO: 2091130
uacuagcacagagaguucu

SEQ ID NO: 2091132 - RNA, 19 nt, Artificial Sequence
  Description of Artificial Sequence: Synthetic oligonucleotide
  Sense strand starting at position 3851 of SEQ ID NO: 1882048
ccuguagcacuguucguua

SEQ ID NO: 2091133 - RNA, 19 nt, Artificial Sequence
  Description of Artificial Sequence: Synthetic oligonucleotide
  Antisense strand to SEQ ID NO: 2091132
uaacgaacagugcuacagg

SEQ ID NO: 2091134 - RNA, 19 nt, Artificial Sequence
  Description of Artificial Sequence: Synthetic oligonucleotide
  Sense strand starting at position 3865 of SEQ ID NO: 1882048
cguuacgugauccaucaua

SEQ ID NO: 2091135 - RNA, 19 nt, Artificial Sequence
  Description of Artificial Sequence: Synthetic oligonucleotide
  Antisense strand to SEQ ID NO: 2091134
uaugauggaucacguaacg

SEQ ID NO: 2091136 - RNA, 19 nt, Artificial Sequence
  Description of Artificial Sequence: Synthetic oligonucleotide
  Sense strand starting at position 3 of SEQ ID NO: 1882049
augucuucuguuuauugaa

SEQ ID NO: 2091137 - RNA, 19 nt, Artificial Sequence
  Description of Artificial Sequence: Synthetic oligonucleotide
  Antisense strand to SEQ ID NO: 2091136
uucaauaaacagaagacau

SEQ ID NO: 2091138 - RNA, 19 nt, Artificial Sequence
  Description of Artificial Sequence: Synthetic oligonucleotide
  Sense strand starting at position 5 of SEQ ID NO: 1882049
gucuucuguuuauugaaua

SEQ ID NO: 2091139 - RNA, 19 nt, Artificial Sequence
  Description of Artificial Sequence: Synthetic oligonucleotide
  Antisense strand to SEQ ID NO: 2091138
uauucaauaaacagaagac

SEQ ID NO: 2091140 - RNA, 19 nt, Artificial Sequence
  Description of Artificial Sequence: Synthetic oligonucleotide
  Sense strand starting at position 29 of SEQ ID NO: 1882049
uugguuucccuacagaauc

SEQ ID NO: 2091141 - RNA, 19 nt, Artificial Sequence
  Description of Artificial Sequence: Synthetic oligonucleotide
  Antisense strand to SEQ ID NO: 2091140
gauucuguagggaaaccaa

SEQ ID NO: 2091142 - RNA, 19 nt, Artificial Sequence
  Description of Artificial Sequence: Synthetic oligonucleotide
  Sense strand starting at position 292 of SEQ ID NO: 1882049
cccagcaucgccuauuaua

SEQ ID NO: 2091143 - RNA, 19 nt, Artificial Sequence
  Description of Artificial Sequence: Synthetic oligonucleotide
  Antisense strand to SEQ ID NO: 2091142
uauaauaggcgaugcuggg

SEQ ID NO: 2091144 - RNA, 19 nt, Artificial Sequence
  Description of Artificial Sequence: Synthetic oligonucleotide
  Sense strand starting at position 300 of SEQ ID NO: 1882049
cgccuauuauauuuaugua

SEQ ID NO: 2091145 - RNA, 19 nt, Artificial Sequence
  Description of Artificial Sequence: Synthetic oligonucleotide
  Antisense strand to SEQ ID NO: 2091144
uacauaaauauaauaggcg

SEQ ID NO: 2091146 - RNA, 19 nt, Artificial Sequence
  Description of Artificial Sequence: Synthetic oligonucleotide
  Sense strand starting at position 443 of SEQ ID NO: 1882049
uuaucacuaggucagugau

SEQ ID NO: 2091147 - RNA, 19 nt, Artificial Sequence
  Description of Artificial Sequence: Synthetic oligonucleotide
  Antisense strand to SEQ ID NO: 2091146
aucacugaccuagugauaa

SEQ ID NO: 2091148 - RNA, 19 nt, Artificial Sequence
  Description of Artificial Sequence: Synthetic oligonucleotide
  Sense strand starting at position 446 of SEQ ID NO: 1882049
ucacuaggucagugauucu

SEQ ID NO: 2091149 - RNA, 19 nt, Artificial Sequence
  Description of Artificial Sequence: Synthetic oligonucleotide
  Antisense strand to SEQ ID NO: 2091148
agaaucacugaccuaguga

SEQ ID NO: 2091150 - RNA, 19 nt, Artificial Sequence
  Description of Artificial Sequence: Synthetic oligonucleotide
  Sense strand starting at position 449 of SEQ ID NO: 1882049
cuaggucagugauucuuua

SEQ ID NO: 2091151 - RNA, 19 nt, Artificial Sequence
  Description of Artificial Sequence: Synthetic oligonucleotide
  Antisense strand to SEQ ID NO: 2091150
uaaagaaucacugaccuag

SEQ ID NO: 2091152 - RNA, 19 nt, Artificial Sequence
  Description of Artificial Sequence: Synthetic oligonucleotide
  Sense strand starting at position 453 of SEQ ID NO: 1882049
gucagugauucuuuauaga

SEQ ID NO: 2091153 - RNA, 19 nt, Artificial Sequence
  Description of Artificial Sequence: Synthetic oligonucleotide
  Antisense strand to SEQ ID NO: 2091152
ucuauaaagaaucacugac

SEQ ID NO: 2091154 - RNA, 19 nt, Artificial Sequence
  Description of Artificial Sequence: Synthetic oligonucleotide
  Sense strand starting at position 704 of SEQ ID NO: 1882049
cuuauaauccaguacagua

SEQ ID NO: 2091155 - RNA, 19 nt, Artificial Sequence
  Description of Artificial Sequence: Synthetic oligonucleotide
  Antisense strand to SEQ ID NO: 2091154
uacuguacuggauuauaag

SEQ ID NO: 2091156 - RNA, 19 nt, Artificial Sequence
  Description of Artificial Sequence: Synthetic oligonucleotide
  Sense strand starting at position 803 of SEQ ID NO: 1882049
ugcaaauguccgcacaaga

SEQ ID NO: 2091157 - RNA, 19 nt, Artificial Sequence
  Description of Artificial Sequence: Synthetic oligonucleotide
  Antisense strand to SEQ ID NO: 2091156
ucuugugcggacauuugca

SEQ ID NO: 2091158 - RNA, 19 nt, Artificial Sequence
  Description of Artificial Sequence: Synthetic oligonucleotide
  Sense strand starting at position 816 of SEQ ID NO: 1882049
acaagaauacugcaugucu

SEQ ID NO: 2091159 - RNA, 19 nt, Artificial Sequence
  Description of Artificial Sequence: Synthetic oligonucleotide
  Antisense strand to SEQ ID NO: 2091158
agacaugcaguauucuugu

SEQ ID NO: 2091160 - RNA, 19 nt, Artificial Sequence
  Description of Artificial Sequence: Synthetic oligonucleotide
  Sense strand starting at position 1001 of SEQ ID NO: 1882049
gugaaaggauugagguaga

SEQ ID NO: 2091161 - RNA, 19 nt, Artificial Sequence
  Description of Artificial Sequence: Synthetic oligonucleotide
  Antisense strand to SEQ ID NO: 2091160
ucuaccucaauccuuucac

SEQ ID NO: 2091162 - RNA, 19 nt, Artificial Sequence
  Description of Artificial Sequence: Synthetic oligonucleotide
  Sense strand starting at position 1100 of SEQ ID NO: 1882049
uugacugacucaucuggaa

SEQ ID NO: 2091163 - RNA, 19 nt, Artificial Sequence
  Description of Artificial Sequence: Synthetic oligonucleotide
  Antisense strand to SEQ ID NO: 2091162
uuccagaugagucagucaa

SEQ ID NO: 2091164 - RNA, 19 nt, Artificial Sequence
  Description of Artificial Sequence: Synthetic oligonucleotide
  Sense strand starting at position 1149 of SEQ ID NO: 1882049
acacacagucauggcuaua

SEQ ID NO: 2091165 - RNA, 19 nt, Artificial Sequence
  Description of Artificial Sequence: Synthetic oligonucleotide
  Antisense strand to SEQ ID NO: 2091164
uauagccaugacugugugu

SEQ ID NO: 2091166 - RNA, 19 nt, Artificial Sequence
  Description of Artificial Sequence: Synthetic oligonucleotide
  Sense strand starting at position 1152 of SEQ ID NO: 1882049
cacagucauggcuauagaa

SEQ ID NO: 2091167 - RNA, 19 nt, Artificial Sequence
  Description of Artificial Sequence: Synthetic oligonucleotide
  Antisense strand to SEQ ID NO: 2091166
uucuauagccaugacugug

SEQ ID NO: 2091168 - RNA, 19 nt, Artificial Sequence
  Description of Artificial Sequence: Synthetic oligonucleotide
  Sense strand starting at position 1154 of SEQ ID NO: 1882049
cagucauggcuauagaaac

SEQ ID NO: 2091169 - RNA, 19 nt, Artificial Sequence
  Description of Artificial Sequence: Synthetic oligonucleotide
  Antisense strand to SEQ ID NO: 2091168
guuucuauagccaugacug

SEQ ID NO: 2091170 - RNA, 19 nt, Artificial Sequence
  Description of Artificial Sequence: Synthetic oligonucleotide
  Sense strand starting at position 1557 of SEQ ID NO: 1882049
gacacauuguagguccauu

SEQ ID NO: 2091171 - RNA, 19 nt, Artificial Sequence
  Description of Artificial Sequence: Synthetic oligonucleotide
  Antisense strand to SEQ ID NO: 2091170
aauggaccuacaauguguc

SEQ ID NO: 2091172 - RNA, 19 nt, Artificial Sequence
  Description of Artificial Sequence: Synthetic oligonucleotide
  Sense strand starting at position 1638 of SEQ ID NO: 1882049
cacugucuacuccgaaaga

SEQ ID NO: 2091173 - RNA, 19 nt, Artificial Sequence
  Description of Artificial Sequence: Synthetic oligonucleotide
  Antisense strand to SEQ ID NO: 2091172
ucuuucggaguagacagug

SEQ ID NO: 2091174 - RNA, 19 nt, Artificial Sequence
  Description of Artificial Sequence: Synthetic oligonucleotide
  Sense strand starting at position 1779 of SEQ ID NO: 1882049
gugcauuguaaguauuacu

SEQ ID NO: 2091175 - RNA, 19 nt, Artificial Sequence
  Description of Artificial Sequence: Synthetic oligonucleotide
  Antisense strand to SEQ ID NO: 2091174
aguaauacuuacaaugcac

SEQ ID NO: 2091176 - RNA, 19 nt, Artificial Sequence
  Description of Artificial Sequence: Synthetic oligonucleotide
  Sense strand starting at position 1909 of SEQ ID NO: 1882049
uuguauaugcaauaagaca

SEQ ID NO: 2091177 - RNA, 19 nt, Artificial Sequence
  Description of Artificial Sequence: Synthetic oligonucleotide
  Antisense strand to SEQ ID NO: 2091176
ugucuuauugcauauacaa

SEQ ID NO: 2091178 - RNA, 19 nt, Artificial Sequence
  Description of Artificial Sequence: Synthetic oligonucleotide
  Sense strand starting at position 2152 of SEQ ID NO: 1882049
aggcuaaauuuguaacaug

SEQ ID NO: 2091179 - RNA, 19 nt, Artificial Sequence
  Description of Artificial Sequence: Synthetic oligonucleotide
  Antisense strand to SEQ ID NO: 2091178
cauguuacaaauuuagccu

SEQ ID NO: 2091180 - RNA, 19 nt, Artificial Sequence
  Description of Artificial Sequence: Synthetic oligonucleotide
  Sense strand starting at position 2178 of SEQ ID NO: 1882049
guggcagaacucuaaucuu

SEQ ID NO: 2091181 - RNA, 19 nt, Artificial Sequence
  Description of Artificial Sequence: Synthetic oligonucleotide
  Antisense strand to SEQ ID NO: 2091180
aagauuagaguucugccac

SEQ ID NO: 2091182 - RNA, 19 nt, Artificial Sequence
  Description of Artificial Sequence: Synthetic oligonucleotide
  Sense strand starting at position 2731 of SEQ ID NO: 1882049
aucacuucuguuuacugau

SEQ ID NO: 2091183 - RNA, 19 nt, Artificial Sequence
  Description of Artificial Sequence: Synthetic oligonucleotide
  Antisense strand to SEQ ID NO: 2091182
aucaguaaacagaagugau

SEQ ID NO: 2091184 - RNA, 19 nt, Artificial Sequence
  Description of Artificial Sequence: Synthetic oligonucleotide
  Sense strand starting at position 2737 of SEQ ID NO: 1882049
ucuguuuacugauccaaag

SEQ ID NO: 2091185 - RNA, 19 nt, Artificial Sequence
  Description of Artificial Sequence: Synthetic oligonucleotide
  Antisense strand to SEQ ID NO: 2091184
cuuuggaucaguaaacaga

SEQ ID NO: 2091186 - RNA, 19 nt, Artificial Sequence
  Description of Artificial Sequence: Synthetic oligonucleotide
  Sense strand starting at position 2754 of SEQ ID NO: 1882049
agacuacuugucuguauua

SEQ ID NO: 2091187 - RNA, 19 nt, Artificial Sequence
  Description of Artificial Sequence: Synthetic oligonucleotide
  Antisense strand to SEQ ID NO: 2091186
uaauacagacaaguagucu

SEQ ID NO: 2091188 - RNA, 19 nt, Artificial Sequence
  Description of Artificial Sequence: Synthetic oligonucleotide
  Sense strand starting at position 2755 of SEQ ID NO: 1882049
gacuacuugucuguauuag

SEQ ID NO: 2091189 - RNA, 19 nt, Artificial Sequence
  Description of Artificial Sequence: Synthetic oligonucleotide
  Antisense strand to SEQ ID NO: 2091188
cuaauacagacaaguaguc

SEQ ID NO: 2091190 - RNA, 19 nt, Artificial Sequence
  Description of Artificial Sequence: Synthetic oligonucleotide
  Sense strand starting at position 2756 of SEQ ID NO: 1882049
acuacuugucuguauuaga

SEQ ID NO: 2091191 - RNA, 19 nt, Artificial Sequence
  Description of Artificial Sequence: Synthetic oligonucleotide
  Antisense strand to SEQ ID NO: 2091190
ucuaauacagacaaguagu

SEQ ID NO: 2091192 - RNA, 19 nt, Artificial Sequence
  Description of Artificial Sequence: Synthetic oligonucleotide
  Sense strand starting at position 2763 of SEQ ID NO: 1882049
gucuguauuagacaguaaa

SEQ ID NO: 2091193 - RNA, 19 nt, Artificial Sequence
  Description of Artificial Sequence: Synthetic oligonucleotide
  Antisense strand to SEQ ID NO: 2091192
uuuacugucuaauacagac

SEQ ID NO: 2091194 - RNA, 19 nt, Artificial Sequence
  Description of Artificial Sequence: Synthetic oligonucleotide
  Sense strand starting at position 2782 of SEQ ID NO: 1882049
auaucuaggagucgugaua

SEQ ID NO: 2091195 - RNA, 19 nt, Artificial Sequence
  Description of Artificial Sequence: Synthetic oligonucleotide
  Antisense strand to SEQ ID NO: 2091194
uaucacgacuccuagauau

SEQ ID NO: 2091196 - RNA, 19 nt, Artificial Sequence
  Description of Artificial Sequence: Synthetic oligonucleotide
  Sense strand starting at position 2915 of SEQ ID NO: 1882049
ugacauuaguaaucgaguu

SEQ ID NO: 2091197 - RNA, 19 nt, Artificial Sequence
  Description of Artificial Sequence: Synthetic oligonucleotide
  Antisense strand to SEQ ID NO: 2091196
aacucgauuacuaauguca

SEQ ID NO: 2091198 - RNA, 19 nt, Artificial Sequence
  Description of Artificial Sequence: Synthetic oligonucleotide
  Sense strand starting at position 3334 of SEQ ID NO: 1882049
gaacuagaaucucugcgua

SEQ ID NO: 2091199 - RNA, 19 nt, Artificial Sequence
  Description of Artificial Sequence: Synthetic oligonucleotide
  Antisense strand to SEQ ID NO: 2091198
uacgcagagauucuaguuc

SEQ ID NO: 2091200 - RNA, 19 nt, Artificial Sequence
  Description of Artificial Sequence: Synthetic oligonucleotide
  Sense strand starting at position 3336 of SEQ ID NO: 1882049
acuagaaucucugcguaca

SEQ ID NO: 2091201 - RNA, 19 nt, Artificial Sequence
  Description of Artificial Sequence: Synthetic oligonucleotide
  Antisense strand to SEQ ID NO: 2091200
uguacgcagagauucuagu

SEQ ID NO: 2091202 - RNA, 19 nt, Artificial Sequence
  Description of Artificial Sequence: Synthetic oligonucleotide
  Sense strand starting at position 3367 of SEQ ID NO: 1882049
augaacuauugagccuaga

SEQ ID NO: 2091203 - RNA, 19 nt, Artificial Sequence
  Description of Artificial Sequence: Synthetic oligonucleotide
  Antisense strand to SEQ ID NO: 2091202
ucuaggcucaauaguucau

SEQ ID NO: 2091204 - RNA, 19 nt, Artificial Sequence
  Description of Artificial Sequence: Synthetic oligonucleotide
  Sense strand starting at position 3422 of SEQ ID NO: 1882049
gaugaaggcucuuuaugaa

SEQ ID NO: 2091205 - RNA, 19 nt, Artificial Sequence
  Description of Artificial Sequence: Synthetic oligonucleotide
  Antisense strand to SEQ ID NO: 2091204
uucauaaagagccuucauc

SEQ ID NO: 2091206 - RNA, 19 nt, Artificial Sequence
  Description of Artificial Sequence: Synthetic oligonucleotide
  Sense strand starting at position 3495 of SEQ ID NO: 1882049
acuaaagaccuuuggguuu

SEQ ID NO: 2091207 - RNA, 19 nt, Artificial Sequence
  Description of Artificial Sequence: Synthetic oligonucleotide
  Antisense strand to SEQ ID NO: 2091206
aaacccaaaggucuuuagu

SEQ ID NO: 2091208 - RNA, 19 nt, Artificial Sequence
  Description of Artificial Sequence: Synthetic oligonucleotide
  Sense strand starting at position 3550 of SEQ ID NO: 1882049
cuuuaaauugcucacguua

SEQ ID NO: 2091209 - RNA, 19 nt, Artificial Sequence
  Description of Artificial Sequence: Synthetic oligonucleotide
  Antisense strand to SEQ ID NO: 2091208
uaacgugagcaauuuaaag

SEQ ID NO: 2091210 - RNA, 19 nt, Artificial Sequence
  Description of Artificial Sequence: Synthetic oligonucleotide
  Sense strand starting at position 3564 of SEQ ID NO: 1882049
cguuaagaaccaugguuua

SEQ ID NO: 2091211 - RNA, 19 nt, Artificial Sequence
  Description of Artificial Sequence: Synthetic oligonucleotide
  Antisense strand to SEQ ID NO: 2091210
uaaaccaugguucuuaacg

SEQ ID NO: 2091212 - RNA, 19 nt, Artificial Sequence
  Description of Artificial Sequence: Synthetic oligonucleotide
  Sense strand starting at position 3775 of SEQ ID NO: 1882049
gaugcaaacgauugcauua

SEQ ID NO: 2091213 - RNA, 19 nt, Artificial Sequence
  Description of Artificial Sequence: Synthetic oligonucleotide
  Antisense strand to SEQ ID NO: 2091212
uaaugcaaucguuugcauc

SEQ ID NO: 2091214 - RNA, 19 nt, Artificial Sequence
  Description of Artificial Sequence: Synthetic oligonucleotide
  Sense strand starting at position 3901 of SEQ ID NO: 1882049
uaccaagaauucguuuguu

SEQ ID NO: 2091215 - RNA, 19 nt, Artificial Sequence
  Description of Artificial Sequence: Synthetic oligonucleotide
  Antisense strand to SEQ ID NO: 2091214
aacaaacgaauucuuggua

SEQ ID NO: 2091216 - RNA, 19 nt, Artificial Sequence
  Description of Artificial Sequence: Synthetic oligonucleotide
  Sense strand starting at position 172 of SEQ ID NO: 1882050
cccagcaucgccuauuaua

SEQ ID NO: 2091217 - RNA, 19 nt, Artificial Sequence
  Description of Artificial Sequence: Synthetic oligonucleotide
  Antisense strand to SEQ ID NO: 2091216
uauaauaggcgaugcuggg

SEQ ID NO: 2091218 - RNA, 19 nt, Artificial Sequence
  Description of Artificial Sequence: Synthetic oligonucleotide
  Sense strand starting at position 180 of SEQ ID NO: 1882050
cgccuauuauauuuaugua

SEQ ID NO: 2091219 - RNA, 19 nt, Artificial Sequence
  Description of Artificial Sequence: Synthetic oligonucleotide
  Antisense strand to SEQ ID NO: 2091218
uacauaaauauaauaggcg

SEQ ID NO: 2091220 - RNA, 19 nt, Artificial Sequence
  Description of Artificial Sequence: Synthetic oligonucleotide
  Sense strand starting at position 323 of SEQ ID NO: 1882050
uuaucacuaggucagugau

SEQ ID NO: 2091221 - RNA, 19 nt, Artificial Sequence
  Description of Artificial Sequence: Synthetic oligonucleotide
  Antisense strand to SEQ ID NO: 2091220
aucacugaccuagugauaa

SEQ ID NO: 2091222 - RNA, 19 nt, Artificial Sequence
  Description of Artificial Sequence: Synthetic oligonucleotide
  Sense strand starting at position 326 of SEQ ID NO: 1882050
ucacuaggucagugauucu

SEQ ID NO: 2091223 - RNA, 19 nt, Artificial Sequence
  Description of Artificial Sequence: Synthetic oligonucleotide
  Antisense strand to SEQ ID NO: 2091222
agaaucacugaccuaguga

SEQ ID NO: 2091224 - RNA, 19 nt, Artificial Sequence
  Description of Artificial Sequence: Synthetic oligonucleotide
  Sense strand starting at position 329 of SEQ ID NO: 1882050
cuaggucagugauucuuua

SEQ ID NO: 2091225 - RNA, 19 nt, Artificial Sequence
  Description of Artificial Sequence: Synthetic oligonucleotide
  Antisense strand to SEQ ID NO: 2091224
uaaagaaucacugaccuag

SEQ ID NO: 2091226 - RNA, 19 nt, Artificial Sequence
  Description of Artificial Sequence: Synthetic oligonucleotide
  Sense strand starting at position 333 of SEQ ID NO: 1882050
gucagugauucuuuauaga

SEQ ID NO: 2091227 - RNA, 19 nt, Artificial Sequence
  Description of Artificial Sequence: Synthetic oligonucleotide
  Antisense strand to SEQ ID NO: 2091226
ucuauaaagaaucacugac

SEQ ID NO: 2091228 - RNA, 19 nt, Artificial Sequence
  Description of Artificial Sequence: Synthetic oligonucleotide
  Sense strand starting at position 584 of SEQ ID NO: 1882050
cuuauaauccaguacagua

SEQ ID NO: 2091229 - RNA, 19 nt, Artificial Sequence
  Description of Artificial Sequence: Synthetic oligonucleotide
  Antisense strand to SEQ ID NO: 2091228
uacuguacuggauuauaag

SEQ ID NO: 2091230 - RNA, 19 nt, Artificial Sequence
  Description of Artificial Sequence: Synthetic oligonucleotide
  Sense strand starting at position 683 of SEQ ID NO: 1882050
ugcaaauguccgcacaaga

SEQ ID NO: 2091231 - RNA, 19 nt, Artificial Sequence
  Description of Artificial Sequence: Synthetic oligonucleotide
  Antisense strand to SEQ ID NO: 2091230
ucuugugcggacauuugca

SEQ ID NO: 2091232 - RNA, 19 nt, Artificial Sequence
  Description of Artificial Sequence: Synthetic oligonucleotide
  Sense strand starting at position 696 of SEQ ID NO: 1882050
acaagaauacugcaugucu

SEQ ID NO: 2091233 - RNA, 19 nt, Artificial Sequence
  Description of Artificial Sequence: Synthetic oligonucleotide
  Antisense strand to SEQ ID NO: 2091232
agacaugcaguauucuugu

SEQ ID NO: 2091234 - RNA, 19 nt, Artificial Sequence
  Description of Artificial Sequence: Synthetic oligonucleotide
  Sense strand starting at position 881 of SEQ ID NO: 1882050
gugaaaggauugagguaga

SEQ ID NO: 2091235 - RNA, 19 nt, Artificial Sequence
  Description of Artificial Sequence: Synthetic oligonucleotide
  Antisense strand to SEQ ID NO: 2091234
ucuaccucaauccuuucac

SEQ ID NO: 2091236 - RNA, 19 nt, Artificial Sequence
  Description of Artificial Sequence: Synthetic oligonucleotide
  Sense strand starting at position 980 of SEQ ID NO: 1882050
uugacugacucaucuggaa

SEQ ID NO: 2091237 - RNA, 19 nt, Artificial Sequence
  Description of Artificial Sequence: Synthetic oligonucleotide
  Antisense strand to SEQ ID NO: 2091236
uuccagaugagucagucaa

SEQ ID NO: 2091238 - RNA, 19 nt, Artificial Sequence
  Description of Artificial Sequence: Synthetic oligonucleotide
  Sense strand starting at position 1029 of SEQ ID NO: 1882050
acacacagucauggcuaua

SEQ ID NO: 2091239 - RNA, 19 nt, Artificial Sequence
  Description of Artificial Sequence: Synthetic oligonucleotide
  Antisense strand to SEQ ID NO: 2091238
uauagccaugacugugugu

SEQ ID NO: 2091240 - RNA, 19 nt, Artificial Sequence
  Description of Artificial Sequence: Synthetic oligonucleotide
  Sense strand starting at position 1032 of SEQ ID NO: 1882050
cacagucauggcuauagaa

SEQ ID NO: 2091241 - RNA, 19 nt, Artificial Sequence
  Description of Artificial Sequence: Synthetic oligonucleotide
  Antisense strand to SEQ ID NO: 2091240
uucuauagccaugacugug

SEQ ID NO: 2091242 - RNA, 19 nt, Artificial Sequence
  Description of Artificial Sequence: Synthetic oligonucleotide
  Sense strand starting at position 1034 of SEQ ID NO: 1882050
cagucauggcuauagaaac

SEQ ID NO: 2091243 - RNA, 19 nt, Artificial Sequence
  Description of Artificial Sequence: Synthetic oligonucleotide
  Antisense strand to SEQ ID NO: 2091242
guuucuauagccaugacug

SEQ ID NO: 2091244 - RNA, 19 nt, Artificial Sequence
  Description of Artificial Sequence: Synthetic oligonucleotide
  Sense strand starting at position 1437 of SEQ ID NO: 1882050
gacacauuguagguccauu

SEQ ID NO: 2091245 - RNA, 19 nt, Artificial Sequence
  Description of Artificial Sequence: Synthetic oligonucleotide
  Antisense strand to SEQ ID NO: 2091244
aauggaccuacaauguguc

SEQ ID NO: 2091246 - RNA, 19 nt, Artificial Sequence
  Description of Artificial Sequence: Synthetic oligonucleotide
  Sense strand starting at position 1518 of SEQ ID NO: 1882050
cacugucuacuccgaaaga

SEQ ID NO: 2091247 - RNA, 19 nt, Artificial Sequence
  Description of Artificial Sequence: Synthetic oligonucleotide
  Antisense strand to SEQ ID NO: 2091246
ucuuucggaguagacagug

SEQ ID NO: 2091248 - RNA, 19 nt, Artificial Sequence
  Description of Artificial Sequence: Synthetic oligonucleotide
  Sense strand starting at position 1659 of SEQ ID NO: 1882050
gugcauuguaaguauuacu

SEQ ID NO: 2091249 - RNA, 19 nt, Artificial Sequence
  Description of Artificial Sequence: Synthetic oligonucleotide
  Antisense strand to SEQ ID NO: 2091248
aguaauacuuacaaugcac

SEQ ID NO: 2091250 - RNA, 19 nt, Artificial Sequence
  Description of Artificial Sequence: Synthetic oligonucleotide
  Sense strand starting at position 1789 of SEQ ID NO: 1882050
uuguauaugcaauaagaca

SEQ ID NO: 2091251 - RNA, 19 nt, Artificial Sequence
  Description of Artificial Sequence: Synthetic oligonucleotide
  Antisense strand to SEQ ID NO: 2091250
ugucuuauugcauauacaa

SEQ ID NO: 2091252 - RNA, 19 nt, Artificial Sequence
  Description of Artificial Sequence: Synthetic oligonucleotide
  Sense strand starting at position 2032 of SEQ ID NO: 1882050
aggcuaaauuuguaacaug

SEQ ID NO: 2091253 - RNA, 19 nt, Artificial Sequence
  Description of Artificial Sequence: Synthetic oligonucleotide
  Antisense strand to SEQ ID NO: 2091252
cauguuacaaauuuagccu

SEQ ID NO: 2091254 - RNA, 19 nt, Artificial Sequence
  Description of Artificial Sequence: Synthetic oligonucleotide
  Sense strand starting at position 2058 of SEQ ID NO: 1882050
guggcagaacucuaaucuu

SEQ ID NO: 2091255 - RNA, 19 nt, Artificial Sequence
  Description of Artificial Sequence: Synthetic oligonucleotide
  Antisense strand to SEQ ID NO: 2091254
aagauuagaguucugccac

SEQ ID NO: 2091256 - RNA, 19 nt, Artificial Sequence
  Description of Artificial Sequence: Synthetic oligonucleotide
  Sense strand starting at position 2611 of SEQ ID NO: 1882050
aucacuucuguuuacugau

SEQ ID NO: 2091257 - RNA, 19 nt, Artificial Sequence
  Description of Artificial Sequence: Synthetic oligonucleotide
  Antisense strand to SEQ ID NO: 2091256
aucaguaaacagaagugau

SEQ ID NO: 2091258 - RNA, 19 nt, Artificial Sequence
  Description of Artificial Sequence: Synthetic oligonucleotide
  Sense strand starting at position 2617 of SEQ ID NO: 1882050
ucuguuuacugauccaaag

SEQ ID NO: 2091259 - RNA, 19 nt, Artificial Sequence
  Description of Artificial Sequence: Synthetic oligonucleotide
  Antisense strand to SEQ ID NO: 2091258
cuuuggaucaguaaacaga

SEQ ID NO: 2091260 - RNA, 19 nt, Artificial Sequence
  Description of Artificial Sequence: Synthetic oligonucleotide
  Sense strand starting at position 2634 of SEQ ID NO: 1882050
agacuacuugucuguauua

SEQ ID NO: 2091261 - RNA, 19 nt, Artificial Sequence
  Description of Artificial Sequence: Synthetic oligonucleotide
  Antisense strand to SEQ ID NO: 2091260
uaauacagacaaguagucu

SEQ ID NO: 2091262 - RNA, 19 nt, Artificial Sequence
  Description of Artificial Sequence: Synthetic oligonucleotide
  Sense strand starting at position 2635 of SEQ ID NO: 1882050
gacuacuugucuguauuag

SEQ ID NO: 2091263 - RNA, 19 nt, Artificial Sequence
  Description of Artificial Sequence: Synthetic oligonucleotide
  Antisense strand to SEQ ID NO: 2091262
cuaauacagacaaguaguc

SEQ ID NO: 2091264 - RNA, 19 nt, Artificial Sequence
  Description of Artificial Sequence: Synthetic oligonucleotide
  Sense strand starting at position 2636 of SEQ ID NO: 1882050
acuacuugucuguauuaga

SEQ ID NO: 2091265 - RNA, 19 nt, Artificial Sequence
  Description of Artificial Sequence: Synthetic oligonucleotide
  Antisense strand to SEQ ID NO: 2091264
ucuaauacagacaaguagu

SEQ ID NO: 2091266 - RNA, 19 nt, Artificial Sequence
  Description of Artificial Sequence: Synthetic oligonucleotide
  Sense strand starting at position 2643 of SEQ ID NO: 1882050
gucuguauuagacaguaaa

SEQ ID NO: 2091267 - RNA, 19 nt, Artificial Sequence
  Description of Artificial Sequence: Synthetic oligonucleotide
  Antisense strand to SEQ ID NO: 2091266
uuuacugucuaauacagac

SEQ ID NO: 2091268 - RNA, 19 nt, Artificial Sequence
  Description of Artificial Sequence: Synthetic oligonucleotide
  Sense strand starting at position 2662 of SEQ ID NO: 1882050
auaucuaggagucgugaua

SEQ ID NO: 2091269 - RNA, 19 nt, Artificial Sequence
  Description of Artificial Sequence: Synthetic oligonucleotide
  Antisense strand to SEQ ID NO: 2091268
uaucacgacuccuagauau

SEQ ID NO: 2091270 - RNA, 19 nt, Artificial Sequence
  Description of Artificial Sequence: Synthetic oligonucleotide
  Sense strand starting at position 2795 of SEQ ID NO: 1882050
ugacauuaguaaucgaguu

SEQ ID NO: 2091271 - RNA, 19 nt, Artificial Sequence
  Description of Artificial Sequence: Synthetic oligonucleotide
  Antisense strand to SEQ ID NO: 2091270
aacucgauuacuaauguca

SEQ ID NO: 2091272 - RNA, 19 nt, Artificial Sequence
  Description of Artificial Sequence: Synthetic oligonucleotide
  Sense strand starting at position 3214 of SEQ ID NO: 1882050
gaacuagaaucucugcgua

SEQ ID NO: 2091273 - RNA, 19 nt, Artificial Sequence
  Description of Artificial Sequence: Synthetic oligonucleotide
  Antisense strand to SEQ ID NO: 2091272
uacgcagagauucuaguuc

SEQ ID NO: 2091274 - RNA, 19 nt, Artificial Sequence
  Description of Artificial Sequence: Synthetic oligonucleotide
  Sense strand starting at position 3216 of SEQ ID NO: 1882050
acuagaaucucugcguaca

SEQ ID NO: 2091275 - RNA, 19 nt, Artificial Sequence
  Description of Artificial Sequence: Synthetic oligonucleotide
  Antisense strand to SEQ ID NO: 2091274
uguacgcagagauucuagu

SEQ ID NO: 2091276 - RNA, 19 nt, Artificial Sequence
  Description of Artificial Sequence: Synthetic oligonucleotide
  Sense strand starting at position 3247 of SEQ ID NO: 1882050
augaacuauugagccuaga

SEQ ID NO: 2091277 - RNA, 19 nt, Artificial Sequence
  Description of Artificial Sequence: Synthetic oligonucleotide
  Antisense strand to SEQ ID NO: 2091276
ucuaggcucaauaguucau

SEQ ID NO: 2091278 - RNA, 19 nt, Artificial Sequence
  Description of Artificial Sequence: Synthetic oligonucleotide
  Sense strand starting at position 3302 of SEQ ID NO: 1882050
gaugaaggcucuuuaugaa

SEQ ID NO: 2091279 - RNA, 19 nt, Artificial Sequence
  Description of Artificial Sequence: Synthetic oligonucleotide
  Antisense strand to SEQ ID NO: 2091278
uucauaaagagccuucauc

SEQ ID NO: 2091280 - RNA, 19 nt, Artificial Sequence
  Description of Artificial Sequence: Synthetic oligonucleotide
  Sense strand starting at position 3375 of SEQ ID NO: 1882050
acuaaagaccuuuggguuu

SEQ ID NO: 2091281 - RNA, 19 nt, Artificial Sequence
  Description of Artificial Sequence: Synthetic oligonucleotide
  Antisense strand to SEQ ID NO: 2091280
aaacccaaaggucuuuagu

SEQ ID NO: 2091282 - RNA, 19 nt, Artificial Sequence
  Description of Artificial Sequence: Synthetic oligonucleotide
  Sense strand starting at position 3430 of SEQ ID NO: 1882050
cuuuaaauugcucacguua

SEQ ID NO: 2091283 - RNA, 19 nt, Artificial Sequence
  Description of Artificial Sequence: Synthetic oligonucleotide
  Antisense strand to SEQ ID NO: 2091282
uaacgugagcaauuuaaag

SEQ ID NO: 2091284 - RNA, 19 nt, Artificial Sequence
  Description of Artificial Sequence: Synthetic oligonucleotide
  Sense strand starting at position 3444 of SEQ ID NO: 1882050
cguuaagaaccaugguuua

SEQ ID NO: 2091285 - RNA, 19 nt, Artificial Sequence
  Description of Artificial Sequence: Synthetic oligonucleotide
  Antisense strand to SEQ ID NO: 2091284
uaaaccaugguucuuaacg

SEQ ID NO: 2091286 - RNA, 19 nt, Artificial Sequence
  Description of Artificial Sequence: Synthetic oligonucleotide
  Sense strand starting at position 3655 of SEQ ID NO: 1882050
gaugcaaacgauugcauua

SEQ ID NO: 2091287 - RNA, 19 nt, Artificial Sequence
  Description of Artificial Sequence: Synthetic oligonucleotide
  Antisense strand to SEQ ID NO: 2091286
uaaugcaaucguuugcauc

SEQ ID NO: 2091288 - RNA, 19 nt, Artificial Sequence
  Description of Artificial Sequence: Synthetic oligonucleotide
  Sense strand starting at position 3781 of SEQ ID NO: 1882050
uaccaagaauucguuuguu

SEQ ID NO: 2091289 - RNA, 19 nt, Artificial Sequence
  Description of Artificial Sequence: Synthetic oligonucleotide
  Antisense strand to SEQ ID NO: 2091288
aacaaacgaauucuuggua

SEQ ID NO: 2091290 - RNA, 19 nt, Artificial Sequence
  Description of Artificial Sequence: Synthetic oligonucleotide
  Sense strand starting at position 3850 of SEQ ID NO: 1882050
gcggaaucuugacuucucu

SEQ ID NO: 2091291 - RNA, 19 nt, Artificial Sequence
  Description of Artificial Sequence: Synthetic oligonucleotide
  Antisense strand to SEQ ID NO: 2091290
agagaagucaagauuccgc

SEQ ID NO: 2091292 - RNA, 19 nt, Artificial Sequence
  Description of Artificial Sequence: Synthetic oligonucleotide
  Sense strand starting at position 3872 of SEQ ID NO: 1882050
gcuucaagucuuuggagag

SEQ ID NO: 2091293 - RNA, 19 nt, Artificial Sequence
  Description of Artificial Sequence: Synthetic oligonucleotide
  Antisense strand to SEQ ID NO: 2091292
cucuccaaagacuugaagc

SEQ ID NO: 2091294 - RNA, 19 nt, Artificial Sequence
  Description of Artificial Sequence: Synthetic oligonucleotide
  Sense strand starting at position 3896 of SEQ ID NO: 1882050
gcaugauacuuuccuuuga

SEQ ID NO: 2091295 - RNA, 19 nt, Artificial Sequence
  Description of Artificial Sequence: Synthetic oligonucleotide
  Antisense strand to SEQ ID NO: 2091294
ucaaaggaaaguaucaugc

SEQ ID NO: 2091296 - RNA, 19 nt, Artificial Sequence
  Description of Artificial Sequence: Synthetic oligonucleotide
  Sense strand starting at position 48 of SEQ ID NO: 1882051
gugcauuguaaguauuacu

SEQ ID NO: 2091297 - RNA, 19 nt, Artificial Sequence
  Description of Artificial Sequence: Synthetic oligonucleotide
  Antisense strand to SEQ ID NO: 2091296
aguaauacuuacaaugcac

SEQ ID NO: 2091298 - RNA, 19 nt, Artificial Sequence
  Description of Artificial Sequence: Synthetic oligonucleotide
  Sense strand starting at position 178 of SEQ ID NO: 1882051
uuguauaugcaauaagaca

SEQ ID NO: 2091299 - RNA, 19 nt, Artificial Sequence
  Description of Artificial Sequence: Synthetic oligonucleotide
  Antisense strand to SEQ ID NO: 2091298
ugucuuauugcauauacaa

SEQ ID NO: 2091300 - RNA, 19 nt, Artificial Sequence
  Description of Artificial Sequence: Synthetic oligonucleotide
  Sense strand starting at position 421 of SEQ ID NO: 1882051
aggcuaaauuuguaacaug

SEQ ID NO: 2091301 - RNA, 19 nt, Artificial Sequence
  Description of Artificial Sequence: Synthetic oligonucleotide
  Antisense strand to SEQ ID NO: 2091300
cauguuacaaauuuagccu

SEQ ID NO: 2091302 - RNA, 19 nt, Artificial Sequence
  Description of Artificial Sequence: Synthetic oligonucleotide
  Sense strand starting at position 447 of SEQ ID NO: 1882051
guggcagaacucuaaucuu

SEQ ID NO: 2091303 - RNA, 19 nt, Artificial Sequence
  Description of Artificial Sequence: Synthetic oligonucleotide
  Antisense strand to SEQ ID NO: 2091302
aagauuagaguucugccac

SEQ ID NO: 2091304 - RNA, 19 nt, Artificial Sequence
  Description of Artificial Sequence: Synthetic oligonucleotide
  Sense strand starting at position 1000 of SEQ ID NO: 1882051
aucacuucuguuuacugau

SEQ ID NO: 2091305 - RNA, 19 nt, Artificial Sequence
  Description of Artificial Sequence: Synthetic oligonucleotide
  Antisense strand to SEQ ID NO: 2091304
aucaguaaacagaagugau

SEQ ID NO: 2091306 - RNA, 19 nt, Artificial Sequence
  Description of Artificial Sequence: Synthetic oligonucleotide
  Sense strand starting at position 1006 of SEQ ID NO: 1882051
ucuguuuacugauccaaag

SEQ ID NO: 2091307 - RNA, 19 nt, Artificial Sequence
  Description of Artificial Sequence: Synthetic oligonucleotide
  Antisense strand to SEQ ID NO: 2091306
cuuuggaucaguaaacaga

SEQ ID NO: 2091308 - RNA, 19 nt, Artificial Sequence
  Description of Artificial Sequence: Synthetic oligonucleotide
  Sense strand starting at position 1023 of SEQ ID NO: 1882051
agacuacuugucuguauua

SEQ ID NO: 2091309 - RNA, 19 nt, Artificial Sequence
  Description of Artificial Sequence: Synthetic oligonucleotide
  Antisense strand to SEQ ID NO: 2091308
uaauacagacaaguagucu

SEQ ID NO: 2091310 - RNA, 19 nt, Artificial Sequence
  Description of Artificial Sequence: Synthetic oligonucleotide
  Sense strand starting at position 1024 of SEQ ID NO: 1882051
gacuacuugucuguauuag

SEQ ID NO: 2091311 - RNA, 19 nt, Artificial Sequence
  Description of Artificial Sequence: Synthetic oligonucleotide
  Antisense strand to SEQ ID NO: 2091310
cuaauacagacaaguaguc

SEQ ID NO: 2091312 - RNA, 19 nt, Artificial Sequence
  Description of Artificial Sequence: Synthetic oligonucleotide
  Sense strand starting at position 1025 of SEQ ID NO: 1882051
acuacuugucuguauuaga

SEQ ID NO: 2091313 - RNA, 19 nt, Artificial Sequence
  Description of Artificial Sequence: Synthetic oligonucleotide
  Antisense strand to SEQ ID NO: 2091312
ucuaauacagacaaguagu

SEQ ID NO: 2091314 - RNA, 19 nt, Artificial Sequence
  Description of Artificial Sequence: Synthetic oligonucleotide
  Sense strand starting at position 1032 of SEQ ID NO: 1882051
gucuguauuagacaguaaa

SEQ ID NO: 2091315 - RNA, 19 nt, Artificial Sequence
  Description of Artificial Sequence: Synthetic oligonucleotide
  Antisense strand to SEQ ID NO: 2091314
uuuacugucuaauacagac

SEQ ID NO: 2091316 - RNA, 19 nt, Artificial Sequence
  Description of Artificial Sequence: Synthetic oligonucleotide
  Sense strand starting at position 1051 of SEQ ID NO: 1882051
auaucuaggagucgugaua

SEQ ID NO: 2091317 - RNA, 19 nt, Artificial Sequence
  Description of Artificial Sequence: Synthetic oligonucleotide
  Antisense strand to SEQ ID NO: 2091316
uaucacgacuccuagauau

SEQ ID NO: 2091318 - RNA, 19 nt, Artificial Sequence
  Description of Artificial Sequence: Synthetic oligonucleotide
  Sense strand starting at position 1184 of SEQ ID NO: 1882051
ugacauuaguaaucgaguu

SEQ ID NO: 2091319 - RNA, 19 nt, Artificial Sequence
  Description of Artificial Sequence: Synthetic oligonucleotide
  Antisense strand to SEQ ID NO: 2091318
aacucgauuacuaauguca

SEQ ID NO: 2091320 - RNA, 19 nt, Artificial Sequence
  Description of Artificial Sequence: Synthetic oligonucleotide
  Sense strand starting at position 1603 of SEQ ID NO: 1882051
gaacuagaaucucugcgua

SEQ ID NO: 2091321 - RNA, 19 nt, Artificial Sequence
  Description of Artificial Sequence: Synthetic oligonucleotide
  Antisense strand to SEQ ID NO: 2091320
uacgcagagauucuaguuc

SEQ ID NO: 2091322 - RNA, 19 nt, Artificial Sequence
  Description of Artificial Sequence: Synthetic oligonucleotide
  Sense strand starting at position 1605 of SEQ ID NO: 1882051
acuagaaucucugcguaca

SEQ ID NO: 2091323 - RNA, 19 nt, Artificial Sequence
  Description of Artificial Sequence: Synthetic oligonucleotide
  Antisense strand to SEQ ID NO: 2091322
uguacgcagagauucuagu

SEQ ID NO: 2091324 - RNA, 19 nt, Artificial Sequence
  Description of Artificial Sequence: Synthetic oligonucleotide
  Sense strand starting at position 1606 of SEQ ID NO: 1882051
cuagaaucucugcguacag

SEQ ID NO: 2091325 - RNA, 19 nt, Artificial Sequence
  Description of Artificial Sequence: Synthetic oligonucleotide
  Antisense strand to SEQ ID NO: 2091324
cuguacgcagagauucuag

SEQ ID NO: 2091326 - RNA, 19 nt, Artificial Sequence
  Description of Artificial Sequence: Synthetic oligonucleotide
  Sense strand starting at position 1636 of SEQ ID NO: 1882051
augaacuauugagccuaga

SEQ ID NO: 2091327 - RNA, 19 nt, Artificial Sequence
  Description of Artificial Sequence: Synthetic oligonucleotide
  Antisense strand to SEQ ID NO: 2091326
ucuaggcucaauaguucau

SEQ ID NO: 2091328 - RNA, 19 nt, Artificial Sequence
  Description of Artificial Sequence: Synthetic oligonucleotide
  Sense strand starting at position 1691 of SEQ ID NO: 1882051
gaugaaggcucuuuaugaa

SEQ ID NO: 2091329 - RNA, 19 nt, Artificial Sequence
  Description of Artificial Sequence: Synthetic oligonucleotide
  Antisense strand to SEQ ID NO: 2091328
uucauaaagagccuucauc

SEQ ID NO: 2091330 - RNA, 19 nt, Artificial Sequence
  Description of Artificial Sequence: Synthetic oligonucleotide
  Sense strand starting at position 1764 of SEQ ID NO: 1882051
acuaaagaccuuuggguuu

SEQ ID NO: 2091331 - RNA, 19 nt, Artificial Sequence
  Description of Artificial Sequence: Synthetic oligonucleotide
  Antisense strand to SEQ ID NO: 2091330
aaacccaaaggucuuuagu

SEQ ID NO: 2091332 - RNA, 19 nt, Artificial Sequence
  Description of Artificial Sequence: Synthetic oligonucleotide
  Sense strand starting at position 1819 of SEQ ID NO: 1882051
cuuuaaauugcucacguua

SEQ ID NO: 2091333 - RNA, 19 nt, Artificial Sequence
  Description of Artificial Sequence: Synthetic oligonucleotide
  Antisense strand to SEQ ID NO: 2091332
uaacgugagcaauuuaaag

SEQ ID NO: 2091334 - RNA, 19 nt, Artificial Sequence
  Description of Artificial Sequence: Synthetic oligonucleotide
  Sense strand starting at position 1833 of SEQ ID NO: 1882051
cguuaagaaccaugguuua

SEQ ID NO: 2091335 - RNA, 19 nt, Artificial Sequence
  Description of Artificial Sequence: Synthetic oligonucleotide
  Antisense strand to SEQ ID NO: 2091334
uaaaccaugguucuuaacg

SEQ ID NO: 2091336 - RNA, 19 nt, Artificial Sequence
  Description of Artificial Sequence: Synthetic oligonucleotide
  Sense strand starting at position 2044 of SEQ ID NO: 1882051
gaugcaaacgauugcauua

SEQ ID NO: 2091337 - RNA, 19 nt, Artificial Sequence
  Description of Artificial Sequence: Synthetic oligonucleotide
  Antisense strand to SEQ ID NO: 2091336
uaaugcaaucguuugcauc

SEQ ID NO: 2091338 - RNA, 19 nt, Artificial Sequence
  Description of Artificial Sequence: Synthetic oligonucleotide
  Sense strand starting at position 2060 of SEQ ID NO: 1882051
uuauuugucugggaucuuc

SEQ ID NO: 2091339 - RNA, 19 nt, Artificial Sequence
  Description of Artificial Sequence: Synthetic oligonucleotide
  Antisense strand to SEQ ID NO: 2091338
gaagaucccagacaaauaa

SEQ ID NO: 2091340 - RNA, 19 nt, Artificial Sequence
  Description of Artificial Sequence: Synthetic oligonucleotide
  Sense strand starting at position 2170 of SEQ ID NO: 1882051
uaccaagaauucguuuguu

SEQ ID NO: 2091341 - RNA, 19 nt, Artificial Sequence
  Description of Artificial Sequence: Synthetic oligonucleotide
  Antisense strand to SEQ ID NO: 2091340
aacaaacgaauucuuggua

SEQ ID NO: 2091342 - RNA, 19 nt, Artificial Sequence
  Description of Artificial Sequence: Synthetic oligonucleotide
  Sense strand starting at position 2239 of SEQ ID NO: 1882051
gcggaaucuugacuucucu

SEQ ID NO: 2091343 - RNA, 19 nt, Artificial Sequence
  Description of Artificial Sequence: Synthetic oligonucleotide
  Antisense strand to SEQ ID NO: 2091342
agagaagucaagauuccgc

SEQ ID NO: 2091344 - RNA, 19 nt, Artificial Sequence
  Description of Artificial Sequence: Synthetic oligonucleotide
  Sense strand starting at position 2261 of SEQ ID NO: 1882051
gcuucaagucuuuggagag

SEQ ID NO: 2091345 - RNA, 19 nt, Artificial Sequence
  Description of Artificial Sequence: Synthetic oligonucleotide
  Antisense strand to SEQ ID NO: 2091344
cucuccaaagacuugaagc

SEQ ID NO: 2091346 - RNA, 19 nt, Artificial Sequence
  Description of Artificial Sequence: Synthetic oligonucleotide
  Sense strand starting at position 2285 of SEQ ID NO: 1882051
gcaugauacuuuccuuuga

SEQ ID NO: 2091347 - RNA, 19 nt, Artificial Sequence
  Description of Artificial Sequence: Synthetic oligonucleotide
  Antisense strand to SEQ ID NO: 2091346
ucaaaggaaaguaucaugc

SEQ ID NO: 2091348 - RNA, 19 nt, Artificial Sequence
  Description of Artificial Sequence: Synthetic oligonucleotide
  Sense strand starting at position 2312 of SEQ ID NO: 1882051
auaacauauugagggagaa

SEQ ID NO: 2091349 - RNA, 19 nt, Artificial Sequence
  Description of Artificial Sequence: Synthetic oligonucleotide
  Antisense strand to SEQ ID NO: 2091348
uucucccucaauauguuau

SEQ ID NO: 2091350 - RNA, 19 nt, Artificial Sequence
  Description of Artificial Sequence: Synthetic oligonucleotide
  Sense strand starting at position 2372 of SEQ ID NO: 1882051
agaucuugugcuugucaga

SEQ ID NO: 2091351 - RNA, 19 nt, Artificial Sequence
  Description of Artificial Sequence: Synthetic oligonucleotide
  Antisense strand to SEQ ID NO: 2091350
ucugacaagcacaagaucu

SEQ ID NO: 2091352 - RNA, 19 nt, Artificial Sequence
  Description of Artificial Sequence: Synthetic oligonucleotide
  Sense strand starting at position 2713 of SEQ ID NO: 1882051
aggucuaagucagucuuga

SEQ ID NO: 2091353 - RNA, 19 nt, Artificial Sequence
  Description of Artificial Sequence: Synthetic oligonucleotide
  Antisense strand to SEQ ID NO: 2091352
ucaagacugacuuagaccu

SEQ ID NO: 2091354 - RNA, 19 nt, Artificial Sequence
  Description of Artificial Sequence: Synthetic oligonucleotide
  Sense strand starting at position 3131 of SEQ ID NO: 1882051
cugggaguucacgaucuuu

SEQ ID NO: 2091355 - RNA, 19 nt, Artificial Sequence
  Description of Artificial Sequence: Synthetic oligonucleotide
  Antisense strand to SEQ ID NO: 2091354
aaagaucgugaacucccag

SEQ ID NO: 2091356 - RNA, 19 nt, Artificial Sequence
  Description of Artificial Sequence: Synthetic oligonucleotide
  Sense strand starting at position 3268 of SEQ ID NO: 1882051
ggccucuguccguugguaa

SEQ ID NO: 2091357 - RNA, 19 nt, Artificial Sequence
  Description of Artificial Sequence: Synthetic oligonucleotide
  Antisense strand to SEQ ID NO: 2091356
uuaccaacggacagaggcc

SEQ ID NO: 2091358 - RNA, 19 nt, Artificial Sequence
  Description of Artificial Sequence: Synthetic oligonucleotide
  Sense strand starting at position 3283 of SEQ ID NO: 1882051
guaaucgcugugucagcua

SEQ ID NO: 2091359 - RNA, 19 nt, Artificial Sequence
  Description of Artificial Sequence: Synthetic oligonucleotide
  Antisense strand to SEQ ID NO: 2091358
uagcugacacagcgauuac

SEQ ID NO: 2091360 - RNA, 19 nt, Artificial Sequence
  Description of Artificial Sequence: Synthetic oligonucleotide
  Sense strand starting at position 3290 of SEQ ID NO: 1882051
cugugucagcuauagaugu

SEQ ID NO: 2091361 - RNA, 19 nt, Artificial Sequence
  Description of Artificial Sequence: Synthetic oligonucleotide
  Antisense strand to SEQ ID NO: 2091360
acaucuauagcugacacag

SEQ ID NO: 2091362 - RNA, 19 nt, Artificial Sequence
  Description of Artificial Sequence: Synthetic oligonucleotide
  Sense strand starting at position 3292 of SEQ ID NO: 1882051
gugucagcuauagauguga

SEQ ID NO: 2091363 - RNA, 19 nt, Artificial Sequence
  Description of Artificial Sequence: Synthetic oligonucleotide
  Antisense strand to SEQ ID NO: 2091362
ucacaucuauagcugacac

SEQ ID NO: 2091364 - RNA, 19 nt, Artificial Sequence
  Description of Artificial Sequence: Synthetic oligonucleotide
  Sense strand starting at position 3355 of SEQ ID NO: 1882051
gcaagauuucuaugccgau

SEQ ID NO: 2091365 - RNA, 19 nt, Artificial Sequence
  Description of Artificial Sequence: Synthetic oligonucleotide
  Antisense strand to SEQ ID NO: 2091364
aucggcauagaaaucuugc

SEQ ID NO: 2091366 - RNA, 19 nt, Artificial Sequence
  Description of Artificial Sequence: Synthetic oligonucleotide
  Sense strand starting at position 3377 of SEQ ID NO: 1882051
aagggagagcguugacaua

SEQ ID NO: 2091367 - RNA, 19 nt, Artificial Sequence
  Description of Artificial Sequence: Synthetic oligonucleotide
  Antisense strand to SEQ ID NO: 2091366
uaugucaacgcucucccuu

SEQ ID NO: 2091368 - RNA, 19 nt, Artificial Sequence
  Description of Artificial Sequence: Synthetic oligonucleotide
  Sense strand starting at position 3417 of SEQ ID NO: 1882051
ugcucuauacauugggagu

SEQ ID NO: 2091369 - RNA, 19 nt, Artificial Sequence
  Description of Artificial Sequence: Synthetic oligonucleotide
  Antisense strand to SEQ ID NO: 2091368
acucccaauguauagagca

SEQ ID NO: 2091370 - RNA, 19 nt, Artificial Sequence
  Description of Artificial Sequence: Synthetic oligonucleotide
  Sense strand starting at position 3418 of SEQ ID NO: 1882051
gcucuauacauugggagua

SEQ ID NO: 2091371 - RNA, 19 nt, Artificial Sequence
  Description of Artificial Sequence: Synthetic oligonucleotide
  Antisense strand to SEQ ID NO: 2091370
uacucccaauguauagagc

SEQ ID NO: 2091372 - RNA, 19 nt, Artificial Sequence
  Description of Artificial Sequence: Synthetic oligonucleotide
  Sense strand starting at position 3622 of SEQ ID NO: 1882051
agaggucuggcgggaaaug

SEQ ID NO: 2091373 - RNA, 19 nt, Artificial Sequence
  Description of Artificial Sequence: Synthetic oligonucleotide
  Antisense strand to SEQ ID NO: 2091372
cauuucccgccagaccucu

SEQ ID NO: 2091374 - RNA, 19 nt, Artificial Sequence
  Description of Artificial Sequence: Synthetic oligonucleotide
  Sense strand starting at position 3623 of SEQ ID NO: 1882051
gaggucuggcgggaaauga

SEQ ID NO: 2091375 - RNA, 19 nt, Artificial Sequence
  Description of Artificial Sequence: Synthetic oligonucleotide
  Antisense strand to SEQ ID NO: 2091374
ucauuucccgccagaccuc

SEQ ID NO: 2091376 - RNA, 19 nt, Artificial Sequence
  Description of Artificial Sequence: Synthetic oligonucleotide
  Sense strand starting at position 104 of SEQ ID NO: 1882052
aaaguagauuuccagaugu

SEQ ID NO: 2091377 - RNA, 19 nt, Artificial Sequence
  Description of Artificial Sequence: Synthetic oligonucleotide
  Antisense strand to SEQ ID NO: 2091376
acaucuggaaaucuacuuu

SEQ ID NO: 2091378 - RNA, 19 nt, Artificial Sequence
  Description of Artificial Sequence: Synthetic oligonucleotide
  Sense strand starting at position 147 of SEQ ID NO: 1882052
agacaagauuguuccugga

SEQ ID NO: 2091379 - RNA, 19 nt, Artificial Sequence
  Description of Artificial Sequence: Synthetic oligonucleotide
  Antisense strand to SEQ ID NO: 2091378
uccaggaacaaucuugucu

SEQ ID NO: 2091380 - RNA, 19 nt, Artificial Sequence
  Description of Artificial Sequence: Synthetic oligonucleotide
  Sense strand starting at position 149 of SEQ ID NO: 1882052
acaagauuguuccuggaaa

SEQ ID NO: 2091381 - RNA, 19 nt, Artificial Sequence
  Description of Artificial Sequence: Synthetic oligonucleotide
  Antisense strand to SEQ ID NO: 2091380
uuuccaggaacaaucuugu

SEQ ID NO: 2091382 - RNA, 19 nt, Artificial Sequence
  Description of Artificial Sequence: Synthetic oligonucleotide
  Sense strand starting at position 269 of SEQ ID NO: 1882052
agguuacaacccuagcuua

SEQ ID NO: 2091383 - RNA, 19 nt, Artificial Sequence
  Description of Artificial Sequence: Synthetic oligonucleotide
  Antisense strand to SEQ ID NO: 2091382
uaagcuaggguuguaaccu

SEQ ID NO: 2091384 - RNA, 19 nt, Artificial Sequence
  Description of Artificial Sequence: Synthetic oligonucleotide
  Sense strand starting at position 433 of SEQ ID NO: 1882052
uugaaucuacauugggauu

SEQ ID NO: 2091385 - RNA, 19 nt, Artificial Sequence
  Description of Artificial Sequence: Synthetic oligonucleotide
  Antisense strand to SEQ ID NO: 2091384
aaucccaauguagauucaa

SEQ ID NO: 2091386 - RNA, 19 nt, Artificial Sequence
  Description of Artificial Sequence: Synthetic oligonucleotide
  Sense strand starting at position 444 of SEQ ID NO: 1882052
uugggauucccuugguuag

SEQ ID NO: 2091387 - RNA, 19 nt, Artificial Sequence
  Description of Artificial Sequence: Synthetic oligonucleotide
  Antisense strand to SEQ ID NO: 2091386
cuaaccaagggaaucccaa

SEQ ID NO: 2091388 - RNA, 19 nt, Artificial Sequence
  Description of Artificial Sequence: Synthetic oligonucleotide
  Sense strand starting at position 564 of SEQ ID NO: 1882052
gauacaaugcuuuagguau

SEQ ID NO: 2091389 - RNA, 19 nt, Artificial Sequence
  Description of Artificial Sequence: Synthetic oligonucleotide
  Antisense strand to SEQ ID NO: 2091388
auaccuaaagcauuguauc

SEQ ID NO: 2091390 - RNA, 19 nt, Artificial Sequence
  Description of Artificial Sequence: Synthetic oligonucleotide
  Sense strand starting at position 578 of SEQ ID NO: 1882052
gguauuauucuggaauguu

SEQ ID NO: 2091391 - RNA, 19 nt, Artificial Sequence
  Description of Artificial Sequence: Synthetic oligonucleotide
  Antisense strand to SEQ ID NO: 2091390
aacauuccagaauaauacc

SEQ ID NO: 2091392 - RNA, 19 nt, Artificial Sequence
  Description of Artificial Sequence: Synthetic oligonucleotide
  Sense strand starting at position 676 of SEQ ID NO: 1882052
ugagcauuagcucaucuac

SEQ ID NO: 2091393 - RNA, 19 nt, Artificial Sequence
  Description of Artificial Sequence: Synthetic oligonucleotide
  Antisense strand to SEQ ID NO: 2091392
guagaugagcuaaugcuca

SEQ ID NO: 2091394 - RNA, 19 nt, Artificial Sequence
  Description of Artificial Sequence: Synthetic oligonucleotide
  Sense strand starting at position 969 of SEQ ID NO: 1882052
cuuaucuucuggccacaga

SEQ ID NO: 2091395 - RNA, 19 nt, Artificial Sequence
  Description of Artificial Sequence: Synthetic oligonucleotide
  Antisense strand to SEQ ID NO: 2091394
ucuguggccagaagauaag

SEQ ID NO: 2091396 - RNA, 19 nt, Artificial Sequence
  Description of Artificial Sequence: Synthetic oligonucleotide
  Sense strand starting at position 970 of SEQ ID NO: 1882052
uuaucuucuggccacagaa

SEQ ID NO: 2091397 - RNA, 19 nt, Artificial Sequence
  Description of Artificial Sequence: Synthetic oligonucleotide
  Antisense strand to SEQ ID NO: 2091396
uucuguggccagaagauaa

SEQ ID NO: 2091398 - RNA, 19 nt, Artificial Sequence
  Description of Artificial Sequence: Synthetic oligonucleotide
  Sense strand starting at position 1373 of SEQ ID NO: 1882052
agacauuguuacuuugaca

SEQ ID NO: 2091399 - RNA, 19 nt, Artificial Sequence
  Description of Artificial Sequence: Synthetic oligonucleotide
  Antisense strand to SEQ ID NO: 2091398
ugucaaaguaacaaugucu

SEQ ID NO: 2091400 - RNA, 19 nt, Artificial Sequence
  Description of Artificial Sequence: Synthetic oligonucleotide
  Sense strand starting at position 1450 of SEQ ID NO: 1882052
ggucuuaaagaucaguucu

SEQ ID NO: 2091401 - RNA, 19 nt, Artificial Sequence
  Description of Artificial Sequence: Synthetic oligonucleotide
  Antisense strand to SEQ ID NO: 2091400
agaacugaucuuuaagacc

SEQ ID NO: 2091402 - RNA, 19 nt, Artificial Sequence
  Description of Artificial Sequence: Synthetic oligonucleotide
  Sense strand starting at position 1639 of SEQ ID NO: 1882052
ggcccaaguguggagaaau

SEQ ID NO: 2091403 - RNA, 19 nt, Artificial Sequence
  Description of Artificial Sequence: Synthetic oligonucleotide
  Antisense strand to SEQ ID NO: 2091402
auuucuccacacuugggcc

SEQ ID NO: 2091404 - RNA, 19 nt, Artificial Sequence
  Description of Artificial Sequence: Synthetic oligonucleotide
  Sense strand starting at position 1744 of SEQ ID NO: 1882052
guaacauggacucaccgau

SEQ ID NO: 2091405 - RNA, 19 nt, Artificial Sequence
  Description of Artificial Sequence: Synthetic oligonucleotide
  Antisense strand to SEQ ID NO: 2091404
aucggugaguccauguuac

SEQ ID NO: 2091406 - RNA, 19 nt, Artificial Sequence
  Description of Artificial Sequence: Synthetic oligonucleotide
  Sense strand starting at position 1773 of SEQ ID NO: 1882052
gagucuuccuaagugacaa

SEQ ID NO: 2091407 - RNA, 19 nt, Artificial Sequence
  Description of Artificial Sequence: Synthetic oligonucleotide
  Antisense strand to SEQ ID NO: 2091406
uugucacuuaggaagacuc

SEQ ID NO: 2091408 - RNA, 19 nt, Artificial Sequence
  Description of Artificial Sequence: Synthetic oligonucleotide
  Sense strand starting at position 1990 of SEQ ID NO: 1882052
ggagacuugccauguaacc

SEQ ID NO: 2091409 - RNA, 19 nt, Artificial Sequence
  Description of Artificial Sequence: Synthetic oligonucleotide
  Antisense strand to SEQ ID NO: 2091408
gguuacauggcaagucucc

SEQ ID NO: 2091410 - RNA, 19 nt, Artificial Sequence
  Description of Artificial Sequence: Synthetic oligonucleotide
  Sense strand starting at position 2226 of SEQ ID NO: 1882052
uauaguguacaguagucau

SEQ ID NO: 2091411 - RNA, 19 nt, Artificial Sequence
  Description of Artificial Sequence: Synthetic oligonucleotide
  Antisense strand to SEQ ID NO: 2091410
augacuacuguacacuaua

SEQ ID NO: 2091412 - RNA, 19 nt, Artificial Sequence
  Description of Artificial Sequence: Synthetic oligonucleotide
  Sense strand starting at position 2230 of SEQ ID NO: 1882052
guguacaguagucaugaga

SEQ ID NO: 2091413 - RNA, 19 nt, Artificial Sequence
  Description of Artificial Sequence: Synthetic oligonucleotide
  Antisense strand to SEQ ID NO: 2091412
ucucaugacuacuguacac

SEQ ID NO: 2091414 - RNA, 19 nt, Artificial Sequence
  Description of Artificial Sequence: Synthetic oligonucleotide
  Sense strand starting at position 2327 of SEQ ID NO: 1882052
agacauaaaucgguaucag

SEQ ID NO: 2091415 - RNA, 19 nt, Artificial Sequence
  Description of Artificial Sequence: Synthetic oligonucleotide
  Antisense strand to SEQ ID NO: 2091414
cugauaccgauuuaugucu

SEQ ID NO: 2091416 - RNA, 19 nt, Artificial Sequence
  Description of Artificial Sequence: Synthetic oligonucleotide
  Sense strand starting at position 2336 of SEQ ID NO: 1882052
ucgguaucagaagguauau

SEQ ID NO: 2091417 - RNA, 19 nt, Artificial Sequence
  Description of Artificial Sequence: Synthetic oligonucleotide
  Antisense strand to SEQ ID NO: 2091416
auauaccuucugauaccga

SEQ ID NO: 2091418 - RNA, 19 nt, Artificial Sequence
  Description of Artificial Sequence: Synthetic oligonucleotide
  Sense strand starting at position 2369 of SEQ ID NO: 1882052
gugcauauuuauguaucua

SEQ ID NO: 2091419 - RNA, 19 nt, Artificial Sequence
  Description of Artificial Sequence: Synthetic oligonucleotide
  Antisense strand to SEQ ID NO: 2091418
uagauacauaaauaugcac

SEQ ID NO: 2091420 - RNA, 19 nt, Artificial Sequence
  Description of Artificial Sequence: Synthetic oligonucleotide
  Sense strand starting at position 2419 of SEQ ID NO: 1882052
gaggcaucaggcugaagaa

SEQ ID NO: 2091421 - RNA, 19 nt, Artificial Sequence
  Description of Artificial Sequence: Synthetic oligonucleotide
  Antisense strand to SEQ ID NO: 2091420
uucuucagccugaugccuc

SEQ ID NO: 2091422 - RNA, 19 nt, Artificial Sequence
  Description of Artificial Sequence: Synthetic oligonucleotide
  Sense strand starting at position 2547 of SEQ ID NO: 1882052
uuagacuaguuggcggaaa

SEQ ID NO: 2091423 - RNA, 19 nt, Artificial Sequence
  Description of Artificial Sequence: Synthetic oligonucleotide
  Antisense strand to SEQ ID NO: 2091422
uuuccgccaacuagucuaa

SEQ ID NO: 2091424 - RNA, 19 nt, Artificial Sequence
  Description of Artificial Sequence: Synthetic oligonucleotide
  Sense strand starting at position 2671 of SEQ ID NO: 1882052
gcuacaggugaccagaauu

SEQ ID NO: 2091425 - RNA, 19 nt, Artificial Sequence
  Description of Artificial Sequence: Synthetic oligonucleotide
  Antisense strand to SEQ ID NO: 2091424
aauucuggucaccuguagc

SEQ ID NO: 2091426 - RNA, 19 nt, Artificial Sequence
  Description of Artificial Sequence: Synthetic oligonucleotide
  Sense strand starting at position 2770 of SEQ ID NO: 1882052
agaccaaggcccugaaauu

SEQ ID NO: 2091427 - RNA, 19 nt, Artificial Sequence
  Description of Artificial Sequence: Synthetic oligonucleotide
  Antisense strand to SEQ ID NO: 2091426
aauuucagggccuuggucu

SEQ ID NO: 2091428 - RNA, 19 nt, Artificial Sequence
  Description of Artificial Sequence: Synthetic oligonucleotide
  Sense strand starting at position 2841 of SEQ ID NO: 1882052
ccuaguuuagaauagcauu

SEQ ID NO: 2091429 - RNA, 19 nt, Artificial Sequence
  Description of Artificial Sequence: Synthetic oligonucleotide
  Antisense strand to SEQ ID NO: 2091428
aaugcuauucuaaacuagg

SEQ ID NO: 2091430 - RNA, 19 nt, Artificial Sequence
  Description of Artificial Sequence: Synthetic oligonucleotide
  Sense strand starting at position 2849 of SEQ ID NO: 1882052
agaauagcauuaucuuaga

SEQ ID NO: 2091431 - RNA, 19 nt, Artificial Sequence
  Description of Artificial Sequence: Synthetic oligonucleotide
  Antisense strand to SEQ ID NO: 2091430
ucuaagauaaugcuauucu

SEQ ID NO: 2091432 - RNA, 19 nt, Artificial Sequence
  Description of Artificial Sequence: Synthetic oligonucleotide
  Sense strand starting at position 2943 of SEQ ID NO: 1882052
cgcaguuaguauuuggauu

SEQ ID NO: 2091433 - RNA, 19 nt, Artificial Sequence
  Description of Artificial Sequence: Synthetic oligonucleotide
  Antisense strand to SEQ ID NO: 2091432
aauccaaauacuaacugcg

SEQ ID NO: 2091434 - RNA, 19 nt, Artificial Sequence
  Description of Artificial Sequence: Synthetic oligonucleotide
  Sense strand starting at position 2944 of SEQ ID NO: 1882052
gcaguuaguauuuggauuc

SEQ ID NO: 2091435 - RNA, 19 nt, Artificial Sequence
  Description of Artificial Sequence: Synthetic oligonucleotide
  Antisense strand to SEQ ID NO: 2091434
gaauccaaauacuaacugc

SEQ ID NO: 2091436 - RNA, 19 nt, Artificial Sequence
  Description of Artificial Sequence: Synthetic oligonucleotide
  Sense strand starting at position 2977 of SEQ ID NO: 1882052
ggacuucucaaaggugcau

SEQ ID NO: 2091437 - RNA, 19 nt, Artificial Sequence
  Description of Artificial Sequence: Synthetic oligonucleotide
  Antisense strand to SEQ ID NO: 2091436
augcaccuuugagaagucc

SEQ ID NO: 2091438 - RNA, 19 nt, Artificial Sequence
  Description of Artificial Sequence: Synthetic oligonucleotide
  Sense strand starting at position 3208 of SEQ ID NO: 1882052
cugacuuuguccucugaau

SEQ ID NO: 2091439 - RNA, 19 nt, Artificial Sequence
  Description of Artificial Sequence: Synthetic oligonucleotide
  Antisense strand to SEQ ID NO: 2091438
auucagaggacaaagucag

SEQ ID NO: 2091440 - RNA, 19 nt, Artificial Sequence
  Description of Artificial Sequence: Synthetic oligonucleotide
  Sense strand starting at position 3219 of SEQ ID NO: 1882052
cucugaaugcaggaacuuu

SEQ ID NO: 2091441 - RNA, 19 nt, Artificial Sequence
  Description of Artificial Sequence: Synthetic oligonucleotide
  Antisense strand to SEQ ID NO: 2091440
aaaguuccugcauucagag

SEQ ID NO: 2091442 - RNA, 19 nt, Artificial Sequence
  Description of Artificial Sequence: Synthetic oligonucleotide
  Sense strand starting at position 3513 of SEQ ID NO: 1882052
gguaauggauauuccaauu

SEQ ID NO: 2091443 - RNA, 19 nt, Artificial Sequence
  Description of Artificial Sequence: Synthetic oligonucleotide
  Antisense strand to SEQ ID NO: 2091442
aauuggaauauccauuacc

SEQ ID NO: 2091444 - RNA, 19 nt, Artificial Sequence
  Description of Artificial Sequence: Synthetic oligonucleotide
  Sense strand starting at position 3714 of SEQ ID NO: 1882052
aucaguuucucagcuaaag

SEQ ID NO: 2091445 - RNA, 19 nt, Artificial Sequence
  Description of Artificial Sequence: Synthetic oligonucleotide
  Antisense strand to SEQ ID NO: 2091444
cuuuagcugagaaacugau

SEQ ID NO: 2091446 - RNA, 19 nt, Artificial Sequence
  Description of Artificial Sequence: Synthetic oligonucleotide
  Sense strand starting at position 3788 of SEQ ID NO: 1882052
aauauaaauucgccaguga

SEQ ID NO: 2091447 - RNA, 19 nt, Artificial Sequence
  Description of Artificial Sequence: Synthetic oligonucleotide
  Antisense strand to SEQ ID NO: 2091446
ucacuggcgaauuuauauu

SEQ ID NO: 2091448 - RNA, 19 nt, Artificial Sequence
  Description of Artificial Sequence: Synthetic oligonucleotide
  Sense strand starting at position 3789 of SEQ ID NO: 1882052
auauaaauucgccagugaa

SEQ ID NO: 2091449 - RNA, 19 nt, Artificial Sequence
  Description of Artificial Sequence: Synthetic oligonucleotide
  Antisense strand to SEQ ID NO: 2091448
uucacuggcgaauuuauau

SEQ ID NO: 2091450 - RNA, 19 nt, Artificial Sequence
  Description of Artificial Sequence: Synthetic oligonucleotide
  Sense strand starting at position 3881 of SEQ ID NO: 1882052
guaguccucagguagaaca

SEQ ID NO: 2091451 - RNA, 19 nt, Artificial Sequence
  Description of Artificial Sequence: Synthetic oligonucleotide
  Antisense strand to SEQ ID NO: 2091450
uguucuaccugaggacuac

SEQ ID NO: 2091452 - RNA, 19 nt, Artificial Sequence
  Description of Artificial Sequence: Synthetic oligonucleotide
  Sense strand starting at position 3923 of SEQ ID NO: 1882052
gaacucaaggucuagcuua

SEQ ID NO: 2091453 - RNA, 19 nt, Artificial Sequence
  Description of Artificial Sequence: Synthetic oligonucleotide
  Antisense strand to SEQ ID NO: 2091452
uaagcuagaccuugaguuc

SEQ ID NO: 2091454 - RNA, 19 nt, Artificial Sequence
  Description of Artificial Sequence: Synthetic oligonucleotide
  Sense strand starting at position 3937 of SEQ ID NO: 1882052
gcuuaaguuggguauuugu

SEQ ID NO: 2091455 - RNA, 19 nt, Artificial Sequence
  Description of Artificial Sequence: Synthetic oligonucleotide
  Antisense strand to SEQ ID NO: 2091454
acaaauacccaacuuaagc

SEQ ID NO: 2091456 - RNA, 19 nt, Artificial Sequence
  Description of Artificial Sequence: Synthetic oligonucleotide
  Sense strand starting at position 86 of SEQ ID NO: 1882053
uuaagauuagucugugaag

SEQ ID NO: 2091457 - RNA, 19 nt, Artificial Sequence
  Description of Artificial Sequence: Synthetic oligonucleotide
  Antisense strand to SEQ ID NO: 2091456
cuucacagacuaaucuuaa

SEQ ID NO: 2091458 - RNA, 19 nt, Artificial Sequence
  Description of Artificial Sequence: Synthetic oligonucleotide
  Sense strand starting at position 87 of SEQ ID NO: 1882053
uaagauuagucugugaagu

SEQ ID NO: 2091459 - RNA, 19 nt, Artificial Sequence
  Description of Artificial Sequence: Synthetic oligonucleotide
  Antisense strand to SEQ ID NO: 2091458
acuucacagacuaaucuua

SEQ ID NO: 2091460 - RNA, 19 nt, Artificial Sequence
  Description of Artificial Sequence: Synthetic oligonucleotide
  Sense strand starting at position 157 of SEQ ID NO: 1882053
uagggauagggucagucuu

SEQ ID NO: 2091461 - RNA, 19 nt, Artificial Sequence
  Description of Artificial Sequence: Synthetic oligonucleotide
  Antisense strand to SEQ ID NO: 2091460
aagacugacccuaucccua

SEQ ID NO: 2091462 - RNA, 19 nt, Artificial Sequence
  Description of Artificial Sequence: Synthetic oligonucleotide
  Sense strand starting at position 167 of SEQ ID NO: 1882053
gucagucuuccauacuaca

SEQ ID NO: 2091463 - RNA, 19 nt, Artificial Sequence
  Description of Artificial Sequence: Synthetic oligonucleotide
  Antisense strand to SEQ ID NO: 2091462
uguaguauggaagacugac

SEQ ID NO: 2091464 - RNA, 19 nt, Artificial Sequence
  Description of Artificial Sequence: Synthetic oligonucleotide
  Sense strand starting at position 284 of SEQ ID NO: 1882053
gcuguauaaucaucuggaa

SEQ ID NO: 2091465 - RNA, 19 nt, Artificial Sequence
  Description of Artificial Sequence: Synthetic oligonucleotide
  Antisense strand to SEQ ID NO: 2091464
uuccagaugauuauacagc

SEQ ID NO: 2091466 - RNA, 19 nt, Artificial Sequence
  Description of Artificial Sequence: Synthetic oligonucleotide
  Sense strand starting at position 371 of SEQ ID NO: 1882053
uagugauggagugguagga

SEQ ID NO: 2091467 - RNA, 19 nt, Artificial Sequence
  Description of Artificial Sequence: Synthetic oligonucleotide
  Antisense strand to SEQ ID NO: 2091466
uccuaccacuccaucacua

SEQ ID NO: 2091468 - RNA, 19 nt, Artificial Sequence
  Description of Artificial Sequence: Synthetic oligonucleotide
  Sense strand starting at position 410 of SEQ ID NO: 1882053
cugcuagucgaggauaaag

SEQ ID NO: 2091469 - RNA, 19 nt, Artificial Sequence
  Description of Artificial Sequence: Synthetic oligonucleotide
  Antisense strand to SEQ ID NO: 2091468
cuuuauccucgacuagcag

SEQ ID NO: 2091470 - RNA, 19 nt, Artificial Sequence
  Description of Artificial Sequence: Synthetic oligonucleotide
  Sense strand starting at position 424 of SEQ ID NO: 1882053
uaaagaggcccuggacaua

SEQ ID NO: 2091471 - RNA, 19 nt, Artificial Sequence
  Description of Artificial Sequence: Synthetic oligonucleotide
  Antisense strand to SEQ ID NO: 2091470
uauguccagggccucuuua

SEQ ID NO: 2091472 - RNA, 19 nt, Artificial Sequence
  Description of Artificial Sequence: Synthetic oligonucleotide
  Sense strand starting at position 495 of SEQ ID NO: 1882053
auuuauugacugcgauguu

SEQ ID NO: 2091473 - RNA, 19 nt, Artificial Sequence
  Description of Artificial Sequence: Synthetic oligonucleotide
  Antisense strand to SEQ ID NO: 2091472
aacaucgcagucaauaaau

SEQ ID NO: 2091474 - RNA, 19 nt, Artificial Sequence
  Description of Artificial Sequence: Synthetic oligonucleotide
  Sense strand starting at position 507 of SEQ ID NO: 1882053
cgauguuuagacgauccuu

SEQ ID NO: 2091475 - RNA, 19 nt, Artificial Sequence
  Description of Artificial Sequence: Synthetic oligonucleotide
  Antisense strand to SEQ ID NO: 2091474
aaggaucgucuaaacaucg

SEQ ID NO: 2091476 - RNA, 19 nt, Artificial Sequence
  Description of Artificial Sequence: Synthetic oligonucleotide
  Sense strand starting at position 589 of SEQ ID NO: 1882053
ugcucagcucaugauagau

SEQ ID NO: 2091477 - RNA, 19 nt, Artificial Sequence
  Description of Artificial Sequence: Synthetic oligonucleotide
  Antisense strand to SEQ ID NO: 2091476
aucuaucaugagcugagca

SEQ ID NO: 2091478 - RNA, 19 nt, Artificial Sequence
  Description of Artificial Sequence: Synthetic oligonucleotide
  Sense strand starting at position 934 of SEQ ID NO: 1882053
gcaguuguagauuaucaca

SEQ ID NO: 2091479 - RNA, 19 nt, Artificial Sequence
  Description of Artificial Sequence: Synthetic oligonucleotide
  Antisense strand to SEQ ID NO: 2091478
ugugauaaucuacaacugc

SEQ ID NO: 2091480 - RNA, 19 nt, Artificial Sequence
  Description of Artificial Sequence: Synthetic oligonucleotide
  Sense strand starting at position 1071 of SEQ ID NO: 1882053
uaaucaguugcagagauuc

SEQ ID NO: 2091481 - RNA, 19 nt, Artificial Sequence
  Description of Artificial Sequence: Synthetic oligonucleotide
  Antisense strand to SEQ ID NO: 2091480
gaaucucugcaacugauua

SEQ ID NO: 2091482 - RNA, 19 nt, Artificial Sequence
  Description of Artificial Sequence: Synthetic oligonucleotide
  Sense strand starting at position 1173 of SEQ ID NO: 1882053
auacaaucauggcugcaua

SEQ ID NO: 2091483 - RNA, 19 nt, Artificial Sequence
  Description of Artificial Sequence: Synthetic oligonucleotide
  Antisense strand to SEQ ID NO: 2091482
uaugcagccaugauuguau

SEQ ID NO: 2091484 - RNA, 19 nt, Artificial Sequence
  Description of Artificial Sequence: Synthetic oligonucleotide
  Sense strand starting at position 1218 of SEQ ID NO: 1882053
aguggucccauaggauaau

SEQ ID NO: 2091485 - RNA, 19 nt, Artificial Sequence
  Description of Artificial Sequence: Synthetic oligonucleotide
  Antisense strand to SEQ ID NO: 2091484
auuauccuaugggaccacu

SEQ ID NO: 2091486 - RNA, 19 nt, Artificial Sequence
  Description of Artificial Sequence: Synthetic oligonucleotide
  Sense strand starting at position 1653 of SEQ ID NO: 1882053
aguguaaucuauuuguacu

SEQ ID NO: 2091487 - RNA, 19 nt, Artificial Sequence
  Description of Artificial Sequence: Synthetic oligonucleotide
  Antisense strand to SEQ ID NO: 2091486
aguacaaauagauuacacu

SEQ ID NO: 2091488 - RNA, 19 nt, Artificial Sequence
  Description of Artificial Sequence: Synthetic oligonucleotide
  Sense strand starting at position 1667 of SEQ ID NO: 1882053
guacuuguuccuggcauuu

SEQ ID NO: 2091489 - RNA, 19 nt, Artificial Sequence
  Description of Artificial Sequence: Synthetic oligonucleotide
  Antisense strand to SEQ ID NO: 2091488
aaaugccaggaacaaguac

SEQ ID NO: 2091490 - RNA, 19 nt, Artificial Sequence
  Description of Artificial Sequence: Synthetic oligonucleotide
  Sense strand starting at position 1782 of SEQ ID NO: 1882053
accucugguccugggaaca

SEQ ID NO: 2091491 - RNA, 19 nt, Artificial Sequence
  Description of Artificial Sequence: Synthetic oligonucleotide
  Antisense strand to SEQ ID NO: 2091490
uguucccaggaccagaggu

SEQ ID NO: 2091492 - RNA, 19 nt, Artificial Sequence
  Description of Artificial Sequence: Synthetic oligonucleotide
  Sense strand starting at position 1826 of SEQ ID NO: 1882053
cgaucuccugccgaacaga

SEQ ID NO: 2091493 - RNA, 19 nt, Artificial Sequence
  Description of Artificial Sequence: Synthetic oligonucleotide
  Antisense strand to SEQ ID NO: 2091492
ucuguucggcaggagaucg

SEQ ID NO: 2091494 - RNA, 19 nt, Artificial Sequence
  Description of Artificial Sequence: Synthetic oligonucleotide
  Sense strand starting at position 2088 of SEQ ID NO: 1882053
cgcgauuguguggauuuca

SEQ ID NO: 2091495 - RNA, 19 nt, Artificial Sequence
  Description of Artificial Sequence: Synthetic oligonucleotide
  Antisense strand to SEQ ID NO: 2091494
ugaaauccacacaaucgcg

SEQ ID NO: 2091496 - RNA, 19 nt, Artificial Sequence
  Description of Artificial Sequence: Synthetic oligonucleotide
  Sense strand starting at position 2266 of SEQ ID NO: 1882053
aguggaaacguacaguaau

SEQ ID NO: 2091497 - RNA, 19 nt, Artificial Sequence
  Description of Artificial Sequence: Synthetic oligonucleotide
  Antisense strand to SEQ ID NO: 2091496
auuacuguacguuuccacu

SEQ ID NO: 2091498 - RNA, 19 nt, Artificial Sequence
  Description of Artificial Sequence: Synthetic oligonucleotide
  Sense strand starting at position 2367 of SEQ ID NO: 1882053
gccgcauuuguguaccuga

SEQ ID NO: 2091499 - RNA, 19 nt, Artificial Sequence
  Description of Artificial Sequence: Synthetic oligonucleotide
  Antisense strand to SEQ ID NO: 2091498
ucagguacacaaaugcggc

SEQ ID NO: 2091500 - RNA, 19 nt, Artificial Sequence
  Description of Artificial Sequence: Synthetic oligonucleotide
  Sense strand starting at position 2619 of SEQ ID NO: 1882053
gggagucugugauucggaa

SEQ ID NO: 2091501 - RNA, 19 nt, Artificial Sequence
  Description of Artificial Sequence: Synthetic oligonucleotide
  Antisense strand to SEQ ID NO: 2091500
uuccgaaucacagacuccc

SEQ ID NO: 2091502 - RNA, 19 nt, Artificial Sequence
  Description of Artificial Sequence: Synthetic oligonucleotide
  Sense strand starting at position 2669 of SEQ ID NO: 1882053
agccuuccuccaugggaau

SEQ ID NO: 2091503 - RNA, 19 nt, Artificial Sequence
  Description of Artificial Sequence: Synthetic oligonucleotide
  Antisense strand to SEQ ID NO: 2091502
auucccauggaggaaggcu

SEQ ID NO: 2091504 - RNA, 19 nt, Artificial Sequence
  Description of Artificial Sequence: Synthetic oligonucleotide
  Sense strand starting at position 2681 of SEQ ID NO: 1882053
ugggaauuguuaccaugag

SEQ ID NO: 2091505 - RNA, 19 nt, Artificial Sequence
  Description of Artificial Sequence: Synthetic oligonucleotide
  Antisense strand to SEQ ID NO: 2091504
cucaugguaacaauuccca

SEQ ID NO: 2091506 - RNA, 19 nt, Artificial Sequence
  Description of Artificial Sequence: Synthetic oligonucleotide
  Sense strand starting at position 2886 of SEQ ID NO: 1882053
aguaaugcagccuaauaac

SEQ ID NO: 2091507 - RNA, 19 nt, Artificial Sequence
  Description of Artificial Sequence: Synthetic oligonucleotide
  Antisense strand to SEQ ID NO: 2091506
guuauuaggcugcauuacu

SEQ ID NO: 2091508 - RNA, 19 nt, Artificial Sequence
  Description of Artificial Sequence: Synthetic oligonucleotide
  Sense strand starting at position 2973 of SEQ ID NO: 1882053
cuuaauaaagucugauuga

SEQ ID NO: 2091509 - RNA, 19 nt, Artificial Sequence
  Description of Artificial Sequence: Synthetic oligonucleotide
  Antisense strand to SEQ ID NO: 2091508
ucaaucagacuuuauuaag

SEQ ID NO: 2091510 - RNA, 19 nt, Artificial Sequence
  Description of Artificial Sequence: Synthetic oligonucleotide
  Sense strand starting at position 3121 of SEQ ID NO: 1882053
caauguguggcuuaacaca

SEQ ID NO: 2091511 - RNA, 19 nt, Artificial Sequence
  Description of Artificial Sequence: Synthetic oligonucleotide
  Antisense strand to SEQ ID NO: 2091510
uguguuaagccacacauug

SEQ ID NO: 2091512 - RNA, 19 nt, Artificial Sequence
  Description of Artificial Sequence: Synthetic oligonucleotide
  Sense strand starting at position 3191 of SEQ ID NO: 1882053
gcacuaaagggaugccaau

SEQ ID NO: 2091513 - RNA, 19 nt, Artificial Sequence
  Description of Artificial Sequence: Synthetic oligonucleotide
  Antisense strand to SEQ ID NO: 2091512
auuggcaucccuuuagugc

SEQ ID NO: 2091514 - RNA, 19 nt, Artificial Sequence
  Description of Artificial Sequence: Synthetic oligonucleotide
  Sense strand starting at position 3197 of SEQ ID NO: 1882053
aagggaugccaauguucuu

SEQ ID NO: 2091515 - RNA, 19 nt, Artificial Sequence
  Description of Artificial Sequence: Synthetic oligonucleotide
  Antisense strand to SEQ ID NO: 2091514
aagaacauuggcaucccuu

SEQ ID NO: 2091516 - RNA, 19 nt, Artificial Sequence
  Description of Artificial Sequence: Synthetic oligonucleotide
  Sense strand starting at position 3323 of SEQ ID NO: 1882053
aggguuucagagugggaau

SEQ ID NO: 2091517 - RNA, 19 nt, Artificial Sequence
  Description of Artificial Sequence: Synthetic oligonucleotide
  Antisense strand to SEQ ID NO: 2091516
auucccacucugaaacccu

SEQ ID NO: 2091518 - RNA, 19 nt, Artificial Sequence
  Description of Artificial Sequence: Synthetic oligonucleotide
  Sense strand starting at position 3325 of SEQ ID NO: 1882053
gguuucagagugggaauca

SEQ ID NO: 2091519 - RNA, 19 nt, Artificial Sequence
  Description of Artificial Sequence: Synthetic oligonucleotide
  Antisense strand to SEQ ID NO: 2091518
ugauucccacucugaaacc

SEQ ID NO: 2091520 - RNA, 19 nt, Artificial Sequence
  Description of Artificial Sequence: Synthetic oligonucleotide
  Sense strand starting at position 3480 of SEQ ID NO: 1882053
acaagauucuuauuaaggc

SEQ ID NO: 2091521 - RNA, 19 nt, Artificial Sequence
  Description of Artificial Sequence: Synthetic oligonucleotide
  Antisense strand to SEQ ID NO: 2091520
gccuuaauaagaaucuugu

SEQ ID NO: 2091522 - RNA, 19 nt, Artificial Sequence
  Description of Artificial Sequence: Synthetic oligonucleotide
  Sense strand starting at position 3565 of SEQ ID NO: 1882053
auauguggccuuggacaca

SEQ ID NO: 2091523 - RNA, 19 nt, Artificial Sequence
  Description of Artificial Sequence: Synthetic oligonucleotide
  Antisense strand to SEQ ID NO: 2091522
uguguccaaggccacauau

SEQ ID NO: 2091524 - RNA, 19 nt, Artificial Sequence
  Description of Artificial Sequence: Synthetic oligonucleotide
  Sense strand starting at position 3615 of SEQ ID NO: 1882053
cucuguaaacuagggauaa

SEQ ID NO: 2091525 - RNA, 19 nt, Artificial Sequence
  Description of Artificial Sequence: Synthetic oligonucleotide
  Antisense strand to SEQ ID NO: 2091524
uuaucccuaguuuacagag

SEQ ID NO: 2091526 - RNA, 19 nt, Artificial Sequence
  Description of Artificial Sequence: Synthetic oligonucleotide
  Sense strand starting at position 3652 of SEQ ID NO: 1882053
gguuguggccaucaaauga

SEQ ID NO: 2091527 - RNA, 19 nt, Artificial Sequence
  Description of Artificial Sequence: Synthetic oligonucleotide
  Antisense strand to SEQ ID NO: 2091526
ucauuugauggccacaacc

SEQ ID NO: 2091528 - RNA, 19 nt, Artificial Sequence
  Description of Artificial Sequence: Synthetic oligonucleotide
  Sense strand starting at position 3670 of SEQ ID NO: 1882053
auggaauacaugugagcua

SEQ ID NO: 2091529 - RNA, 19 nt, Artificial Sequence
  Description of Artificial Sequence: Synthetic oligonucleotide
  Antisense strand to SEQ ID NO: 2091528
uagcucacauguauuccau

SEQ ID NO: 2091530 - RNA, 19 nt, Artificial Sequence
  Description of Artificial Sequence: Synthetic oligonucleotide
  Sense strand starting at position 3729 of SEQ ID NO: 1882053
gaacacucaguguguuaaa

SEQ ID NO: 2091531 - RNA, 19 nt, Artificial Sequence
  Description of Artificial Sequence: Synthetic oligonucleotide
  Antisense strand to SEQ ID NO: 2091530
uuuaacacacugaguguuc

SEQ ID NO: 2091532 - RNA, 19 nt, Artificial Sequence
  Description of Artificial Sequence: Synthetic oligonucleotide
  Sense strand starting at position 3741 of SEQ ID NO: 1882053
uguuaaaugcuuuacauag

SEQ ID NO: 2091533 - RNA, 19 nt, Artificial Sequence
  Description of Artificial Sequence: Synthetic oligonucleotide
  Antisense strand to SEQ ID NO: 2091532
cuauguaaagcauuuaaca

SEQ ID NO: 2091534 - RNA, 19 nt, Artificial Sequence
  Description of Artificial Sequence: Synthetic oligonucleotide
  Sense strand starting at position 3863 of SEQ ID NO: 1882053
gcuugcucuguugcagauu

SEQ ID NO: 2091535 - RNA, 19 nt, Artificial Sequence
  Description of Artificial Sequence: Synthetic oligonucleotide
  Antisense strand to SEQ ID NO: 2091534
aaucugcaacagagcaagc

SEQ ID NO: 2091536 - RNA, 19 nt, Artificial Sequence
  Description of Artificial Sequence: Synthetic oligonucleotide
  Sense strand starting at position 224 of SEQ ID NO: 1882054
gcgggaucccugcgucuca

SEQ ID NO: 2091537 - RNA, 19 nt, Artificial Sequence
  Description of Artificial Sequence: Synthetic oligonucleotide
  Antisense strand to SEQ ID NO: 2091536
ugagacgcagggaucccgc

SEQ ID NO: 2091538 - RNA, 19 nt, Artificial Sequence
  Description of Artificial Sequence: Synthetic oligonucleotide
  Sense strand starting at position 602 of SEQ ID NO: 1882054
gcgggaucccugugucuca

SEQ ID NO: 2091539 - RNA, 19 nt, Artificial Sequence
  Description of Artificial Sequence: Synthetic oligonucleotide
  Antisense strand to SEQ ID NO: 2091538
ugagacacagggaucccgc

SEQ ID NO: 2091540 - RNA, 19 nt, Artificial Sequence
  Description of Artificial Sequence: Synthetic oligonucleotide
  Sense strand starting at position 660 of SEQ ID NO: 1882054
ccuguuaagcaccaguauu

SEQ ID NO: 2091541 - RNA, 19 nt, Artificial Sequence
  Description of Artificial Sequence: Synthetic oligonucleotide
  Antisense strand to SEQ ID NO: 2091540
aauacuggugcuuaacagg

SEQ ID NO: 2091542 - RNA, 19 nt, Artificial Sequence
  Description of Artificial Sequence: Synthetic oligonucleotide
  Sense strand starting at position 1088 of SEQ ID NO: 1882054
gagacauggcugggagcau

SEQ ID NO: 2091543 - RNA, 19 nt, Artificial Sequence
  Description of Artificial Sequence: Synthetic oligonucleotide
  Antisense strand to SEQ ID NO: 2091542
augcucccagccaugucuc

SEQ ID NO: 2091544 - RNA, 19 nt, Artificial Sequence
  Description of Artificial Sequence: Synthetic oligonucleotide
  Sense strand starting at position 1570 of SEQ ID NO: 1882054
aacugaguuccacgggaac

SEQ ID NO: 2091545 - RNA, 19 nt, Artificial Sequence
  Description of Artificial Sequence: Synthetic oligonucleotide
  Antisense strand to SEQ ID NO: 2091544
guucccguggaacucaguu

SEQ ID NO: 2091546 - RNA, 19 nt, Artificial Sequence
  Description of Artificial Sequence: Synthetic oligonucleotide
  Sense strand starting at position 1604 of SEQ ID NO: 1882054
gaagguugucggugaggca

SEQ ID NO: 2091547 - RNA, 19 nt, Artificial Sequence
  Description of Artificial Sequence: Synthetic oligonucleotide
  Antisense strand to SEQ ID NO: 2091546
ugccucaccgacaaccuuc

SEQ ID NO: 2091548 - RNA, 19 nt, Artificial Sequence
  Description of Artificial Sequence: Synthetic oligonucleotide
  Sense strand starting at position 1813 of SEQ ID NO: 1882054
gcgugacagucucuaucca

SEQ ID NO: 2091549 - RNA, 19 nt, Artificial Sequence
  Description of Artificial Sequence: Synthetic oligonucleotide
  Antisense strand to SEQ ID NO: 2091548
uggauagagacugucacgc

SEQ ID NO: 2091550 - RNA, 19 nt, Artificial Sequence
  Description of Artificial Sequence: Synthetic oligonucleotide
  Sense strand starting at position 1950 of SEQ ID NO: 1882054
accaguguugucggcguga

SEQ ID NO: 2091551 - RNA, 19 nt, Artificial Sequence
  Description of Artificial Sequence: Synthetic oligonucleotide
  Antisense strand to SEQ ID NO: 2091550
ucacgccgacaacacuggu

SEQ ID NO: 2091552 - RNA, 19 nt, Artificial Sequence
  Description of Artificial Sequence: Synthetic oligonucleotide
  Sense strand starting at position 1951 of SEQ ID NO: 1882054
ccaguguugucggcgugau

SEQ ID NO: 2091553 - RNA, 19 nt, Artificial Sequence
  Description of Artificial Sequence: Synthetic oligonucleotide
  Antisense strand to SEQ ID NO: 2091552
aucacgccgacaacacugg

SEQ ID NO: 2091554 - RNA, 19 nt, Artificial Sequence
  Description of Artificial Sequence: Synthetic oligonucleotide
  Sense strand starting at position 1952 of SEQ ID NO: 1882054
caguguugucggcgugauc

SEQ ID NO: 2091555 - RNA, 19 nt, Artificial Sequence
  Description of Artificial Sequence: Synthetic oligonucleotide
  Antisense strand to SEQ ID NO: 2091554
gaucacgccgacaacacug

SEQ ID NO: 2091556 - RNA, 19 nt, Artificial Sequence
  Description of Artificial Sequence: Synthetic oligonucleotide
  Sense strand starting at position 1954 of SEQ ID NO: 1882054
guguugucggcgugaucca

SEQ ID NO: 2091557 - RNA, 19 nt, Artificial Sequence
  Description of Artificial Sequence: Synthetic oligonucleotide
  Antisense strand to SEQ ID NO: 2091556
uggaucacgccgacaacac

SEQ ID NO: 2091558 - RNA, 19 nt, Artificial Sequence
  Description of Artificial Sequence: Synthetic oligonucleotide
  Sense strand starting at position 1955 of SEQ ID NO: 1882054
uguugucggcgugauccaa

SEQ ID NO: 2091559 - RNA, 19 nt, Artificial Sequence
  Description of Artificial Sequence: Synthetic oligonucleotide
  Antisense strand to SEQ ID NO: 2091558
uuggaucacgccgacaaca

SEQ ID NO: 2091560 - RNA, 19 nt, Artificial Sequence
  Description of Artificial Sequence: Synthetic oligonucleotide
  Sense strand starting at position 2105 of SEQ ID NO: 1882054
gauccagagcuccaugcuu

SEQ ID NO: 2091561 - RNA, 19 nt, Artificial Sequence
  Description of Artificial Sequence: Synthetic oligonucleotide
  Antisense strand to SEQ ID NO: 2091560
aagcauggagcucuggauc

SEQ ID NO: 2091562 - RNA, 19 nt, Artificial Sequence
  Description of Artificial Sequence: Synthetic oligonucleotide
  Sense strand starting at position 2172 of SEQ ID NO: 1882054
cguccucuccaggcgugaa

SEQ ID NO: 2091563 - RNA, 19 nt, Artificial Sequence
  Description of Artificial Sequence: Synthetic oligonucleotide
  Antisense strand to SEQ ID NO: 2091562
uucacgccuggagaggacg

SEQ ID NO: 2091564 - RNA, 19 nt, Artificial Sequence
  Description of Artificial Sequence: Synthetic oligonucleotide
  Sense strand starting at position 2239 of SEQ ID NO: 1882054
cugucugucccacgugaca

SEQ ID NO: 2091565 - RNA, 19 nt, Artificial Sequence
  Description of Artificial Sequence: Synthetic oligonucleotide
  Antisense strand to SEQ ID NO: 2091564
ugucacgugggacagacag

SEQ ID NO: 2091566 - RNA, 19 nt, Artificial Sequence
  Description of Artificial Sequence: Synthetic oligonucleotide
  Sense strand starting at position 2315 of SEQ ID NO: 1882054
gugguuuccagccguggga

SEQ ID NO: 2091567 - RNA, 19 nt, Artificial Sequence
  Description of Artificial Sequence: Synthetic oligonucleotide
  Antisense strand to SEQ ID NO: 2091566
ucccacggcuggaaaccac

SEQ ID NO: 2091568 - RNA, 19 nt, Artificial Sequence
  Description of Artificial Sequence: Synthetic oligonucleotide
  Sense strand starting at position 2538 of SEQ ID NO: 1882054
ggcucugugcuuucuguga

SEQ ID NO: 2091569 - RNA, 19 nt, Artificial Sequence
  Description of Artificial Sequence: Synthetic oligonucleotide
  Antisense strand to SEQ ID NO: 2091568
ucacagaaagcacagagcc

SEQ ID NO: 2091570 - RNA, 19 nt, Artificial Sequence
  Description of Artificial Sequence: Synthetic oligonucleotide
  Sense strand starting at position 2540 of SEQ ID NO: 1882054
cucugugcuuucugugaug

SEQ ID NO: 2091571 - RNA, 19 nt, Artificial Sequence
  Description of Artificial Sequence: Synthetic oligonucleotide
  Antisense strand to SEQ ID NO: 2091570
caucacagaaagcacagag

SEQ ID NO: 2091572 - RNA, 19 nt, Artificial Sequence
  Description of Artificial Sequence: Synthetic oligonucleotide
  Sense strand starting at position 2551 of SEQ ID NO: 1882054
cugugauguccuggcgauu

SEQ ID NO: 2091573 - RNA, 19 nt, Artificial Sequence
  Description of Artificial Sequence: Synthetic oligonucleotide
  Antisense strand to SEQ ID NO: 2091572
aaucgccaggacaucacag

SEQ ID NO: 2091574 - RNA, 19 nt, Artificial Sequence
  Description of Artificial Sequence: Synthetic oligonucleotide
  Sense strand starting at position 2893 of SEQ ID NO: 1882054
cgcugaugcgcaaguggua

SEQ ID NO: 2091575 - RNA, 19 nt, Artificial Sequence
  Description of Artificial Sequence: Synthetic oligonucleotide
  Antisense strand to SEQ ID NO: 2091574
uaccacuugcgcaucagcg

SEQ ID NO: 2091576 - RNA, 19 nt, Artificial Sequence
  Description of Artificial Sequence: Synthetic oligonucleotide
  Sense strand starting at position 3271 of SEQ ID NO: 1882054
gacggugucugcggagaga

SEQ ID NO: 2091577 - RNA, 19 nt, Artificial Sequence
  Description of Artificial Sequence: Synthetic oligonucleotide
  Antisense strand to SEQ ID NO: 2091576
ucucuccgcagacaccguc

SEQ ID NO: 2091578 - RNA, 19 nt, Artificial Sequence
  Description of Artificial Sequence: Synthetic oligonucleotide
  Sense strand starting at position 3463 of SEQ ID NO: 1882054
uggucauguguccagggaa

SEQ ID NO: 2091579 - RNA, 19 nt, Artificial Sequence
  Description of Artificial Sequence: Synthetic oligonucleotide
  Antisense strand to SEQ ID NO: 2091578
uucccuggacacaugacca

SEQ ID NO: 2091580 - RNA, 19 nt, Artificial Sequence
  Description of Artificial Sequence: Synthetic oligonucleotide
  Sense strand starting at position 199 of SEQ ID NO: 1882055
uggcaaguuacauauguga

SEQ ID NO: 2091581 - RNA, 19 nt, Artificial Sequence
  Description of Artificial Sequence: Synthetic oligonucleotide
  Antisense strand to SEQ ID NO: 2091580
ucacauauguaacuugcca

SEQ ID NO: 2091582 - RNA, 19 nt, Artificial Sequence
  Description of Artificial Sequence: Synthetic oligonucleotide
  Sense strand starting at position 336 of SEQ ID NO: 1882055
ugcgcuguuauauauuuga

SEQ ID NO: 2091583 - RNA, 19 nt, Artificial Sequence
  Description of Artificial Sequence: Synthetic oligonucleotide
  Antisense strand to SEQ ID NO: 2091582
ucaaauauauaacagcgca

SEQ ID NO: 2091584 - RNA, 19 nt, Artificial Sequence
  Description of Artificial Sequence: Synthetic oligonucleotide
  Sense strand starting at position 474 of SEQ ID NO: 1882055
auaagucaucaaugcagau

SEQ ID NO: 2091585 - RNA, 19 nt, Artificial Sequence
  Description of Artificial Sequence: Synthetic oligonucleotide
  Antisense strand to SEQ ID NO: 2091584
aucugcauugaugacuuau

SEQ ID NO: 2091586 - RNA, 19 nt, Artificial Sequence
  Description of Artificial Sequence: Synthetic oligonucleotide
  Sense strand starting at position 726 of SEQ ID NO: 1882055
aucuuaucucguguuugcu

SEQ ID NO: 2091587 - RNA, 19 nt, Artificial Sequence
  Description of Artificial Sequence: Synthetic oligonucleotide
  Antisense strand to SEQ ID NO: 2091586
agcaaacacgagauaagau

SEQ ID NO: 2091588 - RNA, 19 nt, Artificial Sequence
  Description of Artificial Sequence: Synthetic oligonucleotide
  Sense strand starting at position 734 of SEQ ID NO: 1882055
ucguguuugcugucucuga

SEQ ID NO: 2091589 - RNA, 19 nt, Artificial Sequence
  Description of Artificial Sequence: Synthetic oligonucleotide
  Antisense strand to SEQ ID NO: 2091588
ucagagacagcaaacacga

SEQ ID NO: 2091590 - RNA, 19 nt, Artificial Sequence
  Description of Artificial Sequence: Synthetic oligonucleotide
  Sense strand starting at position 742 of SEQ ID NO: 1882055
gcugucucugaagagauaa

SEQ ID NO: 2091591 - RNA, 19 nt, Artificial Sequence
  Description of Artificial Sequence: Synthetic oligonucleotide
  Antisense strand to SEQ ID NO: 2091590
uuaucucuucagagacagc

SEQ ID NO: 2091592 - RNA, 19 nt, Artificial Sequence
  Description of Artificial Sequence: Synthetic oligonucleotide
  Sense strand starting at position 755 of SEQ ID NO: 1882055
agauaaggucaaugcacaa

SEQ ID NO: 2091593 - RNA, 19 nt, Artificial Sequence
  Description of Artificial Sequence: Synthetic oligonucleotide
  Antisense strand to SEQ ID NO: 2091592
uugugcauugaccuuaucu

SEQ ID NO: 2091594 - RNA, 19 nt, Artificial Sequence
  Description of Artificial Sequence: Synthetic oligonucleotide
  Sense strand starting at position 833 of SEQ ID NO: 1882055
uuuacuaggaugugugaaa

SEQ ID NO: 2091595 - RNA, 19 nt, Artificial Sequence
  Description of Artificial Sequence: Synthetic oligonucleotide
  Antisense strand to SEQ ID NO: 2091594
uuucacacauccuaguaaa

SEQ ID NO: 2091596 - RNA, 19 nt, Artificial Sequence
  Description of Artificial Sequence: Synthetic oligonucleotide
  Sense strand starting at position 834 of SEQ ID NO: 1882055
uuacuaggaugugugaaau

SEQ ID NO: 2091597 - RNA, 19 nt, Artificial Sequence
  Description of Artificial Sequence: Synthetic oligonucleotide
  Antisense strand to SEQ ID NO: 2091596
auuucacacauccuaguaa

SEQ ID NO: 2091598 - RNA, 19 nt, Artificial Sequence
  Description of Artificial Sequence: Synthetic oligonucleotide
  Sense strand starting at position 887 of SEQ ID NO: 1882055
guaagacuccuauauaagu

SEQ ID NO: 2091599 - RNA, 19 nt, Artificial Sequence
  Description of Artificial Sequence: Synthetic oligonucleotide
  Antisense strand to SEQ ID NO: 2091598
acuuauauaggagucuuac

SEQ ID NO: 2091600 - RNA, 19 nt, Artificial Sequence
  Description of Artificial Sequence: Synthetic oligonucleotide
  Sense strand starting at position 1052 of SEQ ID NO: 1882055
uugugcuuugcuccaguua

SEQ ID NO: 2091601 - RNA, 19 nt, Artificial Sequence
  Description of Artificial Sequence: Synthetic oligonucleotide
  Antisense strand to SEQ ID NO: 2091600
uaacuggagcaaagcacaa

SEQ ID NO: 2091602 - RNA, 19 nt, Artificial Sequence
  Description of Artificial Sequence: Synthetic oligonucleotide
  Sense strand starting at position 1172 of SEQ ID NO: 1882055
gaaagaugugcaggagcaa

SEQ ID NO: 2091603 - RNA, 19 nt, Artificial Sequence
  Description of Artificial Sequence: Synthetic oligonucleotide
  Antisense strand to SEQ ID NO: 2091602
uugcuccugcacaucuuuc

SEQ ID NO: 2091604 - RNA, 19 nt, Artificial Sequence
  Description of Artificial Sequence: Synthetic oligonucleotide
  Sense strand starting at position 1467 of SEQ ID NO: 1882055
ggcuacuggcuuuaagaau

SEQ ID NO: 2091605 - RNA, 19 nt, Artificial Sequence
  Description of Artificial Sequence: Synthetic oligonucleotide
  Antisense strand to SEQ ID NO: 2091604
auucuuaaagccaguagcc

SEQ ID NO: 2091606 - RNA, 19 nt, Artificial Sequence
  Description of Artificial Sequence: Synthetic oligonucleotide
  Sense strand starting at position 1602 of SEQ ID NO: 1882055
ugaagcauccugcaagagu

SEQ ID NO: 2091607 - RNA, 19 nt, Artificial Sequence
  Description of Artificial Sequence: Synthetic oligonucleotide
  Antisense strand to SEQ ID NO: 2091606
acucuugcaggaugcuuca

SEQ ID NO: 2091608 - RNA, 19 nt, Artificial Sequence
  Description of Artificial Sequence: Synthetic oligonucleotide
  Sense strand starting at position 1647 of SEQ ID NO: 1882055
gaagucauuccuggaacac

SEQ ID NO: 2091609 - RNA, 19 nt, Artificial Sequence
  Description of Artificial Sequence: Synthetic oligonucleotide
  Antisense strand to SEQ ID NO: 2091608
guguuccaggaaugacuuc

SEQ ID NO: 2091610 - RNA, 19 nt, Artificial Sequence
  Description of Artificial Sequence: Synthetic oligonucleotide
  Sense strand starting at position 1876 of SEQ ID NO: 1882055
uugggauguuuccuaauua

SEQ ID NO: 2091611 - RNA, 19 nt, Artificial Sequence
  Description of Artificial Sequence: Synthetic oligonucleotide
  Antisense strand to SEQ ID NO: 2091610
uaauuaggaaacaucccaa

SEQ ID NO: 2091612 - RNA, 19 nt, Artificial Sequence
  Description of Artificial Sequence: Synthetic oligonucleotide
  Sense strand starting at position 1880 of SEQ ID NO: 1882055
gauguuuccuaauuaggga

SEQ ID NO: 2091613 - RNA, 19 nt, Artificial Sequence
  Description of Artificial Sequence: Synthetic oligonucleotide
  Antisense strand to SEQ ID NO: 2091612
ucccuaauuaggaaacauc

SEQ ID NO: 2091614 - RNA, 19 nt, Artificial Sequence
  Description of Artificial Sequence: Synthetic oligonucleotide
  Sense strand starting at position 1909 of SEQ ID NO: 1882055
uguaacaugccauagauuc

SEQ ID NO: 2091615 - RNA, 19 nt, Artificial Sequence
  Description of Artificial Sequence: Synthetic oligonucleotide
  Antisense strand to SEQ ID NO: 2091614
gaaucuauggcauguuaca

SEQ ID NO: 2091616 - RNA, 19 nt, Artificial Sequence
  Description of Artificial Sequence: Synthetic oligonucleotide
  Sense strand starting at position 1996 of SEQ ID NO: 1882055
aucuauagcucagugagaa

SEQ ID NO: 2091617 - RNA, 19 nt, Artificial Sequence
  Description of Artificial Sequence: Synthetic oligonucleotide
  Antisense strand to SEQ ID NO: 2091616
uucucacugagcuauagau

SEQ ID NO: 2091618 - RNA, 19 nt, Artificial Sequence
  Description of Artificial Sequence: Synthetic oligonucleotide
  Sense strand starting at position 2147 of SEQ ID NO: 1882055
ggccaauuugucugaaagc

SEQ ID NO: 2091619 - RNA, 19 nt, Artificial Sequence
  Description of Artificial Sequence: Synthetic oligonucleotide
  Antisense strand to SEQ ID NO: 2091618
gcuuucagacaaauuggcc

SEQ ID NO: 2091620 - RNA, 19 nt, Artificial Sequence
  Description of Artificial Sequence: Synthetic oligonucleotide
  Sense strand starting at position 2441 of SEQ ID NO: 1882055
guggauucuguuuaguaag

SEQ ID NO: 2091621 - RNA, 19 nt, Artificial Sequence
  Description of Artificial Sequence: Synthetic oligonucleotide
  Antisense strand to SEQ ID NO: 2091620
cuuacuaaacagaauccac

SEQ ID NO: 2091622 - RNA, 19 nt, Artificial Sequence
  Description of Artificial Sequence: Synthetic oligonucleotide
  Sense strand starting at position 2448 of SEQ ID NO: 1882055
cuguuuaguaagggaaaca

SEQ ID NO: 2091623 - RNA, 19 nt, Artificial Sequence
  Description of Artificial Sequence: Synthetic oligonucleotide
  Antisense strand to SEQ ID NO: 2091622
uguuucccuuacuaaacag

SEQ ID NO: 2091624 - RNA, 19 nt, Artificial Sequence
  Description of Artificial Sequence: Synthetic oligonucleotide
  Sense strand starting at position 2555 of SEQ ID NO: 1882055
cuuccucuuggugacagau

SEQ ID NO: 2091625 - RNA, 19 nt, Artificial Sequence
  Description of Artificial Sequence: Synthetic oligonucleotide
  Antisense strand to SEQ ID NO: 2091624
aucugucaccaagaggaag

SEQ ID NO: 2091626 - RNA, 19 nt, Artificial Sequence
  Description of Artificial Sequence: Synthetic oligonucleotide
  Sense strand starting at position 2677 of SEQ ID NO: 1882055
gugcacgagcugucauagu

SEQ ID NO: 2091627 - RNA, 19 nt, Artificial Sequence
  Description of Artificial Sequence: Synthetic oligonucleotide
  Antisense strand to SEQ ID NO: 2091626
acuaugacagcucgugcac

SEQ ID NO: 2091628 - RNA, 19 nt, Artificial Sequence
  Description of Artificial Sequence: Synthetic oligonucleotide
  Sense strand starting at position 2805 of SEQ ID NO: 1882055
agguaaguaguucaaguca

SEQ ID NO: 2091629 - RNA, 19 nt, Artificial Sequence
  Description of Artificial Sequence: Synthetic oligonucleotide
  Antisense strand to SEQ ID NO: 2091628
ugacuugaacuacuuaccu

SEQ ID NO: 2091630 - RNA, 19 nt, Artificial Sequence
  Description of Artificial Sequence: Synthetic oligonucleotide
  Sense strand starting at position 2847 of SEQ ID NO: 1882055
augguuuacucccugacag

SEQ ID NO: 2091631 - RNA, 19 nt, Artificial Sequence
  Description of Artificial Sequence: Synthetic oligonucleotide
  Antisense strand to SEQ ID NO: 2091630
cugucagggaguaaaccau

SEQ ID NO: 2091632 - RNA, 19 nt, Artificial Sequence
  Description of Artificial Sequence: Synthetic oligonucleotide
  Sense strand starting at position 2849 of SEQ ID NO: 1882055
gguuuacucccugacagug

SEQ ID NO: 2091633 - RNA, 19 nt, Artificial Sequence
  Description of Artificial Sequence: Synthetic oligonucleotide
  Antisense strand to SEQ ID NO: 2091632
cacugucagggaguaaacc

SEQ ID NO: 2091634 - RNA, 19 nt, Artificial Sequence
  Description of Artificial Sequence: Synthetic oligonucleotide
  Sense strand starting at position 2882 of SEQ ID NO: 1882055
uaacacgucccaugaggaa

SEQ ID NO: 2091635 - RNA, 19 nt, Artificial Sequence
  Description of Artificial Sequence: Synthetic oligonucleotide
  Antisense strand to SEQ ID NO: 2091634
uuccucaugggacguguua

SEQ ID NO: 2091636 - RNA, 19 nt, Artificial Sequence
  Description of Artificial Sequence: Synthetic oligonucleotide
  Sense strand starting at position 2909 of SEQ ID NO: 1882055
aagaaugcucgguaaauuc

SEQ ID NO: 2091637 - RNA, 19 nt, Artificial Sequence
  Description of Artificial Sequence: Synthetic oligonucleotide
  Antisense strand to SEQ ID NO: 2091636
gaauuuaccgagcauucuu

SEQ ID NO: 2091638 - RNA, 19 nt, Artificial Sequence
  Description of Artificial Sequence: Synthetic oligonucleotide
  Sense strand starting at position 2966 of SEQ ID NO: 1882055
uugacacuauguuuaaaug

SEQ ID NO: 2091639 - RNA, 19 nt, Artificial Sequence
  Description of Artificial Sequence: Synthetic oligonucleotide
  Antisense strand to SEQ ID NO: 2091638
cauuuaaacauagugucaa

SEQ ID NO: 2091640 - RNA, 19 nt, Artificial Sequence
  Description of Artificial Sequence: Synthetic oligonucleotide
  Sense strand starting at position 3373 of SEQ ID NO: 1882055
ugcugagucccaggacaaa

SEQ ID NO: 2091641 - RNA, 19 nt, Artificial Sequence
  Description of Artificial Sequence: Synthetic oligonucleotide
  Antisense strand to SEQ ID NO: 2091640
uuuguccugggacucagca

SEQ ID NO: 2091642 - RNA, 19 nt, Artificial Sequence
  Description of Artificial Sequence: Synthetic oligonucleotide
  Sense strand starting at position 3399 of SEQ ID NO: 1882055
gacguugucaaacaaggua

SEQ ID NO: 2091643 - RNA, 19 nt, Artificial Sequence
  Description of Artificial Sequence: Synthetic oligonucleotide
  Antisense strand to SEQ ID NO: 2091642
uaccuuguuugacaacguc

SEQ ID NO: 2091644 - RNA, 19 nt, Artificial Sequence
  Description of Artificial Sequence: Synthetic oligonucleotide
  Sense strand starting at position 3499 of SEQ ID NO: 1882055
guauguagacaguaucaua

SEQ ID NO: 2091645 - RNA, 19 nt, Artificial Sequence
  Description of Artificial Sequence: Synthetic oligonucleotide
  Antisense strand to SEQ ID NO: 2091644
uaugauacugucuacauac

SEQ ID NO: 2091646 - RNA, 19 nt, Artificial Sequence
  Description of Artificial Sequence: Synthetic oligonucleotide
  Sense strand starting at position 3792 of SEQ ID NO: 1882055
agaaauaaguuugcaaucu

SEQ ID NO: 2091647 - RNA, 19 nt, Artificial Sequence
  Description of Artificial Sequence: Synthetic oligonucleotide
  Antisense strand to SEQ ID NO: 2091646
agauugcaaacuuauuucu

SEQ ID NO: 2091648 - RNA, 19 nt, Artificial Sequence
  Description of Artificial Sequence: Synthetic oligonucleotide
  Sense strand starting at position 3801 of SEQ ID NO: 1882055
uuugcaaucuaacuggaaa

SEQ ID NO: 2091649 - RNA, 19 nt, Artificial Sequence
  Description of Artificial Sequence: Synthetic oligonucleotide
  Antisense strand to SEQ ID NO: 2091648
uuuccaguuagauugcaaa

SEQ ID NO: 2091650 - RNA, 19 nt, Artificial Sequence
  Description of Artificial Sequence: Synthetic oligonucleotide
  Sense strand starting at position 3874 of SEQ ID NO: 1882055
aaaguuauacgguauauca

SEQ ID NO: 2091651 - RNA, 19 nt, Artificial Sequence
  Description of Artificial Sequence: Synthetic oligonucleotide
  Antisense strand to SEQ ID NO: 2091650
ugauauaccguauaacuuu

SEQ ID NO: 2091652 - RNA, 19 nt, Artificial Sequence
  Description of Artificial Sequence: Synthetic oligonucleotide
  Sense strand starting at position 3876 of SEQ ID NO: 1882055
aguuauacgguauaucaga

SEQ ID NO: 2091653 - RNA, 19 nt, Artificial Sequence
  Description of Artificial Sequence: Synthetic oligonucleotide
  Antisense strand to SEQ ID NO: 2091652
ucugauauaccguauaacu

SEQ ID NO: 2091654 - RNA, 19 nt, Artificial Sequence
  Description of Artificial Sequence: Synthetic oligonucleotide
  Sense strand starting at position 3883 of SEQ ID NO: 1882055
cgguauaucagacaguuag

SEQ ID NO: 2091655 - RNA, 19 nt, Artificial Sequence
  Description of Artificial Sequence: Synthetic oligonucleotide
  Antisense strand to SEQ ID NO: 2091654
cuaacugucugauauaccg

SEQ ID NO: 2091656 - RNA, 19 nt, Artificial Sequence
  Description of Artificial Sequence: Synthetic oligonucleotide
  Sense strand starting at position 3915 of SEQ ID NO: 1882055
guauuugauacuggcugua

SEQ ID NO: 2091657 - RNA, 19 nt, Artificial Sequence
  Description of Artificial Sequence: Synthetic oligonucleotide
  Antisense strand to SEQ ID NO: 2091656
uacagccaguaucaaauac

SEQ ID NO: 2091658 - RNA, 19 nt, Artificial Sequence
  Description of Artificial Sequence: Synthetic oligonucleotide
  Sense strand starting at position 3920 of SEQ ID NO: 1882055
ugauacuggcuguaauauc

SEQ ID NO: 2091659 - RNA, 19 nt, Artificial Sequence
  Description of Artificial Sequence: Synthetic oligonucleotide
  Antisense strand to SEQ ID NO: 2091658
gauauuacagccaguauca

SEQ ID NO: 2091660 - RNA, 19 nt, Artificial Sequence
  Description of Artificial Sequence: Synthetic oligonucleotide
  Sense strand starting at position 133 of SEQ ID NO: 1882056
gggccauccuuccuugaaa

SEQ ID NO: 2091661 - RNA, 19 nt, Artificial Sequence
  Description of Artificial Sequence: Synthetic oligonucleotide
  Antisense strand to SEQ ID NO: 2091660
uuucaaggaaggauggccc

SEQ ID NO: 2091662 - RNA, 19 nt, Artificial Sequence
  Description of Artificial Sequence: Synthetic oligonucleotide
  Sense strand starting at position 134 of SEQ ID NO: 1882056
ggccauccuuccuugaaag

SEQ ID NO: 2091663 - RNA, 19 nt, Artificial Sequence
  Description of Artificial Sequence: Synthetic oligonucleotide
  Antisense strand to SEQ ID NO: 2091662
cuuucaaggaaggauggcc

SEQ ID NO: 2091664 - RNA, 19 nt, Artificial Sequence
  Description of Artificial Sequence: Synthetic oligonucleotide
  Sense strand starting at position 135 of SEQ ID NO: 1882056
gccauccuuccuugaaaga

SEQ ID NO: 2091665 - RNA, 19 nt, Artificial Sequence
  Description of Artificial Sequence: Synthetic oligonucleotide
  Antisense strand to SEQ ID NO: 2091664
ucuuucaaggaaggauggc

SEQ ID NO: 2091666 - RNA, 19 nt, Artificial Sequence
  Description of Artificial Sequence: Synthetic oligonucleotide
  Sense strand starting at position 164 of SEQ ID NO: 1882056
auagucucugaugaaaugu

SEQ ID NO: 2091667 - RNA, 19 nt, Artificial Sequence
  Description of Artificial Sequence: Synthetic oligonucleotide
  Antisense strand to SEQ ID NO: 2091666
acauuucaucagagacuau

SEQ ID NO: 2091668 - RNA, 19 nt, Artificial Sequence
  Description of Artificial Sequence: Synthetic oligonucleotide
  Sense strand starting at position 253 of SEQ ID NO: 1882056
gcagaucuagccuagaaau

SEQ ID NO: 2091669 - RNA, 19 nt, Artificial Sequence
  Description of Artificial Sequence: Synthetic oligonucleotide
  Antisense strand to SEQ ID NO: 2091668
auuucuaggcuagaucugc

SEQ ID NO: 2091670 - RNA, 19 nt, Artificial Sequence
  Description of Artificial Sequence: Synthetic oligonucleotide
  Sense strand starting at position 419 of SEQ ID NO: 1882056
gcauuuaaauuaggaagga

SEQ ID NO: 2091671 - RNA, 19 nt, Artificial Sequence
  Description of Artificial Sequence: Synthetic oligonucleotide
  Antisense strand to SEQ ID NO: 2091670
uccuuccuaauuuaaaugc

SEQ ID NO: 2091672 - RNA, 19 nt, Artificial Sequence
  Description of Artificial Sequence: Synthetic oligonucleotide
  Sense strand starting at position 555 of SEQ ID NO: 1882056
agaaguaauuuccaaacag

SEQ ID NO: 2091673 - RNA, 19 nt, Artificial Sequence
  Description of Artificial Sequence: Synthetic oligonucleotide
  Antisense strand to SEQ ID NO: 2091672
cuguuuggaaauuacuucu

SEQ ID NO: 2091674 - RNA, 19 nt, Artificial Sequence
  Description of Artificial Sequence: Synthetic oligonucleotide
  Sense strand starting at position 710 of SEQ ID NO: 1882056
guaacagcccaaggaguua

SEQ ID NO: 2091675 - RNA, 19 nt, Artificial Sequence
  Description of Artificial Sequence: Synthetic oligonucleotide
  Antisense strand to SEQ ID NO: 2091674
uaacuccuugggcuguuac

SEQ ID NO: 2091676 - RNA, 19 nt, Artificial Sequence
  Description of Artificial Sequence: Synthetic oligonucleotide
  Sense strand starting at position 722 of SEQ ID NO: 1882056
ggaguuagcccugauacuu

SEQ ID NO: 2091677 - RNA, 19 nt, Artificial Sequence
  Description of Artificial Sequence: Synthetic oligonucleotide
  Antisense strand to SEQ ID NO: 2091676
aaguaucagggcuaacucc

SEQ ID NO: 2091678 - RNA, 19 nt, Artificial Sequence
  Description of Artificial Sequence: Synthetic oligonucleotide
  Sense strand starting at position 923 of SEQ ID NO: 1882056
ugcuuugagaucuagaggu

SEQ ID NO: 2091679 - RNA, 19 nt, Artificial Sequence
  Description of Artificial Sequence: Synthetic oligonucleotide
  Antisense strand to SEQ ID NO: 2091678
accucuagaucucaaagca

SEQ ID NO: 2091680 - RNA, 19 nt, Artificial Sequence
  Description of Artificial Sequence: Synthetic oligonucleotide
  Sense strand starting at position 975 of SEQ ID NO: 1882056
acagacggauggucuaauu

SEQ ID NO: 2091681 - RNA, 19 nt, Artificial Sequence
  Description of Artificial Sequence: Synthetic oligonucleotide
  Antisense strand to SEQ ID NO: 2091680
aauuagaccauccgucugu

SEQ ID NO: 2091682 - RNA, 19 nt, Artificial Sequence
  Description of Artificial Sequence: Synthetic oligonucleotide
  Sense strand starting at position 1070 of SEQ ID NO: 1882056
ucauuuggcuuagaacaaa

SEQ ID NO: 2091683 - RNA, 19 nt, Artificial Sequence
  Description of Artificial Sequence: Synthetic oligonucleotide
  Antisense strand to SEQ ID NO: 2091682
uuuguucuaagccaaauga

SEQ ID NO: 2091684 - RNA, 19 nt, Artificial Sequence
  Description of Artificial Sequence: Synthetic oligonucleotide
  Sense strand starting at position 1661 of SEQ ID NO: 1882056
aucuuagugccuuagagga

SEQ ID NO: 2091685 - RNA, 19 nt, Artificial Sequence
  Description of Artificial Sequence: Synthetic oligonucleotide
  Antisense strand to SEQ ID NO: 2091684
uccucuaaggcacuaagau

SEQ ID NO: 2091686 - RNA, 19 nt, Artificial Sequence
  Description of Artificial Sequence: Synthetic oligonucleotide
  Sense strand starting at position 1707 of SEQ ID NO: 1882056
uggcaaugagcugacucau

SEQ ID NO: 2091687 - RNA, 19 nt, Artificial Sequence
  Description of Artificial Sequence: Synthetic oligonucleotide
  Antisense strand to SEQ ID NO: 2091686
augagucagcucauugcca

SEQ ID NO: 2091688 - RNA, 19 nt, Artificial Sequence
  Description of Artificial Sequence: Synthetic oligonucleotide
  Sense strand starting at position 1713 of SEQ ID NO: 1882056
ugagcugacucaucugaac

SEQ ID NO: 2091689 - RNA, 19 nt, Artificial Sequence
  Description of Artificial Sequence: Synthetic oligonucleotide
  Antisense strand to SEQ ID NO: 2091688
guucagaugagucagcuca

SEQ ID NO: 2091690 - RNA, 19 nt, Artificial Sequence
  Description of Artificial Sequence: Synthetic oligonucleotide
  Sense strand starting at position 2032 of SEQ ID NO: 1882056
agauaucacugguuaagac

SEQ ID NO: 2091691 - RNA, 19 nt, Artificial Sequence
  Description of Artificial Sequence: Synthetic oligonucleotide
  Antisense strand to SEQ ID NO: 2091690
gucuuaaccagugauaucu

SEQ ID NO: 2091692 - RNA, 19 nt, Artificial Sequence
  Description of Artificial Sequence: Synthetic oligonucleotide
  Sense strand starting at position 2083 of SEQ ID NO: 1882056
augcaugguuaaccuaaua

SEQ ID NO: 2091693 - RNA, 19 nt, Artificial Sequence
  Description of Artificial Sequence: Synthetic oligonucleotide
  Antisense strand to SEQ ID NO: 2091692
uauuagguuaaccaugcau

SEQ ID NO: 2091694 - RNA, 19 nt, Artificial Sequence
  Description of Artificial Sequence: Synthetic oligonucleotide
  Sense strand starting at position 2235 of SEQ ID NO: 1882056
ugcuguauuagguagaaug

SEQ ID NO: 2091695 - RNA, 19 nt, Artificial Sequence
  Description of Artificial Sequence: Synthetic oligonucleotide
  Antisense strand to SEQ ID NO: 2091694
cauucuaccuaauacagca

SEQ ID NO: 2091696 - RNA, 19 nt, Artificial Sequence
  Description of Artificial Sequence: Synthetic oligonucleotide
  Sense strand starting at position 2318 of SEQ ID NO: 1882056
agaguuggugacuaaguua

SEQ ID NO: 2091697 - RNA, 19 nt, Artificial Sequence
  Description of Artificial Sequence: Synthetic oligonucleotide
  Antisense strand to SEQ ID NO: 2091696
uaacuuagucaccaacucu

SEQ ID NO: 2091698 - RNA, 19 nt, Artificial Sequence
  Description of Artificial Sequence: Synthetic oligonucleotide
  Sense strand starting at position 2517 of SEQ ID NO: 1882056
aaaggcuauggugggaauu

SEQ ID NO: 2091699 - RNA, 19 nt, Artificial Sequence
  Description of Artificial Sequence: Synthetic oligonucleotide
  Antisense strand to SEQ ID NO: 2091698
aauucccaccauagccuuu

SEQ ID NO: 2091700 - RNA, 19 nt, Artificial Sequence
  Description of Artificial Sequence: Synthetic oligonucleotide
  Sense strand starting at position 2518 of SEQ ID NO: 1882056
aaggcuauggugggaauua

SEQ ID NO: 2091701 - RNA, 19 nt, Artificial Sequence
  Description of Artificial Sequence: Synthetic oligonucleotide
  Antisense strand to SEQ ID NO: 2091700
uaauucccaccauagccuu

SEQ ID NO: 2091702 - RNA, 19 nt, Artificial Sequence
  Description of Artificial Sequence: Synthetic oligonucleotide
  Sense strand starting at position 2566 of SEQ ID NO: 1882056
ucaaauaaguaugucaagu

SEQ ID NO: 2091703 - RNA, 19 nt, Artificial Sequence
  Description of Artificial Sequence: Synthetic oligonucleotide
  Antisense strand to SEQ ID NO: 2091702
acuugacauacuuauuuga

SEQ ID NO: 2091704 - RNA, 19 nt, Artificial Sequence
  Description of Artificial Sequence: Synthetic oligonucleotide
  Sense strand starting at position 2577 of SEQ ID NO: 1882056
ugucaaguucuugguauuu

SEQ ID NO: 2091705 - RNA, 19 nt, Artificial Sequence
  Description of Artificial Sequence: Synthetic oligonucleotide
  Antisense strand to SEQ ID NO: 2091704
aaauaccaagaacuugaca

SEQ ID NO: 2091706 - RNA, 19 nt, Artificial Sequence
  Description of Artificial Sequence: Synthetic oligonucleotide
  Sense strand starting at position 2668 of SEQ ID NO: 1882056
cggcaugaacacuggaauu

SEQ ID NO: 2091707 - RNA, 19 nt, Artificial Sequence
  Description of Artificial Sequence: Synthetic oligonucleotide
  Antisense strand to SEQ ID NO: 2091706
aauuccaguguucaugccg

SEQ ID NO: 2091708 - RNA, 19 nt, Artificial Sequence
  Description of Artificial Sequence: Synthetic oligonucleotide
  Sense strand starting at position 2693 of SEQ ID NO: 1882056
uugcaugccaaguaagaga

SEQ ID NO: 2091709 - RNA, 19 nt, Artificial Sequence
  Description of Artificial Sequence: Synthetic oligonucleotide
  Antisense strand to SEQ ID NO: 2091708
ucucuuacuuggcaugcaa

SEQ ID NO: 2091710 - RNA, 19 nt, Artificial Sequence
  Description of Artificial Sequence: Synthetic oligonucleotide
  Sense strand starting at position 2794 of SEQ ID NO: 1882056
ucgauuugcucuccauaug

SEQ ID NO: 2091711 - RNA, 19 nt, Artificial Sequence
  Description of Artificial Sequence: Synthetic oligonucleotide
  Antisense strand to SEQ ID NO: 2091710
cauauggagagcaaaucga

SEQ ID NO: 2091712 - RNA, 19 nt, Artificial Sequence
  Description of Artificial Sequence: Synthetic oligonucleotide
  Sense strand starting at position 2795 of SEQ ID NO: 1882056
cgauuugcucuccauaugu

SEQ ID NO: 2091713 - RNA, 19 nt, Artificial Sequence
  Description of Artificial Sequence: Synthetic oligonucleotide
  Antisense strand to SEQ ID NO: 2091712
acauauggagagcaaaucg

SEQ ID NO: 2091714 - RNA, 19 nt, Artificial Sequence
  Description of Artificial Sequence: Synthetic oligonucleotide
  Sense strand starting at position 2951 of SEQ ID NO: 1882056
ugggaagucuggucuccaa

SEQ ID NO: 2091715 - RNA, 19 nt, Artificial Sequence
  Description of Artificial Sequence: Synthetic oligonucleotide
  Antisense strand to SEQ ID NO: 2091714
uuggagaccagacuuccca

SEQ ID NO: 2091716 - RNA, 19 nt, Artificial Sequence
  Description of Artificial Sequence: Synthetic oligonucleotide
  Sense strand starting at position 3010 of SEQ ID NO: 1882056
ggcugaaagucagugaaga

SEQ ID NO: 2091717 - RNA, 19 nt, Artificial Sequence
  Description of Artificial Sequence: Synthetic oligonucleotide
  Antisense strand to SEQ ID NO: 2091716
ucuucacugacuuucagcc

SEQ ID NO: 2091718 - RNA, 19 nt, Artificial Sequence
  Description of Artificial Sequence: Synthetic oligonucleotide
  Sense strand starting at position 3011 of SEQ ID NO: 1882056
gcugaaagucagugaagaa

SEQ ID NO: 2091719 - RNA, 19 nt, Artificial Sequence
  Description of Artificial Sequence: Synthetic oligonucleotide
  Antisense strand to SEQ ID NO: 2091718
uucuucacugacuuucagc

SEQ ID NO: 2091720 - RNA, 19 nt, Artificial Sequence
  Description of Artificial Sequence: Synthetic oligonucleotide
  Sense strand starting at position 3266 of SEQ ID NO: 1882056
uccucugagccagguauuu

SEQ ID NO: 2091721 - RNA, 19 nt, Artificial Sequence
  Description of Artificial Sequence: Synthetic oligonucleotide
  Antisense strand to SEQ ID NO: 2091720
aaauaccuggcucagagga

SEQ ID NO: 2091722 - RNA, 19 nt, Artificial Sequence
  Description of Artificial Sequence: Synthetic oligonucleotide
  Sense strand starting at position 3458 of SEQ ID NO: 1882056
gccgcuguggcauuauuca

SEQ ID NO: 2091723 - RNA, 19 nt, Artificial Sequence
  Description of Artificial Sequence: Synthetic oligonucleotide
  Antisense strand to SEQ ID NO: 2091722
ugaauaaugccacagcggc

SEQ ID NO: 2091724 - RNA, 19 nt, Artificial Sequence
  Description of Artificial Sequence: Synthetic oligonucleotide
  Sense strand starting at position 3586 of SEQ ID NO: 1882056
ccagguaucucaucaggua

SEQ ID NO: 2091725 - RNA, 19 nt, Artificial Sequence
  Description of Artificial Sequence: Synthetic oligonucleotide
  Antisense strand to SEQ ID NO: 2091724
uaccugaugagauaccugg

SEQ ID NO: 2091726 - RNA, 19 nt, Artificial Sequence
  Description of Artificial Sequence: Synthetic oligonucleotide
  Sense strand starting at position 3606 of SEQ ID NO: 1882056
cagauaacugggugucuca

SEQ ID NO: 2091727 - RNA, 19 nt, Artificial Sequence
  Description of Artificial Sequence: Synthetic oligonucleotide
  Antisense strand to SEQ ID NO: 2091726
ugagacacccaguuaucug

SEQ ID NO: 2091728 - RNA, 19 nt, Artificial Sequence
  Description of Artificial Sequence: Synthetic oligonucleotide
  Sense strand starting at position 3698 of SEQ ID NO: 1882056
uguuguauuucuccuuaua

SEQ ID NO: 2091729 - RNA, 19 nt, Artificial Sequence
  Description of Artificial Sequence: Synthetic oligonucleotide
  Antisense strand to SEQ ID NO: 2091728
uauaaggagaaauacaaca

SEQ ID NO: 2091730 - RNA, 19 nt, Artificial Sequence
  Description of Artificial Sequence: Synthetic oligonucleotide
  Sense strand starting at position 3771 of SEQ ID NO: 1882056
cugauaacucagugaucug

SEQ ID NO: 2091731 - RNA, 19 nt, Artificial Sequence
  Description of Artificial Sequence: Synthetic oligonucleotide
  Antisense strand to SEQ ID NO: 2091730
cagaucacugaguuaucag

SEQ ID NO: 2091732 - RNA, 19 nt, Artificial Sequence
  Description of Artificial Sequence: Synthetic oligonucleotide
  Sense strand starting at position 3774 of SEQ ID NO: 1882056
auaacucagugaucugaua

SEQ ID NO: 2091733 - RNA, 19 nt, Artificial Sequence
  Description of Artificial Sequence: Synthetic oligonucleotide
  Antisense strand to SEQ ID NO: 2091732
uaucagaucacugaguuau

SEQ ID NO: 2091734 - RNA, 19 nt, Artificial Sequence
  Description of Artificial Sequence: Synthetic oligonucleotide
  Sense strand starting at position 3863 of SEQ ID NO: 1882056
cugaaaugguaacuugauu

SEQ ID NO: 2091735 - RNA, 19 nt, Artificial Sequence
  Description of Artificial Sequence: Synthetic oligonucleotide
  Antisense strand to SEQ ID NO: 2091734
aaucaaguuaccauuucag

SEQ ID NO: 2091736 - RNA, 19 nt, Artificial Sequence
  Description of Artificial Sequence: Synthetic oligonucleotide
  Sense strand starting at position 3868 of SEQ ID NO: 1882056
augguaacuugauugccaa

SEQ ID NO: 2091737 - RNA, 19 nt, Artificial Sequence
  Description of Artificial Sequence: Synthetic oligonucleotide
  Antisense strand to SEQ ID NO: 2091736
uuggcaaucaaguuaccau

SEQ ID NO: 2091738 - RNA, 19 nt, Artificial Sequence
  Description of Artificial Sequence: Synthetic oligonucleotide
  Sense strand starting at position 3977 of SEQ ID NO: 1882056
ccuguuccggcauaagaua

SEQ ID NO: 2091739 - RNA, 19 nt, Artificial Sequence
  Description of Artificial Sequence: Synthetic oligonucleotide
  Antisense strand to SEQ ID NO: 2091738
uaucuuaugccggaacagg

SEQ ID NO: 2091740 - RNA, 19 nt, Artificial Sequence
  Description of Artificial Sequence: Synthetic oligonucleotide
  Sense strand starting at position 11 of SEQ ID NO: 1882057
uagcgacucugccuauuua

SEQ ID NO: 2091741 - RNA, 19 nt, Artificial Sequence
  Description of Artificial Sequence: Synthetic oligonucleotide
  Antisense strand to SEQ ID NO: 2091740
uaaauaggcagagucgcua

SEQ ID NO: 2091742 - RNA, 19 nt, Artificial Sequence
  Description of Artificial Sequence: Synthetic oligonucleotide
  Sense strand starting at position 96 of SEQ ID NO: 1882057
ugauuuacgucugagacag

SEQ ID NO: 2091743 - RNA, 19 nt, Artificial Sequence
  Description of Artificial Sequence: Synthetic oligonucleotide
  Antisense strand to SEQ ID NO: 2091742
cugucucagacguaaauca

SEQ ID NO: 2091744 - RNA, 19 nt, Artificial Sequence
  Description of Artificial Sequence: Synthetic oligonucleotide
  Sense strand starting at position 98 of SEQ ID NO: 1882057
auuuacgucugagacagaa

SEQ ID NO: 2091745 - RNA, 19 nt, Artificial Sequence
  Description of Artificial Sequence: Synthetic oligonucleotide
  Antisense strand to SEQ ID NO: 2091744
uucugucucagacguaaau

SEQ ID NO: 2091746 - RNA, 19 nt, Artificial Sequence
  Description of Artificial Sequence: Synthetic oligonucleotide
  Sense strand starting at position 130 of SEQ ID NO: 1882057
uuugcucagcgagauuaag

SEQ ID NO: 2091747 - RNA, 19 nt, Artificial Sequence
  Description of Artificial Sequence: Synthetic oligonucleotide
  Antisense strand to SEQ ID NO: 2091746
cuuaaucucgcugagcaaa

SEQ ID NO: 2091748 - RNA, 19 nt, Artificial Sequence
  Description of Artificial Sequence: Synthetic oligonucleotide
  Sense strand starting at position 138 of SEQ ID NO: 1882057
gcgagauuaagccagcuuu

SEQ ID NO: 2091749 - RNA, 19 nt, Artificial Sequence
  Description of Artificial Sequence: Synthetic oligonucleotide
  Antisense strand to SEQ ID NO: 2091748
aaagcuggcuuaaucucgc

SEQ ID NO: 2091750 - RNA, 19 nt, Artificial Sequence
  Description of Artificial Sequence: Synthetic oligonucleotide
  Sense strand starting at position 148 of SEQ ID NO: 1882057
gccagcuuucuaugaucaa

SEQ ID NO: 2091751 - RNA, 19 nt, Artificial Sequence
  Description of Artificial Sequence: Synthetic oligonucleotide
  Antisense strand to SEQ ID NO: 2091750
uugaucauagaaagcuggc

SEQ ID NO: 2091752 - RNA, 19 nt, Artificial Sequence
  Description of Artificial Sequence: Synthetic oligonucleotide
  Sense strand starting at position 152 of SEQ ID NO: 1882057
gcuuucuaugaucaacaga

SEQ ID NO: 2091753 - RNA, 19 nt, Artificial Sequence
  Description of Artificial Sequence: Synthetic oligonucleotide
  Antisense strand to SEQ ID NO: 2091752
ucuguugaucauagaaagc

SEQ ID NO: 2091754 - RNA, 19 nt, Artificial Sequence
  Description of Artificial Sequence: Synthetic oligonucleotide
  Sense strand starting at position 199 of SEQ ID NO: 1882057
aggagacuucgacagcuua

SEQ ID NO: 2091755 - RNA, 19 nt, Artificial Sequence
  Description of Artificial Sequence: Synthetic oligonucleotide
  Antisense strand to SEQ ID NO: 2091754
uaagcugucgaagucuccu

SEQ ID NO: 2091756 - RNA, 19 nt, Artificial Sequence
  Description of Artificial Sequence: Synthetic oligonucleotide
  Sense strand starting at position 745 of SEQ ID NO: 1882057
ucuuaaagucaagagcaua

SEQ ID NO: 2091757 - RNA, 19 nt, Artificial Sequence
  Description of Artificial Sequence: Synthetic oligonucleotide
  Antisense strand to SEQ ID NO: 2091756
uaugcucuugacuuuaaga

SEQ ID NO: 2091758 - RNA, 19 nt, Artificial Sequence
  Description of Artificial Sequence: Synthetic oligonucleotide
  Sense strand starting at position 778 of SEQ ID NO: 1882057
gaagacaagugucucauau

SEQ ID NO: 2091759 - RNA, 19 nt, Artificial Sequence
  Description of Artificial Sequence: Synthetic oligonucleotide
  Antisense strand to SEQ ID NO: 2091758
auaugagacacuugucuuc

SEQ ID NO: 2091760 - RNA, 19 nt, Artificial Sequence
  Description of Artificial Sequence: Synthetic oligonucleotide
  Sense strand starting at position 831 of SEQ ID NO: 1882057
gcaggucguagcgagacaa

SEQ ID NO: 2091761 - RNA, 19 nt, Artificial Sequence
  Description of Artificial Sequence: Synthetic oligonucleotide
  Antisense strand to SEQ ID NO: 2091760
uugucucgcuacgaccugc

SEQ ID NO: 2091762 - RNA, 19 nt, Artificial Sequence
  Description of Artificial Sequence: Synthetic oligonucleotide
  Sense strand starting at position 952 of SEQ ID NO: 1882057
uucgauaaaccacauuguu

SEQ ID NO: 2091763 - RNA, 19 nt, Artificial Sequence
  Description of Artificial Sequence: Synthetic oligonucleotide
  Antisense strand to SEQ ID NO: 2091762
aacaaugugguuuaucgaa

SEQ ID NO: 2091764 - RNA, 19 nt, Artificial Sequence
  Description of Artificial Sequence: Synthetic oligonucleotide
  Sense strand starting at position 1072 of SEQ ID NO: 1882057
gggucaugcaugcacgaua

SEQ ID NO: 2091765 - RNA, 19 nt, Artificial Sequence
  Description of Artificial Sequence: Synthetic oligonucleotide
  Antisense strand to SEQ ID NO: 2091764
uaucgugcaugcaugaccc

SEQ ID NO: 2091766 - RNA, 19 nt, Artificial Sequence
  Description of Artificial Sequence: Synthetic oligonucleotide
  Sense strand starting at position 1111 of SEQ ID NO: 1882057
ggaauugguccacagguac

SEQ ID NO: 2091767 - RNA, 19 nt, Artificial Sequence
  Description of Artificial Sequence: Synthetic oligonucleotide
  Antisense strand to SEQ ID NO: 2091766
guaccuguggaccaauucc

SEQ ID NO: 2091768 - RNA, 19 nt, Artificial Sequence
  Description of Artificial Sequence: Synthetic oligonucleotide
  Sense strand starting at position 1136 of SEQ ID NO: 1882057
cucauucuuucuuugagag

SEQ ID NO: 2091769 - RNA, 19 nt, Artificial Sequence
  Description of Artificial Sequence: Synthetic oligonucleotide
  Antisense strand to SEQ ID NO: 2091768
cucucaaagaaagaaugag

SEQ ID NO: 2091770 - RNA, 19 nt, Artificial Sequence
  Description of Artificial Sequence: Synthetic oligonucleotide
  Sense strand starting at position 1137 of SEQ ID NO: 1882057
ucauucuuucuuugagagu

SEQ ID NO: 2091771 - RNA, 19 nt, Artificial Sequence
  Description of Artificial Sequence: Synthetic oligonucleotide
  Antisense strand to SEQ ID NO: 2091770
acucucaaagaaagaauga

SEQ ID NO: 2091772 - RNA, 19 nt, Artificial Sequence
  Description of Artificial Sequence: Synthetic oligonucleotide
  Sense strand starting at position 1151 of SEQ ID NO: 1882057
agaguuagcgagggugcaa

SEQ ID NO: 2091773 - RNA, 19 nt, Artificial Sequence
  Description of Artificial Sequence: Synthetic oligonucleotide
  Antisense strand to SEQ ID NO: 2091772
uugcacccucgcuaacucu

SEQ ID NO: 2091774 - RNA, 19 nt, Artificial Sequence
  Description of Artificial Sequence: Synthetic oligonucleotide
  Sense strand starting at position 1162 of SEQ ID NO: 1882057
gggugcaaacguugugaga

SEQ ID NO: 2091775 - RNA, 19 nt, Artificial Sequence
  Description of Artificial Sequence: Synthetic oligonucleotide
  Antisense strand to SEQ ID NO: 2091774
ucucacaacguuugcaccc

SEQ ID NO: 2091776 - RNA, 19 nt, Artificial Sequence
  Description of Artificial Sequence: Synthetic oligonucleotide
  Sense strand starting at position 1210 of SEQ ID NO: 1882057
cggagaacaccagguuagu

SEQ ID NO: 2091777 - RNA, 19 nt, Artificial Sequence
  Description of Artificial Sequence: Synthetic oligonucleotide
  Antisense strand to SEQ ID NO: 2091776
acuaaccugguguucuccg

SEQ ID NO: 2091778 - RNA, 19 nt, Artificial Sequence
  Description of Artificial Sequence: Synthetic oligonucleotide
  Sense strand starting at position 1337 of SEQ ID NO: 1882057
gcgaaauuacgcccaacgu

SEQ ID NO: 2091779 - RNA, 19 nt, Artificial Sequence
  Description of Artificial Sequence: Synthetic oligonucleotide
  Antisense strand to SEQ ID NO: 2091778
acguugggcguaauuucgc

SEQ ID NO: 2091780 - RNA, 19 nt, Artificial Sequence
  Description of Artificial Sequence: Synthetic oligonucleotide
  Sense strand starting at position 1418 of SEQ ID NO: 1882057
cggccaugucuguauucua

SEQ ID NO: 2091781 - RNA, 19 nt, Artificial Sequence
  Description of Artificial Sequence: Synthetic oligonucleotide
  Antisense strand to SEQ ID NO: 2091780
uagaauacagacauggccg

SEQ ID NO: 2091782 - RNA, 19 nt, Artificial Sequence
  Description of Artificial Sequence: Synthetic oligonucleotide
  Sense strand starting at position 1434 of SEQ ID NO: 1882057
cuaacuuugucucugaaga

SEQ ID NO: 2091783 - RNA, 19 nt, Artificial Sequence
  Description of Artificial Sequence: Synthetic oligonucleotide
  Antisense strand to SEQ ID NO: 2091782
ucuucagagacaaaguuag

SEQ ID NO: 2091784 - RNA, 19 nt, Artificial Sequence
  Description of Artificial Sequence: Synthetic oligonucleotide
  Sense strand starting at position 1451 of SEQ ID NO: 1882057
gauggagguuacccucaga

SEQ ID NO: 2091785 - RNA, 19 nt, Artificial Sequence
  Description of Artificial Sequence: Synthetic oligonucleotide
  Antisense strand to SEQ ID NO: 2091784
ucugaggguaaccuccauc

SEQ ID NO: 2091786 - RNA, 19 nt, Artificial Sequence
  Description of Artificial Sequence: Synthetic oligonucleotide
  Sense strand starting at position 1454 of SEQ ID NO: 1882057
ggagguuacccucagaggu

SEQ ID NO: 2091787 - RNA, 19 nt, Artificial Sequence
  Description of Artificial Sequence: Synthetic oligonucleotide
  Antisense strand to SEQ ID NO: 2091786
accucugaggguaaccucc

SEQ ID NO: 2091788 - RNA, 19 nt, Artificial Sequence
  Description of Artificial Sequence: Synthetic oligonucleotide
  Sense strand starting at position 1458 of SEQ ID NO: 1882057
guuacccucagagguguaa

SEQ ID NO: 2091789 - RNA, 19 nt, Artificial Sequence
  Description of Artificial Sequence: Synthetic oligonucleotide
  Antisense strand to SEQ ID NO: 2091788
uuacaccucugaggguaac

SEQ ID NO: 2091790 - RNA, 19 nt, Artificial Sequence
  Description of Artificial Sequence: Synthetic oligonucleotide
  Sense strand starting at position 1471 of SEQ ID NO: 1882057
guguaagcacguuuccacu

SEQ ID NO: 2091791 - RNA, 19 nt, Artificial Sequence
  Description of Artificial Sequence: Synthetic oligonucleotide
  Antisense strand to SEQ ID NO: 2091790
aguggaaacgugcuuacac

SEQ ID NO: 2091792 - RNA, 19 nt, Artificial Sequence
  Description of Artificial Sequence: Synthetic oligonucleotide
  Sense strand starting at position 1546 of SEQ ID NO: 1882057
aucugaaaucuacggauuc

SEQ ID NO: 2091793 - RNA, 19 nt, Artificial Sequence
  Description of Artificial Sequence: Synthetic oligonucleotide
  Antisense strand to SEQ ID NO: 2091792
gaauccguagauuucagau

SEQ ID NO: 2091794 - RNA, 19 nt, Artificial Sequence
  Description of Artificial Sequence: Synthetic oligonucleotide
  Sense strand starting at position 1556 of SEQ ID NO: 1882057
uacggauuccuguacaugu

SEQ ID NO: 2091795 - RNA, 19 nt, Artificial Sequence
  Description of Artificial Sequence: Synthetic oligonucleotide
  Antisense strand to SEQ ID NO: 2091794
acauguacaggaauccgua

SEQ ID NO: 2091796 - RNA, 19 nt, Artificial Sequence
  Description of Artificial Sequence: Synthetic oligonucleotide
  Sense strand starting at position 1558 of SEQ ID NO: 1882057
cggauuccuguacauguga

SEQ ID NO: 2091797 - RNA, 19 nt, Artificial Sequence
  Description of Artificial Sequence: Synthetic oligonucleotide
  Antisense strand to SEQ ID NO: 2091796
ucacauguacaggaauccg

SEQ ID NO: 2091798 - RNA, 19 nt, Artificial Sequence
  Description of Artificial Sequence: Synthetic oligonucleotide
  Sense strand starting at position 1855 of SEQ ID NO: 1882057
cggcaucguccugaagaca

SEQ ID NO: 2091799 - RNA, 19 nt, Artificial Sequence
  Description of Artificial Sequence: Synthetic oligonucleotide
  Antisense strand to SEQ ID NO: 2091798
ugucuucaggacgaugccg

SEQ ID NO: 2091800 - RNA, 19 nt, Artificial Sequence
  Description of Artificial Sequence: Synthetic oligonucleotide
  Sense strand starting at position 1890 of SEQ ID NO: 1882057
ccgggauagcucuaggcaa

SEQ ID NO: 2091801 - RNA, 19 nt, Artificial Sequence
  Description of Artificial Sequence: Synthetic oligonucleotide
  Antisense strand to SEQ ID NO: 2091800
uugccuagagcuaucccgg

SEQ ID NO: 2091802 - RNA, 19 nt, Artificial Sequence
  Description of Artificial Sequence: Synthetic oligonucleotide
  Sense strand starting at position 2008 of SEQ ID NO: 1882057
ccuguaauggccuagcaua

SEQ ID NO: 2091803 - RNA, 19 nt, Artificial Sequence
  Description of Artificial Sequence: Synthetic oligonucleotide
  Antisense strand to SEQ ID NO: 2091802
uaugcuaggccauuacagg

SEQ ID NO: 2091804 - RNA, 19 nt, Artificial Sequence
  Description of Artificial Sequence: Synthetic oligonucleotide
  Sense strand starting at position 2187 of SEQ ID NO: 1882057
cuggcacucacuggagauu

SEQ ID NO: 2091805 - RNA, 19 nt, Artificial Sequence
  Description of Artificial Sequence: Synthetic oligonucleotide
  Antisense strand to SEQ ID NO: 2091804
aaucuccagugagugccag

SEQ ID NO: 2091806 - RNA, 19 nt, Artificial Sequence
  Description of Artificial Sequence: Synthetic oligonucleotide
  Sense strand starting at position 2196 of SEQ ID NO: 1882057
acuggagauucuguacaua

SEQ ID NO: 2091807 - RNA, 19 nt, Artificial Sequence
  Description of Artificial Sequence: Synthetic oligonucleotide
  Antisense strand to SEQ ID NO: 2091806
uauguacagaaucuccagu

SEQ ID NO: 2091808 - RNA, 19 nt, Artificial Sequence
  Description of Artificial Sequence: Synthetic oligonucleotide
  Sense strand starting at position 2365 of SEQ ID NO: 1882057
ugagaauguagauguaaug

SEQ ID NO: 2091809 - RNA, 19 nt, Artificial Sequence
  Description of Artificial Sequence: Synthetic oligonucleotide
  Antisense strand to SEQ ID NO: 2091808
cauuacaucuacauucuca

SEQ ID NO: 2091810 - RNA, 19 nt, Artificial Sequence
  Description of Artificial Sequence: Synthetic oligonucleotide
  Sense strand starting at position 2376 of SEQ ID NO: 1882057
auguaaugauucgucacca

SEQ ID NO: 2091811 - RNA, 19 nt, Artificial Sequence
  Description of Artificial Sequence: Synthetic oligonucleotide
  Antisense strand to SEQ ID NO: 2091810
uggugacgaaucauuacau

SEQ ID NO: 2091812 - RNA, 19 nt, Artificial Sequence
  Description of Artificial Sequence: Synthetic oligonucleotide
  Sense strand starting at position 2377 of SEQ ID NO: 1882057
uguaaugauucgucaccac

SEQ ID NO: 2091813 - RNA, 19 nt, Artificial Sequence
  Description of Artificial Sequence: Synthetic oligonucleotide
  Antisense strand to SEQ ID NO: 2091812
guggugacgaaucauuaca

SEQ ID NO: 2091814 - RNA, 19 nt, Artificial Sequence
  Description of Artificial Sequence: Synthetic oligonucleotide
  Sense strand starting at position 2453 of SEQ ID NO: 1882057
ggcaguuucuaccucggau

SEQ ID NO: 2091815 - RNA, 19 nt, Artificial Sequence
  Description of Artificial Sequence: Synthetic oligonucleotide
  Antisense strand to SEQ ID NO: 2091814
auccgagguagaaacugcc

SEQ ID NO: 2091816 - RNA, 19 nt, Artificial Sequence
  Description of Artificial Sequence: Synthetic oligonucleotide
  Sense strand starting at position 2572 of SEQ ID NO: 1882057
cugaguccuccacaacgaa

SEQ ID NO: 2091817 - RNA, 19 nt, Artificial Sequence
  Description of Artificial Sequence: Synthetic oligonucleotide
  Antisense strand to SEQ ID NO: 2091816
uucguuguggaggacucag

SEQ ID NO: 2091818 - RNA, 19 nt, Artificial Sequence
  Description of Artificial Sequence: Synthetic oligonucleotide
  Sense strand starting at position 2588 of SEQ ID NO: 1882057
gaagucgucugccuagaag

SEQ ID NO: 2091819 - RNA, 19 nt, Artificial Sequence
  Description of Artificial Sequence: Synthetic oligonucleotide
  Antisense strand to SEQ ID NO: 2091818
cuucuaggcagacgacuuc

SEQ ID NO: 2091820 - RNA, 19 nt, Artificial Sequence
  Description of Artificial Sequence: Synthetic oligonucleotide
  Sense strand starting at position 322 of SEQ ID NO: 1882058
uccuuauucugagcaggga

SEQ ID NO: 2091821 - RNA, 19 nt, Artificial Sequence
  Description of Artificial Sequence: Synthetic oligonucleotide
  Antisense strand to SEQ ID NO: 2091820
ucccugcucagaauaagga

SEQ ID NO: 2091822 - RNA, 19 nt, Artificial Sequence
  Description of Artificial Sequence: Synthetic oligonucleotide
  Sense strand starting at position 406 of SEQ ID NO: 1882058
gcaagagaagggugucacu

SEQ ID NO: 2091823 - RNA, 19 nt, Artificial Sequence
  Description of Artificial Sequence: Synthetic oligonucleotide
  Antisense strand to SEQ ID NO: 2091822
agugacacccuucucuugc

SEQ ID NO: 2091824 - RNA, 19 nt, Artificial Sequence
  Description of Artificial Sequence: Synthetic oligonucleotide
  Sense strand starting at position 638 of SEQ ID NO: 1882058
ggauuacagugaccugcua

SEQ ID NO: 2091825 - RNA, 19 nt, Artificial Sequence
  Description of Artificial Sequence: Synthetic oligonucleotide
  Antisense strand to SEQ ID NO: 2091824
uagcaggucacuguaaucc

SEQ ID NO: 2091826 - RNA, 19 nt, Artificial Sequence
  Description of Artificial Sequence: Synthetic oligonucleotide
  Sense strand starting at position 1066 of SEQ ID NO: 1882058
gcacgaacuauugaguacu

SEQ ID NO: 2091827 - RNA, 19 nt, Artificial Sequence
  Description of Artificial Sequence: Synthetic oligonucleotide
  Antisense strand to SEQ ID NO: 2091826
aguacucaauaguucgugc

SEQ ID NO: 2091828 - RNA, 19 nt, Artificial Sequence
  Description of Artificial Sequence: Synthetic oligonucleotide
  Sense strand starting at position 1187 of SEQ ID NO: 1882058
gacucaggccuauggagaa

SEQ ID NO: 2091829 - RNA, 19 nt, Artificial Sequence
  Description of Artificial Sequence: Synthetic oligonucleotide
  Antisense strand to SEQ ID NO: 2091828
uucuccauaggccugaguc

SEQ ID NO: 2091830 - RNA, 19 nt, Artificial Sequence
  Description of Artificial Sequence: Synthetic oligonucleotide
  Sense strand starting at position 1200 of SEQ ID NO: 1882058
ggagaaucauacuuugacg

SEQ ID NO: 2091831 - RNA, 19 nt, Artificial Sequence
  Description of Artificial Sequence: Synthetic oligonucleotide
  Antisense strand to SEQ ID NO: 2091830
cgucaaaguaugauucucc

SEQ ID NO: 2091832 - RNA, 19 nt, Artificial Sequence
  Description of Artificial Sequence: Synthetic oligonucleotide
  Sense strand starting at position 1202 of SEQ ID NO: 1882058
agaaucauacuuugacgga

SEQ ID NO: 2091833 - RNA, 19 nt, Artificial Sequence
  Description of Artificial Sequence: Synthetic oligonucleotide
  Antisense strand to SEQ ID NO: 2091832
uccgucaaaguaugauucu

SEQ ID NO: 2091834 - RNA, 19 nt, Artificial Sequence
  Description of Artificial Sequence: Synthetic oligonucleotide
  Sense strand starting at position 1316 of SEQ ID NO: 1882058
gaaauagacugguaauuua

SEQ ID NO: 2091835 - RNA, 19 nt, Artificial Sequence
  Description of Artificial Sequence: Synthetic oligonucleotide
  Antisense strand to SEQ ID NO: 2091834
uaaauuaccagucuauuuc

SEQ ID NO: 2091836 - RNA, 19 nt, Artificial Sequence
  Description of Artificial Sequence: Synthetic oligonucleotide
  Sense strand starting at position 1435 of SEQ ID NO: 1882058
gugggauacuuugcuugaa

SEQ ID NO: 2091837 - RNA, 19 nt, Artificial Sequence
  Description of Artificial Sequence: Synthetic oligonucleotide
  Antisense strand to SEQ ID NO: 2091836
uucaagcaaaguaucccac

SEQ ID NO: 2091838 - RNA, 19 nt, Artificial Sequence
  Description of Artificial Sequence: Synthetic oligonucleotide
  Sense strand starting at position 1436 of SEQ ID NO: 1882058
ugggauacuuugcuugaag

SEQ ID NO: 2091839 - RNA, 19 nt, Artificial Sequence
  Description of Artificial Sequence: Synthetic oligonucleotide
  Antisense strand to SEQ ID NO: 2091838
cuucaagcaaaguauccca

SEQ ID NO: 2091840 - RNA, 19 nt, Artificial Sequence
  Description of Artificial Sequence: Synthetic oligonucleotide
  Sense strand starting at position 1439 of SEQ ID NO: 1882058
gauacuuugcuugaagguu

SEQ ID NO: 2091841 - RNA, 19 nt, Artificial Sequence
  Description of Artificial Sequence: Synthetic oligonucleotide
  Antisense strand to SEQ ID NO: 2091840
aaccuucaagcaaaguauc

SEQ ID NO: 2091842 - RNA, 19 nt, Artificial Sequence
  Description of Artificial Sequence: Synthetic oligonucleotide
  Sense strand starting at position 1630 of SEQ ID NO: 1882058
ugguauagcaguuaacagu

SEQ ID NO: 2091843 - RNA, 19 nt, Artificial Sequence
  Description of Artificial Sequence: Synthetic oligonucleotide
  Antisense strand to SEQ ID NO: 2091842
acuguuaacugcuauacca

SEQ ID NO: 2091844 - RNA, 19 nt, Artificial Sequence
  Description of Artificial Sequence: Synthetic oligonucleotide
  Sense strand starting at position 1639 of SEQ ID NO: 1882058
aguuaacagucucuauacu

SEQ ID NO: 2091845 - RNA, 19 nt, Artificial Sequence
  Description of Artificial Sequence: Synthetic oligonucleotide
  Antisense strand to SEQ ID NO: 2091844
aguauagagacuguuaacu

SEQ ID NO: 2091846 - RNA, 19 nt, Artificial Sequence
  Description of Artificial Sequence: Synthetic oligonucleotide
  Sense strand starting at position 1640 of SEQ ID NO: 1882058
guuaacagucucuauacua

SEQ ID NO: 2091847 - RNA, 19 nt, Artificial Sequence
  Description of Artificial Sequence: Synthetic oligonucleotide
  Antisense strand to SEQ ID NO: 2091846
uaguauagagacuguuaac

SEQ ID NO: 2091848 - RNA, 19 nt, Artificial Sequence
  Description of Artificial Sequence: Synthetic oligonucleotide
  Sense strand starting at position 1662 of SEQ ID NO: 1882058
agcucaauuagaggaugua

SEQ ID NO: 2091849 - RNA, 19 nt, Artificial Sequence
  Description of Artificial Sequence: Synthetic oligonucleotide
  Antisense strand to SEQ ID NO: 2091848
uacauccucuaauugagcu

SEQ ID NO: 2091850 - RNA, 19 nt, Artificial Sequence
  Description of Artificial Sequence: Synthetic oligonucleotide
  Sense strand starting at position 1665 of SEQ ID NO: 1882058
ucaauuagaggauguacau

SEQ ID NO: 2091851 - RNA, 19 nt, Artificial Sequence
  Description of Artificial Sequence: Synthetic oligonucleotide
  Antisense strand to SEQ ID NO: 2091850
auguacauccucuaauuga

SEQ ID NO: 2091852 - RNA, 19 nt, Artificial Sequence
  Description of Artificial Sequence: Synthetic oligonucleotide
  Sense strand starting at position 1918 of SEQ ID NO: 1882058
uccacuucugaaugggauu

SEQ ID NO: 2091853 - RNA, 19 nt, Artificial Sequence
  Description of Artificial Sequence: Synthetic oligonucleotide
  Antisense strand to SEQ ID NO: 2091852
aaucccauucagaagugga

SEQ ID NO: 2091854 - RNA, 19 nt, Artificial Sequence
  Description of Artificial Sequence: Synthetic oligonucleotide
  Sense strand starting at position 1921 of SEQ ID NO: 1882058
acuucugaaugggauuuaa

SEQ ID NO: 2091855 - RNA, 19 nt, Artificial Sequence
  Description of Artificial Sequence: Synthetic oligonucleotide
  Antisense strand to SEQ ID NO: 2091854
uuaaaucccauucagaagu

SEQ ID NO: 2091856 - RNA, 19 nt, Artificial Sequence
  Description of Artificial Sequence: Synthetic oligonucleotide
  Sense strand starting at position 2030 of SEQ ID NO: 1882058
aucaaagugugauuugcuu

SEQ ID NO: 2091857 - RNA, 19 nt, Artificial Sequence
  Description of Artificial Sequence: Synthetic oligonucleotide
  Antisense strand to SEQ ID NO: 2091856
aagcaaaucacacuuugau

SEQ ID NO: 2091858 - RNA, 19 nt, Artificial Sequence
  Description of Artificial Sequence: Synthetic oligonucleotide
  Sense strand starting at position 2034 of SEQ ID NO: 1882058
aagugugauuugcuuacuu

SEQ ID NO: 2091859 - RNA, 19 nt, Artificial Sequence
  Description of Artificial Sequence: Synthetic oligonucleotide
  Antisense strand to SEQ ID NO: 2091858
aaguaagcaaaucacacuu

SEQ ID NO: 2091860 - RNA, 19 nt, Artificial Sequence
  Description of Artificial Sequence: Synthetic oligonucleotide
  Sense strand starting at position 2036 of SEQ ID NO: 1882058
gugugauuugcuuacuuug

SEQ ID NO: 2091861 - RNA, 19 nt, Artificial Sequence
  Description of Artificial Sequence: Synthetic oligonucleotide
  Antisense strand to SEQ ID NO: 2091860
caaaguaagcaaaucacac

SEQ ID NO: 2091862 - RNA, 19 nt, Artificial Sequence
  Description of Artificial Sequence: Synthetic oligonucleotide
  Sense strand starting at position 2046 of SEQ ID NO: 1882058
cuuacuuugucuuuagaag

SEQ ID NO: 2091863 - RNA, 19 nt, Artificial Sequence
  Description of Artificial Sequence: Synthetic oligonucleotide
  Antisense strand to SEQ ID NO: 2091862
cuucuaaagacaaaguaag

SEQ ID NO: 2091864 - RNA, 19 nt, Artificial Sequence
  Description of Artificial Sequence: Synthetic oligonucleotide
  Sense strand starting at position 2047 of SEQ ID NO: 1882058
uuacuuugucuuuagaagu

SEQ ID NO: 2091865 - RNA, 19 nt, Artificial Sequence
  Description of Artificial Sequence: Synthetic oligonucleotide
  Antisense strand to SEQ ID NO: 2091864
acuucuaaagacaaaguaa

SEQ ID NO: 2091866 - RNA, 19 nt, Artificial Sequence
  Description of Artificial Sequence: Synthetic oligonucleotide
  Sense strand starting at position 2545 of SEQ ID NO: 1882058
aauuaaguucugggccaua

SEQ ID NO: 2091867 - RNA, 19 nt, Artificial Sequence
  Description of Artificial Sequence: Synthetic oligonucleotide
  Antisense strand to SEQ ID NO: 2091866
uauggcccagaacuuaauu

SEQ ID NO: 2091868 - RNA, 19 nt, Artificial Sequence
  Description of Artificial Sequence: Synthetic oligonucleotide
  Sense strand starting at position 2548 of SEQ ID NO: 1882058
uaaguucugggccauauau

SEQ ID NO: 2091869 - RNA, 19 nt, Artificial Sequence
  Description of Artificial Sequence: Synthetic oligonucleotide
  Antisense strand to SEQ ID NO: 2091868
auauauggcccagaacuua

SEQ ID NO: 2091870 - RNA, 19 nt, Artificial Sequence
  Description of Artificial Sequence: Synthetic oligonucleotide
  Sense strand starting at position 2650 of SEQ ID NO: 1882058
ugauaaauguacucugaac

SEQ ID NO: 2091871 - RNA, 19 nt, Artificial Sequence
  Description of Artificial Sequence: Synthetic oligonucleotide
  Antisense strand to SEQ ID NO: 2091870
guucagaguacauuuauca

SEQ ID NO: 2091872 - RNA, 19 nt, Artificial Sequence
  Description of Artificial Sequence: Synthetic oligonucleotide
  Sense strand starting at position 2676 of SEQ ID NO: 1882058
cguagcucuccugagaaac

SEQ ID NO: 2091873 - RNA, 19 nt, Artificial Sequence
  Description of Artificial Sequence: Synthetic oligonucleotide
  Antisense strand to SEQ ID NO: 2091872
guuucucaggagagcuacg

SEQ ID NO: 2091874 - RNA, 19 nt, Artificial Sequence
  Description of Artificial Sequence: Synthetic oligonucleotide
  Sense strand starting at position 2880 of SEQ ID NO: 1882058
aguaacaaguucucuuaag

SEQ ID NO: 2091875 - RNA, 19 nt, Artificial Sequence
  Description of Artificial Sequence: Synthetic oligonucleotide
  Antisense strand to SEQ ID NO: 2091874
cuuaagagaacuuguuacu

SEQ ID NO: 2091876 - RNA, 19 nt, Artificial Sequence
  Description of Artificial Sequence: Synthetic oligonucleotide
  Sense strand starting at position 2881 of SEQ ID NO: 1882058
guaacaaguucucuuaaga

SEQ ID NO: 2091877 - RNA, 19 nt, Artificial Sequence
  Description of Artificial Sequence: Synthetic oligonucleotide
  Antisense strand to SEQ ID NO: 2091876
ucuuaagagaacuuguuac

SEQ ID NO: 2091878 - RNA, 19 nt, Artificial Sequence
  Description of Artificial Sequence: Synthetic oligonucleotide
  Sense strand starting at position 2942 of SEQ ID NO: 1882058
auuauucuccauuggguau

SEQ ID NO: 2091879 - RNA, 19 nt, Artificial Sequence
  Description of Artificial Sequence: Synthetic oligonucleotide
  Antisense strand to SEQ ID NO: 2091878
auacccaauggagaauaau

SEQ ID NO: 2091880 - RNA, 19 nt, Artificial Sequence
  Description of Artificial Sequence: Synthetic oligonucleotide
  Sense strand starting at position 2981 of SEQ ID NO: 1882058
cuuggaauauaugcaauga

SEQ ID NO: 2091881 - RNA, 19 nt, Artificial Sequence
  Description of Artificial Sequence: Synthetic oligonucleotide
  Antisense strand to SEQ ID NO: 2091880
ucauugcauauauuccaag

SEQ ID NO: 2091882 - RNA, 19 nt, Artificial Sequence
  Description of Artificial Sequence: Synthetic oligonucleotide
  Sense strand starting at position 2992 of SEQ ID NO: 1882058
ugcaaugauccauauguau

SEQ ID NO: 2091883 - RNA, 19 nt, Artificial Sequence
  Description of Artificial Sequence: Synthetic oligonucleotide
  Antisense strand to SEQ ID NO: 2091882
auacauauggaucauugca

SEQ ID NO: 2091884 - RNA, 19 nt, Artificial Sequence
  Description of Artificial Sequence: Synthetic oligonucleotide
  Sense strand starting at position 3156 of SEQ ID NO: 1882058
ucuggaguuuaacugaaag

SEQ ID NO: 2091885 - RNA, 19 nt, Artificial Sequence
  Description of Artificial Sequence: Synthetic oligonucleotide
  Antisense strand to SEQ ID NO: 2091884
cuuucaguuaaacuccaga

SEQ ID NO: 2091886 - RNA, 19 nt, Artificial Sequence
  Description of Artificial Sequence: Synthetic oligonucleotide
  Sense strand starting at position 3184 of SEQ ID NO: 1882058
cugauuccugcccagaaag

SEQ ID NO: 2091887 - RNA, 19 nt, Artificial Sequence
  Description of Artificial Sequence: Synthetic oligonucleotide
  Antisense strand to SEQ ID NO: 2091886
cuuucugggcaggaaucag

SEQ ID NO: 2091888 - RNA, 19 nt, Artificial Sequence
  Description of Artificial Sequence: Synthetic oligonucleotide
  Sense strand starting at position 3264 of SEQ ID NO: 1882058
gauggagcacccuaagguu

SEQ ID NO: 2091889 - RNA, 19 nt, Artificial Sequence
  Description of Artificial Sequence: Synthetic oligonucleotide
  Antisense strand to SEQ ID NO: 2091888
aaccuuagggugcuccauc

SEQ ID NO: 2091890 - RNA, 19 nt, Artificial Sequence
  Description of Artificial Sequence: Synthetic oligonucleotide
  Sense strand starting at position 3464 of SEQ ID NO: 1882058
cagcuaucccuccagagga

SEQ ID NO: 2091891 - RNA, 19 nt, Artificial Sequence
  Description of Artificial Sequence: Synthetic oligonucleotide
  Antisense strand to SEQ ID NO: 2091890
uccucuggagggauagcug

SEQ ID NO: 2091892 - RNA, 19 nt, Artificial Sequence
  Description of Artificial Sequence: Synthetic oligonucleotide
  Sense strand starting at position 3479 of SEQ ID NO: 1882058
aggagagucuaaccacauu

SEQ ID NO: 2091893 - RNA, 19 nt, Artificial Sequence
  Description of Artificial Sequence: Synthetic oligonucleotide
  Antisense strand to SEQ ID NO: 2091892
aaugugguuagacucuccu

SEQ ID NO: 2091894 - RNA, 19 nt, Artificial Sequence
  Description of Artificial Sequence: Synthetic oligonucleotide
  Sense strand starting at position 3539 of SEQ ID NO: 1882058
agaagaugaugccuuaaug

SEQ ID NO: 2091895 - RNA, 19 nt, Artificial Sequence
  Description of Artificial Sequence: Synthetic oligonucleotide
  Antisense strand to SEQ ID NO: 2091894
cauuaaggcaucaucuucu

SEQ ID NO: 2091896 - RNA, 19 nt, Artificial Sequence
  Description of Artificial Sequence: Synthetic oligonucleotide
  Sense strand starting at position 3587 of SEQ ID NO: 1882058
gcauuuccuuccgucacau

SEQ ID NO: 2091897 - RNA, 19 nt, Artificial Sequence
  Description of Artificial Sequence: Synthetic oligonucleotide
  Antisense strand to SEQ ID NO: 2091896
augugacggaaggaaaugc

SEQ ID NO: 2091898 - RNA, 19 nt, Artificial Sequence
  Description of Artificial Sequence: Synthetic oligonucleotide
  Sense strand starting at position 3944 of SEQ ID NO: 1882058
uuucuuacagauggaugau

SEQ ID NO: 2091899 - RNA, 19 nt, Artificial Sequence
  Description of Artificial Sequence: Synthetic oligonucleotide
  Antisense strand to SEQ ID NO: 2091898
aucauccaucuguaagaaa

SEQ ID NO: 2091900 - RNA, 19 nt, Artificial Sequence
  Description of Artificial Sequence: Synthetic oligonucleotide
  Sense strand starting at position 112 of SEQ ID NO: 1882059
acguuuacugaauacuuaa

SEQ ID NO: 2091901 - RNA, 19 nt, Artificial Sequence
  Description of Artificial Sequence: Synthetic oligonucleotide
  Antisense strand to SEQ ID NO: 2091900
uuaaguauucaguaaacgu

SEQ ID NO: 2091902 - RNA, 19 nt, Artificial Sequence
  Description of Artificial Sequence: Synthetic oligonucleotide
  Sense strand starting at position 127 of SEQ ID NO: 1882059
uuaaauaugggcugagcau

SEQ ID NO: 2091903 - RNA, 19 nt, Artificial Sequence
  Description of Artificial Sequence: Synthetic oligonucleotide
  Antisense strand to SEQ ID NO: 2091902
augcucagcccauauuuaa

SEQ ID NO: 2091904 - RNA, 19 nt, Artificial Sequence
  Description of Artificial Sequence: Synthetic oligonucleotide
  Sense strand starting at position 128 of SEQ ID NO: 1882059
uaaauaugggcugagcauu

SEQ ID NO: 2091905 - RNA, 19 nt, Artificial Sequence
  Description of Artificial Sequence: Synthetic oligonucleotide
  Antisense strand to SEQ ID NO: 2091904
aaugcucagcccauauuua

SEQ ID NO: 2091906 - RNA, 19 nt, Artificial Sequence
  Description of Artificial Sequence: Synthetic oligonucleotide
  Sense strand starting at position 256 of SEQ ID NO: 1882059
gcugcuauaccagaucaca

SEQ ID NO: 2091907 - RNA, 19 nt, Artificial Sequence
  Description of Artificial Sequence: Synthetic oligonucleotide
  Antisense strand to SEQ ID NO: 2091906
ugugaucugguauagcagc

SEQ ID NO: 2091908 - RNA, 19 nt, Artificial Sequence
  Description of Artificial Sequence: Synthetic oligonucleotide
  Sense strand starting at position 442 of SEQ ID NO: 1882059
gccauuucggcucauagcu

SEQ ID NO: 2091909 - RNA, 19 nt, Artificial Sequence
  Description of Artificial Sequence: Synthetic oligonucleotide
  Antisense strand to SEQ ID NO: 2091908
agcuaugagccgaaauggc

SEQ ID NO: 2091910 - RNA, 19 nt, Artificial Sequence
  Description of Artificial Sequence: Synthetic oligonucleotide
  Sense strand starting at position 975 of SEQ ID NO: 1882059
gaggccaagcaguaugaau

SEQ ID NO: 2091911 - RNA, 19 nt, Artificial Sequence
  Description of Artificial Sequence: Synthetic oligonucleotide
  Antisense strand to SEQ ID NO: 2091910
auucauacugcuuggccuc

SEQ ID NO: 2091912 - RNA, 19 nt, Artificial Sequence
  Description of Artificial Sequence: Synthetic oligonucleotide
  Sense strand starting at position 987 of SEQ ID NO: 1882059
uaugaauugcuugaggcaa

SEQ ID NO: 2091913 - RNA, 19 nt, Artificial Sequence
  Description of Artificial Sequence: Synthetic oligonucleotide
  Antisense strand to SEQ ID NO: 2091912
uugccucaagcaauucaua

SEQ ID NO: 2091914 - RNA, 19 nt, Artificial Sequence
  Description of Artificial Sequence: Synthetic oligonucleotide
  Sense strand starting at position 1102 of SEQ ID NO: 1882059
uaauguuggcacuaauuag

SEQ ID NO: 2091915 - RNA, 19 nt, Artificial Sequence
  Description of Artificial Sequence: Synthetic oligonucleotide
  Antisense strand to SEQ ID NO: 2091914
cuaauuagugccaacauua

SEQ ID NO: 2091916 - RNA, 19 nt, Artificial Sequence
  Description of Artificial Sequence: Synthetic oligonucleotide
  Sense strand starting at position 1182 of SEQ ID NO: 1882059
auauuagugcaguaauaga

SEQ ID NO: 2091917 - RNA, 19 nt, Artificial Sequence
  Description of Artificial Sequence: Synthetic oligonucleotide
  Antisense strand to SEQ ID NO: 2091916
ucuauuacugcacuaauau

SEQ ID NO: 2091918 - RNA, 19 nt, Artificial Sequence
  Description of Artificial Sequence: Synthetic oligonucleotide
  Sense strand starting at position 1199 of SEQ ID NO: 1882059
gaguuagaguaccuaguua

SEQ ID NO: 2091919 - RNA, 19 nt, Artificial Sequence
  Description of Artificial Sequence: Synthetic oligonucleotide
  Antisense strand to SEQ ID NO: 2091918
uaacuagguacucuaacuc

SEQ ID NO: 2091920 - RNA, 19 nt, Artificial Sequence
  Description of Artificial Sequence: Synthetic oligonucleotide
  Sense strand starting at position 1245 of SEQ ID NO: 1882059
aauguuauagccuagguuu

SEQ ID NO: 2091921 - RNA, 19 nt, Artificial Sequence
  Description of Artificial Sequence: Synthetic oligonucleotide
  Antisense strand to SEQ ID NO: 2091920
aaaccuaggcuauaacauu

SEQ ID NO: 2091922 - RNA, 19 nt, Artificial Sequence
  Description of Artificial Sequence: Synthetic oligonucleotide
  Sense strand starting at position 1283 of SEQ ID NO: 1882059
auagcauagguuuauguua

SEQ ID NO: 2091923 - RNA, 19 nt, Artificial Sequence
  Description of Artificial Sequence: Synthetic oligonucleotide
  Antisense strand to SEQ ID NO: 2091922
uaacauaaaccuaugcuau

SEQ ID NO: 2091924 - RNA, 19 nt, Artificial Sequence
  Description of Artificial Sequence: Synthetic oligonucleotide
  Sense strand starting at position 1323 of SEQ ID NO: 1882059
aaaucucuggagugaagca

SEQ ID NO: 2091925 - RNA, 19 nt, Artificial Sequence
  Description of Artificial Sequence: Synthetic oligonucleotide
  Antisense strand to SEQ ID NO: 2091924
ugcuucacuccagagauuu

SEQ ID NO: 2091926 - RNA, 19 nt, Artificial Sequence
  Description of Artificial Sequence: Synthetic oligonucleotide
  Sense strand starting at position 1339 of SEQ ID NO: 1882059
gcagcugcugcugaaauuu

SEQ ID NO: 2091927 - RNA, 19 nt, Artificial Sequence
  Description of Artificial Sequence: Synthetic oligonucleotide
  Antisense strand to SEQ ID NO: 2091926
aaauuucagcagcagcugc

SEQ ID NO: 2091928 - RNA, 19 nt, Artificial Sequence
  Description of Artificial Sequence: Synthetic oligonucleotide
  Sense strand starting at position 1521 of SEQ ID NO: 1882059
acagaauucucuuugggca

SEQ ID NO: 2091929 - RNA, 19 nt, Artificial Sequence
  Description of Artificial Sequence: Synthetic oligonucleotide
  Antisense strand to SEQ ID NO: 2091928
ugcccaaagagaauucugu

SEQ ID NO: 2091930 - RNA, 19 nt, Artificial Sequence
  Description of Artificial Sequence: Synthetic oligonucleotide
  Sense strand starting at position 1539 of SEQ ID NO: 1882059
aagagaugugcuuauguac

SEQ ID NO: 2091931 - RNA, 19 nt, Artificial Sequence
  Description of Artificial Sequence: Synthetic oligonucleotide
  Antisense strand to SEQ ID NO: 2091930
guacauaagcacaucucuu

SEQ ID NO: 2091932 - RNA, 19 nt, Artificial Sequence
  Description of Artificial Sequence: Synthetic oligonucleotide
  Sense strand starting at position 1608 of SEQ ID NO: 1882059
agaguaaucugggcccaug

SEQ ID NO: 2091933 - RNA, 19 nt, Artificial Sequence
  Description of Artificial Sequence: Synthetic oligonucleotide
  Antisense strand to SEQ ID NO: 2091932
caugggcccagauuacucu

SEQ ID NO: 2091934 - RNA, 19 nt, Artificial Sequence
  Description of Artificial Sequence: Synthetic oligonucleotide
  Sense strand starting at position 1611 of SEQ ID NO: 1882059
guaaucugggcccauggaa

SEQ ID NO: 2091935 - RNA, 19 nt, Artificial Sequence
  Description of Artificial Sequence: Synthetic oligonucleotide
  Antisense strand to SEQ ID NO: 2091934
uuccaugggcccagauuac

SEQ ID NO: 2091936 - RNA, 19 nt, Artificial Sequence
  Description of Artificial Sequence: Synthetic oligonucleotide
  Sense strand starting at position 1750 of SEQ ID NO: 1882059
gcggauuucugcucuugaa

SEQ ID NO: 2091937 - RNA, 19 nt, Artificial Sequence
  Description of Artificial Sequence: Synthetic oligonucleotide
  Antisense strand to SEQ ID NO: 2091936
uucaagagcagaaauccgc

SEQ ID NO: 2091938 - RNA, 19 nt, Artificial Sequence
  Description of Artificial Sequence: Synthetic oligonucleotide
  Sense strand starting at position 1845 of SEQ ID NO: 1882059
ucaaacguaucauuaaagu

SEQ ID NO: 2091939 - RNA, 19 nt, Artificial Sequence
  Description of Artificial Sequence: Synthetic oligonucleotide
  Antisense strand to SEQ ID NO: 2091938
acuuuaaugauacguuuga

SEQ ID NO: 2091940 - RNA, 19 nt, Artificial Sequence
  Description of Artificial Sequence: Synthetic oligonucleotide
  Sense strand starting at position 2012 of SEQ ID NO: 1882059
ugcuuucuugauggaaaga

SEQ ID NO: 2091941 - RNA, 19 nt, Artificial Sequence
  Description of Artificial Sequence: Synthetic oligonucleotide
  Antisense strand to SEQ ID NO: 2091940
ucuuuccaucaagaaagca

SEQ ID NO: 2091942 - RNA, 19 nt, Artificial Sequence
  Description of Artificial Sequence: Synthetic oligonucleotide
  Sense strand starting at position 2146 of SEQ ID NO: 1882059
ccagauggcuaagauuuga

SEQ ID NO: 2091943 - RNA, 19 nt, Artificial Sequence
  Description of Artificial Sequence: Synthetic oligonucleotide
  Antisense strand to SEQ ID NO: 2091942
ucaaaucuuagccaucugg

SEQ ID NO: 2091944 - RNA, 19 nt, Artificial Sequence
  Description of Artificial Sequence: Synthetic oligonucleotide
  Sense strand starting at position 2151 of SEQ ID NO: 1882059
uggcuaagauuugagaaau

SEQ ID NO: 2091945 - RNA, 19 nt, Artificial Sequence
  Description of Artificial Sequence: Synthetic oligonucleotide
  Antisense strand to SEQ ID NO: 2091944
auuucucaaaucuuagcca

SEQ ID NO: 2091946 - RNA, 19 nt, Artificial Sequence
  Description of Artificial Sequence: Synthetic oligonucleotide
  Sense strand starting at position 2240 of SEQ ID NO: 1882059
agagaacuauuuggaauau

SEQ ID NO: 2091947 - RNA, 19 nt, Artificial Sequence
  Description of Artificial Sequence: Synthetic oligonucleotide
  Antisense strand to SEQ ID NO: 2091946
auauuccaaauaguucucu

SEQ ID NO: 2091948 - RNA, 19 nt, Artificial Sequence
  Description of Artificial Sequence: Synthetic oligonucleotide
  Sense strand starting at position 2278 of SEQ ID NO: 1882059
gcucauauacuuugaggaa

SEQ ID NO: 2091949 - RNA, 19 nt, Artificial Sequence
  Description of Artificial Sequence: Synthetic oligonucleotide
  Antisense strand to SEQ ID NO: 2091948
uuccucaaaguauaugagc

SEQ ID NO: 2091950 - RNA, 19 nt, Artificial Sequence
  Description of Artificial Sequence: Synthetic oligonucleotide
  Sense strand starting at position 2483 of SEQ ID NO: 1882059
uuauguauaccaugaugga

SEQ ID NO: 2091951 - RNA, 19 nt, Artificial Sequence
  Description of Artificial Sequence: Synthetic oligonucleotide
  Antisense strand to SEQ ID NO: 2091950
uccaucaugguauacauaa

SEQ ID NO: 2091952 - RNA, 19 nt, Artificial Sequence
  Description of Artificial Sequence: Synthetic oligonucleotide
  Sense strand starting at position 2749 of SEQ ID NO: 1882059
accagugauuacucagggu

SEQ ID NO: 2091953 - RNA, 19 nt, Artificial Sequence
  Description of Artificial Sequence: Synthetic oligonucleotide
  Antisense strand to SEQ ID NO: 2091952
acccugaguaaucacuggu

SEQ ID NO: 2091954 - RNA, 19 nt, Artificial Sequence
  Description of Artificial Sequence: Synthetic oligonucleotide
  Sense strand starting at position 2755 of SEQ ID NO: 1882059
gauuacucaggguggugaa

SEQ ID NO: 2091955 - RNA, 19 nt, Artificial Sequence
  Description of Artificial Sequence: Synthetic oligonucleotide
  Antisense strand to SEQ ID NO: 2091954
uucaccacccugaguaauc

SEQ ID NO: 2091956 - RNA, 19 nt, Artificial Sequence
  Description of Artificial Sequence: Synthetic oligonucleotide
  Sense strand starting at position 2756 of SEQ ID NO: 1882059
auuacucaggguggugaaa

SEQ ID NO: 2091957 - RNA, 19 nt, Artificial Sequence
  Description of Artificial Sequence: Synthetic oligonucleotide
  Antisense strand to SEQ ID NO: 2091956
uuucaccacccugaguaau

SEQ ID NO: 2091958 - RNA, 19 nt, Artificial Sequence
  Description of Artificial Sequence: Synthetic oligonucleotide
  Sense strand starting at position 2811 of SEQ ID NO: 1882059
uucccacgagcuuauauua

SEQ ID NO: 2091959 - RNA, 19 nt, Artificial Sequence
  Description of Artificial Sequence: Synthetic oligonucleotide
  Antisense strand to SEQ ID NO: 2091958
uaauauaagcucgugggaa

SEQ ID NO: 2091960 - RNA, 19 nt, Artificial Sequence
  Description of Artificial Sequence: Synthetic oligonucleotide
  Sense strand starting at position 2847 of SEQ ID NO: 1882059
ugggcuuaacauuaaguua

SEQ ID NO: 2091961 - RNA, 19 nt, Artificial Sequence
  Description of Artificial Sequence: Synthetic oligonucleotide
  Antisense strand to SEQ ID NO: 2091960
uaacuuaauguuaagccca

SEQ ID NO: 2091962 - RNA, 19 nt, Artificial Sequence
  Description of Artificial Sequence: Synthetic oligonucleotide
  Sense strand starting at position 2882 of SEQ ID NO: 1882059
ucacaacuagugggaaauu

SEQ ID NO: 2091963 - RNA, 19 nt, Artificial Sequence
  Description of Artificial Sequence: Synthetic oligonucleotide
  Antisense strand to SEQ ID NO: 2091962
aauuucccacuaguuguga

SEQ ID NO: 2091964 - RNA, 19 nt, Artificial Sequence
  Description of Artificial Sequence: Synthetic oligonucleotide
  Sense strand starting at position 2927 of SEQ ID NO: 1882059
acaauagagucugugguua

SEQ ID NO: 2091965 - RNA, 19 nt, Artificial Sequence
  Description of Artificial Sequence: Synthetic oligonucleotide
  Antisense strand to SEQ ID NO: 2091964
uaaccacagacucuauugu

SEQ ID NO: 2091966 - RNA, 19 nt, Artificial Sequence
  Description of Artificial Sequence: Synthetic oligonucleotide
  Sense strand starting at position 2931 of SEQ ID NO: 1882059
uagagucugugguuaaaua

SEQ ID NO: 2091967 - RNA, 19 nt, Artificial Sequence
  Description of Artificial Sequence: Synthetic oligonucleotide
  Antisense strand to SEQ ID NO: 2091966
uauuuaaccacagacucua

SEQ ID NO: 2091968 - RNA, 19 nt, Artificial Sequence
  Description of Artificial Sequence: Synthetic oligonucleotide
  Sense strand starting at position 2932 of SEQ ID NO: 1882059
agagucugugguuaaauaa

SEQ ID NO: 2091969 - RNA, 19 nt, Artificial Sequence
  Description of Artificial Sequence: Synthetic oligonucleotide
  Antisense strand to SEQ ID NO: 2091968
uuauuuaaccacagacucu

SEQ ID NO: 2091970 - RNA, 19 nt, Artificial Sequence
  Description of Artificial Sequence: Synthetic oligonucleotide
  Sense strand starting at position 2942 of SEQ ID NO: 1882059
guuaaauaacaaggauugu

SEQ ID NO: 2091971 - RNA, 19 nt, Artificial Sequence
  Description of Artificial Sequence: Synthetic oligonucleotide
  Antisense strand to SEQ ID NO: 2091970
acaauccuuguuauuuaac

SEQ ID NO: 2091972 - RNA, 19 nt, Artificial Sequence
  Description of Artificial Sequence: Synthetic oligonucleotide
  Sense strand starting at position 3220 of SEQ ID NO: 1882059
cagcauuuauaagagggaa

SEQ ID NO: 2091973 - RNA, 19 nt, Artificial Sequence
  Description of Artificial Sequence: Synthetic oligonucleotide
  Antisense strand to SEQ ID NO: 2091972
uucccucuuauaaaugcug

SEQ ID NO: 2091974 - RNA, 19 nt, Artificial Sequence
  Description of Artificial Sequence: Synthetic oligonucleotide
  Sense strand starting at position 3794 of SEQ ID NO: 1882059
uaaaguuuccuaggugacu

SEQ ID NO: 2091975 - RNA, 19 nt, Artificial Sequence
  Description of Artificial Sequence: Synthetic oligonucleotide
  Antisense strand to SEQ ID NO: 2091974
agucaccuaggaaacuuua

SEQ ID NO: 2091976 - RNA, 19 nt, Artificial Sequence
  Description of Artificial Sequence: Synthetic oligonucleotide
  Sense strand starting at position 3795 of SEQ ID NO: 1882059
aaaguuuccuaggugacua

SEQ ID NO: 2091977 - RNA, 19 nt, Artificial Sequence
  Description of Artificial Sequence: Synthetic oligonucleotide
  Antisense strand to SEQ ID NO: 2091976
uagucaccuaggaaacuuu

SEQ ID NO: 2091978 - RNA, 19 nt, Artificial Sequence
  Description of Artificial Sequence: Synthetic oligonucleotide
  Sense strand starting at position 3799 of SEQ ID NO: 1882059
uuuccuaggugacuauaaa

SEQ ID NO: 2091979 - RNA, 19 nt, Artificial Sequence
  Description of Artificial Sequence: Synthetic oligonucleotide
  Antisense strand to SEQ ID NO: 2091978
uuuauagucaccuaggaaa

SEQ ID NO: 2091980 - RNA, 19 nt, Artificial Sequence
  Description of Artificial Sequence: Synthetic oligonucleotide
  Sense strand starting at position 20 of SEQ ID NO: 1882060
auaaguaguuuccuaacuu

SEQ ID NO: 2091981 - RNA, 19 nt, Artificial Sequence
  Description of Artificial Sequence: Synthetic oligonucleotide
  Antisense strand to SEQ ID NO: 2091980
aaguuaggaaacuacuuau

SEQ ID NO: 2091982 - RNA, 19 nt, Artificial Sequence
  Description of Artificial Sequence: Synthetic oligonucleotide
  Sense strand starting at position 24 of SEQ ID NO: 1882060
guaguuuccuaacuuucuu

SEQ ID NO: 2091983 - RNA, 19 nt, Artificial Sequence
  Description of Artificial Sequence: Synthetic oligonucleotide
  Antisense strand to SEQ ID NO: 2091982
aagaaaguuaggaaacuac

SEQ ID NO: 2091984 - RNA, 19 nt, Artificial Sequence
  Description of Artificial Sequence: Synthetic oligonucleotide
  Sense strand starting at position 247 of SEQ ID NO: 1882060
ugcagagauccuuagcuuc

SEQ ID NO: 2091985 - RNA, 19 nt, Artificial Sequence
  Description of Artificial Sequence: Synthetic oligonucleotide
  Antisense strand to SEQ ID NO: 2091984
gaagcuaaggaucucugca

SEQ ID NO: 2091986 - RNA, 19 nt, Artificial Sequence
  Description of Artificial Sequence: Synthetic oligonucleotide
  Sense strand starting at position 274 of SEQ ID NO: 1882060
ggaccagacucauacagau

SEQ ID NO: 2091987 - RNA, 19 nt, Artificial Sequence
  Description of Artificial Sequence: Synthetic oligonucleotide
  Antisense strand to SEQ ID NO: 2091986
aucuguaugagucuggucc

SEQ ID NO: 2091988 - RNA, 19 nt, Artificial Sequence
  Description of Artificial Sequence: Synthetic oligonucleotide
  Sense strand starting at position 291 of SEQ ID NO: 1882060
auacccugucacugguaaa

SEQ ID NO: 2091989 - RNA, 19 nt, Artificial Sequence
  Description of Artificial Sequence: Synthetic oligonucleotide
  Antisense strand to SEQ ID NO: 2091988
uuuaccagugacaggguau

SEQ ID NO: 2091990 - RNA, 19 nt, Artificial Sequence
  Description of Artificial Sequence: Synthetic oligonucleotide
  Sense strand starting at position 400 of SEQ ID NO: 1882060
gccauccucccaugaaaga

SEQ ID NO: 2091991 - RNA, 19 nt, Artificial Sequence
  Description of Artificial Sequence: Synthetic oligonucleotide
  Antisense strand to SEQ ID NO: 2091990
ucuuucaugggaggauggc

SEQ ID NO: 2091992 - RNA, 19 nt, Artificial Sequence
  Description of Artificial Sequence: Synthetic oligonucleotide
  Sense strand starting at position 551 of SEQ ID NO: 1882060
aguggagaccuuugcaguu

SEQ ID NO: 2091993 - RNA, 19 nt, Artificial Sequence
  Description of Artificial Sequence: Synthetic oligonucleotide
  Antisense strand to SEQ ID NO: 2091992
aacugcaaaggucuccacu

SEQ ID NO: 2091994 - RNA, 19 nt, Artificial Sequence
  Description of Artificial Sequence: Synthetic oligonucleotide
  Sense strand starting at position 921 of SEQ ID NO: 1882060
uggucaaucccauggcuuu

SEQ ID NO: 2091995 - RNA, 19 nt, Artificial Sequence
  Description of Artificial Sequence: Synthetic oligonucleotide
  Antisense strand to SEQ ID NO: 2091994
aaagccaugggauugacca

SEQ ID NO: 2091996 - RNA, 19 nt, Artificial Sequence
  Description of Artificial Sequence: Synthetic oligonucleotide
  Sense strand starting at position 1275 of SEQ ID NO: 1882060
gugucuuuccagcaguuag

SEQ ID NO: 2091997 - RNA, 19 nt, Artificial Sequence
  Description of Artificial Sequence: Synthetic oligonucleotide
  Antisense strand to SEQ ID NO: 2091996
cuaacugcuggaaagacac

SEQ ID NO: 2091998 - RNA, 19 nt, Artificial Sequence
  Description of Artificial Sequence: Synthetic oligonucleotide
  Sense strand starting at position 1283 of SEQ ID NO: 1882060
ccagcaguuagucaaggaa

SEQ ID NO: 2091999 - RNA, 19 nt, Artificial Sequence
  Description of Artificial Sequence: Synthetic oligonucleotide
  Antisense strand to SEQ ID NO: 2091998
uuccuugacuaacugcugg

SEQ ID NO: 2092000 - RNA, 19 nt, Artificial Sequence
  Description of Artificial Sequence: Synthetic oligonucleotide
  Sense strand starting at position 1286 of SEQ ID NO: 1882060
gcaguuagucaaggaaaca

SEQ ID NO: 2092001 - RNA, 19 nt, Artificial Sequence
  Description of Artificial Sequence: Synthetic oligonucleotide
  Antisense strand to SEQ ID NO: 2092000
uguuuccuugacuaacugc

SEQ ID NO: 2092002 - RNA, 19 nt, Artificial Sequence
  Description of Artificial Sequence: Synthetic oligonucleotide
  Sense strand starting at position 1313 of SEQ ID NO: 1882060
acucgaaaugcauggcaga

SEQ ID NO: 2092003 - RNA, 19 nt, Artificial Sequence
  Description of Artificial Sequence: Synthetic oligonucleotide
  Antisense strand to SEQ ID NO: 2092002
ucugccaugcauuucgagu

SEQ ID NO: 2092004 - RNA, 19 nt, Artificial Sequence
  Description of Artificial Sequence: Synthetic oligonucleotide
  Sense strand starting at position 1414 of SEQ ID NO: 1882060
uggcaagucuuucuggaag

SEQ ID NO: 2092005 - RNA, 19 nt, Artificial Sequence
  Description of Artificial Sequence: Synthetic oligonucleotide
  Antisense strand to SEQ ID NO: 2092004
cuuccagaaagacuugcca

SEQ ID NO: 2092006 - RNA, 19 nt, Artificial Sequence
  Description of Artificial Sequence: Synthetic oligonucleotide
  Sense strand starting at position 1491 of SEQ ID NO: 1882060
gaugaaagccugugcuuug

SEQ ID NO: 2092007 - RNA, 19 nt, Artificial Sequence
  Description of Artificial Sequence: Synthetic oligonucleotide
  Antisense strand to SEQ ID NO: 2092006
caaagcacaggcuuucauc

SEQ ID NO: 2092008 - RNA, 19 nt, Artificial Sequence
  Description of Artificial Sequence: Synthetic oligonucleotide
  Sense strand starting at position 1520 of SEQ ID NO: 1882060
gucugagagccuugagcaa

SEQ ID NO: 2092009 - RNA, 19 nt, Artificial Sequence
  Description of Artificial Sequence: Synthetic oligonucleotide
  Antisense strand to SEQ ID NO: 2092008
uugcucaaggcucucagac

SEQ ID NO: 2092010 - RNA, 19 nt, Artificial Sequence
  Description of Artificial Sequence: Synthetic oligonucleotide
  Sense strand starting at position 1646 of SEQ ID NO: 1882060
ggcagaaguccuggcacau

SEQ ID NO: 2092011 - RNA, 19 nt, Artificial Sequence
  Description of Artificial Sequence: Synthetic oligonucleotide
  Antisense strand to SEQ ID NO: 2092010
augugccaggacuucugcc

SEQ ID NO: 2092012 - RNA, 19 nt, Artificial Sequence
  Description of Artificial Sequence: Synthetic oligonucleotide
  Sense strand starting at position 1776 of SEQ ID NO: 1882060
cacaguuugagaggugguu

SEQ ID NO: 2092013 - RNA, 19 nt, Artificial Sequence
  Description of Artificial Sequence: Synthetic oligonucleotide
  Antisense strand to SEQ ID NO: 2092012
aaccaccucucaaacugug

SEQ ID NO: 2092014 - RNA, 19 nt, Artificial Sequence
  Description of Artificial Sequence: Synthetic oligonucleotide
  Sense strand starting at position 1778 of SEQ ID NO: 1882060
caguuugagaggugguuaa

SEQ ID NO: 2092015 - RNA, 19 nt, Artificial Sequence
  Description of Artificial Sequence: Synthetic oligonucleotide
  Antisense strand to SEQ ID NO: 2092014
uuaaccaccucucaaacug

SEQ ID NO: 2092016 - RNA, 19 nt, Artificial Sequence
  Description of Artificial Sequence: Synthetic oligonucleotide
  Sense strand starting at position 1812 of SEQ ID NO: 1882060
ggagucagaccuggguuua

SEQ ID NO: 2092017 - RNA, 19 nt, Artificial Sequence
  Description of Artificial Sequence: Synthetic oligonucleotide
  Antisense strand to SEQ ID NO: 2092016
uaaacccaggucugacucc

SEQ ID NO: 2092018 - RNA, 19 nt, Artificial Sequence
  Description of Artificial Sequence: Synthetic oligonucleotide
  Sense strand starting at position 1813 of SEQ ID NO: 1882060
gagucagaccuggguuuaa

SEQ ID NO: 2092019 - RNA, 19 nt, Artificial Sequence
  Description of Artificial Sequence: Synthetic oligonucleotide
  Antisense strand to SEQ ID NO: 2092018
uuaaacccaggucugacuc

SEQ ID NO: 2092020 - RNA, 19 nt, Artificial Sequence
  Description of Artificial Sequence: Synthetic oligonucleotide
  Sense strand starting at position 1881 of SEQ ID NO: 1882060
ucuugagguccguacuuaa

SEQ ID NO: 2092021 - RNA, 19 nt, Artificial Sequence
  Description of Artificial Sequence: Synthetic oligonucleotide
  Antisense strand to SEQ ID NO: 2092020
uuaaguacggaccucaaga

SEQ ID NO: 2092022 - RNA, 19 nt, Artificial Sequence
  Description of Artificial Sequence: Synthetic oligonucleotide
  Sense strand starting at position 1884 of SEQ ID NO: 1882060
ugagguccguacuuaacuu

SEQ ID NO: 2092023 - RNA, 19 nt, Artificial Sequence
  Description of Artificial Sequence: Synthetic oligonucleotide
  Antisense strand to SEQ ID NO: 2092022
aaguuaaguacggaccuca

SEQ ID NO: 2092024 - RNA, 19 nt, Artificial Sequence
  Description of Artificial Sequence: Synthetic oligonucleotide
  Sense strand starting at position 2092 of SEQ ID NO: 1882060
gguuuauuccugggucaga

SEQ ID NO: 2092025 - RNA, 19 nt, Artificial Sequence
  Description of Artificial Sequence: Synthetic oligonucleotide
  Antisense strand to SEQ ID NO: 2092024
ucugacccaggaauaaacc

SEQ ID NO: 2092026 - RNA, 19 nt, Artificial Sequence
  Description of Artificial Sequence: Synthetic oligonucleotide
  Sense strand starting at position 2093 of SEQ ID NO: 1882060
guuuauuccugggucagag

SEQ ID NO: 2092027 - RNA, 19 nt, Artificial Sequence
  Description of Artificial Sequence: Synthetic oligonucleotide
  Antisense strand to SEQ ID NO: 2092026
cucugacccaggaauaaac

SEQ ID NO: 2092028 - RNA, 19 nt, Artificial Sequence
  Description of Artificial Sequence: Synthetic oligonucleotide
  Sense strand starting at position 2221 of SEQ ID NO: 1882060
cuugguguccaaggacaga

SEQ ID NO: 2092029 - RNA, 19 nt, Artificial Sequence
  Description of Artificial Sequence: Synthetic oligonucleotide
  Antisense strand to SEQ ID NO: 2092028
ucuguccuuggacaccaag

SEQ ID NO: 2092030 - RNA, 19 nt, Artificial Sequence
  Description of Artificial Sequence: Synthetic oligonucleotide
  Sense strand starting at position 2258 of SEQ ID NO: 1882060
gccagcaggcguccuaaau

SEQ ID NO: 2092031 - RNA, 19 nt, Artificial Sequence
  Description of Artificial Sequence: Synthetic oligonucleotide
  Antisense strand to SEQ ID NO: 2092030
auuuaggacgccugcuggc

SEQ ID NO: 2092032 - RNA, 19 nt, Artificial Sequence
  Description of Artificial Sequence: Synthetic oligonucleotide
  Sense strand starting at position 2509 of SEQ ID NO: 1882060
augggagaaucgucuauuc

SEQ ID NO: 2092033 - RNA, 19 nt, Artificial Sequence
  Description of Artificial Sequence: Synthetic oligonucleotide
  Antisense strand to SEQ ID NO: 2092032
gaauagacgauucucccau

SEQ ID NO: 2092034 - RNA, 19 nt, Artificial Sequence
  Description of Artificial Sequence: Synthetic oligonucleotide
  Sense strand starting at position 2511 of SEQ ID NO: 1882060
gggagaaucgucuauucug

SEQ ID NO: 2092035 - RNA, 19 nt, Artificial Sequence
  Description of Artificial Sequence: Synthetic oligonucleotide
  Antisense strand to SEQ ID NO: 2092034
cagaauagacgauucuccc

SEQ ID NO: 2092036 - RNA, 19 nt, Artificial Sequence
  Description of Artificial Sequence: Synthetic oligonucleotide
  Sense strand starting at position 2546 of SEQ ID NO: 1882060
ugaggauuacacuggaguu

SEQ ID NO: 2092037 - RNA, 19 nt, Artificial Sequence
  Description of Artificial Sequence: Synthetic oligonucleotide
  Antisense strand to SEQ ID NO: 2092036
aacuccaguguaauccuca

SEQ ID NO: 2092038 - RNA, 19 nt, Artificial Sequence
  Description of Artificial Sequence: Synthetic oligonucleotide
  Sense strand starting at position 2589 of SEQ ID NO: 1882060
gguacaugucuugguuuau

SEQ ID NO: 2092039 - RNA, 19 nt, Artificial Sequence
  Description of Artificial Sequence: Synthetic oligonucleotide
  Antisense strand to SEQ ID NO: 2092038
auaaaccaagacauguacc

SEQ ID NO: 2092040 - RNA, 19 nt, Artificial Sequence
  Description of Artificial Sequence: Synthetic oligonucleotide
  Sense strand starting at position 2602 of SEQ ID NO: 1882060
guuuauuggguuuaaucuu

SEQ ID NO: 2092041 - RNA, 19 nt, Artificial Sequence
  Description of Artificial Sequence: Synthetic oligonucleotide
  Antisense strand to SEQ ID NO: 2092040
aagauuaaacccaauaaac

SEQ ID NO: 2092042 - RNA, 19 nt, Artificial Sequence
  Description of Artificial Sequence: Synthetic oligonucleotide
  Sense strand starting at position 2962 of SEQ ID NO: 1882060
gacuguagaccuugaguga

SEQ ID NO: 2092043 - RNA, 19 nt, Artificial Sequence
  Description of Artificial Sequence: Synthetic oligonucleotide
  Antisense strand to SEQ ID NO: 2092042
ucacucaaggucuacaguc

SEQ ID NO: 2092044 - RNA, 19 nt, Artificial Sequence
  Description of Artificial Sequence: Synthetic oligonucleotide
  Sense strand starting at position 2965 of SEQ ID NO: 1882060
uguagaccuugagugagaa

SEQ ID NO: 2092045 - RNA, 19 nt, Artificial Sequence
  Description of Artificial Sequence: Synthetic oligonucleotide
  Antisense strand to SEQ ID NO: 2092044
uucucacucaaggucuaca

SEQ ID NO: 2092046 - RNA, 19 nt, Artificial Sequence
  Description of Artificial Sequence: Synthetic oligonucleotide
  Sense strand starting at position 2966 of SEQ ID NO: 1882060
guagaccuugagugagaaa

SEQ ID NO: 2092047 - RNA, 19 nt, Artificial Sequence
  Description of Artificial Sequence: Synthetic oligonucleotide
  Antisense strand to SEQ ID NO: 2092046
uuucucacucaaggucuac

SEQ ID NO: 2092048 - RNA, 19 nt, Artificial Sequence
  Description of Artificial Sequence: Synthetic oligonucleotide
  Sense strand starting at position 3191 of SEQ ID NO: 1882060
uuuccauugguggguuuaa

SEQ ID NO: 2092049 - RNA, 19 nt, Artificial Sequence
  Description of Artificial Sequence: Synthetic oligonucleotide
  Antisense strand to SEQ ID NO: 2092048
uuaaacccaccaauggaaa

SEQ ID NO: 2092050 - RNA, 19 nt, Artificial Sequence
  Description of Artificial Sequence: Synthetic oligonucleotide
  Sense strand starting at position 3192 of SEQ ID NO: 1882060
uuccauugguggguuuaaa

SEQ ID NO: 2092051 - RNA, 19 nt, Artificial Sequence
  Description of Artificial Sequence: Synthetic oligonucleotide
  Antisense strand to SEQ ID NO: 2092050
uuuaaacccaccaauggaa

SEQ ID NO: 2092052 - RNA, 19 nt, Artificial Sequence
  Description of Artificial Sequence: Synthetic oligonucleotide
  Sense strand starting at position 3354 of SEQ ID NO: 1882060
caaacauuagucgggugua

SEQ ID NO: 2092053 - RNA, 19 nt, Artificial Sequence
  Description of Artificial Sequence: Synthetic oligonucleotide
  Antisense strand to SEQ ID NO: 2092052
uacacccgacuaauguuug

SEQ ID NO: 2092054 - RNA, 19 nt, Artificial Sequence
  Description of Artificial Sequence: Synthetic oligonucleotide
  Sense strand starting at position 3825 of SEQ ID NO: 1882060
ggcucugaugcgagaguuc

SEQ ID NO: 2092055 - RNA, 19 nt, Artificial Sequence
  Description of Artificial Sequence: Synthetic oligonucleotide
  Antisense strand to SEQ ID NO: 2092054
gaacucucgcaucagagcc

SEQ ID NO: 2092056 - RNA, 19 nt, Artificial Sequence
  Description of Artificial Sequence: Synthetic oligonucleotide
  Sense strand starting at position 3939 of SEQ ID NO: 1882060
uguggucucuucuugauaa

SEQ ID NO: 2092057 - RNA, 19 nt, Artificial Sequence
  Description of Artificial Sequence: Synthetic oligonucleotide
  Antisense strand to SEQ ID NO: 2092056
uuaucaagaagagaccaca

SEQ ID NO: 2092058 - RNA, 19 nt, Artificial Sequence
  Description of Artificial Sequence: Synthetic oligonucleotide
  Sense strand starting at position 3941 of SEQ ID NO: 1882060
uggucucuucuugauaaag

SEQ ID NO: 2092059 - RNA, 19 nt, Artificial Sequence
  Description of Artificial Sequence: Synthetic oligonucleotide
  Antisense strand to SEQ ID NO: 2092058
cuuuaucaagaagagacca

SEQ ID NO: 2092060 - RNA, 19 nt, Artificial Sequence
  Description of Artificial Sequence: Synthetic oligonucleotide
  Sense strand starting at position 348 of SEQ ID NO: 1882061
uugggagucagguaaacuu

SEQ ID NO: 2092061 - RNA, 19 nt, Artificial Sequence
  Description of Artificial Sequence: Synthetic oligonucleotide
  Antisense strand to SEQ ID NO: 2092060
aaguuuaccugacucccaa

SEQ ID NO: 2092062 - RNA, 19 nt, Artificial Sequence
  Description of Artificial Sequence: Synthetic oligonucleotide
  Sense strand starting at position 395 of SEQ ID NO: 1882061
uuaguugaaugaccuuaaa

SEQ ID NO: 2092063 - RNA, 19 nt, Artificial Sequence
  Description of Artificial Sequence: Synthetic oligonucleotide
  Antisense strand to SEQ ID NO: 2092062
uuuaaggucauucaacuaa

SEQ ID NO: 2092064 - RNA, 19 nt, Artificial Sequence
  Description of Artificial Sequence: Synthetic oligonucleotide
  Sense strand starting at position 447 of SEQ ID NO: 1882061
uuuagaaagugggucuaau

SEQ ID NO: 2092065 - RNA, 19 nt, Artificial Sequence
  Description of Artificial Sequence: Synthetic oligonucleotide
  Antisense strand to SEQ ID NO: 2092064
auuagacccacuuucuaaa

SEQ ID NO: 2092066 - RNA, 19 nt, Artificial Sequence
  Description of Artificial Sequence: Synthetic oligonucleotide
  Sense strand starting at position 501 of SEQ ID NO: 1882061
agagauaaugccugaaagu

SEQ ID NO: 2092067 - RNA, 19 nt, Artificial Sequence
  Description of Artificial Sequence: Synthetic oligonucleotide
  Antisense strand to SEQ ID NO: 2092066
acuuucaggcauuaucucu

SEQ ID NO: 2092068 - RNA, 19 nt, Artificial Sequence
  Description of Artificial Sequence: Synthetic oligonucleotide
  Sense strand starting at position 588 of SEQ ID NO: 1882061
ucauuaauacuauguggga

SEQ ID NO: 2092069 - RNA, 19 nt, Artificial Sequence
  Description of Artificial Sequence: Synthetic oligonucleotide
  Antisense strand to SEQ ID NO: 2092068
ucccacauaguauuaauga

SEQ ID NO: 2092070 - RNA, 19 nt, Artificial Sequence
  Description of Artificial Sequence: Synthetic oligonucleotide
  Sense strand starting at position 589 of SEQ ID NO: 1882061
cauuaauacuaugugggaa

SEQ ID NO: 2092071 - RNA, 19 nt, Artificial Sequence
  Description of Artificial Sequence: Synthetic oligonucleotide
  Antisense strand to SEQ ID NO: 2092070
uucccacauaguauuaaug

SEQ ID NO: 2092072 - RNA, 19 nt, Artificial Sequence
  Description of Artificial Sequence: Synthetic oligonucleotide
  Sense strand starting at position 592 of SEQ ID NO: 1882061
uaauacuaugugggaauca

SEQ ID NO: 2092073 - RNA, 19 nt, Artificial Sequence
  Description of Artificial Sequence: Synthetic oligonucleotide
  Antisense strand to SEQ ID NO: 2092072
ugauucccacauaguauua

SEQ ID NO: 2092074 - RNA, 19 nt, Artificial Sequence
  Description of Artificial Sequence: Synthetic oligonucleotide
  Sense strand starting at position 636 of SEQ ID NO: 1882061
ccugcaucccucugagaaa

SEQ ID NO: 2092075 - RNA, 19 nt, Artificial Sequence
  Description of Artificial Sequence: Synthetic oligonucleotide
  Antisense strand to SEQ ID NO: 2092074
uuucucagagggaugcagg

SEQ ID NO: 2092076 - RNA, 19 nt, Artificial Sequence
  Description of Artificial Sequence: Synthetic oligonucleotide
  Sense strand starting at position 693 of SEQ ID NO: 1882061
cuagaauuauucuugguac

SEQ ID NO: 2092077 - RNA, 19 nt, Artificial Sequence
  Description of Artificial Sequence: Synthetic oligonucleotide
  Antisense strand to SEQ ID NO: 2092076
guaccaagaauaauucuag

SEQ ID NO: 2092078 - RNA, 19 nt, Artificial Sequence
  Description of Artificial Sequence: Synthetic oligonucleotide
  Sense strand starting at position 695 of SEQ ID NO: 1882061
agaauuauucuugguacag

SEQ ID NO: 2092079 - RNA, 19 nt, Artificial Sequence
  Description of Artificial Sequence: Synthetic oligonucleotide
  Antisense strand to SEQ ID NO: 2092078
cuguaccaagaauaauucu

SEQ ID NO: 2092080 - RNA, 19 nt, Artificial Sequence
  Description of Artificial Sequence: Synthetic oligonucleotide
  Sense strand starting at position 696 of SEQ ID NO: 1882061
gaauuauucuugguacaga

SEQ ID NO: 2092081 - RNA, 19 nt, Artificial Sequence
  Description of Artificial Sequence: Synthetic oligonucleotide
  Antisense strand to SEQ ID NO: 2092080
ucuguaccaagaauaauuc

SEQ ID NO: 2092082 - RNA, 19 nt, Artificial Sequence
  Description of Artificial Sequence: Synthetic oligonucleotide
  Sense strand starting at position 734 of SEQ ID NO: 1882061
gguuuccaugguuacauua

SEQ ID NO: 2092083 - RNA, 19 nt, Artificial Sequence
  Description of Artificial Sequence: Synthetic oligonucleotide
  Antisense strand to SEQ ID NO: 2092082
uaauguaaccauggaaacc

SEQ ID NO: 2092084 - RNA, 19 nt, Artificial Sequence
  Description of Artificial Sequence: Synthetic oligonucleotide
  Sense strand starting at position 762 of SEQ ID NO: 1882061
ugggcuuucgcgucuucau

SEQ ID NO: 2092085 - RNA, 19 nt, Artificial Sequence
  Description of Artificial Sequence: Synthetic oligonucleotide
  Antisense strand to SEQ ID NO: 2092084
augaagacgcgaaagccca

SEQ ID NO: 2092086 - RNA, 19 nt, Artificial Sequence
  Description of Artificial Sequence: Synthetic oligonucleotide
  Sense strand starting at position 763 of SEQ ID NO: 1882061
gggcuuucgcgucuucauu

SEQ ID NO: 2092087 - RNA, 19 nt, Artificial Sequence
  Description of Artificial Sequence: Synthetic oligonucleotide
  Antisense strand to SEQ ID NO: 2092086
aaugaagacgcgaaagccc

SEQ ID NO: 2092088 - RNA, 19 nt, Artificial Sequence
  Description of Artificial Sequence: Synthetic oligonucleotide
  Sense strand starting at position 1008 of SEQ ID NO: 1882061
aauugaaggguuugucauu

SEQ ID NO: 2092089 - RNA, 19 nt, Artificial Sequence
  Description of Artificial Sequence: Synthetic oligonucleotide
  Antisense strand to SEQ ID NO: 2092088
aaugacaaacccuucaauu

SEQ ID NO: 2092090 - RNA, 19 nt, Artificial Sequence
  Description of Artificial Sequence: Synthetic oligonucleotide
  Sense strand starting at position 1329 of SEQ ID NO: 1882061
gguacacacauguaguauu

SEQ ID NO: 2092091 - RNA, 19 nt, Artificial Sequence
  Description of Artificial Sequence: Synthetic oligonucleotide
  Antisense strand to SEQ ID NO: 2092090
aauacuacauguguguacc

SEQ ID NO: 2092092 - RNA, 19 nt, Artificial Sequence
  Description of Artificial Sequence: Synthetic oligonucleotide
  Sense strand starting at position 1545 of SEQ ID NO: 1882061
aguaaagcaguguauauau

SEQ ID NO: 2092093 - RNA, 19 nt, Artificial Sequence
  Description of Artificial Sequence: Synthetic oligonucleotide
  Antisense strand to SEQ ID NO: 2092092
auauauacacugcuuuacu

SEQ ID NO: 2092094 - RNA, 19 nt, Artificial Sequence
  Description of Artificial Sequence: Synthetic oligonucleotide
  Sense strand starting at position 1778 of SEQ ID NO: 1882061
agaccugugaagugcagaa

SEQ ID NO: 2092095 - RNA, 19 nt, Artificial Sequence
  Description of Artificial Sequence: Synthetic oligonucleotide
  Antisense strand to SEQ ID NO: 2092094
uucugcacuucacaggucu

SEQ ID NO: 2092096 - RNA, 19 nt, Artificial Sequence
  Description of Artificial Sequence: Synthetic oligonucleotide
  Sense strand starting at position 1872 of SEQ ID NO: 1882061
acccucuguguugacagaa

SEQ ID NO: 2092097 - RNA, 19 nt, Artificial Sequence
  Description of Artificial Sequence: Synthetic oligonucleotide
  Antisense strand to SEQ ID NO: 2092096
uucugucaacacagagggu

SEQ ID NO: 2092098 - RNA, 19 nt, Artificial Sequence
  Description of Artificial Sequence: Synthetic oligonucleotide
  Sense strand starting at position 1988 of SEQ ID NO: 1882061
uguggaaucccauacaguu

SEQ ID NO: 2092099 - RNA, 19 nt, Artificial Sequence
  Description of Artificial Sequence: Synthetic oligonucleotide
  Antisense strand to SEQ ID NO: 2092098
aacuguaugggauuccaca

SEQ ID NO: 2092100 - RNA, 19 nt, Artificial Sequence
  Description of Artificial Sequence: Synthetic oligonucleotide
  Sense strand starting at position 2157 of SEQ ID NO: 1882061
aagcguauccuauaaguaa

SEQ ID NO: 2092101 - RNA, 19 nt, Artificial Sequence
  Description of Artificial Sequence: Synthetic oligonucleotide
  Antisense strand to SEQ ID NO: 2092100
uuacuuauaggauacgcuu

SEQ ID NO: 2092102 - RNA, 19 nt, Artificial Sequence
  Description of Artificial Sequence: Synthetic oligonucleotide
  Sense strand starting at position 2237 of SEQ ID NO: 1882061
acgagaaacuacucuagug

SEQ ID NO: 2092103 - RNA, 19 nt, Artificial Sequence
  Description of Artificial Sequence: Synthetic oligonucleotide
  Antisense strand to SEQ ID NO: 2092102
cacuagaguaguuucucgu

SEQ ID NO: 2092104 - RNA, 19 nt, Artificial Sequence
  Description of Artificial Sequence: Synthetic oligonucleotide
  Sense strand starting at position 2264 of SEQ ID NO: 1882061
augaauaacuagguaggua

SEQ ID NO: 2092105 - RNA, 19 nt, Artificial Sequence
  Description of Artificial Sequence: Synthetic oligonucleotide
  Antisense strand to SEQ ID NO: 2092104
uaccuaccuaguuauucau

SEQ ID NO: 2092106 - RNA, 19 nt, Artificial Sequence
  Description of Artificial Sequence: Synthetic oligonucleotide
  Sense strand starting at position 2481 of SEQ ID NO: 1882061
caggacugucuugauuauc

SEQ ID NO: 2092107 - RNA, 19 nt, Artificial Sequence
  Description of Artificial Sequence: Synthetic oligonucleotide
  Antisense strand to SEQ ID NO: 2092106
gauaaucaagacaguccug

SEQ ID NO: 2092108 - RNA, 19 nt, Artificial Sequence
  Description of Artificial Sequence: Synthetic oligonucleotide
  Sense strand starting at position 2540 of SEQ ID NO: 1882061
ucaggaauagucugagcug

SEQ ID NO: 2092109 - RNA, 19 nt, Artificial Sequence
  Description of Artificial Sequence: Synthetic oligonucleotide
  Antisense strand to SEQ ID NO: 2092108
cagcucagacuauuccuga

SEQ ID NO: 2092110 - RNA, 19 nt, Artificial Sequence
  Description of Artificial Sequence: Synthetic oligonucleotide
  Sense strand starting at position 2598 of SEQ ID NO: 1882061
uacauaacugguugguaua

SEQ ID NO: 2092111 - RNA, 19 nt, Artificial Sequence
  Description of Artificial Sequence: Synthetic oligonucleotide
  Antisense strand to SEQ ID NO: 2092110
uauaccaaccaguuaugua

SEQ ID NO: 2092112 - RNA, 19 nt, Artificial Sequence
  Description of Artificial Sequence: Synthetic oligonucleotide
  Sense strand starting at position 2599 of SEQ ID NO: 1882061
acauaacugguugguauaa

SEQ ID NO: 2092113 - RNA, 19 nt, Artificial Sequence
  Description of Artificial Sequence: Synthetic oligonucleotide
  Antisense strand to SEQ ID NO: 2092112
uuauaccaaccaguuaugu

SEQ ID NO: 2092114 - RNA, 19 nt, Artificial Sequence
  Description of Artificial Sequence: Synthetic oligonucleotide
  Sense strand starting at position 2670 of SEQ ID NO: 1882061
aaggaauguuaagccaagu

SEQ ID NO: 2092115 - RNA, 19 nt, Artificial Sequence
  Description of Artificial Sequence: Synthetic oligonucleotide
  Antisense strand to SEQ ID NO: 2092114
acuuggcuuaacauuccuu

SEQ ID NO: 2092116 - RNA, 19 nt, Artificial Sequence
  Description of Artificial Sequence: Synthetic oligonucleotide
  Sense strand starting at position 2700 of SEQ ID NO: 1882061
uguuguaucccacagaccu

SEQ ID NO: 2092117 - RNA, 19 nt, Artificial Sequence
  Description of Artificial Sequence: Synthetic oligonucleotide
  Antisense strand to SEQ ID NO: 2092116
aggucugugggauacaaca

SEQ ID NO: 2092118 - RNA, 19 nt, Artificial Sequence
  Description of Artificial Sequence: Synthetic oligonucleotide
  Sense strand starting at position 2794 of SEQ ID NO: 1882061
auagacauguccuuggaac

SEQ ID NO: 2092119 - RNA, 19 nt, Artificial Sequence
  Description of Artificial Sequence: Synthetic oligonucleotide
  Antisense strand to SEQ ID NO: 2092118
guuccaaggacaugucuau

SEQ ID NO: 2092120 - RNA, 19 nt, Artificial Sequence
  Description of Artificial Sequence: Synthetic oligonucleotide
  Sense strand starting at position 2796 of SEQ ID NO: 1882061
agacauguccuuggaaccu

SEQ ID NO: 2092121 - RNA, 19 nt, Artificial Sequence
  Description of Artificial Sequence: Synthetic oligonucleotide
  Antisense strand to SEQ ID NO: 2092120
agguuccaaggacaugucu

SEQ ID NO: 2092122 - RNA, 19 nt, Artificial Sequence
  Description of Artificial Sequence: Synthetic oligonucleotide
  Sense strand starting at position 2943 of SEQ ID NO: 1882061
ccaucuguucucgaggaac

SEQ ID NO: 2092123 - RNA, 19 nt, Artificial Sequence
  Description of Artificial Sequence: Synthetic oligonucleotide
  Antisense strand to SEQ ID NO: 2092122
guuccucgagaacagaugg

SEQ ID NO: 2092124 - RNA, 19 nt, Artificial Sequence
  Description of Artificial Sequence: Synthetic oligonucleotide
  Sense strand starting at position 3188 of SEQ ID NO: 1882061
cuaucuguaugauuccaca

SEQ ID NO: 2092125 - RNA, 19 nt, Artificial Sequence
  Description of Artificial Sequence: Synthetic oligonucleotide
  Antisense strand to SEQ ID NO: 2092124
uguggaaucauacagauag

SEQ ID NO: 2092126 - RNA, 19 nt, Artificial Sequence
  Description of Artificial Sequence: Synthetic oligonucleotide
  Sense strand starting at position 3338 of SEQ ID NO: 1882061
cgauauuaaaguugggaac

SEQ ID NO: 2092127 - RNA, 19 nt, Artificial Sequence
  Description of Artificial Sequence: Synthetic oligonucleotide
  Antisense strand to SEQ ID NO: 2092126
guucccaacuuuaauaucg

SEQ ID NO: 2092128 - RNA, 19 nt, Artificial Sequence
  Description of Artificial Sequence: Synthetic oligonucleotide
  Sense strand starting at position 3618 of SEQ ID NO: 1882061
uugcaucuucuguaaugaa

SEQ ID NO: 2092129 - RNA, 19 nt, Artificial Sequence
  Description of Artificial Sequence: Synthetic oligonucleotide
  Antisense strand to SEQ ID NO: 2092128
uucauuacagaagaugcaa

SEQ ID NO: 2092130 - RNA, 19 nt, Artificial Sequence
  Description of Artificial Sequence: Synthetic oligonucleotide
  Sense strand starting at position 3651 of SEQ ID NO: 1882061
gucucauuagcacauuacu

SEQ ID NO: 2092131 - RNA, 19 nt, Artificial Sequence
  Description of Artificial Sequence: Synthetic oligonucleotide
  Antisense strand to SEQ ID NO: 2092130
aguaaugugcuaaugagac

SEQ ID NO: 2092132 - RNA, 19 nt, Artificial Sequence
  Description of Artificial Sequence: Synthetic oligonucleotide
  Sense strand starting at position 3849 of SEQ ID NO: 1882061
guuggaaauaagggaugua

SEQ ID NO: 2092133 - RNA, 19 nt, Artificial Sequence
  Description of Artificial Sequence: Synthetic oligonucleotide
  Antisense strand to SEQ ID NO: 2092132
uacaucccuuauuuccaac

SEQ ID NO: 2092134 - RNA, 19 nt, Artificial Sequence
  Description of Artificial Sequence: Synthetic oligonucleotide
  Sense strand starting at position 3923 of SEQ ID NO: 1882061
ccacuuggcugaucaaauc

SEQ ID NO: 2092135 - RNA, 19 nt, Artificial Sequence
  Description of Artificial Sequence: Synthetic oligonucleotide
  Antisense strand to SEQ ID NO: 2092134
gauuugaucagccaagugg

SEQ ID NO: 2092136 - RNA, 19 nt, Artificial Sequence
  Description of Artificial Sequence: Synthetic oligonucleotide
  Sense strand starting at position 3932 of SEQ ID NO: 1882061
ugaucaaaucaugggucaa

SEQ ID NO: 2092137 - RNA, 19 nt, Artificial Sequence
  Description of Artificial Sequence: Synthetic oligonucleotide
  Antisense strand to SEQ ID NO: 2092136
uugacccaugauuugauca

SEQ ID NO: 2092138 - RNA, 19 nt, Artificial Sequence
  Description of Artificial Sequence: Synthetic oligonucleotide
  Sense strand starting at position 3945 of SEQ ID NO: 1882061
ggucaagaaguuugauccu

SEQ ID NO: 2092139 - RNA, 19 nt, Artificial Sequence
  Description of Artificial Sequence: Synthetic oligonucleotide
  Antisense strand to SEQ ID NO: 2092138
aggaucaaacuucuugacc

SEQ ID NO: 2092140 - RNA, 19 nt, Artificial Sequence
  Description of Artificial Sequence: Synthetic oligonucleotide
  Sense strand starting at position 33 of SEQ ID NO: 1882062
uccuguguauauuugguaa

SEQ ID NO: 2092141 - RNA, 19 nt, Artificial Sequence
  Description of Artificial Sequence: Synthetic oligonucleotide
  Antisense strand to SEQ ID NO: 2092140
uuaccaaauauacacagga

SEQ ID NO: 2092142 - RNA, 19 nt, Artificial Sequence
  Description of Artificial Sequence: Synthetic oligonucleotide
  Sense strand starting at position 167 of SEQ ID NO: 1882062
ucuuacugacauugguuaa

SEQ ID NO: 2092143 - RNA, 19 nt, Artificial Sequence
  Description of Artificial Sequence: Synthetic oligonucleotide
  Antisense strand to SEQ ID NO: 2092142
uuaaccaaugucaguaaga

SEQ ID NO: 2092144 - RNA, 19 nt, Artificial Sequence
  Description of Artificial Sequence: Synthetic oligonucleotide
  Sense strand starting at position 316 of SEQ ID NO: 1882062
uguaaacauugggcuuaga

SEQ ID NO: 2092145 - RNA, 19 nt, Artificial Sequence
  Description of Artificial Sequence: Synthetic oligonucleotide
  Antisense strand to SEQ ID NO: 2092144
ucuaagcccaauguuuaca

SEQ ID NO: 2092146 - RNA, 19 nt, Artificial Sequence
  Description of Artificial Sequence: Synthetic oligonucleotide
  Sense strand starting at position 607 of SEQ ID NO: 1882062
ggucuuguuguuagaguag

SEQ ID NO: 2092147 - RNA, 19 nt, Artificial Sequence
  Description of Artificial Sequence: Synthetic oligonucleotide
  Antisense strand to SEQ ID NO: 2092146
cuacucuaacaacaagacc

SEQ ID NO: 2092148 - RNA, 19 nt, Artificial Sequence
  Description of Artificial Sequence: Synthetic oligonucleotide
  Sense strand starting at position 649 of SEQ ID NO: 1882062
uuagaagacucuucuauug

SEQ ID NO: 2092149 - RNA, 19 nt, Artificial Sequence
  Description of Artificial Sequence: Synthetic oligonucleotide
  Antisense strand to SEQ ID NO: 2092148
caauagaagagucuucuaa

SEQ ID NO: 2092150 - RNA, 19 nt, Artificial Sequence
  Description of Artificial Sequence: Synthetic oligonucleotide
  Sense strand starting at position 672 of SEQ ID NO: 1882062
cauuaaaggugccuugaau

SEQ ID NO: 2092151 - RNA, 19 nt, Artificial Sequence
  Description of Artificial Sequence: Synthetic oligonucleotide
  Antisense strand to SEQ ID NO: 2092150
auucaaggcaccuuuaaug

SEQ ID NO: 2092152 - RNA, 19 nt, Artificial Sequence
  Description of Artificial Sequence: Synthetic oligonucleotide
  Sense strand starting at position 830 of SEQ ID NO: 1882062
ugcuuuagagaaggauugu

SEQ ID NO: 2092153 - RNA, 19 nt, Artificial Sequence
  Description of Artificial Sequence: Synthetic oligonucleotide
  Antisense strand to SEQ ID NO: 2092152
acaauccuucucuaaagca

SEQ ID NO: 2092154 - RNA, 19 nt, Artificial Sequence
  Description of Artificial Sequence: Synthetic oligonucleotide
  Sense strand starting at position 831 of SEQ ID NO: 1882062
gcuuuagagaaggauuguu

SEQ ID NO: 2092155 - RNA, 19 nt, Artificial Sequence
  Description of Artificial Sequence: Synthetic oligonucleotide
  Antisense strand to SEQ ID NO: 2092154
aacaauccuucucuaaagc

SEQ ID NO: 2092156 - RNA, 19 nt, Artificial Sequence
  Description of Artificial Sequence: Synthetic oligonucleotide
  Sense strand starting at position 836 of SEQ ID NO: 1882062
agagaaggauuguuucuau

SEQ ID NO: 2092157 - RNA, 19 nt, Artificial Sequence
  Description of Artificial Sequence: Synthetic oligonucleotide
  Antisense strand to SEQ ID NO: 2092156
auagaaacaauccuucucu

SEQ ID NO: 2092158 - RNA, 19 nt, Artificial Sequence
  Description of Artificial Sequence: Synthetic oligonucleotide
  Sense strand starting at position 839 of SEQ ID NO: 1882062
gaaggauuguuucuauuau

SEQ ID NO: 2092159 - RNA, 19 nt, Artificial Sequence
  Description of Artificial Sequence: Synthetic oligonucleotide
  Antisense strand to SEQ ID NO: 2092158
auaauagaaacaauccuuc

SEQ ID NO: 2092160 - RNA, 19 nt, Artificial Sequence
  Description of Artificial Sequence: Synthetic oligonucleotide
  Sense strand starting at position 865 of SEQ ID NO: 1882062
gugguuugggaagaguguu

SEQ ID NO: 2092161 - RNA, 19 nt, Artificial Sequence
  Description of Artificial Sequence: Synthetic oligonucleotide
  Antisense strand to SEQ ID NO: 2092160
aacacucuucccaaaccac

SEQ ID NO: 2092162 - RNA, 19 nt, Artificial Sequence
  Description of Artificial Sequence: Synthetic oligonucleotide
  Sense strand starting at position 894 of SEQ ID NO: 1882062
acagauauuccuggcauga

SEQ ID NO: 2092163 - RNA, 19 nt, Artificial Sequence
  Description of Artificial Sequence: Synthetic oligonucleotide
  Antisense strand to SEQ ID NO: 2092162
ucaugccaggaauaucugu

SEQ ID NO: 2092164 - RNA, 19 nt, Artificial Sequence
  Description of Artificial Sequence: Synthetic oligonucleotide
  Sense strand starting at position 898 of SEQ ID NO: 1882062
auauuccuggcaugagaac

SEQ ID NO: 2092165 - RNA, 19 nt, Artificial Sequence
  Description of Artificial Sequence: Synthetic oligonucleotide
  Antisense strand to SEQ ID NO: 2092164
guucucaugccaggaauau

SEQ ID NO: 2092166 - RNA, 19 nt, Artificial Sequence
  Description of Artificial Sequence: Synthetic oligonucleotide
  Sense strand starting at position 1045 of SEQ ID NO: 1882062
cauagagauguuuggccau

SEQ ID NO: 2092167 - RNA, 19 nt, Artificial Sequence
  Description of Artificial Sequence: Synthetic oligonucleotide
  Antisense strand to SEQ ID NO: 2092166
auggccaaacaucucuaug

SEQ ID NO: 2092168 - RNA, 19 nt, Artificial Sequence
  Description of Artificial Sequence: Synthetic oligonucleotide
  Sense strand starting at position 1047 of SEQ ID NO: 1882062
uagagauguuuggccauua

SEQ ID NO: 2092169 - RNA, 19 nt, Artificial Sequence
  Description of Artificial Sequence: Synthetic oligonucleotide
  Antisense strand to SEQ ID NO: 2092168
uaauggccaaacaucucua

SEQ ID NO: 2092170 - RNA, 19 nt, Artificial Sequence
  Description of Artificial Sequence: Synthetic oligonucleotide
  Sense strand starting at position 1048 of SEQ ID NO: 1882062
agagauguuuggccauuac

SEQ ID NO: 2092171 - RNA, 19 nt, Artificial Sequence
  Description of Artificial Sequence: Synthetic oligonucleotide
  Antisense strand to SEQ ID NO: 2092170
guaauggccaaacaucucu

SEQ ID NO: 2092172 - RNA, 19 nt, Artificial Sequence
  Description of Artificial Sequence: Synthetic oligonucleotide
  Sense strand starting at position 1124 of SEQ ID NO: 1882062
uugucacaucaagaguuau

SEQ ID NO: 2092173 - RNA, 19 nt, Artificial Sequence
  Description of Artificial Sequence: Synthetic oligonucleotide
  Antisense strand to SEQ ID NO: 2092172
auaacucuugaugugacaa

SEQ ID NO: 2092174 - RNA, 19 nt, Artificial Sequence
  Description of Artificial Sequence: Synthetic oligonucleotide
  Sense strand starting at position 1305 of SEQ ID NO: 1882062
gcaccugucauagaguaag

SEQ ID NO: 2092175 - RNA, 19 nt, Artificial Sequence
  Description of Artificial Sequence: Synthetic oligonucleotide
  Antisense strand to SEQ ID NO: 2092174
cuuacucuaugacaggugc

SEQ ID NO: 2092176 - RNA, 19 nt, Artificial Sequence
  Description of Artificial Sequence: Synthetic oligonucleotide
  Sense strand starting at position 1319 of SEQ ID NO: 1882062
guaaguacacaauaaaugu

SEQ ID NO: 2092177 - RNA, 19 nt, Artificial Sequence
  Description of Artificial Sequence: Synthetic oligonucleotide
  Antisense strand to SEQ ID NO: 2092176
acauuuauuguguacuuac

SEQ ID NO: 2092178 - RNA, 19 nt, Artificial Sequence
  Description of Artificial Sequence: Synthetic oligonucleotide
  Sense strand starting at position 1483 of SEQ ID NO: 1882062
cugacauaaucuuuguuga

SEQ ID NO: 2092179 - RNA, 19 nt, Artificial Sequence
  Description of Artificial Sequence: Synthetic oligonucleotide
  Antisense strand to SEQ ID NO: 2092178
ucaacaaagauuaugucag

SEQ ID NO: 2092180 - RNA, 19 nt, Artificial Sequence
  Description of Artificial Sequence: Synthetic oligonucleotide
  Sense strand starting at position 1484 of SEQ ID NO: 1882062
ugacauaaucuuuguugac

SEQ ID NO: 2092181 - RNA, 19 nt, Artificial Sequence
  Description of Artificial Sequence: Synthetic oligonucleotide
  Antisense strand to SEQ ID NO: 2092180
gucaacaaagauuauguca

SEQ ID NO: 2092182 - RNA, 19 nt, Artificial Sequence
  Description of Artificial Sequence: Synthetic oligonucleotide
  Sense strand starting at position 1841 of SEQ ID NO: 1882062
ucaugugaucaaugaggug

SEQ ID NO: 2092183 - RNA, 19 nt, Artificial Sequence
  Description of Artificial Sequence: Synthetic oligonucleotide
  Antisense strand to SEQ ID NO: 2092182
caccucauugaucacauga

SEQ ID NO: 2092184 - RNA, 19 nt, Artificial Sequence
  Description of Artificial Sequence: Synthetic oligonucleotide
  Sense strand starting at position 2130 of SEQ ID NO: 1882062
uagacaggucuugguuaau

SEQ ID NO: 2092185 - RNA, 19 nt, Artificial Sequence
  Description of Artificial Sequence: Synthetic oligonucleotide
  Antisense strand to SEQ ID NO: 2092184
auuaaccaagaccugucua

SEQ ID NO: 2092186 - RNA, 19 nt, Artificial Sequence
  Description of Artificial Sequence: Synthetic oligonucleotide
  Sense strand starting at position 2221 of SEQ ID NO: 1882062
gcccuaaauggucagagca

SEQ ID NO: 2092187 - RNA, 19 nt, Artificial Sequence
  Description of Artificial Sequence: Synthetic oligonucleotide
  Antisense strand to SEQ ID NO: 2092186
ugcucugaccauuuagggc

SEQ ID NO: 2092188 - RNA, 19 nt, Artificial Sequence
  Description of Artificial Sequence: Synthetic oligonucleotide
  Sense strand starting at position 2286 of SEQ ID NO: 1882062
acguaagaugaauauuggu

SEQ ID NO: 2092189 - RNA, 19 nt, Artificial Sequence
  Description of Artificial Sequence: Synthetic oligonucleotide
  Antisense strand to SEQ ID NO: 2092188
accaauauucaucuuacgu

SEQ ID NO: 2092190 - RNA, 19 nt, Artificial Sequence
  Description of Artificial Sequence: Synthetic oligonucleotide
  Sense strand starting at position 2666 of SEQ ID NO: 1882062
cucauaugggcauggauga

SEQ ID NO: 2092191 - RNA, 19 nt, Artificial Sequence
  Description of Artificial Sequence: Synthetic oligonucleotide
  Antisense strand to SEQ ID NO: 2092190
ucauccaugcccauaugag

SEQ ID NO: 2092192 - RNA, 19 nt, Artificial Sequence
  Description of Artificial Sequence: Synthetic oligonucleotide
  Sense strand starting at position 2758 of SEQ ID NO: 1882062
guugaaauguacuccucaa

SEQ ID NO: 2092193 - RNA, 19 nt, Artificial Sequence
  Description of Artificial Sequence: Synthetic oligonucleotide
  Antisense strand to SEQ ID NO: 2092192
uugaggaguacauuucaac

SEQ ID NO: 2092194 - RNA, 19 nt, Artificial Sequence
  Description of Artificial Sequence: Synthetic oligonucleotide
  Sense strand starting at position 2782 of SEQ ID NO: 1882062
gagguagggccuugaauua

SEQ ID NO: 2092195 - RNA, 19 nt, Artificial Sequence
  Description of Artificial Sequence: Synthetic oligonucleotide
  Antisense strand to SEQ ID NO: 2092194
uaauucaaggcccuaccuc

SEQ ID NO: 2092196 - RNA, 19 nt, Artificial Sequence
  Description of Artificial Sequence: Synthetic oligonucleotide
  Sense strand starting at position 3147 of SEQ ID NO: 1882062
cauauuaggccugguagga

SEQ ID NO: 2092197 - RNA, 19 nt, Artificial Sequence
  Description of Artificial Sequence: Synthetic oligonucleotide
  Antisense strand to SEQ ID NO: 2092196
uccuaccaggccuaauaug

SEQ ID NO: 2092198 - RNA, 19 nt, Artificial Sequence
  Description of Artificial Sequence: Synthetic oligonucleotide
  Sense strand starting at position 3165 of SEQ ID NO: 1882062
agguguuugguucauagag

SEQ ID NO: 2092199 - RNA, 19 nt, Artificial Sequence
  Description of Artificial Sequence: Synthetic oligonucleotide
  Antisense strand to SEQ ID NO: 2092198
cucuaugaaccaaacaccu

SEQ ID NO: 2092200 - RNA, 19 nt, Artificial Sequence
  Description of Artificial Sequence: Synthetic oligonucleotide
  Sense strand starting at position 3233 of SEQ ID NO: 1882062
caugaaaccugguugcuua

SEQ ID NO: 2092201 - RNA, 19 nt, Artificial Sequence
  Description of Artificial Sequence: Synthetic oligonucleotide
  Antisense strand to SEQ ID NO: 2092200
uaagcaaccagguuucaug

SEQ ID NO: 2092202 - RNA, 19 nt, Artificial Sequence
  Description of Artificial Sequence: Synthetic oligonucleotide
  Sense strand starting at position 3234 of SEQ ID NO: 1882062
augaaaccugguugcuuaa

SEQ ID NO: 2092203 - RNA, 19 nt, Artificial Sequence
  Description of Artificial Sequence: Synthetic oligonucleotide
  Antisense strand to SEQ ID NO: 2092202
uuaagcaaccagguuucau

SEQ ID NO: 2092204 - RNA, 19 nt, Artificial Sequence
  Description of Artificial Sequence: Synthetic oligonucleotide
  Sense strand starting at position 3336 of SEQ ID NO: 1882062
auuguaaacuuucugagac

SEQ ID NO: 2092205 - RNA, 19 nt, Artificial Sequence
  Description of Artificial Sequence: Synthetic oligonucleotide
  Antisense strand to SEQ ID NO: 2092204
gucucagaaaguuuacaau

SEQ ID NO: 2092206 - RNA, 19 nt, Artificial Sequence
  Description of Artificial Sequence: Synthetic oligonucleotide
  Sense strand starting at position 3378 of SEQ ID NO: 1882062
cuauguuuacucuacaggu

SEQ ID NO: 2092207 - RNA, 19 nt, Artificial Sequence
  Description of Artificial Sequence: Synthetic oligonucleotide
  Antisense strand to SEQ ID NO: 2092206
accuguagaguaaacauag

SEQ ID NO: 2092208 - RNA, 19 nt, Artificial Sequence
  Description of Artificial Sequence: Synthetic oligonucleotide
  Sense strand starting at position 3475 of SEQ ID NO: 1882062
ugcccuaaugcagaaaguu

SEQ ID NO: 2092209 - RNA, 19 nt, Artificial Sequence
  Description of Artificial Sequence: Synthetic oligonucleotide
  Antisense strand to SEQ ID NO: 2092208
aacuuucugcauuagggca

SEQ ID NO: 2092210 - RNA, 19 nt, Artificial Sequence
  Description of Artificial Sequence: Synthetic oligonucleotide
  Sense strand starting at position 3490 of SEQ ID NO: 1882062
aguugcuaucaaggaguga

SEQ ID NO: 2092211 - RNA, 19 nt, Artificial Sequence
  Description of Artificial Sequence: Synthetic oligonucleotide
  Antisense strand to SEQ ID NO: 2092210
ucacuccuugauagcaacu

SEQ ID NO: 2092212 - RNA, 19 nt, Artificial Sequence
  Description of Artificial Sequence: Synthetic oligonucleotide
  Sense strand starting at position 3494 of SEQ ID NO: 1882062
gcuaucaaggagugagaua

SEQ ID NO: 2092213 - RNA, 19 nt, Artificial Sequence
  Description of Artificial Sequence: Synthetic oligonucleotide
  Antisense strand to SEQ ID NO: 2092212
uaucucacuccuugauagc

SEQ ID NO: 2092214 - RNA, 19 nt, Artificial Sequence
  Description of Artificial Sequence: Synthetic oligonucleotide
  Sense strand starting at position 3537 of SEQ ID NO: 1882062
ugggcaucacuuuggaacu

SEQ ID NO: 2092215 - RNA, 19 nt, Artificial Sequence
  Description of Artificial Sequence: Synthetic oligonucleotide
  Antisense strand to SEQ ID NO: 2092214
aguuccaaagugaugccca

SEQ ID NO: 2092216 - RNA, 19 nt, Artificial Sequence
  Description of Artificial Sequence: Synthetic oligonucleotide
  Sense strand starting at position 3750 of SEQ ID NO: 1882062
gcaugucacgccuuagcaa

SEQ ID NO: 2092217 - RNA, 19 nt, Artificial Sequence
  Description of Artificial Sequence: Synthetic oligonucleotide
  Antisense strand to SEQ ID NO: 2092216
uugcuaaggcgugacaugc

SEQ ID NO: 2092218 - RNA, 19 nt, Artificial Sequence
  Description of Artificial Sequence: Synthetic oligonucleotide
  Sense strand starting at position 3837 of SEQ ID NO: 1882062
uggugucugguggaagaaa

SEQ ID NO: 2092219 - RNA, 19 nt, Artificial Sequence
  Description of Artificial Sequence: Synthetic oligonucleotide
  Antisense strand to SEQ ID NO: 2092218
uuucuuccaccagacacca

SEQ ID NO: 2092220 - RNA, 19 nt, Artificial Sequence
  Description of Artificial Sequence: Synthetic oligonucleotide
  Sense strand starting at position 156 of SEQ ID NO: 1882063
guaguucuccuccaucaua

SEQ ID NO: 2092221 - RNA, 19 nt, Artificial Sequence
  Description of Artificial Sequence: Synthetic oligonucleotide
  Antisense strand to SEQ ID NO: 2092220
uaugauggaggagaacuac

SEQ ID NO: 2092222 - RNA, 19 nt, Artificial Sequence
  Description of Artificial Sequence: Synthetic oligonucleotide
  Sense strand starting at position 216 of SEQ ID NO: 1882063
acaugaauaugugugguuu

SEQ ID NO: 2092223 - RNA, 19 nt, Artificial Sequence
  Description of Artificial Sequence: Synthetic oligonucleotide
  Antisense strand to SEQ ID NO: 2092222
aaaccacacauauucaugu

SEQ ID NO: 2092224 - RNA, 19 nt, Artificial Sequence
  Description of Artificial Sequence: Synthetic oligonucleotide
  Sense strand starting at position 260 of SEQ ID NO: 1882063
uauugaaagcuccauugug

SEQ ID NO: 2092225 - RNA, 19 nt, Artificial Sequence
  Description of Artificial Sequence: Synthetic oligonucleotide
  Antisense strand to SEQ ID NO: 2092224
cacaauggagcuuucaaua

SEQ ID NO: 2092226 - RNA, 19 nt, Artificial Sequence
  Description of Artificial Sequence: Synthetic oligonucleotide
  Sense strand starting at position 455 of SEQ ID NO: 1882063
gcaguaguucuagacaaga

SEQ ID NO: 2092227 - RNA, 19 nt, Artificial Sequence
  Description of Artificial Sequence: Synthetic oligonucleotide
  Antisense strand to SEQ ID NO: 2092226
ucuugucuagaacuacugc

SEQ ID NO: 2092228 - RNA, 19 nt, Artificial Sequence
  Description of Artificial Sequence: Synthetic oligonucleotide
  Sense strand starting at position 637 of SEQ ID NO: 1882063
cuauaagaaggcugaguua

SEQ ID NO: 2092229 - RNA, 19 nt, Artificial Sequence
  Description of Artificial Sequence: Synthetic oligonucleotide
  Antisense strand to SEQ ID NO: 2092228
uaacucagccuucuuauag

SEQ ID NO: 2092230 - RNA, 19 nt, Artificial Sequence
  Description of Artificial Sequence: Synthetic oligonucleotide
  Sense strand starting at position 640 of SEQ ID NO: 1882063
uaagaaggcugaguuacuu

SEQ ID NO: 2092231 - RNA, 19 nt, Artificial Sequence
  Description of Artificial Sequence: Synthetic oligonucleotide
  Antisense strand to SEQ ID NO: 2092230
aaguaacucagccuucuua

SEQ ID NO: 2092232 - RNA, 19 nt, Artificial Sequence
  Description of Artificial Sequence: Synthetic oligonucleotide
  Sense strand starting at position 1033 of SEQ ID NO: 1882063
ggagaaguccuaggguuga

SEQ ID NO: 2092233 - RNA, 19 nt, Artificial Sequence
  Description of Artificial Sequence: Synthetic oligonucleotide
  Antisense strand to SEQ ID NO: 2092232
ucaacccuaggacuucucc

SEQ ID NO: 2092234 - RNA, 19 nt, Artificial Sequence
  Description of Artificial Sequence: Synthetic oligonucleotide
  Sense strand starting at position 1037 of SEQ ID NO: 1882063
aaguccuaggguugaugau

SEQ ID NO: 2092235 - RNA, 19 nt, Artificial Sequence
  Description of Artificial Sequence: Synthetic oligonucleotide
  Antisense strand to SEQ ID NO: 2092234
aucaucaacccuaggacuu

SEQ ID NO: 2092236 - RNA, 19 nt, Artificial Sequence
  Description of Artificial Sequence: Synthetic oligonucleotide
  Sense strand starting at position 1038 of SEQ ID NO: 1882063
aguccuaggguugaugauu

SEQ ID NO: 2092237 - RNA, 19 nt, Artificial Sequence
  Description of Artificial Sequence: Synthetic oligonucleotide
  Antisense strand to SEQ ID NO: 2092236
aaucaucaacccuaggacu

SEQ ID NO: 2092238 - RNA, 19 nt, Artificial Sequence
  Description of Artificial Sequence: Synthetic oligonucleotide
  Sense strand starting at position 1043 of SEQ ID NO: 1882063
uaggguugaugauuguauu

SEQ ID NO: 2092239 - RNA, 19 nt, Artificial Sequence
  Description of Artificial Sequence: Synthetic oligonucleotide
  Antisense strand to SEQ ID NO: 2092238
aauacaaucaucaacccua

SEQ ID NO: 2092240 - RNA, 19 nt, Artificial Sequence
  Description of Artificial Sequence: Synthetic oligonucleotide
  Sense strand starting at position 1044 of SEQ ID NO: 1882063
aggguugaugauuguauua

SEQ ID NO: 2092241 - RNA, 19 nt, Artificial Sequence
  Description of Artificial Sequence: Synthetic oligonucleotide
  Antisense strand to SEQ ID NO: 2092240
uaauacaaucaucaacccu

SEQ ID NO: 2092242 - RNA, 19 nt, Artificial Sequence
  Description of Artificial Sequence: Synthetic oligonucleotide
  Sense strand starting at position 1065 of SEQ ID NO: 1882063
gaaagacacucgucauaua

SEQ ID NO: 2092243 - RNA, 19 nt, Artificial Sequence
  Description of Artificial Sequence: Synthetic oligonucleotide
  Antisense strand to SEQ ID NO: 2092242
uauaugacgagugucuuuc

SEQ ID NO: 2092244 - RNA, 19 nt, Artificial Sequence
  Description of Artificial Sequence: Synthetic oligonucleotide
  Sense strand starting at position 1073 of SEQ ID NO: 1882063
cucgucauauaagcauaaa

SEQ ID NO: 2092245 - RNA, 19 nt, Artificial Sequence
  Description of Artificial Sequence: Synthetic oligonucleotide
  Antisense strand to SEQ ID NO: 2092244
uuuaugcuuauaugacgag

SEQ ID NO: 2092246 - RNA, 19 nt, Artificial Sequence
  Description of Artificial Sequence: Synthetic oligonucleotide
  Sense strand starting at position 1076 of SEQ ID NO: 1882063
gucauauaagcauaaagcu

SEQ ID NO: 2092247 - RNA, 19 nt, Artificial Sequence
  Description of Artificial Sequence: Synthetic oligonucleotide
  Antisense strand to SEQ ID NO: 2092246
agcuuuaugcuuauaugac

SEQ ID NO: 2092248 - RNA, 19 nt, Artificial Sequence
  Description of Artificial Sequence: Synthetic oligonucleotide
  Sense strand starting at position 1239 of SEQ ID NO: 1882063
caaggcaaguuugcagaua

SEQ ID NO: 2092249 - RNA, 19 nt, Artificial Sequence
  Description of Artificial Sequence: Synthetic oligonucleotide
  Antisense strand to SEQ ID NO: 2092248
uaucugcaaacuugccuug

SEQ ID NO: 2092250 - RNA, 19 nt, Artificial Sequence
  Description of Artificial Sequence: Synthetic oligonucleotide
  Sense strand starting at position 1294 of SEQ ID NO: 1882063
uaguucuggcauuaagagu

SEQ ID NO: 2092251 - RNA, 19 nt, Artificial Sequence
  Description of Artificial Sequence: Synthetic oligonucleotide
  Antisense strand to SEQ ID NO: 2092250
acucuuaaugccagaacua

SEQ ID NO: 2092252 - RNA, 19 nt, Artificial Sequence
  Description of Artificial Sequence: Synthetic oligonucleotide
  Sense strand starting at position 1301 of SEQ ID NO: 1882063
ggcauuaagaguuggauuc

SEQ ID NO: 2092253 - RNA, 19 nt, Artificial Sequence
  Description of Artificial Sequence: Synthetic oligonucleotide
  Antisense strand to SEQ ID NO: 2092252
gaauccaacucuuaaugcc

SEQ ID NO: 2092254 - RNA, 19 nt, Artificial Sequence
  Description of Artificial Sequence: Synthetic oligonucleotide
  Sense strand starting at position 1476 of SEQ ID NO: 1882063
ucaguaagugguuaauauu

SEQ ID NO: 2092255 - RNA, 19 nt, Artificial Sequence
  Description of Artificial Sequence: Synthetic oligonucleotide
  Antisense strand to SEQ ID NO: 2092254
aauauuaaccacuuacuga

SEQ ID NO: 2092256 - RNA, 19 nt, Artificial Sequence
  Description of Artificial Sequence: Synthetic oligonucleotide
  Sense strand starting at position 1737 of SEQ ID NO: 1882063
ugucaagaugcauauuaaa

SEQ ID NO: 2092257 - RNA, 19 nt, Artificial Sequence
  Description of Artificial Sequence: Synthetic oligonucleotide
  Antisense strand to SEQ ID NO: 2092256
uuuaauaugcaucuugaca

SEQ ID NO: 2092258 - RNA, 19 nt, Artificial Sequence
  Description of Artificial Sequence: Synthetic oligonucleotide
  Sense strand starting at position 1980 of SEQ ID NO: 1882063
uuagguuugcaccaaccua

SEQ ID NO: 2092259 - RNA, 19 nt, Artificial Sequence
  Description of Artificial Sequence: Synthetic oligonucleotide
  Antisense strand to SEQ ID NO: 2092258
uagguuggugcaaaccuaa

SEQ ID NO: 2092260 - RNA, 19 nt, Artificial Sequence
  Description of Artificial Sequence: Synthetic oligonucleotide
  Sense strand starting at position 2185 of SEQ ID NO: 1882063
ucuuuauuucugugcagcu

SEQ ID NO: 2092261 - RNA, 19 nt, Artificial Sequence
  Description of Artificial Sequence: Synthetic oligonucleotide
  Antisense strand to SEQ ID NO: 2092260
agcugcacagaaauaaaga

SEQ ID NO: 2092262 - RNA, 19 nt, Artificial Sequence
  Description of Artificial Sequence: Synthetic oligonucleotide
  Sense strand starting at position 2186 of SEQ ID NO: 1882063
cuuuauuucugugcagcua

SEQ ID NO: 2092263 - RNA, 19 nt, Artificial Sequence
  Description of Artificial Sequence: Synthetic oligonucleotide
  Antisense strand to SEQ ID NO: 2092262
uagcugcacagaaauaaag

SEQ ID NO: 2092264 - RNA, 19 nt, Artificial Sequence
  Description of Artificial Sequence: Synthetic oligonucleotide
  Sense strand starting at position 2187 of SEQ ID NO: 1882063
uuuauuucugugcagcuaa

SEQ ID NO: 2092265 - RNA, 19 nt, Artificial Sequence
  Description of Artificial Sequence: Synthetic oligonucleotide
  Antisense strand to SEQ ID NO: 2092264
uuagcugcacagaaauaaa

SEQ ID NO: 2092266 - RNA, 19 nt, Artificial Sequence
  Description of Artificial Sequence: Synthetic oligonucleotide
  Sense strand starting at position 2271 of SEQ ID NO: 1882063
cgaaauacaugucuggcau

SEQ ID NO: 2092267 - RNA, 19 nt, Artificial Sequence
  Description of Artificial Sequence: Synthetic oligonucleotide
  Antisense strand to SEQ ID NO: 2092266
augccagacauguauuucg

SEQ ID NO: 2092268 - RNA, 19 nt, Artificial Sequence
  Description of Artificial Sequence: Synthetic oligonucleotide
  Sense strand starting at position 2272 of SEQ ID NO: 1882063
gaaauacaugucuggcaua

SEQ ID NO: 2092269 - RNA, 19 nt, Artificial Sequence
  Description of Artificial Sequence: Synthetic oligonucleotide
  Antisense strand to SEQ ID NO: 2092268
uaugccagacauguauuuc

SEQ ID NO: 2092270 - RNA, 19 nt, Artificial Sequence
  Description of Artificial Sequence: Synthetic oligonucleotide
  Sense strand starting at position 2277 of SEQ ID NO: 1882063
acaugucuggcauagucaa

SEQ ID NO: 2092271 - RNA, 19 nt, Artificial Sequence
  Description of Artificial Sequence: Synthetic oligonucleotide
  Antisense strand to SEQ ID NO: 2092270
uugacuaugccagacaugu

SEQ ID NO: 2092272 - RNA, 19 nt, Artificial Sequence
  Description of Artificial Sequence: Synthetic oligonucleotide
  Sense strand starting at position 2603 of SEQ ID NO: 1882063
caaagcuuagagcaaugua

SEQ ID NO: 2092273 - RNA, 19 nt, Artificial Sequence
  Description of Artificial Sequence: Synthetic oligonucleotide
  Antisense strand to SEQ ID NO: 2092272
uacauugcucuaagcuuug

SEQ ID NO: 2092274 - RNA, 19 nt, Artificial Sequence
  Description of Artificial Sequence: Synthetic oligonucleotide
  Sense strand starting at position 2606 of SEQ ID NO: 1882063
agcuuagagcaauguauag

SEQ ID NO: 2092275 - RNA, 19 nt, Artificial Sequence
  Description of Artificial Sequence: Synthetic oligonucleotide
  Antisense strand to SEQ ID NO: 2092274
cuauacauugcucuaagcu

SEQ ID NO: 2092276 - RNA, 19 nt, Artificial Sequence
  Description of Artificial Sequence: Synthetic oligonucleotide
  Sense strand starting at position 2825 of SEQ ID NO: 1882063
cggucaagcccagacaaua

SEQ ID NO: 2092277 - RNA, 19 nt, Artificial Sequence
  Description of Artificial Sequence: Synthetic oligonucleotide
  Antisense strand to SEQ ID NO: 2092276
uauugucugggcuugaccg

SEQ ID NO: 2092278 - RNA, 19 nt, Artificial Sequence
  Description of Artificial Sequence: Synthetic oligonucleotide
  Sense strand starting at position 2922 of SEQ ID NO: 1882063
gaaagugacucuucuuuga

SEQ ID NO: 2092279 - RNA, 19 nt, Artificial Sequence
  Description of Artificial Sequence: Synthetic oligonucleotide
  Antisense strand to SEQ ID NO: 2092278
ucaaagaagagucacuuuc

SEQ ID NO: 2092280 - RNA, 19 nt, Artificial Sequence
  Description of Artificial Sequence: Synthetic oligonucleotide
  Sense strand starting at position 2925 of SEQ ID NO: 1882063
agugacucuucuuugauau

SEQ ID NO: 2092281 - RNA, 19 nt, Artificial Sequence
  Description of Artificial Sequence: Synthetic oligonucleotide
  Antisense strand to SEQ ID NO: 2092280
auaucaaagaagagucacu

SEQ ID NO: 2092282 - RNA, 19 nt, Artificial Sequence
  Description of Artificial Sequence: Synthetic oligonucleotide
  Sense strand starting at position 2926 of SEQ ID NO: 1882063
gugacucuucuuugauaua

SEQ ID NO: 2092283 - RNA, 19 nt, Artificial Sequence
  Description of Artificial Sequence: Synthetic oligonucleotide
  Antisense strand to SEQ ID NO: 2092282
uauaucaaagaagagucac

SEQ ID NO: 2092284 - RNA, 19 nt, Artificial Sequence
  Description of Artificial Sequence: Synthetic oligonucleotide
  Sense strand starting at position 3167 of SEQ ID NO: 1882063
cugaacuuaugguugcaaa

SEQ ID NO: 2092285 - RNA, 19 nt, Artificial Sequence
  Description of Artificial Sequence: Synthetic oligonucleotide
  Antisense strand to SEQ ID NO: 2092284
uuugcaaccauaaguucag

SEQ ID NO: 2092286 - RNA, 19 nt, Artificial Sequence
  Description of Artificial Sequence: Synthetic oligonucleotide
  Sense strand starting at position 3168 of SEQ ID NO: 1882063
ugaacuuaugguugcaaau

SEQ ID NO: 2092287 - RNA, 19 nt, Artificial Sequence
  Description of Artificial Sequence: Synthetic oligonucleotide
  Antisense strand to SEQ ID NO: 2092286
auuugcaaccauaaguuca

SEQ ID NO: 2092288 - RNA, 19 nt, Artificial Sequence
  Description of Artificial Sequence: Synthetic oligonucleotide
  Sense strand starting at position 3177 of SEQ ID NO: 1882063
gguugcaaauccuuggacu

SEQ ID NO: 2092289 - RNA, 19 nt, Artificial Sequence
  Description of Artificial Sequence: Synthetic oligonucleotide
  Antisense strand to SEQ ID NO: 2092288
aguccaaggauuugcaacc

SEQ ID NO: 2092290 - RNA, 19 nt, Artificial Sequence
  Description of Artificial Sequence: Synthetic oligonucleotide
  Sense strand starting at position 3178 of SEQ ID NO: 1882063
guugcaaauccuuggacua

SEQ ID NO: 2092291 - RNA, 19 nt, Artificial Sequence
  Description of Artificial Sequence: Synthetic oligonucleotide
  Antisense strand to SEQ ID NO: 2092290
uaguccaaggauuugcaac

SEQ ID NO: 2092292 - RNA, 19 nt, Artificial Sequence
  Description of Artificial Sequence: Synthetic oligonucleotide
  Sense strand starting at position 3179 of SEQ ID NO: 1882063
uugcaaauccuuggacuaa

SEQ ID NO: 2092293 - RNA, 19 nt, Artificial Sequence
  Description of Artificial Sequence: Synthetic oligonucleotide
  Antisense strand to SEQ ID NO: 2092292
uuaguccaaggauuugcaa

SEQ ID NO: 2092294 - RNA, 19 nt, Artificial Sequence
  Description of Artificial Sequence: Synthetic oligonucleotide
  Sense strand starting at position 3355 of SEQ ID NO: 1882063
ccuagaacugagggucuua

SEQ ID NO: 2092295 - RNA, 19 nt, Artificial Sequence
  Description of Artificial Sequence: Synthetic oligonucleotide
  Antisense strand to SEQ ID NO: 2092294
uaagacccucaguucuagg

SEQ ID NO: 2092296 - RNA, 19 nt, Artificial Sequence
  Description of Artificial Sequence: Synthetic oligonucleotide
  Sense strand starting at position 3391 of SEQ ID NO: 1882063
ggaguuucuucuccuaaac

SEQ ID NO: 2092297 - RNA, 19 nt, Artificial Sequence
  Description of Artificial Sequence: Synthetic oligonucleotide
  Antisense strand to SEQ ID NO: 2092296
guuuaggagaagaaacucc

SEQ ID NO: 2092298 - RNA, 19 nt, Artificial Sequence
  Description of Artificial Sequence: Synthetic oligonucleotide
  Sense strand starting at position 3534 of SEQ ID NO: 1882063
ugguuugauaacugagcca

SEQ ID NO: 2092299 - RNA, 19 nt, Artificial Sequence
  Description of Artificial Sequence: Synthetic oligonucleotide
  Antisense strand to SEQ ID NO: 2092298
uggcucaguuaucaaacca

SEQ ID NO: 2092300 - RNA, 19 nt, Artificial Sequence
  Description of Artificial Sequence: Synthetic oligonucleotide
  Sense strand starting at position 44 of SEQ ID NO: 1882064
cuaaguaggcaauaaguaa

SEQ ID NO: 2092301 - RNA, 19 nt, Artificial Sequence
  Description of Artificial Sequence: Synthetic oligonucleotide
  Antisense strand to SEQ ID NO: 2092300
uuacuuauugccuacuuag

SEQ ID NO: 2092302 - RNA, 19 nt, Artificial Sequence
  Description of Artificial Sequence: Synthetic oligonucleotide
  Sense strand starting at position 178 of SEQ ID NO: 1882064
auugcaauucgguauuaaa

SEQ ID NO: 2092303 - RNA, 19 nt, Artificial Sequence
  Description of Artificial Sequence: Synthetic oligonucleotide
  Antisense strand to SEQ ID NO: 2092302
uuuaauaccgaauugcaau

SEQ ID NO: 2092304 - RNA, 19 nt, Artificial Sequence
  Description of Artificial Sequence: Synthetic oligonucleotide
  Sense strand starting at position 253 of SEQ ID NO: 1882064
ucagcauaauugguuagau

SEQ ID NO: 2092305 - RNA, 19 nt, Artificial Sequence
  Description of Artificial Sequence: Synthetic oligonucleotide
  Antisense strand to SEQ ID NO: 2092304
aucuaaccaauuaugcuga

SEQ ID NO: 2092306 - RNA, 19 nt, Artificial Sequence
  Description of Artificial Sequence: Synthetic oligonucleotide
  Sense strand starting at position 254 of SEQ ID NO: 1882064
cagcauaauugguuagaua

SEQ ID NO: 2092307 - RNA, 19 nt, Artificial Sequence
  Description of Artificial Sequence: Synthetic oligonucleotide
  Antisense strand to SEQ ID NO: 2092306
uaucuaaccaauuaugcug

SEQ ID NO: 2092308 - RNA, 19 nt, Artificial Sequence
  Description of Artificial Sequence: Synthetic oligonucleotide
  Sense strand starting at position 1134 of SEQ ID NO: 1882064
uuuggaaugucucuaccca

SEQ ID NO: 2092309 - RNA, 19 nt, Artificial Sequence
  Description of Artificial Sequence: Synthetic oligonucleotide
  Antisense strand to SEQ ID NO: 2092308
uggguagagacauuccaaa

SEQ ID NO: 2092310 - RNA, 19 nt, Artificial Sequence
  Description of Artificial Sequence: Synthetic oligonucleotide
  Sense strand starting at position 1209 of SEQ ID NO: 1882064
cugugauauguuuauaagu

SEQ ID NO: 2092311 - RNA, 19 nt, Artificial Sequence
  Description of Artificial Sequence: Synthetic oligonucleotide
  Antisense strand to SEQ ID NO: 2092310
acuuauaaacauaucacag

SEQ ID NO: 2092312 - RNA, 19 nt, Artificial Sequence
  Description of Artificial Sequence: Synthetic oligonucleotide
  Sense strand starting at position 1218 of SEQ ID NO: 1882064
guuuauaaguacuugagaa

SEQ ID NO: 2092313 - RNA, 19 nt, Artificial Sequence
  Description of Artificial Sequence: Synthetic oligonucleotide
  Antisense strand to SEQ ID NO: 2092312
uucucaaguacuuauaaac

SEQ ID NO: 2092314 - RNA, 19 nt, Artificial Sequence
  Description of Artificial Sequence: Synthetic oligonucleotide
  Sense strand starting at position 1417 of SEQ ID NO: 1882064
uuggaaccuucugugacua

SEQ ID NO: 2092315 - RNA, 19 nt, Artificial Sequence
  Description of Artificial Sequence: Synthetic oligonucleotide
  Antisense strand to SEQ ID NO: 2092314
uagucacagaagguuccaa

SEQ ID NO: 2092316 - RNA, 19 nt, Artificial Sequence
  Description of Artificial Sequence: Synthetic oligonucleotide
  Sense strand starting at position 1422 of SEQ ID NO: 1882064
accuucugugacuacuuau

SEQ ID NO: 2092317 - RNA, 19 nt, Artificial Sequence
  Description of Artificial Sequence: Synthetic oligonucleotide
  Antisense strand to SEQ ID NO: 2092316
auaaguagucacagaaggu

SEQ ID NO: 2092318 - RNA, 19 nt, Artificial Sequence
  Description of Artificial Sequence: Synthetic oligonucleotide
  Sense strand starting at position 1432 of SEQ ID NO: 1882064
acuacuuauuggcuggaca

SEQ ID NO: 2092319 - RNA, 19 nt, Artificial Sequence
  Description of Artificial Sequence: Synthetic oligonucleotide
  Antisense strand to SEQ ID NO: 2092318
uguccagccaauaaguagu

SEQ ID NO: 2092320 - RNA, 19 nt, Artificial Sequence
  Description of Artificial Sequence: Synthetic oligonucleotide
  Sense strand starting at position 1433 of SEQ ID NO: 1882064
cuacuuauuggcuggacaa

SEQ ID NO: 2092321 - RNA, 19 nt, Artificial Sequence
  Description of Artificial Sequence: Synthetic oligonucleotide
  Antisense strand to SEQ ID NO: 2092320
uuguccagccaauaaguag

SEQ ID NO: 2092322 - RNA, 19 nt, Artificial Sequence
  Description of Artificial Sequence: Synthetic oligonucleotide
  Sense strand starting at position 1435 of SEQ ID NO: 1882064
acuuauuggcuggacaauu

SEQ ID NO: 2092323 - RNA, 19 nt, Artificial Sequence
  Description of Artificial Sequence: Synthetic oligonucleotide
  Antisense strand to SEQ ID NO: 2092322
aauuguccagccaauaagu

SEQ ID NO: 2092324 - RNA, 19 nt, Artificial Sequence
  Description of Artificial Sequence: Synthetic oligonucleotide
  Sense strand starting at position 1453 of SEQ ID NO: 1882064
ugugguaacgucguuuaac

SEQ ID NO: 2092325 - RNA, 19 nt, Artificial Sequence
  Description of Artificial Sequence: Synthetic oligonucleotide
  Antisense strand to SEQ ID NO: 2092324
guuaaacgacguuaccaca

SEQ ID NO: 2092326 - RNA, 19 nt, Artificial Sequence
  Description of Artificial Sequence: Synthetic oligonucleotide
  Sense strand starting at position 1462 of SEQ ID NO: 1882064
gucguuuaaccucaaugga

SEQ ID NO: 2092327 - RNA, 19 nt, Artificial Sequence
  Description of Artificial Sequence: Synthetic oligonucleotide
  Antisense strand to SEQ ID NO: 2092326
uccauugagguuaaacgac

SEQ ID NO: 2092328 - RNA, 19 nt, Artificial Sequence
  Description of Artificial Sequence: Synthetic oligonucleotide
  Sense strand starting at position 1465 of SEQ ID NO: 1882064
guuuaaccucaauggacau

SEQ ID NO: 2092329 - RNA, 19 nt, Artificial Sequence
  Description of Artificial Sequence: Synthetic oligonucleotide
  Antisense strand to SEQ ID NO: 2092328
auguccauugagguuaaac

SEQ ID NO: 2092330 - RNA, 19 nt, Artificial Sequence
  Description of Artificial Sequence: Synthetic oligonucleotide
  Sense strand starting at position 1476 of SEQ ID NO: 1882064
auggacauguuuccuuaau

SEQ ID NO: 2092331 - RNA, 19 nt, Artificial Sequence
  Description of Artificial Sequence: Synthetic oligonucleotide
  Antisense strand to SEQ ID NO: 2092330
auuaaggaaacauguccau

SEQ ID NO: 2092332 - RNA, 19 nt, Artificial Sequence
  Description of Artificial Sequence: Synthetic oligonucleotide
  Sense strand starting at position 1477 of SEQ ID NO: 1882064
uggacauguuuccuuaauu

SEQ ID NO: 2092333 - RNA, 19 nt, Artificial Sequence
  Description of Artificial Sequence: Synthetic oligonucleotide
  Antisense strand to SEQ ID NO: 2092332
aauuaaggaaacaugucca

SEQ ID NO: 2092334 - RNA, 19 nt, Artificial Sequence
  Description of Artificial Sequence: Synthetic oligonucleotide
  Sense strand starting at position 1478 of SEQ ID NO: 1882064
ggacauguuuccuuaauuc

SEQ ID NO: 2092335 - RNA, 19 nt, Artificial Sequence
  Description of Artificial Sequence: Synthetic oligonucleotide
  Antisense strand to SEQ ID NO: 2092334
gaauuaaggaaacaugucc

SEQ ID NO: 2092336 - RNA, 19 nt, Artificial Sequence
  Description of Artificial Sequence: Synthetic oligonucleotide
  Sense strand starting at position 1742 of SEQ ID NO: 1882064
uaauaaucacccgaugagu

SEQ ID NO: 2092337 - RNA, 19 nt, Artificial Sequence
  Description of Artificial Sequence: Synthetic oligonucleotide
  Antisense strand to SEQ ID NO: 2092336
acucaucgggugauuauua

SEQ ID NO: 2092338 - RNA, 19 nt, Artificial Sequence
  Description of Artificial Sequence: Synthetic oligonucleotide
  Sense strand starting at position 1744 of SEQ ID NO: 1882064
auaaucacccgaugaguca

SEQ ID NO: 2092339 - RNA, 19 nt, Artificial Sequence
  Description of Artificial Sequence: Synthetic oligonucleotide
  Antisense strand to SEQ ID NO: 2092338
ugacucaucgggugauuau

SEQ ID NO: 2092340 - RNA, 19 nt, Artificial Sequence
  Description of Artificial Sequence: Synthetic oligonucleotide
  Sense strand starting at position 1814 of SEQ ID NO: 1882064
uuuaacaacguugauacua

SEQ ID NO: 2092341 - RNA, 19 nt, Artificial Sequence
  Description of Artificial Sequence: Synthetic oligonucleotide
  Antisense strand to SEQ ID NO: 2092340
uaguaucaacguuguuaaa

SEQ ID NO: 2092342 - RNA, 19 nt, Artificial Sequence
  Description of Artificial Sequence: Synthetic oligonucleotide
  Sense strand starting at position 2049 of SEQ ID NO: 1882064
ugugacaauuucuagaaga

SEQ ID NO: 2092343 - RNA, 19 nt, Artificial Sequence
  Description of Artificial Sequence: Synthetic oligonucleotide
  Antisense strand to SEQ ID NO: 2092342
ucuucuagaaauugucaca

SEQ ID NO: 2092344 - RNA, 19 nt, Artificial Sequence
  Description of Artificial Sequence: Synthetic oligonucleotide
  Sense strand starting at position 2060 of SEQ ID NO: 1882064
cuagaagaauuugaauauc

SEQ ID NO: 2092345 - RNA, 19 nt, Artificial Sequence
  Description of Artificial Sequence: Synthetic oligonucleotide
  Antisense strand to SEQ ID NO: 2092344
gauauucaaauucuucuag

SEQ ID NO: 2092346 - RNA, 19 nt, Artificial Sequence
  Description of Artificial Sequence: Synthetic oligonucleotide
  Sense strand starting at position 2161 of SEQ ID NO: 1882064
uucuaucuggaaugugaga

SEQ ID NO: 2092347 - RNA, 19 nt, Artificial Sequence
  Description of Artificial Sequence: Synthetic oligonucleotide
  Antisense strand to SEQ ID NO: 2092346
ucucacauuccagauagaa

SEQ ID NO: 2092348 - RNA, 19 nt, Artificial Sequence
  Description of Artificial Sequence: Synthetic oligonucleotide
  Sense strand starting at position 2247 of SEQ ID NO: 1882064
uuugucuuccaguaacuga

SEQ ID NO: 2092349 - RNA, 19 nt, Artificial Sequence
  Description of Artificial Sequence: Synthetic oligonucleotide
  Antisense strand to SEQ ID NO: 2092348
ucaguuacuggaagacaaa

SEQ ID NO: 2092350 - RNA, 19 nt, Artificial Sequence
  Description of Artificial Sequence: Synthetic oligonucleotide
  Sense strand starting at position 2283 of SEQ ID NO: 1882064
acuggaagucuaugucaag

SEQ ID NO: 2092351 - RNA, 19 nt, Artificial Sequence
  Description of Artificial Sequence: Synthetic oligonucleotide
  Antisense strand to SEQ ID NO: 2092350
cuugacauagacuuccagu

SEQ ID NO: 2092352 - RNA, 19 nt, Artificial Sequence
  Description of Artificial Sequence: Synthetic oligonucleotide
  Sense strand starting at position 2700 of SEQ ID NO: 1882064
ccagauaauuggcuuucua

SEQ ID NO: 2092353 - RNA, 19 nt, Artificial Sequence
  Description of Artificial Sequence: Synthetic oligonucleotide
  Antisense strand to SEQ ID NO: 2092352
uagaaagccaauuaucugg

SEQ ID NO: 2092354 - RNA, 19 nt, Artificial Sequence
  Description of Artificial Sequence: Synthetic oligonucleotide
  Sense strand starting at position 2896 of SEQ ID NO: 1882064
ucuuaugaggaguauaugu

SEQ ID NO: 2092355 - RNA, 19 nt, Artificial Sequence
  Description of Artificial Sequence: Synthetic oligonucleotide
  Antisense strand to SEQ ID NO: 2092354
acauauacuccucauaaga

SEQ ID NO: 2092356 - RNA, 19 nt, Artificial Sequence
  Description of Artificial Sequence: Synthetic oligonucleotide
  Sense strand starting at position 2944 of SEQ ID NO: 1882064
cagucauccguggacauau

SEQ ID NO: 2092357 - RNA, 19 nt, Artificial Sequence
  Description of Artificial Sequence: Synthetic oligonucleotide
  Antisense strand to SEQ ID NO: 2092356
auauguccacggaugacug

SEQ ID NO: 2092358 - RNA, 19 nt, Artificial Sequence
  Description of Artificial Sequence: Synthetic oligonucleotide
  Sense strand starting at position 3103 of SEQ ID NO: 1882064
agauuaugagauggcuugu

SEQ ID NO: 2092359 - RNA, 19 nt, Artificial Sequence
  Description of Artificial Sequence: Synthetic oligonucleotide
  Antisense strand to SEQ ID NO: 2092358
acaagccaucucauaaucu

SEQ ID NO: 2092360 - RNA, 19 nt, Artificial Sequence
  Description of Artificial Sequence: Synthetic oligonucleotide
  Sense strand starting at position 3137 of SEQ ID NO: 1882064
cagggaugauaguaaauuu

SEQ ID NO: 2092361 - RNA, 19 nt, Artificial Sequence
  Description of Artificial Sequence: Synthetic oligonucleotide
  Antisense strand to SEQ ID NO: 2092360
aaauuuacuaucaucccug

SEQ ID NO: 2092362 - RNA, 19 nt, Artificial Sequence
  Description of Artificial Sequence: Synthetic oligonucleotide
  Sense strand starting at position 3202 of SEQ ID NO: 1882064
ucacucugccaugaaguaa

SEQ ID NO: 2092363 - RNA, 19 nt, Artificial Sequence
  Description of Artificial Sequence: Synthetic oligonucleotide
  Antisense strand to SEQ ID NO: 2092362
uuacuucauggcagaguga

SEQ ID NO: 2092364 - RNA, 19 nt, Artificial Sequence
  Description of Artificial Sequence: Synthetic oligonucleotide
  Sense strand starting at position 3213 of SEQ ID NO: 1882064
ugaaguaauccuuauagua

SEQ ID NO: 2092365 - RNA, 19 nt, Artificial Sequence
  Description of Artificial Sequence: Synthetic oligonucleotide
  Antisense strand to SEQ ID NO: 2092364
uacuauaaggauuacuuca

SEQ ID NO: 2092366 - RNA, 19 nt, Artificial Sequence
  Description of Artificial Sequence: Synthetic oligonucleotide
  Sense strand starting at position 3416 of SEQ ID NO: 1882064
uguaaagagcucuauaugu

SEQ ID NO: 2092367 - RNA, 19 nt, Artificial Sequence
  Description of Artificial Sequence: Synthetic oligonucleotide
  Antisense strand to SEQ ID NO: 2092366
acauauagagcucuuuaca

SEQ ID NO: 2092368 - RNA, 19 nt, Artificial Sequence
  Description of Artificial Sequence: Synthetic oligonucleotide
  Sense strand starting at position 3550 of SEQ ID NO: 1882064
acagaaauuguaggugaca

SEQ ID NO: 2092369 - RNA, 19 nt, Artificial Sequence
  Description of Artificial Sequence: Synthetic oligonucleotide
  Antisense strand to SEQ ID NO: 2092368
ugucaccuacaauuucugu

SEQ ID NO: 2092370 - RNA, 19 nt, Artificial Sequence
  Description of Artificial Sequence: Synthetic oligonucleotide
  Sense strand starting at position 3667 of SEQ ID NO: 1882064
auagcaaguccuuaggauc

SEQ ID NO: 2092371 - RNA, 19 nt, Artificial Sequence
  Description of Artificial Sequence: Synthetic oligonucleotide
  Antisense strand to SEQ ID NO: 2092370
gauccuaaggacuugcuau

SEQ ID NO: 2092372 - RNA, 19 nt, Artificial Sequence
  Description of Artificial Sequence: Synthetic oligonucleotide
  Sense strand starting at position 3734 of SEQ ID NO: 1882064
ugguguuauggugauuaac

SEQ ID NO: 2092373 - RNA, 19 nt, Artificial Sequence
  Description of Artificial Sequence: Synthetic oligonucleotide
  Antisense strand to SEQ ID NO: 2092372
guuaaucaccauaacacca

SEQ ID NO: 2092374 - RNA, 19 nt, Artificial Sequence
  Description of Artificial Sequence: Synthetic oligonucleotide
  Sense strand starting at position 3748 of SEQ ID NO: 1882064
uuaacaggccaguaucaau

SEQ ID NO: 2092375 - RNA, 19 nt, Artificial Sequence
  Description of Artificial Sequence: Synthetic oligonucleotide
  Antisense strand to SEQ ID NO: 2092374
auugauacuggccuguuaa

SEQ ID NO: 2092376 - RNA, 19 nt, Artificial Sequence
  Description of Artificial Sequence: Synthetic oligonucleotide
  Sense strand starting at position 3870 of SEQ ID NO: 1882064
agugcuugaagucagaaga

SEQ ID NO: 2092377 - RNA, 19 nt, Artificial Sequence
  Description of Artificial Sequence: Synthetic oligonucleotide
  Antisense strand to SEQ ID NO: 2092376
ucuucugacuucaagcacu

SEQ ID NO: 2092378 - RNA, 19 nt, Artificial Sequence
  Description of Artificial Sequence: Synthetic oligonucleotide
  Sense strand starting at position 3934 of SEQ ID NO: 1882064
ugacaaaggcaaugacauu

SEQ ID NO: 2092379 - RNA, 19 nt, Artificial Sequence
  Description of Artificial Sequence: Synthetic oligonucleotide
  Antisense strand to SEQ ID NO: 2092378
aaugucauugccuuuguca

SEQ ID NO: 2092380 - RNA, 19 nt, Artificial Sequence
  Description of Artificial Sequence: Synthetic oligonucleotide
  Sense strand starting at position 133 of SEQ ID NO: 1882065
aguuguguguuauuucuga

SEQ ID NO: 2092381 - RNA, 19 nt, Artificial Sequence
  Description of Artificial Sequence: Synthetic oligonucleotide
  Antisense strand to SEQ ID NO: 2092380
ucagaaauaacacacaacu

SEQ ID NO: 2092382 - RNA, 19 nt, Artificial Sequence
  Description of Artificial Sequence: Synthetic oligonucleotide
  Sense strand starting at position 187 of SEQ ID NO: 1882065
ucauuagauguccaagagu

SEQ ID NO: 2092383 - RNA, 19 nt, Artificial Sequence
  Description of Artificial Sequence: Synthetic oligonucleotide
  Antisense strand to SEQ ID NO: 2092382
acucuuggacaucuaauga

SEQ ID NO: 2092384 - RNA, 19 nt, Artificial Sequence
  Description of Artificial Sequence: Synthetic oligonucleotide
  Sense strand starting at position 411 of SEQ ID NO: 1882065
cuggaauuaucaguuauaa

SEQ ID NO: 2092385 - RNA, 19 nt, Artificial Sequence
  Description of Artificial Sequence: Synthetic oligonucleotide
  Antisense strand to SEQ ID NO: 2092384
uuauaacugauaauuccag

SEQ ID NO: 2092386 - RNA, 19 nt, Artificial Sequence
  Description of Artificial Sequence: Synthetic oligonucleotide
  Sense strand starting at position 437 of SEQ ID NO: 1882065
agcugaagccaugagacuu

SEQ ID NO: 2092387 - RNA, 19 nt, Artificial Sequence
  Description of Artificial Sequence: Synthetic oligonucleotide
  Antisense strand to SEQ ID NO: 2092386
aagucucauggcuucagcu

SEQ ID NO: 2092388 - RNA, 19 nt, Artificial Sequence
  Description of Artificial Sequence: Synthetic oligonucleotide
  Sense strand starting at position 452 of SEQ ID NO: 1882065
acuuuaagauugcucggaa

SEQ ID NO: 2092389 - RNA, 19 nt, Artificial Sequence
  Description of Artificial Sequence: Synthetic oligonucleotide
  Antisense strand to SEQ ID NO: 2092388
uuccgagcaaucuuaaagu

SEQ ID NO: 2092390 - RNA, 19 nt, Artificial Sequence
  Description of Artificial Sequence: Synthetic oligonucleotide
  Sense strand starting at position 453 of SEQ ID NO: 1882065
cuuuaagauugcucggaaa

SEQ ID NO: 2092391 - RNA, 19 nt, Artificial Sequence
  Description of Artificial Sequence: Synthetic oligonucleotide
  Antisense strand to SEQ ID NO: 2092390
uuuccgagcaaucuuaaag

SEQ ID NO: 2092392 - RNA, 19 nt, Artificial Sequence
  Description of Artificial Sequence: Synthetic oligonucleotide
  Sense strand starting at position 475 of SEQ ID NO: 1882065
uggcaugagccauaaucuu

SEQ ID NO: 2092393 - RNA, 19 nt, Artificial Sequence
  Description of Artificial Sequence: Synthetic oligonucleotide
  Antisense strand to SEQ ID NO: 2092392
aagauuauggcucaugcca

SEQ ID NO: 2092394 - RNA, 19 nt, Artificial Sequence
  Description of Artificial Sequence: Synthetic oligonucleotide
  Sense strand starting at position 482 of SEQ ID NO: 1882065
agccauaaucuuggaaaga

SEQ ID NO: 2092395 - RNA, 19 nt, Artificial Sequence
  Description of Artificial Sequence: Synthetic oligonucleotide
  Antisense strand to SEQ ID NO: 2092394
ucuuuccaagauuauggcu

SEQ ID NO: 2092396 - RNA, 19 nt, Artificial Sequence
  Description of Artificial Sequence: Synthetic oligonucleotide
  Sense strand starting at position 837 of SEQ ID NO: 1882065
cucagucucauugaguagu

SEQ ID NO: 2092397 - RNA, 19 nt, Artificial Sequence
  Description of Artificial Sequence: Synthetic oligonucleotide
  Antisense strand to SEQ ID NO: 2092396
acuacucaaugagacugag

SEQ ID NO: 2092398 - RNA, 19 nt, Artificial Sequence
  Description of Artificial Sequence: Synthetic oligonucleotide
  Sense strand starting at position 840 of SEQ ID NO: 1882065
agucucauugaguaguaaa

SEQ ID NO: 2092399 - RNA, 19 nt, Artificial Sequence
  Description of Artificial Sequence: Synthetic oligonucleotide
  Antisense strand to SEQ ID NO: 2092398
uuuacuacucaaugagacu

SEQ ID NO: 2092400 - RNA, 19 nt, Artificial Sequence
  Description of Artificial Sequence: Synthetic oligonucleotide
  Sense strand starting at position 1220 of SEQ ID NO: 1882065
ccaugccuggucuaauaau

SEQ ID NO: 2092401 - RNA, 19 nt, Artificial Sequence
  Description of Artificial Sequence: Synthetic oligonucleotide
  Antisense strand to SEQ ID NO: 2092400
auuauuagaccaggcaugg

SEQ ID NO: 2092402 - RNA, 19 nt, Artificial Sequence
  Description of Artificial Sequence: Synthetic oligonucleotide
  Sense strand starting at position 1229 of SEQ ID NO: 1882065
gucuaauaauucuugacag

SEQ ID NO: 2092403 - RNA, 19 nt, Artificial Sequence
  Description of Artificial Sequence: Synthetic oligonucleotide
  Antisense strand to SEQ ID NO: 2092402
cugucaagaauuauuagac

SEQ ID NO: 2092404 - RNA, 19 nt, Artificial Sequence
  Description of Artificial Sequence: Synthetic oligonucleotide
  Sense strand starting at position 1353 of SEQ ID NO: 1882065
cucuuuggcccugauggaa

SEQ ID NO: 2092405 - RNA, 19 nt, Artificial Sequence
  Description of Artificial Sequence: Synthetic oligonucleotide
  Antisense strand to SEQ ID NO: 2092404
uuccaucagggccaaagag

SEQ ID NO: 2092406 - RNA, 19 nt, Artificial Sequence
  Description of Artificial Sequence: Synthetic oligonucleotide
  Sense strand starting at position 1387 of SEQ ID NO: 1882065
ggaagaaagugagauaaga

SEQ ID NO: 2092407 - RNA, 19 nt, Artificial Sequence
  Description of Artificial Sequence: Synthetic oligonucleotide
  Antisense strand to SEQ ID NO: 2092406
ucuuaucucacuuucuucc

SEQ ID NO: 2092408 - RNA, 19 nt, Artificial Sequence
  Description of Artificial Sequence: Synthetic oligonucleotide
  Sense strand starting at position 1536 of SEQ ID NO: 1882065
uuaagucauugccuagaac

SEQ ID NO: 2092409 - RNA, 19 nt, Artificial Sequence
  Description of Artificial Sequence: Synthetic oligonucleotide
  Antisense strand to SEQ ID NO: 2092408
guucuaggcaaugacuuaa

SEQ ID NO: 2092410 - RNA, 19 nt, Artificial Sequence
  Description of Artificial Sequence: Synthetic oligonucleotide
  Sense strand starting at position 1539 of SEQ ID NO: 1882065
agucauugccuagaacaag

SEQ ID NO: 2092411 - RNA, 19 nt, Artificial Sequence
  Description of Artificial Sequence: Synthetic oligonucleotide
  Antisense strand to SEQ ID NO: 2092410
cuuguucuaggcaaugacu

SEQ ID NO: 2092412 - RNA, 19 nt, Artificial Sequence
  Description of Artificial Sequence: Synthetic oligonucleotide
  Sense strand starting at position 1797 of SEQ ID NO: 1882065
ugagguaucauagggaggu

SEQ ID NO: 2092413 - RNA, 19 nt, Artificial Sequence
  Description of Artificial Sequence: Synthetic oligonucleotide
  Antisense strand to SEQ ID NO: 2092412
accucccuaugauaccuca

SEQ ID NO: 2092414 - RNA, 19 nt, Artificial Sequence
  Description of Artificial Sequence: Synthetic oligonucleotide
  Sense strand starting at position 1801 of SEQ ID NO: 1882065
guaucauagggagguccau

SEQ ID NO: 2092415 - RNA, 19 nt, Artificial Sequence
  Description of Artificial Sequence: Synthetic oligonucleotide
  Antisense strand to SEQ ID NO: 2092414
auggaccucccuaugauac

SEQ ID NO: 2092416 - RNA, 19 nt, Artificial Sequence
  Description of Artificial Sequence: Synthetic oligonucleotide
  Sense strand starting at position 1962 of SEQ ID NO: 1882065
ggguaccauuuagaagauu

SEQ ID NO: 2092417 - RNA, 19 nt, Artificial Sequence
  Description of Artificial Sequence: Synthetic oligonucleotide
  Antisense strand to SEQ ID NO: 2092416
aaucuucuaaaugguaccc

SEQ ID NO: 2092418 - RNA, 19 nt, Artificial Sequence
  Description of Artificial Sequence: Synthetic oligonucleotide
  Sense strand starting at position 2182 of SEQ ID NO: 1882065
aauaaaugugaaugggcaa

SEQ ID NO: 2092419 - RNA, 19 nt, Artificial Sequence
  Description of Artificial Sequence: Synthetic oligonucleotide
  Antisense strand to SEQ ID NO: 2092418
uugcccauucacauuuauu

SEQ ID NO: 2092420 - RNA, 19 nt, Artificial Sequence
  Description of Artificial Sequence: Synthetic oligonucleotide
  Sense strand starting at position 2183 of SEQ ID NO: 1882065
auaaaugugaaugggcaaa

SEQ ID NO: 2092421 - RNA, 19 nt, Artificial Sequence
  Description of Artificial Sequence: Synthetic oligonucleotide
  Antisense strand to SEQ ID NO: 2092420
uuugcccauucacauuuau

SEQ ID NO: 2092422 - RNA, 19 nt, Artificial Sequence
  Description of Artificial Sequence: Synthetic oligonucleotide
  Sense strand starting at position 2278 of SEQ ID NO: 1882065
acugguucuugagcaagaa

SEQ ID NO: 2092423 - RNA, 19 nt, Artificial Sequence
  Description of Artificial Sequence: Synthetic oligonucleotide
  Antisense strand to SEQ ID NO: 2092422
uucuugcucaagaaccagu

SEQ ID NO: 2092424 - RNA, 19 nt, Artificial Sequence
  Description of Artificial Sequence: Synthetic oligonucleotide
  Sense strand starting at position 2279 of SEQ ID NO: 1882065
cugguucuugagcaagaaa

SEQ ID NO: 2092425 - RNA, 19 nt, Artificial Sequence
  Description of Artificial Sequence: Synthetic oligonucleotide
  Antisense strand to SEQ ID NO: 2092424
uuucuugcucaagaaccag

SEQ ID NO: 2092426 - RNA, 19 nt, Artificial Sequence
  Description of Artificial Sequence: Synthetic oligonucleotide
  Sense strand starting at position 2359 of SEQ ID NO: 1882065
gcaggugagagguaucagu

SEQ ID NO: 2092427 - RNA, 19 nt, Artificial Sequence
  Description of Artificial Sequence: Synthetic oligonucleotide
  Antisense strand to SEQ ID NO: 2092426
acugauaccucucaccugc

SEQ ID NO: 2092428 - RNA, 19 nt, Artificial Sequence
  Description of Artificial Sequence: Synthetic oligonucleotide
  Sense strand starting at position 2366 of SEQ ID NO: 1882065
agagguaucagugauagca

SEQ ID NO: 2092429 - RNA, 19 nt, Artificial Sequence
  Description of Artificial Sequence: Synthetic oligonucleotide
  Antisense strand to SEQ ID NO: 2092428
ugcuaucacugauaccucu

SEQ ID NO: 2092430 - RNA, 19 nt, Artificial Sequence
  Description of Artificial Sequence: Synthetic oligonucleotide
  Sense strand starting at position 2481 of SEQ ID NO: 1882065
ccuacauucuggucacuua

SEQ ID NO: 2092431 - RNA, 19 nt, Artificial Sequence
  Description of Artificial Sequence: Synthetic oligonucleotide
  Antisense strand to SEQ ID NO: 2092430
uaagugaccagaauguagg

SEQ ID NO: 2092432 - RNA, 19 nt, Artificial Sequence
  Description of Artificial Sequence: Synthetic oligonucleotide
  Sense strand starting at position 2767 of SEQ ID NO: 1882065
gagcuauuagggcaaguua

SEQ ID NO: 2092433 - RNA, 19 nt, Artificial Sequence
  Description of Artificial Sequence: Synthetic oligonucleotide
  Antisense strand to SEQ ID NO: 2092432
uaacuugcccuaauagcuc

SEQ ID NO: 2092434 - RNA, 19 nt, Artificial Sequence
  Description of Artificial Sequence: Synthetic oligonucleotide
  Sense strand starting at position 3003 of SEQ ID NO: 1882065
aggucacaaucaguaguaa

SEQ ID NO: 2092435 - RNA, 19 nt, Artificial Sequence
  Description of Artificial Sequence: Synthetic oligonucleotide
  Antisense strand to SEQ ID NO: 2092434
uuacuacugauugugaccu

SEQ ID NO: 2092436 - RNA, 19 nt, Artificial Sequence
  Description of Artificial Sequence: Synthetic oligonucleotide
  Sense strand starting at position 3004 of SEQ ID NO: 1882065
ggucacaaucaguaguaaa

SEQ ID NO: 2092437 - RNA, 19 nt, Artificial Sequence
  Description of Artificial Sequence: Synthetic oligonucleotide
  Antisense strand to SEQ ID NO: 2092436
uuuacuacugauugugacc

SEQ ID NO: 2092438 - RNA, 19 nt, Artificial Sequence
  Description of Artificial Sequence: Synthetic oligonucleotide
  Sense strand starting at position 3120 of SEQ ID NO: 1882065
gccacuuaucgggaaacua

SEQ ID NO: 2092439 - RNA, 19 nt, Artificial Sequence
  Description of Artificial Sequence: Synthetic oligonucleotide
  Antisense strand to SEQ ID NO: 2092438
uaguuucccgauaaguggc

SEQ ID NO: 2092440 - RNA, 19 nt, Artificial Sequence
  Description of Artificial Sequence: Synthetic oligonucleotide
  Sense strand starting at position 3213 of SEQ ID NO: 1882065
uaggguuagaagugauaua

SEQ ID NO: 2092441 - RNA, 19 nt, Artificial Sequence
  Description of Artificial Sequence: Synthetic oligonucleotide
  Antisense strand to SEQ ID NO: 2092440
uauaucacuucuaacccua

SEQ ID NO: 2092442 - RNA, 19 nt, Artificial Sequence
  Description of Artificial Sequence: Synthetic oligonucleotide
  Sense strand starting at position 3286 of SEQ ID NO: 1882065
aucacaguacuuggcauaa

SEQ ID NO: 2092443 - RNA, 19 nt, Artificial Sequence
  Description of Artificial Sequence: Synthetic oligonucleotide
  Antisense strand to SEQ ID NO: 2092442
uuaugccaaguacugugau

SEQ ID NO: 2092444 - RNA, 19 nt, Artificial Sequence
  Description of Artificial Sequence: Synthetic oligonucleotide
  Sense strand starting at position 3337 of SEQ ID NO: 1882065
agacucaaauggcuacaua

SEQ ID NO: 2092445 - RNA, 19 nt, Artificial Sequence
  Description of Artificial Sequence: Synthetic oligonucleotide
  Antisense strand to SEQ ID NO: 2092444
uauguagccauuugagucu

SEQ ID NO: 2092446 - RNA, 19 nt, Artificial Sequence
  Description of Artificial Sequence: Synthetic oligonucleotide
  Sense strand starting at position 3529 of SEQ ID NO: 1882065
gauuguaucugguuacagg

SEQ ID NO: 2092447 - RNA, 19 nt, Artificial Sequence
  Description of Artificial Sequence: Synthetic oligonucleotide
  Antisense strand to SEQ ID NO: 2092446
ccuguaaccagauacaauc

SEQ ID NO: 2092448 - RNA, 19 nt, Artificial Sequence
  Description of Artificial Sequence: Synthetic oligonucleotide
  Sense strand starting at position 3530 of SEQ ID NO: 1882065
auuguaucugguuacagga

SEQ ID NO: 2092449 - RNA, 19 nt, Artificial Sequence
  Description of Artificial Sequence: Synthetic oligonucleotide
  Antisense strand to SEQ ID NO: 2092448
uccuguaaccagauacaau

SEQ ID NO: 2092450 - RNA, 19 nt, Artificial Sequence
  Description of Artificial Sequence: Synthetic oligonucleotide
  Sense strand starting at position 3801 of SEQ ID NO: 1882065
gacagaguuggguagucaa

SEQ ID NO: 2092451 - RNA, 19 nt, Artificial Sequence
  Description of Artificial Sequence: Synthetic oligonucleotide
  Antisense strand to SEQ ID NO: 2092450
uugacuacccaacucuguc

SEQ ID NO: 2092452 - RNA, 19 nt, Artificial Sequence
  Description of Artificial Sequence: Synthetic oligonucleotide
  Sense strand starting at position 3809 of SEQ ID NO: 1882065
uggguagucaaguauaucu

SEQ ID NO: 2092453 - RNA, 19 nt, Artificial Sequence
  Description of Artificial Sequence: Synthetic oligonucleotide
  Antisense strand to SEQ ID NO: 2092452
agauauacuugacuaccca

SEQ ID NO: 2092454 - RNA, 19 nt, Artificial Sequence
  Description of Artificial Sequence: Synthetic oligonucleotide
  Sense strand starting at position 3909 of SEQ ID NO: 1882065
cucaucugguaaguaagaa

SEQ ID NO: 2092455 - RNA, 19 nt, Artificial Sequence
  Description of Artificial Sequence: Synthetic oligonucleotide
  Antisense strand to SEQ ID NO: 2092454
uucuuacuuaccagaugag

SEQ ID NO: 2092456 - RNA, 19 nt, Artificial Sequence
  Description of Artificial Sequence: Synthetic oligonucleotide
  Sense strand starting at position 3924 of SEQ ID NO: 1882065
agaauaauacuguguacau

SEQ ID NO: 2092457 - RNA, 19 nt, Artificial Sequence
  Description of Artificial Sequence: Synthetic oligonucleotide
  Antisense strand to SEQ ID NO: 2092456
auguacacaguauuauucu

SEQ ID NO: 2092458 - RNA, 19 nt, Artificial Sequence
  Description of Artificial Sequence: Synthetic oligonucleotide
  Sense strand starting at position 3948 of SEQ ID NO: 1882065
ccagaacugcugcaaacua

SEQ ID NO: 2092459 - RNA, 19 nt, Artificial Sequence
  Description of Artificial Sequence: Synthetic oligonucleotide
  Antisense strand to SEQ ID NO: 2092458
uaguuugcagcaguucugg

SEQ ID NO: 2092460 - RNA, 19 nt, Artificial Sequence
  Description of Artificial Sequence: Synthetic oligonucleotide
  Sense strand starting at position 179 of SEQ ID NO: 1882066
uuguaauauccggaagggu

SEQ ID NO: 2092461 - RNA, 19 nt, Artificial Sequence
  Description of Artificial Sequence: Synthetic oligonucleotide
  Antisense strand to SEQ ID NO: 2092460
acccuuccggauauuacaa

SEQ ID NO: 2092462 - RNA, 19 nt, Artificial Sequence
  Description of Artificial Sequence: Synthetic oligonucleotide
  Sense strand starting at position 341 of SEQ ID NO: 1882066
guacgucugcuugugauau

SEQ ID NO: 2092463 - RNA, 19 nt, Artificial Sequence
  Description of Artificial Sequence: Synthetic oligonucleotide
  Antisense strand to SEQ ID NO: 2092462
auaucacaagcagacguac

SEQ ID NO: 2092464 - RNA, 19 nt, Artificial Sequence
  Description of Artificial Sequence: Synthetic oligonucleotide
  Sense strand starting at position 579 of SEQ ID NO: 1882066
ucaauaucacagugggaau

SEQ ID NO: 2092465 - RNA, 19 nt, Artificial Sequence
  Description of Artificial Sequence: Synthetic oligonucleotide
  Antisense strand to SEQ ID NO: 2092464
auucccacugugauauuga

SEQ ID NO: 2092466 - RNA, 19 nt, Artificial Sequence
  Description of Artificial Sequence: Synthetic oligonucleotide
  Sense strand starting at position 677 of SEQ ID NO: 1882066
cgcagugauauuguacgua

SEQ ID NO: 2092467 - RNA, 19 nt, Artificial Sequence
  Description of Artificial Sequence: Synthetic oligonucleotide
  Antisense strand to SEQ ID NO: 2092466
uacguacaauaucacugcg

SEQ ID NO: 2092468 - RNA, 19 nt, Artificial Sequence
  Description of Artificial Sequence: Synthetic oligonucleotide
  Sense strand starting at position 682 of SEQ ID NO: 1882066
ugauauuguacguaauaug

SEQ ID NO: 2092469 - RNA, 19 nt, Artificial Sequence
  Description of Artificial Sequence: Synthetic oligonucleotide
  Antisense strand to SEQ ID NO: 2092468
cauauuacguacaauauca

SEQ ID NO: 2092470 - RNA, 19 nt, Artificial Sequence
  Description of Artificial Sequence: Synthetic oligonucleotide
  Sense strand starting at position 691 of SEQ ID NO: 1882066
acguaauaugcagggagaa

SEQ ID NO: 2092471 - RNA, 19 nt, Artificial Sequence
  Description of Artificial Sequence: Synthetic oligonucleotide
  Antisense strand to SEQ ID NO: 2092470
uucucccugcauauuacgu

SEQ ID NO: 2092472 - RNA, 19 nt, Artificial Sequence
  Description of Artificial Sequence: Synthetic oligonucleotide
  Sense strand starting at position 692 of SEQ ID NO: 1882066
cguaauaugcagggagaaa

SEQ ID NO: 2092473 - RNA, 19 nt, Artificial Sequence
  Description of Artificial Sequence: Synthetic oligonucleotide
  Antisense strand to SEQ ID NO: 2092472
uuucucccugcauauuacg

SEQ ID NO: 2092474 - RNA, 19 nt, Artificial Sequence
  Description of Artificial Sequence: Synthetic oligonucleotide
  Sense strand starting at position 1061 of SEQ ID NO: 1882066
cggagauauuacuccuaau

SEQ ID NO: 2092475 - RNA, 19 nt, Artificial Sequence
  Description of Artificial Sequence: Synthetic oligonucleotide
  Antisense strand to SEQ ID NO: 2092474
auuaggaguaauaucuccg

SEQ ID NO: 2092476 - RNA, 19 nt, Artificial Sequence
  Description of Artificial Sequence: Synthetic oligonucleotide
  Sense strand starting at position 1086 of SEQ ID NO: 1882066
guggguuuacaucauauga

SEQ ID NO: 2092477 - RNA, 19 nt, Artificial Sequence
  Description of Artificial Sequence: Synthetic oligonucleotide
  Antisense strand to SEQ ID NO: 2092476
ucauaugauguaaacccac

SEQ ID NO: 2092478 - RNA, 19 nt, Artificial Sequence
  Description of Artificial Sequence: Synthetic oligonucleotide
  Sense strand starting at position 1101 of SEQ ID NO: 1882066
augacuacacccuguuaua

SEQ ID NO: 2092479 - RNA, 19 nt, Artificial Sequence
  Description of Artificial Sequence: Synthetic oligonucleotide
  Antisense strand to SEQ ID NO: 2092478
uauaacaggguguagucau

SEQ ID NO: 2092480 - RNA, 19 nt, Artificial Sequence
  Description of Artificial Sequence: Synthetic oligonucleotide
  Sense strand starting at position 1253 of SEQ ID NO: 1882066
guguguagacccuaugaua

SEQ ID NO: 2092481 - RNA, 19 nt, Artificial Sequence
  Description of Artificial Sequence: Synthetic oligonucleotide
  Antisense strand to SEQ ID NO: 2092480
uaucauagggucuacacac

SEQ ID NO: 2092482 - RNA, 19 nt, Artificial Sequence
  Description of Artificial Sequence: Synthetic oligonucleotide
  Sense strand starting at position 1353 of SEQ ID NO: 1882066
uauaauauccuagggaggu

SEQ ID NO: 2092483 - RNA, 19 nt, Artificial Sequence
  Description of Artificial Sequence: Synthetic oligonucleotide
  Antisense strand to SEQ ID NO: 2092482
accucccuaggauauuaua

SEQ ID NO: 2092484 - RNA, 19 nt, Artificial Sequence
  Description of Artificial Sequence: Synthetic oligonucleotide
  Sense strand starting at position 1392 of SEQ ID NO: 1882066
ggguguacaccauauaugu

SEQ ID NO: 2092485 - RNA, 19 nt, Artificial Sequence
  Description of Artificial Sequence: Synthetic oligonucleotide
  Antisense strand to SEQ ID NO: 2092484
acauauaugguguacaccc

SEQ ID NO: 2092486 - RNA, 19 nt, Artificial Sequence
  Description of Artificial Sequence: Synthetic oligonucleotide
  Sense strand starting at position 1429 of SEQ ID NO: 1882066
ucuaguauccuuggaagau

SEQ ID NO: 2092487 - RNA, 19 nt, Artificial Sequence
  Description of Artificial Sequence: Synthetic oligonucleotide
  Antisense strand to SEQ ID NO: 2092486
aucuuccaaggauacuaga

SEQ ID NO: 2092488 - RNA, 19 nt, Artificial Sequence
  Description of Artificial Sequence: Synthetic oligonucleotide
  Sense strand starting at position 1591 of SEQ ID NO: 1882066
gagagauacuacuccuagu

SEQ ID NO: 2092489 - RNA, 19 nt, Artificial Sequence
  Description of Artificial Sequence: Synthetic oligonucleotide
  Antisense strand to SEQ ID NO: 2092488
acuaggaguaguaucucuc

SEQ ID NO: 2092490 - RNA, 19 nt, Artificial Sequence
  Description of Artificial Sequence: Synthetic oligonucleotide
  Sense strand starting at position 1605 of SEQ ID NO: 1882066
cuaguaucacagugagaau

SEQ ID NO: 2092491 - RNA, 19 nt, Artificial Sequence
  Description of Artificial Sequence: Synthetic oligonucleotide
  Antisense strand to SEQ ID NO: 2092490
auucucacugugauacuag

SEQ ID NO: 2092492 - RNA, 19 nt, Artificial Sequence
  Description of Artificial Sequence: Synthetic oligonucleotide
  Sense strand starting at position 1667 of SEQ ID NO: 1882066
gggagauauuaauccuagu

SEQ ID NO: 2092493 - RNA, 19 nt, Artificial Sequence
  Description of Artificial Sequence: Synthetic oligonucleotide
  Antisense strand to SEQ ID NO: 2092492
acuaggauuaauaucuccc

SEQ ID NO: 2092494 - RNA, 19 nt, Artificial Sequence
  Description of Artificial Sequence: Synthetic oligonucleotide
  Sense strand starting at position 1743 of SEQ ID NO: 1882066
gggaaauauuacuccuagu

SEQ ID NO: 2092495 - RNA, 19 nt, Artificial Sequence
  Description of Artificial Sequence: Synthetic oligonucleotide
  Antisense strand to SEQ ID NO: 2092494
acuaggaguaauauuuccc

SEQ ID NO: 2092496 - RNA, 19 nt, Artificial Sequence
  Description of Artificial Sequence: Synthetic oligonucleotide
  Sense strand starting at position 1982 of SEQ ID NO: 1882066
ggguauauacaauguuaua

SEQ ID NO: 2092497 - RNA, 19 nt, Artificial Sequence
  Description of Artificial Sequence: Synthetic oligonucleotide
  Antisense strand to SEQ ID NO: 2092496
uauaacauuguauauaccc

SEQ ID NO: 2092498 - RNA, 19 nt, Artificial Sequence
  Description of Artificial Sequence: Synthetic oligonucleotide
  Sense strand starting at position 2006 of SEQ ID NO: 1882066
aguaauauccuauggaggu

SEQ ID NO: 2092499 - RNA, 19 nt, Artificial Sequence
  Description of Artificial Sequence: Synthetic oligonucleotide
  Antisense strand to SEQ ID NO: 2092498
accuccauaggauauuacu

SEQ ID NO: 2092500 - RNA, 19 nt, Artificial Sequence
  Description of Artificial Sequence: Synthetic oligonucleotide
  Sense strand starting at position 2010 of SEQ ID NO: 1882066
auauccuauggagguauua

SEQ ID NO: 2092501 - RNA, 19 nt, Artificial Sequence
  Description of Artificial Sequence: Synthetic oligonucleotide
  Antisense strand to SEQ ID NO: 2092500
uaauaccuccauaggauau

SEQ ID NO: 2092502 - RNA, 19 nt, Artificial Sequence
  Description of Artificial Sequence: Synthetic oligonucleotide
  Sense strand starting at position 2097 of SEQ ID NO: 1882066
agauauuacguguaauauc

SEQ ID NO: 2092503 - RNA, 19 nt, Artificial Sequence
  Description of Artificial Sequence: Synthetic oligonucleotide
  Antisense strand to SEQ ID NO: 2092502
gauauuacacguaauaucu

SEQ ID NO: 2092504 - RNA, 19 nt, Artificial Sequence
  Description of Artificial Sequence: Synthetic oligonucleotide
  Sense strand starting at position 2146 of SEQ ID NO: 1882066
auaauauacuuggcagaug

SEQ ID NO: 2092505 - RNA, 19 nt, Artificial Sequence
  Description of Artificial Sequence: Synthetic oligonucleotide
  Antisense strand to SEQ ID NO: 2092504
caucugccaaguauauuau

SEQ ID NO: 2092506 - RNA, 19 nt, Artificial Sequence
  Description of Artificial Sequence: Synthetic oligonucleotide
  Sense strand starting at position 2149 of SEQ ID NO: 1882066
auauacuuggcagauguua

SEQ ID NO: 2092507 - RNA, 19 nt, Artificial Sequence
  Description of Artificial Sequence: Synthetic oligonucleotide
  Antisense strand to SEQ ID NO: 2092506
uaacaucugccaaguauau

SEQ ID NO: 2092508 - RNA, 19 nt, Artificial Sequence
  Description of Artificial Sequence: Synthetic oligonucleotide
  Sense strand starting at position 2171 of SEQ ID NO: 1882066
auaauauucuuggcagaua

SEQ ID NO: 2092509 - RNA, 19 nt, Artificial Sequence
  Description of Artificial Sequence: Synthetic oligonucleotide
  Antisense strand to SEQ ID NO: 2092508
uaucugccaagaauauuau

SEQ ID NO: 2092510 - RNA, 19 nt, Artificial Sequence
  Description of Artificial Sequence: Synthetic oligonucleotide
  Sense strand starting at position 2174 of SEQ ID NO: 1882066
auauucuuggcagauauua

SEQ ID NO: 2092511 - RNA, 19 nt, Artificial Sequence
  Description of Artificial Sequence: Synthetic oligonucleotide
  Antisense strand to SEQ ID NO: 2092510
uaauaucugccaagaauau

SEQ ID NO: 2092512 - RNA, 19 nt, Artificial Sequence
  Description of Artificial Sequence: Synthetic oligonucleotide
  Sense strand starting at position 2182 of SEQ ID NO: 1882066
ggcagauauuauuccuaau

SEQ ID NO: 2092513 - RNA, 19 nt, Artificial Sequence
  Description of Artificial Sequence: Synthetic oligonucleotide
  Antisense strand to SEQ ID NO: 2092512
auuaggaauaauaucugcc

SEQ ID NO: 2092514 - RNA, 19 nt, Artificial Sequence
  Description of Artificial Sequence: Synthetic oligonucleotide
  Sense strand starting at position 2613 of SEQ ID NO: 1882066
uguaauaucucccuaggau

SEQ ID NO: 2092515 - RNA, 19 nt, Artificial Sequence
  Description of Artificial Sequence: Synthetic oligonucleotide
  Antisense strand to SEQ ID NO: 2092514
auccuagggagauauuaca

SEQ ID NO: 2092516 - RNA, 19 nt, Artificial Sequence
  Description of Artificial Sequence: Synthetic oligonucleotide
  Sense strand starting at position 2991 of SEQ ID NO: 1882066
gucacaugaucuccacaca

SEQ ID NO: 2092517 - RNA, 19 nt, Artificial Sequence
  Description of Artificial Sequence: Synthetic oligonucleotide
  Antisense strand to SEQ ID NO: 2092516
uguguggagaucaugugac

SEQ ID NO: 2092518 - RNA, 19 nt, Artificial Sequence
  Description of Artificial Sequence: Synthetic oligonucleotide
  Sense strand starting at position 3037 of SEQ ID NO: 1882066
guacuaucucccuaugaua

SEQ ID NO: 2092519 - RNA, 19 nt, Artificial Sequence
  Description of Artificial Sequence: Synthetic oligonucleotide
  Antisense strand to SEQ ID NO: 2092518
uaucauagggagauaguac

SEQ ID NO: 2092520 - RNA, 19 nt, Artificial Sequence
  Description of Artificial Sequence: Synthetic oligonucleotide
  Sense strand starting at position 3178 of SEQ ID NO: 1882066
ugacauuaaguguaauauc

SEQ ID NO: 2092521 - RNA, 19 nt, Artificial Sequence
  Description of Artificial Sequence: Synthetic oligonucleotide
  Antisense strand to SEQ ID NO: 2092520
gauauuacacuuaauguca

SEQ ID NO: 2092522 - RNA, 19 nt, Artificial Sequence
  Description of Artificial Sequence: Synthetic oligonucleotide
  Sense strand starting at position 3262 of SEQ ID NO: 1882066
agaguaauaucuuccuaga

SEQ ID NO: 2092523 - RNA, 19 nt, Artificial Sequence
  Description of Artificial Sequence: Synthetic oligonucleotide
  Antisense strand to SEQ ID NO: 2092522
ucuaggaagauauuacucu

SEQ ID NO: 2092524 - RNA, 19 nt, Artificial Sequence
  Description of Artificial Sequence: Synthetic oligonucleotide
  Sense strand starting at position 3302 of SEQ ID NO: 1882066
gguuuccacccauaaugua

SEQ ID NO: 2092525 - RNA, 19 nt, Artificial Sequence
  Description of Artificial Sequence: Synthetic oligonucleotide
  Antisense strand to SEQ ID NO: 2092524
uacauuauggguggaaacc

SEQ ID NO: 2092526 - RNA, 19 nt, Artificial Sequence
  Description of Artificial Sequence: Synthetic oligonucleotide
  Sense strand starting at position 3746 of SEQ ID NO: 1882066
gguguacacccugacauau

SEQ ID NO: 2092527 - RNA, 19 nt, Artificial Sequence
  Description of Artificial Sequence: Synthetic oligonucleotide
  Antisense strand to SEQ ID NO: 2092526
auaugucaggguguacacc

SEQ ID NO: 2092528 - RNA, 19 nt, Artificial Sequence
  Description of Artificial Sequence: Synthetic oligonucleotide
  Sense strand starting at position 3808 of SEQ ID NO: 1882066
gacuguacacccugggaua

SEQ ID NO: 2092529 - RNA, 19 nt, Artificial Sequence
  Description of Artificial Sequence: Synthetic oligonucleotide
  Antisense strand to SEQ ID NO: 2092528
uaucccaggguguacaguc

SEQ ID NO: 2092530 - RNA, 19 nt, Artificial Sequence
  Description of Artificial Sequence: Synthetic oligonucleotide
  Sense strand starting at position 3832 of SEQ ID NO: 1882066
uguaauaucccagggagau

SEQ ID NO: 2092531 - RNA, 19 nt, Artificial Sequence
  Description of Artificial Sequence: Synthetic oligonucleotide
  Antisense strand to SEQ ID NO: 2092530
aucucccugggauauuaca

SEQ ID NO: 2092532 - RNA, 19 nt, Artificial Sequence
  Description of Artificial Sequence: Synthetic oligonucleotide
  Sense strand starting at position 3833 of SEQ ID NO: 1882066
guaauaucccagggagauu

SEQ ID NO: 2092533 - RNA, 19 nt, Artificial Sequence
  Description of Artificial Sequence: Synthetic oligonucleotide
  Antisense strand to SEQ ID NO: 2092532
aaucucccugggauauuac

SEQ ID NO: 2092534 - RNA, 19 nt, Artificial Sequence
  Description of Artificial Sequence: Synthetic oligonucleotide
  Sense strand starting at position 3871 of SEQ ID NO: 1882066
aaguguacacccugggaua

SEQ ID NO: 2092535 - RNA, 19 nt, Artificial Sequence
  Description of Artificial Sequence: Synthetic oligonucleotide
  Antisense strand to SEQ ID NO: 2092534
uaucccaggguguacacuu

SEQ ID NO: 2092536 - RNA, 19 nt, Artificial Sequence
  Description of Artificial Sequence: Synthetic oligonucleotide
  Sense strand starting at position 3896 of SEQ ID NO: 1882066
guaauauccuagguagaua

SEQ ID NO: 2092537 - RNA, 19 nt, Artificial Sequence
  Description of Artificial Sequence: Synthetic oligonucleotide
  Antisense strand to SEQ ID NO: 2092536
uaucuaccuaggauauuac

SEQ ID NO: 2092538 - RNA, 19 nt, Artificial Sequence
  Description of Artificial Sequence: Synthetic oligonucleotide
  Sense strand starting at position 3958 of SEQ ID NO: 1882066
cauaguauccuaggaagau

SEQ ID NO: 2092539 - RNA, 19 nt, Artificial Sequence
  Description of Artificial Sequence: Synthetic oligonucleotide
  Antisense strand to SEQ ID NO: 2092538
aucuuccuaggauacuaug

SEQ ID NO: 2092540 - RNA, 19 nt, Artificial Sequence
  Description of Artificial Sequence: Synthetic oligonucleotide
  Sense strand starting at position 27 of SEQ ID NO: 1882067
uguguauauagucaaagga

SEQ ID NO: 2092541 - RNA, 19 nt, Artificial Sequence
  Description of Artificial Sequence: Synthetic oligonucleotide
  Antisense strand to SEQ ID NO: 2092540
uccuuugacuauauacaca

SEQ ID NO: 2092542 - RNA, 19 nt, Artificial Sequence
  Description of Artificial Sequence: Synthetic oligonucleotide
  Sense strand starting at position 36 of SEQ ID NO: 1882067
agucaaaggaugugaaauc

SEQ ID NO: 2092543 - RNA, 19 nt, Artificial Sequence
  Description of Artificial Sequence: Synthetic oligonucleotide
  Antisense strand to SEQ ID NO: 2092542
gauuucacauccuuugacu

SEQ ID NO: 2092544 - RNA, 19 nt, Artificial Sequence
  Description of Artificial Sequence: Synthetic oligonucleotide
  Sense strand starting at position 78 of SEQ ID NO: 1882067
cuccaauguuaagugaagu

SEQ ID NO: 2092545 - RNA, 19 nt, Artificial Sequence
  Description of Artificial Sequence: Synthetic oligonucleotide
  Antisense strand to SEQ ID NO: 2092544
acuucacuuaacauuggag

SEQ ID NO: 2092546 - RNA, 19 nt, Artificial Sequence
  Description of Artificial Sequence: Synthetic oligonucleotide
  Sense strand starting at position 172 of SEQ ID NO: 1882067
uaggcagaccuuggagaua

SEQ ID NO: 2092547 - RNA, 19 nt, Artificial Sequence
  Description of Artificial Sequence: Synthetic oligonucleotide
  Antisense strand to SEQ ID NO: 2092546
uaucuccaaggucugccua

SEQ ID NO: 2092548 - RNA, 19 nt, Artificial Sequence
  Description of Artificial Sequence: Synthetic oligonucleotide
  Sense strand starting at position 184 of SEQ ID NO: 1882067
ggagauaccauggguucga

SEQ ID NO: 2092549 - RNA, 19 nt, Artificial Sequence
  Description of Artificial Sequence: Synthetic oligonucleotide
  Antisense strand to SEQ ID NO: 2092548
ucgaacccaugguaucucc

SEQ ID NO: 2092550 - RNA, 19 nt, Artificial Sequence
  Description of Artificial Sequence: Synthetic oligonucleotide
  Sense strand starting at position 185 of SEQ ID NO: 1882067
gagauaccauggguucgau

SEQ ID NO: 2092551 - RNA, 19 nt, Artificial Sequence
  Description of Artificial Sequence: Synthetic oligonucleotide
  Antisense strand to SEQ ID NO: 2092550
aucgaacccaugguaucuc

SEQ ID NO: 2092552 - RNA, 19 nt, Artificial Sequence
  Description of Artificial Sequence: Synthetic oligonucleotide
  Sense strand starting at position 290 of SEQ ID NO: 1882067
aucauacuguggucuauua

SEQ ID NO: 2092553 - RNA, 19 nt, Artificial Sequence
  Description of Artificial Sequence: Synthetic oligonucleotide
  Antisense strand to SEQ ID NO: 2092552
uaauagaccacaguaugau

SEQ ID NO: 2092554 - RNA, 19 nt, Artificial Sequence
  Description of Artificial Sequence: Synthetic oligonucleotide
  Sense strand starting at position 385 of SEQ ID NO: 1882067
ucaccugagccuuaagcaa

SEQ ID NO: 2092555 - RNA, 19 nt, Artificial Sequence
  Description of Artificial Sequence: Synthetic oligonucleotide
  Antisense strand to SEQ ID NO: 2092554
uugcuuaaggcucagguga

SEQ ID NO: 2092556 - RNA, 19 nt, Artificial Sequence
  Description of Artificial Sequence: Synthetic oligonucleotide
  Sense strand starting at position 425 of SEQ ID NO: 1882067
gaaucuugccuugauguua

SEQ ID NO: 2092557 - RNA, 19 nt, Artificial Sequence
  Description of Artificial Sequence: Synthetic oligonucleotide
  Antisense strand to SEQ ID NO: 2092556
uaacaucaaggcaagauuc

SEQ ID NO: 2092558 - RNA, 19 nt, Artificial Sequence
  Description of Artificial Sequence: Synthetic oligonucleotide
  Sense strand starting at position 481 of SEQ ID NO: 1882067
cugggauggcuauagcaau

SEQ ID NO: 2092559 - RNA, 19 nt, Artificial Sequence
  Description of Artificial Sequence: Synthetic oligonucleotide
  Antisense strand to SEQ ID NO: 2092558
auugcuauagccaucccag

SEQ ID NO: 2092560 - RNA, 19 nt, Artificial Sequence
  Description of Artificial Sequence: Synthetic oligonucleotide
  Sense strand starting at position 750 of SEQ ID NO: 1882067
uugcucauccuuuaagaag

SEQ ID NO: 2092561 - RNA, 19 nt, Artificial Sequence
  Description of Artificial Sequence: Synthetic oligonucleotide
  Antisense strand to SEQ ID NO: 2092560
cuucuuaaaggaugagcaa

SEQ ID NO: 2092562 - RNA, 19 nt, Artificial Sequence
  Description of Artificial Sequence: Synthetic oligonucleotide
  Sense strand starting at position 1502 of SEQ ID NO: 1882067
cuuguacaccugcaucaga

SEQ ID NO: 2092563 - RNA, 19 nt, Artificial Sequence
  Description of Artificial Sequence: Synthetic oligonucleotide
  Antisense strand to SEQ ID NO: 2092562
ucugaugcagguguacaag

SEQ ID NO: 2092564 - RNA, 19 nt, Artificial Sequence
  Description of Artificial Sequence: Synthetic oligonucleotide
  Sense strand starting at position 1530 of SEQ ID NO: 1882067
ugaacaggucacugucaau

SEQ ID NO: 2092565 - RNA, 19 nt, Artificial Sequence
  Description of Artificial Sequence: Synthetic oligonucleotide
  Antisense strand to SEQ ID NO: 2092564
auugacagugaccuguuca

SEQ ID NO: 2092566 - RNA, 19 nt, Artificial Sequence
  Description of Artificial Sequence: Synthetic oligonucleotide
  Sense strand starting at position 1551 of SEQ ID NO: 1882067
cagcaauauuucgaaagga

SEQ ID NO: 2092567 - RNA, 19 nt, Artificial Sequence
  Description of Artificial Sequence: Synthetic oligonucleotide
  Antisense strand to SEQ ID NO: 2092566
uccuuucgaaauauugcug

SEQ ID NO: 2092568 - RNA, 19 nt, Artificial Sequence
  Description of Artificial Sequence: Synthetic oligonucleotide
  Sense strand starting at position 1594 of SEQ ID NO: 1882067
ucaauaguaggcugcaaau

SEQ ID NO: 2092569 - RNA, 19 nt, Artificial Sequence
  Description of Artificial Sequence: Synthetic oligonucleotide
  Antisense strand to SEQ ID NO: 2092568
auuugcagccuacuauuga

SEQ ID NO: 2092570 - RNA, 19 nt, Artificial Sequence
  Description of Artificial Sequence: Synthetic oligonucleotide
  Sense strand starting at position 1596 of SEQ ID NO: 1882067
aauaguaggcugcaaauau

SEQ ID NO: 2092571 - RNA, 19 nt, Artificial Sequence
  Description of Artificial Sequence: Synthetic oligonucleotide
  Antisense strand to SEQ ID NO: 2092570
auauuugcagccuacuauu

SEQ ID NO: 2092572 - RNA, 19 nt, Artificial Sequence
  Description of Artificial Sequence: Synthetic oligonucleotide
  Sense strand starting at position 1920 of SEQ ID NO: 1882067
uuagcuagauccucuggaa

SEQ ID NO: 2092573 - RNA, 19 nt, Artificial Sequence
  Description of Artificial Sequence: Synthetic oligonucleotide
  Antisense strand to SEQ ID NO: 2092572
uuccagaggaucuagcuaa

SEQ ID NO: 2092574 - RNA, 19 nt, Artificial Sequence
  Description of Artificial Sequence: Synthetic oligonucleotide
  Sense strand starting at position 2015 of SEQ ID NO: 1882067
guaguuuacggagaaagcu

SEQ ID NO: 2092575 - RNA, 19 nt, Artificial Sequence
  Description of Artificial Sequence: Synthetic oligonucleotide
  Antisense strand to SEQ ID NO: 2092574
agcuuucuccguaaacuac

SEQ ID NO: 2092576 - RNA, 19 nt, Artificial Sequence
  Description of Artificial Sequence: Synthetic oligonucleotide
  Sense strand starting at position 2024 of SEQ ID NO: 1882067
ggagaaagcuccuuuccuu

SEQ ID NO: 2092577 - RNA, 19 nt, Artificial Sequence
  Description of Artificial Sequence: Synthetic oligonucleotide
  Antisense strand to SEQ ID NO: 2092576
aaggaaaggagcuuucucc

SEQ ID NO: 2092578 - RNA, 19 nt, Artificial Sequence
  Description of Artificial Sequence: Synthetic oligonucleotide
  Sense strand starting at position 2113 of SEQ ID NO: 1882067
augaaauuaagacgaguua

SEQ ID NO: 2092579 - RNA, 19 nt, Artificial Sequence
  Description of Artificial Sequence: Synthetic oligonucleotide
  Antisense strand to SEQ ID NO: 2092578
uaacucgucuuaauuucau

SEQ ID NO: 2092580 - RNA, 19 nt, Artificial Sequence
  Description of Artificial Sequence: Synthetic oligonucleotide
  Sense strand starting at position 2148 of SEQ ID NO: 1882067
uaggcuuuggcauaagaga

SEQ ID NO: 2092581 - RNA, 19 nt, Artificial Sequence
  Description of Artificial Sequence: Synthetic oligonucleotide
  Antisense strand to SEQ ID NO: 2092580
ucucuuaugccaaagccua

SEQ ID NO: 2092582 - RNA, 19 nt, Artificial Sequence
  Description of Artificial Sequence: Synthetic oligonucleotide
  Sense strand starting at position 2251 of SEQ ID NO: 1882067
guguucaauggagaacguu

SEQ ID NO: 2092583 - RNA, 19 nt, Artificial Sequence
  Description of Artificial Sequence: Synthetic oligonucleotide
  Antisense strand to SEQ ID NO: 2092582
aacguucuccauugaacac

SEQ ID NO: 2092584 - RNA, 19 nt, Artificial Sequence
  Description of Artificial Sequence: Synthetic oligonucleotide
  Sense strand starting at position 2451 of SEQ ID NO: 1882067
auuguaggguuguuaaacu

SEQ ID NO: 2092585 - RNA, 19 nt, Artificial Sequence
  Description of Artificial Sequence: Synthetic oligonucleotide
  Antisense strand to SEQ ID NO: 2092584
aguuuaacaacccuacaau

SEQ ID NO: 2092586 - RNA, 19 nt, Artificial Sequence
  Description of Artificial Sequence: Synthetic oligonucleotide
  Sense strand starting at position 2460 of SEQ ID NO: 1882067
uuguuaaacuguccuaauu

SEQ ID NO: 2092587 - RNA, 19 nt, Artificial Sequence
  Description of Artificial Sequence: Synthetic oligonucleotide
  Antisense strand to SEQ ID NO: 2092586
aauuaggacaguuuaacaa

SEQ ID NO: 2092588 - RNA, 19 nt, Artificial Sequence
  Description of Artificial Sequence: Synthetic oligonucleotide
  Sense strand starting at position 2486 of SEQ ID NO: 1882067
uguuaugucucagugaaua

SEQ ID NO: 2092589 - RNA, 19 nt, Artificial Sequence
  Description of Artificial Sequence: Synthetic oligonucleotide
  Antisense strand to SEQ ID NO: 2092588
uauucacugagacauaaca

SEQ ID NO: 2092590 - RNA, 19 nt, Artificial Sequence
  Description of Artificial Sequence: Synthetic oligonucleotide
  Sense strand starting at position 2534 of SEQ ID NO: 1882067
gggaauggcugaucagugu

SEQ ID NO: 2092591 - RNA, 19 nt, Artificial Sequence
  Description of Artificial Sequence: Synthetic oligonucleotide
  Antisense strand to SEQ ID NO: 2092590
acacugaucagccauuccc

SEQ ID NO: 2092592 - RNA, 19 nt, Artificial Sequence
  Description of Artificial Sequence: Synthetic oligonucleotide
  Sense strand starting at position 2749 of SEQ ID NO: 1882067
cugaaagacuugcucaaca

SEQ ID NO: 2092593 - RNA, 19 nt, Artificial Sequence
  Description of Artificial Sequence: Synthetic oligonucleotide
  Antisense strand to SEQ ID NO: 2092592
uguugagcaagucuuucag

SEQ ID NO: 2092594 - RNA, 19 nt, Artificial Sequence
  Description of Artificial Sequence: Synthetic oligonucleotide
  Sense strand starting at position 2840 of SEQ ID NO: 1882067
aaaggaguaugccuguaua

SEQ ID NO: 2092595 - RNA, 19 nt, Artificial Sequence
  Description of Artificial Sequence: Synthetic oligonucleotide
  Antisense strand to SEQ ID NO: 2092594
uauacaggcauacuccuuu

SEQ ID NO: 2092596 - RNA, 19 nt, Artificial Sequence
  Description of Artificial Sequence: Synthetic oligonucleotide
  Sense strand starting at position 2843 of SEQ ID NO: 1882067
ggaguaugccuguauauac

SEQ ID NO: 2092597 - RNA, 19 nt, Artificial Sequence
  Description of Artificial Sequence: Synthetic oligonucleotide
  Antisense strand to SEQ ID NO: 2092596
guauauacaggcauacucc

SEQ ID NO: 2092598 - RNA, 19 nt, Artificial Sequence
  Description of Artificial Sequence: Synthetic oligonucleotide
  Sense strand starting at position 2852 of SEQ ID NO: 1882067
cuguauauacacuggagua

SEQ ID NO: 2092599 - RNA, 19 nt, Artificial Sequence
  Description of Artificial Sequence: Synthetic oligonucleotide
  Antisense strand to SEQ ID NO: 2092598
uacuccaguguauauacag

SEQ ID NO: 2092600 - RNA, 19 nt, Artificial Sequence
  Description of Artificial Sequence: Synthetic oligonucleotide
  Sense strand starting at position 2980 of SEQ ID NO: 1882067
cacuuaucuguggaaucga

SEQ ID NO: 2092601 - RNA, 19 nt, Artificial Sequence
  Description of Artificial Sequence: Synthetic oligonucleotide
  Antisense strand to SEQ ID NO: 2092600
ucgauuccacagauaagug

SEQ ID NO: 2092602 - RNA, 19 nt, Artificial Sequence
  Description of Artificial Sequence: Synthetic oligonucleotide
  Sense strand starting at position 3030 of SEQ ID NO: 1882067
acgguauuugcccaaggcu

SEQ ID NO: 2092603 - RNA, 19 nt, Artificial Sequence
  Description of Artificial Sequence: Synthetic oligonucleotide
  Antisense strand to SEQ ID NO: 2092602
agccuugggcaaauaccgu

SEQ ID NO: 2092604 - RNA, 19 nt, Artificial Sequence
  Description of Artificial Sequence: Synthetic oligonucleotide
  Sense strand starting at position 3136 of SEQ ID NO: 1882067
gguagcuaccuuuaauaau

SEQ ID NO: 2092605 - RNA, 19 nt, Artificial Sequence
  Description of Artificial Sequence: Synthetic oligonucleotide
  Antisense strand to SEQ ID NO: 2092604
auuauuaaagguagcuacc

SEQ ID NO: 2092606 - RNA, 19 nt, Artificial Sequence
  Description of Artificial Sequence: Synthetic oligonucleotide
  Sense strand starting at position 3233 of SEQ ID NO: 1882067
gauggauauguuuaguuug

SEQ ID NO: 2092607 - RNA, 19 nt, Artificial Sequence
  Description of Artificial Sequence: Synthetic oligonucleotide
  Antisense strand to SEQ ID NO: 2092606
caaacuaaacauauccauc

SEQ ID NO: 2092608 - RNA, 19 nt, Artificial Sequence
  Description of Artificial Sequence: Synthetic oligonucleotide
  Sense strand starting at position 3236 of SEQ ID NO: 1882067
ggauauguuuaguuugacu

SEQ ID NO: 2092609 - RNA, 19 nt, Artificial Sequence
  Description of Artificial Sequence: Synthetic oligonucleotide
  Antisense strand to SEQ ID NO: 2092608
agucaaacuaaacauaucc

SEQ ID NO: 2092610 - RNA, 19 nt, Artificial Sequence
  Description of Artificial Sequence: Synthetic oligonucleotide
  Sense strand starting at position 3241 of SEQ ID NO: 1882067
uguuuaguuugacuuaauc

SEQ ID NO: 2092611 - RNA, 19 nt, Artificial Sequence
  Description of Artificial Sequence: Synthetic oligonucleotide
  Antisense strand to SEQ ID NO: 2092610
gauuaagucaaacuaaaca

SEQ ID NO: 2092612 - RNA, 19 nt, Artificial Sequence
  Description of Artificial Sequence: Synthetic oligonucleotide
  Sense strand starting at position 3879 of SEQ ID NO: 1882067
cuugaacuucccgggagau

SEQ ID NO: 2092613 - RNA, 19 nt, Artificial Sequence
  Description of Artificial Sequence: Synthetic oligonucleotide
  Antisense strand to SEQ ID NO: 2092612
aucucccgggaaguucaag

SEQ ID NO: 2092614 - RNA, 19 nt, Artificial Sequence
  Description of Artificial Sequence: Synthetic oligonucleotide
  Sense strand starting at position 3924 of SEQ ID NO: 1882067
aagugaacuuaagugagau

SEQ ID NO: 2092615 - RNA, 19 nt, Artificial Sequence
  Description of Artificial Sequence: Synthetic oligonucleotide
  Antisense strand to SEQ ID NO: 2092614
aucucacuuaaguucacuu

SEQ ID NO: 2092616 - RNA, 19 nt, Artificial Sequence
  Description of Artificial Sequence: Synthetic oligonucleotide
  Sense strand starting at position 3928 of SEQ ID NO: 1882067
gaacuuaagugagauuucu

SEQ ID NO: 2092617 - RNA, 19 nt, Artificial Sequence
  Description of Artificial Sequence: Synthetic oligonucleotide
  Antisense strand to SEQ ID NO: 2092616
agaaaucucacuuaaguuc

SEQ ID NO: 2092618 - RNA, 19 nt, Artificial Sequence
  Description of Artificial Sequence: Synthetic oligonucleotide
  Sense strand starting at position 3937 of SEQ ID NO: 1882067
ugagauuucucuuacuuug

SEQ ID NO: 2092619 - RNA, 19 nt, Artificial Sequence
  Description of Artificial Sequence: Synthetic oligonucleotide
  Antisense strand to SEQ ID NO: 2092618
caaaguaagagaaaucuca

SEQ ID NO: 2092620 - RNA, 19 nt, Artificial Sequence
  Description of Artificial Sequence: Synthetic oligonucleotide
  Sense strand starting at position 4 of SEQ ID NO: 1882068
uaagaaacgucuguacaaa

SEQ ID NO: 2092621 - RNA, 19 nt, Artificial Sequence
  Description of Artificial Sequence: Synthetic oligonucleotide
  Antisense strand to SEQ ID NO: 2092620
uuuguacagacguuucuua

SEQ ID NO: 2092622 - RNA, 19 nt, Artificial Sequence
  Description of Artificial Sequence: Synthetic oligonucleotide
  Sense strand starting at position 5 of SEQ ID NO: 1882068
aagaaacgucuguacaaau

SEQ ID NO: 2092623 - RNA, 19 nt, Artificial Sequence
  Description of Artificial Sequence: Synthetic oligonucleotide
  Antisense strand to SEQ ID NO: 2092622
auuuguacagacguuucuu

SEQ ID NO: 2092624 - RNA, 19 nt, Artificial Sequence
  Description of Artificial Sequence: Synthetic oligonucleotide
  Sense strand starting at position 114 of SEQ ID NO: 1882068
acauuuaauugguagagau

SEQ ID NO: 2092625 - RNA, 19 nt, Artificial Sequence
  Description of Artificial Sequence: Synthetic oligonucleotide
  Antisense strand to SEQ ID NO: 2092624
aucucuaccaauuaaaugu

SEQ ID NO: 2092626 - RNA, 19 nt, Artificial Sequence
  Description of Artificial Sequence: Synthetic oligonucleotide
  Sense strand starting at position 575 of SEQ ID NO: 1882068
cuaaauguacagugaaauu

SEQ ID NO: 2092627 - RNA, 19 nt, Artificial Sequence
  Description of Artificial Sequence: Synthetic oligonucleotide
  Antisense strand to SEQ ID NO: 2092626
aauuucacuguacauuuag

SEQ ID NO: 2092628 - RNA, 19 nt, Artificial Sequence
  Description of Artificial Sequence: Synthetic oligonucleotide
  Sense strand starting at position 716 of SEQ ID NO: 1882068
ucccacuauucuguggaau

SEQ ID NO: 2092629 - RNA, 19 nt, Artificial Sequence
  Description of Artificial Sequence: Synthetic oligonucleotide
  Antisense strand to SEQ ID NO: 2092628
auuccacagaauaguggga

SEQ ID NO: 2092630 - RNA, 19 nt, Artificial Sequence
  Description of Artificial Sequence: Synthetic oligonucleotide
  Sense strand starting at position 717 of SEQ ID NO: 1882068
cccacuauucuguggaaua

SEQ ID NO: 2092631 - RNA, 19 nt, Artificial Sequence
  Description of Artificial Sequence: Synthetic oligonucleotide
  Antisense strand to SEQ ID NO: 2092630
uauuccacagaauaguggg

SEQ ID NO: 2092632 - RNA, 19 nt, Artificial Sequence
  Description of Artificial Sequence: Synthetic oligonucleotide
  Sense strand starting at position 1183 of SEQ ID NO: 1882068
acaguaagucuugacaggu

SEQ ID NO: 2092633 - RNA, 19 nt, Artificial Sequence
  Description of Artificial Sequence: Synthetic oligonucleotide
  Antisense strand to SEQ ID NO: 2092632
accugucaagacuuacugu

SEQ ID NO: 2092634 - RNA, 19 nt, Artificial Sequence
  Description of Artificial Sequence: Synthetic oligonucleotide
  Sense strand starting at position 1221 of SEQ ID NO: 1882068
uuuggaguccuugauaauu

SEQ ID NO: 2092635 - RNA, 19 nt, Artificial Sequence
  Description of Artificial Sequence: Synthetic oligonucleotide
  Antisense strand to SEQ ID NO: 2092634
aauuaucaaggacuccaaa

SEQ ID NO: 2092636 - RNA, 19 nt, Artificial Sequence
  Description of Artificial Sequence: Synthetic oligonucleotide
  Sense strand starting at position 1226 of SEQ ID NO: 1882068
aguccuugauaauugagga

SEQ ID NO: 2092637 - RNA, 19 nt, Artificial Sequence
  Description of Artificial Sequence: Synthetic oligonucleotide
  Antisense strand to SEQ ID NO: 2092636
uccucaauuaucaaggacu

SEQ ID NO: 2092638 - RNA, 19 nt, Artificial Sequence
  Description of Artificial Sequence: Synthetic oligonucleotide
  Sense strand starting at position 1227 of SEQ ID NO: 1882068
guccuugauaauugaggau

SEQ ID NO: 2092639 - RNA, 19 nt, Artificial Sequence
  Description of Artificial Sequence: Synthetic oligonucleotide
  Antisense strand to SEQ ID NO: 2092638
auccucaauuaucaaggac

SEQ ID NO: 2092640 - RNA, 19 nt, Artificial Sequence
  Description of Artificial Sequence: Synthetic oligonucleotide
  Sense strand starting at position 1293 of SEQ ID NO: 1882068
ccaguauaggcagacaugu

SEQ ID NO: 2092641 - RNA, 19 nt, Artificial Sequence
  Description of Artificial Sequence: Synthetic oligonucleotide
  Antisense strand to SEQ ID NO: 2092640
acaugucugccuauacugg

SEQ ID NO: 2092642 - RNA, 19 nt, Artificial Sequence
  Description of Artificial Sequence: Synthetic oligonucleotide
  Sense strand starting at position 1353 of SEQ ID NO: 1882068
agcaacuaacgauaaugua

SEQ ID NO: 2092643 - RNA, 19 nt, Artificial Sequence
  Description of Artificial Sequence: Synthetic oligonucleotide
  Antisense strand to SEQ ID NO: 2092642
uacauuaucguuaguugcu

SEQ ID NO: 2092644 - RNA, 19 nt, Artificial Sequence
  Description of Artificial Sequence: Synthetic oligonucleotide
  Sense strand starting at position 1362 of SEQ ID NO: 1882068
cgauaauguaugcaguaau

SEQ ID NO: 2092645 - RNA, 19 nt, Artificial Sequence
  Description of Artificial Sequence: Synthetic oligonucleotide
  Antisense strand to SEQ ID NO: 2092644
auuacugcauacauuaucg

SEQ ID NO: 2092646 - RNA, 19 nt, Artificial Sequence
  Description of Artificial Sequence: Synthetic oligonucleotide
  Sense strand starting at position 1376 of SEQ ID NO: 1882068
guaauaucgccucaauagg

SEQ ID NO: 2092647 - RNA, 19 nt, Artificial Sequence
  Description of Artificial Sequence: Synthetic oligonucleotide
  Antisense strand to SEQ ID NO: 2092646
ccuauugaggcgauauuac

SEQ ID NO: 2092648 - RNA, 19 nt, Artificial Sequence
  Description of Artificial Sequence: Synthetic oligonucleotide
  Sense strand starting at position 1591 of SEQ ID NO: 1882068
aguugaagguauguaaaug

SEQ ID NO: 2092649 - RNA, 19 nt, Artificial Sequence
  Description of Artificial Sequence: Synthetic oligonucleotide
  Antisense strand to SEQ ID NO: 2092648
cauuuacauaccuucaacu

SEQ ID NO: 2092650 - RNA, 19 nt, Artificial Sequence
  Description of Artificial Sequence: Synthetic oligonucleotide
  Sense strand starting at position 1592 of SEQ ID NO: 1882068
guugaagguauguaaauga

SEQ ID NO: 2092651 - RNA, 19 nt, Artificial Sequence
  Description of Artificial Sequence: Synthetic oligonucleotide
  Antisense strand to SEQ ID NO: 2092650
ucauuuacauaccuucaac

SEQ ID NO: 2092652 - RNA, 19 nt, Artificial Sequence
  Description of Artificial Sequence: Synthetic oligonucleotide
  Sense strand starting at position 1764 of SEQ ID NO: 1882068
gugguacauaaggauguau

SEQ ID NO: 2092653 - RNA, 19 nt, Artificial Sequence
  Description of Artificial Sequence: Synthetic oligonucleotide
  Antisense strand to SEQ ID NO: 2092652
auacauccuuauguaccac

SEQ ID NO: 2092654 - RNA, 19 nt, Artificial Sequence
  Description of Artificial Sequence: Synthetic oligonucleotide
  Sense strand starting at position 1766 of SEQ ID NO: 1882068
gguacauaaggauguauua

SEQ ID NO: 2092655 - RNA, 19 nt, Artificial Sequence
  Description of Artificial Sequence: Synthetic oligonucleotide
  Antisense strand to SEQ ID NO: 2092654
uaauacauccuuauguacc

SEQ ID NO: 2092656 - RNA, 19 nt, Artificial Sequence
  Description of Artificial Sequence: Synthetic oligonucleotide
  Sense strand starting at position 1859 of SEQ ID NO: 1882068
cuaagugaacgaugccaga

SEQ ID NO: 2092657 - RNA, 19 nt, Artificial Sequence
  Description of Artificial Sequence: Synthetic oligonucleotide
  Antisense strand to SEQ ID NO: 2092656
ucuggcaucguucacuuag

SEQ ID NO: 2092658 - RNA, 19 nt, Artificial Sequence
  Description of Artificial Sequence: Synthetic oligonucleotide
  Sense strand starting at position 2080 of SEQ ID NO: 1882068
gggagauacuagguaugug

SEQ ID NO: 2092659 - RNA, 19 nt, Artificial Sequence
  Description of Artificial Sequence: Synthetic oligonucleotide
  Antisense strand to SEQ ID NO: 2092658
cacauaccuaguaucuccc

SEQ ID NO: 2092660 - RNA, 19 nt, Artificial Sequence
  Description of Artificial Sequence: Synthetic oligonucleotide
  Sense strand starting at position 2115 of SEQ ID NO: 1882068
auuguuaauggguacguga

SEQ ID NO: 2092661 - RNA, 19 nt, Artificial Sequence
  Description of Artificial Sequence: Synthetic oligonucleotide
  Antisense strand to SEQ ID NO: 2092660
ucacguacccauuaacaau

SEQ ID NO: 2092662 - RNA, 19 nt, Artificial Sequence
  Description of Artificial Sequence: Synthetic oligonucleotide
  Sense strand starting at position 2118 of SEQ ID NO: 1882068
guuaauggguacgugauuu

SEQ ID NO: 2092663 - RNA, 19 nt, Artificial Sequence
  Description of Artificial Sequence: Synthetic oligonucleotide
  Antisense strand to SEQ ID NO: 2092662
aaaucacguacccauuaac

SEQ ID NO: 2092664 - RNA, 19 nt, Artificial Sequence
  Description of Artificial Sequence: Synthetic oligonucleotide
  Sense strand starting at position 2122 of SEQ ID NO: 1882068
auggguacgugauuucuuu

SEQ ID NO: 2092665 - RNA, 19 nt, Artificial Sequence
  Description of Artificial Sequence: Synthetic oligonucleotide
  Antisense strand to SEQ ID NO: 2092664
aaagaaaucacguacccau

SEQ ID NO: 2092666 - RNA, 19 nt, Artificial Sequence
  Description of Artificial Sequence: Synthetic oligonucleotide
  Sense strand starting at position 2184 of SEQ ID NO: 1882068
acaacucugucacuguaua

SEQ ID NO: 2092667 - RNA, 19 nt, Artificial Sequence
  Description of Artificial Sequence: Synthetic oligonucleotide
  Antisense strand to SEQ ID NO: 2092666
uauacagugacagaguugu

SEQ ID NO: 2092668 - RNA, 19 nt, Artificial Sequence
  Description of Artificial Sequence: Synthetic oligonucleotide
  Sense strand starting at position 2192 of SEQ ID NO: 1882068
gucacuguauaaguuuaga

SEQ ID NO: 2092669 - RNA, 19 nt, Artificial Sequence
  Description of Artificial Sequence: Synthetic oligonucleotide
  Antisense strand to SEQ ID NO: 2092668
ucuaaacuuauacagugac

SEQ ID NO: 2092670 - RNA, 19 nt, Artificial Sequence
  Description of Artificial Sequence: Synthetic oligonucleotide
  Sense strand starting at position 2299 of SEQ ID NO: 1882068
cccuguagccacuaaaguu

SEQ ID NO: 2092671 - RNA, 19 nt, Artificial Sequence
  Description of Artificial Sequence: Synthetic oligonucleotide
  Antisense strand to SEQ ID NO: 2092670
aacuuuaguggcuacaggg

SEQ ID NO: 2092672 - RNA, 19 nt, Artificial Sequence
  Description of Artificial Sequence: Synthetic oligonucleotide
  Sense strand starting at position 2309 of SEQ ID NO: 1882068
acuaaaguuucuuuaugga

SEQ ID NO: 2092673 - RNA, 19 nt, Artificial Sequence
  Description of Artificial Sequence: Synthetic oligonucleotide
  Antisense strand to SEQ ID NO: 2092672
uccauaaagaaacuuuagu

SEQ ID NO: 2092674 - RNA, 19 nt, Artificial Sequence
  Description of Artificial Sequence: Synthetic oligonucleotide
  Sense strand starting at position 2368 of SEQ ID NO: 1882068
ucaggaaauguaugucuau

SEQ ID NO: 2092675 - RNA, 19 nt, Artificial Sequence
  Description of Artificial Sequence: Synthetic oligonucleotide
  Antisense strand to SEQ ID NO: 2092674
auagacauacauuuccuga

SEQ ID NO: 2092676 - RNA, 19 nt, Artificial Sequence
  Description of Artificial Sequence: Synthetic oligonucleotide
  Sense strand starting at position 2369 of SEQ ID NO: 1882068
caggaaauguaugucuauu

SEQ ID NO: 2092677 - RNA, 19 nt, Artificial Sequence
  Description of Artificial Sequence: Synthetic oligonucleotide
  Antisense strand to SEQ ID NO: 2092676
aauagacauacauuuccug

SEQ ID NO: 2092678 - RNA, 19 nt, Artificial Sequence
  Description of Artificial Sequence: Synthetic oligonucleotide
  Sense strand starting at position 2547 of SEQ ID NO: 1882068
cuaggaucuuccucaagag

SEQ ID NO: 2092679 - RNA, 19 nt, Artificial Sequence
  Description of Artificial Sequence: Synthetic oligonucleotide
  Antisense strand to SEQ ID NO: 2092678
cucuugaggaagauccuag

SEQ ID NO: 2092680 - RNA, 19 nt, Artificial Sequence
  Description of Artificial Sequence: Synthetic oligonucleotide
  Sense strand starting at position 2591 of SEQ ID NO: 1882068
gauugcuuugaaugggagu

SEQ ID NO: 2092681 - RNA, 19 nt, Artificial Sequence
  Description of Artificial Sequence: Synthetic oligonucleotide
  Antisense strand to SEQ ID NO: 2092680
acucccauucaaagcaauc

SEQ ID NO: 2092682 - RNA, 19 nt, Artificial Sequence
  Description of Artificial Sequence: Synthetic oligonucleotide
  Sense strand starting at position 2593 of SEQ ID NO: 1882068
uugcuuugaaugggaguca

SEQ ID NO: 2092683 - RNA, 19 nt, Artificial Sequence
  Description of Artificial Sequence: Synthetic oligonucleotide
  Antisense strand to SEQ ID NO: 2092682
ugacucccauucaaagcaa

SEQ ID NO: 2092684 - RNA, 19 nt, Artificial Sequence
  Description of Artificial Sequence: Synthetic oligonucleotide
  Sense strand starting at position 2605 of SEQ ID NO: 1882068
ggagucacaugcucagaau

SEQ ID NO: 2092685 - RNA, 19 nt, Artificial Sequence
  Description of Artificial Sequence: Synthetic oligonucleotide
  Antisense strand to SEQ ID NO: 2092684
auucugagcaugugacucc

SEQ ID NO: 2092686 - RNA, 19 nt, Artificial Sequence
  Description of Artificial Sequence: Synthetic oligonucleotide
  Sense strand starting at position 2606 of SEQ ID NO: 1882068
gagucacaugcucagaaug

SEQ ID NO: 2092687 - RNA, 19 nt, Artificial Sequence
  Description of Artificial Sequence: Synthetic oligonucleotide
  Antisense strand to SEQ ID NO: 2092686
cauucugagcaugugacuc

SEQ ID NO: 2092688 - RNA, 19 nt, Artificial Sequence
  Description of Artificial Sequence: Synthetic oligonucleotide
  Sense strand starting at position 2906 of SEQ ID NO: 1882068
cuuauucuuuaaucacgga

SEQ ID NO: 2092689 - RNA, 19 nt, Artificial Sequence
  Description of Artificial Sequence: Synthetic oligonucleotide
  Antisense strand to SEQ ID NO: 2092688
uccgugauuaaagaauaag

SEQ ID NO: 2092690 - RNA, 19 nt, Artificial Sequence
  Description of Artificial Sequence: Synthetic oligonucleotide
  Sense strand starting at position 2911 of SEQ ID NO: 1882068
ucuuuaaucacggaggcuu

SEQ ID NO: 2092691 - RNA, 19 nt, Artificial Sequence
  Description of Artificial Sequence: Synthetic oligonucleotide
  Antisense strand to SEQ ID NO: 2092690
aagccuccgugauuaaaga

SEQ ID NO: 2092692 - RNA, 19 nt, Artificial Sequence
  Description of Artificial Sequence: Synthetic oligonucleotide
  Sense strand starting at position 3032 of SEQ ID NO: 1882068
cuuagugcugaccaacaaa

SEQ ID NO: 2092693 - RNA, 19 nt, Artificial Sequence
  Description of Artificial Sequence: Synthetic oligonucleotide
  Antisense strand to SEQ ID NO: 2092692
uuuguuggucagcacuaag

SEQ ID NO: 2092694 - RNA, 19 nt, Artificial Sequence
  Description of Artificial Sequence: Synthetic oligonucleotide
  Sense strand starting at position 3565 of SEQ ID NO: 1882068
ggugaaacguucucuagaa

SEQ ID NO: 2092695 - RNA, 19 nt, Artificial Sequence
  Description of Artificial Sequence: Synthetic oligonucleotide
  Antisense strand to SEQ ID NO: 2092694
uucuagagaacguuucacc

SEQ ID NO: 2092696 - RNA, 19 nt, Artificial Sequence
  Description of Artificial Sequence: Synthetic oligonucleotide
  Sense strand starting at position 3566 of SEQ ID NO: 1882068
gugaaacguucucuagaaa

SEQ ID NO: 2092697 - RNA, 19 nt, Artificial Sequence
  Description of Artificial Sequence: Synthetic oligonucleotide
  Antisense strand to SEQ ID NO: 2092696
uuucuagagaacguuucac

SEQ ID NO: 2092698 - RNA, 19 nt, Artificial Sequence
  Description of Artificial Sequence: Synthetic oligonucleotide
  Sense strand starting at position 3810 of SEQ ID NO: 1882068
acuguaacuguuuauaaac

SEQ ID NO: 2092699 - RNA, 19 nt, Artificial Sequence
  Description of Artificial Sequence: Synthetic oligonucleotide
  Antisense strand to SEQ ID NO: 2092698
guuuauaaacaguuacagu

SEQ ID NO: 2092700 - RNA, 19 nt, Artificial Sequence
  Description of Artificial Sequence: Synthetic oligonucleotide
  Sense strand starting at position 89 of SEQ ID NO: 1882069
acuuuaaaggguuguagau

SEQ ID NO: 2092701 - RNA, 19 nt, Artificial Sequence
  Description of Artificial Sequence: Synthetic oligonucleotide
  Antisense strand to SEQ ID NO: 2092700
aucuacaacccuuuaaagu

SEQ ID NO: 2092702 - RNA, 19 nt, Artificial Sequence
  Description of Artificial Sequence: Synthetic oligonucleotide
  Sense strand starting at position 123 of SEQ ID NO: 1882069
uggauccuuuauucuagua

SEQ ID NO: 2092703 - RNA, 19 nt, Artificial Sequence
  Description of Artificial Sequence: Synthetic oligonucleotide
  Antisense strand to SEQ ID NO: 2092702
uacuagaauaaaggaucca

SEQ ID NO: 2092704 - RNA, 19 nt, Artificial Sequence
  Description of Artificial Sequence: Synthetic oligonucleotide
  Sense strand starting at position 353 of SEQ ID NO: 1882069
uugcaucuuucucugaaga

SEQ ID NO: 2092705 - RNA, 19 nt, Artificial Sequence
  Description of Artificial Sequence: Synthetic oligonucleotide
  Antisense strand to SEQ ID NO: 2092704
ucuucagagaaagaugcaa

SEQ ID NO: 2092706 - RNA, 19 nt, Artificial Sequence
  Description of Artificial Sequence: Synthetic oligonucleotide
  Sense strand starting at position 354 of SEQ ID NO: 1882069
ugcaucuuucucugaagaa

SEQ ID NO: 2092707 - RNA, 19 nt, Artificial Sequence
  Description of Artificial Sequence: Synthetic oligonucleotide
  Antisense strand to SEQ ID NO: 2092706
uucuucagagaaagaugca

SEQ ID NO: 2092708 - RNA, 19 nt, Artificial Sequence
  Description of Artificial Sequence: Synthetic oligonucleotide
  Sense strand starting at position 504 of SEQ ID NO: 1882069
uccagauagcuaggacuau

SEQ ID NO: 2092709 - RNA, 19 nt, Artificial Sequence
  Description of Artificial Sequence: Synthetic oligonucleotide
  Antisense strand to SEQ ID NO: 2092708
auaguccuagcuaucugga

SEQ ID NO: 2092710 - RNA, 19 nt, Artificial Sequence
  Description of Artificial Sequence: Synthetic oligonucleotide
  Sense strand starting at position 697 of SEQ ID NO: 1882069
guucuuuaugguuauagga

SEQ ID NO: 2092711 - RNA, 19 nt, Artificial Sequence
  Description of Artificial Sequence: Synthetic oligonucleotide
  Antisense strand to SEQ ID NO: 2092710
uccuauaaccauaaagaac

SEQ ID NO: 2092712 - RNA, 19 nt, Artificial Sequence
  Description of Artificial Sequence: Synthetic oligonucleotide
  Sense strand starting at position 870 of SEQ ID NO: 1882069
gugaaauaaucaccauagu

SEQ ID NO: 2092713 - RNA, 19 nt, Artificial Sequence
  Description of Artificial Sequence: Synthetic oligonucleotide
  Antisense strand to SEQ ID NO: 2092712
acuauggugauuauuucac

SEQ ID NO: 2092714 - RNA, 19 nt, Artificial Sequence
  Description of Artificial Sequence: Synthetic oligonucleotide
  Sense strand starting at position 1065 of SEQ ID NO: 1882069
gggcuuaucugauuacacu

SEQ ID NO: 2092715 - RNA, 19 nt, Artificial Sequence
  Description of Artificial Sequence: Synthetic oligonucleotide
  Antisense strand to SEQ ID NO: 2092714
aguguaaucagauaagccc

SEQ ID NO: 2092716 - RNA, 19 nt, Artificial Sequence
  Description of Artificial Sequence: Synthetic oligonucleotide
  Sense strand starting at position 1066 of SEQ ID NO: 1882069
ggcuuaucugauuacacug

SEQ ID NO: 2092717 - RNA, 19 nt, Artificial Sequence
  Description of Artificial Sequence: Synthetic oligonucleotide
  Antisense strand to SEQ ID NO: 2092716
caguguaaucagauaagcc

SEQ ID NO: 2092718 - RNA, 19 nt, Artificial Sequence
  Description of Artificial Sequence: Synthetic oligonucleotide
  Sense strand starting at position 1082 of SEQ ID NO: 1882069
cugggccugccugaauaau

SEQ ID NO: 2092719 - RNA, 19 nt, Artificial Sequence
  Description of Artificial Sequence: Synthetic oligonucleotide
  Antisense strand to SEQ ID NO: 2092718
auuauucaggcaggcccag

SEQ ID NO: 2092720 - RNA, 19 nt, Artificial Sequence
  Description of Artificial Sequence: Synthetic oligonucleotide
  Sense strand starting at position 1181 of SEQ ID NO: 1882069
ucuguugaggccgaacuau

SEQ ID NO: 2092721 - RNA, 19 nt, Artificial Sequence
  Description of Artificial Sequence: Synthetic oligonucleotide
  Antisense strand to SEQ ID NO: 2092720
auaguucggccucaacaga

SEQ ID NO: 2092722 - RNA, 19 nt, Artificial Sequence
  Description of Artificial Sequence: Synthetic oligonucleotide
  Sense strand starting at position 1430 of SEQ ID NO: 1882069
guuccaugugauuaagcac

SEQ ID NO: 2092723 - RNA, 19 nt, Artificial Sequence
  Description of Artificial Sequence: Synthetic oligonucleotide
  Antisense strand to SEQ ID NO: 2092722
gugcuuaaucacauggaac

SEQ ID NO: 2092724 - RNA, 19 nt, Artificial Sequence
  Description of Artificial Sequence: Synthetic oligonucleotide
  Sense strand starting at position 1437 of SEQ ID NO: 1882069
gugauuaagcaccacagua

SEQ ID NO: 2092725 - RNA, 19 nt, Artificial Sequence
  Description of Artificial Sequence: Synthetic oligonucleotide
  Antisense strand to SEQ ID NO: 2092724
uacuguggugcuuaaucac

SEQ ID NO: 2092726 - RNA, 19 nt, Artificial Sequence
  Description of Artificial Sequence: Synthetic oligonucleotide
  Sense strand starting at position 1461 of SEQ ID NO: 1882069
acuugauuauacucgaaau

SEQ ID NO: 2092727 - RNA, 19 nt, Artificial Sequence
  Description of Artificial Sequence: Synthetic oligonucleotide
  Antisense strand to SEQ ID NO: 2092726
auuucgaguauaaucaagu

SEQ ID NO: 2092728 - RNA, 19 nt, Artificial Sequence
  Description of Artificial Sequence: Synthetic oligonucleotide
  Sense strand starting at position 1673 of SEQ ID NO: 1882069
ugacuaauguuacugacua

SEQ ID NO: 2092729 - RNA, 19 nt, Artificial Sequence
  Description of Artificial Sequence: Synthetic oligonucleotide
  Antisense strand to SEQ ID NO: 2092728
uagucaguaacauuaguca

SEQ ID NO: 2092730 - RNA, 19 nt, Artificial Sequence
  Description of Artificial Sequence: Synthetic oligonucleotide
  Sense strand starting at position 1697 of SEQ ID NO: 1882069
cuguuuccugaguacuuua

SEQ ID NO: 2092731 - RNA, 19 nt, Artificial Sequence
  Description of Artificial Sequence: Synthetic oligonucleotide
  Antisense strand to SEQ ID NO: 2092730
uaaaguacucaggaaacag

SEQ ID NO: 2092732 - RNA, 19 nt, Artificial Sequence
  Description of Artificial Sequence: Synthetic oligonucleotide
  Sense strand starting at position 1738 of SEQ ID NO: 1882069
ccaaauacccuuugaugga

SEQ ID NO: 2092733 - RNA, 19 nt, Artificial Sequence
  Description of Artificial Sequence: Synthetic oligonucleotide
  Antisense strand to SEQ ID NO: 2092732
uccaucaaaggguauuugg

SEQ ID NO: 2092734 - RNA, 19 nt, Artificial Sequence
  Description of Artificial Sequence: Synthetic oligonucleotide
  Sense strand starting at position 1952 of SEQ ID NO: 1882069
uuaaauaucugagucugau

SEQ ID NO: 2092735 - RNA, 19 nt, Artificial Sequence
  Description of Artificial Sequence: Synthetic oligonucleotide
  Antisense strand to SEQ ID NO: 2092734
aucagacucagauauuuaa

SEQ ID NO: 2092736 - RNA, 19 nt, Artificial Sequence
  Description of Artificial Sequence: Synthetic oligonucleotide
  Sense strand starting at position 1955 of SEQ ID NO: 1882069
aauaucugagucugaugaa

SEQ ID NO: 2092737 - RNA, 19 nt, Artificial Sequence
  Description of Artificial Sequence: Synthetic oligonucleotide
  Antisense strand to SEQ ID NO: 2092736
uucaucagacucagauauu

SEQ ID NO: 2092738 - RNA, 19 nt, Artificial Sequence
  Description of Artificial Sequence: Synthetic oligonucleotide
  Sense strand starting at position 1965 of SEQ ID NO: 1882069
ucugaugaaucauuagguu

SEQ ID NO: 2092739 - RNA, 19 nt, Artificial Sequence
  Description of Artificial Sequence: Synthetic oligonucleotide
  Antisense strand to SEQ ID NO: 2092738
aaccuaaugauucaucaga

SEQ ID NO: 2092740 - RNA, 19 nt, Artificial Sequence
  Description of Artificial Sequence: Synthetic oligonucleotide
  Sense strand starting at position 1969 of SEQ ID NO: 1882069
augaaucauuagguuccaa

SEQ ID NO: 2092741 - RNA, 19 nt, Artificial Sequence
  Description of Artificial Sequence: Synthetic oligonucleotide
  Antisense strand to SEQ ID NO: 2092740
uuggaaccuaaugauucau

SEQ ID NO: 2092742 - RNA, 19 nt, Artificial Sequence
  Description of Artificial Sequence: Synthetic oligonucleotide
  Sense strand starting at position 2023 of SEQ ID NO: 1882069
uuacucagauaugugcaaa

SEQ ID NO: 2092743 - RNA, 19 nt, Artificial Sequence
  Description of Artificial Sequence: Synthetic oligonucleotide
  Antisense strand to SEQ ID NO: 2092742
uuugcacauaucugaguaa

SEQ ID NO: 2092744 - RNA, 19 nt, Artificial Sequence
  Description of Artificial Sequence: Synthetic oligonucleotide
  Sense strand starting at position 2107 of SEQ ID NO: 1882069
gugaaugauuaagucaaca

SEQ ID NO: 2092745 - RNA, 19 nt, Artificial Sequence
  Description of Artificial Sequence: Synthetic oligonucleotide
  Antisense strand to SEQ ID NO: 2092744
uguugacuuaaucauucac

SEQ ID NO: 2092746 - RNA, 19 nt, Artificial Sequence
  Description of Artificial Sequence: Synthetic oligonucleotide
  Sense strand starting at position 2409 of SEQ ID NO: 1882069
agagguagcaaucauguaa

SEQ ID NO: 2092747 - RNA, 19 nt, Artificial Sequence
  Description of Artificial Sequence: Synthetic oligonucleotide
  Antisense strand to SEQ ID NO: 2092746
uuacaugauugcuaccucu

SEQ ID NO: 2092748 - RNA, 19 nt, Artificial Sequence
  Description of Artificial Sequence: Synthetic oligonucleotide
  Sense strand starting at position 2661 of SEQ ID NO: 1882069
guucguuuccuugcuuaac

SEQ ID NO: 2092749 - RNA, 19 nt, Artificial Sequence
  Description of Artificial Sequence: Synthetic oligonucleotide
  Antisense strand to SEQ ID NO: 2092748
guuaagcaaggaaacgaac

SEQ ID NO: 2092750 - RNA, 19 nt, Artificial Sequence
  Description of Artificial Sequence: Synthetic oligonucleotide
  Sense strand starting at position 2720 of SEQ ID NO: 1882069
guuaacagagcuggugaau

SEQ ID NO: 2092751 - RNA, 19 nt, Artificial Sequence
  Description of Artificial Sequence: Synthetic oligonucleotide
  Antisense strand to SEQ ID NO: 2092750
auucaccagcucuguuaac

SEQ ID NO: 2092752 - RNA, 19 nt, Artificial Sequence
  Description of Artificial Sequence: Synthetic oligonucleotide
  Sense strand starting at position 2726 of SEQ ID NO: 1882069
agagcuggugaaugguaaa

SEQ ID NO: 2092753 - RNA, 19 nt, Artificial Sequence
  Description of Artificial Sequence: Synthetic oligonucleotide
  Antisense strand to SEQ ID NO: 2092752
uuuaccauucaccagcucu

SEQ ID NO: 2092754 - RNA, 19 nt, Artificial Sequence
  Description of Artificial Sequence: Synthetic oligonucleotide
  Sense strand starting at position 2760 of SEQ ID NO: 1882069
gaggcaucuuuacuacaga

SEQ ID NO: 2092755 - RNA, 19 nt, Artificial Sequence
  Description of Artificial Sequence: Synthetic oligonucleotide
  Antisense strand to SEQ ID NO: 2092754
ucuguaguaaagaugccuc

SEQ ID NO: 2092756 - RNA, 19 nt, Artificial Sequence
  Description of Artificial Sequence: Synthetic oligonucleotide
  Sense strand starting at position 2917 of SEQ ID NO: 1882069
aggacagaaugcuuaguca

SEQ ID NO: 2092757 - RNA, 19 nt, Artificial Sequence
  Description of Artificial Sequence: Synthetic oligonucleotide
  Antisense strand to SEQ ID NO: 2092756
ugacuaagcauucuguccu

SEQ ID NO: 2092758 - RNA, 19 nt, Artificial Sequence
  Description of Artificial Sequence: Synthetic oligonucleotide
  Sense strand starting at position 3002 of SEQ ID NO: 1882069
gguaauauaugacuguacu

SEQ ID NO: 2092759 - RNA, 19 nt, Artificial Sequence
  Description of Artificial Sequence: Synthetic oligonucleotide
  Antisense strand to SEQ ID NO: 2092758
aguacagucauauauuacc

SEQ ID NO: 2092760 - RNA, 19 nt, Artificial Sequence
  Description of Artificial Sequence: Synthetic oligonucleotide
  Sense strand starting at position 3003 of SEQ ID NO: 1882069
guaauauaugacuguacuc

SEQ ID NO: 2092761 - RNA, 19 nt, Artificial Sequence
  Description of Artificial Sequence: Synthetic oligonucleotide
  Antisense strand to SEQ ID NO: 2092760
gaguacagucauauauuac

SEQ ID NO: 2092762 - RNA, 19 nt, Artificial Sequence
  Description of Artificial Sequence: Synthetic oligonucleotide
  Sense strand starting at position 3008 of SEQ ID NO: 1882069
auaugacuguacucuacau

SEQ ID NO: 2092763 - RNA, 19 nt, Artificial Sequence
  Description of Artificial Sequence: Synthetic oligonucleotide
  Antisense strand to SEQ ID NO: 2092762
auguagaguacagucauau

SEQ ID NO: 2092764 - RNA, 19 nt, Artificial Sequence
  Description of Artificial Sequence: Synthetic oligonucleotide
  Sense strand starting at position 3357 of SEQ ID NO: 1882069
agauuaguuuggcuacaca

SEQ ID NO: 2092765 - RNA, 19 nt, Artificial Sequence
  Description of Artificial Sequence: Synthetic oligonucleotide
  Antisense strand to SEQ ID NO: 2092764
uguguagccaaacuaaucu

SEQ ID NO: 2092766 - RNA, 19 nt, Artificial Sequence
  Description of Artificial Sequence: Synthetic oligonucleotide
  Sense strand starting at position 3420 of SEQ ID NO: 1882069
uuauuucucguguaagucu

SEQ ID NO: 2092767 - RNA, 19 nt, Artificial Sequence
  Description of Artificial Sequence: Synthetic oligonucleotide
  Antisense strand to SEQ ID NO: 2092766
agacuuacacgagaaauaa

SEQ ID NO: 2092768 - RNA, 19 nt, Artificial Sequence
  Description of Artificial Sequence: Synthetic oligonucleotide
  Sense strand starting at position 3428 of SEQ ID NO: 1882069
cguguaagucuugagauag

SEQ ID NO: 2092769 - RNA, 19 nt, Artificial Sequence
  Description of Artificial Sequence: Synthetic oligonucleotide
  Antisense strand to SEQ ID NO: 2092768
cuaucucaagacuuacacg

SEQ ID NO: 2092770 - RNA, 19 nt, Artificial Sequence
  Description of Artificial Sequence: Synthetic oligonucleotide
  Sense strand starting at position 3436 of SEQ ID NO: 1882069
ucuugagauaggugguuau

SEQ ID NO: 2092771 - RNA, 19 nt, Artificial Sequence
  Description of Artificial Sequence: Synthetic oligonucleotide
  Antisense strand to SEQ ID NO: 2092770
auaaccaccuaucucaaga

SEQ ID NO: 2092772 - RNA, 19 nt, Artificial Sequence
  Description of Artificial Sequence: Synthetic oligonucleotide
  Sense strand starting at position 3440 of SEQ ID NO: 1882069
gagauaggugguuauggca

SEQ ID NO: 2092773 - RNA, 19 nt, Artificial Sequence
  Description of Artificial Sequence: Synthetic oligonucleotide
  Antisense strand to SEQ ID NO: 2092772
ugccauaaccaccuaucuc

SEQ ID NO: 2092774 - RNA, 19 nt, Artificial Sequence
  Description of Artificial Sequence: Synthetic oligonucleotide
  Sense strand starting at position 3524 of SEQ ID NO: 1882069
ccuuauguuccaggacaga

SEQ ID NO: 2092775 - RNA, 19 nt, Artificial Sequence
  Description of Artificial Sequence: Synthetic oligonucleotide
  Antisense strand to SEQ ID NO: 2092774
ucuguccuggaacauaagg

SEQ ID NO: 2092776 - RNA, 19 nt, Artificial Sequence
  Description of Artificial Sequence: Synthetic oligonucleotide
  Sense strand starting at position 3979 of SEQ ID NO: 1882069
aguucuuuaugaccagaua

SEQ ID NO: 2092777 - RNA, 19 nt, Artificial Sequence
  Description of Artificial Sequence: Synthetic oligonucleotide
  Antisense strand to SEQ ID NO: 2092776
uaucuggucauaaagaacu

SEQ ID NO: 2092778 - RNA, 19 nt, Artificial Sequence
  Description of Artificial Sequence: Synthetic oligonucleotide
  Sense strand starting at position 3982 of SEQ ID NO: 1882069
ucuuuaugaccagauagca

SEQ ID NO: 2092779 - RNA, 19 nt, Artificial Sequence
  Description of Artificial Sequence: Synthetic oligonucleotide
  Antisense strand to SEQ ID NO: 2092778
ugcuaucuggucauaaaga

SEQ ID NO: 2092780 - RNA, 19 nt, Artificial Sequence
  Description of Artificial Sequence: Synthetic oligonucleotide
  Sense strand starting at position 3 of SEQ ID NO: 1882070
ggaugugucuucuuaaaca

SEQ ID NO: 2092781 - RNA, 19 nt, Artificial Sequence
  Description of Artificial Sequence: Synthetic oligonucleotide
  Antisense strand to SEQ ID NO: 2092780
uguuuaagaagacacaucc

SEQ ID NO: 2092782 - RNA, 19 nt, Artificial Sequence
  Description of Artificial Sequence: Synthetic oligonucleotide
  Sense strand starting at position 48 of SEQ ID NO: 1882070
uuuggagggccugacuuaa

SEQ ID NO: 2092783 - RNA, 19 nt, Artificial Sequence
  Description of Artificial Sequence: Synthetic oligonucleotide
  Antisense strand to SEQ ID NO: 2092782
uuaagucaggcccuccaaa

SEQ ID NO: 2092784 - RNA, 19 nt, Artificial Sequence
  Description of Artificial Sequence: Synthetic oligonucleotide
  Sense strand starting at position 82 of SEQ ID NO: 1882070
gcaugccuacaagaguuaa

SEQ ID NO: 2092785 - RNA, 19 nt, Artificial Sequence
  Description of Artificial Sequence: Synthetic oligonucleotide
  Antisense strand to SEQ ID NO: 2092784
uuaacucuuguaggcaugc

SEQ ID NO: 2092786 - RNA, 19 nt, Artificial Sequence
  Description of Artificial Sequence: Synthetic oligonucleotide
  Sense strand starting at position 157 of SEQ ID NO: 1882070
aucauaaucgcucagaaca

SEQ ID NO: 2092787 - RNA, 19 nt, Artificial Sequence
  Description of Artificial Sequence: Synthetic oligonucleotide
  Antisense strand to SEQ ID NO: 2092786
uguucugagcgauuaugau

SEQ ID NO: 2092788 - RNA, 19 nt, Artificial Sequence
  Description of Artificial Sequence: Synthetic oligonucleotide
  Sense strand starting at position 193 of SEQ ID NO: 1882070
gaugaaagguuucuccaag

SEQ ID NO: 2092789 - RNA, 19 nt, Artificial Sequence
  Description of Artificial Sequence: Synthetic oligonucleotide
  Antisense strand to SEQ ID NO: 2092788
cuuggagaaaccuuucauc

SEQ ID NO: 2092790 - RNA, 19 nt, Artificial Sequence
  Description of Artificial Sequence: Synthetic oligonucleotide
  Sense strand starting at position 194 of SEQ ID NO: 1882070
augaaagguuucuccaagu

SEQ ID NO: 2092791 - RNA, 19 nt, Artificial Sequence
  Description of Artificial Sequence: Synthetic oligonucleotide
  Antisense strand to SEQ ID NO: 2092790
acuuggagaaaccuuucau

SEQ ID NO: 2092792 - RNA, 19 nt, Artificial Sequence
  Description of Artificial Sequence: Synthetic oligonucleotide
  Sense strand starting at position 248 of SEQ ID NO: 1882070
cucguaugugaagagugaa

SEQ ID NO: 2092793 - RNA, 19 nt, Artificial Sequence
  Description of Artificial Sequence: Synthetic oligonucleotide
  Antisense strand to SEQ ID NO: 2092792
uucacucuucacauacgag

SEQ ID NO: 2092794 - RNA, 19 nt, Artificial Sequence
  Description of Artificial Sequence: Synthetic oligonucleotide
  Sense strand starting at position 370 of SEQ ID NO: 1882070
ugcuuaguucacgugcaga

SEQ ID NO: 2092795 - RNA, 19 nt, Artificial Sequence
  Description of Artificial Sequence: Synthetic oligonucleotide
  Antisense strand to SEQ ID NO: 2092794
ucugcacgugaacuaagca

SEQ ID NO: 2092796 - RNA, 19 nt, Artificial Sequence
  Description of Artificial Sequence: Synthetic oligonucleotide
  Sense strand starting at position 383 of SEQ ID NO: 1882070
ugcagauauuuguuggcaa

SEQ ID NO: 2092797 - RNA, 19 nt, Artificial Sequence
  Description of Artificial Sequence: Synthetic oligonucleotide
  Antisense strand to SEQ ID NO: 2092796
uugccaacaaauaucugca

SEQ ID NO: 2092798 - RNA, 19 nt, Artificial Sequence
  Description of Artificial Sequence: Synthetic oligonucleotide
  Sense strand starting at position 483 of SEQ ID NO: 1882070
ugaugauuaugugcaagau

SEQ ID NO: 2092799 - RNA, 19 nt, Artificial Sequence
  Description of Artificial Sequence: Synthetic oligonucleotide
  Antisense strand to SEQ ID NO: 2092798
aucuugcacauaaucauca

SEQ ID NO: 2092800 - RNA, 19 nt, Artificial Sequence
  Description of Artificial Sequence: Synthetic oligonucleotide
  Sense strand starting at position 484 of SEQ ID NO: 1882070
gaugauuaugugcaagauc

SEQ ID NO: 2092801 - RNA, 19 nt, Artificial Sequence
  Description of Artificial Sequence: Synthetic oligonucleotide
  Antisense strand to SEQ ID NO: 2092800
gaucuugcacauaaucauc

SEQ ID NO: 2092802 - RNA, 19 nt, Artificial Sequence
  Description of Artificial Sequence: Synthetic oligonucleotide
  Sense strand starting at position 487 of SEQ ID NO: 1882070
gauuaugugcaagaucaau

SEQ ID NO: 2092803 - RNA, 19 nt, Artificial Sequence
  Description of Artificial Sequence: Synthetic oligonucleotide
  Antisense strand to SEQ ID NO: 2092802
auugaucuugcacauaauc

SEQ ID NO: 2092804 - RNA, 19 nt, Artificial Sequence
  Description of Artificial Sequence: Synthetic oligonucleotide
  Sense strand starting at position 511 of SEQ ID NO: 1882070
agugaaaguauguaguauu

SEQ ID NO: 2092805 - RNA, 19 nt, Artificial Sequence
  Description of Artificial Sequence: Synthetic oligonucleotide
  Antisense strand to SEQ ID NO: 2092804
aauacuacauacuuucacu

SEQ ID NO: 2092806 - RNA, 19 nt, Artificial Sequence
  Description of Artificial Sequence: Synthetic oligonucleotide
  Sense strand starting at position 685 of SEQ ID NO: 1882070
aacgacuaugcucaaggua

SEQ ID NO: 2092807 - RNA, 19 nt, Artificial Sequence
  Description of Artificial Sequence: Synthetic oligonucleotide
  Antisense strand to SEQ ID NO: 2092806
uaccuugagcauagucguu

SEQ ID NO: 2092808 - RNA, 19 nt, Artificial Sequence
  Description of Artificial Sequence: Synthetic oligonucleotide
  Sense strand starting at position 807 of SEQ ID NO: 1882070
cuguuaacaguaggagaaa

SEQ ID NO: 2092809 - RNA, 19 nt, Artificial Sequence
  Description of Artificial Sequence: Synthetic oligonucleotide
  Antisense strand to SEQ ID NO: 2092808
uuucuccuacuguuaacag

SEQ ID NO: 2092810 - RNA, 19 nt, Artificial Sequence
  Description of Artificial Sequence: Synthetic oligonucleotide
  Sense strand starting at position 947 of SEQ ID NO: 1882070
gaggguaaucgugaagcaa

SEQ ID NO: 2092811 - RNA, 19 nt, Artificial Sequence
  Description of Artificial Sequence: Synthetic oligonucleotide
  Antisense strand to SEQ ID NO: 2092810
uugcuucacgauuacccuc

SEQ ID NO: 2092812 - RNA, 19 nt, Artificial Sequence
  Description of Artificial Sequence: Synthetic oligonucleotide
  Sense strand starting at position 951 of SEQ ID NO: 1882070
guaaucgugaagcaagauu

SEQ ID NO: 2092813 - RNA, 19 nt, Artificial Sequence
  Description of Artificial Sequence: Synthetic oligonucleotide
  Antisense strand to SEQ ID NO: 2092812
aaucuugcuucacgauuac

SEQ ID NO: 2092814 - RNA, 19 nt, Artificial Sequence
  Description of Artificial Sequence: Synthetic oligonucleotide
  Sense strand starting at position 1098 of SEQ ID NO: 1882070
cauguaaaccaguagguca

SEQ ID NO: 2092815 - RNA, 19 nt, Artificial Sequence
  Description of Artificial Sequence: Synthetic oligonucleotide
  Antisense strand to SEQ ID NO: 2092814
ugaccuacugguuuacaug

SEQ ID NO: 2092816 - RNA, 19 nt, Artificial Sequence
  Description of Artificial Sequence: Synthetic oligonucleotide
  Sense strand starting at position 1130 of SEQ ID NO: 1882070
aauguauucccacagugag

SEQ ID NO: 2092817 - RNA, 19 nt, Artificial Sequence
  Description of Artificial Sequence: Synthetic oligonucleotide
  Antisense strand to SEQ ID NO: 2092816
cucacugugggaauacauu

SEQ ID NO: 2092818 - RNA, 19 nt, Artificial Sequence
  Description of Artificial Sequence: Synthetic oligonucleotide
  Sense strand starting at position 1133 of SEQ ID NO: 1882070
guauucccacagugagaua

SEQ ID NO: 2092819 - RNA, 19 nt, Artificial Sequence
  Description of Artificial Sequence: Synthetic oligonucleotide
  Antisense strand to SEQ ID NO: 2092818
uaucucacugugggaauac

SEQ ID NO: 2092820 - RNA, 19 nt, Artificial Sequence
  Description of Artificial Sequence: Synthetic oligonucleotide
  Sense strand starting at position 1200 of SEQ ID NO: 1882070
uuaugagugcucuaaggua

SEQ ID NO: 2092821 - RNA, 19 nt, Artificial Sequence
  Description of Artificial Sequence: Synthetic oligonucleotide
  Antisense strand to SEQ ID NO: 2092820
uaccuuagagcacucauaa

SEQ ID NO: 2092822 - RNA, 19 nt, Artificial Sequence
  Description of Artificial Sequence: Synthetic oligonucleotide
  Sense strand starting at position 1607 of SEQ ID NO: 1882070
uugaguauggccuacaaag

SEQ ID NO: 2092823 - RNA, 19 nt, Artificial Sequence
  Description of Artificial Sequence: Synthetic oligonucleotide
  Antisense strand to SEQ ID NO: 2092822
cuuuguaggccauacucaa

SEQ ID NO: 2092824 - RNA, 19 nt, Artificial Sequence
  Description of Artificial Sequence: Synthetic oligonucleotide
  Sense strand starting at position 1668 of SEQ ID NO: 1882070
ccaugagcuugaucagaac

SEQ ID NO: 2092825 - RNA, 19 nt, Artificial Sequence
  Description of Artificial Sequence: Synthetic oligonucleotide
  Antisense strand to SEQ ID NO: 2092824
guucugaucaagcucaugg

SEQ ID NO: 2092826 - RNA, 19 nt, Artificial Sequence
  Description of Artificial Sequence: Synthetic oligonucleotide
  Sense strand starting at position 1690 of SEQ ID NO: 1882070
aaauaccaucuguggugaa

SEQ ID NO: 2092827 - RNA, 19 nt, Artificial Sequence
  Description of Artificial Sequence: Synthetic oligonucleotide
  Antisense strand to SEQ ID NO: 2092826
uucaccacagaugguauuu

SEQ ID NO: 2092828 - RNA, 19 nt, Artificial Sequence
  Description of Artificial Sequence: Synthetic oligonucleotide
  Sense strand starting at position 1792 of SEQ ID NO: 1882070
uuggauguugcagagaugu

SEQ ID NO: 2092829 - RNA, 19 nt, Artificial Sequence
  Description of Artificial Sequence: Synthetic oligonucleotide
  Antisense strand to SEQ ID NO: 2092828
acaucucugcaacauccaa

SEQ ID NO: 2092830 - RNA, 19 nt, Artificial Sequence
  Description of Artificial Sequence: Synthetic oligonucleotide
  Sense strand starting at position 1794 of SEQ ID NO: 1882070
ggauguugcagagauguca

SEQ ID NO: 2092831 - RNA, 19 nt, Artificial Sequence
  Description of Artificial Sequence: Synthetic oligonucleotide
  Antisense strand to SEQ ID NO: 2092830
ugacaucucugcaacaucc

SEQ ID NO: 2092832 - RNA, 19 nt, Artificial Sequence
  Description of Artificial Sequence: Synthetic oligonucleotide
  Sense strand starting at position 1806 of SEQ ID NO: 1882070
gaugucagauugcuauaaa

SEQ ID NO: 2092833 - RNA, 19 nt, Artificial Sequence
  Description of Artificial Sequence: Synthetic oligonucleotide
  Antisense strand to SEQ ID NO: 2092832
uuuauagcaaucugacauc

SEQ ID NO: 2092834 - RNA, 19 nt, Artificial Sequence
  Description of Artificial Sequence: Synthetic oligonucleotide
  Sense strand starting at position 1850 of SEQ ID NO: 1882070
cuguauuuaucuucuugca

SEQ ID NO: 2092835 - RNA, 19 nt, Artificial Sequence
  Description of Artificial Sequence: Synthetic oligonucleotide
  Antisense strand to SEQ ID NO: 2092834
ugcaagaagauaaauacag

SEQ ID NO: 2092836 - RNA, 19 nt, Artificial Sequence
  Description of Artificial Sequence: Synthetic oligonucleotide
  Sense strand starting at position 1852 of SEQ ID NO: 1882070
guauuuaucuucuugcaua

SEQ ID NO: 2092837 - RNA, 19 nt, Artificial Sequence
  Description of Artificial Sequence: Synthetic oligonucleotide
  Antisense strand to SEQ ID NO: 2092836
uaugcaagaagauaaauac

SEQ ID NO: 2092838 - RNA, 19 nt, Artificial Sequence
  Description of Artificial Sequence: Synthetic oligonucleotide
  Sense strand starting at position 2054 of SEQ ID NO: 1882070
ucgauaugaugaccacuaa

SEQ ID NO: 2092839 - RNA, 19 nt, Artificial Sequence
  Description of Artificial Sequence: Synthetic oligonucleotide
  Antisense strand to SEQ ID NO: 2092838
uuaguggucaucauaucga

SEQ ID NO: 2092840 - RNA, 19 nt, Artificial Sequence
  Description of Artificial Sequence: Synthetic oligonucleotide
  Sense strand starting at position 2707 of SEQ ID NO: 1882070
ugaguccuugcacagacaa

SEQ ID NO: 2092841 - RNA, 19 nt, Artificial Sequence
  Description of Artificial Sequence: Synthetic oligonucleotide
  Antisense strand to SEQ ID NO: 2092840
uugucugugcaaggacuca

SEQ ID NO: 2092842 - RNA, 19 nt, Artificial Sequence
  Description of Artificial Sequence: Synthetic oligonucleotide
  Sense strand starting at position 2827 of SEQ ID NO: 1882070
auagcaaaguuccuugaua

SEQ ID NO: 2092843 - RNA, 19 nt, Artificial Sequence
  Description of Artificial Sequence: Synthetic oligonucleotide
  Antisense strand to SEQ ID NO: 2092842
uaucaaggaacuuugcuau

SEQ ID NO: 2092844 - RNA, 19 nt, Artificial Sequence
  Description of Artificial Sequence: Synthetic oligonucleotide
  Sense strand starting at position 2906 of SEQ ID NO: 1882070
auaugauacuccuugguuu

SEQ ID NO: 2092845 - RNA, 19 nt, Artificial Sequence
  Description of Artificial Sequence: Synthetic oligonucleotide
  Antisense strand to SEQ ID NO: 2092844
aaaccaaggaguaucauau

SEQ ID NO: 2092846 - RNA, 19 nt, Artificial Sequence
  Description of Artificial Sequence: Synthetic oligonucleotide
  Sense strand starting at position 3021 of SEQ ID NO: 1882070
aucuuuaucucucuaggga

SEQ ID NO: 2092847 - RNA, 19 nt, Artificial Sequence
  Description of Artificial Sequence: Synthetic oligonucleotide
  Antisense strand to SEQ ID NO: 2092846
ucccuagagagauaaagau

SEQ ID NO: 2092848 - RNA, 19 nt, Artificial Sequence
  Description of Artificial Sequence: Synthetic oligonucleotide
  Sense strand starting at position 3024 of SEQ ID NO: 1882070
uuuaucucucuagggaaau

SEQ ID NO: 2092849 - RNA, 19 nt, Artificial Sequence
  Description of Artificial Sequence: Synthetic oligonucleotide
  Antisense strand to SEQ ID NO: 2092848
auuucccuagagagauaaa

SEQ ID NO: 2092850 - RNA, 19 nt, Artificial Sequence
  Description of Artificial Sequence: Synthetic oligonucleotide
  Sense strand starting at position 3110 of SEQ ID NO: 1882070
agaugaaacucuguuauug

SEQ ID NO: 2092851 - RNA, 19 nt, Artificial Sequence
  Description of Artificial Sequence: Synthetic oligonucleotide
  Antisense strand to SEQ ID NO: 2092850
caauaacagaguuucaucu

SEQ ID NO: 2092852 - RNA, 19 nt, Artificial Sequence
  Description of Artificial Sequence: Synthetic oligonucleotide
  Sense strand starting at position 3148 of SEQ ID NO: 1882070
uuaggugucagaugauaaa

SEQ ID NO: 2092853 - RNA, 19 nt, Artificial Sequence
  Description of Artificial Sequence: Synthetic oligonucleotide
  Antisense strand to SEQ ID NO: 2092852
uuuaucaucugacaccuaa

SEQ ID NO: 2092854 - RNA, 19 nt, Artificial Sequence
  Description of Artificial Sequence: Synthetic oligonucleotide
  Sense strand starting at position 3310 of SEQ ID NO: 1882070
cuugcuuuauuuguuguua

SEQ ID NO: 2092855 - RNA, 19 nt, Artificial Sequence
  Description of Artificial Sequence: Synthetic oligonucleotide
  Antisense strand to SEQ ID NO: 2092854
uaacaacaaauaaagcaag

SEQ ID NO: 2092856 - RNA, 19 nt, Artificial Sequence
  Description of Artificial Sequence: Synthetic oligonucleotide
  Sense strand starting at position 3322 of SEQ ID NO: 1882070
guuguuacagaagaauguu

SEQ ID NO: 2092857 - RNA, 19 nt, Artificial Sequence
  Description of Artificial Sequence: Synthetic oligonucleotide
  Antisense strand to SEQ ID NO: 2092856
aacauucuucuguaacaac

SEQ ID NO: 2092858 - RNA, 19 nt, Artificial Sequence
  Description of Artificial Sequence: Synthetic oligonucleotide
  Sense strand starting at position 3899 of SEQ ID NO: 1882070
ugagguaaauccucauuag

SEQ ID NO: 2092859 - RNA, 19 nt, Artificial Sequence
  Description of Artificial Sequence: Synthetic oligonucleotide
  Antisense strand to SEQ ID NO: 2092858
cuaaugaggauuuaccuca

SEQ ID NO: 2092860 - RNA, 19 nt, Artificial Sequence
  Description of Artificial Sequence: Synthetic oligonucleotide
  Sense strand starting at position 213 of SEQ ID NO: 1882071
cagagaguggcauaaaggu

SEQ ID NO: 2092861 - RNA, 19 nt, Artificial Sequence
  Description of Artificial Sequence: Synthetic oligonucleotide
  Antisense strand to SEQ ID NO: 2092860
accuuuaugccacucucug

SEQ ID NO: 2092862 - RNA, 19 nt, Artificial Sequence
  Description of Artificial Sequence: Synthetic oligonucleotide
  Sense strand starting at position 288 of SEQ ID NO: 1882071
ccaagaaagcacuggucaa

SEQ ID NO: 2092863 - RNA, 19 nt, Artificial Sequence
  Description of Artificial Sequence: Synthetic oligonucleotide
  Antisense strand to SEQ ID NO: 2092862
uugaccagugcuuucuugg

SEQ ID NO: 2092864 - RNA, 19 nt, Artificial Sequence
  Description of Artificial Sequence: Synthetic oligonucleotide
  Sense strand starting at position 370 of SEQ ID NO: 1882071
gcaacaucaccuggaaaca

SEQ ID NO: 2092865 - RNA, 19 nt, Artificial Sequence
  Description of Artificial Sequence: Synthetic oligonucleotide
  Antisense strand to SEQ ID NO: 2092864
uguuuccaggugauguugc

SEQ ID NO: 2092866 - RNA, 19 nt, Artificial Sequence
  Description of Artificial Sequence: Synthetic oligonucleotide
  Sense strand starting at position 749 of SEQ ID NO: 1882071
uauaaucgugcugagagaa

SEQ ID NO: 2092867 - RNA, 19 nt, Artificial Sequence
  Description of Artificial Sequence: Synthetic oligonucleotide
  Antisense strand to SEQ ID NO: 2092866
uucucucagcacgauuaua

SEQ ID NO: 2092868 - RNA, 19 nt, Artificial Sequence
  Description of Artificial Sequence: Synthetic oligonucleotide
  Sense strand starting at position 1350 of SEQ ID NO: 1882071
auagaaauguucccugagu

SEQ ID NO: 2092869 - RNA, 19 nt, Artificial Sequence
  Description of Artificial Sequence: Synthetic oligonucleotide
  Antisense strand to SEQ ID NO: 2092868
acucagggaacauuucuau

SEQ ID NO: 2092870 - RNA, 19 nt, Artificial Sequence
  Description of Artificial Sequence: Synthetic oligonucleotide
  Sense strand starting at position 1351 of SEQ ID NO: 1882071
uagaaauguucccugaguc

SEQ ID NO: 2092871 - RNA, 19 nt, Artificial Sequence
  Description of Artificial Sequence: Synthetic oligonucleotide
  Antisense strand to SEQ ID NO: 2092870
gacucagggaacauuucua

SEQ ID NO: 2092872 - RNA, 19 nt, Artificial Sequence
  Description of Artificial Sequence: Synthetic oligonucleotide
  Sense strand starting at position 1352 of SEQ ID NO: 1882071
agaaauguucccugagucu

SEQ ID NO: 2092873 - RNA, 19 nt, Artificial Sequence
  Description of Artificial Sequence: Synthetic oligonucleotide
  Antisense strand to SEQ ID NO: 2092872
agacucagggaacauuucu

SEQ ID NO: 2092874 - RNA, 19 nt, Artificial Sequence
  Description of Artificial Sequence: Synthetic oligonucleotide
  Sense strand starting at position 1363 of SEQ ID NO: 1882071
cugagucucacugggacaa

SEQ ID NO: 2092875 - RNA, 19 nt, Artificial Sequence
  Description of Artificial Sequence: Synthetic oligonucleotide
  Antisense strand to SEQ ID NO: 2092874
uugucccagugagacucag

SEQ ID NO: 2092876 - RNA, 19 nt, Artificial Sequence
  Description of Artificial Sequence: Synthetic oligonucleotide
  Sense strand starting at position 1390 of SEQ ID NO: 1882071
gcaauagcuuuaccagaau

SEQ ID NO: 2092877 - RNA, 19 nt, Artificial Sequence
  Description of Artificial Sequence: Synthetic oligonucleotide
  Antisense strand to SEQ ID NO: 2092876
auucugguaaagcuauugc

SEQ ID NO: 2092878 - RNA, 19 nt, Artificial Sequence
  Description of Artificial Sequence: Synthetic oligonucleotide
  Sense strand starting at position 1393 of SEQ ID NO: 1882071
auagcuuuaccagaauguu

SEQ ID NO: 2092879 - RNA, 19 nt, Artificial Sequence
  Description of Artificial Sequence: Synthetic oligonucleotide
  Antisense strand to SEQ ID NO: 2092878
aacauucugguaaagcuau

SEQ ID NO: 2092880 - RNA, 19 nt, Artificial Sequence
  Description of Artificial Sequence: Synthetic oligonucleotide
  Sense strand starting at position 1414 of SEQ ID NO: 1882071
gugaauaugguaugauauc

SEQ ID NO: 2092881 - RNA, 19 nt, Artificial Sequence
  Description of Artificial Sequence: Synthetic oligonucleotide
  Antisense strand to SEQ ID NO: 2092880
gauaucauaccauauucac

SEQ ID NO: 2092882 - RNA, 19 nt, Artificial Sequence
  Description of Artificial Sequence: Synthetic oligonucleotide
  Sense strand starting at position 1503 of SEQ ID NO: 1882071
auaauugcacauggauaua

SEQ ID NO: 2092883 - RNA, 19 nt, Artificial Sequence
  Description of Artificial Sequence: Synthetic oligonucleotide
  Antisense strand to SEQ ID NO: 2092882
uauauccaugugcaauuau

SEQ ID NO: 2092884 - RNA, 19 nt, Artificial Sequence
  Description of Artificial Sequence: Synthetic oligonucleotide
  Sense strand starting at position 1513 of SEQ ID NO: 1882071
auggauauauugccuuaua

SEQ ID NO: 2092885 - RNA, 19 nt, Artificial Sequence
  Description of Artificial Sequence: Synthetic oligonucleotide
  Antisense strand to SEQ ID NO: 2092884
uauaaggcaauauauccau

SEQ ID NO: 2092886 - RNA, 19 nt, Artificial Sequence
  Description of Artificial Sequence: Synthetic oligonucleotide
  Sense strand starting at position 1514 of SEQ ID NO: 1882071
uggauauauugccuuauau

SEQ ID NO: 2092887 - RNA, 19 nt, Artificial Sequence
  Description of Artificial Sequence: Synthetic oligonucleotide
  Antisense strand to SEQ ID NO: 2092886
auauaaggcaauauaucca

SEQ ID NO: 2092888 - RNA, 19 nt, Artificial Sequence
  Description of Artificial Sequence: Synthetic oligonucleotide
  Sense strand starting at position 1958 of SEQ ID NO: 1882071
agauuaguaacugguugaa

SEQ ID NO: 2092889 - RNA, 19 nt, Artificial Sequence
  Description of Artificial Sequence: Synthetic oligonucleotide
  Antisense strand to SEQ ID NO: 2092888
uucaaccaguuacuaaucu

SEQ ID NO: 2092890 - RNA, 19 nt, Artificial Sequence
  Description of Artificial Sequence: Synthetic oligonucleotide
  Sense strand starting at position 1960 of SEQ ID NO: 1882071
auuaguaacugguugaaca

SEQ ID NO: 2092891 - RNA, 19 nt, Artificial Sequence
  Description of Artificial Sequence: Synthetic oligonucleotide
  Antisense strand to SEQ ID NO: 2092890
uguucaaccaguuacuaau

SEQ ID NO: 2092892 - RNA, 19 nt, Artificial Sequence
  Description of Artificial Sequence: Synthetic oligonucleotide
  Sense strand starting at position 1961 of SEQ ID NO: 1882071
uuaguaacugguugaacaa

SEQ ID NO: 2092893 - RNA, 19 nt, Artificial Sequence
  Description of Artificial Sequence: Synthetic oligonucleotide
  Antisense strand to SEQ ID NO: 2092892
uuguucaaccaguuacuaa

SEQ ID NO: 2092894 - RNA, 19 nt, Artificial Sequence
  Description of Artificial Sequence: Synthetic oligonucleotide
  Sense strand starting at position 2479 of SEQ ID NO: 1882071
caauauuauguaggugaca

SEQ ID NO: 2092895 - RNA, 19 nt, Artificial Sequence
  Description of Artificial Sequence: Synthetic oligonucleotide
  Antisense strand to SEQ ID NO: 2092894
ugucaccuacauaauauug

SEQ ID NO: 2092896 - RNA, 19 nt, Artificial Sequence
  Description of Artificial Sequence: Synthetic oligonucleotide
  Sense strand starting at position 2480 of SEQ ID NO: 1882071
aauauuauguaggugacaa

SEQ ID NO: 2092897 - RNA, 19 nt, Artificial Sequence
  Description of Artificial Sequence: Synthetic oligonucleotide
  Antisense strand to SEQ ID NO: 2092896
uugucaccuacauaauauu

SEQ ID NO: 2092898 - RNA, 19 nt, Artificial Sequence
  Description of Artificial Sequence: Synthetic oligonucleotide
  Sense strand starting at position 2481 of SEQ ID NO: 1882071
auauuauguaggugacaag

SEQ ID NO: 2092899 - RNA, 19 nt, Artificial Sequence
  Description of Artificial Sequence: Synthetic oligonucleotide
  Antisense strand to SEQ ID NO: 2092898
cuugucaccuacauaauau

SEQ ID NO: 2092900 - RNA, 19 nt, Artificial Sequence
  Description of Artificial Sequence: Synthetic oligonucleotide
  Sense strand starting at position 2590 of SEQ ID NO: 1882071
aggccauucccugauauua

SEQ ID NO: 2092901 - RNA, 19 nt, Artificial Sequence
  Description of Artificial Sequence: Synthetic oligonucleotide
  Antisense strand to SEQ ID NO: 2092900
uaauaucagggaauggccu

SEQ ID NO: 2092902 - RNA, 19 nt, Artificial Sequence
  Description of Artificial Sequence: Synthetic oligonucleotide
  Sense strand starting at position 2620 of SEQ ID NO: 1882071
aggugaaacuccuucuuuc

SEQ ID NO: 2092903 - RNA, 19 nt, Artificial Sequence
  Description of Artificial Sequence: Synthetic oligonucleotide
  Antisense strand to SEQ ID NO: 2092902
gaaagaaggaguuucaccu

SEQ ID NO: 2092904 - RNA, 19 nt, Artificial Sequence
  Description of Artificial Sequence: Synthetic oligonucleotide
  Sense strand starting at position 2719 of SEQ ID NO: 1882071
ucuuucugccauggacaga

SEQ ID NO: 2092905 - RNA, 19 nt, Artificial Sequence
  Description of Artificial Sequence: Synthetic oligonucleotide
  Antisense strand to SEQ ID NO: 2092904
ucuguccauggcagaaaga

SEQ ID NO: 2092906 - RNA, 19 nt, Artificial Sequence
  Description of Artificial Sequence: Synthetic oligonucleotide
  Sense strand starting at position 2802 of SEQ ID NO: 1882071
uccagcauugacugagaau

SEQ ID NO: 2092907 - RNA, 19 nt, Artificial Sequence
  Description of Artificial Sequence: Synthetic oligonucleotide
  Antisense strand to SEQ ID NO: 2092906
auucucagucaaugcugga

SEQ ID NO: 2092908 - RNA, 19 nt, Artificial Sequence
  Description of Artificial Sequence: Synthetic oligonucleotide
  Sense strand starting at position 2805 of SEQ ID NO: 1882071
agcauugacugagaauuua

SEQ ID NO: 2092909 - RNA, 19 nt, Artificial Sequence
  Description of Artificial Sequence: Synthetic oligonucleotide
  Antisense strand to SEQ ID NO: 2092908
uaaauucucagucaaugcu

SEQ ID NO: 2092910 - RNA, 19 nt, Artificial Sequence
  Description of Artificial Sequence: Synthetic oligonucleotide
  Sense strand starting at position 2874 of SEQ ID NO: 1882071
uugaguuccuacucucaga

SEQ ID NO: 2092911 - RNA, 19 nt, Artificial Sequence
  Description of Artificial Sequence: Synthetic oligonucleotide
  Antisense strand to SEQ ID NO: 2092910
ucugagaguaggaacucaa

SEQ ID NO: 2092912 - RNA, 19 nt, Artificial Sequence
  Description of Artificial Sequence: Synthetic oligonucleotide
  Sense strand starting at position 2924 of SEQ ID NO: 1882071
uccugaauccagugagauu

SEQ ID NO: 2092913 - RNA, 19 nt, Artificial Sequence
  Description of Artificial Sequence: Synthetic oligonucleotide
  Antisense strand to SEQ ID NO: 2092912
aaucucacuggauucagga

SEQ ID NO: 2092914 - RNA, 19 nt, Artificial Sequence
  Description of Artificial Sequence: Synthetic oligonucleotide
  Sense strand starting at position 2933 of SEQ ID NO: 1882071
cagugagauuaacugguau

SEQ ID NO: 2092915 - RNA, 19 nt, Artificial Sequence
  Description of Artificial Sequence: Synthetic oligonucleotide
  Antisense strand to SEQ ID NO: 2092914
auaccaguuaaucucacug

SEQ ID NO: 2092916 - RNA, 19 nt, Artificial Sequence
  Description of Artificial Sequence: Synthetic oligonucleotide
  Sense strand starting at position 2985 of SEQ ID NO: 1882071
uuguacagaucagcaauaa

SEQ ID NO: 2092917 - RNA, 19 nt, Artificial Sequence
  Description of Artificial Sequence: Synthetic oligonucleotide
  Antisense strand to SEQ ID NO: 2092916
uuauugcugaucuguacaa

SEQ ID NO: 2092918 - RNA, 19 nt, Artificial Sequence
  Description of Artificial Sequence: Synthetic oligonucleotide
  Sense strand starting at position 3022 of SEQ ID NO: 1882071
ugugguguccaugaacaag

SEQ ID NO: 2092919 - RNA, 19 nt, Artificial Sequence
  Description of Artificial Sequence: Synthetic oligonucleotide
  Antisense strand to SEQ ID NO: 2092918
cuuguucauggacaccaca

SEQ ID NO: 2092920 - RNA, 19 nt, Artificial Sequence
  Description of Artificial Sequence: Synthetic oligonucleotide
  Sense strand starting at position 3052 of SEQ ID NO: 1882071
gguccaagucuagacuuga

SEQ ID NO: 2092921 - RNA, 19 nt, Artificial Sequence
  Description of Artificial Sequence: Synthetic oligonucleotide
  Antisense strand to SEQ ID NO: 2092920
ucaagucuagacuuggacc

SEQ ID NO: 2092922 - RNA, 19 nt, Artificial Sequence
  Description of Artificial Sequence: Synthetic oligonucleotide
  Sense strand starting at position 3368 of SEQ ID NO: 1882071
agcaauucgccagaguaaa

SEQ ID NO: 2092923 - RNA, 19 nt, Artificial Sequence
  Description of Artificial Sequence: Synthetic oligonucleotide
  Antisense strand to SEQ ID NO: 2092922
uuuacucuggcgaauugcu

SEQ ID NO: 2092924 - RNA, 19 nt, Artificial Sequence
  Description of Artificial Sequence: Synthetic oligonucleotide
  Sense strand starting at position 3379 of SEQ ID NO: 1882071
agaguaaacuggcuguaua

SEQ ID NO: 2092925 - RNA, 19 nt, Artificial Sequence
  Description of Artificial Sequence: Synthetic oligonucleotide
  Antisense strand to SEQ ID NO: 2092924
uauacagccaguuuacucu

SEQ ID NO: 2092926 - RNA, 19 nt, Artificial Sequence
  Description of Artificial Sequence: Synthetic oligonucleotide
  Sense strand starting at position 3484 of SEQ ID NO: 1882071
aagauuguuccaggccuga

SEQ ID NO: 2092927 - RNA, 19 nt, Artificial Sequence
  Description of Artificial Sequence: Synthetic oligonucleotide
  Antisense strand to SEQ ID NO: 2092926
ucaggccuggaacaaucuu

SEQ ID NO: 2092928 - RNA, 19 nt, Artificial Sequence
  Description of Artificial Sequence: Synthetic oligonucleotide
  Sense strand starting at position 3570 of SEQ ID NO: 1882071
uggagccuccuugaguuaa

SEQ ID NO: 2092929 - RNA, 19 nt, Artificial Sequence
  Description of Artificial Sequence: Synthetic oligonucleotide
  Antisense strand to SEQ ID NO: 2092928
uuaacucaaggaggcucca

SEQ ID NO: 2092930 - RNA, 19 nt, Artificial Sequence
  Description of Artificial Sequence: Synthetic oligonucleotide
  Sense strand starting at position 3931 of SEQ ID NO: 1882071
agaagaccuuuccugcuaa

SEQ ID NO: 2092931 - RNA, 19 nt, Artificial Sequence
  Description of Artificial Sequence: Synthetic oligonucleotide
  Antisense strand to SEQ ID NO: 2092930
uuagcaggaaaggucuucu

SEQ ID NO: 2092932 - RNA, 19 nt, Artificial Sequence
  Description of Artificial Sequence: Synthetic oligonucleotide
  Sense strand starting at position 3957 of SEQ ID NO: 1882071
agaaccuaucuggguuacu

SEQ ID NO: 2092933 - RNA, 19 nt, Artificial Sequence
  Description of Artificial Sequence: Synthetic oligonucleotide
  Antisense strand to SEQ ID NO: 2092932
aguaacccagauagguucu

SEQ ID NO: 2092934 - RNA, 19 nt, Artificial Sequence
  Description of Artificial Sequence: Synthetic oligonucleotide
  Sense strand starting at position 3958 of SEQ ID NO: 1882071
gaaccuaucuggguuacua

SEQ ID NO: 2092935 - RNA, 19 nt, Artificial Sequence
  Description of Artificial Sequence: Synthetic oligonucleotide
  Antisense strand to SEQ ID NO: 2092934
uaguaacccagauagguuc

SEQ ID NO: 2092936 - RNA, 19 nt, Artificial Sequence
  Description of Artificial Sequence: Synthetic oligonucleotide
  Sense strand starting at position 3960 of SEQ ID NO: 1882071
accuaucuggguuacuaau

SEQ ID NO: 2092937 - RNA, 19 nt, Artificial Sequence
  Description of Artificial Sequence: Synthetic oligonucleotide
  Antisense strand to SEQ ID NO: 2092936
auuaguaacccagauaggu

SEQ ID NO: 2092938 - RNA, 19 nt, Artificial Sequence
  Description of Artificial Sequence: Synthetic oligonucleotide
  Sense strand starting at position 3962 of SEQ ID NO: 1882071
cuaucuggguuacuaauau

SEQ ID NO: 2092939 - RNA, 19 nt, Artificial Sequence
  Description of Artificial Sequence: Synthetic oligonucleotide
  Antisense strand to SEQ ID NO: 2092938
auauuaguaacccagauag

SEQ ID NO: 2092940 - RNA, 19 nt, Artificial Sequence
  Description of Artificial Sequence: Synthetic oligonucleotide
  Sense strand starting at position 266 of SEQ ID NO: 1882072
ggaaauugugccuagcuca

SEQ ID NO: 2092941 - RNA, 19 nt, Artificial Sequence
  Description of Artificial Sequence: Synthetic oligonucleotide
  Antisense strand to SEQ ID NO: 2092940
ugagcuaggcacaauuucc

SEQ ID NO: 2092942 - RNA, 19 nt, Artificial Sequence
  Description of Artificial Sequence: Synthetic oligonucleotide
  Sense strand starting at position 330 of SEQ ID NO: 1882072
uugagucuccuagggugaa

SEQ ID NO: 2092943 - RNA, 19 nt, Artificial Sequence
  Description of Artificial Sequence: Synthetic oligonucleotide
  Antisense strand to SEQ ID NO: 2092942
uucacccuaggagacucaa

SEQ ID NO: 2092944 - RNA, 19 nt, Artificial Sequence
  Description of Artificial Sequence: Synthetic oligonucleotide
  Sense strand starting at position 417 of SEQ ID NO: 1882072
gucacaguuagaugaguca

SEQ ID NO: 2092945 - RNA, 19 nt, Artificial Sequence
  Description of Artificial Sequence: Synthetic oligonucleotide
  Antisense strand to SEQ ID NO: 2092944
ugacucaucuaacugugac

SEQ ID NO: 2092946 - RNA, 19 nt, Artificial Sequence
  Description of Artificial Sequence: Synthetic oligonucleotide
  Sense strand starting at position 509 of SEQ ID NO: 1882072
gacauaauuguuggaacug

SEQ ID NO: 2092947 - RNA, 19 nt, Artificial Sequence
  Description of Artificial Sequence: Synthetic oligonucleotide
  Antisense strand to SEQ ID NO: 2092946
caguuccaacaauuauguc

SEQ ID NO: 2092948 - RNA, 19 nt, Artificial Sequence
  Description of Artificial Sequence: Synthetic oligonucleotide
  Sense strand starting at position 651 of SEQ ID NO: 1882072
uuauaccuauggucaggaa

SEQ ID NO: 2092949 - RNA, 19 nt, Artificial Sequence
  Description of Artificial Sequence: Synthetic oligonucleotide
  Antisense strand to SEQ ID NO: 2092948
uuccugaccauagguauaa

SEQ ID NO: 2092950 - RNA, 19 nt, Artificial Sequence
  Description of Artificial Sequence: Synthetic oligonucleotide
  Sense strand starting at position 788 of SEQ ID NO: 1882072
guuaucauccaaugauagc

SEQ ID NO: 2092951 - RNA, 19 nt, Artificial Sequence
  Description of Artificial Sequence: Synthetic oligonucleotide
  Antisense strand to SEQ ID NO: 2092950
gcuaucauuggaugauaac

SEQ ID NO: 2092952 - RNA, 19 nt, Artificial Sequence
  Description of Artificial Sequence: Synthetic oligonucleotide
  Sense strand starting at position 876 of SEQ ID NO: 1882072
guauuauauguggauauca

SEQ ID NO: 2092953 - RNA, 19 nt, Artificial Sequence
  Description of Artificial Sequence: Synthetic oligonucleotide
  Antisense strand to SEQ ID NO: 2092952
ugauauccacauauaauac

SEQ ID NO: 2092954 - RNA, 19 nt, Artificial Sequence
  Description of Artificial Sequence: Synthetic oligonucleotide
  Sense strand starting at position 884 of SEQ ID NO: 1882072
uguggauaucagcaugaug

SEQ ID NO: 2092955 - RNA, 19 nt, Artificial Sequence
  Description of Artificial Sequence: Synthetic oligonucleotide
  Antisense strand to SEQ ID NO: 2092954
caucaugcugauauccaca

SEQ ID NO: 2092956 - RNA, 19 nt, Artificial Sequence
  Description of Artificial Sequence: Synthetic oligonucleotide
  Sense strand starting at position 886 of SEQ ID NO: 1882072
uggauaucagcaugaugua

SEQ ID NO: 2092957 - RNA, 19 nt, Artificial Sequence
  Description of Artificial Sequence: Synthetic oligonucleotide
  Antisense strand to SEQ ID NO: 2092956
uacaucaugcugauaucca

SEQ ID NO: 2092958 - RNA, 19 nt, Artificial Sequence
  Description of Artificial Sequence: Synthetic oligonucleotide
  Sense strand starting at position 887 of SEQ ID NO: 1882072
ggauaucagcaugauguac

SEQ ID NO: 2092959 - RNA, 19 nt, Artificial Sequence
  Description of Artificial Sequence: Synthetic oligonucleotide
  Antisense strand to SEQ ID NO: 2092958
guacaucaugcugauaucc

SEQ ID NO: 2092960 - RNA, 19 nt, Artificial Sequence
  Description of Artificial Sequence: Synthetic oligonucleotide
  Sense strand starting at position 989 of SEQ ID NO: 1882072
gguacagaaaguugaguaa

SEQ ID NO: 2092961 - RNA, 19 nt, Artificial Sequence
  Description of Artificial Sequence: Synthetic oligonucleotide
  Antisense strand to SEQ ID NO: 2092960
uuacucaacuuucuguacc

SEQ ID NO: 2092962 - RNA, 19 nt, Artificial Sequence
  Description of Artificial Sequence: Synthetic oligonucleotide
  Sense strand starting at position 1015 of SEQ ID NO: 1882072
uagguuauauggcuaauaa

SEQ ID NO: 2092963 - RNA, 19 nt, Artificial Sequence
  Description of Artificial Sequence: Synthetic oligonucleotide
  Antisense strand to SEQ ID NO: 2092962
uuauuagccauauaaccua

SEQ ID NO: 2092964 - RNA, 19 nt, Artificial Sequence
  Description of Artificial Sequence: Synthetic oligonucleotide
  Sense strand starting at position 1162 of SEQ ID NO: 1882072
augcacgaauauguauaua

SEQ ID NO: 2092965 - RNA, 19 nt, Artificial Sequence
  Description of Artificial Sequence: Synthetic oligonucleotide
  Antisense strand to SEQ ID NO: 2092964
uauauacauauucgugcau

SEQ ID NO: 2092966 - RNA, 19 nt, Artificial Sequence
  Description of Artificial Sequence: Synthetic oligonucleotide
  Sense strand starting at position 1304 of SEQ ID NO: 1882072
ggauaaagcuauuugugcu

SEQ ID NO: 2092967 - RNA, 19 nt, Artificial Sequence
  Description of Artificial Sequence: Synthetic oligonucleotide
  Antisense strand to SEQ ID NO: 2092966
agcacaaauagcuuuaucc

SEQ ID NO: 2092968 - RNA, 19 nt, Artificial Sequence
  Description of Artificial Sequence: Synthetic oligonucleotide
  Sense strand starting at position 1308 of SEQ ID NO: 1882072
aaagcuauuugugcugaua

SEQ ID NO: 2092969 - RNA, 19 nt, Artificial Sequence
  Description of Artificial Sequence: Synthetic oligonucleotide
  Antisense strand to SEQ ID NO: 2092968
uaucagcacaaauagcuuu

SEQ ID NO: 2092970 - RNA, 19 nt, Artificial Sequence
  Description of Artificial Sequence: Synthetic oligonucleotide
  Sense strand starting at position 1406 of SEQ ID NO: 1882072
auucuuaaagguugcuaua

SEQ ID NO: 2092971 - RNA, 19 nt, Artificial Sequence
  Description of Artificial Sequence: Synthetic oligonucleotide
  Antisense strand to SEQ ID NO: 2092970
uauagcaaccuuuaagaau

SEQ ID NO: 2092972 - RNA, 19 nt, Artificial Sequence
  Description of Artificial Sequence: Synthetic oligonucleotide
  Sense strand starting at position 1408 of SEQ ID NO: 1882072
ucuuaaagguugcuauaua

SEQ ID NO: 2092973 - RNA, 19 nt, Artificial Sequence
  Description of Artificial Sequence: Synthetic oligonucleotide
  Antisense strand to SEQ ID NO: 2092972
uauauagcaaccuuuaaga

SEQ ID NO: 2092974 - RNA, 19 nt, Artificial Sequence
  Description of Artificial Sequence: Synthetic oligonucleotide
  Sense strand starting at position 1433 of SEQ ID NO: 1882072
auugaaguuugauuacgua

SEQ ID NO: 2092975 - RNA, 19 nt, Artificial Sequence
  Description of Artificial Sequence: Synthetic oligonucleotide
  Antisense strand to SEQ ID NO: 2092974
uacguaaucaaacuucaau

SEQ ID NO: 2092976 - RNA, 19 nt, Artificial Sequence
  Description of Artificial Sequence: Synthetic oligonucleotide
  Sense strand starting at position 1437 of SEQ ID NO: 1882072
aaguuugauuacguagaga

SEQ ID NO: 2092977 - RNA, 19 nt, Artificial Sequence
  Description of Artificial Sequence: Synthetic oligonucleotide
  Antisense strand to SEQ ID NO: 2092976
ucucuacguaaucaaacuu

SEQ ID NO: 2092978 - RNA, 19 nt, Artificial Sequence
  Description of Artificial Sequence: Synthetic oligonucleotide
  Sense strand starting at position 1442 of SEQ ID NO: 1882072
ugauuacguagagaauguu

SEQ ID NO: 2092979 - RNA, 19 nt, Artificial Sequence
  Description of Artificial Sequence: Synthetic oligonucleotide
  Antisense strand to SEQ ID NO: 2092978
aacauucucuacguaauca

SEQ ID NO: 2092980 - RNA, 19 nt, Artificial Sequence
  Description of Artificial Sequence: Synthetic oligonucleotide
  Sense strand starting at position 1450 of SEQ ID NO: 1882072
uagagaauguuuguggaag

SEQ ID NO: 2092981 - RNA, 19 nt, Artificial Sequence
  Description of Artificial Sequence: Synthetic oligonucleotide
  Antisense strand to SEQ ID NO: 2092980
cuuccacaaacauucucua

SEQ ID NO: 2092982 - RNA, 19 nt, Artificial Sequence
  Description of Artificial Sequence: Synthetic oligonucleotide
  Sense strand starting at position 1469 of SEQ ID NO: 1882072
ggugcuagcaaguaauuag

SEQ ID NO: 2092983 - RNA, 19 nt, Artificial Sequence
  Description of Artificial Sequence: Synthetic oligonucleotide
  Antisense strand to SEQ ID NO: 2092982
cuaauuacuugcuagcacc

SEQ ID NO: 2092984 - RNA, 19 nt, Artificial Sequence
  Description of Artificial Sequence: Synthetic oligonucleotide
  Sense strand starting at position 1986 of SEQ ID NO: 1882072
gguuaaugugugaguugua

SEQ ID NO: 2092985 - RNA, 19 nt, Artificial Sequence
  Description of Artificial Sequence: Synthetic oligonucleotide
  Antisense strand to SEQ ID NO: 2092984
uacaacucacacauuaacc

SEQ ID NO: 2092986 - RNA, 19 nt, Artificial Sequence
  Description of Artificial Sequence: Synthetic oligonucleotide
  Sense strand starting at position 1993 of SEQ ID NO: 1882072
gugugaguuguaagaugua

SEQ ID NO: 2092987 - RNA, 19 nt, Artificial Sequence
  Description of Artificial Sequence: Synthetic oligonucleotide
  Antisense strand to SEQ ID NO: 2092986
uacaucuuacaacucacac

SEQ ID NO: 2092988 - RNA, 19 nt, Artificial Sequence
  Description of Artificial Sequence: Synthetic oligonucleotide
  Sense strand starting at position 1996 of SEQ ID NO: 1882072
ugaguuguaagauguaaag

SEQ ID NO: 2092989 - RNA, 19 nt, Artificial Sequence
  Description of Artificial Sequence: Synthetic oligonucleotide
  Antisense strand to SEQ ID NO: 2092988
cuuuacaucuuacaacuca

SEQ ID NO: 2092990 - RNA, 19 nt, Artificial Sequence
  Description of Artificial Sequence: Synthetic oligonucleotide
  Sense strand starting at position 2140 of SEQ ID NO: 1882072
guauuaagucuagaaccca

SEQ ID NO: 2092991 - RNA, 19 nt, Artificial Sequence
  Description of Artificial Sequence: Synthetic oligonucleotide
  Antisense strand to SEQ ID NO: 2092990
uggguucuagacuuaauac

SEQ ID NO: 2092992 - RNA, 19 nt, Artificial Sequence
  Description of Artificial Sequence: Synthetic oligonucleotide
  Sense strand starting at position 2412 of SEQ ID NO: 1882072
gacaaauuaugcuuaguga

SEQ ID NO: 2092993 - RNA, 19 nt, Artificial Sequence
  Description of Artificial Sequence: Synthetic oligonucleotide
  Antisense strand to SEQ ID NO: 2092992
ucacuaagcauaauuuguc

SEQ ID NO: 2092994 - RNA, 19 nt, Artificial Sequence
  Description of Artificial Sequence: Synthetic oligonucleotide
  Sense strand starting at position 2415 of SEQ ID NO: 1882072
aaauuaugcuuagugauug

SEQ ID NO: 2092995 - RNA, 19 nt, Artificial Sequence
  Description of Artificial Sequence: Synthetic oligonucleotide
  Antisense strand to SEQ ID NO: 2092994
caaucacuaagcauaauuu

SEQ ID NO: 2092996 - RNA, 19 nt, Artificial Sequence
  Description of Artificial Sequence: Synthetic oligonucleotide
  Sense strand starting at position 2532 of SEQ ID NO: 1882072
gcuugaucaagauggugaa

SEQ ID NO: 2092997 - RNA, 19 nt, Artificial Sequence
  Description of Artificial Sequence: Synthetic oligonucleotide
  Antisense strand to SEQ ID NO: 2092996
uucaccaucuugaucaagc

SEQ ID NO: 2092998 - RNA, 19 nt, Artificial Sequence
  Description of Artificial Sequence: Synthetic oligonucleotide
  Sense strand starting at position 2907 of SEQ ID NO: 1882072
augucauggugucuagaga

SEQ ID NO: 2092999 - RNA, 19 nt, Artificial Sequence
  Description of Artificial Sequence: Synthetic oligonucleotide
  Antisense strand to SEQ ID NO: 2092998
ucucuagacaccaugacau

SEQ ID NO: 2093000 - RNA, 19 nt, Artificial Sequence
  Description of Artificial Sequence: Synthetic oligonucleotide
  Sense strand starting at position 2908 of SEQ ID NO: 1882072
ugucauggugucuagagau

SEQ ID NO: 2093001 - RNA, 19 nt, Artificial Sequence
  Description of Artificial Sequence: Synthetic oligonucleotide
  Antisense strand to SEQ ID NO: 2093000
aucucuagacaccaugaca

SEQ ID NO: 2093002 - RNA, 19 nt, Artificial Sequence
  Description of Artificial Sequence: Synthetic oligonucleotide
  Sense strand starting at position 2984 of SEQ ID NO: 1882072
uggaauuaguaccuuuauc

SEQ ID NO: 2093003 - RNA, 19 nt, Artificial Sequence
  Description of Artificial Sequence: Synthetic oligonucleotide
  Antisense strand to SEQ ID NO: 2093002
gauaaagguacuaauucca

SEQ ID NO: 2093004 - RNA, 19 nt, Artificial Sequence
  Description of Artificial Sequence: Synthetic oligonucleotide
  Sense strand starting at position 3164 of SEQ ID NO: 1882072
uaauguuccuggucugaag

SEQ ID NO: 2093005 - RNA, 19 nt, Artificial Sequence
  Description of Artificial Sequence: Synthetic oligonucleotide
  Antisense strand to SEQ ID NO: 2093004
cuucagaccaggaacauua

SEQ ID NO: 2093006 - RNA, 19 nt, Artificial Sequence
  Description of Artificial Sequence: Synthetic oligonucleotide
  Sense strand starting at position 3166 of SEQ ID NO: 1882072
auguuccuggucugaagau

SEQ ID NO: 2093007 - RNA, 19 nt, Artificial Sequence
  Description of Artificial Sequence: Synthetic oligonucleotide
  Antisense strand to SEQ ID NO: 2093006
aucuucagaccaggaacau

SEQ ID NO: 2093008 - RNA, 19 nt, Artificial Sequence
  Description of Artificial Sequence: Synthetic oligonucleotide
  Sense strand starting at position 3183 of SEQ ID NO: 1882072
auuacuauagcauagguaa

SEQ ID NO: 2093009 - RNA, 19 nt, Artificial Sequence
  Description of Artificial Sequence: Synthetic oligonucleotide
  Antisense strand to SEQ ID NO: 2093008
uuaccuaugcuauaguaau

SEQ ID NO: 2093010 - RNA, 19 nt, Artificial Sequence
  Description of Artificial Sequence: Synthetic oligonucleotide
  Sense strand starting at position 3203 of SEQ ID NO: 1882072
ccagcuauccaguagucaa

SEQ ID NO: 2093011 - RNA, 19 nt, Artificial Sequence
  Description of Artificial Sequence: Synthetic oligonucleotide
  Antisense strand to SEQ ID NO: 2093010
uugacuacuggauagcugg

SEQ ID NO: 2093012 - RNA, 19 nt, Artificial Sequence
  Description of Artificial Sequence: Synthetic oligonucleotide
  Sense strand starting at position 3275 of SEQ ID NO: 1882072
uuauguugaggcuggauaa

SEQ ID NO: 2093013 - RNA, 19 nt, Artificial Sequence
  Description of Artificial Sequence: Synthetic oligonucleotide
  Antisense strand to SEQ ID NO: 2093012
uuauccagccucaacauaa

SEQ ID NO: 2093014 - RNA, 19 nt, Artificial Sequence
  Description of Artificial Sequence: Synthetic oligonucleotide
  Sense strand starting at position 3276 of SEQ ID NO: 1882072
uauguugaggcuggauaau

SEQ ID NO: 2093015 - RNA, 19 nt, Artificial Sequence
  Description of Artificial Sequence: Synthetic oligonucleotide
  Antisense strand to SEQ ID NO: 2093014
auuauccagccucaacaua

SEQ ID NO: 2093016 - RNA, 19 nt, Artificial Sequence
  Description of Artificial Sequence: Synthetic oligonucleotide
  Sense strand starting at position 3612 of SEQ ID NO: 1882072
ugaaguuuggguggaucaa

SEQ ID NO: 2093017 - RNA, 19 nt, Artificial Sequence
  Description of Artificial Sequence: Synthetic oligonucleotide
  Antisense strand to SEQ ID NO: 2093016
uugauccacccaaacuuca

SEQ ID NO: 2093018 - RNA, 19 nt, Artificial Sequence
  Description of Artificial Sequence: Synthetic oligonucleotide
  Sense strand starting at position 3706 of SEQ ID NO: 1882072
uguguaucugccuaauaau

SEQ ID NO: 2093019 - RNA, 19 nt, Artificial Sequence
  Description of Artificial Sequence: Synthetic oligonucleotide
  Antisense strand to SEQ ID NO: 2093018
auuauuaggcagauacaca

SEQ ID NO: 2093020 - RNA, 19 nt, Artificial Sequence
  Description of Artificial Sequence: Synthetic oligonucleotide
  Sense strand starting at position 60 of SEQ ID NO: 1882073
aguagucagagucaacguu

SEQ ID NO: 2093021 - RNA, 19 nt, Artificial Sequence
  Description of Artificial Sequence: Synthetic oligonucleotide
  Antisense strand to SEQ ID NO: 2093020
aacguugacucugacuacu

SEQ ID NO: 2093022 - RNA, 19 nt, Artificial Sequence
  Description of Artificial Sequence: Synthetic oligonucleotide
  Sense strand starting at position 80 of SEQ ID NO: 1882073
auuauugugucacuccaca

SEQ ID NO: 2093023 - RNA, 19 nt, Artificial Sequence
  Description of Artificial Sequence: Synthetic oligonucleotide
  Antisense strand to SEQ ID NO: 2093022
uguggagugacacaauaau

SEQ ID NO: 2093024 - RNA, 19 nt, Artificial Sequence
  Description of Artificial Sequence: Synthetic oligonucleotide
  Sense strand starting at position 127 of SEQ ID NO: 1882073
cagugcuaucaagagccuu

SEQ ID NO: 2093025 - RNA, 19 nt, Artificial Sequence
  Description of Artificial Sequence: Synthetic oligonucleotide
  Antisense strand to SEQ ID NO: 2093024
aaggcucuugauagcacug

SEQ ID NO: 2093026 - RNA, 19 nt, Artificial Sequence
  Description of Artificial Sequence: Synthetic oligonucleotide
  Sense strand starting at position 158 of SEQ ID NO: 1882073
guccauuagcccugaggac

SEQ ID NO: 2093027 - RNA, 19 nt, Artificial Sequence
  Description of Artificial Sequence: Synthetic oligonucleotide
  Antisense strand to SEQ ID NO: 2093026
guccucagggcuaauggac

SEQ ID NO: 2093028 - RNA, 19 nt, Artificial Sequence
  Description of Artificial Sequence: Synthetic oligonucleotide
  Sense strand starting at position 159 of SEQ ID NO: 1882073
uccauuagcccugaggacu

SEQ ID NO: 2093029 - RNA, 19 nt, Artificial Sequence
  Description of Artificial Sequence: Synthetic oligonucleotide
  Antisense strand to SEQ ID NO: 2093028
aguccucagggcuaaugga

SEQ ID NO: 2093030 - RNA, 19 nt, Artificial Sequence
  Description of Artificial Sequence: Synthetic oligonucleotide
  Sense strand starting at position 291 of SEQ ID NO: 1882073
guaggaguggcccauauua

SEQ ID NO: 2093031 - RNA, 19 nt, Artificial Sequence
  Description of Artificial Sequence: Synthetic oligonucleotide
  Antisense strand to SEQ ID NO: 2093030
uaauaugggccacuccuac

SEQ ID NO: 2093032 - RNA, 19 nt, Artificial Sequence
  Description of Artificial Sequence: Synthetic oligonucleotide
  Sense strand starting at position 293 of SEQ ID NO: 1882073
aggaguggcccauauuaac

SEQ ID NO: 2093033 - RNA, 19 nt, Artificial Sequence
  Description of Artificial Sequence: Synthetic oligonucleotide
  Antisense strand to SEQ ID NO: 2093032
guuaauaugggccacuccu

SEQ ID NO: 2093034 - RNA, 19 nt, Artificial Sequence
  Description of Artificial Sequence: Synthetic oligonucleotide
  Sense strand starting at position 299 of SEQ ID NO: 1882073
ggcccauauuaacuaacga

SEQ ID NO: 2093035 - RNA, 19 nt, Artificial Sequence
  Description of Artificial Sequence: Synthetic oligonucleotide
  Antisense strand to SEQ ID NO: 2093034
ucguuaguuaauaugggcc

SEQ ID NO: 2093036 - RNA, 19 nt, Artificial Sequence
  Description of Artificial Sequence: Synthetic oligonucleotide
  Sense strand starting at position 329 of SEQ ID NO: 1882073
guaguuacugaaggguuau

SEQ ID NO: 2093037 - RNA, 19 nt, Artificial Sequence
  Description of Artificial Sequence: Synthetic oligonucleotide
  Antisense strand to SEQ ID NO: 2093036
auaacccuucaguaacuac

SEQ ID NO: 2093038 - RNA, 19 nt, Artificial Sequence
  Description of Artificial Sequence: Synthetic oligonucleotide
  Sense strand starting at position 361 of SEQ ID NO: 1882073
uugugcuaaguccaugaga

SEQ ID NO: 2093039 - RNA, 19 nt, Artificial Sequence
  Description of Artificial Sequence: Synthetic oligonucleotide
  Antisense strand to SEQ ID NO: 2093038
ucucauggacuuagcacaa

SEQ ID NO: 2093040 - RNA, 19 nt, Artificial Sequence
  Description of Artificial Sequence: Synthetic oligonucleotide
  Sense strand starting at position 363 of SEQ ID NO: 1882073
gugcuaaguccaugagagg

SEQ ID NO: 2093041 - RNA, 19 nt, Artificial Sequence
  Description of Artificial Sequence: Synthetic oligonucleotide
  Antisense strand to SEQ ID NO: 2093040
ccucucauggacuuagcac

SEQ ID NO: 2093042 - RNA, 19 nt, Artificial Sequence
  Description of Artificial Sequence: Synthetic oligonucleotide
  Sense strand starting at position 500 of SEQ ID NO: 1882073
cuauuaaguugcuccagga

SEQ ID NO: 2093043 - RNA, 19 nt, Artificial Sequence
  Description of Artificial Sequence: Synthetic oligonucleotide
  Antisense strand to SEQ ID NO: 2093042
uccuggagcaacuuaauag

SEQ ID NO: 2093044 - RNA, 19 nt, Artificial Sequence
  Description of Artificial Sequence: Synthetic oligonucleotide
  Sense strand starting at position 698 of SEQ ID NO: 1882073
aggcuaacucuuggugaaa

SEQ ID NO: 2093045 - RNA, 19 nt, Artificial Sequence
  Description of Artificial Sequence: Synthetic oligonucleotide
  Antisense strand to SEQ ID NO: 2093044
uuucaccaagaguuagccu

SEQ ID NO: 2093046 - RNA, 19 nt, Artificial Sequence
  Description of Artificial Sequence: Synthetic oligonucleotide
  Sense strand starting at position 729 of SEQ ID NO: 1882073
ggugccagccaguaaucaa

SEQ ID NO: 2093047 - RNA, 19 nt, Artificial Sequence
  Description of Artificial Sequence: Synthetic oligonucleotide
  Antisense strand to SEQ ID NO: 2093046
uugauuacuggcuggcacc

SEQ ID NO: 2093048 - RNA, 19 nt, Artificial Sequence
  Description of Artificial Sequence: Synthetic oligonucleotide
  Sense strand starting at position 736 of SEQ ID NO: 1882073
gccaguaaucaauggcaaa

SEQ ID NO: 2093049 - RNA, 19 nt, Artificial Sequence
  Description of Artificial Sequence: Synthetic oligonucleotide
  Antisense strand to SEQ ID NO: 2093048
uuugccauugauuacuggc

SEQ ID NO: 2093050 - RNA, 19 nt, Artificial Sequence
  Description of Artificial Sequence: Synthetic oligonucleotide
  Sense strand starting at position 855 of SEQ ID NO: 1882073
ucuguucuacaggaaaucu

SEQ ID NO: 2093051 - RNA, 19 nt, Artificial Sequence
  Description of Artificial Sequence: Synthetic oligonucleotide
  Antisense strand to SEQ ID NO: 2093050
agauuuccuguagaacaga

SEQ ID NO: 2093052 - RNA, 19 nt, Artificial Sequence
  Description of Artificial Sequence: Synthetic oligonucleotide
  Sense strand starting at position 863 of SEQ ID NO: 1882073
acaggaaaucuuuggcuga

SEQ ID NO: 2093053 - RNA, 19 nt, Artificial Sequence
  Description of Artificial Sequence: Synthetic oligonucleotide
  Antisense strand to SEQ ID NO: 2093052
ucagccaaagauuuccugu

SEQ ID NO: 2093054 - RNA, 19 nt, Artificial Sequence
  Description of Artificial Sequence: Synthetic oligonucleotide
  Sense strand starting at position 865 of SEQ ID NO: 1882073
aggaaaucuuuggcugaag

SEQ ID NO: 2093055 - RNA, 19 nt, Artificial Sequence
  Description of Artificial Sequence: Synthetic oligonucleotide
  Antisense strand to SEQ ID NO: 2093054
cuucagccaaagauuuccu

SEQ ID NO: 2093056 - RNA, 19 nt, Artificial Sequence
  Description of Artificial Sequence: Synthetic oligonucleotide
  Sense strand starting at position 867 of SEQ ID NO: 1882073
gaaaucuuuggcugaagga

SEQ ID NO: 2093057 - RNA, 19 nt, Artificial Sequence
  Description of Artificial Sequence: Synthetic oligonucleotide
  Antisense strand to SEQ ID NO: 2093056
uccuucagccaaagauuuc

SEQ ID NO: 2093058 - RNA, 19 nt, Artificial Sequence
  Description of Artificial Sequence: Synthetic oligonucleotide
  Sense strand starting at position 1008 of SEQ ID NO: 1882073
cagggagagcgcgaguuau

SEQ ID NO: 2093059 - RNA, 19 nt, Artificial Sequence
  Description of Artificial Sequence: Synthetic oligonucleotide
  Antisense strand to SEQ ID NO: 2093058
auaacucgcgcucucccug

SEQ ID NO: 2093060 - RNA, 19 nt, Artificial Sequence
  Description of Artificial Sequence: Synthetic oligonucleotide
  Sense strand starting at position 1127 of SEQ ID NO: 1882073
accacagcucuaugaagaa

SEQ ID NO: 2093061 - RNA, 19 nt, Artificial Sequence
  Description of Artificial Sequence: Synthetic oligonucleotide
  Antisense strand to SEQ ID NO: 2093060
uucuucauagagcuguggu

SEQ ID NO: 2093062 - RNA, 19 nt, Artificial Sequence
  Description of Artificial Sequence: Synthetic oligonucleotide
  Sense strand starting at position 1196 of SEQ ID NO: 1882073
aguuaaauaaguugucgag

SEQ ID NO: 2093063 - RNA, 19 nt, Artificial Sequence
  Description of Artificial Sequence: Synthetic oligonucleotide
  Antisense strand to SEQ ID NO: 2093062
cucgacaacuuauuuaacu

SEQ ID NO: 2093064 - RNA, 19 nt, Artificial Sequence
  Description of Artificial Sequence: Synthetic oligonucleotide
  Sense strand starting at position 1200 of SEQ ID NO: 1882073
aaauaaguugucgaggcaa

SEQ ID NO: 2093065 - RNA, 19 nt, Artificial Sequence
  Description of Artificial Sequence: Synthetic oligonucleotide
  Antisense strand to SEQ ID NO: 2093064
uugccucgacaacuuauuu

SEQ ID NO: 2093066 - RNA, 19 nt, Artificial Sequence
  Description of Artificial Sequence: Synthetic oligonucleotide
  Sense strand starting at position 1262 of SEQ ID NO: 1882073
ccaagugaguagccaagau

SEQ ID NO: 2093067 - RNA, 19 nt, Artificial Sequence
  Description of Artificial Sequence: Synthetic oligonucleotide
  Antisense strand to SEQ ID NO: 2093066
aucuuggcuacucacuugg

SEQ ID NO: 2093068 - RNA, 19 nt, Artificial Sequence
  Description of Artificial Sequence: Synthetic oligonucleotide
  Sense strand starting at position 1266 of SEQ ID NO: 1882073
gugaguagccaagaugaca

SEQ ID NO: 2093069 - RNA, 19 nt, Artificial Sequence
  Description of Artificial Sequence: Synthetic oligonucleotide
  Antisense strand to SEQ ID NO: 2093068
ugucaucuuggcuacucac

SEQ ID NO: 2093070 - RNA, 19 nt, Artificial Sequence
  Description of Artificial Sequence: Synthetic oligonucleotide
  Sense strand starting at position 1630 of SEQ ID NO: 1882073
agaagaaaguugucuguca

SEQ ID NO: 2093071 - RNA, 19 nt, Artificial Sequence
  Description of Artificial Sequence: Synthetic oligonucleotide
  Antisense strand to SEQ ID NO: 2093070
ugacagacaacuuucuucu

SEQ ID NO: 2093072 - RNA, 19 nt, Artificial Sequence
  Description of Artificial Sequence: Synthetic oligonucleotide
  Sense strand starting at position 1631 of SEQ ID NO: 1882073
gaagaaaguugucugucag

SEQ ID NO: 2093073 - RNA, 19 nt, Artificial Sequence
  Description of Artificial Sequence: Synthetic oligonucleotide
  Antisense strand to SEQ ID NO: 2093072
cugacagacaacuuucuuc

SEQ ID NO: 2093074 - RNA, 19 nt, Artificial Sequence
  Description of Artificial Sequence: Synthetic oligonucleotide
  Sense strand starting at position 1639 of SEQ ID NO: 1882073
uugucugucagagaguaga

SEQ ID NO: 2093075 - RNA, 19 nt, Artificial Sequence
  Description of Artificial Sequence: Synthetic oligonucleotide
  Antisense strand to SEQ ID NO: 2093074
ucuacucucugacagacaa

SEQ ID NO: 2093076 - RNA, 19 nt, Artificial Sequence
  Description of Artificial Sequence: Synthetic oligonucleotide
  Sense strand starting at position 1747 of SEQ ID NO: 1882073
gaaugauuccuuggagcaa

SEQ ID NO: 2093077 - RNA, 19 nt, Artificial Sequence
  Description of Artificial Sequence: Synthetic oligonucleotide
  Antisense strand to SEQ ID NO: 2093076
uugcuccaaggaaucauuc

SEQ ID NO: 2093078 - RNA, 19 nt, Artificial Sequence
  Description of Artificial Sequence: Synthetic oligonucleotide
  Sense strand starting at position 1751 of SEQ ID NO: 1882073
gauuccuuggagcaauguu

SEQ ID NO: 2093079 - RNA, 19 nt, Artificial Sequence
  Description of Artificial Sequence: Synthetic oligonucleotide
  Antisense strand to SEQ ID NO: 2093078
aacauugcuccaaggaauc

SEQ ID NO: 2093080 - RNA, 19 nt, Artificial Sequence
  Description of Artificial Sequence: Synthetic oligonucleotide
  Sense strand starting at position 2003 of SEQ ID NO: 1882073
ucacucucccaugaguuga

SEQ ID NO: 2093081 - RNA, 19 nt, Artificial Sequence
  Description of Artificial Sequence: Synthetic oligonucleotide
  Antisense strand to SEQ ID NO: 2093080
ucaacucaugggagaguga

SEQ ID NO: 2093082 - RNA, 19 nt, Artificial Sequence
  Description of Artificial Sequence: Synthetic oligonucleotide
  Sense strand starting at position 2008 of SEQ ID NO: 1882073
cucccaugaguugacaauu

SEQ ID NO: 2093083 - RNA, 19 nt, Artificial Sequence
  Description of Artificial Sequence: Synthetic oligonucleotide
  Antisense strand to SEQ ID NO: 2093082
aauugucaacucaugggag

SEQ ID NO: 2093084 - RNA, 19 nt, Artificial Sequence
  Description of Artificial Sequence: Synthetic oligonucleotide
  Sense strand starting at position 2018 of SEQ ID NO: 1882073
uugacaauuucuuagagca

SEQ ID NO: 2093085 - RNA, 19 nt, Artificial Sequence
  Description of Artificial Sequence: Synthetic oligonucleotide
  Antisense strand to SEQ ID NO: 2093084
ugcucuaagaaauugucaa

SEQ ID NO: 2093086 - RNA, 19 nt, Artificial Sequence
  Description of Artificial Sequence: Synthetic oligonucleotide
  Sense strand starting at position 3301 of SEQ ID NO: 1882073
gggagagguuggucaauag

SEQ ID NO: 2093087 - RNA, 19 nt, Artificial Sequence
  Description of Artificial Sequence: Synthetic oligonucleotide
  Antisense strand to SEQ ID NO: 2093086
cuauugaccaaccucuccc

SEQ ID NO: 2093088 - RNA, 19 nt, Artificial Sequence
  Description of Artificial Sequence: Synthetic oligonucleotide
  Sense strand starting at position 3305 of SEQ ID NO: 1882073
gagguuggucaauagguaa

SEQ ID NO: 2093089 - RNA, 19 nt, Artificial Sequence
  Description of Artificial Sequence: Synthetic oligonucleotide
  Antisense strand to SEQ ID NO: 2093088
uuaccuauugaccaaccuc

SEQ ID NO: 2093090 - RNA, 19 nt, Artificial Sequence
  Description of Artificial Sequence: Synthetic oligonucleotide
  Sense strand starting at position 3536 of SEQ ID NO: 1882073
gcccauaaauguguagaau

SEQ ID NO: 2093091 - RNA, 19 nt, Artificial Sequence
  Description of Artificial Sequence: Synthetic oligonucleotide
  Antisense strand to SEQ ID NO: 2093090
auucuacacauuuaugggc

SEQ ID NO: 2093092 - RNA, 19 nt, Artificial Sequence
  Description of Artificial Sequence: Synthetic oligonucleotide
  Sense strand starting at position 3594 of SEQ ID NO: 1882073
acagcaagucuacagguau

SEQ ID NO: 2093093 - RNA, 19 nt, Artificial Sequence
  Description of Artificial Sequence: Synthetic oligonucleotide
  Antisense strand to SEQ ID NO: 2093092
auaccuguagacuugcugu

SEQ ID NO: 2093094 - RNA, 19 nt, Artificial Sequence
  Description of Artificial Sequence: Synthetic oligonucleotide
  Sense strand starting at position 3684 of SEQ ID NO: 1882073
uugacacuguggcuaaauu

SEQ ID NO: 2093095 - RNA, 19 nt, Artificial Sequence
  Description of Artificial Sequence: Synthetic oligonucleotide
  Antisense strand to SEQ ID NO: 2093094
aauuuagccacagugucaa

SEQ ID NO: 2093096 - RNA, 19 nt, Artificial Sequence
  Description of Artificial Sequence: Synthetic oligonucleotide
  Sense strand starting at position 3750 of SEQ ID NO: 1882073
gcugaaugccagcaaggua

SEQ ID NO: 2093097 - RNA, 19 nt, Artificial Sequence
  Description of Artificial Sequence: Synthetic oligonucleotide
  Antisense strand to SEQ ID NO: 2093096
uaccuugcuggcauucagc

SEQ ID NO: 2093098 - RNA, 19 nt, Artificial Sequence
  Description of Artificial Sequence: Synthetic oligonucleotide
  Sense strand starting at position 3777 of SEQ ID NO: 1882073
gcaugacugcucuaacaac

SEQ ID NO: 2093099 - RNA, 19 nt, Artificial Sequence
  Description of Artificial Sequence: Synthetic oligonucleotide
  Antisense strand to SEQ ID NO: 2093098
guuguuagagcagucaugc

SEQ ID NO: 2093100 - RNA, 19 nt, Artificial Sequence
  Description of Artificial Sequence: Synthetic oligonucleotide
  Sense strand starting at position 116 of SEQ ID NO: 1882074
ggaugucaccuuugugaca

SEQ ID NO: 2093101 - RNA, 19 nt, Artificial Sequence
  Description of Artificial Sequence: Synthetic oligonucleotide
  Antisense strand to SEQ ID NO: 2093100
ugucacaaaggugacaucc

SEQ ID NO: 2093102 - RNA, 19 nt, Artificial Sequence
  Description of Artificial Sequence: Synthetic oligonucleotide
  Sense strand starting at position 117 of SEQ ID NO: 1882074
gaugucaccuuugugacau

SEQ ID NO: 2093103 - RNA, 19 nt, Artificial Sequence
  Description of Artificial Sequence: Synthetic oligonucleotide
  Antisense strand to SEQ ID NO: 2093102
augucacaaaggugacauc

SEQ ID NO: 2093104 - RNA, 19 nt, Artificial Sequence
  Description of Artificial Sequence: Synthetic oligonucleotide
  Sense strand starting at position 179 of SEQ ID NO: 1882074
ucuugcuggcugugaugaa

SEQ ID NO: 2093105 - RNA, 19 nt, Artificial Sequence
  Description of Artificial Sequence: Synthetic oligonucleotide
  Antisense strand to SEQ ID NO: 2093104
uucaucacagccagcaaga

SEQ ID NO: 2093106 - RNA, 19 nt, Artificial Sequence
  Description of Artificial Sequence: Synthetic oligonucleotide
  Sense strand starting at position 328 of SEQ ID NO: 1882074
cccaauaaccuugagagcu

SEQ ID NO: 2093107 - RNA, 19 nt, Artificial Sequence
  Description of Artificial Sequence: Synthetic oligonucleotide
  Antisense strand to SEQ ID NO: 2093106
agcucucaagguuauuggg

SEQ ID NO: 2093108 - RNA, 19 nt, Artificial Sequence
  Description of Artificial Sequence: Synthetic oligonucleotide
  Sense strand starting at position 458 of SEQ ID NO: 1882074
ugcugaaugccuguuguuu

SEQ ID NO: 2093109 - RNA, 19 nt, Artificial Sequence
  Description of Artificial Sequence: Synthetic oligonucleotide
  Antisense strand to SEQ ID NO: 2093108
aaacaacaggcauucagca

SEQ ID NO: 2093110 - RNA, 19 nt, Artificial Sequence
  Description of Artificial Sequence: Synthetic oligonucleotide
  Sense strand starting at position 481 of SEQ ID NO: 1882074
ccacgaaguuugcuaucau

SEQ ID NO: 2093111 - RNA, 19 nt, Artificial Sequence
  Description of Artificial Sequence: Synthetic oligonucleotide
  Antisense strand to SEQ ID NO: 2093110
augauagcaaacuucgugg

SEQ ID NO: 2093112 - RNA, 19 nt, Artificial Sequence
  Description of Artificial Sequence: Synthetic oligonucleotide
  Sense strand starting at position 488 of SEQ ID NO: 1882074
guuugcuaucauuauauga

SEQ ID NO: 2093113 - RNA, 19 nt, Artificial Sequence
  Description of Artificial Sequence: Synthetic oligonucleotide
  Antisense strand to SEQ ID NO: 2093112
ucauauaaugauagcaaac

SEQ ID NO: 2093114 - RNA, 19 nt, Artificial Sequence
  Description of Artificial Sequence: Synthetic oligonucleotide
  Sense strand starting at position 608 of SEQ ID NO: 1882074
gaauaaagauauggugaga

SEQ ID NO: 2093115 - RNA, 19 nt, Artificial Sequence
  Description of Artificial Sequence: Synthetic oligonucleotide
  Antisense strand to SEQ ID NO: 2093114
ucucaccauaucuuuauuc

SEQ ID NO: 2093116 - RNA, 19 nt, Artificial Sequence
  Description of Artificial Sequence: Synthetic oligonucleotide
  Sense strand starting at position 670 of SEQ ID NO: 1882074
ucucuuagagagugagauu

SEQ ID NO: 2093117 - RNA, 19 nt, Artificial Sequence
  Description of Artificial Sequence: Synthetic oligonucleotide
  Antisense strand to SEQ ID NO: 2093116
aaucucacucucuaagaga

SEQ ID NO: 2093118 - RNA, 19 nt, Artificial Sequence
  Description of Artificial Sequence: Synthetic oligonucleotide
  Sense strand starting at position 683 of SEQ ID NO: 1882074
gagauuuggucugagacua

SEQ ID NO: 2093119 - RNA, 19 nt, Artificial Sequence
  Description of Artificial Sequence: Synthetic oligonucleotide
  Antisense strand to SEQ ID NO: 2093118
uagucucagaccaaaucuc

SEQ ID NO: 2093120 - RNA, 19 nt, Artificial Sequence
  Description of Artificial Sequence: Synthetic oligonucleotide
  Sense strand starting at position 740 of SEQ ID NO: 1882074
ggagacguuuccaggugga

SEQ ID NO: 2093121 - RNA, 19 nt, Artificial Sequence
  Description of Artificial Sequence: Synthetic oligonucleotide
  Antisense strand to SEQ ID NO: 2093120
uccaccuggaaacgucucc

SEQ ID NO: 2093122 - RNA, 19 nt, Artificial Sequence
  Description of Artificial Sequence: Synthetic oligonucleotide
  Sense strand starting at position 743 of SEQ ID NO: 1882074
gacguuuccagguggaaga

SEQ ID NO: 2093123 - RNA, 19 nt, Artificial Sequence
  Description of Artificial Sequence: Synthetic oligonucleotide
  Antisense strand to SEQ ID NO: 2093122
ucuuccaccuggaaacguc

SEQ ID NO: 2093124 - RNA, 19 nt, Artificial Sequence
  Description of Artificial Sequence: Synthetic oligonucleotide
  Sense strand starting at position 744 of SEQ ID NO: 1882074
acguuuccagguggaagaa

SEQ ID NO: 2093125 - RNA, 19 nt, Artificial Sequence
  Description of Artificial Sequence: Synthetic oligonucleotide
  Antisense strand to SEQ ID NO: 2093124
uucuuccaccuggaaacgu

SEQ ID NO: 2093126 - RNA, 19 nt, Artificial Sequence
  Description of Artificial Sequence: Synthetic oligonucleotide
  Sense strand starting at position 745 of SEQ ID NO: 1882074
cguuuccagguggaagaau

SEQ ID NO: 2093127 - RNA, 19 nt, Artificial Sequence
  Description of Artificial Sequence: Synthetic oligonucleotide
  Antisense strand to SEQ ID NO: 2093126
auucuuccaccuggaaacg

SEQ ID NO: 2093128 - RNA, 19 nt, Artificial Sequence
  Description of Artificial Sequence: Synthetic oligonucleotide
  Sense strand starting at position 1159 of SEQ ID NO: 1882074
aaguccugcguccauuuaa

SEQ ID NO: 2093129 - RNA, 19 nt, Artificial Sequence
  Description of Artificial Sequence: Synthetic oligonucleotide
  Antisense strand to SEQ ID NO: 2093128
uuaaauggacgcaggacuu

SEQ ID NO: 2093130 - RNA, 19 nt, Artificial Sequence
  Description of Artificial Sequence: Synthetic oligonucleotide
  Sense strand starting at position 1178 of SEQ ID NO: 1882074
auccuacugcucuguuaug

SEQ ID NO: 2093131 - RNA, 19 nt, Artificial Sequence
  Description of Artificial Sequence: Synthetic oligonucleotide
  Antisense strand to SEQ ID NO: 2093130
cauaacagagcaguaggau

SEQ ID NO: 2093132 - RNA, 19 nt, Artificial Sequence
  Description of Artificial Sequence: Synthetic oligonucleotide
  Sense strand starting at position 1244 of SEQ ID NO: 1882074
uaccuaugagugugaucgu

SEQ ID NO: 2093133 - RNA, 19 nt, Artificial Sequence
  Description of Artificial Sequence: Synthetic oligonucleotide
  Antisense strand to SEQ ID NO: 2093132
acgaucacacucauaggua

SEQ ID NO: 2093134 - RNA, 19 nt, Artificial Sequence
  Description of Artificial Sequence: Synthetic oligonucleotide
  Sense strand starting at position 1247 of SEQ ID NO: 1882074
cuaugagugugaucguauu

SEQ ID NO: 2093135 - RNA, 19 nt, Artificial Sequence
  Description of Artificial Sequence: Synthetic oligonucleotide
  Antisense strand to SEQ ID NO: 2093134
aauacgaucacacucauag

SEQ ID NO: 2093136 - RNA, 19 nt, Artificial Sequence
  Description of Artificial Sequence: Synthetic oligonucleotide
  Sense strand starting at position 1253 of SEQ ID NO: 1882074
gugugaucguauuugaaag

SEQ ID NO: 2093137 - RNA, 19 nt, Artificial Sequence
  Description of Artificial Sequence: Synthetic oligonucleotide
  Antisense strand to SEQ ID NO: 2093136
cuuucaaauacgaucacac

SEQ ID NO: 2093138 - RNA, 19 nt, Artificial Sequence
  Description of Artificial Sequence: Synthetic oligonucleotide
  Sense strand starting at position 1254 of SEQ ID NO: 1882074
ugugaucguauuugaaagu

SEQ ID NO: 2093139 - RNA, 19 nt, Artificial Sequence
  Description of Artificial Sequence: Synthetic oligonucleotide
  Antisense strand to SEQ ID NO: 2093138
acuuucaaauacgaucaca

SEQ ID NO: 2093140 - RNA, 19 nt, Artificial Sequence
  Description of Artificial Sequence: Synthetic oligonucleotide
  Sense strand starting at position 1596 of SEQ ID NO: 1882074
cuaugauugcacugcucca

SEQ ID NO: 2093141 - RNA, 19 nt, Artificial Sequence
  Description of Artificial Sequence: Synthetic oligonucleotide
  Antisense strand to SEQ ID NO: 2093140
uggagcagugcaaucauag

SEQ ID NO: 2093142 - RNA, 19 nt, Artificial Sequence
  Description of Artificial Sequence: Synthetic oligonucleotide
  Sense strand starting at position 2302 of SEQ ID NO: 1882074
uuugcuuaucaguauuauc

SEQ ID NO: 2093143 - RNA, 19 nt, Artificial Sequence
  Description of Artificial Sequence: Synthetic oligonucleotide
  Antisense strand to SEQ ID NO: 2093142
gauaauacugauaagcaaa

SEQ ID NO: 2093144 - RNA, 19 nt, Artificial Sequence
  Description of Artificial Sequence: Synthetic oligonucleotide
  Sense strand starting at position 2391 of SEQ ID NO: 1882074
gaguccaguuaaccuaaga

SEQ ID NO: 2093145 - RNA, 19 nt, Artificial Sequence
  Description of Artificial Sequence: Synthetic oligonucleotide
  Antisense strand to SEQ ID NO: 2093144
ucuuagguuaacuggacuc

SEQ ID NO: 2093146 - RNA, 19 nt, Artificial Sequence
  Description of Artificial Sequence: Synthetic oligonucleotide
  Sense strand starting at position 2808 of SEQ ID NO: 1882074
agggcagaccucugaaacu

SEQ ID NO: 2093147 - RNA, 19 nt, Artificial Sequence
  Description of Artificial Sequence: Synthetic oligonucleotide
  Antisense strand to SEQ ID NO: 2093146
aguuucagaggucugcccu

SEQ ID NO: 2093148 - RNA, 19 nt, Artificial Sequence
  Description of Artificial Sequence: Synthetic oligonucleotide
  Sense strand starting at position 2901 of SEQ ID NO: 1882074
cccagcuacccugaugaaa

SEQ ID NO: 2093149 - RNA, 19 nt, Artificial Sequence
  Description of Artificial Sequence: Synthetic oligonucleotide
  Antisense strand to SEQ ID NO: 2093148
uuucaucaggguagcuggg

SEQ ID NO: 2093150 - RNA, 19 nt, Artificial Sequence
  Description of Artificial Sequence: Synthetic oligonucleotide
  Sense strand starting at position 2921 of SEQ ID NO: 1882074
agagaaacagcauguguuu

SEQ ID NO: 2093151 - RNA, 19 nt, Artificial Sequence
  Description of Artificial Sequence: Synthetic oligonucleotide
  Antisense strand to SEQ ID NO: 2093150
aaacacaugcuguuucucu

SEQ ID NO: 2093152 - RNA, 19 nt, Artificial Sequence
  Description of Artificial Sequence: Synthetic oligonucleotide
  Sense strand starting at position 2923 of SEQ ID NO: 1882074
agaaacagcauguguuuga

SEQ ID NO: 2093153 - RNA, 19 nt, Artificial Sequence
  Description of Artificial Sequence: Synthetic oligonucleotide
  Antisense strand to SEQ ID NO: 2093152
ucaaacacaugcuguuucu

SEQ ID NO: 2093154 - RNA, 19 nt, Artificial Sequence
  Description of Artificial Sequence: Synthetic oligonucleotide
  Sense strand starting at position 2924 of SEQ ID NO: 1882074
gaaacagcauguguuugaa

SEQ ID NO: 2093155 - RNA, 19 nt, Artificial Sequence
  Description of Artificial Sequence: Synthetic oligonucleotide
  Antisense strand to SEQ ID NO: 2093154
uucaaacacaugcuguuuc

SEQ ID NO: 2093156 - RNA, 19 nt, Artificial Sequence
  Description of Artificial Sequence: Synthetic oligonucleotide
  Sense strand starting at position 3125 of SEQ ID NO: 1882074
acacgcauuugggaaagaa

SEQ ID NO: 2093157 - RNA, 19 nt, Artificial Sequence
  Description of Artificial Sequence: Synthetic oligonucleotide
  Antisense strand to SEQ ID NO: 2093156
uucuuucccaaaugcgugu

SEQ ID NO: 2093158 - RNA, 19 nt, Artificial Sequence
  Description of Artificial Sequence: Synthetic oligonucleotide
  Sense strand starting at position 3180 of SEQ ID NO: 1882074
uaccucaguuguuugggaa

SEQ ID NO: 2093159 - RNA, 19 nt, Artificial Sequence
  Description of Artificial Sequence: Synthetic oligonucleotide
  Antisense strand to SEQ ID NO: 2093158
uucccaaacaacugaggua

SEQ ID NO: 2093160 - RNA, 19 nt, Artificial Sequence
  Description of Artificial Sequence: Synthetic oligonucleotide
  Sense strand starting at position 3181 of SEQ ID NO: 1882074
accucaguuguuugggaac

SEQ ID NO: 2093161 - RNA, 19 nt, Artificial Sequence
  Description of Artificial Sequence: Synthetic oligonucleotide
  Antisense strand to SEQ ID NO: 2093160
guucccaaacaacugaggu

SEQ ID NO: 2093162 - RNA, 19 nt, Artificial Sequence
  Description of Artificial Sequence: Synthetic oligonucleotide
  Sense strand starting at position 3362 of SEQ ID NO: 1882074
gcauguaaagaggaguauu

SEQ ID NO: 2093163 - RNA, 19 nt, Artificial Sequence
  Description of Artificial Sequence: Synthetic oligonucleotide
  Antisense strand to SEQ ID NO: 2093162
aauacuccucuuuacaugc

SEQ ID NO: 2093164 - RNA, 19 nt, Artificial Sequence
  Description of Artificial Sequence: Synthetic oligonucleotide
  Sense strand starting at position 3549 of SEQ ID NO: 1882074
cggugaguucuggccugca

SEQ ID NO: 2093165 - RNA, 19 nt, Artificial Sequence
  Description of Artificial Sequence: Synthetic oligonucleotide
  Antisense strand to SEQ ID NO: 2093164
ugcaggccagaacucaccg

SEQ ID NO: 2093166 - RNA, 19 nt, Artificial Sequence
  Description of Artificial Sequence: Synthetic oligonucleotide
  Sense strand starting at position 3571 of SEQ ID NO: 1882074
cugcguagucugguucuca

SEQ ID NO: 2093167 - RNA, 19 nt, Artificial Sequence
  Description of Artificial Sequence: Synthetic oligonucleotide
  Antisense strand to SEQ ID NO: 2093166
ugagaaccagacuacgcag

SEQ ID NO: 2093168 - RNA, 19 nt, Artificial Sequence
  Description of Artificial Sequence: Synthetic oligonucleotide
  Sense strand starting at position 3579 of SEQ ID NO: 1882074
ucugguucucacugugauu

SEQ ID NO: 2093169 - RNA, 19 nt, Artificial Sequence
  Description of Artificial Sequence: Synthetic oligonucleotide
  Antisense strand to SEQ ID NO: 2093168
aaucacagugagaaccaga

SEQ ID NO: 2093170 - RNA, 19 nt, Artificial Sequence
  Description of Artificial Sequence: Synthetic oligonucleotide
  Sense strand starting at position 3616 of SEQ ID NO: 1882074
uugccaauuugggagcauu

SEQ ID NO: 2093171 - RNA, 19 nt, Artificial Sequence
  Description of Artificial Sequence: Synthetic oligonucleotide
  Antisense strand to SEQ ID NO: 2093170
aaugcucccaaauuggcaa

SEQ ID NO: 2093172 - RNA, 19 nt, Artificial Sequence
  Description of Artificial Sequence: Synthetic oligonucleotide
  Sense strand starting at position 3647 of SEQ ID NO: 1882074
cuacaauucuggcuugucu

SEQ ID NO: 2093173 - RNA, 19 nt, Artificial Sequence
  Description of Artificial Sequence: Synthetic oligonucleotide
  Antisense strand to SEQ ID NO: 2093172
agacaagccagaauuguag

SEQ ID NO: 2093174 - RNA, 19 nt, Artificial Sequence
  Description of Artificial Sequence: Synthetic oligonucleotide
  Sense strand starting at position 3655 of SEQ ID NO: 1882074
cuggcuugucuccaaaggu

SEQ ID NO: 2093175 - RNA, 19 nt, Artificial Sequence
  Description of Artificial Sequence: Synthetic oligonucleotide
  Antisense strand to SEQ ID NO: 2093174
accuuuggagacaagccag

SEQ ID NO: 2093176 - RNA, 19 nt, Artificial Sequence
  Description of Artificial Sequence: Synthetic oligonucleotide
  Sense strand starting at position 3734 of SEQ ID NO: 1882074
gcccacuuugcauaaggua

SEQ ID NO: 2093177 - RNA, 19 nt, Artificial Sequence
  Description of Artificial Sequence: Synthetic oligonucleotide
  Antisense strand to SEQ ID NO: 2093176
uaccuuaugcaaagugggc

SEQ ID NO: 2093178 - RNA, 19 nt, Artificial Sequence
  Description of Artificial Sequence: Synthetic oligonucleotide
  Sense strand starting at position 3747 of SEQ ID NO: 1882074
aagguacaugccugcaauu

SEQ ID NO: 2093179 - RNA, 19 nt, Artificial Sequence
  Description of Artificial Sequence: Synthetic oligonucleotide
  Antisense strand to SEQ ID NO: 2093178
aauugcaggcauguaccuu

SEQ ID NO: 2093180 - RNA, 19 nt, Artificial Sequence
  Description of Artificial Sequence: Synthetic oligonucleotide
  Sense strand starting at position 200 of SEQ ID NO: 1882075
ccacuuguuggagauguca

SEQ ID NO: 2093181 - RNA, 19 nt, Artificial Sequence
  Description of Artificial Sequence: Synthetic oligonucleotide
  Antisense strand to SEQ ID NO: 2093180
ugacaucuccaacaagugg

SEQ ID NO: 2093182 - RNA, 19 nt, Artificial Sequence
  Description of Artificial Sequence: Synthetic oligonucleotide
  Sense strand starting at position 202 of SEQ ID NO: 1882075
acuuguuggagaugucaca

SEQ ID NO: 2093183 - RNA, 19 nt, Artificial Sequence
  Description of Artificial Sequence: Synthetic oligonucleotide
  Antisense strand to SEQ ID NO: 2093182
ugugacaucuccaacaagu

SEQ ID NO: 2093184 - RNA, 19 nt, Artificial Sequence
  Description of Artificial Sequence: Synthetic oligonucleotide
  Sense strand starting at position 450 of SEQ ID NO: 1882075
ugcuuuaauuauguggaaa

SEQ ID NO: 2093185 - RNA, 19 nt, Artificial Sequence
  Description of Artificial Sequence: Synthetic oligonucleotide
  Antisense strand to SEQ ID NO: 2093184
uuuccacauaauuaaagca

SEQ ID NO: 2093186 - RNA, 19 nt, Artificial Sequence
  Description of Artificial Sequence: Synthetic oligonucleotide
  Sense strand starting at position 494 of SEQ ID NO: 1882075
gcgacagugcgcuugcaaa

SEQ ID NO: 2093187 - RNA, 19 nt, Artificial Sequence
  Description of Artificial Sequence: Synthetic oligonucleotide
  Antisense strand to SEQ ID NO: 2093186
uuugcaagcgcacugucgc

SEQ ID NO: 2093188 - RNA, 19 nt, Artificial Sequence
  Description of Artificial Sequence: Synthetic oligonucleotide
  Sense strand starting at position 505 of SEQ ID NO: 1882075
cuugcaaauccacgagaga

SEQ ID NO: 2093189 - RNA, 19 nt, Artificial Sequence
  Description of Artificial Sequence: Synthetic oligonucleotide
  Antisense strand to SEQ ID NO: 2093188
ucucucguggauuugcaag

SEQ ID NO: 2093190 - RNA, 19 nt, Artificial Sequence
  Description of Artificial Sequence: Synthetic oligonucleotide
  Sense strand starting at position 673 of SEQ ID NO: 1882075
cggcacuuccaucagcaaa

SEQ ID NO: 2093191 - RNA, 19 nt, Artificial Sequence
  Description of Artificial Sequence: Synthetic oligonucleotide
  Antisense strand to SEQ ID NO: 2093190
uuugcugauggaagugccg

SEQ ID NO: 2093192 - RNA, 19 nt, Artificial Sequence
  Description of Artificial Sequence: Synthetic oligonucleotide
  Sense strand starting at position 850 of SEQ ID NO: 1882075
ugacuucugguccaaacca

SEQ ID NO: 2093193 - RNA, 19 nt, Artificial Sequence
  Description of Artificial Sequence: Synthetic oligonucleotide
  Antisense strand to SEQ ID NO: 2093192
ugguuuggaccagaaguca

SEQ ID NO: 2093194 - RNA, 19 nt, Artificial Sequence
  Description of Artificial Sequence: Synthetic oligonucleotide
  Sense strand starting at position 911 of SEQ ID NO: 1882075
gaauucucauaguuaacga

SEQ ID NO: 2093195 - RNA, 19 nt, Artificial Sequence
  Description of Artificial Sequence: Synthetic oligonucleotide
  Antisense strand to SEQ ID NO: 2093194
ucguuaacuaugagaauuc

SEQ ID NO: 2093196 - RNA, 19 nt, Artificial Sequence
  Description of Artificial Sequence: Synthetic oligonucleotide
  Sense strand starting at position 1119 of SEQ ID NO: 1882075
guuucauugggaggaacau

SEQ ID NO: 2093197 - RNA, 19 nt, Artificial Sequence
  Description of Artificial Sequence: Synthetic oligonucleotide
  Antisense strand to SEQ ID NO: 2093196
auguuccucccaaugaaac

SEQ ID NO: 2093198 - RNA, 19 nt, Artificial Sequence
  Description of Artificial Sequence: Synthetic oligonucleotide
  Sense strand starting at position 1156 of SEQ ID NO: 1882075
ucccauuucuguuugugua

SEQ ID NO: 2093199 - RNA, 19 nt, Artificial Sequence
  Description of Artificial Sequence: Synthetic oligonucleotide
  Antisense strand to SEQ ID NO: 2093198
uacacaaacagaaauggga

SEQ ID NO: 2093200 - RNA, 19 nt, Artificial Sequence
  Description of Artificial Sequence: Synthetic oligonucleotide
  Sense strand starting at position 1157 of SEQ ID NO: 1882075
cccauuucuguuuguguaa

SEQ ID NO: 2093201 - RNA, 19 nt, Artificial Sequence
  Description of Artificial Sequence: Synthetic oligonucleotide
  Antisense strand to SEQ ID NO: 2093200
uuacacaaacagaaauggg

SEQ ID NO: 2093202 - RNA, 19 nt, Artificial Sequence
  Description of Artificial Sequence: Synthetic oligonucleotide
  Sense strand starting at position 1158 of SEQ ID NO: 1882075
ccauuucuguuuguguaau

SEQ ID NO: 2093203 - RNA, 19 nt, Artificial Sequence
  Description of Artificial Sequence: Synthetic oligonucleotide
  Antisense strand to SEQ ID NO: 2093202
auuacacaaacagaaaugg

SEQ ID NO: 2093204 - RNA, 19 nt, Artificial Sequence
  Description of Artificial Sequence: Synthetic oligonucleotide
  Sense strand starting at position 1376 of SEQ ID NO: 1882075
ccgugcuuacugcuaucua

SEQ ID NO: 2093205 - RNA, 19 nt, Artificial Sequence
  Description of Artificial Sequence: Synthetic oligonucleotide
  Antisense strand to SEQ ID NO: 2093204
uagauagcaguaagcacgg

SEQ ID NO: 2093206 - RNA, 19 nt, Artificial Sequence
  Description of Artificial Sequence: Synthetic oligonucleotide
  Sense strand starting at position 1503 of SEQ ID NO: 1882075
cgcugucaucucuacucca

SEQ ID NO: 2093207 - RNA, 19 nt, Artificial Sequence
  Description of Artificial Sequence: Synthetic oligonucleotide
  Antisense strand to SEQ ID NO: 2093206
uggaguagagaugacagcg

SEQ ID NO: 2093208 - RNA, 19 nt, Artificial Sequence
  Description of Artificial Sequence: Synthetic oligonucleotide
  Sense strand starting at position 1575 of SEQ ID NO: 1882075
agaugacaguguguucagu

SEQ ID NO: 2093209 - RNA, 19 nt, Artificial Sequence
  Description of Artificial Sequence: Synthetic oligonucleotide
  Antisense strand to SEQ ID NO: 2093208
acugaacacacugucaucu

SEQ ID NO: 2093210 - RNA, 19 nt, Artificial Sequence
  Description of Artificial Sequence: Synthetic oligonucleotide
  Sense strand starting at position 1577 of SEQ ID NO: 1882075
augacaguguguucaguaa

SEQ ID NO: 2093211 - RNA, 19 nt, Artificial Sequence
  Description of Artificial Sequence: Synthetic oligonucleotide
  Antisense strand to SEQ ID NO: 2093210
uuacugaacacacugucau

SEQ ID NO: 2093212 - RNA, 19 nt, Artificial Sequence
  Description of Artificial Sequence: Synthetic oligonucleotide
  Sense strand starting at position 1639 of SEQ ID NO: 1882075
gugauucuccuagaccacu

SEQ ID NO: 2093213 - RNA, 19 nt, Artificial Sequence
  Description of Artificial Sequence: Synthetic oligonucleotide
  Antisense strand to SEQ ID NO: 2093212
aguggucuaggagaaucac

SEQ ID NO: 2093214 - RNA, 19 nt, Artificial Sequence
  Description of Artificial Sequence: Synthetic oligonucleotide
  Sense strand starting at position 1713 of SEQ ID NO: 1882075
cgguguugaaugggaucaa

SEQ ID NO: 2093215 - RNA, 19 nt, Artificial Sequence
  Description of Artificial Sequence: Synthetic oligonucleotide
  Antisense strand to SEQ ID NO: 2093214
uugaucccauucaacaccg

SEQ ID NO: 2093216 - RNA, 19 nt, Artificial Sequence
  Description of Artificial Sequence: Synthetic oligonucleotide
  Sense strand starting at position 1740 of SEQ ID NO: 1882075
uggucuuggccaugucuaa

SEQ ID NO: 2093217 - RNA, 19 nt, Artificial Sequence
  Description of Artificial Sequence: Synthetic oligonucleotide
  Antisense strand to SEQ ID NO: 2093216
uuagacauggccaagacca

SEQ ID NO: 2093218 - RNA, 19 nt, Artificial Sequence
  Description of Artificial Sequence: Synthetic oligonucleotide
  Sense strand starting at position 1935 of SEQ ID NO: 1882075
gcugcaucugugggacacu

SEQ ID NO: 2093219 - RNA, 19 nt, Artificial Sequence
  Description of Artificial Sequence: Synthetic oligonucleotide
  Antisense strand to SEQ ID NO: 2093218
agugucccacagaugcagc

SEQ ID NO: 2093220 - RNA, 19 nt, Artificial Sequence
  Description of Artificial Sequence: Synthetic oligonucleotide
  Sense strand starting at position 2123 of SEQ ID NO: 1882075
uaguccugcuuucuggaaa

SEQ ID NO: 2093221 - RNA, 19 nt, Artificial Sequence
  Description of Artificial Sequence: Synthetic oligonucleotide
  Antisense strand to SEQ ID NO: 2093220
uuuccagaaagcaggacua

SEQ ID NO: 2093222 - RNA, 19 nt, Artificial Sequence
  Description of Artificial Sequence: Synthetic oligonucleotide
  Sense strand starting at position 2196 of SEQ ID NO: 1882075
gggcacuggcucugagaaa

SEQ ID NO: 2093223 - RNA, 19 nt, Artificial Sequence
  Description of Artificial Sequence: Synthetic oligonucleotide
  Antisense strand to SEQ ID NO: 2093222
uuucucagagccagugccc

SEQ ID NO: 2093224 - RNA, 19 nt, Artificial Sequence
  Description of Artificial Sequence: Synthetic oligonucleotide
  Sense strand starting at position 2412 of SEQ ID NO: 1882075
gcuguuugugugucccagu

SEQ ID NO: 2093225 - RNA, 19 nt, Artificial Sequence
  Description of Artificial Sequence: Synthetic oligonucleotide
  Antisense strand to SEQ ID NO: 2093224
acugggacacacaaacagc

SEQ ID NO: 2093226 - RNA, 19 nt, Artificial Sequence
  Description of Artificial Sequence: Synthetic oligonucleotide
  Sense strand starting at position 2797 of SEQ ID NO: 1882075
ucaggacacugcuugaauu

SEQ ID NO: 2093227 - RNA, 19 nt, Artificial Sequence
  Description of Artificial Sequence: Synthetic oligonucleotide
  Antisense strand to SEQ ID NO: 2093226
aauucaagcaguguccuga

SEQ ID NO: 2093228 - RNA, 19 nt, Artificial Sequence
  Description of Artificial Sequence: Synthetic oligonucleotide
  Sense strand starting at position 2867 of SEQ ID NO: 1882075
gggaaucccugagugggau

SEQ ID NO: 2093229 - RNA, 19 nt, Artificial Sequence
  Description of Artificial Sequence: Synthetic oligonucleotide
  Antisense strand to SEQ ID NO: 2093228
aucccacucagggauuccc

SEQ ID NO: 2093230 - RNA, 19 nt, Artificial Sequence
  Description of Artificial Sequence: Synthetic oligonucleotide
  Sense strand starting at position 3254 of SEQ ID NO: 1882075
cugcucauucgccaguaaa

SEQ ID NO: 2093231 - RNA, 19 nt, Artificial Sequence
  Description of Artificial Sequence: Synthetic oligonucleotide
  Antisense strand to SEQ ID NO: 2093230
uuuacuggcgaaugagcag

SEQ ID NO: 2093232 - RNA, 19 nt, Artificial Sequence
  Description of Artificial Sequence: Synthetic oligonucleotide
  Sense strand starting at position 3256 of SEQ ID NO: 1882075
gcucauucgccaguaaagu

SEQ ID NO: 2093233 - RNA, 19 nt, Artificial Sequence
  Description of Artificial Sequence: Synthetic oligonucleotide
  Antisense strand to SEQ ID NO: 2093232
acuuuacuggcgaaugagc

SEQ ID NO: 2093234 - RNA, 19 nt, Artificial Sequence
  Description of Artificial Sequence: Synthetic oligonucleotide
  Sense strand starting at position 3257 of SEQ ID NO: 1882075
cucauucgccaguaaagug

SEQ ID NO: 2093235 - RNA, 19 nt, Artificial Sequence
  Description of Artificial Sequence: Synthetic oligonucleotide
  Antisense strand to SEQ ID NO: 2093234
cacuuuacuggcgaaugag

SEQ ID NO: 2093236 - RNA, 19 nt, Artificial Sequence
  Description of Artificial Sequence: Synthetic oligonucleotide
  Sense strand starting at position 3519 of SEQ ID NO: 1882075
agagcagucccacacuaga

SEQ ID NO: 2093237 - RNA, 19 nt, Artificial Sequence
  Description of Artificial Sequence: Synthetic oligonucleotide
  Antisense strand to SEQ ID NO: 2093236
ucuagugugggacugcucu

SEQ ID NO: 2093238 - RNA, 19 nt, Artificial Sequence
  Description of Artificial Sequence: Synthetic oligonucleotide
  Sense strand starting at position 3572 of SEQ ID NO: 1882075
ccaugcuucccguagaauc

SEQ ID NO: 2093239 - RNA, 19 nt, Artificial Sequence
  Description of Artificial Sequence: Synthetic oligonucleotide
  Antisense strand to SEQ ID NO: 2093238
gauucuacgggaagcaugg

SEQ ID NO: 2093240 - RNA, 19 nt, Artificial Sequence
  Description of Artificial Sequence: Synthetic oligonucleotide
  Sense strand starting at position 3574 of SEQ ID NO: 1882075
augcuucccguagaaucaa

SEQ ID NO: 2093241 - RNA, 19 nt, Artificial Sequence
  Description of Artificial Sequence: Synthetic oligonucleotide
  Antisense strand to SEQ ID NO: 2093240
uugauucuacgggaagcau

SEQ ID NO: 2093242 - RNA, 19 nt, Artificial Sequence
  Description of Artificial Sequence: Synthetic oligonucleotide
  Sense strand starting at position 3582 of SEQ ID NO: 1882075
cguagaaucaagggccaua

SEQ ID NO: 2093243 - RNA, 19 nt, Artificial Sequence
  Description of Artificial Sequence: Synthetic oligonucleotide
  Antisense strand to SEQ ID NO: 2093242
uauggcccuugauucuacg

SEQ ID NO: 2093244 - RNA, 19 nt, Artificial Sequence
  Description of Artificial Sequence: Synthetic oligonucleotide
  Sense strand starting at position 3625 of SEQ ID NO: 1882075
cccugcagucacuggagaa

SEQ ID NO: 2093245 - RNA, 19 nt, Artificial Sequence
  Description of Artificial Sequence: Synthetic oligonucleotide
  Antisense strand to SEQ ID NO: 2093244
uucuccagugacugcaggg

SEQ ID NO: 2093246 - RNA, 19 nt, Artificial Sequence
  Description of Artificial Sequence: Synthetic oligonucleotide
  Sense strand starting at position 3709 of SEQ ID NO: 1882075
ugcagauuccuggacaccu

SEQ ID NO: 2093247 - RNA, 19 nt, Artificial Sequence
  Description of Artificial Sequence: Synthetic oligonucleotide
  Antisense strand to SEQ ID NO: 2093246
agguguccaggaaucugca

SEQ ID NO: 2093248 - RNA, 19 nt, Artificial Sequence
  Description of Artificial Sequence: Synthetic oligonucleotide
  Sense strand starting at position 3725 of SEQ ID NO: 1882075
ccuugugaccuuuggaaug

SEQ ID NO: 2093249 - RNA, 19 nt, Artificial Sequence
  Description of Artificial Sequence: Synthetic oligonucleotide
  Antisense strand to SEQ ID NO: 2093248
cauuccaaaggucacaagg

SEQ ID NO: 2093250 - RNA, 19 nt, Artificial Sequence
  Description of Artificial Sequence: Synthetic oligonucleotide
  Sense strand starting at position 3806 of SEQ ID NO: 1882075
ccuggagucuuccucccau

SEQ ID NO: 2093251 - RNA, 19 nt, Artificial Sequence
  Description of Artificial Sequence: Synthetic oligonucleotide
  Antisense strand to SEQ ID NO: 2093250
augggaggaagacuccagg

SEQ ID NO: 2093252 - RNA, 19 nt, Artificial Sequence
  Description of Artificial Sequence: Synthetic oligonucleotide
  Sense strand starting at position 3830 of SEQ ID NO: 1882075
ggcucugcugucuggacua

SEQ ID NO: 2093253 - RNA, 19 nt, Artificial Sequence
  Description of Artificial Sequence: Synthetic oligonucleotide
  Antisense strand to SEQ ID NO: 2093252
uaguccagacagcagagcc

SEQ ID NO: 2093254 - RNA, 19 nt, Artificial Sequence
  Description of Artificial Sequence: Synthetic oligonucleotide
  Sense strand starting at position 3844 of SEQ ID NO: 1882075
gacuaagcguucccugaca

SEQ ID NO: 2093255 - RNA, 19 nt, Artificial Sequence
  Description of Artificial Sequence: Synthetic oligonucleotide
  Antisense strand to SEQ ID NO: 2093254
ugucagggaacgcuuaguc

SEQ ID NO: 2093256 - RNA, 19 nt, Artificial Sequence
  Description of Artificial Sequence: Synthetic oligonucleotide
  Sense strand starting at position 3909 of SEQ ID NO: 1882075
auuggugcuguuggaaagu

SEQ ID NO: 2093257 - RNA, 19 nt, Artificial Sequence
  Description of Artificial Sequence: Synthetic oligonucleotide
  Antisense strand to SEQ ID NO: 2093256
acuuuccaacagcaccaau

SEQ ID NO: 2093258 - RNA, 19 nt, Artificial Sequence
  Description of Artificial Sequence: Synthetic oligonucleotide
  Sense strand starting at position 3918 of SEQ ID NO: 1882075
guuggaaaguaaccaguaa

SEQ ID NO: 2093259 - RNA, 19 nt, Artificial Sequence
  Description of Artificial Sequence: Synthetic oligonucleotide
  Antisense strand to SEQ ID NO: 2093258
uuacugguuacuuuccaac

SEQ ID NO: 2093260 - RNA, 19 nt, Artificial Sequence
  Description of Artificial Sequence: Synthetic oligonucleotide
  Sense strand starting at position 326 of SEQ ID NO: 1882076
ugcauuuagugagaggaga

SEQ ID NO: 2093261 - RNA, 19 nt, Artificial Sequence
  Description of Artificial Sequence: Synthetic oligonucleotide
  Antisense strand to SEQ ID NO: 2093260
ucuccucucacuaaaugca

SEQ ID NO: 2093262 - RNA, 19 nt, Artificial Sequence
  Description of Artificial Sequence: Synthetic oligonucleotide
  Sense strand starting at position 466 of SEQ ID NO: 1882076
ucggguuuccagggaagca

SEQ ID NO: 2093263 - RNA, 19 nt, Artificial Sequence
  Description of Artificial Sequence: Synthetic oligonucleotide
  Antisense strand to SEQ ID NO: 2093262
ugcuucccuggaaacccga

SEQ ID NO: 2093264 - RNA, 19 nt, Artificial Sequence
  Description of Artificial Sequence: Synthetic oligonucleotide
  Sense strand starting at position 580 of SEQ ID NO: 1882076
ccaaguaggcgugaccaaa

SEQ ID NO: 2093265 - RNA, 19 nt, Artificial Sequence
  Description of Artificial Sequence: Synthetic oligonucleotide
  Antisense strand to SEQ ID NO: 2093264
uuuggucacgccuacuugg

SEQ ID NO: 2093266 - RNA, 19 nt, Artificial Sequence
  Description of Artificial Sequence: Synthetic oligonucleotide
  Sense strand starting at position 752 of SEQ ID NO: 1882076
uugggcaagucuuuacauu

SEQ ID NO: 2093267 - RNA, 19 nt, Artificial Sequence
  Description of Artificial Sequence: Synthetic oligonucleotide
  Antisense strand to SEQ ID NO: 2093266
aauguaaagacuugcccaa

SEQ ID NO: 2093268 - RNA, 19 nt, Artificial Sequence
  Description of Artificial Sequence: Synthetic oligonucleotide
  Sense strand starting at position 764 of SEQ ID NO: 1882076
uuacauucuccaggucuca

SEQ ID NO: 2093269 - RNA, 19 nt, Artificial Sequence
  Description of Artificial Sequence: Synthetic oligonucleotide
  Antisense strand to SEQ ID NO: 2093268
ugagaccuggagaauguaa

SEQ ID NO: 2093270 - RNA, 19 nt, Artificial Sequence
  Description of Artificial Sequence: Synthetic oligonucleotide
  Sense strand starting at position 800 of SEQ ID NO: 1882076
uggagacagucauuguaga

SEQ ID NO: 2093271 - RNA, 19 nt, Artificial Sequence
  Description of Artificial Sequence: Synthetic oligonucleotide
  Antisense strand to SEQ ID NO: 2093270
ucuacaaugacugucucca

SEQ ID NO: 2093272 - RNA, 19 nt, Artificial Sequence
  Description of Artificial Sequence: Synthetic oligonucleotide
  Sense strand starting at position 801 of SEQ ID NO: 1882076
ggagacagucauuguagac

SEQ ID NO: 2093273 - RNA, 19 nt, Artificial Sequence
  Description of Artificial Sequence: Synthetic oligonucleotide
  Antisense strand to SEQ ID NO: 2093272
gucuacaaugacugucucc

SEQ ID NO: 2093274 - RNA, 19 nt, Artificial Sequence
  Description of Artificial Sequence: Synthetic oligonucleotide
  Sense strand starting at position 821 of SEQ ID NO: 1882076
agugucacuuucccuuaua

SEQ ID NO: 2093275 - RNA, 19 nt, Artificial Sequence
  Description of Artificial Sequence: Synthetic oligonucleotide
  Antisense strand to SEQ ID NO: 2093274
uauaagggaaagugacacu

SEQ ID NO: 2093276 - RNA, 19 nt, Artificial Sequence
  Description of Artificial Sequence: Synthetic oligonucleotide
  Sense strand starting at position 1013 of SEQ ID NO: 1882076
gcugauuucgaaggcauua

SEQ ID NO: 2093277 - RNA, 19 nt, Artificial Sequence
  Description of Artificial Sequence: Synthetic oligonucleotide
  Antisense strand to SEQ ID NO: 2093276
uaaugccuucgaaaucagc

SEQ ID NO: 2093278 - RNA, 19 nt, Artificial Sequence
  Description of Artificial Sequence: Synthetic oligonucleotide
  Sense strand starting at position 1018 of SEQ ID NO: 1882076
uuucgaaggcauuaaucuu

SEQ ID NO: 2093279 - RNA, 19 nt, Artificial Sequence
  Description of Artificial Sequence: Synthetic oligonucleotide
  Antisense strand to SEQ ID NO: 2093278
aagauuaaugccuucgaaa

SEQ ID NO: 2093280 - RNA, 19 nt, Artificial Sequence
  Description of Artificial Sequence: Synthetic oligonucleotide
  Sense strand starting at position 1039 of SEQ ID NO: 1882076
uaauccuucuguguggaca

SEQ ID NO: 2093281 - RNA, 19 nt, Artificial Sequence
  Description of Artificial Sequence: Synthetic oligonucleotide
  Antisense strand to SEQ ID NO: 2093280
uguccacacagaaggauua

SEQ ID NO: 2093282 - RNA, 19 nt, Artificial Sequence
  Description of Artificial Sequence: Synthetic oligonucleotide
  Sense strand starting at position 1040 of SEQ ID NO: 1882076
aauccuucuguguggacaa

SEQ ID NO: 2093283 - RNA, 19 nt, Artificial Sequence
  Description of Artificial Sequence: Synthetic oligonucleotide
  Antisense strand to SEQ ID NO: 2093282
uuguccacacagaaggauu

SEQ ID NO: 2093284 - RNA, 19 nt, Artificial Sequence
  Description of Artificial Sequence: Synthetic oligonucleotide
  Sense strand starting at position 1062 of SEQ ID NO: 1882076
gcugcaaauauuggugaaa

SEQ ID NO: 2093285 - RNA, 19 nt, Artificial Sequence
  Description of Artificial Sequence: Synthetic oligonucleotide
  Antisense strand to SEQ ID NO: 2093284
uuucaccaauauuugcagc

SEQ ID NO: 2093286 - RNA, 19 nt, Artificial Sequence
  Description of Artificial Sequence: Synthetic oligonucleotide
  Sense strand starting at position 1161 of SEQ ID NO: 1882076
uuucccgcuccugagauaa

SEQ ID NO: 2093287 - RNA, 19 nt, Artificial Sequence
  Description of Artificial Sequence: Synthetic oligonucleotide
  Antisense strand to SEQ ID NO: 2093286
uuaucucaggagcgggaaa

SEQ ID NO: 2093288 - RNA, 19 nt, Artificial Sequence
  Description of Artificial Sequence: Synthetic oligonucleotide
  Sense strand starting at position 1404 of SEQ ID NO: 1882076
ugcccuuuacgagaggaga

SEQ ID NO: 2093289 - RNA, 19 nt, Artificial Sequence
  Description of Artificial Sequence: Synthetic oligonucleotide
  Antisense strand to SEQ ID NO: 2093288
ucuccucucguaaagggca

SEQ ID NO: 2093290 - RNA, 19 nt, Artificial Sequence
  Description of Artificial Sequence: Synthetic oligonucleotide
  Sense strand starting at position 1506 of SEQ ID NO: 1882076
cagggauugucagcaucac

SEQ ID NO: 2093291 - RNA, 19 nt, Artificial Sequence
  Description of Artificial Sequence: Synthetic oligonucleotide
  Antisense strand to SEQ ID NO: 2093290
gugaugcugacaaucccug

SEQ ID NO: 2093292 - RNA, 19 nt, Artificial Sequence
  Description of Artificial Sequence: Synthetic oligonucleotide
  Sense strand starting at position 1594 of SEQ ID NO: 1882076
aaucaaguccgggaagcua

SEQ ID NO: 2093293 - RNA, 19 nt, Artificial Sequence
  Description of Artificial Sequence: Synthetic oligonucleotide
  Antisense strand to SEQ ID NO: 2093292
uagcuucccggacuugauu

SEQ ID NO: 2093294 - RNA, 19 nt, Artificial Sequence
  Description of Artificial Sequence: Synthetic oligonucleotide
  Sense strand starting at position 2030 of SEQ ID NO: 1882076
augugcucgcugcugauua

SEQ ID NO: 2093295 - RNA, 19 nt, Artificial Sequence
  Description of Artificial Sequence: Synthetic oligonucleotide
  Antisense strand to SEQ ID NO: 2093294
uaaucagcagcgagcacau

SEQ ID NO: 2093296 - RNA, 19 nt, Artificial Sequence
  Description of Artificial Sequence: Synthetic oligonucleotide
  Sense strand starting at position 2230 of SEQ ID NO: 1882076
auaggugaacgccaccaua

SEQ ID NO: 2093297 - RNA, 19 nt, Artificial Sequence
  Description of Artificial Sequence: Synthetic oligonucleotide
  Antisense strand to SEQ ID NO: 2093296
uaugguggcguucaccuau

SEQ ID NO: 2093298 - RNA, 19 nt, Artificial Sequence
  Description of Artificial Sequence: Synthetic oligonucleotide
  Sense strand starting at position 2387 of SEQ ID NO: 1882076
ggccuuaucccagaggauu

SEQ ID NO: 2093299 - RNA, 19 nt, Artificial Sequence
  Description of Artificial Sequence: Synthetic oligonucleotide
  Antisense strand to SEQ ID NO: 2093298
aauccucugggauaaggcc

SEQ ID NO: 2093300 - RNA, 19 nt, Artificial Sequence
  Description of Artificial Sequence: Synthetic oligonucleotide
  Sense strand starting at position 2517 of SEQ ID NO: 1882076
cuugauggcugacccaaau

SEQ ID NO: 2093301 - RNA, 19 nt, Artificial Sequence
  Description of Artificial Sequence: Synthetic oligonucleotide
  Antisense strand to SEQ ID NO: 2093300
auuugggucagccaucaag

SEQ ID NO: 2093302 - RNA, 19 nt, Artificial Sequence
  Description of Artificial Sequence: Synthetic oligonucleotide
  Sense strand starting at position 2652 of SEQ ID NO: 1882076
gcaggagcuaccuauagau

SEQ ID NO: 2093303 - RNA, 19 nt, Artificial Sequence
  Description of Artificial Sequence: Synthetic oligonucleotide
  Antisense strand to SEQ ID NO: 2093302
aucuauagguagcuccugc

SEQ ID NO: 2093304 - RNA, 19 nt, Artificial Sequence
  Description of Artificial Sequence: Synthetic oligonucleotide
  Sense strand starting at position 2761 of SEQ ID NO: 1882076
ggguuaaccucuuuaacau

SEQ ID NO: 2093305 - RNA, 19 nt, Artificial Sequence
  Description of Artificial Sequence: Synthetic oligonucleotide
  Antisense strand to SEQ ID NO: 2093304
auguuaaagagguuaaccc

SEQ ID NO: 2093306 - RNA, 19 nt, Artificial Sequence
  Description of Artificial Sequence: Synthetic oligonucleotide
  Sense strand starting at position 2789 of SEQ ID NO: 1882076
ggucaagguuaacugcaua

SEQ ID NO: 2093307 - RNA, 19 nt, Artificial Sequence
  Description of Artificial Sequence: Synthetic oligonucleotide
  Antisense strand to SEQ ID NO: 2093306
uaugcaguuaaccuugacc

SEQ ID NO: 2093308 - RNA, 19 nt, Artificial Sequence
  Description of Artificial Sequence: Synthetic oligonucleotide
  Sense strand starting at position 2901 of SEQ ID NO: 1882076
uguggaauucuaugaacuu

SEQ ID NO: 2093309 - RNA, 19 nt, Artificial Sequence
  Description of Artificial Sequence: Synthetic oligonucleotide
  Antisense strand to SEQ ID NO: 2093308
aaguucauagaauuccaca

SEQ ID NO: 2093310 - RNA, 19 nt, Artificial Sequence
  Description of Artificial Sequence: Synthetic oligonucleotide
  Sense strand starting at position 3030 of SEQ ID NO: 1882076
gagacugcaugucugcaaa

SEQ ID NO: 2093311 - RNA, 19 nt, Artificial Sequence
  Description of Artificial Sequence: Synthetic oligonucleotide
  Antisense strand to SEQ ID NO: 2093310
uuugcagacaugcagucuc

SEQ ID NO: 2093312 - RNA, 19 nt, Artificial Sequence
  Description of Artificial Sequence: Synthetic oligonucleotide
  Sense strand starting at position 3087 of SEQ ID NO: 1882076
guugcaggucucugauaga

SEQ ID NO: 2093313 - RNA, 19 nt, Artificial Sequence
  Description of Artificial Sequence: Synthetic oligonucleotide
  Antisense strand to SEQ ID NO: 2093312
ucuaucagagaccugcaac

SEQ ID NO: 2093314 - RNA, 19 nt, Artificial Sequence
  Description of Artificial Sequence: Synthetic oligonucleotide
  Sense strand starting at position 3096 of SEQ ID NO: 1882076
cucugauagacucgagcca

SEQ ID NO: 2093315 - RNA, 19 nt, Artificial Sequence
  Description of Artificial Sequence: Synthetic oligonucleotide
  Antisense strand to SEQ ID NO: 2093314
uggcucgagucuaucagag

SEQ ID NO: 2093316 - RNA, 19 nt, Artificial Sequence
  Description of Artificial Sequence: Synthetic oligonucleotide
  Sense strand starting at position 3108 of SEQ ID NO: 1882076
cgagccaaaugaucuaacu

SEQ ID NO: 2093317 - RNA, 19 nt, Artificial Sequence
  Description of Artificial Sequence: Synthetic oligonucleotide
  Antisense strand to SEQ ID NO: 2093316
aguuagaucauuuggcucg

SEQ ID NO: 2093318 - RNA, 19 nt, Artificial Sequence
  Description of Artificial Sequence: Synthetic oligonucleotide
  Sense strand starting at position 3150 of SEQ ID NO: 1882076
cuagcuguuugacuuuaca

SEQ ID NO: 2093319 - RNA, 19 nt, Artificial Sequence
  Description of Artificial Sequence: Synthetic oligonucleotide
  Antisense strand to SEQ ID NO: 2093318
uguaaagucaaacagcuag

SEQ ID NO: 2093320 - RNA, 19 nt, Artificial Sequence
  Description of Artificial Sequence: Synthetic oligonucleotide
  Sense strand starting at position 3153 of SEQ ID NO: 1882076
gcuguuugacuuuacacaa

SEQ ID NO: 2093321 - RNA, 19 nt, Artificial Sequence
  Description of Artificial Sequence: Synthetic oligonucleotide
  Antisense strand to SEQ ID NO: 2093320
uuguguaaagucaaacagc

SEQ ID NO: 2093322 - RNA, 19 nt, Artificial Sequence
  Description of Artificial Sequence: Synthetic oligonucleotide
  Sense strand starting at position 3202 of SEQ ID NO: 1882076
uggacaugauaguccucau

SEQ ID NO: 2093323 - RNA, 19 nt, Artificial Sequence
  Description of Artificial Sequence: Synthetic oligonucleotide
  Antisense strand to SEQ ID NO: 2093322
augaggacuaucaugucca

SEQ ID NO: 2093324 - RNA, 19 nt, Artificial Sequence
  Description of Artificial Sequence: Synthetic oligonucleotide
  Sense strand starting at position 3288 of SEQ ID NO: 1882076
uacaauugauggguucgau

SEQ ID NO: 2093325 - RNA, 19 nt, Artificial Sequence
  Description of Artificial Sequence: Synthetic oligonucleotide
  Antisense strand to SEQ ID NO: 2093324
aucgaacccaucaauugua

SEQ ID NO: 2093326 - RNA, 19 nt, Artificial Sequence
  Description of Artificial Sequence: Synthetic oligonucleotide
  Sense strand starting at position 3291 of SEQ ID NO: 1882076
aauugauggguucgauuau

SEQ ID NO: 2093327 - RNA, 19 nt, Artificial Sequence
  Description of Artificial Sequence: Synthetic oligonucleotide
  Antisense strand to SEQ ID NO: 2093326
auaaucgaacccaucaauu

SEQ ID NO: 2093328 - RNA, 19 nt, Artificial Sequence
  Description of Artificial Sequence: Synthetic oligonucleotide
  Sense strand starting at position 3357 of SEQ ID NO: 1882076
guccuucuacaccagagua

SEQ ID NO: 2093329 - RNA, 19 nt, Artificial Sequence
  Description of Artificial Sequence: Synthetic oligonucleotide
  Antisense strand to SEQ ID NO: 2093328
uacucugguguagaaggac

SEQ ID NO: 2093330 - RNA, 19 nt, Artificial Sequence
  Description of Artificial Sequence: Synthetic oligonucleotide
  Sense strand starting at position 3485 of SEQ ID NO: 1882076
ccagaaaccuuagcucaga

SEQ ID NO: 2093331 - RNA, 19 nt, Artificial Sequence
  Description of Artificial Sequence: Synthetic oligonucleotide
  Antisense strand to SEQ ID NO: 2093330
ucugagcuaagguuucugg

SEQ ID NO: 2093332 - RNA, 19 nt, Artificial Sequence
  Description of Artificial Sequence: Synthetic oligonucleotide
  Sense strand starting at position 3556 of SEQ ID NO: 1882076
aucugugcucccuagcaga

SEQ ID NO: 2093333 - RNA, 19 nt, Artificial Sequence
  Description of Artificial Sequence: Synthetic oligonucleotide
  Antisense strand to SEQ ID NO: 2093332
ucugcuagggagcacagau

SEQ ID NO: 2093334 - RNA, 19 nt, Artificial Sequence
  Description of Artificial Sequence: Synthetic oligonucleotide
  Sense strand starting at position 3731 of SEQ ID NO: 1882076
accuaaauggucuggaguu

SEQ ID NO: 2093335 - RNA, 19 nt, Artificial Sequence
  Description of Artificial Sequence: Synthetic oligonucleotide
  Antisense strand to SEQ ID NO: 2093334
aacuccagaccauuuaggu

SEQ ID NO: 2093336 - RNA, 19 nt, Artificial Sequence
  Description of Artificial Sequence: Synthetic oligonucleotide
  Sense strand starting at position 3733 of SEQ ID NO: 1882076
cuaaauggucuggaguuua

SEQ ID NO: 2093337 - RNA, 19 nt, Artificial Sequence
  Description of Artificial Sequence: Synthetic oligonucleotide
  Antisense strand to SEQ ID NO: 2093336
uaaacuccagaccauuuag

SEQ ID NO: 2093338 - RNA, 19 nt, Artificial Sequence
  Description of Artificial Sequence: Synthetic oligonucleotide
  Sense strand starting at position 3744 of SEQ ID NO: 1882076
ggaguuuacacgcaaucau

SEQ ID NO: 2093339 - RNA, 19 nt, Artificial Sequence
  Description of Artificial Sequence: Synthetic oligonucleotide
  Antisense strand to SEQ ID NO: 2093338
augauugcguguaaacucc

SEQ ID NO: 2093340 - RNA, 19 nt, Artificial Sequence
  Description of Artificial Sequence: Synthetic oligonucleotide
  Sense strand starting at position 128 of SEQ ID NO: 1882077
ccuuaaugccagggaugcu

SEQ ID NO: 2093341 - RNA, 19 nt, Artificial Sequence
  Description of Artificial Sequence: Synthetic oligonucleotide
  Antisense strand to SEQ ID NO: 2093340
agcaucccuggcauuaagg

SEQ ID NO: 2093342 - RNA, 19 nt, Artificial Sequence
  Description of Artificial Sequence: Synthetic oligonucleotide
  Sense strand starting at position 163 of SEQ ID NO: 1882077
gccugaggagcuuagugaa

SEQ ID NO: 2093343 - RNA, 19 nt, Artificial Sequence
  Description of Artificial Sequence: Synthetic oligonucleotide
  Antisense strand to SEQ ID NO: 2093342
uucacuaagcuccucaggc

SEQ ID NO: 2093344 - RNA, 19 nt, Artificial Sequence
  Description of Artificial Sequence: Synthetic oligonucleotide
  Sense strand starting at position 189 of SEQ ID NO: 1882077
ggcuuuagagugggacaca

SEQ ID NO: 2093345 - RNA, 19 nt, Artificial Sequence
  Description of Artificial Sequence: Synthetic oligonucleotide
  Antisense strand to SEQ ID NO: 2093344
ugugucccacucuaaagcc

SEQ ID NO: 2093346 - RNA, 19 nt, Artificial Sequence
  Description of Artificial Sequence: Synthetic oligonucleotide
  Sense strand starting at position 324 of SEQ ID NO: 1882077
ugccgauuaguuuagguga

SEQ ID NO: 2093347 - RNA, 19 nt, Artificial Sequence
  Description of Artificial Sequence: Synthetic oligonucleotide
  Antisense strand to SEQ ID NO: 2093346
ucaccuaaacuaaucggca

SEQ ID NO: 2093348 - RNA, 19 nt, Artificial Sequence
  Description of Artificial Sequence: Synthetic oligonucleotide
  Sense strand starting at position 327 of SEQ ID NO: 1882077
cgauuaguuuaggugacau

SEQ ID NO: 2093349 - RNA, 19 nt, Artificial Sequence
  Description of Artificial Sequence: Synthetic oligonucleotide
  Antisense strand to SEQ ID NO: 2093348
augucaccuaaacuaaucg

SEQ ID NO: 2093350 - RNA, 19 nt, Artificial Sequence
  Description of Artificial Sequence: Synthetic oligonucleotide
  Sense strand starting at position 612 of SEQ ID NO: 1882077
ugagcugucugagucuaag

SEQ ID NO: 2093351 - RNA, 19 nt, Artificial Sequence
  Description of Artificial Sequence: Synthetic oligonucleotide
  Antisense strand to SEQ ID NO: 2093350
cuuagacucagacagcuca

SEQ ID NO: 2093352 - RNA, 19 nt, Artificial Sequence
  Description of Artificial Sequence: Synthetic oligonucleotide
  Sense strand starting at position 623 of SEQ ID NO: 1882077
agucuaagccuugagcuua

SEQ ID NO: 2093353 - RNA, 19 nt, Artificial Sequence
  Description of Artificial Sequence: Synthetic oligonucleotide
  Antisense strand to SEQ ID NO: 2093352
uaagcucaaggcuuagacu

SEQ ID NO: 2093354 - RNA, 19 nt, Artificial Sequence
  Description of Artificial Sequence: Synthetic oligonucleotide
  Sense strand starting at position 870 of SEQ ID NO: 1882077
gcucuuagccaugauguua

SEQ ID NO: 2093355 - RNA, 19 nt, Artificial Sequence
  Description of Artificial Sequence: Synthetic oligonucleotide
  Antisense strand to SEQ ID NO: 2093354
uaacaucauggcuaagagc

SEQ ID NO: 2093356 - RNA, 19 nt, Artificial Sequence
  Description of Artificial Sequence: Synthetic oligonucleotide
  Sense strand starting at position 926 of SEQ ID NO: 1882077
ucgaaagggagcugagaau

SEQ ID NO: 2093357 - RNA, 19 nt, Artificial Sequence
  Description of Artificial Sequence: Synthetic oligonucleotide
  Antisense strand to SEQ ID NO: 2093356
auucucagcucccuuucga

SEQ ID NO: 2093358 - RNA, 19 nt, Artificial Sequence
  Description of Artificial Sequence: Synthetic oligonucleotide
  Sense strand starting at position 933 of SEQ ID NO: 1882077
ggagcugagaauuggguau

SEQ ID NO: 2093359 - RNA, 19 nt, Artificial Sequence
  Description of Artificial Sequence: Synthetic oligonucleotide
  Antisense strand to SEQ ID NO: 2093358
auacccaauucucagcucc

SEQ ID NO: 2093360 - RNA, 19 nt, Artificial Sequence
  Description of Artificial Sequence: Synthetic oligonucleotide
  Sense strand starting at position 1003 of SEQ ID NO: 1882077
ggccuuugggcuuauuaaa

SEQ ID NO: 2093361 - RNA, 19 nt, Artificial Sequence
  Description of Artificial Sequence: Synthetic oligonucleotide
  Antisense strand to SEQ ID NO: 2093360
uuuaauaagcccaaaggcc

SEQ ID NO: 2093362 - RNA, 19 nt, Artificial Sequence
  Description of Artificial Sequence: Synthetic oligonucleotide
  Sense strand starting at position 1039 of SEQ ID NO: 1882077
cacagagccucaguggaau

SEQ ID NO: 2093363 - RNA, 19 nt, Artificial Sequence
  Description of Artificial Sequence: Synthetic oligonucleotide
  Antisense strand to SEQ ID NO: 2093362
auuccacugaggcucugug

SEQ ID NO: 2093364 - RNA, 19 nt, Artificial Sequence
  Description of Artificial Sequence: Synthetic oligonucleotide
  Sense strand starting at position 1051 of SEQ ID NO: 1882077
guggaaucuccaugcuuag

SEQ ID NO: 2093365 - RNA, 19 nt, Artificial Sequence
  Description of Artificial Sequence: Synthetic oligonucleotide
  Antisense strand to SEQ ID NO: 2093364
cuaagcauggagauuccac

SEQ ID NO: 2093366 - RNA, 19 nt, Artificial Sequence
  Description of Artificial Sequence: Synthetic oligonucleotide
  Sense strand starting at position 1119 of SEQ ID NO: 1882077
aguacuuaccauugcagga

SEQ ID NO: 2093367 - RNA, 19 nt, Artificial Sequence
  Description of Artificial Sequence: Synthetic oligonucleotide
  Antisense strand to SEQ ID NO: 2093366
uccugcaaugguaaguacu

SEQ ID NO: 2093368 - RNA, 19 nt, Artificial Sequence
  Description of Artificial Sequence: Synthetic oligonucleotide
  Sense strand starting at position 1324 of SEQ ID NO: 1882077
ggcugagugagugaugaug

SEQ ID NO: 2093369 - RNA, 19 nt, Artificial Sequence
  Description of Artificial Sequence: Synthetic oligonucleotide
  Antisense strand to SEQ ID NO: 2093368
caucaucacucacucagcc

SEQ ID NO: 2093370 - RNA, 19 nt, Artificial Sequence
  Description of Artificial Sequence: Synthetic oligonucleotide
  Sense strand starting at position 1350 of SEQ ID NO: 1882077
gcuccugaaacucguagaa

SEQ ID NO: 2093371 - RNA, 19 nt, Artificial Sequence
  Description of Artificial Sequence: Synthetic oligonucleotide
  Antisense strand to SEQ ID NO: 2093370
uucuacgaguuucaggagc

SEQ ID NO: 2093372 - RNA, 19 nt, Artificial Sequence
  Description of Artificial Sequence: Synthetic oligonucleotide
  Sense strand starting at position 1354 of SEQ ID NO: 1882077
cugaaacucguagaagguu

SEQ ID NO: 2093373 - RNA, 19 nt, Artificial Sequence
  Description of Artificial Sequence: Synthetic oligonucleotide
  Antisense strand to SEQ ID NO: 2093372
aaccuucuacgaguuucag

SEQ ID NO: 2093374 - RNA, 19 nt, Artificial Sequence
  Description of Artificial Sequence: Synthetic oligonucleotide
  Sense strand starting at position 1448 of SEQ ID NO: 1882077
auguuagcccguuugaugu

SEQ ID NO: 2093375 - RNA, 19 nt, Artificial Sequence
  Description of Artificial Sequence: Synthetic oligonucleotide
  Antisense strand to SEQ ID NO: 2093374
acaucaaacgggcuaacau

SEQ ID NO: 2093376 - RNA, 19 nt, Artificial Sequence
  Description of Artificial Sequence: Synthetic oligonucleotide
  Sense strand starting at position 1467 of SEQ ID NO: 1882077
ccagcuuauggcugaggaa

SEQ ID NO: 2093377 - RNA, 19 nt, Artificial Sequence
  Description of Artificial Sequence: Synthetic oligonucleotide
  Antisense strand to SEQ ID NO: 2093376
uuccucagccauaagcugg

SEQ ID NO: 2093378 - RNA, 19 nt, Artificial Sequence
  Description of Artificial Sequence: Synthetic oligonucleotide
  Sense strand starting at position 1479 of SEQ ID NO: 1882077
ugaggaaccucugcagguu

SEQ ID NO: 2093379 - RNA, 19 nt, Artificial Sequence
  Description of Artificial Sequence: Synthetic oligonucleotide
  Antisense strand to SEQ ID NO: 2093378
aaccugcagagguuccuca

SEQ ID NO: 2093380 - RNA, 19 nt, Artificial Sequence
  Description of Artificial Sequence: Synthetic oligonucleotide
  Sense strand starting at position 1635 of SEQ ID NO: 1882077
ccgugacguugaacgagua

SEQ ID NO: 2093381 - RNA, 19 nt, Artificial Sequence
  Description of Artificial Sequence: Synthetic oligonucleotide
  Antisense strand to SEQ ID NO: 2093380
uacucguucaacgucacgg

SEQ ID NO: 2093382 - RNA, 19 nt, Artificial Sequence
  Description of Artificial Sequence: Synthetic oligonucleotide
  Sense strand starting at position 1774 of SEQ ID NO: 1882077
gucuguggcauggaucuua

SEQ ID NO: 2093383 - RNA, 19 nt, Artificial Sequence
  Description of Artificial Sequence: Synthetic oligonucleotide
  Antisense strand to SEQ ID NO: 2093382
uaagauccaugccacagac

SEQ ID NO: 2093384 - RNA, 19 nt, Artificial Sequence
  Description of Artificial Sequence: Synthetic oligonucleotide
  Sense strand starting at position 1917 of SEQ ID NO: 1882077
gagggaugccacugucuga

SEQ ID NO: 2093385 - RNA, 19 nt, Artificial Sequence
  Description of Artificial Sequence: Synthetic oligonucleotide
  Antisense strand to SEQ ID NO: 2093384
ucagacaguggcaucccuc

SEQ ID NO: 2093386 - RNA, 19 nt, Artificial Sequence
  Description of Artificial Sequence: Synthetic oligonucleotide
  Sense strand starting at position 2235 of SEQ ID NO: 1882077
agccauagacuugggcuaa

SEQ ID NO: 2093387 - RNA, 19 nt, Artificial Sequence
  Description of Artificial Sequence: Synthetic oligonucleotide
  Antisense strand to SEQ ID NO: 2093386
uuagcccaagucuauggcu

SEQ ID NO: 2093388 - RNA, 19 nt, Artificial Sequence
  Description of Artificial Sequence: Synthetic oligonucleotide
  Sense strand starting at position 2246 of SEQ ID NO: 1882077
ugggcuaacuuccucauga

SEQ ID NO: 2093389 - RNA, 19 nt, Artificial Sequence
  Description of Artificial Sequence: Synthetic oligonucleotide
  Antisense strand to SEQ ID NO: 2093388
ucaugaggaaguuagccca

SEQ ID NO: 2093390 - RNA, 19 nt, Artificial Sequence
  Description of Artificial Sequence: Synthetic oligonucleotide
  Sense strand starting at position 2248 of SEQ ID NO: 1882077
ggcuaacuuccucaugaag

SEQ ID NO: 2093391 - RNA, 19 nt, Artificial Sequence
  Description of Artificial Sequence: Synthetic oligonucleotide
  Antisense strand to SEQ ID NO: 2093390
cuucaugaggaaguuagcc

SEQ ID NO: 2093392 - RNA, 19 nt, Artificial Sequence
  Description of Artificial Sequence: Synthetic oligonucleotide
  Sense strand starting at position 2300 of SEQ ID NO: 1882077
ucagaugucucagcaauuc

SEQ ID NO: 2093393 - RNA, 19 nt, Artificial Sequence
  Description of Artificial Sequence: Synthetic oligonucleotide
  Antisense strand to SEQ ID NO: 2093392
gaauugcugagacaucuga

SEQ ID NO: 2093394 - RNA, 19 nt, Artificial Sequence
  Description of Artificial Sequence: Synthetic oligonucleotide
  Sense strand starting at position 2396 of SEQ ID NO: 1882077
cgggauuuguccuucuagu

SEQ ID NO: 2093395 - RNA, 19 nt, Artificial Sequence
  Description of Artificial Sequence: Synthetic oligonucleotide
  Antisense strand to SEQ ID NO: 2093394
acuagaaggacaaaucccg

SEQ ID NO: 2093396 - RNA, 19 nt, Artificial Sequence
  Description of Artificial Sequence: Synthetic oligonucleotide
  Sense strand starting at position 2511 of SEQ ID NO: 1882077
accuaacuuugaucaggua

SEQ ID NO: 2093397 - RNA, 19 nt, Artificial Sequence
  Description of Artificial Sequence: Synthetic oligonucleotide
  Antisense strand to SEQ ID NO: 2093396
uaccugaucaaaguuaggu

SEQ ID NO: 2093398 - RNA, 19 nt, Artificial Sequence
  Description of Artificial Sequence: Synthetic oligonucleotide
  Sense strand starting at position 2555 of SEQ ID NO: 1882077
acauuugaguccugaggga

SEQ ID NO: 2093399 - RNA, 19 nt, Artificial Sequence
  Description of Artificial Sequence: Synthetic oligonucleotide
  Antisense strand to SEQ ID NO: 2093398
ucccucaggacucaaaugu

SEQ ID NO: 2093400 - RNA, 19 nt, Artificial Sequence
  Description of Artificial Sequence: Synthetic oligonucleotide
  Sense strand starting at position 2850 of SEQ ID NO: 1882077
cuuccugccugacuuagaa

SEQ ID NO: 2093401 - RNA, 19 nt, Artificial Sequence
  Description of Artificial Sequence: Synthetic oligonucleotide
  Antisense strand to SEQ ID NO: 2093400
uucuaagucaggcaggaag

SEQ ID NO: 2093402 - RNA, 19 nt, Artificial Sequence
  Description of Artificial Sequence: Synthetic oligonucleotide
  Sense strand starting at position 2881 of SEQ ID NO: 1882077
ccuucuucuccucagugau

SEQ ID NO: 2093403 - RNA, 19 nt, Artificial Sequence
  Description of Artificial Sequence: Synthetic oligonucleotide
  Antisense strand to SEQ ID NO: 2093402
aucacugaggagaagaagg

SEQ ID NO: 2093404 - RNA, 19 nt, Artificial Sequence
  Description of Artificial Sequence: Synthetic oligonucleotide
  Sense strand starting at position 2920 of SEQ ID NO: 1882077
caacgagggucuccacaau

SEQ ID NO: 2093405 - RNA, 19 nt, Artificial Sequence
  Description of Artificial Sequence: Synthetic oligonucleotide
  Antisense strand to SEQ ID NO: 2093404
auuguggagacccucguug

SEQ ID NO: 2093406 - RNA, 19 nt, Artificial Sequence
  Description of Artificial Sequence: Synthetic oligonucleotide
  Sense strand starting at position 3161 of SEQ ID NO: 1882077
guacaaugcuagucauuau

SEQ ID NO: 2093407 - RNA, 19 nt, Artificial Sequence
  Description of Artificial Sequence: Synthetic oligonucleotide
  Antisense strand to SEQ ID NO: 2093406
auaaugacuagcauuguac

SEQ ID NO: 2093408 - RNA, 19 nt, Artificial Sequence
  Description of Artificial Sequence: Synthetic oligonucleotide
  Sense strand starting at position 3192 of SEQ ID NO: 1882077
augauaaugcuguaaauac

SEQ ID NO: 2093409 - RNA, 19 nt, Artificial Sequence
  Description of Artificial Sequence: Synthetic oligonucleotide
  Antisense strand to SEQ ID NO: 2093408
guauuuacagcauuaucau

SEQ ID NO: 2093410 - RNA, 19 nt, Artificial Sequence
  Description of Artificial Sequence: Synthetic oligonucleotide
  Sense strand starting at position 3203 of SEQ ID NO: 1882077
guaaauacauuauccuagu

SEQ ID NO: 2093411 - RNA, 19 nt, Artificial Sequence
  Description of Artificial Sequence: Synthetic oligonucleotide
  Antisense strand to SEQ ID NO: 2093410
acuaggauaauguauuuac

SEQ ID NO: 2093412 - RNA, 19 nt, Artificial Sequence
  Description of Artificial Sequence: Synthetic oligonucleotide
  Sense strand starting at position 3219 of SEQ ID NO: 1882077
aguuuauccuucuuaugag

SEQ ID NO: 2093413 - RNA, 19 nt, Artificial Sequence
  Description of Artificial Sequence: Synthetic oligonucleotide
  Antisense strand to SEQ ID NO: 2093412
cucauaagaaggauaaacu

SEQ ID NO: 2093414 - RNA, 19 nt, Artificial Sequence
  Description of Artificial Sequence: Synthetic oligonucleotide
  Sense strand starting at position 3447 of SEQ ID NO: 1882077
ugaugccagucauuacuaa

SEQ ID NO: 2093415 - RNA, 19 nt, Artificial Sequence
  Description of Artificial Sequence: Synthetic oligonucleotide
  Antisense strand to SEQ ID NO: 2093414
uuaguaaugacuggcauca

SEQ ID NO: 2093416 - RNA, 19 nt, Artificial Sequence
  Description of Artificial Sequence: Synthetic oligonucleotide
  Sense strand starting at position 3681 of SEQ ID NO: 1882077
uucgguuuagcccauaaac

SEQ ID NO: 2093417 - RNA, 19 nt, Artificial Sequence
  Description of Artificial Sequence: Synthetic oligonucleotide
  Antisense strand to SEQ ID NO: 2093416
guuuaugggcuaaaccgaa

SEQ ID NO: 2093418 - RNA, 19 nt, Artificial Sequence
  Description of Artificial Sequence: Synthetic oligonucleotide
  Sense strand starting at position 3683 of SEQ ID NO: 1882077
cgguuuagcccauaaaccu

SEQ ID NO: 2093419 - RNA, 19 nt, Artificial Sequence
  Description of Artificial Sequence: Synthetic oligonucleotide
  Antisense strand to SEQ ID NO: 2093418
agguuuaugggcuaaaccg

SEQ ID NO: 2093420 - RNA, 19 nt, Artificial Sequence
  Description of Artificial Sequence: Synthetic oligonucleotide
  Sense strand starting at position 333 of SEQ ID NO: 1882078
cguaccaucucuucuuauu

SEQ ID NO: 2093421 - RNA, 19 nt, Artificial Sequence
  Description of Artificial Sequence: Synthetic oligonucleotide
  Antisense strand to SEQ ID NO: 2093420
aauaagaagagaugguacg

SEQ ID NO: 2093422 - RNA, 19 nt, Artificial Sequence
  Description of Artificial Sequence: Synthetic oligonucleotide
  Sense strand starting at position 398 of SEQ ID NO: 1882078
ccaaguauaguuuaaagcu

SEQ ID NO: 2093423 - RNA, 19 nt, Artificial Sequence
  Description of Artificial Sequence: Synthetic oligonucleotide
  Antisense strand to SEQ ID NO: 2093422
agcuuuaaacuauacuugg

SEQ ID NO: 2093424 - RNA, 19 nt, Artificial Sequence
  Description of Artificial Sequence: Synthetic oligonucleotide
  Sense strand starting at position 427 of SEQ ID NO: 1882078
ucacacucucaucgguaau

SEQ ID NO: 2093425 - RNA, 19 nt, Artificial Sequence
  Description of Artificial Sequence: Synthetic oligonucleotide
  Antisense strand to SEQ ID NO: 2093424
auuaccgaugagaguguga

SEQ ID NO: 2093426 - RNA, 19 nt, Artificial Sequence
  Description of Artificial Sequence: Synthetic oligonucleotide
  Sense strand starting at position 429 of SEQ ID NO: 1882078
acacucucaucgguaauau

SEQ ID NO: 2093427 - RNA, 19 nt, Artificial Sequence
  Description of Artificial Sequence: Synthetic oligonucleotide
  Antisense strand to SEQ ID NO: 2093426
auauuaccgaugagagugu

SEQ ID NO: 2093428 - RNA, 19 nt, Artificial Sequence
  Description of Artificial Sequence: Synthetic oligonucleotide
  Sense strand starting at position 438 of SEQ ID NO: 1882078
ucgguaauaucacuucuag

SEQ ID NO: 2093429 - RNA, 19 nt, Artificial Sequence
  Description of Artificial Sequence: Synthetic oligonucleotide
  Antisense strand to SEQ ID NO: 2093428
cuagaagugauauuaccga

SEQ ID NO: 2093430 - RNA, 19 nt, Artificial Sequence
  Description of Artificial Sequence: Synthetic oligonucleotide
  Sense strand starting at position 548 of SEQ ID NO: 1882078
ugacccauuugacaguauu

SEQ ID NO: 2093431 - RNA, 19 nt, Artificial Sequence
  Description of Artificial Sequence: Synthetic oligonucleotide
  Antisense strand to SEQ ID NO: 2093430
aauacugucaaauggguca

SEQ ID NO: 2093432 - RNA, 19 nt, Artificial Sequence
  Description of Artificial Sequence: Synthetic oligonucleotide
  Sense strand starting at position 554 of SEQ ID NO: 1882078
auuugacaguauuaucagu

SEQ ID NO: 2093433 - RNA, 19 nt, Artificial Sequence
  Description of Artificial Sequence: Synthetic oligonucleotide
  Antisense strand to SEQ ID NO: 2093432
acugauaauacugucaaau

SEQ ID NO: 2093434 - RNA, 19 nt, Artificial Sequence
  Description of Artificial Sequence: Synthetic oligonucleotide
  Sense strand starting at position 556 of SEQ ID NO: 1882078
uugacaguauuaucaguau

SEQ ID NO: 2093435 - RNA, 19 nt, Artificial Sequence
  Description of Artificial Sequence: Synthetic oligonucleotide
  Antisense strand to SEQ ID NO: 2093434
auacugauaauacugucaa

SEQ ID NO: 2093436 - RNA, 19 nt, Artificial Sequence
  Description of Artificial Sequence: Synthetic oligonucleotide
  Sense strand starting at position 559 of SEQ ID NO: 1882078
acaguauuaucaguaugac

SEQ ID NO: 2093437 - RNA, 19 nt, Artificial Sequence
  Description of Artificial Sequence: Synthetic oligonucleotide
  Antisense strand to SEQ ID NO: 2093436
gucauacugauaauacugu

SEQ ID NO: 2093438 - RNA, 19 nt, Artificial Sequence
  Description of Artificial Sequence: Synthetic oligonucleotide
  Sense strand starting at position 562 of SEQ ID NO: 1882078
guauuaucaguaugacaga

SEQ ID NO: 2093439 - RNA, 19 nt, Artificial Sequence
  Description of Artificial Sequence: Synthetic oligonucleotide
  Antisense strand to SEQ ID NO: 2093438
ucugucauacugauaauac

SEQ ID NO: 2093440 - RNA, 19 nt, Artificial Sequence
  Description of Artificial Sequence: Synthetic oligonucleotide
  Sense strand starting at position 725 of SEQ ID NO: 1882078
acauaugaauaggaaugaa

SEQ ID NO: 2093441 - RNA, 19 nt, Artificial Sequence
  Description of Artificial Sequence: Synthetic oligonucleotide
  Antisense strand to SEQ ID NO: 2093440
uucauuccuauucauaugu

SEQ ID NO: 2093442 - RNA, 19 nt, Artificial Sequence
  Description of Artificial Sequence: Synthetic oligonucleotide
  Sense strand starting at position 845 of SEQ ID NO: 1882078
ccugguauguauguauagu

SEQ ID NO: 2093443 - RNA, 19 nt, Artificial Sequence
  Description of Artificial Sequence: Synthetic oligonucleotide
  Antisense strand to SEQ ID NO: 2093442
acuauacauacauaccagg

SEQ ID NO: 2093444 - RNA, 19 nt, Artificial Sequence
  Description of Artificial Sequence: Synthetic oligonucleotide
  Sense strand starting at position 846 of SEQ ID NO: 1882078
cugguauguauguauaguu

SEQ ID NO: 2093445 - RNA, 19 nt, Artificial Sequence
  Description of Artificial Sequence: Synthetic oligonucleotide
  Antisense strand to SEQ ID NO: 2093444
aacuauacauacauaccag

SEQ ID NO: 2093446 - RNA, 19 nt, Artificial Sequence
  Description of Artificial Sequence: Synthetic oligonucleotide
  Sense strand starting at position 877 of SEQ ID NO: 1882078
uguauaugcauagguagaa

SEQ ID NO: 2093447 - RNA, 19 nt, Artificial Sequence
  Description of Artificial Sequence: Synthetic oligonucleotide
  Antisense strand to SEQ ID NO: 2093446
uucuaccuaugcauauaca

SEQ ID NO: 2093448 - RNA, 19 nt, Artificial Sequence
  Description of Artificial Sequence: Synthetic oligonucleotide
  Sense strand starting at position 878 of SEQ ID NO: 1882078
guauaugcauagguagaaa

SEQ ID NO: 2093449 - RNA, 19 nt, Artificial Sequence
  Description of Artificial Sequence: Synthetic oligonucleotide
  Antisense strand to SEQ ID NO: 2093448
uuucuaccuaugcauauac

SEQ ID NO: 2093450 - RNA, 19 nt, Artificial Sequence
  Description of Artificial Sequence: Synthetic oligonucleotide
  Sense strand starting at position 1476 of SEQ ID NO: 1882078
ggucuugaccugugacaau

SEQ ID NO: 2093451 - RNA, 19 nt, Artificial Sequence
  Description of Artificial Sequence: Synthetic oligonucleotide
  Antisense strand to SEQ ID NO: 2093450
auugucacaggucaagacc

SEQ ID NO: 2093452 - RNA, 19 nt, Artificial Sequence
  Description of Artificial Sequence: Synthetic oligonucleotide
  Sense strand starting at position 1503 of SEQ ID NO: 1882078
ugagaauucccuggugcca

SEQ ID NO: 2093453 - RNA, 19 nt, Artificial Sequence
  Description of Artificial Sequence: Synthetic oligonucleotide
  Antisense strand to SEQ ID NO: 2093452
uggcaccagggaauucuca

SEQ ID NO: 2093454 - RNA, 19 nt, Artificial Sequence
  Description of Artificial Sequence: Synthetic oligonucleotide
  Sense strand starting at position 1675 of SEQ ID NO: 1882078
guacuuagcuccucucaag

SEQ ID NO: 2093455 - RNA, 19 nt, Artificial Sequence
  Description of Artificial Sequence: Synthetic oligonucleotide
  Antisense strand to SEQ ID NO: 2093454
cuugagaggagcuaaguac

SEQ ID NO: 2093456 - RNA, 19 nt, Artificial Sequence
  Description of Artificial Sequence: Synthetic oligonucleotide
  Sense strand starting at position 1853 of SEQ ID NO: 1882078
uggcuuccuccacaaggau

SEQ ID NO: 2093457 - RNA, 19 nt, Artificial Sequence
  Description of Artificial Sequence: Synthetic oligonucleotide
  Antisense strand to SEQ ID NO: 2093456
auccuuguggaggaagcca

SEQ ID NO: 2093458 - RNA, 19 nt, Artificial Sequence
  Description of Artificial Sequence: Synthetic oligonucleotide
  Sense strand starting at position 2040 of SEQ ID NO: 1882078
augucagcucucugaggau

SEQ ID NO: 2093459 - RNA, 19 nt, Artificial Sequence
  Description of Artificial Sequence: Synthetic oligonucleotide
  Antisense strand to SEQ ID NO: 2093458
auccucagagagcugacau

SEQ ID NO: 2093460 - RNA, 19 nt, Artificial Sequence
  Description of Artificial Sequence: Synthetic oligonucleotide
  Sense strand starting at position 2145 of SEQ ID NO: 1882078
ggauguuugagauaagugc

SEQ ID NO: 2093461 - RNA, 19 nt, Artificial Sequence
  Description of Artificial Sequence: Synthetic oligonucleotide
  Antisense strand to SEQ ID NO: 2093460
gcacuuaucucaaacaucc

SEQ ID NO: 2093462 - RNA, 19 nt, Artificial Sequence
  Description of Artificial Sequence: Synthetic oligonucleotide
  Sense strand starting at position 2154 of SEQ ID NO: 1882078
agauaagugcacuggaugu

SEQ ID NO: 2093463 - RNA, 19 nt, Artificial Sequence
  Description of Artificial Sequence: Synthetic oligonucleotide
  Antisense strand to SEQ ID NO: 2093462
acauccagugcacuuaucu

SEQ ID NO: 2093464 - RNA, 19 nt, Artificial Sequence
  Description of Artificial Sequence: Synthetic oligonucleotide
  Sense strand starting at position 2196 of SEQ ID NO: 1882078
ucauucuccgacuguuaca

SEQ ID NO: 2093465 - RNA, 19 nt, Artificial Sequence
  Description of Artificial Sequence: Synthetic oligonucleotide
  Antisense strand to SEQ ID NO: 2093464
uguaacagucggagaauga

SEQ ID NO: 2093466 - RNA, 19 nt, Artificial Sequence
  Description of Artificial Sequence: Synthetic oligonucleotide
  Sense strand starting at position 2250 of SEQ ID NO: 1882078
gggcucaccacaggauaaa

SEQ ID NO: 2093467 - RNA, 19 nt, Artificial Sequence
  Description of Artificial Sequence: Synthetic oligonucleotide
  Antisense strand to SEQ ID NO: 2093466
uuuauccuguggugagccc

SEQ ID NO: 2093468 - RNA, 19 nt, Artificial Sequence
  Description of Artificial Sequence: Synthetic oligonucleotide
  Sense strand starting at position 2276 of SEQ ID NO: 1882078
gaacuuuaggucggaagga

SEQ ID NO: 2093469 - RNA, 19 nt, Artificial Sequence
  Description of Artificial Sequence: Synthetic oligonucleotide
  Antisense strand to SEQ ID NO: 2093468
uccuuccgaccuaaaguuc

SEQ ID NO: 2093470 - RNA, 19 nt, Artificial Sequence
  Description of Artificial Sequence: Synthetic oligonucleotide
  Sense strand starting at position 2446 of SEQ ID NO: 1882078
cauccagaucauugggauc

SEQ ID NO: 2093471 - RNA, 19 nt, Artificial Sequence
  Description of Artificial Sequence: Synthetic oligonucleotide
  Antisense strand to SEQ ID NO: 2093470
gaucccaaugaucuggaug

SEQ ID NO: 2093472 - RNA, 19 nt, Artificial Sequence
  Description of Artificial Sequence: Synthetic oligonucleotide
  Sense strand starting at position 2565 of SEQ ID NO: 1882078
cagagacauccguggcaug

SEQ ID NO: 2093473 - RNA, 19 nt, Artificial Sequence
  Description of Artificial Sequence: Synthetic oligonucleotide
  Antisense strand to SEQ ID NO: 2093472
caugccacggaugucucug

SEQ ID NO: 2093474 - RNA, 19 nt, Artificial Sequence
  Description of Artificial Sequence: Synthetic oligonucleotide
  Sense strand starting at position 2566 of SEQ ID NO: 1882078
agagacauccguggcaugu

SEQ ID NO: 2093475 - RNA, 19 nt, Artificial Sequence
  Description of Artificial Sequence: Synthetic oligonucleotide
  Antisense strand to SEQ ID NO: 2093474
acaugccacggaugucucu

SEQ ID NO: 2093476 - RNA, 19 nt, Artificial Sequence
  Description of Artificial Sequence: Synthetic oligonucleotide
  Sense strand starting at position 2612 of SEQ ID NO: 1882078
ccuguuggcacguaccaau

SEQ ID NO: 2093477 - RNA, 19 nt, Artificial Sequence
  Description of Artificial Sequence: Synthetic oligonucleotide
  Antisense strand to SEQ ID NO: 2093476
auugguacgugccaacagg

SEQ ID NO: 2093478 - RNA, 19 nt, Artificial Sequence
  Description of Artificial Sequence: Synthetic oligonucleotide
  Sense strand starting at position 2775 of SEQ ID NO: 1882078
uaauuuaggugaggagaca

SEQ ID NO: 2093479 - RNA, 19 nt, Artificial Sequence
  Description of Artificial Sequence: Synthetic oligonucleotide
  Antisense strand to SEQ ID NO: 2093478
ugucuccucaccuaaauua

SEQ ID NO: 2093480 - RNA, 19 nt, Artificial Sequence
  Description of Artificial Sequence: Synthetic oligonucleotide
  Sense strand starting at position 2983 of SEQ ID NO: 1882078
ccaccuguaccaugagaag

SEQ ID NO: 2093481 - RNA, 19 nt, Artificial Sequence
  Description of Artificial Sequence: Synthetic oligonucleotide
  Antisense strand to SEQ ID NO: 2093480
cuucucaugguacaggugg

SEQ ID NO: 2093482 - RNA, 19 nt, Artificial Sequence
  Description of Artificial Sequence: Synthetic oligonucleotide
  Sense strand starting at position 3115 of SEQ ID NO: 1882078
acacauaugccaggacagu

SEQ ID NO: 2093483 - RNA, 19 nt, Artificial Sequence
  Description of Artificial Sequence: Synthetic oligonucleotide
  Antisense strand to SEQ ID NO: 2093482
acuguccuggcauaugugu

SEQ ID NO: 2093484 - RNA, 19 nt, Artificial Sequence
  Description of Artificial Sequence: Synthetic oligonucleotide
  Sense strand starting at position 3331 of SEQ ID NO: 1882078
acagucuccuagguagaca

SEQ ID NO: 2093485 - RNA, 19 nt, Artificial Sequence
  Description of Artificial Sequence: Synthetic oligonucleotide
  Antisense strand to SEQ ID NO: 2093484
ugucuaccuaggagacugu

SEQ ID NO: 2093486 - RNA, 19 nt, Artificial Sequence
  Description of Artificial Sequence: Synthetic oligonucleotide
  Sense strand starting at position 3339 of SEQ ID NO: 1882078
cuagguagacaguguucuu

SEQ ID NO: 2093487 - RNA, 19 nt, Artificial Sequence
  Description of Artificial Sequence: Synthetic oligonucleotide
  Antisense strand to SEQ ID NO: 2093486
aagaacacugucuaccuag

SEQ ID NO: 2093488 - RNA, 19 nt, Artificial Sequence
  Description of Artificial Sequence: Synthetic oligonucleotide
  Sense strand starting at position 3350 of SEQ ID NO: 1882078
guguucuuccuguaguaag

SEQ ID NO: 2093489 - RNA, 19 nt, Artificial Sequence
  Description of Artificial Sequence: Synthetic oligonucleotide
  Antisense strand to SEQ ID NO: 2093488
cuuacuacaggaagaacac

SEQ ID NO: 2093490 - RNA, 19 nt, Artificial Sequence
  Description of Artificial Sequence: Synthetic oligonucleotide
  Sense strand starting at position 3376 of SEQ ID NO: 1882078
ggcagacacuguucucacu

SEQ ID NO: 2093491 - RNA, 19 nt, Artificial Sequence
  Description of Artificial Sequence: Synthetic oligonucleotide
  Antisense strand to SEQ ID NO: 2093490
agugagaacagugucugcc

SEQ ID NO: 2093492 - RNA, 19 nt, Artificial Sequence
  Description of Artificial Sequence: Synthetic oligonucleotide
  Sense strand starting at position 3652 of SEQ ID NO: 1882078
uagacugugcuggaggauu

SEQ ID NO: 2093493 - RNA, 19 nt, Artificial Sequence
  Description of Artificial Sequence: Synthetic oligonucleotide
  Antisense strand to SEQ ID NO: 2093492
aauccuccagcacagucua

SEQ ID NO: 2093494 - RNA, 19 nt, Artificial Sequence
  Description of Artificial Sequence: Synthetic oligonucleotide
  Sense strand starting at position 3865 of SEQ ID NO: 1882078
cccgccauacuugauuaga

SEQ ID NO: 2093495 - RNA, 19 nt, Artificial Sequence
  Description of Artificial Sequence: Synthetic oligonucleotide
  Antisense strand to SEQ ID NO: 2093494
ucuaaucaaguauggcggg

SEQ ID NO: 2093496 - RNA, 19 nt, Artificial Sequence
  Description of Artificial Sequence: Synthetic oligonucleotide
  Sense strand starting at position 3867 of SEQ ID NO: 1882078
cgccauacuugauuagaca

SEQ ID NO: 2093497 - RNA, 19 nt, Artificial Sequence
  Description of Artificial Sequence: Synthetic oligonucleotide
  Antisense strand to SEQ ID NO: 2093496
ugucuaaucaaguauggcg

SEQ ID NO: 2093498 - RNA, 19 nt, Artificial Sequence
  Description of Artificial Sequence: Synthetic oligonucleotide
  Sense strand starting at position 3868 of SEQ ID NO: 1882078
gccauacuugauuagacac

SEQ ID NO: 2093499 - RNA, 19 nt, Artificial Sequence
  Description of Artificial Sequence: Synthetic oligonucleotide
  Antisense strand to SEQ ID NO: 2093498
gugucuaaucaaguauggc

SEQ ID NO: 2093500 - RNA, 19 nt, Artificial Sequence
  Description of Artificial Sequence: Synthetic oligonucleotide
  Sense strand starting at position 95 of SEQ ID NO: 1882079
gucacuguuccggaagcau

SEQ ID NO: 2093501 - RNA, 19 nt, Artificial Sequence
  Description of Artificial Sequence: Synthetic oligonucleotide
  Antisense strand to SEQ ID NO: 2093500
augcuuccggaacagugac

SEQ ID NO: 2093502 - RNA, 19 nt, Artificial Sequence
  Description of Artificial Sequence: Synthetic oligonucleotide
  Sense strand starting at position 507 of SEQ ID NO: 1882079
agauaaaggucauugccau

SEQ ID NO: 2093503 - RNA, 19 nt, Artificial Sequence
  Description of Artificial Sequence: Synthetic oligonucleotide
  Antisense strand to SEQ ID NO: 2093502
auggcaaugaccuuuaucu

SEQ ID NO: 2093504 - RNA, 19 nt, Artificial Sequence
  Description of Artificial Sequence: Synthetic oligonucleotide
  Sense strand starting at position 508 of SEQ ID NO: 1882079
gauaaaggucauugccaug

SEQ ID NO: 2093505 - RNA, 19 nt, Artificial Sequence
  Description of Artificial Sequence: Synthetic oligonucleotide
  Antisense strand to SEQ ID NO: 2093504
cauggcaaugaccuuuauc

SEQ ID NO: 2093506 - RNA, 19 nt, Artificial Sequence
  Description of Artificial Sequence: Synthetic oligonucleotide
  Sense strand starting at position 513 of SEQ ID NO: 1882079
aggucauugccaugagaaa

SEQ ID NO: 2093507 - RNA, 19 nt, Artificial Sequence
  Description of Artificial Sequence: Synthetic oligonucleotide
  Antisense strand to SEQ ID NO: 2093506
uuucucauggcaaugaccu

SEQ ID NO: 2093508 - RNA, 19 nt, Artificial Sequence
  Description of Artificial Sequence: Synthetic oligonucleotide
  Sense strand starting at position 514 of SEQ ID NO: 1882079
ggucauugccaugagaaau

SEQ ID NO: 2093509 - RNA, 19 nt, Artificial Sequence
  Description of Artificial Sequence: Synthetic oligonucleotide
  Antisense strand to SEQ ID NO: 2093508
auuucucauggcaaugacc

SEQ ID NO: 2093510 - RNA, 19 nt, Artificial Sequence
  Description of Artificial Sequence: Synthetic oligonucleotide
  Sense strand starting at position 655 of SEQ ID NO: 1882079
gcuggauacaguuauugac

SEQ ID NO: 2093511 - RNA, 19 nt, Artificial Sequence
  Description of Artificial Sequence: Synthetic oligonucleotide
  Antisense strand to SEQ ID NO: 2093510
gucaauaacuguauccagc

SEQ ID NO: 2093512 - RNA, 19 nt, Artificial Sequence
  Description of Artificial Sequence: Synthetic oligonucleotide
  Sense strand starting at position 662 of SEQ ID NO: 1882079
acaguuauugacugcaaua

SEQ ID NO: 2093513 - RNA, 19 nt, Artificial Sequence
  Description of Artificial Sequence: Synthetic oligonucleotide
  Antisense strand to SEQ ID NO: 2093512
uauugcagucaauaacugu

SEQ ID NO: 2093514 - RNA, 19 nt, Artificial Sequence
  Description of Artificial Sequence: Synthetic oligonucleotide
  Sense strand starting at position 664 of SEQ ID NO: 1882079
aguuauugacugcaauacu

SEQ ID NO: 2093515 - RNA, 19 nt, Artificial Sequence
  Description of Artificial Sequence: Synthetic oligonucleotide
  Antisense strand to SEQ ID NO: 2093514
aguauugcagucaauaacu

SEQ ID NO: 2093516 - RNA, 19 nt, Artificial Sequence
  Description of Artificial Sequence: Synthetic oligonucleotide
  Sense strand starting at position 771 of SEQ ID NO: 1882079
aggaauuaauaaggaugga

SEQ ID NO: 2093517 - RNA, 19 nt, Artificial Sequence
  Description of Artificial Sequence: Synthetic oligonucleotide
  Antisense strand to SEQ ID NO: 2093516
uccauccuuauuaauuccu

SEQ ID NO: 2093518 - RNA, 19 nt, Artificial Sequence
  Description of Artificial Sequence: Synthetic oligonucleotide
  Sense strand starting at position 897 of SEQ ID NO: 1882079
ggcccaagucacuaccuua

SEQ ID NO: 2093519 - RNA, 19 nt, Artificial Sequence
  Description of Artificial Sequence: Synthetic oligonucleotide
  Antisense strand to SEQ ID NO: 2093518
uaagguagugacuugggcc

SEQ ID NO: 2093520 - RNA, 19 nt, Artificial Sequence
  Description of Artificial Sequence: Synthetic oligonucleotide
  Sense strand starting at position 1134 of SEQ ID NO: 1882079
cauaaagugugacucagaa

SEQ ID NO: 2093521 - RNA, 19 nt, Artificial Sequence
  Description of Artificial Sequence: Synthetic oligonucleotide
  Antisense strand to SEQ ID NO: 2093520
uucugagucacacuuuaug

SEQ ID NO: 2093522 - RNA, 19 nt, Artificial Sequence
  Description of Artificial Sequence: Synthetic oligonucleotide
  Sense strand starting at position 1138 of SEQ ID NO: 1882079
aagugugacucagaauuug

SEQ ID NO: 2093523 - RNA, 19 nt, Artificial Sequence
  Description of Artificial Sequence: Synthetic oligonucleotide
  Antisense strand to SEQ ID NO: 2093522
caaauucugagucacacuu

SEQ ID NO: 2093524 - RNA, 19 nt, Artificial Sequence
  Description of Artificial Sequence: Synthetic oligonucleotide
  Sense strand starting at position 1927 of SEQ ID NO: 1882079
gugggaguuagucaguuua

SEQ ID NO: 2093525 - RNA, 19 nt, Artificial Sequence
  Description of Artificial Sequence: Synthetic oligonucleotide
  Antisense strand to SEQ ID NO: 2093524
uaaacugacuaacucccac

SEQ ID NO: 2093526 - RNA, 19 nt, Artificial Sequence
  Description of Artificial Sequence: Synthetic oligonucleotide
  Sense strand starting at position 1929 of SEQ ID NO: 1882079
gggaguuagucaguuuaac

SEQ ID NO: 2093527 - RNA, 19 nt, Artificial Sequence
  Description of Artificial Sequence: Synthetic oligonucleotide
  Antisense strand to SEQ ID NO: 2093526
guuaaacugacuaacuccc

SEQ ID NO: 2093528 - RNA, 19 nt, Artificial Sequence
  Description of Artificial Sequence: Synthetic oligonucleotide
  Sense strand starting at position 2065 of SEQ ID NO: 1882079
gguacaugccaguaguaag

SEQ ID NO: 2093529 - RNA, 19 nt, Artificial Sequence
  Description of Artificial Sequence: Synthetic oligonucleotide
  Antisense strand to SEQ ID NO: 2093528
cuuacuacuggcauguacc

SEQ ID NO: 2093530 - RNA, 19 nt, Artificial Sequence
  Description of Artificial Sequence: Synthetic oligonucleotide
  Sense strand starting at position 2257 of SEQ ID NO: 1882079
gucaguucuuaggcugaag

SEQ ID NO: 2093531 - RNA, 19 nt, Artificial Sequence
  Description of Artificial Sequence: Synthetic oligonucleotide
  Antisense strand to SEQ ID NO: 2093530
cuucagccuaagaacugac

SEQ ID NO: 2093532 - RNA, 19 nt, Artificial Sequence
  Description of Artificial Sequence: Synthetic oligonucleotide
  Sense strand starting at position 2259 of SEQ ID NO: 1882079
caguucuuaggcugaagau

SEQ ID NO: 2093533 - RNA, 19 nt, Artificial Sequence
  Description of Artificial Sequence: Synthetic oligonucleotide
  Antisense strand to SEQ ID NO: 2093532
aucuucagccuaagaacug

SEQ ID NO: 2093534 - RNA, 19 nt, Artificial Sequence
  Description of Artificial Sequence: Synthetic oligonucleotide
  Sense strand starting at position 2260 of SEQ ID NO: 1882079
aguucuuaggcugaagauc

SEQ ID NO: 2093535 - RNA, 19 nt, Artificial Sequence
  Description of Artificial Sequence: Synthetic oligonucleotide
  Antisense strand to SEQ ID NO: 2093534
gaucuucagccuaagaacu

SEQ ID NO: 2093536 - RNA, 19 nt, Artificial Sequence
  Description of Artificial Sequence: Synthetic oligonucleotide
  Sense strand starting at position 2306 of SEQ ID NO: 1882079
auguaaagaccggguucau

SEQ ID NO: 2093537 - RNA, 19 nt, Artificial Sequence
  Description of Artificial Sequence: Synthetic oligonucleotide
  Antisense strand to SEQ ID NO: 2093536
augaacccggucuuuacau

SEQ ID NO: 2093538 - RNA, 19 nt, Artificial Sequence
  Description of Artificial Sequence: Synthetic oligonucleotide
  Sense strand starting at position 2449 of SEQ ID NO: 1882079
cgcaguugaccagaaugau

SEQ ID NO: 2093539 - RNA, 19 nt, Artificial Sequence
  Description of Artificial Sequence: Synthetic oligonucleotide
  Antisense strand to SEQ ID NO: 2093538
aucauucuggucaacugcg

SEQ ID NO: 2093540 - RNA, 19 nt, Artificial Sequence
  Description of Artificial Sequence: Synthetic oligonucleotide
  Sense strand starting at position 2458 of SEQ ID NO: 1882079
ccagaaugauggccagcau

SEQ ID NO: 2093541 - RNA, 19 nt, Artificial Sequence
  Description of Artificial Sequence: Synthetic oligonucleotide
  Antisense strand to SEQ ID NO: 2093540
augcuggccaucauucugg

SEQ ID NO: 2093542 - RNA, 19 nt, Artificial Sequence
  Description of Artificial Sequence: Synthetic oligonucleotide
  Sense strand starting at position 2462 of SEQ ID NO: 1882079
aaugauggccagcauguaa

SEQ ID NO: 2093543 - RNA, 19 nt, Artificial Sequence
  Description of Artificial Sequence: Synthetic oligonucleotide
  Antisense strand to SEQ ID NO: 2093542
uuacaugcuggccaucauu

SEQ ID NO: 2093544 - RNA, 19 nt, Artificial Sequence
  Description of Artificial Sequence: Synthetic oligonucleotide
  Sense strand starting at position 2477 of SEQ ID NO: 1882079
guaauccuugcccagcaua

SEQ ID NO: 2093545 - RNA, 19 nt, Artificial Sequence
  Description of Artificial Sequence: Synthetic oligonucleotide
  Antisense strand to SEQ ID NO: 2093544
uaugcugggcaaggauuac

SEQ ID NO: 2093546 - RNA, 19 nt, Artificial Sequence
  Description of Artificial Sequence: Synthetic oligonucleotide
  Sense strand starting at position 2936 of SEQ ID NO: 1882079
cguggaaguaucugagaga

SEQ ID NO: 2093547 - RNA, 19 nt, Artificial Sequence
  Description of Artificial Sequence: Synthetic oligonucleotide
  Antisense strand to SEQ ID NO: 2093546
ucucucagauacuuccacg

SEQ ID NO: 2093548 - RNA, 19 nt, Artificial Sequence
  Description of Artificial Sequence: Synthetic oligonucleotide
  Sense strand starting at position 2958 of SEQ ID NO: 1882079
guacuuggccacuaggaaa

SEQ ID NO: 2093549 - RNA, 19 nt, Artificial Sequence
  Description of Artificial Sequence: Synthetic oligonucleotide
  Antisense strand to SEQ ID NO: 2093548
uuuccuaguggccaaguac

SEQ ID NO: 2093550 - RNA, 19 nt, Artificial Sequence
  Description of Artificial Sequence: Synthetic oligonucleotide
  Sense strand starting at position 3008 of SEQ ID NO: 1882079
gugccuucgcccuccguaa

SEQ ID NO: 2093551 - RNA, 19 nt, Artificial Sequence
  Description of Artificial Sequence: Synthetic oligonucleotide
  Antisense strand to SEQ ID NO: 2093550
uuacggagggcgaaggcac

SEQ ID NO: 2093552 - RNA, 19 nt, Artificial Sequence
  Description of Artificial Sequence: Synthetic oligonucleotide
  Sense strand starting at position 3009 of SEQ ID NO: 1882079
ugccuucgcccuccguaaa

SEQ ID NO: 2093553 - RNA, 19 nt, Artificial Sequence
  Description of Artificial Sequence: Synthetic oligonucleotide
  Antisense strand to SEQ ID NO: 2093552
uuuacggagggcgaaggca

SEQ ID NO: 2093554 - RNA, 19 nt, Artificial Sequence
  Description of Artificial Sequence: Synthetic oligonucleotide
  Sense strand starting at position 3206 of SEQ ID NO: 1882079
gaggaugucccuuguuucu

SEQ ID NO: 2093555 - RNA, 19 nt, Artificial Sequence
  Description of Artificial Sequence: Synthetic oligonucleotide
  Antisense strand to SEQ ID NO: 2093554
agaaacaagggacauccuc

SEQ ID NO: 2093556 - RNA, 19 nt, Artificial Sequence
  Description of Artificial Sequence: Synthetic oligonucleotide
  Sense strand starting at position 3424 of SEQ ID NO: 1882079
gugacacgauguuuccaau

SEQ ID NO: 2093557 - RNA, 19 nt, Artificial Sequence
  Description of Artificial Sequence: Synthetic oligonucleotide
  Antisense strand to SEQ ID NO: 2093556
auuggaaacaucgugucac

SEQ ID NO: 2093558 - RNA, 19 nt, Artificial Sequence
  Description of Artificial Sequence: Synthetic oligonucleotide
  Sense strand starting at position 3562 of SEQ ID NO: 1882079
uugucauucucagucacau

SEQ ID NO: 2093559 - RNA, 19 nt, Artificial Sequence
  Description of Artificial Sequence: Synthetic oligonucleotide
  Antisense strand to SEQ ID NO: 2093558
augugacugagaaugacaa

SEQ ID NO: 2093560 - RNA, 19 nt, Artificial Sequence
  Description of Artificial Sequence: Synthetic oligonucleotide
  Sense strand starting at position 3600 of SEQ ID NO: 1882079
uugggauguccuugggaag

SEQ ID NO: 2093561 - RNA, 19 nt, Artificial Sequence
  Description of Artificial Sequence: Synthetic oligonucleotide
  Antisense strand to SEQ ID NO: 2093560
cuucccaaggacaucccaa

SEQ ID NO: 2093562 - RNA, 19 nt, Artificial Sequence
  Description of Artificial Sequence: Synthetic oligonucleotide
  Sense strand starting at position 3601 of SEQ ID NO: 1882079
ugggauguccuugggaaga

SEQ ID NO: 2093563 - RNA, 19 nt, Artificial Sequence
  Description of Artificial Sequence: Synthetic oligonucleotide
  Antisense strand to SEQ ID NO: 2093562
ucuucccaaggacauccca

SEQ ID NO: 2093564 - RNA, 19 nt, Artificial Sequence
  Description of Artificial Sequence: Synthetic oligonucleotide
  Sense strand starting at position 3681 of SEQ ID NO: 1882079
auuacucaccauuggucua

SEQ ID NO: 2093565 - RNA, 19 nt, Artificial Sequence
  Description of Artificial Sequence: Synthetic oligonucleotide
  Antisense strand to SEQ ID NO: 2093564
uagaccaauggugaguaau

SEQ ID NO: 2093566 - RNA, 19 nt, Artificial Sequence
  Description of Artificial Sequence: Synthetic oligonucleotide
  Sense strand starting at position 3684 of SEQ ID NO: 1882079
acucaccauuggucuagaa

SEQ ID NO: 2093567 - RNA, 19 nt, Artificial Sequence
  Description of Artificial Sequence: Synthetic oligonucleotide
  Antisense strand to SEQ ID NO: 2093566
uucuagaccaauggugagu

SEQ ID NO: 2093568 - RNA, 19 nt, Artificial Sequence
  Description of Artificial Sequence: Synthetic oligonucleotide
  Sense strand starting at position 3694 of SEQ ID NO: 1882079
ggucuagaagcucagcauu

SEQ ID NO: 2093569 - RNA, 19 nt, Artificial Sequence
  Description of Artificial Sequence: Synthetic oligonucleotide
  Antisense strand to SEQ ID NO: 2093568
aaugcugagcuucuagacc

SEQ ID NO: 2093570 - RNA, 19 nt, Artificial Sequence
  Description of Artificial Sequence: Synthetic oligonucleotide
  Sense strand starting at position 3786 of SEQ ID NO: 1882079
ucauaauggagucaguagu

SEQ ID NO: 2093571 - RNA, 19 nt, Artificial Sequence
  Description of Artificial Sequence: Synthetic oligonucleotide
  Antisense strand to SEQ ID NO: 2093570
acuacugacuccauuauga

SEQ ID NO: 2093572 - RNA, 19 nt, Artificial Sequence
  Description of Artificial Sequence: Synthetic oligonucleotide
  Sense strand starting at position 3804 of SEQ ID NO: 1882079
ugguuuccugauggaccua

SEQ ID NO: 2093573 - RNA, 19 nt, Artificial Sequence
  Description of Artificial Sequence: Synthetic oligonucleotide
  Antisense strand to SEQ ID NO: 2093572
uagguccaucaggaaacca

SEQ ID NO: 2093574 - RNA, 19 nt, Artificial Sequence
  Description of Artificial Sequence: Synthetic oligonucleotide
  Sense strand starting at position 3878 of SEQ ID NO: 1882079
aauucuugucaagguugau

SEQ ID NO: 2093575 - RNA, 19 nt, Artificial Sequence
  Description of Artificial Sequence: Synthetic oligonucleotide
  Antisense strand to SEQ ID NO: 2093574
aucaaccuugacaagaauu

SEQ ID NO: 2093576 - RNA, 19 nt, Artificial Sequence
  Description of Artificial Sequence: Synthetic oligonucleotide
  Sense strand starting at position 3881 of SEQ ID NO: 1882079
ucuugucaagguugaugua

SEQ ID NO: 2093577 - RNA, 19 nt, Artificial Sequence
  Description of Artificial Sequence: Synthetic oligonucleotide
  Antisense strand to SEQ ID NO: 2093576
uacaucaaccuugacaaga

SEQ ID NO: 2093578 - RNA, 19 nt, Artificial Sequence
  Description of Artificial Sequence: Synthetic oligonucleotide
  Sense strand starting at position 3882 of SEQ ID NO: 1882079
cuugucaagguugauguaa

SEQ ID NO: 2093579 - RNA, 19 nt, Artificial Sequence
  Description of Artificial Sequence: Synthetic oligonucleotide
  Antisense strand to SEQ ID NO: 2093578
uuacaucaaccuugacaag

SEQ ID NO: 2093580 - RNA, 19 nt, Artificial Sequence
  Description of Artificial Sequence: Synthetic oligonucleotide
  Sense strand starting at position 9 of SEQ ID NO: 1882080
auuauugaaccagggaguu

SEQ ID NO: 2093581 - RNA, 19 nt, Artificial Sequence
  Description of Artificial Sequence: Synthetic oligonucleotide
  Antisense strand to SEQ ID NO: 2093580
aacucccugguucaauaau

SEQ ID NO: 2093582 - RNA, 19 nt, Artificial Sequence
  Description of Artificial Sequence: Synthetic oligonucleotide
  Sense strand starting at position 80 of SEQ ID NO: 1882080
acugaagcucaucaaguua

SEQ ID NO: 2093583 - RNA, 19 nt, Artificial Sequence
  Description of Artificial Sequence: Synthetic oligonucleotide
  Antisense strand to SEQ ID NO: 2093582
uaacuugaugagcuucagu

SEQ ID NO: 2093584 - RNA, 19 nt, Artificial Sequence
  Description of Artificial Sequence: Synthetic oligonucleotide
  Sense strand starting at position 179 of SEQ ID NO: 1882080
uggagauccugugugguaa

SEQ ID NO: 2093585 - RNA, 19 nt, Artificial Sequence
  Description of Artificial Sequence: Synthetic oligonucleotide
  Antisense strand to SEQ ID NO: 2093584
uuaccacacaggaucucca

SEQ ID NO: 2093586 - RNA, 19 nt, Artificial Sequence
  Description of Artificial Sequence: Synthetic oligonucleotide
  Sense strand starting at position 180 of SEQ ID NO: 1882080
ggagauccugugugguaag

SEQ ID NO: 2093587 - RNA, 19 nt, Artificial Sequence
  Description of Artificial Sequence: Synthetic oligonucleotide
  Antisense strand to SEQ ID NO: 2093586
cuuaccacacaggaucucc

SEQ ID NO: 2093588 - RNA, 19 nt, Artificial Sequence
  Description of Artificial Sequence: Synthetic oligonucleotide
  Sense strand starting at position 209 of SEQ ID NO: 1882080
agcuuagaaaccgauguuu

SEQ ID NO: 2093589 - RNA, 19 nt, Artificial Sequence
  Description of Artificial Sequence: Synthetic oligonucleotide
  Antisense strand to SEQ ID NO: 2093588
aaacaucgguuucuaagcu

SEQ ID NO: 2093590 - RNA, 19 nt, Artificial Sequence
  Description of Artificial Sequence: Synthetic oligonucleotide
  Sense strand starting at position 367 of SEQ ID NO: 1882080
uggagacagucuucuccuu

SEQ ID NO: 2093591 - RNA, 19 nt, Artificial Sequence
  Description of Artificial Sequence: Synthetic oligonucleotide
  Antisense strand to SEQ ID NO: 2093590
aaggagaagacugucucca

SEQ ID NO: 2093592 - RNA, 19 nt, Artificial Sequence
  Description of Artificial Sequence: Synthetic oligonucleotide
  Sense strand starting at position 400 of SEQ ID NO: 1882080
ucaugaagcuucuuaggaa

SEQ ID NO: 2093593 - RNA, 19 nt, Artificial Sequence
  Description of Artificial Sequence: Synthetic oligonucleotide
  Antisense strand to SEQ ID NO: 2093592
uuccuaagaagcuucauga

SEQ ID NO: 2093594 - RNA, 19 nt, Artificial Sequence
  Description of Artificial Sequence: Synthetic oligonucleotide
  Sense strand starting at position 523 of SEQ ID NO: 1882080
cuaaguugucaccagcuua

SEQ ID NO: 2093595 - RNA, 19 nt, Artificial Sequence
  Description of Artificial Sequence: Synthetic oligonucleotide
  Antisense strand to SEQ ID NO: 2093594
uaagcuggugacaacuuag

SEQ ID NO: 2093596 - RNA, 19 nt, Artificial Sequence
  Description of Artificial Sequence: Synthetic oligonucleotide
  Sense strand starting at position 695 of SEQ ID NO: 1882080
aaggaaauagguuguuauc

SEQ ID NO: 2093597 - RNA, 19 nt, Artificial Sequence
  Description of Artificial Sequence: Synthetic oligonucleotide
  Antisense strand to SEQ ID NO: 2093596
gauaacaaccuauuuccuu

SEQ ID NO: 2093598 - RNA, 19 nt, Artificial Sequence
  Description of Artificial Sequence: Synthetic oligonucleotide
  Sense strand starting at position 697 of SEQ ID NO: 1882080
ggaaauagguuguuaucca

SEQ ID NO: 2093599 - RNA, 19 nt, Artificial Sequence
  Description of Artificial Sequence: Synthetic oligonucleotide
  Antisense strand to SEQ ID NO: 2093598
uggauaacaaccuauuucc

SEQ ID NO: 2093600 - RNA, 19 nt, Artificial Sequence
  Description of Artificial Sequence: Synthetic oligonucleotide
  Sense strand starting at position 1061 of SEQ ID NO: 1882080
guuauucuugcgaguggga

SEQ ID NO: 2093601 - RNA, 19 nt, Artificial Sequence
  Description of Artificial Sequence: Synthetic oligonucleotide
  Antisense strand to SEQ ID NO: 2093600
ucccacucgcaagaauaac

SEQ ID NO: 2093602 - RNA, 19 nt, Artificial Sequence
  Description of Artificial Sequence: Synthetic oligonucleotide
  Sense strand starting at position 1064 of SEQ ID NO: 1882080
auucuugcgagugggaaga

SEQ ID NO: 2093603 - RNA, 19 nt, Artificial Sequence
  Description of Artificial Sequence: Synthetic oligonucleotide
  Antisense strand to SEQ ID NO: 2093602
ucuucccacucgcaagaau

SEQ ID NO: 2093604 - RNA, 19 nt, Artificial Sequence
  Description of Artificial Sequence: Synthetic oligonucleotide
  Sense strand starting at position 1107 of SEQ ID NO: 1882080
ccaccuacuggaugacauu

SEQ ID NO: 2093605 - RNA, 19 nt, Artificial Sequence
  Description of Artificial Sequence: Synthetic oligonucleotide
  Antisense strand to SEQ ID NO: 2093604
aaugucauccaguaggugg

SEQ ID NO: 2093606 - RNA, 19 nt, Artificial Sequence
  Description of Artificial Sequence: Synthetic oligonucleotide
  Sense strand starting at position 1244 of SEQ ID NO: 1882080
acauccugugucuauaaga

SEQ ID NO: 2093607 - RNA, 19 nt, Artificial Sequence
  Description of Artificial Sequence: Synthetic oligonucleotide
  Antisense strand to SEQ ID NO: 2093606
ucuuauagacacaggaugu

SEQ ID NO: 2093608 - RNA, 19 nt, Artificial Sequence
  Description of Artificial Sequence: Synthetic oligonucleotide
  Sense strand starting at position 1407 of SEQ ID NO: 1882080
auggaaauuaccuggaguu

SEQ ID NO: 2093609 - RNA, 19 nt, Artificial Sequence
  Description of Artificial Sequence: Synthetic oligonucleotide
  Antisense strand to SEQ ID NO: 2093608
aacuccagguaauuuccau

SEQ ID NO: 2093610 - RNA, 19 nt, Artificial Sequence
  Description of Artificial Sequence: Synthetic oligonucleotide
  Sense strand starting at position 1408 of SEQ ID NO: 1882080
uggaaauuaccuggaguuu

SEQ ID NO: 2093611 - RNA, 19 nt, Artificial Sequence
  Description of Artificial Sequence: Synthetic oligonucleotide
  Antisense strand to SEQ ID NO: 2093610
aaacuccagguaauuucca

SEQ ID NO: 2093612 - RNA, 19 nt, Artificial Sequence
  Description of Artificial Sequence: Synthetic oligonucleotide
  Sense strand starting at position 1651 of SEQ ID NO: 1882080
agaauauaagcuuggugag

SEQ ID NO: 2093613 - RNA, 19 nt, Artificial Sequence
  Description of Artificial Sequence: Synthetic oligonucleotide
  Antisense strand to SEQ ID NO: 2093612
cucaccaagcuuauauucu

SEQ ID NO: 2093614 - RNA, 19 nt, Artificial Sequence
  Description of Artificial Sequence: Synthetic oligonucleotide
  Sense strand starting at position 1653 of SEQ ID NO: 1882080
aauauaagcuuggugagga

SEQ ID NO: 2093615 - RNA, 19 nt, Artificial Sequence
  Description of Artificial Sequence: Synthetic oligonucleotide
  Antisense strand to SEQ ID NO: 2093614
uccucaccaagcuuauauu

SEQ ID NO: 2093616 - RNA, 19 nt, Artificial Sequence
  Description of Artificial Sequence: Synthetic oligonucleotide
  Sense strand starting at position 1762 of SEQ ID NO: 1882080
auuagaggguaugcuaauu

SEQ ID NO: 2093617 - RNA, 19 nt, Artificial Sequence
  Description of Artificial Sequence: Synthetic oligonucleotide
  Antisense strand to SEQ ID NO: 2093616
aauuagcauacccucuaau

SEQ ID NO: 2093618 - RNA, 19 nt, Artificial Sequence
  Description of Artificial Sequence: Synthetic oligonucleotide
  Sense strand starting at position 1929 of SEQ ID NO: 1882080
uuaggacauguuuaaagca

SEQ ID NO: 2093619 - RNA, 19 nt, Artificial Sequence
  Description of Artificial Sequence: Synthetic oligonucleotide
  Antisense strand to SEQ ID NO: 2093618
ugcuuuaaacauguccuaa

SEQ ID NO: 2093620 - RNA, 19 nt, Artificial Sequence
  Description of Artificial Sequence: Synthetic oligonucleotide
  Sense strand starting at position 2067 of SEQ ID NO: 1882080
accuuauaagcuggauaau

SEQ ID NO: 2093621 - RNA, 19 nt, Artificial Sequence
  Description of Artificial Sequence: Synthetic oligonucleotide
  Antisense strand to SEQ ID NO: 2093620
auuauccagcuuauaaggu

SEQ ID NO: 2093622 - RNA, 19 nt, Artificial Sequence
  Description of Artificial Sequence: Synthetic oligonucleotide
  Sense strand starting at position 2068 of SEQ ID NO: 1882080
ccuuauaagcuggauaauu

SEQ ID NO: 2093623 - RNA, 19 nt, Artificial Sequence
  Description of Artificial Sequence: Synthetic oligonucleotide
  Antisense strand to SEQ ID NO: 2093622
aauuauccagcuuauaagg

SEQ ID NO: 2093624 - RNA, 19 nt, Artificial Sequence
  Description of Artificial Sequence: Synthetic oligonucleotide
  Sense strand starting at position 2136 of SEQ ID NO: 1882080
gccucuauccacuagaggu

SEQ ID NO: 2093625 - RNA, 19 nt, Artificial Sequence
  Description of Artificial Sequence: Synthetic oligonucleotide
  Antisense strand to SEQ ID NO: 2093624
accucuaguggauagaggc

SEQ ID NO: 2093626 - RNA, 19 nt, Artificial Sequence
  Description of Artificial Sequence: Synthetic oligonucleotide
  Sense strand starting at position 2144 of SEQ ID NO: 1882080
ccacuagagguccaaaugu

SEQ ID NO: 2093627 - RNA, 19 nt, Artificial Sequence
  Description of Artificial Sequence: Synthetic oligonucleotide
  Antisense strand to SEQ ID NO: 2093626
acauuuggaccucuagugg

SEQ ID NO: 2093628 - RNA, 19 nt, Artificial Sequence
  Description of Artificial Sequence: Synthetic oligonucleotide
  Sense strand starting at position 2235 of SEQ ID NO: 1882080
cacugacuucgaggaacaa

SEQ ID NO: 2093629 - RNA, 19 nt, Artificial Sequence
  Description of Artificial Sequence: Synthetic oligonucleotide
  Antisense strand to SEQ ID NO: 2093628
uuguuccucgaagucagug

SEQ ID NO: 2093630 - RNA, 19 nt, Artificial Sequence
  Description of Artificial Sequence: Synthetic oligonucleotide
  Sense strand starting at position 2319 of SEQ ID NO: 1882080
ccaagaucuccugauguca

SEQ ID NO: 2093631 - RNA, 19 nt, Artificial Sequence
  Description of Artificial Sequence: Synthetic oligonucleotide
  Antisense strand to SEQ ID NO: 2093630
ugacaucaggagaucuugg

SEQ ID NO: 2093632 - RNA, 19 nt, Artificial Sequence
  Description of Artificial Sequence: Synthetic oligonucleotide
  Sense strand starting at position 2995 of SEQ ID NO: 1882080
aaagucaaaugauccgauu

SEQ ID NO: 2093633 - RNA, 19 nt, Artificial Sequence
  Description of Artificial Sequence: Synthetic oligonucleotide
  Antisense strand to SEQ ID NO: 2093632
aaucggaucauuugacuuu

SEQ ID NO: 2093634 - RNA, 19 nt, Artificial Sequence
  Description of Artificial Sequence: Synthetic oligonucleotide
  Sense strand starting at position 3223 of SEQ ID NO: 1882080
ugagaucccuccuuccaga

SEQ ID NO: 2093635 - RNA, 19 nt, Artificial Sequence
  Description of Artificial Sequence: Synthetic oligonucleotide
  Antisense strand to SEQ ID NO: 2093634
ucuggaaggagggaucuca

SEQ ID NO: 2093636 - RNA, 19 nt, Artificial Sequence
  Description of Artificial Sequence: Synthetic oligonucleotide
  Sense strand starting at position 3242 of SEQ ID NO: 1882080
guguaugaagcauaacugu

SEQ ID NO: 2093637 - RNA, 19 nt, Artificial Sequence
  Description of Artificial Sequence: Synthetic oligonucleotide
  Antisense strand to SEQ ID NO: 2093636
acaguuaugcuucauacac

SEQ ID NO: 2093638 - RNA, 19 nt, Artificial Sequence
  Description of Artificial Sequence: Synthetic oligonucleotide
  Sense strand starting at position 3248 of SEQ ID NO: 1882080
gaagcauaacuguguauga

SEQ ID NO: 2093639 - RNA, 19 nt, Artificial Sequence
  Description of Artificial Sequence: Synthetic oligonucleotide
  Antisense strand to SEQ ID NO: 2093638
ucauacacaguuaugcuuc

SEQ ID NO: 2093640 - RNA, 19 nt, Artificial Sequence
  Description of Artificial Sequence: Synthetic oligonucleotide
  Sense strand starting at position 3250 of SEQ ID NO: 1882080
agcauaacuguguaugagu

SEQ ID NO: 2093641 - RNA, 19 nt, Artificial Sequence
  Description of Artificial Sequence: Synthetic oligonucleotide
  Antisense strand to SEQ ID NO: 2093640
acucauacacaguuaugcu

SEQ ID NO: 2093642 - RNA, 19 nt, Artificial Sequence
  Description of Artificial Sequence: Synthetic oligonucleotide
  Sense strand starting at position 3398 of SEQ ID NO: 1882080
acacauccugauuguaaga

SEQ ID NO: 2093643 - RNA, 19 nt, Artificial Sequence
  Description of Artificial Sequence: Synthetic oligonucleotide
  Antisense strand to SEQ ID NO: 2093642
ucuuacaaucaggaugugu

SEQ ID NO: 2093644 - RNA, 19 nt, Artificial Sequence
  Description of Artificial Sequence: Synthetic oligonucleotide
  Sense strand starting at position 3433 of SEQ ID NO: 1882080
cguguacgcaaugcauuaa

SEQ ID NO: 2093645 - RNA, 19 nt, Artificial Sequence
  Description of Artificial Sequence: Synthetic oligonucleotide
  Antisense strand to SEQ ID NO: 2093644
uuaaugcauugcguacacg

SEQ ID NO: 2093646 - RNA, 19 nt, Artificial Sequence
  Description of Artificial Sequence: Synthetic oligonucleotide
  Sense strand starting at position 3506 of SEQ ID NO: 1882080
agaccugguucuccaaaga

SEQ ID NO: 2093647 - RNA, 19 nt, Artificial Sequence
  Description of Artificial Sequence: Synthetic oligonucleotide
  Antisense strand to SEQ ID NO: 2093646
ucuuuggagaaccaggucu

SEQ ID NO: 2093648 - RNA, 19 nt, Artificial Sequence
  Description of Artificial Sequence: Synthetic oligonucleotide
  Sense strand starting at position 3529 of SEQ ID NO: 1882080
augguugggagauguaaac

SEQ ID NO: 2093649 - RNA, 19 nt, Artificial Sequence
  Description of Artificial Sequence: Synthetic oligonucleotide
  Antisense strand to SEQ ID NO: 2093648
guuuacaucucccaaccau

SEQ ID NO: 2093650 - RNA, 19 nt, Artificial Sequence
  Description of Artificial Sequence: Synthetic oligonucleotide
  Sense strand starting at position 3615 of SEQ ID NO: 1882080
cggguuucuauagaagcaa

SEQ ID NO: 2093651 - RNA, 19 nt, Artificial Sequence
  Description of Artificial Sequence: Synthetic oligonucleotide
  Antisense strand to SEQ ID NO: 2093650
uugcuucuauagaaacccg

SEQ ID NO: 2093652 - RNA, 19 nt, Artificial Sequence
  Description of Artificial Sequence: Synthetic oligonucleotide
  Sense strand starting at position 3713 of SEQ ID NO: 1882080
auccgaaugacgcaucauu

SEQ ID NO: 2093653 - RNA, 19 nt, Artificial Sequence
  Description of Artificial Sequence: Synthetic oligonucleotide
  Antisense strand to SEQ ID NO: 2093652
aaugaugcgucauucggau

SEQ ID NO: 2093654 - RNA, 19 nt, Artificial Sequence
  Description of Artificial Sequence: Synthetic oligonucleotide
  Sense strand starting at position 3751 of SEQ ID NO: 1882080
gaaguaagaugucucucau

SEQ ID NO: 2093655 - RNA, 19 nt, Artificial Sequence
  Description of Artificial Sequence: Synthetic oligonucleotide
  Antisense strand to SEQ ID NO: 2093654
augagagacaucuuacuuc

SEQ ID NO: 2093656 - RNA, 19 nt, Artificial Sequence
  Description of Artificial Sequence: Synthetic oligonucleotide
  Sense strand starting at position 3884 of SEQ ID NO: 1882080
uguggaucugucuagagua

SEQ ID NO: 2093657 - RNA, 19 nt, Artificial Sequence
  Description of Artificial Sequence: Synthetic oligonucleotide
  Antisense strand to SEQ ID NO: 2093656
uacucuagacagauccaca

SEQ ID NO: 2093658 - RNA, 19 nt, Artificial Sequence
  Description of Artificial Sequence: Synthetic oligonucleotide
  Sense strand starting at position 3886 of SEQ ID NO: 1882080
uggaucugucuagaguauc

SEQ ID NO: 2093659 - RNA, 19 nt, Artificial Sequence
  Description of Artificial Sequence: Synthetic oligonucleotide
  Antisense strand to SEQ ID NO: 2093658
gauacucuagacagaucca

SEQ ID NO: 2093660 - RNA, 19 nt, Artificial Sequence
  Description of Artificial Sequence: Synthetic oligonucleotide
  Sense strand starting at position 247 of SEQ ID NO: 1882081
aauggcuagucaguggaau

SEQ ID NO: 2093661 - RNA, 19 nt, Artificial Sequence
  Description of Artificial Sequence: Synthetic oligonucleotide
  Antisense strand to SEQ ID NO: 2093660
auuccacugacuagccauu

SEQ ID NO: 2093662 - RNA, 19 nt, Artificial Sequence
  Description of Artificial Sequence: Synthetic oligonucleotide
  Sense strand starting at position 248 of SEQ ID NO: 1882081
auggcuagucaguggaaua

SEQ ID NO: 2093663 - RNA, 19 nt, Artificial Sequence
  Description of Artificial Sequence: Synthetic oligonucleotide
  Antisense strand to SEQ ID NO: 2093662
uauuccacugacuagccau

SEQ ID NO: 2093664 - RNA, 19 nt, Artificial Sequence
  Description of Artificial Sequence: Synthetic oligonucleotide
  Sense strand starting at position 249 of SEQ ID NO: 1882081
uggcuagucaguggaauag

SEQ ID NO: 2093665 - RNA, 19 nt, Artificial Sequence
  Description of Artificial Sequence: Synthetic oligonucleotide
  Antisense strand to SEQ ID NO: 2093664
cuauuccacugacuagcca

SEQ ID NO: 2093666 - RNA, 19 nt, Artificial Sequence
  Description of Artificial Sequence: Synthetic oligonucleotide
  Sense strand starting at position 275 of SEQ ID NO: 1882081
acauacaaccuguguugau

SEQ ID NO: 2093667 - RNA, 19 nt, Artificial Sequence
  Description of Artificial Sequence: Synthetic oligonucleotide
  Antisense strand to SEQ ID NO: 2093666
aucaacacagguuguaugu

SEQ ID NO: 2093668 - RNA, 19 nt, Artificial Sequence
  Description of Artificial Sequence: Synthetic oligonucleotide
  Sense strand starting at position 472 of SEQ ID NO: 1882081
augcuugcucaaugcaaag

SEQ ID NO: 2093669 - RNA, 19 nt, Artificial Sequence
  Description of Artificial Sequence: Synthetic oligonucleotide
  Antisense strand to SEQ ID NO: 2093668
cuuugcauugagcaagcau

SEQ ID NO: 2093670 - RNA, 19 nt, Artificial Sequence
  Description of Artificial Sequence: Synthetic oligonucleotide
  Sense strand starting at position 684 of SEQ ID NO: 1882081
cguauccucccagguggaa

SEQ ID NO: 2093671 - RNA, 19 nt, Artificial Sequence
  Description of Artificial Sequence: Synthetic oligonucleotide
  Antisense strand to SEQ ID NO: 2093670
uuccaccugggaggauacg

SEQ ID NO: 2093672 - RNA, 19 nt, Artificial Sequence
  Description of Artificial Sequence: Synthetic oligonucleotide
  Sense strand starting at position 1695 of SEQ ID NO: 1882081
aggaauguguuucuaauca

SEQ ID NO: 2093673 - RNA, 19 nt, Artificial Sequence
  Description of Artificial Sequence: Synthetic oligonucleotide
  Antisense strand to SEQ ID NO: 2093672
ugauuagaaacacauuccu

SEQ ID NO: 2093674 - RNA, 19 nt, Artificial Sequence
  Description of Artificial Sequence: Synthetic oligonucleotide
  Sense strand starting at position 1798 of SEQ ID NO: 1882081
guguuuaucucuccuagga

SEQ ID NO: 2093675 - RNA, 19 nt, Artificial Sequence
  Description of Artificial Sequence: Synthetic oligonucleotide
  Antisense strand to SEQ ID NO: 2093674
uccuaggagagauaaacac

SEQ ID NO: 2093676 - RNA, 19 nt, Artificial Sequence
  Description of Artificial Sequence: Synthetic oligonucleotide
  Sense strand starting at position 1846 of SEQ ID NO: 1882081
ggguaccuauccucaagaa

SEQ ID NO: 2093677 - RNA, 19 nt, Artificial Sequence
  Description of Artificial Sequence: Synthetic oligonucleotide
  Antisense strand to SEQ ID NO: 2093676
uucuugaggauagguaccc

SEQ ID NO: 2093678 - RNA, 19 nt, Artificial Sequence
  Description of Artificial Sequence: Synthetic oligonucleotide
  Sense strand starting at position 2012 of SEQ ID NO: 1882081
agguaagugaauuaggguu

SEQ ID NO: 2093679 - RNA, 19 nt, Artificial Sequence
  Description of Artificial Sequence: Synthetic oligonucleotide
  Antisense strand to SEQ ID NO: 2093678
aacccuaauucacuuaccu

SEQ ID NO: 2093680 - RNA, 19 nt, Artificial Sequence
  Description of Artificial Sequence: Synthetic oligonucleotide
  Sense strand starting at position 2019 of SEQ ID NO: 1882081
ugaauuaggguuugccaga

SEQ ID NO: 2093681 - RNA, 19 nt, Artificial Sequence
  Description of Artificial Sequence: Synthetic oligonucleotide
  Antisense strand to SEQ ID NO: 2093680
ucuggcaaacccuaauuca

SEQ ID NO: 2093682 - RNA, 19 nt, Artificial Sequence
  Description of Artificial Sequence: Synthetic oligonucleotide
  Sense strand starting at position 2403 of SEQ ID NO: 1882081
ccuguacugcugugauaau

SEQ ID NO: 2093683 - RNA, 19 nt, Artificial Sequence
  Description of Artificial Sequence: Synthetic oligonucleotide
  Antisense strand to SEQ ID NO: 2093682
auuaucacagcaguacagg

SEQ ID NO: 2093684 - RNA, 19 nt, Artificial Sequence
  Description of Artificial Sequence: Synthetic oligonucleotide
  Sense strand starting at position 2443 of SEQ ID NO: 1882081
cugcaaugagcucaagugu

SEQ ID NO: 2093685 - RNA, 19 nt, Artificial Sequence
  Description of Artificial Sequence: Synthetic oligonucleotide
  Antisense strand to SEQ ID NO: 2093684
acacuugagcucauugcag

SEQ ID NO: 2093686 - RNA, 19 nt, Artificial Sequence
  Description of Artificial Sequence: Synthetic oligonucleotide
  Sense strand starting at position 2456 of SEQ ID NO: 1882081
aaguguuucgaguauccac

SEQ ID NO: 2093687 - RNA, 19 nt, Artificial Sequence
  Description of Artificial Sequence: Synthetic oligonucleotide
  Antisense strand to SEQ ID NO: 2093686
guggauacucgaaacacuu

SEQ ID NO: 2093688 - RNA, 19 nt, Artificial Sequence
  Description of Artificial Sequence: Synthetic oligonucleotide
  Sense strand starting at position 2459 of SEQ ID NO: 1882081
uguuucgaguauccacuua

SEQ ID NO: 2093689 - RNA, 19 nt, Artificial Sequence
  Description of Artificial Sequence: Synthetic oligonucleotide
  Antisense strand to SEQ ID NO: 2093688
uaaguggauacucgaaaca

SEQ ID NO: 2093690 - RNA, 19 nt, Artificial Sequence
  Description of Artificial Sequence: Synthetic oligonucleotide
  Sense strand starting at position 2588 of SEQ ID NO: 1882081
cuguguuuagugcaaccuu

SEQ ID NO: 2093691 - RNA, 19 nt, Artificial Sequence
  Description of Artificial Sequence: Synthetic oligonucleotide
  Antisense strand to SEQ ID NO: 2093690
aagguugcacuaaacacag

SEQ ID NO: 2093692 - RNA, 19 nt, Artificial Sequence
  Description of Artificial Sequence: Synthetic oligonucleotide
  Sense strand starting at position 2697 of SEQ ID NO: 1882081
agccgacuugcuugagaug

SEQ ID NO: 2093693 - RNA, 19 nt, Artificial Sequence
  Description of Artificial Sequence: Synthetic oligonucleotide
  Antisense strand to SEQ ID NO: 2093692
caucucaagcaagucggcu

SEQ ID NO: 2093694 - RNA, 19 nt, Artificial Sequence
  Description of Artificial Sequence: Synthetic oligonucleotide
  Sense strand starting at position 2698 of SEQ ID NO: 1882081
gccgacuugcuugagaugu

SEQ ID NO: 2093695 - RNA, 19 nt, Artificial Sequence
  Description of Artificial Sequence: Synthetic oligonucleotide
  Antisense strand to SEQ ID NO: 2093694
acaucucaagcaagucggc

SEQ ID NO: 2093696 - RNA, 19 nt, Artificial Sequence
  Description of Artificial Sequence: Synthetic oligonucleotide
  Sense strand starting at position 2704 of SEQ ID NO: 1882081
uugcuugagauguacugua

SEQ ID NO: 2093697 - RNA, 19 nt, Artificial Sequence
  Description of Artificial Sequence: Synthetic oligonucleotide
  Antisense strand to SEQ ID NO: 2093696
uacaguacaucucaagcaa

SEQ ID NO: 2093698 - RNA, 19 nt, Artificial Sequence
  Description of Artificial Sequence: Synthetic oligonucleotide
  Sense strand starting at position 2709 of SEQ ID NO: 1882081
ugagauguacuguagauug

SEQ ID NO: 2093699 - RNA, 19 nt, Artificial Sequence
  Description of Artificial Sequence: Synthetic oligonucleotide
  Antisense strand to SEQ ID NO: 2093698
caaucuacaguacaucuca

SEQ ID NO: 2093700 - RNA, 19 nt, Artificial Sequence
  Description of Artificial Sequence: Synthetic oligonucleotide
  Sense strand starting at position 2787 of SEQ ID NO: 1882081
guaagaacuuacuuacggu

SEQ ID NO: 2093701 - RNA, 19 nt, Artificial Sequence
  Description of Artificial Sequence: Synthetic oligonucleotide
  Antisense strand to SEQ ID NO: 2093700
accguaaguaaguucuuac

SEQ ID NO: 2093702 - RNA, 19 nt, Artificial Sequence
  Description of Artificial Sequence: Synthetic oligonucleotide
  Sense strand starting at position 2797 of SEQ ID NO: 1882081
acuuacgguauugguaaau

SEQ ID NO: 2093703 - RNA, 19 nt, Artificial Sequence
  Description of Artificial Sequence: Synthetic oligonucleotide
  Antisense strand to SEQ ID NO: 2093702
auuuaccaauaccguaagu

SEQ ID NO: 2093704 - RNA, 19 nt, Artificial Sequence
  Description of Artificial Sequence: Synthetic oligonucleotide
  Sense strand starting at position 2803 of SEQ ID NO: 1882081
gguauugguaaauacagua

SEQ ID NO: 2093705 - RNA, 19 nt, Artificial Sequence
  Description of Artificial Sequence: Synthetic oligonucleotide
  Antisense strand to SEQ ID NO: 2093704
uacuguauuuaccaauacc

SEQ ID NO: 2093706 - RNA, 19 nt, Artificial Sequence
  Description of Artificial Sequence: Synthetic oligonucleotide
  Sense strand starting at position 2818 of SEQ ID NO: 1882081
aguacaguccuguacaugu

SEQ ID NO: 2093707 - RNA, 19 nt, Artificial Sequence
  Description of Artificial Sequence: Synthetic oligonucleotide
  Antisense strand to SEQ ID NO: 2093706
acauguacaggacuguacu

SEQ ID NO: 2093708 - RNA, 19 nt, Artificial Sequence
  Description of Artificial Sequence: Synthetic oligonucleotide
  Sense strand starting at position 2997 of SEQ ID NO: 1882081
aauggacuguugguguuau

SEQ ID NO: 2093709 - RNA, 19 nt, Artificial Sequence
  Description of Artificial Sequence: Synthetic oligonucleotide
  Antisense strand to SEQ ID NO: 2093708
auaacaccaacaguccauu

SEQ ID NO: 2093710 - RNA, 19 nt, Artificial Sequence
  Description of Artificial Sequence: Synthetic oligonucleotide
  Sense strand starting at position 3008 of SEQ ID NO: 1882081
gguguuaucagugaggcuu

SEQ ID NO: 2093711 - RNA, 19 nt, Artificial Sequence
  Description of Artificial Sequence: Synthetic oligonucleotide
  Antisense strand to SEQ ID NO: 2093710
aagccucacugauaacacc

SEQ ID NO: 2093712 - RNA, 19 nt, Artificial Sequence
  Description of Artificial Sequence: Synthetic oligonucleotide
  Sense strand starting at position 3078 of SEQ ID NO: 1882081
uugacucuguguucccaau

SEQ ID NO: 2093713 - RNA, 19 nt, Artificial Sequence
  Description of Artificial Sequence: Synthetic oligonucleotide
  Antisense strand to SEQ ID NO: 2093712
auugggaacacagagucaa

SEQ ID NO: 2093714 - RNA, 19 nt, Artificial Sequence
  Description of Artificial Sequence: Synthetic oligonucleotide
  Sense strand starting at position 3184 of SEQ ID NO: 1882081
uguucaugacagugaguga

SEQ ID NO: 2093715 - RNA, 19 nt, Artificial Sequence
  Description of Artificial Sequence: Synthetic oligonucleotide
  Antisense strand to SEQ ID NO: 2093714
ucacucacugucaugaaca

SEQ ID NO: 2093716 - RNA, 19 nt, Artificial Sequence
  Description of Artificial Sequence: Synthetic oligonucleotide
  Sense strand starting at position 3195 of SEQ ID NO: 1882081
gugagugaguucuuacgau

SEQ ID NO: 2093717 - RNA, 19 nt, Artificial Sequence
  Description of Artificial Sequence: Synthetic oligonucleotide
  Antisense strand to SEQ ID NO: 2093716
aucguaagaacucacucac

SEQ ID NO: 2093718 - RNA, 19 nt, Artificial Sequence
  Description of Artificial Sequence: Synthetic oligonucleotide
  Sense strand starting at position 3208 of SEQ ID NO: 1882081
uacgauaucugguuguuua

SEQ ID NO: 2093719 - RNA, 19 nt, Artificial Sequence
  Description of Artificial Sequence: Synthetic oligonucleotide
  Antisense strand to SEQ ID NO: 2093718
uaaacaaccagauaucgua

SEQ ID NO: 2093720 - RNA, 19 nt, Artificial Sequence
  Description of Artificial Sequence: Synthetic oligonucleotide
  Sense strand starting at position 3414 of SEQ ID NO: 1882081
ucuuuauagcgguaugaga

SEQ ID NO: 2093721 - RNA, 19 nt, Artificial Sequence
  Description of Artificial Sequence: Synthetic oligonucleotide
  Antisense strand to SEQ ID NO: 2093720
ucucauaccgcuauaaaga

SEQ ID NO: 2093722 - RNA, 19 nt, Artificial Sequence
  Description of Artificial Sequence: Synthetic oligonucleotide
  Sense strand starting at position 3416 of SEQ ID NO: 1882081
uuuauagcgguaugagaac

SEQ ID NO: 2093723 - RNA, 19 nt, Artificial Sequence
  Description of Artificial Sequence: Synthetic oligonucleotide
  Antisense strand to SEQ ID NO: 2093722
guucucauaccgcuauaaa

SEQ ID NO: 2093724 - RNA, 19 nt, Artificial Sequence
  Description of Artificial Sequence: Synthetic oligonucleotide
  Sense strand starting at position 3503 of SEQ ID NO: 1882081
cgaguuguucaagggccaa

SEQ ID NO: 2093725 - RNA, 19 nt, Artificial Sequence
  Description of Artificial Sequence: Synthetic oligonucleotide
  Antisense strand to SEQ ID NO: 2093724
uuggcccuugaacaacucg

SEQ ID NO: 2093726 - RNA, 19 nt, Artificial Sequence
  Description of Artificial Sequence: Synthetic oligonucleotide
  Sense strand starting at position 3563 of SEQ ID NO: 1882081
agggauuucuuguaaggaa

SEQ ID NO: 2093727 - RNA, 19 nt, Artificial Sequence
  Description of Artificial Sequence: Synthetic oligonucleotide
  Antisense strand to SEQ ID NO: 2093726
uuccuuacaagaaaucccu

SEQ ID NO: 2093728 - RNA, 19 nt, Artificial Sequence
  Description of Artificial Sequence: Synthetic oligonucleotide
  Sense strand starting at position 3605 of SEQ ID NO: 1882081
uggaaagucuggccugcua

SEQ ID NO: 2093729 - RNA, 19 nt, Artificial Sequence
  Description of Artificial Sequence: Synthetic oligonucleotide
  Antisense strand to SEQ ID NO: 2093728
uagcaggccagacuuucca

SEQ ID NO: 2093730 - RNA, 19 nt, Artificial Sequence
  Description of Artificial Sequence: Synthetic oligonucleotide
  Sense strand starting at position 3676 of SEQ ID NO: 1882081
ggcagaguuucucuaagga

SEQ ID NO: 2093731 - RNA, 19 nt, Artificial Sequence
  Description of Artificial Sequence: Synthetic oligonucleotide
  Antisense strand to SEQ ID NO: 2093730
uccuuagagaaacucugcc

SEQ ID NO: 2093732 - RNA, 19 nt, Artificial Sequence
  Description of Artificial Sequence: Synthetic oligonucleotide
  Sense strand starting at position 3714 of SEQ ID NO: 1882081
aggccuucugcugaauaga

SEQ ID NO: 2093733 - RNA, 19 nt, Artificial Sequence
  Description of Artificial Sequence: Synthetic oligonucleotide
  Antisense strand to SEQ ID NO: 2093732
ucuauucagcagaaggccu

SEQ ID NO: 2093734 - RNA, 19 nt, Artificial Sequence
  Description of Artificial Sequence: Synthetic oligonucleotide
  Sense strand starting at position 3742 of SEQ ID NO: 1882081
ccacaucaucgagguuauc

SEQ ID NO: 2093735 - RNA, 19 nt, Artificial Sequence
  Description of Artificial Sequence: Synthetic oligonucleotide
  Antisense strand to SEQ ID NO: 2093734
gauaaccucgaugaugugg

SEQ ID NO: 2093736 - RNA, 19 nt, Artificial Sequence
  Description of Artificial Sequence: Synthetic oligonucleotide
  Sense strand starting at position 3753 of SEQ ID NO: 1882081
agguuaucuucucuacuua

SEQ ID NO: 2093737 - RNA, 19 nt, Artificial Sequence
  Description of Artificial Sequence: Synthetic oligonucleotide
  Antisense strand to SEQ ID NO: 2093736
uaaguagagaagauaaccu

SEQ ID NO: 2093738 - RNA, 19 nt, Artificial Sequence
  Description of Artificial Sequence: Synthetic oligonucleotide
  Sense strand starting at position 3790 of SEQ ID NO: 1882081
uguuaaccacgucaauaaa

SEQ ID NO: 2093739 - RNA, 19 nt, Artificial Sequence
  Description of Artificial Sequence: Synthetic oligonucleotide
  Antisense strand to SEQ ID NO: 2093738
uuuauugacgugguuaaca

SEQ ID NO: 2093740 - RNA, 19 nt, Artificial Sequence
  Description of Artificial Sequence: Synthetic oligonucleotide
  Sense strand starting at position 99 of SEQ ID NO: 1882082
agugauucgccugaguuug

SEQ ID NO: 2093741 - RNA, 19 nt, Artificial Sequence
  Description of Artificial Sequence: Synthetic oligonucleotide
  Antisense strand to SEQ ID NO: 2093740
caaacucaggcgaaucacu

SEQ ID NO: 2093742 - RNA, 19 nt, Artificial Sequence
  Description of Artificial Sequence: Synthetic oligonucleotide
  Sense strand starting at position 172 of SEQ ID NO: 1882082
guguauuagggagaugcca

SEQ ID NO: 2093743 - RNA, 19 nt, Artificial Sequence
  Description of Artificial Sequence: Synthetic oligonucleotide
  Antisense strand to SEQ ID NO: 2093742
uggcaucucccuaauacac

SEQ ID NO: 2093744 - RNA, 19 nt, Artificial Sequence
  Description of Artificial Sequence: Synthetic oligonucleotide
  Sense strand starting at position 174 of SEQ ID NO: 1882082
guauuagggagaugccauu

SEQ ID NO: 2093745 - RNA, 19 nt, Artificial Sequence
  Description of Artificial Sequence: Synthetic oligonucleotide
  Antisense strand to SEQ ID NO: 2093744
aauggcaucucccuaauac

SEQ ID NO: 2093746 - RNA, 19 nt, Artificial Sequence
  Description of Artificial Sequence: Synthetic oligonucleotide
  Sense strand starting at position 187 of SEQ ID NO: 1882082
gccauuuauuugugaauca

SEQ ID NO: 2093747 - RNA, 19 nt, Artificial Sequence
  Description of Artificial Sequence: Synthetic oligonucleotide
  Antisense strand to SEQ ID NO: 2093746
ugauucacaaauaaauggc

SEQ ID NO: 2093748 - RNA, 19 nt, Artificial Sequence
  Description of Artificial Sequence: Synthetic oligonucleotide
  Sense strand starting at position 305 of SEQ ID NO: 1882082
aaagacuuaguuugaguaa

SEQ ID NO: 2093749 - RNA, 19 nt, Artificial Sequence
  Description of Artificial Sequence: Synthetic oligonucleotide
  Antisense strand to SEQ ID NO: 2093748
uuacucaaacuaagucuuu

SEQ ID NO: 2093750 - RNA, 19 nt, Artificial Sequence
  Description of Artificial Sequence: Synthetic oligonucleotide
  Sense strand starting at position 308 of SEQ ID NO: 1882082
gacuuaguuugaguaagua

SEQ ID NO: 2093751 - RNA, 19 nt, Artificial Sequence
  Description of Artificial Sequence: Synthetic oligonucleotide
  Antisense strand to SEQ ID NO: 2093750
uacuuacucaaacuaaguc

SEQ ID NO: 2093752 - RNA, 19 nt, Artificial Sequence
  Description of Artificial Sequence: Synthetic oligonucleotide
  Sense strand starting at position 349 of SEQ ID NO: 1882082
ugugccuaaccuuaggaaa

SEQ ID NO: 2093753 - RNA, 19 nt, Artificial Sequence
  Description of Artificial Sequence: Synthetic oligonucleotide
  Antisense strand to SEQ ID NO: 2093752
uuuccuaagguuaggcaca

SEQ ID NO: 2093754 - RNA, 19 nt, Artificial Sequence
  Description of Artificial Sequence: Synthetic oligonucleotide
  Sense strand starting at position 371 of SEQ ID NO: 1882082
agaauaguauuugacagaa

SEQ ID NO: 2093755 - RNA, 19 nt, Artificial Sequence
  Description of Artificial Sequence: Synthetic oligonucleotide
  Antisense strand to SEQ ID NO: 2093754
uucugucaaauacuauucu

SEQ ID NO: 2093756 - RNA, 19 nt, Artificial Sequence
  Description of Artificial Sequence: Synthetic oligonucleotide
  Sense strand starting at position 944 of SEQ ID NO: 1882082
uggaaaguguuuccuucga

SEQ ID NO: 2093757 - RNA, 19 nt, Artificial Sequence
  Description of Artificial Sequence: Synthetic oligonucleotide
  Antisense strand to SEQ ID NO: 2093756
ucgaaggaaacacuuucca

SEQ ID NO: 2093758 - RNA, 19 nt, Artificial Sequence
  Description of Artificial Sequence: Synthetic oligonucleotide
  Sense strand starting at position 946 of SEQ ID NO: 1882082
gaaaguguuuccuucgagg

SEQ ID NO: 2093759 - RNA, 19 nt, Artificial Sequence
  Description of Artificial Sequence: Synthetic oligonucleotide
  Antisense strand to SEQ ID NO: 2093758
ccucgaaggaaacacuuuc

SEQ ID NO: 2093760 - RNA, 19 nt, Artificial Sequence
  Description of Artificial Sequence: Synthetic oligonucleotide
  Sense strand starting at position 948 of SEQ ID NO: 1882082
aaguguuuccuucgaggag

SEQ ID NO: 2093761 - RNA, 19 nt, Artificial Sequence
  Description of Artificial Sequence: Synthetic oligonucleotide
  Antisense strand to SEQ ID NO: 2093760
cuccucgaaggaaacacuu

SEQ ID NO: 2093762 - RNA, 19 nt, Artificial Sequence
  Description of Artificial Sequence: Synthetic oligonucleotide
  Sense strand starting at position 1135 of SEQ ID NO: 1882082
agaugauacccuugagugu

SEQ ID NO: 2093763 - RNA, 19 nt, Artificial Sequence
  Description of Artificial Sequence: Synthetic oligonucleotide
  Antisense strand to SEQ ID NO: 2093762
acacucaaggguaucaucu

SEQ ID NO: 2093764 - RNA, 19 nt, Artificial Sequence
  Description of Artificial Sequence: Synthetic oligonucleotide
  Sense strand starting at position 1136 of SEQ ID NO: 1882082
gaugauacccuugaguguu

SEQ ID NO: 2093765 - RNA, 19 nt, Artificial Sequence
  Description of Artificial Sequence: Synthetic oligonucleotide
  Antisense strand to SEQ ID NO: 2093764
aacacucaaggguaucauc

SEQ ID NO: 2093766 - RNA, 19 nt, Artificial Sequence
  Description of Artificial Sequence: Synthetic oligonucleotide
  Sense strand starting at position 1387 of SEQ ID NO: 1882082
uccugagacggucaugguu

SEQ ID NO: 2093767 - RNA, 19 nt, Artificial Sequence
  Description of Artificial Sequence: Synthetic oligonucleotide
  Antisense strand to SEQ ID NO: 2093766
aaccaugaccgucucagga

SEQ ID NO: 2093768 - RNA, 19 nt, Artificial Sequence
  Description of Artificial Sequence: Synthetic oligonucleotide
  Sense strand starting at position 1446 of SEQ ID NO: 1882082
gacguagcuggugaggaau

SEQ ID NO: 2093769 - RNA, 19 nt, Artificial Sequence
  Description of Artificial Sequence: Synthetic oligonucleotide
  Antisense strand to SEQ ID NO: 2093768
auuccucaccagcuacguc

SEQ ID NO: 2093770 - RNA, 19 nt, Artificial Sequence
  Description of Artificial Sequence: Synthetic oligonucleotide
  Sense strand starting at position 1454 of SEQ ID NO: 1882082
uggugaggaaucugaauuc

SEQ ID NO: 2093771 - RNA, 19 nt, Artificial Sequence
  Description of Artificial Sequence: Synthetic oligonucleotide
  Antisense strand to SEQ ID NO: 2093770
gaauucagauuccucacca

SEQ ID NO: 2093772 - RNA, 19 nt, Artificial Sequence
  Description of Artificial Sequence: Synthetic oligonucleotide
  Sense strand starting at position 1592 of SEQ ID NO: 1882082
uuggaccuauuaguaauaa

SEQ ID NO: 2093773 - RNA, 19 nt, Artificial Sequence
  Description of Artificial Sequence: Synthetic oligonucleotide
  Antisense strand to SEQ ID NO: 2093772
uuauuacuaauagguccaa

SEQ ID NO: 2093774 - RNA, 19 nt, Artificial Sequence
  Description of Artificial Sequence: Synthetic oligonucleotide
  Sense strand starting at position 1635 of SEQ ID NO: 1882082
gguauagauaaguguuuga

SEQ ID NO: 2093775 - RNA, 19 nt, Artificial Sequence
  Description of Artificial Sequence: Synthetic oligonucleotide
  Antisense strand to SEQ ID NO: 2093774
ucaaacacuuaucuauacc

SEQ ID NO: 2093776 - RNA, 19 nt, Artificial Sequence
  Description of Artificial Sequence: Synthetic oligonucleotide
  Sense strand starting at position 1638 of SEQ ID NO: 1882082
auagauaaguguuugauag

SEQ ID NO: 2093777 - RNA, 19 nt, Artificial Sequence
  Description of Artificial Sequence: Synthetic oligonucleotide
  Antisense strand to SEQ ID NO: 2093776
cuaucaaacacuuaucuau

SEQ ID NO: 2093778 - RNA, 19 nt, Artificial Sequence
  Description of Artificial Sequence: Synthetic oligonucleotide
  Sense strand starting at position 1639 of SEQ ID NO: 1882082
uagauaaguguuugauaga

SEQ ID NO: 2093779 - RNA, 19 nt, Artificial Sequence
  Description of Artificial Sequence: Synthetic oligonucleotide
  Antisense strand to SEQ ID NO: 2093778
ucuaucaaacacuuaucua

SEQ ID NO: 2093780 - RNA, 19 nt, Artificial Sequence
  Description of Artificial Sequence: Synthetic oligonucleotide
  Sense strand starting at position 1648 of SEQ ID NO: 1882082
guuugauagauaggaagua

SEQ ID NO: 2093781 - RNA, 19 nt, Artificial Sequence
  Description of Artificial Sequence: Synthetic oligonucleotide
  Antisense strand to SEQ ID NO: 2093780
uacuuccuaucuaucaaac

SEQ ID NO: 2093782 - RNA, 19 nt, Artificial Sequence
  Description of Artificial Sequence: Synthetic oligonucleotide
  Sense strand starting at position 1660 of SEQ ID NO: 1882082
ggaaguacccaaugcaugu

SEQ ID NO: 2093783 - RNA, 19 nt, Artificial Sequence
  Description of Artificial Sequence: Synthetic oligonucleotide
  Antisense strand to SEQ ID NO: 2093782
acaugcauuggguacuucc

SEQ ID NO: 2093784 - RNA, 19 nt, Artificial Sequence
  Description of Artificial Sequence: Synthetic oligonucleotide
  Sense strand starting at position 1860 of SEQ ID NO: 1882082
gggaaucacacggguguau

SEQ ID NO: 2093785 - RNA, 19 nt, Artificial Sequence
  Description of Artificial Sequence: Synthetic oligonucleotide
  Antisense strand to SEQ ID NO: 2093784
auacacccgugugauuccc

SEQ ID NO: 2093786 - RNA, 19 nt, Artificial Sequence
  Description of Artificial Sequence: Synthetic oligonucleotide
  Sense strand starting at position 2051 of SEQ ID NO: 1882082
ugagcagaccugugucaca

SEQ ID NO: 2093787 - RNA, 19 nt, Artificial Sequence
  Description of Artificial Sequence: Synthetic oligonucleotide
  Antisense strand to SEQ ID NO: 2093786
ugugacacaggucugcuca

SEQ ID NO: 2093788 - RNA, 19 nt, Artificial Sequence
  Description of Artificial Sequence: Synthetic oligonucleotide
  Sense strand starting at position 2153 of SEQ ID NO: 1882082
ggaaguuacuagcugaaca

SEQ ID NO: 2093789 - RNA, 19 nt, Artificial Sequence
  Description of Artificial Sequence: Synthetic oligonucleotide
  Antisense strand to SEQ ID NO: 2093788
uguucagcuaguaacuucc

SEQ ID NO: 2093790 - RNA, 19 nt, Artificial Sequence
  Description of Artificial Sequence: Synthetic oligonucleotide
  Sense strand starting at position 2207 of SEQ ID NO: 1882082
ucuaaccugugucuagaau

SEQ ID NO: 2093791 - RNA, 19 nt, Artificial Sequence
  Description of Artificial Sequence: Synthetic oligonucleotide
  Antisense strand to SEQ ID NO: 2093790
auucuagacacagguuaga

SEQ ID NO: 2093792 - RNA, 19 nt, Artificial Sequence
  Description of Artificial Sequence: Synthetic oligonucleotide
  Sense strand starting at position 2437 of SEQ ID NO: 1882082
guuauugugugaaucgugu

SEQ ID NO: 2093793 - RNA, 19 nt, Artificial Sequence
  Description of Artificial Sequence: Synthetic oligonucleotide
  Antisense strand to SEQ ID NO: 2093792
acacgauucacacaauaac

SEQ ID NO: 2093794 - RNA, 19 nt, Artificial Sequence
  Description of Artificial Sequence: Synthetic oligonucleotide
  Sense strand starting at position 2460 of SEQ ID NO: 1882082
auaacugagaggugucaac

SEQ ID NO: 2093795 - RNA, 19 nt, Artificial Sequence
  Description of Artificial Sequence: Synthetic oligonucleotide
  Antisense strand to SEQ ID NO: 2093794
guugacaccucucaguuau

SEQ ID NO: 2093796 - RNA, 19 nt, Artificial Sequence
  Description of Artificial Sequence: Synthetic oligonucleotide
  Sense strand starting at position 2841 of SEQ ID NO: 1882082
ugccaaggucucggaagaa

SEQ ID NO: 2093797 - RNA, 19 nt, Artificial Sequence
  Description of Artificial Sequence: Synthetic oligonucleotide
  Antisense strand to SEQ ID NO: 2093796
uucuuccgagaccuuggca

SEQ ID NO: 2093798 - RNA, 19 nt, Artificial Sequence
  Description of Artificial Sequence: Synthetic oligonucleotide
  Sense strand starting at position 3165 of SEQ ID NO: 1882082
uguguaucuccagagacuc

SEQ ID NO: 2093799 - RNA, 19 nt, Artificial Sequence
  Description of Artificial Sequence: Synthetic oligonucleotide
  Antisense strand to SEQ ID NO: 2093798
gagucucuggagauacaca

SEQ ID NO: 2093800 - RNA, 19 nt, Artificial Sequence
  Description of Artificial Sequence: Synthetic oligonucleotide
  Sense strand starting at position 3211 of SEQ ID NO: 1882082
gagucauuaguggguccca

SEQ ID NO: 2093801 - RNA, 19 nt, Artificial Sequence
  Description of Artificial Sequence: Synthetic oligonucleotide
  Antisense strand to SEQ ID NO: 2093800
ugggacccacuaaugacuc

SEQ ID NO: 2093802 - RNA, 19 nt, Artificial Sequence
  Description of Artificial Sequence: Synthetic oligonucleotide
  Sense strand starting at position 3212 of SEQ ID NO: 1882082
agucauuagugggucccaa

SEQ ID NO: 2093803 - RNA, 19 nt, Artificial Sequence
  Description of Artificial Sequence: Synthetic oligonucleotide
  Antisense strand to SEQ ID NO: 2093802
uugggacccacuaaugacu

SEQ ID NO: 2093804 - RNA, 19 nt, Artificial Sequence
  Description of Artificial Sequence: Synthetic oligonucleotide
  Sense strand starting at position 3282 of SEQ ID NO: 1882082
ggccuccugggucauagau

SEQ ID NO: 2093805 - RNA, 19 nt, Artificial Sequence
  Description of Artificial Sequence: Synthetic oligonucleotide
  Antisense strand to SEQ ID NO: 2093804
aucuaugacccaggaggcc

SEQ ID NO: 2093806 - RNA, 19 nt, Artificial Sequence
  Description of Artificial Sequence: Synthetic oligonucleotide
  Sense strand starting at position 3418 of SEQ ID NO: 1882082
gagaguguccuaggauguc

SEQ ID NO: 2093807 - RNA, 19 nt, Artificial Sequence
  Description of Artificial Sequence: Synthetic oligonucleotide
  Antisense strand to SEQ ID NO: 2093806
gacauccuaggacacucuc

SEQ ID NO: 2093808 - RNA, 19 nt, Artificial Sequence
  Description of Artificial Sequence: Synthetic oligonucleotide
  Sense strand starting at position 3481 of SEQ ID NO: 1882082
agagcagaacucuguguuu

SEQ ID NO: 2093809 - RNA, 19 nt, Artificial Sequence
  Description of Artificial Sequence: Synthetic oligonucleotide
  Antisense strand to SEQ ID NO: 2093808
aaacacagaguucugcucu

SEQ ID NO: 2093810 - RNA, 19 nt, Artificial Sequence
  Description of Artificial Sequence: Synthetic oligonucleotide
  Sense strand starting at position 3518 of SEQ ID NO: 1882082
cucgauguuccagaccaaa

SEQ ID NO: 2093811 - RNA, 19 nt, Artificial Sequence
  Description of Artificial Sequence: Synthetic oligonucleotide
  Antisense strand to SEQ ID NO: 2093810
uuuggucuggaacaucgag

SEQ ID NO: 2093812 - RNA, 19 nt, Artificial Sequence
  Description of Artificial Sequence: Synthetic oligonucleotide
  Sense strand starting at position 3606 of SEQ ID NO: 1882082
gagauugcccuuuguuuga

SEQ ID NO: 2093813 - RNA, 19 nt, Artificial Sequence
  Description of Artificial Sequence: Synthetic oligonucleotide
  Antisense strand to SEQ ID NO: 2093812
ucaaacaaagggcaaucuc

SEQ ID NO: 2093814 - RNA, 19 nt, Artificial Sequence
  Description of Artificial Sequence: Synthetic oligonucleotide
  Sense strand starting at position 3610 of SEQ ID NO: 1882082
uugcccuuuguuugaggaa

SEQ ID NO: 2093815 - RNA, 19 nt, Artificial Sequence
  Description of Artificial Sequence: Synthetic oligonucleotide
  Antisense strand to SEQ ID NO: 2093814
uuccucaaacaaagggcaa

SEQ ID NO: 2093816 - RNA, 19 nt, Artificial Sequence
  Description of Artificial Sequence: Synthetic oligonucleotide
  Sense strand starting at position 3777 of SEQ ID NO: 1882082
cacggaugccauuaacagu

SEQ ID NO: 2093817 - RNA, 19 nt, Artificial Sequence
  Description of Artificial Sequence: Synthetic oligonucleotide
  Antisense strand to SEQ ID NO: 2093816
acuguuaauggcauccgug

SEQ ID NO: 2093818 - RNA, 19 nt, Artificial Sequence
  Description of Artificial Sequence: Synthetic oligonucleotide
  Sense strand starting at position 3904 of SEQ ID NO: 1882082
agacuucaggucugaugga

SEQ ID NO: 2093819 - RNA, 19 nt, Artificial Sequence
  Description of Artificial Sequence: Synthetic oligonucleotide
  Antisense strand to SEQ ID NO: 2093818
uccaucagaccugaagucu

SEQ ID NO: 2093820 - RNA, 19 nt, Artificial Sequence
  Description of Artificial Sequence: Synthetic oligonucleotide
  Sense strand starting at position 392 of SEQ ID NO: 1882083
agguguuaauacccagaau

SEQ ID NO: 2093821 - RNA, 19 nt, Artificial Sequence
  Description of Artificial Sequence: Synthetic oligonucleotide
  Antisense strand to SEQ ID NO: 2093820
auucuggguauuaacaccu

SEQ ID NO: 2093822 - RNA, 19 nt, Artificial Sequence
  Description of Artificial Sequence: Synthetic oligonucleotide
  Sense strand starting at position 789 of SEQ ID NO: 1882083
guugaucaugcagaguaaa

SEQ ID NO: 2093823 - RNA, 19 nt, Artificial Sequence
  Description of Artificial Sequence: Synthetic oligonucleotide
  Antisense strand to SEQ ID NO: 2093822
uuuacucugcaugaucaac

SEQ ID NO: 2093824 - RNA, 19 nt, Artificial Sequence
  Description of Artificial Sequence: Synthetic oligonucleotide
  Sense strand starting at position 835 of SEQ ID NO: 1882083
aauggauaguuguuuccau

SEQ ID NO: 2093825 - RNA, 19 nt, Artificial Sequence
  Description of Artificial Sequence: Synthetic oligonucleotide
  Antisense strand to SEQ ID NO: 2093824
auggaaacaacuauccauu

SEQ ID NO: 2093826 - RNA, 19 nt, Artificial Sequence
  Description of Artificial Sequence: Synthetic oligonucleotide
  Sense strand starting at position 1173 of SEQ ID NO: 1882083
agguaacccugaguaagaa

SEQ ID NO: 2093827 - RNA, 19 nt, Artificial Sequence
  Description of Artificial Sequence: Synthetic oligonucleotide
  Antisense strand to SEQ ID NO: 2093826
uucuuacucaggguuaccu

SEQ ID NO: 2093828 - RNA, 19 nt, Artificial Sequence
  Description of Artificial Sequence: Synthetic oligonucleotide
  Sense strand starting at position 1192 of SEQ ID NO: 1882083
cuaucagucacguaggaau

SEQ ID NO: 2093829 - RNA, 19 nt, Artificial Sequence
  Description of Artificial Sequence: Synthetic oligonucleotide
  Antisense strand to SEQ ID NO: 2093828
auuccuacgugacugauag

SEQ ID NO: 2093830 - RNA, 19 nt, Artificial Sequence
  Description of Artificial Sequence: Synthetic oligonucleotide
  Sense strand starting at position 1225 of SEQ ID NO: 1882083
cuggcucuaggugaacaau

SEQ ID NO: 2093831 - RNA, 19 nt, Artificial Sequence
  Description of Artificial Sequence: Synthetic oligonucleotide
  Antisense strand to SEQ ID NO: 2093830
auuguucaccuagagccag

SEQ ID NO: 2093832 - RNA, 19 nt, Artificial Sequence
  Description of Artificial Sequence: Synthetic oligonucleotide
  Sense strand starting at position 1228 of SEQ ID NO: 1882083
gcucuaggugaacaauuau

SEQ ID NO: 2093833 - RNA, 19 nt, Artificial Sequence
  Description of Artificial Sequence: Synthetic oligonucleotide
  Antisense strand to SEQ ID NO: 2093832
auaauuguucaccuagagc

SEQ ID NO: 2093834 - RNA, 19 nt, Artificial Sequence
  Description of Artificial Sequence: Synthetic oligonucleotide
  Sense strand starting at position 1377 of SEQ ID NO: 1882083
gagguucucugguugacag

SEQ ID NO: 2093835 - RNA, 19 nt, Artificial Sequence
  Description of Artificial Sequence: Synthetic oligonucleotide
  Antisense strand to SEQ ID NO: 2093834
cugucaaccagagaaccuc

SEQ ID NO: 2093836 - RNA, 19 nt, Artificial Sequence
  Description of Artificial Sequence: Synthetic oligonucleotide
  Sense strand starting at position 1378 of SEQ ID NO: 1882083
agguucucugguugacaga

SEQ ID NO: 2093837 - RNA, 19 nt, Artificial Sequence
  Description of Artificial Sequence: Synthetic oligonucleotide
  Antisense strand to SEQ ID NO: 2093836
ucugucaaccagagaaccu

SEQ ID NO: 2093838 - RNA, 19 nt, Artificial Sequence
  Description of Artificial Sequence: Synthetic oligonucleotide
  Sense strand starting at position 1379 of SEQ ID NO: 1882083
gguucucugguugacagaa

SEQ ID NO: 2093839 - RNA, 19 nt, Artificial Sequence
  Description of Artificial Sequence: Synthetic oligonucleotide
  Antisense strand to SEQ ID NO: 2093838
uucugucaaccagagaacc

SEQ ID NO: 2093840 - RNA, 19 nt, Artificial Sequence
  Description of Artificial Sequence: Synthetic oligonucleotide
  Sense strand starting at position 1391 of SEQ ID NO: 1882083
gacagaauaugagugagcu

SEQ ID NO: 2093841 - RNA, 19 nt, Artificial Sequence
  Description of Artificial Sequence: Synthetic oligonucleotide
  Antisense strand to SEQ ID NO: 2093840
agcucacucauauucuguc

SEQ ID NO: 2093842 - RNA, 19 nt, Artificial Sequence
  Description of Artificial Sequence: Synthetic oligonucleotide
  Sense strand starting at position 1395 of SEQ ID NO: 1882083
gaauaugagugagcugaac

SEQ ID NO: 2093843 - RNA, 19 nt, Artificial Sequence
  Description of Artificial Sequence: Synthetic oligonucleotide
  Antisense strand to SEQ ID NO: 2093842
guucagcucacucauauuc

SEQ ID NO: 2093844 - RNA, 19 nt, Artificial Sequence
  Description of Artificial Sequence: Synthetic oligonucleotide
  Sense strand starting at position 1397 of SEQ ID NO: 1882083
auaugagugagcugaacuc

SEQ ID NO: 2093845 - RNA, 19 nt, Artificial Sequence
  Description of Artificial Sequence: Synthetic oligonucleotide
  Antisense strand to SEQ ID NO: 2093844
gaguucagcucacucauau

SEQ ID NO: 2093846 - RNA, 19 nt, Artificial Sequence
  Description of Artificial Sequence: Synthetic oligonucleotide
  Sense strand starting at position 1416 of SEQ ID NO: 1882083
cacuguagcagagaugguu

SEQ ID NO: 2093847 - RNA, 19 nt, Artificial Sequence
  Description of Artificial Sequence: Synthetic oligonucleotide
  Antisense strand to SEQ ID NO: 2093846
aaccaucucugcuacagug

SEQ ID NO: 2093848 - RNA, 19 nt, Artificial Sequence
  Description of Artificial Sequence: Synthetic oligonucleotide
  Sense strand starting at position 1496 of SEQ ID NO: 1882083
gaagauuagugagcccaag

SEQ ID NO: 2093849 - RNA, 19 nt, Artificial Sequence
  Description of Artificial Sequence: Synthetic oligonucleotide
  Antisense strand to SEQ ID NO: 2093848
cuugggcucacuaaucuuc

SEQ ID NO: 2093850 - RNA, 19 nt, Artificial Sequence
  Description of Artificial Sequence: Synthetic oligonucleotide
  Sense strand starting at position 1522 of SEQ ID NO: 1882083
cuaccugauuccuuaggaa

SEQ ID NO: 2093851 - RNA, 19 nt, Artificial Sequence
  Description of Artificial Sequence: Synthetic oligonucleotide
  Antisense strand to SEQ ID NO: 2093850
uuccuaaggaaucagguag

SEQ ID NO: 2093852 - RNA, 19 nt, Artificial Sequence
  Description of Artificial Sequence: Synthetic oligonucleotide
  Sense strand starting at position 1603 of SEQ ID NO: 1882083
agaugauucugauucuacc

SEQ ID NO: 2093853 - RNA, 19 nt, Artificial Sequence
  Description of Artificial Sequence: Synthetic oligonucleotide
  Antisense strand to SEQ ID NO: 2093852
gguagaaucagaaucaucu

SEQ ID NO: 2093854 - RNA, 19 nt, Artificial Sequence
  Description of Artificial Sequence: Synthetic oligonucleotide
  Sense strand starting at position 2119 of SEQ ID NO: 1882083
gucugagaaccagguaaua

SEQ ID NO: 2093855 - RNA, 19 nt, Artificial Sequence
  Description of Artificial Sequence: Synthetic oligonucleotide
  Antisense strand to SEQ ID NO: 2093854
uauuaccugguucucagac

SEQ ID NO: 2093856 - RNA, 19 nt, Artificial Sequence
  Description of Artificial Sequence: Synthetic oligonucleotide
  Sense strand starting at position 2307 of SEQ ID NO: 1882083
auaggaugcuucccauaug

SEQ ID NO: 2093857 - RNA, 19 nt, Artificial Sequence
  Description of Artificial Sequence: Synthetic oligonucleotide
  Antisense strand to SEQ ID NO: 2093856
cauaugggaagcauccuau

SEQ ID NO: 2093858 - RNA, 19 nt, Artificial Sequence
  Description of Artificial Sequence: Synthetic oligonucleotide
  Sense strand starting at position 2310 of SEQ ID NO: 1882083
ggaugcuucccauaugggu

SEQ ID NO: 2093859 - RNA, 19 nt, Artificial Sequence
  Description of Artificial Sequence: Synthetic oligonucleotide
  Antisense strand to SEQ ID NO: 2093858
acccauaugggaagcaucc

SEQ ID NO: 2093860 - RNA, 19 nt, Artificial Sequence
  Description of Artificial Sequence: Synthetic oligonucleotide
  Sense strand starting at position 2357 of SEQ ID NO: 1882083
uuagcacaaugcuugauaa

SEQ ID NO: 2093861 - RNA, 19 nt, Artificial Sequence
  Description of Artificial Sequence: Synthetic oligonucleotide
  Antisense strand to SEQ ID NO: 2093860
uuaucaagcauugugcuaa

SEQ ID NO: 2093862 - RNA, 19 nt, Artificial Sequence
  Description of Artificial Sequence: Synthetic oligonucleotide
  Sense strand starting at position 2359 of SEQ ID NO: 1882083
agcacaaugcuugauaaau

SEQ ID NO: 2093863 - RNA, 19 nt, Artificial Sequence
  Description of Artificial Sequence: Synthetic oligonucleotide
  Antisense strand to SEQ ID NO: 2093862
auuuaucaagcauugugcu

SEQ ID NO: 2093864 - RNA, 19 nt, Artificial Sequence
  Description of Artificial Sequence: Synthetic oligonucleotide
  Sense strand starting at position 2404 of SEQ ID NO: 1882083
acacuagugucauuauuag

SEQ ID NO: 2093865 - RNA, 19 nt, Artificial Sequence
  Description of Artificial Sequence: Synthetic oligonucleotide
  Antisense strand to SEQ ID NO: 2093864
cuaauaaugacacuagugu

SEQ ID NO: 2093866 - RNA, 19 nt, Artificial Sequence
  Description of Artificial Sequence: Synthetic oligonucleotide
  Sense strand starting at position 2604 of SEQ ID NO: 1882083
ggccaaaugagaggucauc

SEQ ID NO: 2093867 - RNA, 19 nt, Artificial Sequence
  Description of Artificial Sequence: Synthetic oligonucleotide
  Antisense strand to SEQ ID NO: 2093866
gaugaccucucauuuggcc

SEQ ID NO: 2093868 - RNA, 19 nt, Artificial Sequence
  Description of Artificial Sequence: Synthetic oligonucleotide
  Sense strand starting at position 2706 of SEQ ID NO: 1882083
gcccaaauggcguuucagu

SEQ ID NO: 2093869 - RNA, 19 nt, Artificial Sequence
  Description of Artificial Sequence: Synthetic oligonucleotide
  Antisense strand to SEQ ID NO: 2093868
acugaaacgccauuugggc

SEQ ID NO: 2093870 - RNA, 19 nt, Artificial Sequence
  Description of Artificial Sequence: Synthetic oligonucleotide
  Sense strand starting at position 3008 of SEQ ID NO: 1882083
gcauauauggcucaggaaa

SEQ ID NO: 2093871 - RNA, 19 nt, Artificial Sequence
  Description of Artificial Sequence: Synthetic oligonucleotide
  Antisense strand to SEQ ID NO: 2093870
uuuccugagccauauaugc

SEQ ID NO: 2093872 - RNA, 19 nt, Artificial Sequence
  Description of Artificial Sequence: Synthetic oligonucleotide
  Sense strand starting at position 3083 of SEQ ID NO: 1882083
aaaggacuuggcuggcaaa

SEQ ID NO: 2093873 - RNA, 19 nt, Artificial Sequence
  Description of Artificial Sequence: Synthetic oligonucleotide
  Antisense strand to SEQ ID NO: 2093872
uuugccagccaaguccuuu

SEQ ID NO: 2093874 - RNA, 19 nt, Artificial Sequence
  Description of Artificial Sequence: Synthetic oligonucleotide
  Sense strand starting at position 3103 of SEQ ID NO: 1882083
agaguuacugcugagaauu

SEQ ID NO: 2093875 - RNA, 19 nt, Artificial Sequence
  Description of Artificial Sequence: Synthetic oligonucleotide
  Antisense strand to SEQ ID NO: 2093874
aauucucagcaguaacucu

SEQ ID NO: 2093876 - RNA, 19 nt, Artificial Sequence
  Description of Artificial Sequence: Synthetic oligonucleotide
  Sense strand starting at position 3111 of SEQ ID NO: 1882083
ugcugagaauuacugaaua

SEQ ID NO: 2093877 - RNA, 19 nt, Artificial Sequence
  Description of Artificial Sequence: Synthetic oligonucleotide
  Antisense strand to SEQ ID NO: 2093876
uauucaguaauucucagca

SEQ ID NO: 2093878 - RNA, 19 nt, Artificial Sequence
  Description of Artificial Sequence: Synthetic oligonucleotide
  Sense strand starting at position 3385 of SEQ ID NO: 1882083
acagcauucggcuauaaug

SEQ ID NO: 2093879 - RNA, 19 nt, Artificial Sequence
  Description of Artificial Sequence: Synthetic oligonucleotide
  Antisense strand to SEQ ID NO: 2093878
cauuauagccgaaugcugu

SEQ ID NO: 2093880 - RNA, 19 nt, Artificial Sequence
  Description of Artificial Sequence: Synthetic oligonucleotide
  Sense strand starting at position 3498 of SEQ ID NO: 1882083
cuaauugugcuuuaaagau

SEQ ID NO: 2093881 - RNA, 19 nt, Artificial Sequence
  Description of Artificial Sequence: Synthetic oligonucleotide
  Antisense strand to SEQ ID NO: 2093880
aucuuuaaagcacaauuag

SEQ ID NO: 2093882 - RNA, 19 nt, Artificial Sequence
  Description of Artificial Sequence: Synthetic oligonucleotide
  Sense strand starting at position 3507 of SEQ ID NO: 1882083
cuuuaaagaugggucacaa

SEQ ID NO: 2093883 - RNA, 19 nt, Artificial Sequence
  Description of Artificial Sequence: Synthetic oligonucleotide
  Antisense strand to SEQ ID NO: 2093882
uugugacccaucuuuaaag

SEQ ID NO: 2093884 - RNA, 19 nt, Artificial Sequence
  Description of Artificial Sequence: Synthetic oligonucleotide
  Sense strand starting at position 3519 of SEQ ID NO: 1882083
gucacaaauucugugauac

SEQ ID NO: 2093885 - RNA, 19 nt, Artificial Sequence
  Description of Artificial Sequence: Synthetic oligonucleotide
  Antisense strand to SEQ ID NO: 2093884
guaucacagaauuugugac

SEQ ID NO: 2093886 - RNA, 19 nt, Artificial Sequence
  Description of Artificial Sequence: Synthetic oligonucleotide
  Sense strand starting at position 3543 of SEQ ID NO: 1882083
cacucagacguggaacuua

SEQ ID NO: 2093887 - RNA, 19 nt, Artificial Sequence
  Description of Artificial Sequence: Synthetic oligonucleotide
  Antisense strand to SEQ ID NO: 2093886
uaaguuccacgucugagug

SEQ ID NO: 2093888 - RNA, 19 nt, Artificial Sequence
  Description of Artificial Sequence: Synthetic oligonucleotide
  Sense strand starting at position 3586 of SEQ ID NO: 1882083
uagacuuagugacuuguau

SEQ ID NO: 2093889 - RNA, 19 nt, Artificial Sequence
  Description of Artificial Sequence: Synthetic oligonucleotide
  Antisense strand to SEQ ID NO: 2093888
auacaagucacuaagucua

SEQ ID NO: 2093890 - RNA, 19 nt, Artificial Sequence
  Description of Artificial Sequence: Synthetic oligonucleotide
  Sense strand starting at position 3731 of SEQ ID NO: 1882083
ccagcaugucaugaggaca

SEQ ID NO: 2093891 - RNA, 19 nt, Artificial Sequence
  Description of Artificial Sequence: Synthetic oligonucleotide
  Antisense strand to SEQ ID NO: 2093890
uguccucaugacaugcugg

SEQ ID NO: 2093892 - RNA, 19 nt, Artificial Sequence
  Description of Artificial Sequence: Synthetic oligonucleotide
  Sense strand starting at position 3866 of SEQ ID NO: 1882083
acagcuugacuguaugaga

SEQ ID NO: 2093893 - RNA, 19 nt, Artificial Sequence
  Description of Artificial Sequence: Synthetic oligonucleotide
  Antisense strand to SEQ ID NO: 2093892
ucucauacagucaagcugu

SEQ ID NO: 2093894 - RNA, 19 nt, Artificial Sequence
  Description of Artificial Sequence: Synthetic oligonucleotide
  Sense strand starting at position 3919 of SEQ ID NO: 1882083
caggauuccugcccacaga

SEQ ID NO: 2093895 - RNA, 19 nt, Artificial Sequence
  Description of Artificial Sequence: Synthetic oligonucleotide
  Antisense strand to SEQ ID NO: 2093894
ucugugggcaggaauccug

SEQ ID NO: 2093896 - RNA, 19 nt, Artificial Sequence
  Description of Artificial Sequence: Synthetic oligonucleotide
  Sense strand starting at position 3943 of SEQ ID NO: 1882083
ugagaugauagauguuuau

SEQ ID NO: 2093897 - RNA, 19 nt, Artificial Sequence
  Description of Artificial Sequence: Synthetic oligonucleotide
  Antisense strand to SEQ ID NO: 2093896
auaaacaucuaucaucuca

SEQ ID NO: 2093898 - RNA, 19 nt, Artificial Sequence
  Description of Artificial Sequence: Synthetic oligonucleotide
  Sense strand starting at position 3946 of SEQ ID NO: 1882083
gaugauagauguuuauugu

SEQ ID NO: 2093899 - RNA, 19 nt, Artificial Sequence
  Description of Artificial Sequence: Synthetic oligonucleotide
  Antisense strand to SEQ ID NO: 2093898
acaauaaacaucuaucauc

SEQ ID NO: 2093900 - RNA, 19 nt, Artificial Sequence
  Description of Artificial Sequence: Synthetic oligonucleotide
  Sense strand starting at position 858 of SEQ ID NO: 1882084
ugucuuggucucuauagag

SEQ ID NO: 2093901 - RNA, 19 nt, Artificial Sequence
  Description of Artificial Sequence: Synthetic oligonucleotide
  Antisense strand to SEQ ID NO: 2093900
cucuauagagaccaagaca

SEQ ID NO: 2093902 - RNA, 19 nt, Artificial Sequence
  Description of Artificial Sequence: Synthetic oligonucleotide
  Sense strand starting at position 930 of SEQ ID NO: 1882084
uucuauuaucugggcuuaa

SEQ ID NO: 2093903 - RNA, 19 nt, Artificial Sequence
  Description of Artificial Sequence: Synthetic oligonucleotide
  Antisense strand to SEQ ID NO: 2093902
uuaagcccagauaauagaa

SEQ ID NO: 2093904 - RNA, 19 nt, Artificial Sequence
  Description of Artificial Sequence: Synthetic oligonucleotide
  Sense strand starting at position 931 of SEQ ID NO: 1882084
ucuauuaucugggcuuaag

SEQ ID NO: 2093905 - RNA, 19 nt, Artificial Sequence
  Description of Artificial Sequence: Synthetic oligonucleotide
  Antisense strand to SEQ ID NO: 2093904
cuuaagcccagauaauaga

SEQ ID NO: 2093906 - RNA, 19 nt, Artificial Sequence
  Description of Artificial Sequence: Synthetic oligonucleotide
  Sense strand starting at position 943 of SEQ ID NO: 1882084
gcuuaagaggauuggauca

SEQ ID NO: 2093907 - RNA, 19 nt, Artificial Sequence
  Description of Artificial Sequence: Synthetic oligonucleotide
  Antisense strand to SEQ ID NO: 2093906
ugauccaauccucuuaagc

SEQ ID NO: 2093908 - RNA, 19 nt, Artificial Sequence
  Description of Artificial Sequence: Synthetic oligonucleotide
  Sense strand starting at position 973 of SEQ ID NO: 1882084
guuccaauuccugaucugu

SEQ ID NO: 2093909 - RNA, 19 nt, Artificial Sequence
  Description of Artificial Sequence: Synthetic oligonucleotide
  Antisense strand to SEQ ID NO: 2093908
acagaucaggaauuggaac

SEQ ID NO: 2093910 - RNA, 19 nt, Artificial Sequence
  Description of Artificial Sequence: Synthetic oligonucleotide
  Sense strand starting at position 1033 of SEQ ID NO: 1882084
cugaguauuuccuuugucu

SEQ ID NO: 2093911 - RNA, 19 nt, Artificial Sequence
  Description of Artificial Sequence: Synthetic oligonucleotide
  Antisense strand to SEQ ID NO: 2093910
agacaaaggaaauacucag

SEQ ID NO: 2093912 - RNA, 19 nt, Artificial Sequence
  Description of Artificial Sequence: Synthetic oligonucleotide
  Sense strand starting at position 1082 of SEQ ID NO: 1882084
gcagcugggauggaguaau

SEQ ID NO: 2093913 - RNA, 19 nt, Artificial Sequence
  Description of Artificial Sequence: Synthetic oligonucleotide
  Antisense strand to SEQ ID NO: 2093912
auuacuccaucccagcugc

SEQ ID NO: 2093914 - RNA, 19 nt, Artificial Sequence
  Description of Artificial Sequence: Synthetic oligonucleotide
  Sense strand starting at position 1099 of SEQ ID NO: 1882084
augagaggauguguguaaa

SEQ ID NO: 2093915 - RNA, 19 nt, Artificial Sequence
  Description of Artificial Sequence: Synthetic oligonucleotide
  Antisense strand to SEQ ID NO: 2093914
uuuacacacauccucucau

SEQ ID NO: 2093916 - RNA, 19 nt, Artificial Sequence
  Description of Artificial Sequence: Synthetic oligonucleotide
  Sense strand starting at position 1102 of SEQ ID NO: 1882084
agaggauguguguaaauau

SEQ ID NO: 2093917 - RNA, 19 nt, Artificial Sequence
  Description of Artificial Sequence: Synthetic oligonucleotide
  Antisense strand to SEQ ID NO: 2093916
auauuuacacacauccucu

SEQ ID NO: 2093918 - RNA, 19 nt, Artificial Sequence
  Description of Artificial Sequence: Synthetic oligonucleotide
  Sense strand starting at position 1234 of SEQ ID NO: 1882084
uaccuugguuuagcagaaa

SEQ ID NO: 2093919 - RNA, 19 nt, Artificial Sequence
  Description of Artificial Sequence: Synthetic oligonucleotide
  Antisense strand to SEQ ID NO: 2093918
uuucugcuaaaccaaggua

SEQ ID NO: 2093920 - RNA, 19 nt, Artificial Sequence
  Description of Artificial Sequence: Synthetic oligonucleotide
  Sense strand starting at position 1312 of SEQ ID NO: 1882084
agaacuguccuuuaugcaa

SEQ ID NO: 2093921 - RNA, 19 nt, Artificial Sequence
  Description of Artificial Sequence: Synthetic oligonucleotide
  Antisense strand to SEQ ID NO: 2093920
uugcauaaaggacaguucu

SEQ ID NO: 2093922 - RNA, 19 nt, Artificial Sequence
  Description of Artificial Sequence: Synthetic oligonucleotide
  Sense strand starting at position 1319 of SEQ ID NO: 1882084
uccuuuaugcaaugggaau

SEQ ID NO: 2093923 - RNA, 19 nt, Artificial Sequence
  Description of Artificial Sequence: Synthetic oligonucleotide
  Antisense strand to SEQ ID NO: 2093922
auucccauugcauaaagga

SEQ ID NO: 2093924 - RNA, 19 nt, Artificial Sequence
  Description of Artificial Sequence: Synthetic oligonucleotide
  Sense strand starting at position 1412 of SEQ ID NO: 1882084
cgcuaugggaagugaauau

SEQ ID NO: 2093925 - RNA, 19 nt, Artificial Sequence
  Description of Artificial Sequence: Synthetic oligonucleotide
  Antisense strand to SEQ ID NO: 2093924
auauucacuucccauagcg

SEQ ID NO: 2093926 - RNA, 19 nt, Artificial Sequence
  Description of Artificial Sequence: Synthetic oligonucleotide
  Sense strand starting at position 1424 of SEQ ID NO: 1882084
ugaauauauuagucuagca

SEQ ID NO: 2093927 - RNA, 19 nt, Artificial Sequence
  Description of Artificial Sequence: Synthetic oligonucleotide
  Antisense strand to SEQ ID NO: 2093926
ugcuagacuaauauauuca

SEQ ID NO: 2093928 - RNA, 19 nt, Artificial Sequence
  Description of Artificial Sequence: Synthetic oligonucleotide
  Sense strand starting at position 1443 of SEQ ID NO: 1882084
aggugaccuucugucaauu

SEQ ID NO: 2093929 - RNA, 19 nt, Artificial Sequence
  Description of Artificial Sequence: Synthetic oligonucleotide
  Antisense strand to SEQ ID NO: 2093928
aauugacagaaggucaccu

SEQ ID NO: 2093930 - RNA, 19 nt, Artificial Sequence
  Description of Artificial Sequence: Synthetic oligonucleotide
  Sense strand starting at position 1502 of SEQ ID NO: 1882084
gaagaacaacuguguuauc

SEQ ID NO: 2093931 - RNA, 19 nt, Artificial Sequence
  Description of Artificial Sequence: Synthetic oligonucleotide
  Antisense strand to SEQ ID NO: 2093930
gauaacacaguuguucuuc

SEQ ID NO: 2093932 - RNA, 19 nt, Artificial Sequence
  Description of Artificial Sequence: Synthetic oligonucleotide
  Sense strand starting at position 1507 of SEQ ID NO: 1882084
acaacuguguuaucuggau

SEQ ID NO: 2093933 - RNA, 19 nt, Artificial Sequence
  Description of Artificial Sequence: Synthetic oligonucleotide
  Antisense strand to SEQ ID NO: 2093932
auccagauaacacaguugu

SEQ ID NO: 2093934 - RNA, 19 nt, Artificial Sequence
  Description of Artificial Sequence: Synthetic oligonucleotide
  Sense strand starting at position 1814 of SEQ ID NO: 1882084
ccagguguccuugaaucag

SEQ ID NO: 2093935 - RNA, 19 nt, Artificial Sequence
  Description of Artificial Sequence: Synthetic oligonucleotide
  Antisense strand to SEQ ID NO: 2093934
cugauucaaggacaccugg

SEQ ID NO: 2093936 - RNA, 19 nt, Artificial Sequence
  Description of Artificial Sequence: Synthetic oligonucleotide
  Sense strand starting at position 2058 of SEQ ID NO: 1882084
ugucauuucccgcacacca

SEQ ID NO: 2093937 - RNA, 19 nt, Artificial Sequence
  Description of Artificial Sequence: Synthetic oligonucleotide
  Antisense strand to SEQ ID NO: 2093936
uggugugcgggaaaugaca

SEQ ID NO: 2093938 - RNA, 19 nt, Artificial Sequence
  Description of Artificial Sequence: Synthetic oligonucleotide
  Sense strand starting at position 2090 of SEQ ID NO: 1882084
gccucugagcacuggaaau

SEQ ID NO: 2093939 - RNA, 19 nt, Artificial Sequence
  Description of Artificial Sequence: Synthetic oligonucleotide
  Antisense strand to SEQ ID NO: 2093938
auuuccagugcucagaggc

SEQ ID NO: 2093940 - RNA, 19 nt, Artificial Sequence
  Description of Artificial Sequence: Synthetic oligonucleotide
  Sense strand starting at position 2145 of SEQ ID NO: 1882084
gagccaaucuguuuauaga

SEQ ID NO: 2093941 - RNA, 19 nt, Artificial Sequence
  Description of Artificial Sequence: Synthetic oligonucleotide
  Antisense strand to SEQ ID NO: 2093940
ucuauaaacagauuggcuc

SEQ ID NO: 2093942 - RNA, 19 nt, Artificial Sequence
  Description of Artificial Sequence: Synthetic oligonucleotide
  Sense strand starting at position 2146 of SEQ ID NO: 1882084
agccaaucuguuuauagaa

SEQ ID NO: 2093943 - RNA, 19 nt, Artificial Sequence
  Description of Artificial Sequence: Synthetic oligonucleotide
  Antisense strand to SEQ ID NO: 2093942
uucuauaaacagauuggcu

SEQ ID NO: 2093944 - RNA, 19 nt, Artificial Sequence
  Description of Artificial Sequence: Synthetic oligonucleotide
  Sense strand starting at position 2286 of SEQ ID NO: 1882084
cuccucacucuggaaugua

SEQ ID NO: 2093945 - RNA, 19 nt, Artificial Sequence
  Description of Artificial Sequence: Synthetic oligonucleotide
  Antisense strand to SEQ ID NO: 2093944
uacauuccagagugaggag

SEQ ID NO: 2093946 - RNA, 19 nt, Artificial Sequence
  Description of Artificial Sequence: Synthetic oligonucleotide
  Sense strand starting at position 2380 of SEQ ID NO: 1882084
gaaugaaugagcgguuuau

SEQ ID NO: 2093947 - RNA, 19 nt, Artificial Sequence
  Description of Artificial Sequence: Synthetic oligonucleotide
  Antisense strand to SEQ ID NO: 2093946
auaaaccgcucauucauuc

SEQ ID NO: 2093948 - RNA, 19 nt, Artificial Sequence
  Description of Artificial Sequence: Synthetic oligonucleotide
  Sense strand starting at position 2418 of SEQ ID NO: 1882084
auaagaggaucagaugaga

SEQ ID NO: 2093949 - RNA, 19 nt, Artificial Sequence
  Description of Artificial Sequence: Synthetic oligonucleotide
  Antisense strand to SEQ ID NO: 2093948
ucucaucugauccucuuau

SEQ ID NO: 2093950 - RNA, 19 nt, Artificial Sequence
  Description of Artificial Sequence: Synthetic oligonucleotide
  Sense strand starting at position 2460 of SEQ ID NO: 1882084
aggaccuuggcugaaguau

SEQ ID NO: 2093951 - RNA, 19 nt, Artificial Sequence
  Description of Artificial Sequence: Synthetic oligonucleotide
  Antisense strand to SEQ ID NO: 2093950
auacuucagccaagguccu

SEQ ID NO: 2093952 - RNA, 19 nt, Artificial Sequence
  Description of Artificial Sequence: Synthetic oligonucleotide
  Sense strand starting at position 2469 of SEQ ID NO: 1882084
gcugaaguauaccuacauu

SEQ ID NO: 2093953 - RNA, 19 nt, Artificial Sequence
  Description of Artificial Sequence: Synthetic oligonucleotide
  Antisense strand to SEQ ID NO: 2093952
aauguagguauacuucagc

SEQ ID NO: 2093954 - RNA, 19 nt, Artificial Sequence
  Description of Artificial Sequence: Synthetic oligonucleotide
  Sense strand starting at position 2574 of SEQ ID NO: 1882084
uuucuuaccugauuguuag

SEQ ID NO: 2093955 - RNA, 19 nt, Artificial Sequence
  Description of Artificial Sequence: Synthetic oligonucleotide
  Antisense strand to SEQ ID NO: 2093954
cuaacaaucagguaagaaa

SEQ ID NO: 2093956 - RNA, 19 nt, Artificial Sequence
  Description of Artificial Sequence: Synthetic oligonucleotide
  Sense strand starting at position 2575 of SEQ ID NO: 1882084
uucuuaccugauuguuaga

SEQ ID NO: 2093957 - RNA, 19 nt, Artificial Sequence
  Description of Artificial Sequence: Synthetic oligonucleotide
  Antisense strand to SEQ ID NO: 2093956
ucuaacaaucagguaagaa

SEQ ID NO: 2093958 - RNA, 19 nt, Artificial Sequence
  Description of Artificial Sequence: Synthetic oligonucleotide
  Sense strand starting at position 2577 of SEQ ID NO: 1882084
cuuaccugauuguuagaac

SEQ ID NO: 2093959 - RNA, 19 nt, Artificial Sequence
  Description of Artificial Sequence: Synthetic oligonucleotide
  Antisense strand to SEQ ID NO: 2093958
guucuaacaaucagguaag

SEQ ID NO: 2093960 - RNA, 19 nt, Artificial Sequence
  Description of Artificial Sequence: Synthetic oligonucleotide
  Sense strand starting at position 2607 of SEQ ID NO: 1882084
ucaggaagguaucuuuaga

SEQ ID NO: 2093961 - RNA, 19 nt, Artificial Sequence
  Description of Artificial Sequence: Synthetic oligonucleotide
  Antisense strand to SEQ ID NO: 2093960
ucuaaagauaccuuccuga

SEQ ID NO: 2093962 - RNA, 19 nt, Artificial Sequence
  Description of Artificial Sequence: Synthetic oligonucleotide
  Sense strand starting at position 3455 of SEQ ID NO: 1882084
cacucaggcccugggaaua

SEQ ID NO: 2093963 - RNA, 19 nt, Artificial Sequence
  Description of Artificial Sequence: Synthetic oligonucleotide
  Antisense strand to SEQ ID NO: 2093962
uauucccagggccugagug

SEQ ID NO: 2093964 - RNA, 19 nt, Artificial Sequence
  Description of Artificial Sequence: Synthetic oligonucleotide
  Sense strand starting at position 3608 of SEQ ID NO: 1882084
aaaggugauuagucccuuu

SEQ ID NO: 2093965 - RNA, 19 nt, Artificial Sequence
  Description of Artificial Sequence: Synthetic oligonucleotide
  Antisense strand to SEQ ID NO: 2093964
aaagggacuaaucaccuuu

SEQ ID NO: 2093966 - RNA, 19 nt, Artificial Sequence
  Description of Artificial Sequence: Synthetic oligonucleotide
  Sense strand starting at position 3661 of SEQ ID NO: 1882084
ucuugaggcugacuguaau

SEQ ID NO: 2093967 - RNA, 19 nt, Artificial Sequence
  Description of Artificial Sequence: Synthetic oligonucleotide
  Antisense strand to SEQ ID NO: 2093966
auuacagucagccucaaga

SEQ ID NO: 2093968 - RNA, 19 nt, Artificial Sequence
  Description of Artificial Sequence: Synthetic oligonucleotide
  Sense strand starting at position 3679 of SEQ ID NO: 1882084
uccugcuugcacugaauuu

SEQ ID NO: 2093969 - RNA, 19 nt, Artificial Sequence
  Description of Artificial Sequence: Synthetic oligonucleotide
  Antisense strand to SEQ ID NO: 2093968
aaauucagugcaagcagga

SEQ ID NO: 2093970 - RNA, 19 nt, Artificial Sequence
  Description of Artificial Sequence: Synthetic oligonucleotide
  Sense strand starting at position 3722 of SEQ ID NO: 1882084
aucugugacgccuauaaag

SEQ ID NO: 2093971 - RNA, 19 nt, Artificial Sequence
  Description of Artificial Sequence: Synthetic oligonucleotide
  Antisense strand to SEQ ID NO: 2093970
cuuuauaggcgucacagau

SEQ ID NO: 2093972 - RNA, 19 nt, Artificial Sequence
  Description of Artificial Sequence: Synthetic oligonucleotide
  Sense strand starting at position 3793 of SEQ ID NO: 1882084
cuaguuuccuuucuuuaga

SEQ ID NO: 2093973 - RNA, 19 nt, Artificial Sequence
  Description of Artificial Sequence: Synthetic oligonucleotide
  Antisense strand to SEQ ID NO: 2093972
ucuaaagaaaggaaacuag

SEQ ID NO: 2093974 - RNA, 19 nt, Artificial Sequence
  Description of Artificial Sequence: Synthetic oligonucleotide
  Sense strand starting at position 3828 of SEQ ID NO: 1882084
ucugcuacacucuaggaaa

SEQ ID NO: 2093975 - RNA, 19 nt, Artificial Sequence
  Description of Artificial Sequence: Synthetic oligonucleotide
  Antisense strand to SEQ ID NO: 2093974
uuuccuagaguguagcaga

SEQ ID NO: 2093976 - RNA, 19 nt, Artificial Sequence
  Description of Artificial Sequence: Synthetic oligonucleotide
  Sense strand starting at position 3830 of SEQ ID NO: 1882084
ugcuacacucuaggaaaga

SEQ ID NO: 2093977 - RNA, 19 nt, Artificial Sequence
  Description of Artificial Sequence: Synthetic oligonucleotide
  Antisense strand to SEQ ID NO: 2093976
ucuuuccuagaguguagca

SEQ ID NO: 2093978 - RNA, 19 nt, Artificial Sequence
  Description of Artificial Sequence: Synthetic oligonucleotide
  Sense strand starting at position 3908 of SEQ ID NO: 1882084
ugaaauacuuguuuaguuc

SEQ ID NO: 2093979 - RNA, 19 nt, Artificial Sequence
  Description of Artificial Sequence: Synthetic oligonucleotide
  Antisense strand to SEQ ID NO: 2093978
gaacuaaacaaguauuuca

SEQ ID NO: 2093980 - RNA, 19 nt, Artificial Sequence
  Description of Artificial Sequence: Synthetic oligonucleotide
  Sense strand starting at position 8 of SEQ ID NO: 1882085
ugaaacuaacagugguuua

SEQ ID NO: 2093981 - RNA, 19 nt, Artificial Sequence
  Description of Artificial Sequence: Synthetic oligonucleotide
  Antisense strand to SEQ ID NO: 2093980
uaaaccacuguuaguuuca

SEQ ID NO: 2093982 - RNA, 19 nt, Artificial Sequence
  Description of Artificial Sequence: Synthetic oligonucleotide
  Sense strand starting at position 174 of SEQ ID NO: 1882085
augguuauauuucugugua

SEQ ID NO: 2093983 - RNA, 19 nt, Artificial Sequence
  Description of Artificial Sequence: Synthetic oligonucleotide
  Antisense strand to SEQ ID NO: 2093982
uacacagaaauauaaccau

SEQ ID NO: 2093984 - RNA, 19 nt, Artificial Sequence
  Description of Artificial Sequence: Synthetic oligonucleotide
  Sense strand starting at position 187 of SEQ ID NO: 1882085
uguguaaaugccuauacaa

SEQ ID NO: 2093985 - RNA, 19 nt, Artificial Sequence
  Description of Artificial Sequence: Synthetic oligonucleotide
  Antisense strand to SEQ ID NO: 2093984
uuguauaggcauuuacaca

SEQ ID NO: 2093986 - RNA, 19 nt, Artificial Sequence
  Description of Artificial Sequence: Synthetic oligonucleotide
  Sense strand starting at position 334 of SEQ ID NO: 1882085
acccaucuagcugagacua

SEQ ID NO: 2093987 - RNA, 19 nt, Artificial Sequence
  Description of Artificial Sequence: Synthetic oligonucleotide
  Antisense strand to SEQ ID NO: 2093986
uagucucagcuagaugggu

SEQ ID NO: 2093988 - RNA, 19 nt, Artificial Sequence
  Description of Artificial Sequence: Synthetic oligonucleotide
  Sense strand starting at position 402 of SEQ ID NO: 1882085
ggcuaaugacuuuauaguu

SEQ ID NO: 2093989 - RNA, 19 nt, Artificial Sequence
  Description of Artificial Sequence: Synthetic oligonucleotide
  Antisense strand to SEQ ID NO: 2093988
aacuauaaagucauuagcc

SEQ ID NO: 2093990 - RNA, 19 nt, Artificial Sequence
  Description of Artificial Sequence: Synthetic oligonucleotide
  Sense strand starting at position 591 of SEQ ID NO: 1882085
ccauaaucucauggacuga

SEQ ID NO: 2093991 - RNA, 19 nt, Artificial Sequence
  Description of Artificial Sequence: Synthetic oligonucleotide
  Antisense strand to SEQ ID NO: 2093990
ucaguccaugagauuaugg

SEQ ID NO: 2093992 - RNA, 19 nt, Artificial Sequence
  Description of Artificial Sequence: Synthetic oligonucleotide
  Sense strand starting at position 648 of SEQ ID NO: 1882085
uggaauugcuuucuacuag

SEQ ID NO: 2093993 - RNA, 19 nt, Artificial Sequence
  Description of Artificial Sequence: Synthetic oligonucleotide
  Antisense strand to SEQ ID NO: 2093992
cuaguagaaagcaauucca

SEQ ID NO: 2093994 - RNA, 19 nt, Artificial Sequence
  Description of Artificial Sequence: Synthetic oligonucleotide
  Sense strand starting at position 710 of SEQ ID NO: 1882085
acuuaauuauggccagauu

SEQ ID NO: 2093995 - RNA, 19 nt, Artificial Sequence
  Description of Artificial Sequence: Synthetic oligonucleotide
  Antisense strand to SEQ ID NO: 2093994
aaucuggccauaauuaagu

SEQ ID NO: 2093996 - RNA, 19 nt, Artificial Sequence
  Description of Artificial Sequence: Synthetic oligonucleotide
  Sense strand starting at position 711 of SEQ ID NO: 1882085
cuuaauuauggccagauua

SEQ ID NO: 2093997 - RNA, 19 nt, Artificial Sequence
  Description of Artificial Sequence: Synthetic oligonucleotide
  Antisense strand to SEQ ID NO: 2093996
uaaucuggccauaauuaag

SEQ ID NO: 2093998 - RNA, 19 nt, Artificial Sequence
  Description of Artificial Sequence: Synthetic oligonucleotide
  Sense strand starting at position 723 of SEQ ID NO: 1882085
cagauuaaacagugguuaa

SEQ ID NO: 2093999 - RNA, 19 nt, Artificial Sequence
  Description of Artificial Sequence: Synthetic oligonucleotide
  Antisense strand to SEQ ID NO: 2093998
uuaaccacuguuuaaucug

SEQ ID NO: 2094000 - RNA, 19 nt, Artificial Sequence
  Description of Artificial Sequence: Synthetic oligonucleotide
  Sense strand starting at position 837 of SEQ ID NO: 1882085
uucuuaagcgauggagaug

SEQ ID NO: 2094001 - RNA, 19 nt, Artificial Sequence
  Description of Artificial Sequence: Synthetic oligonucleotide
  Antisense strand to SEQ ID NO: 2094000
caucuccaucgcuuaagaa

SEQ ID NO: 2094002 - RNA, 19 nt, Artificial Sequence
  Description of Artificial Sequence: Synthetic oligonucleotide
  Sense strand starting at position 842 of SEQ ID NO: 1882085
aagcgauggagaugaguau

SEQ ID NO: 2094003 - RNA, 19 nt, Artificial Sequence
  Description of Artificial Sequence: Synthetic oligonucleotide
  Antisense strand to SEQ ID NO: 2094002
auacucaucuccaucgcuu

SEQ ID NO: 2094004 - RNA, 19 nt, Artificial Sequence
  Description of Artificial Sequence: Synthetic oligonucleotide
  Sense strand starting at position 1002 of SEQ ID NO: 1882085
agcggaaucaauuaggcaa

SEQ ID NO: 2094005 - RNA, 19 nt, Artificial Sequence
  Description of Artificial Sequence: Synthetic oligonucleotide
  Antisense strand to SEQ ID NO: 2094004
uugccuaauugauuccgcu

SEQ ID NO: 2094006 - RNA, 19 nt, Artificial Sequence
  Description of Artificial Sequence: Synthetic oligonucleotide
  Sense strand starting at position 1102 of SEQ ID NO: 1882085
agcuguuuccuggauagac

SEQ ID NO: 2094007 - RNA, 19 nt, Artificial Sequence
  Description of Artificial Sequence: Synthetic oligonucleotide
  Antisense strand to SEQ ID NO: 2094006
gucuauccaggaaacagcu

SEQ ID NO: 2094008 - RNA, 19 nt, Artificial Sequence
  Description of Artificial Sequence: Synthetic oligonucleotide
  Sense strand starting at position 1161 of SEQ ID NO: 1882085
gguuguggcguaaauguca

SEQ ID NO: 2094009 - RNA, 19 nt, Artificial Sequence
  Description of Artificial Sequence: Synthetic oligonucleotide
  Antisense strand to SEQ ID NO: 2094008
ugacauuuacgccacaacc

SEQ ID NO: 2094010 - RNA, 19 nt, Artificial Sequence
  Description of Artificial Sequence: Synthetic oligonucleotide
  Sense strand starting at position 1315 of SEQ ID NO: 1882085
agcaucuguccuuguauuu

SEQ ID NO: 2094011 - RNA, 19 nt, Artificial Sequence
  Description of Artificial Sequence: Synthetic oligonucleotide
  Antisense strand to SEQ ID NO: 2094010
aaauacaaggacagaugcu

SEQ ID NO: 2094012 - RNA, 19 nt, Artificial Sequence
  Description of Artificial Sequence: Synthetic oligonucleotide
  Sense strand starting at position 1398 of SEQ ID NO: 1882085
cuaaguccucaguagauac

SEQ ID NO: 2094013 - RNA, 19 nt, Artificial Sequence
  Description of Artificial Sequence: Synthetic oligonucleotide
  Antisense strand to SEQ ID NO: 2094012
guaucuacugaggacuuag

SEQ ID NO: 2094014 - RNA, 19 nt, Artificial Sequence
  Description of Artificial Sequence: Synthetic oligonucleotide
  Sense strand starting at position 2076 of SEQ ID NO: 1882085
aggauacuugccgcgcuua

SEQ ID NO: 2094015 - RNA, 19 nt, Artificial Sequence
  Description of Artificial Sequence: Synthetic oligonucleotide
  Antisense strand to SEQ ID NO: 2094014
uaagcgcggcaaguauccu

SEQ ID NO: 2094016 - RNA, 19 nt, Artificial Sequence
  Description of Artificial Sequence: Synthetic oligonucleotide
  Sense strand starting at position 2079 of SEQ ID NO: 1882085
auacuugccgcgcuuaaga

SEQ ID NO: 2094017 - RNA, 19 nt, Artificial Sequence
  Description of Artificial Sequence: Synthetic oligonucleotide
  Antisense strand to SEQ ID NO: 2094016
ucuuaagcgcggcaaguau

SEQ ID NO: 2094018 - RNA, 19 nt, Artificial Sequence
  Description of Artificial Sequence: Synthetic oligonucleotide
  Sense strand starting at position 2215 of SEQ ID NO: 1882085
aaguaaucuccggcagcgu

SEQ ID NO: 2094019 - RNA, 19 nt, Artificial Sequence
  Description of Artificial Sequence: Synthetic oligonucleotide
  Antisense strand to SEQ ID NO: 2094018
acgcugccggagauuacuu

SEQ ID NO: 2094020 - RNA, 19 nt, Artificial Sequence
  Description of Artificial Sequence: Synthetic oligonucleotide
  Sense strand starting at position 2480 of SEQ ID NO: 1882085
ggaucuguuccugauccuu

SEQ ID NO: 2094021 - RNA, 19 nt, Artificial Sequence
  Description of Artificial Sequence: Synthetic oligonucleotide
  Antisense strand to SEQ ID NO: 2094020
aaggaucaggaacagaucc

SEQ ID NO: 2094022 - RNA, 19 nt, Artificial Sequence
  Description of Artificial Sequence: Synthetic oligonucleotide
  Sense strand starting at position 2776 of SEQ ID NO: 1882085
ucaaguacaugguuauuga

SEQ ID NO: 2094023 - RNA, 19 nt, Artificial Sequence
  Description of Artificial Sequence: Synthetic oligonucleotide
  Antisense strand to SEQ ID NO: 2094022
ucaauaaccauguacuuga

SEQ ID NO: 2094024 - RNA, 19 nt, Artificial Sequence
  Description of Artificial Sequence: Synthetic oligonucleotide
  Sense strand starting at position 2777 of SEQ ID NO: 1882085
caaguacaugguuauugau

SEQ ID NO: 2094025 - RNA, 19 nt, Artificial Sequence
  Description of Artificial Sequence: Synthetic oligonucleotide
  Antisense strand to SEQ ID NO: 2094024
aucaauaaccauguacuug

SEQ ID NO: 2094026 - RNA, 19 nt, Artificial Sequence
  Description of Artificial Sequence: Synthetic oligonucleotide
  Sense strand starting at position 2779 of SEQ ID NO: 1882085
aguacaugguuauugauau

SEQ ID NO: 2094027 - RNA, 19 nt, Artificial Sequence
  Description of Artificial Sequence: Synthetic oligonucleotide
  Antisense strand to SEQ ID NO: 2094026
auaucaauaaccauguacu

SEQ ID NO: 2094028 - RNA, 19 nt, Artificial Sequence
  Description of Artificial Sequence: Synthetic oligonucleotide
  Sense strand starting at position 2790 of SEQ ID NO: 1882085
auugauaugcaucagugau

SEQ ID NO: 2094029 - RNA, 19 nt, Artificial Sequence
  Description of Artificial Sequence: Synthetic oligonucleotide
  Antisense strand to SEQ ID NO: 2094028
aucacugaugcauaucaau

SEQ ID NO: 2094030 - RNA, 19 nt, Artificial Sequence
  Description of Artificial Sequence: Synthetic oligonucleotide
  Sense strand starting at position 2792 of SEQ ID NO: 1882085
ugauaugcaucagugauca

SEQ ID NO: 2094031 - RNA, 19 nt, Artificial Sequence
  Description of Artificial Sequence: Synthetic oligonucleotide
  Antisense strand to SEQ ID NO: 2094030
ugaucacugaugcauauca

SEQ ID NO: 2094032 - RNA, 19 nt, Artificial Sequence
  Description of Artificial Sequence: Synthetic oligonucleotide
  Sense strand starting at position 3143 of SEQ ID NO: 1882085
gggaaucagaucuguauua

SEQ ID NO: 2094033 - RNA, 19 nt, Artificial Sequence
  Description of Artificial Sequence: Synthetic oligonucleotide
  Antisense strand to SEQ ID NO: 2094032
uaauacagaucugauuccc

SEQ ID NO: 2094034 - RNA, 19 nt, Artificial Sequence
  Description of Artificial Sequence: Synthetic oligonucleotide
  Sense strand starting at position 3144 of SEQ ID NO: 1882085
ggaaucagaucuguauuac

SEQ ID NO: 2094035 - RNA, 19 nt, Artificial Sequence
  Description of Artificial Sequence: Synthetic oligonucleotide
  Antisense strand to SEQ ID NO: 2094034
guaauacagaucugauucc

SEQ ID NO: 2094036 - RNA, 19 nt, Artificial Sequence
  Description of Artificial Sequence: Synthetic oligonucleotide
  Sense strand starting at position 3145 of SEQ ID NO: 1882085
gaaucagaucuguauuacg

SEQ ID NO: 2094037 - RNA, 19 nt, Artificial Sequence
  Description of Artificial Sequence: Synthetic oligonucleotide
  Antisense strand to SEQ ID NO: 2094036
cguaauacagaucugauuc

SEQ ID NO: 2094038 - RNA, 19 nt, Artificial Sequence
  Description of Artificial Sequence: Synthetic oligonucleotide
  Sense strand starting at position 3176 of SEQ ID NO: 1882085
gugugauuacauugacaau

SEQ ID NO: 2094039 - RNA, 19 nt, Artificial Sequence
  Description of Artificial Sequence: Synthetic oligonucleotide
  Antisense strand to SEQ ID NO: 2094038
auugucaauguaaucacac

SEQ ID NO: 2094040 - RNA, 19 nt, Artificial Sequence
  Description of Artificial Sequence: Synthetic oligonucleotide
  Sense strand starting at position 3189 of SEQ ID NO: 1882085
gacaauuugcucugguggu

SEQ ID NO: 2094041 - RNA, 19 nt, Artificial Sequence
  Description of Artificial Sequence: Synthetic oligonucleotide
  Antisense strand to SEQ ID NO: 2094040
accaccagagcaaauuguc

SEQ ID NO: 2094042 - RNA, 19 nt, Artificial Sequence
  Description of Artificial Sequence: Synthetic oligonucleotide
  Sense strand starting at position 3259 of SEQ ID NO: 1882085
gcgauagggcagcauauuu

SEQ ID NO: 2094043 - RNA, 19 nt, Artificial Sequence
  Description of Artificial Sequence: Synthetic oligonucleotide
  Antisense strand to SEQ ID NO: 2094042
aaauaugcugcccuaucgc

SEQ ID NO: 2094044 - RNA, 19 nt, Artificial Sequence
  Description of Artificial Sequence: Synthetic oligonucleotide
  Sense strand starting at position 3414 of SEQ ID NO: 1882085
acaacucugcuguaaugaa

SEQ ID NO: 2094045 - RNA, 19 nt, Artificial Sequence
  Description of Artificial Sequence: Synthetic oligonucleotide
  Antisense strand to SEQ ID NO: 2094044
uucauuacagcagaguugu

SEQ ID NO: 2094046 - RNA, 19 nt, Artificial Sequence
  Description of Artificial Sequence: Synthetic oligonucleotide
  Sense strand starting at position 3524 of SEQ ID NO: 1882085
uuguuaccucgugaagaac

SEQ ID NO: 2094047 - RNA, 19 nt, Artificial Sequence
  Description of Artificial Sequence: Synthetic oligonucleotide
  Antisense strand to SEQ ID NO: 2094046
guucuucacgagguaacaa

SEQ ID NO: 2094048 - RNA, 19 nt, Artificial Sequence
  Description of Artificial Sequence: Synthetic oligonucleotide
  Sense strand starting at position 3560 of SEQ ID NO: 1882085
auguuaagagcauaacucu

SEQ ID NO: 2094049 - RNA, 19 nt, Artificial Sequence
  Description of Artificial Sequence: Synthetic oligonucleotide
  Antisense strand to SEQ ID NO: 2094048
agaguuaugcucuuaacau

SEQ ID NO: 2094050 - RNA, 19 nt, Artificial Sequence
  Description of Artificial Sequence: Synthetic oligonucleotide
  Sense strand starting at position 3726 of SEQ ID NO: 1882085
cuuaguaaugaguaaucua

SEQ ID NO: 2094051 - RNA, 19 nt, Artificial Sequence
  Description of Artificial Sequence: Synthetic oligonucleotide
  Antisense strand to SEQ ID NO: 2094050
uagauuacucauuacuaag

SEQ ID NO: 2094052 - RNA, 19 nt, Artificial Sequence
  Description of Artificial Sequence: Synthetic oligonucleotide
  Sense strand starting at position 3733 of SEQ ID NO: 1882085
augaguaaucuaugucuaa

SEQ ID NO: 2094053 - RNA, 19 nt, Artificial Sequence
  Description of Artificial Sequence: Synthetic oligonucleotide
  Antisense strand to SEQ ID NO: 2094052
uuagacauagauuacucau

SEQ ID NO: 2094054 - RNA, 19 nt, Artificial Sequence
  Description of Artificial Sequence: Synthetic oligonucleotide
  Sense strand starting at position 3734 of SEQ ID NO: 1882085
ugaguaaucuaugucuaac

SEQ ID NO: 2094055 - RNA, 19 nt, Artificial Sequence
  Description of Artificial Sequence: Synthetic oligonucleotide
  Antisense strand to SEQ ID NO: 2094054
guuagacauagauuacuca

SEQ ID NO: 2094056 - RNA, 19 nt, Artificial Sequence
  Description of Artificial Sequence: Synthetic oligonucleotide
  Sense strand starting at position 3737 of SEQ ID NO: 1882085
guaaucuaugucuaacuca

SEQ ID NO: 2094057 - RNA, 19 nt, Artificial Sequence
  Description of Artificial Sequence: Synthetic oligonucleotide
  Antisense strand to SEQ ID NO: 2094056
ugaguuagacauagauuac

SEQ ID NO: 2094058 - RNA, 19 nt, Artificial Sequence
  Description of Artificial Sequence: Synthetic oligonucleotide
  Sense strand starting at position 3908 of SEQ ID NO: 1882085
augcuauuagaguaaucuu

SEQ ID NO: 2094059 - RNA, 19 nt, Artificial Sequence
  Description of Artificial Sequence: Synthetic oligonucleotide
  Antisense strand to SEQ ID NO: 2094058
aagauuacucuaauagcau

SEQ ID NO: 2094060 - RNA, 19 nt, Artificial Sequence
  Description of Artificial Sequence: Synthetic oligonucleotide
  Sense strand starting at position 48 of SEQ ID NO: 1882086
ggcagagucuaugaugucu

SEQ ID NO: 2094061 - RNA, 19 nt, Artificial Sequence
  Description of Artificial Sequence: Synthetic oligonucleotide
  Antisense strand to SEQ ID NO: 2094060
agacaucauagacucugcc

SEQ ID NO: 2094062 - RNA, 19 nt, Artificial Sequence
  Description of Artificial Sequence: Synthetic oligonucleotide
  Sense strand starting at position 431 of SEQ ID NO: 1882086
uggacuggugcaugaagua

SEQ ID NO: 2094063 - RNA, 19 nt, Artificial Sequence
  Description of Artificial Sequence: Synthetic oligonucleotide
  Antisense strand to SEQ ID NO: 2094062
uacuucaugcaccagucca

SEQ ID NO: 2094064 - RNA, 19 nt, Artificial Sequence
  Description of Artificial Sequence: Synthetic oligonucleotide
  Sense strand starting at position 522 of SEQ ID NO: 1882086
gugcaaauaugucaaacau

SEQ ID NO: 2094065 - RNA, 19 nt, Artificial Sequence
  Description of Artificial Sequence: Synthetic oligonucleotide
  Antisense strand to SEQ ID NO: 2094064
auguuugacauauuugcac

SEQ ID NO: 2094066 - RNA, 19 nt, Artificial Sequence
  Description of Artificial Sequence: Synthetic oligonucleotide
  Sense strand starting at position 554 of SEQ ID NO: 1882086
ucuggauaugauugcauaa

SEQ ID NO: 2094067 - RNA, 19 nt, Artificial Sequence
  Description of Artificial Sequence: Synthetic oligonucleotide
  Antisense strand to SEQ ID NO: 2094066
uuaugcaaucauauccaga

SEQ ID NO: 2094068 - RNA, 19 nt, Artificial Sequence
  Description of Artificial Sequence: Synthetic oligonucleotide
  Sense strand starting at position 659 of SEQ ID NO: 1882086
agagcuaauagauaguguu

SEQ ID NO: 2094069 - RNA, 19 nt, Artificial Sequence
  Description of Artificial Sequence: Synthetic oligonucleotide
  Antisense strand to SEQ ID NO: 2094068
aacacuaucuauuagcucu

SEQ ID NO: 2094070 - RNA, 19 nt, Artificial Sequence
  Description of Artificial Sequence: Synthetic oligonucleotide
  Sense strand starting at position 662 of SEQ ID NO: 1882086
gcuaauagauaguguuuac

SEQ ID NO: 2094071 - RNA, 19 nt, Artificial Sequence
  Description of Artificial Sequence: Synthetic oligonucleotide
  Antisense strand to SEQ ID NO: 2094070
guaaacacuaucuauuagc

SEQ ID NO: 2094072 - RNA, 19 nt, Artificial Sequence
  Description of Artificial Sequence: Synthetic oligonucleotide
  Sense strand starting at position 881 of SEQ ID NO: 1882086
ugucuuaugugccaucuuu

SEQ ID NO: 2094073 - RNA, 19 nt, Artificial Sequence
  Description of Artificial Sequence: Synthetic oligonucleotide
  Antisense strand to SEQ ID NO: 2094072
aaagauggcacauaagaca

SEQ ID NO: 2094074 - RNA, 19 nt, Artificial Sequence
  Description of Artificial Sequence: Synthetic oligonucleotide
  Sense strand starting at position 988 of SEQ ID NO: 1882086
aucacaguuucuguuagga

SEQ ID NO: 2094075 - RNA, 19 nt, Artificial Sequence
  Description of Artificial Sequence: Synthetic oligonucleotide
  Antisense strand to SEQ ID NO: 2094074
uccuaacagaaacugugau

SEQ ID NO: 2094076 - RNA, 19 nt, Artificial Sequence
  Description of Artificial Sequence: Synthetic oligonucleotide
  Sense strand starting at position 1004 of SEQ ID NO: 1882086
ggagcagucuccucuuuaa

SEQ ID NO: 2094077 - RNA, 19 nt, Artificial Sequence
  Description of Artificial Sequence: Synthetic oligonucleotide
  Antisense strand to SEQ ID NO: 2094076
uuaaagaggagacugcucc

SEQ ID NO: 2094078 - RNA, 19 nt, Artificial Sequence
  Description of Artificial Sequence: Synthetic oligonucleotide
  Sense strand starting at position 1173 of SEQ ID NO: 1882086
uguagaaucuuacauggua

SEQ ID NO: 2094079 - RNA, 19 nt, Artificial Sequence
  Description of Artificial Sequence: Synthetic oligonucleotide
  Antisense strand to SEQ ID NO: 2094078
uaccauguaagauucuaca

SEQ ID NO: 2094080 - RNA, 19 nt, Artificial Sequence
  Description of Artificial Sequence: Synthetic oligonucleotide
  Sense strand starting at position 1217 of SEQ ID NO: 1882086
uuagccucuuacuaaggaa

SEQ ID NO: 2094081 - RNA, 19 nt, Artificial Sequence
  Description of Artificial Sequence: Synthetic oligonucleotide
  Antisense strand to SEQ ID NO: 2094080
uuccuuaguaagaggcuaa

SEQ ID NO: 2094082 - RNA, 19 nt, Artificial Sequence
  Description of Artificial Sequence: Synthetic oligonucleotide
  Sense strand starting at position 2016 of SEQ ID NO: 1882086
aucuuaggauccuugcauu

SEQ ID NO: 2094083 - RNA, 19 nt, Artificial Sequence
  Description of Artificial Sequence: Synthetic oligonucleotide
  Antisense strand to SEQ ID NO: 2094082
aaugcaaggauccuaagau

SEQ ID NO: 2094084 - RNA, 19 nt, Artificial Sequence
  Description of Artificial Sequence: Synthetic oligonucleotide
  Sense strand starting at position 2257 of SEQ ID NO: 1882086
cuuagugguagucaugaag

SEQ ID NO: 2094085 - RNA, 19 nt, Artificial Sequence
  Description of Artificial Sequence: Synthetic oligonucleotide
  Antisense strand to SEQ ID NO: 2094084
cuucaugacuaccacuaag

SEQ ID NO: 2094086 - RNA, 19 nt, Artificial Sequence
  Description of Artificial Sequence: Synthetic oligonucleotide
  Sense strand starting at position 2260 of SEQ ID NO: 1882086
agugguagucaugaaguca

SEQ ID NO: 2094087 - RNA, 19 nt, Artificial Sequence
  Description of Artificial Sequence: Synthetic oligonucleotide
  Antisense strand to SEQ ID NO: 2094086
ugacuucaugacuaccacu

SEQ ID NO: 2094088 - RNA, 19 nt, Artificial Sequence
  Description of Artificial Sequence: Synthetic oligonucleotide
  Sense strand starting at position 2620 of SEQ ID NO: 1882086
uuacgaauaucauucuggu

SEQ ID NO: 2094089 - RNA, 19 nt, Artificial Sequence
  Description of Artificial Sequence: Synthetic oligonucleotide
  Antisense strand to SEQ ID NO: 2094088
accagaaugauauucguaa

SEQ ID NO: 2094090 - RNA, 19 nt, Artificial Sequence
  Description of Artificial Sequence: Synthetic oligonucleotide
  Sense strand starting at position 2698 of SEQ ID NO: 1882086
aaacaugugugaccaugua

SEQ ID NO: 2094091 - RNA, 19 nt, Artificial Sequence
  Description of Artificial Sequence: Synthetic oligonucleotide
  Antisense strand to SEQ ID NO: 2094090
uacauggucacacauguuu

SEQ ID NO: 2094092 - RNA, 19 nt, Artificial Sequence
  Description of Artificial Sequence: Synthetic oligonucleotide
  Sense strand starting at position 2708 of SEQ ID NO: 1882086
gaccauguaucuugggaaa

SEQ ID NO: 2094093 - RNA, 19 nt, Artificial Sequence
  Description of Artificial Sequence: Synthetic oligonucleotide
  Antisense strand to SEQ ID NO: 2094092
uuucccaagauacaugguc

SEQ ID NO: 2094094 - RNA, 19 nt, Artificial Sequence
  Description of Artificial Sequence: Synthetic oligonucleotide
  Sense strand starting at position 2710 of SEQ ID NO: 1882086
ccauguaucuugggaaauc

SEQ ID NO: 2094095 - RNA, 19 nt, Artificial Sequence
  Description of Artificial Sequence: Synthetic oligonucleotide
  Antisense strand to SEQ ID NO: 2094094
gauuucccaagauacaugg

SEQ ID NO: 2094096 - RNA, 19 nt, Artificial Sequence
  Description of Artificial Sequence: Synthetic oligonucleotide
  Sense strand starting at position 2711 of SEQ ID NO: 1882086
cauguaucuugggaaaucu

SEQ ID NO: 2094097 - RNA, 19 nt, Artificial Sequence
  Description of Artificial Sequence: Synthetic oligonucleotide
  Antisense strand to SEQ ID NO: 2094096
agauuucccaagauacaug

SEQ ID NO: 2094098 - RNA, 19 nt, Artificial Sequence
  Description of Artificial Sequence: Synthetic oligonucleotide
  Sense strand starting at position 2720 of SEQ ID NO: 1882086
ugggaaaucuuguaaaccu

SEQ ID NO: 2094099 - RNA, 19 nt, Artificial Sequence
  Description of Artificial Sequence: Synthetic oligonucleotide
  Antisense strand to SEQ ID NO: 2094098
agguuuacaagauuuccca

SEQ ID NO: 2094100 - RNA, 19 nt, Artificial Sequence
  Description of Artificial Sequence: Synthetic oligonucleotide
  Sense strand starting at position 3228 of SEQ ID NO: 1882086
guauaaugacagugcuuug

SEQ ID NO: 2094101 - RNA, 19 nt, Artificial Sequence
  Description of Artificial Sequence: Synthetic oligonucleotide
  Antisense strand to SEQ ID NO: 2094100
caaagcacugucauuauac

SEQ ID NO: 2094102 - RNA, 19 nt, Artificial Sequence
  Description of Artificial Sequence: Synthetic oligonucleotide
  Sense strand starting at position 3233 of SEQ ID NO: 1882086
augacagugcuuugagaag

SEQ ID NO: 2094103 - RNA, 19 nt, Artificial Sequence
  Description of Artificial Sequence: Synthetic oligonucleotide
  Antisense strand to SEQ ID NO: 2094102
cuucucaaagcacugucau

SEQ ID NO: 2094104 - RNA, 19 nt, Artificial Sequence
  Description of Artificial Sequence: Synthetic oligonucleotide
  Sense strand starting at position 3240 of SEQ ID NO: 1882086
ugcuuugagaaguaguaaa

SEQ ID NO: 2094105 - RNA, 19 nt, Artificial Sequence
  Description of Artificial Sequence: Synthetic oligonucleotide
  Antisense strand to SEQ ID NO: 2094104
uuuacuacuucucaaagca

SEQ ID NO: 2094106 - RNA, 19 nt, Artificial Sequence
  Description of Artificial Sequence: Synthetic oligonucleotide
  Sense strand starting at position 3247 of SEQ ID NO: 1882086
agaaguaguaaaggcuaua

SEQ ID NO: 2094107 - RNA, 19 nt, Artificial Sequence
  Description of Artificial Sequence: Synthetic oligonucleotide
  Antisense strand to SEQ ID NO: 2094106
uauagccuuuacuacuucu

SEQ ID NO: 2094108 - RNA, 19 nt, Artificial Sequence
  Description of Artificial Sequence: Synthetic oligonucleotide
  Sense strand starting at position 3250 of SEQ ID NO: 1882086
aguaguaaaggcuauaaau

SEQ ID NO: 2094109 - RNA, 19 nt, Artificial Sequence
  Description of Artificial Sequence: Synthetic oligonucleotide
  Antisense strand to SEQ ID NO: 2094108
auuuauagccuuuacuacu

SEQ ID NO: 2094110 - RNA, 19 nt, Artificial Sequence
  Description of Artificial Sequence: Synthetic oligonucleotide
  Sense strand starting at position 3295 of SEQ ID NO: 1882086
ccugauauucugugucaga

SEQ ID NO: 2094111 - RNA, 19 nt, Artificial Sequence
  Description of Artificial Sequence: Synthetic oligonucleotide
  Antisense strand to SEQ ID NO: 2094110
ucugacacagaauaucagg

SEQ ID NO: 2094112 - RNA, 19 nt, Artificial Sequence
  Description of Artificial Sequence: Synthetic oligonucleotide
  Sense strand starting at position 3296 of SEQ ID NO: 1882086
cugauauucugugucagaa

SEQ ID NO: 2094113 - RNA, 19 nt, Artificial Sequence
  Description of Artificial Sequence: Synthetic oligonucleotide
  Antisense strand to SEQ ID NO: 2094112
uucugacacagaauaucag

SEQ ID NO: 2094114 - RNA, 19 nt, Artificial Sequence
  Description of Artificial Sequence: Synthetic oligonucleotide
  Sense strand starting at position 3298 of SEQ ID NO: 1882086
gauauucugugucagaaug

SEQ ID NO: 2094115 - RNA, 19 nt, Artificial Sequence
  Description of Artificial Sequence: Synthetic oligonucleotide
  Antisense strand to SEQ ID NO: 2094114
cauucugacacagaauauc

SEQ ID NO: 2094116 - RNA, 19 nt, Artificial Sequence
  Description of Artificial Sequence: Synthetic oligonucleotide
  Sense strand starting at position 3300 of SEQ ID NO: 1882086
uauucugugucagaaugaa

SEQ ID NO: 2094117 - RNA, 19 nt, Artificial Sequence
  Description of Artificial Sequence: Synthetic oligonucleotide
  Antisense strand to SEQ ID NO: 2094116
uucauucugacacagaaua

SEQ ID NO: 2094118 - RNA, 19 nt, Artificial Sequence
  Description of Artificial Sequence: Synthetic oligonucleotide
  Sense strand starting at position 3970 of SEQ ID NO: 1882086
ucaggucucugagacaaca

SEQ ID NO: 2094119 - RNA, 19 nt, Artificial Sequence
  Description of Artificial Sequence: Synthetic oligonucleotide
  Antisense strand to SEQ ID NO: 2094118
uguugucucagagaccuga

SEQ ID NO: 2094120 - RNA, 19 nt, Artificial Sequence
  Description of Artificial Sequence: Synthetic oligonucleotide
  Sense strand starting at position 34 of SEQ ID NO: 1882087
uuccuaagacgucauugau

SEQ ID NO: 2094121 - RNA, 19 nt, Artificial Sequence
  Description of Artificial Sequence: Synthetic oligonucleotide
  Antisense strand to SEQ ID NO: 2094120
aucaaugacgucuuaggaa

SEQ ID NO: 2094122 - RNA, 19 nt, Artificial Sequence
  Description of Artificial Sequence: Synthetic oligonucleotide
  Sense strand starting at position 99 of SEQ ID NO: 1882087
gugacauaccaaugauugu

SEQ ID NO: 2094123 - RNA, 19 nt, Artificial Sequence
  Description of Artificial Sequence: Synthetic oligonucleotide
  Antisense strand to SEQ ID NO: 2094122
acaaucauugguaugucac

SEQ ID NO: 2094124 - RNA, 19 nt, Artificial Sequence
  Description of Artificial Sequence: Synthetic oligonucleotide
  Sense strand starting at position 214 of SEQ ID NO: 1882087
guugaaggauaugaaauga

SEQ ID NO: 2094125 - RNA, 19 nt, Artificial Sequence
  Description of Artificial Sequence: Synthetic oligonucleotide
  Antisense strand to SEQ ID NO: 2094124
ucauuucauauccuucaac

SEQ ID NO: 2094126 - RNA, 19 nt, Artificial Sequence
  Description of Artificial Sequence: Synthetic oligonucleotide
  Sense strand starting at position 265 of SEQ ID NO: 1882087
guugccaucugaccacuaa

SEQ ID NO: 2094127 - RNA, 19 nt, Artificial Sequence
  Description of Artificial Sequence: Synthetic oligonucleotide
  Antisense strand to SEQ ID NO: 2094126
uuaguggucagauggcaac

SEQ ID NO: 2094128 - RNA, 19 nt, Artificial Sequence
  Description of Artificial Sequence: Synthetic oligonucleotide
  Sense strand starting at position 825 of SEQ ID NO: 1882087
aucugugucauugguggaa

SEQ ID NO: 2094129 - RNA, 19 nt, Artificial Sequence
  Description of Artificial Sequence: Synthetic oligonucleotide
  Antisense strand to SEQ ID NO: 2094128
uuccaccaaugacacagau

SEQ ID NO: 2094130 - RNA, 19 nt, Artificial Sequence
  Description of Artificial Sequence: Synthetic oligonucleotide
  Sense strand starting at position 896 of SEQ ID NO: 1882087
gggucuuaguuguuagaac

SEQ ID NO: 2094131 - RNA, 19 nt, Artificial Sequence
  Description of Artificial Sequence: Synthetic oligonucleotide
  Antisense strand to SEQ ID NO: 2094130
guucuaacaacuaagaccc

SEQ ID NO: 2094132 - RNA, 19 nt, Artificial Sequence
  Description of Artificial Sequence: Synthetic oligonucleotide
  Sense strand starting at position 1315 of SEQ ID NO: 1882087
ggauuccuucuaggaauau

SEQ ID NO: 2094133 - RNA, 19 nt, Artificial Sequence
  Description of Artificial Sequence: Synthetic oligonucleotide
  Antisense strand to SEQ ID NO: 2094132
auauuccuagaaggaaucc

SEQ ID NO: 2094134 - RNA, 19 nt, Artificial Sequence
  Description of Artificial Sequence: Synthetic oligonucleotide
  Sense strand starting at position 1359 of SEQ ID NO: 1882087
uuguuugguacauguuuau

SEQ ID NO: 2094135 - RNA, 19 nt, Artificial Sequence
  Description of Artificial Sequence: Synthetic oligonucleotide
  Antisense strand to SEQ ID NO: 2094134
auaaacauguaccaaacaa

SEQ ID NO: 2094136 - RNA, 19 nt, Artificial Sequence
  Description of Artificial Sequence: Synthetic oligonucleotide
  Sense strand starting at position 1362 of SEQ ID NO: 1882087
uuugguacauguuuaucua

SEQ ID NO: 2094137 - RNA, 19 nt, Artificial Sequence
  Description of Artificial Sequence: Synthetic oligonucleotide
  Antisense strand to SEQ ID NO: 2094136
uagauaaacauguaccaaa

SEQ ID NO: 2094138 - RNA, 19 nt, Artificial Sequence
  Description of Artificial Sequence: Synthetic oligonucleotide
  Sense strand starting at position 1363 of SEQ ID NO: 1882087
uugguacauguuuaucuaa

SEQ ID NO: 2094139 - RNA, 19 nt, Artificial Sequence
  Description of Artificial Sequence: Synthetic oligonucleotide
  Antisense strand to SEQ ID NO: 2094138
uuagauaaacauguaccaa

SEQ ID NO: 2094140 - RNA, 19 nt, Artificial Sequence
  Description of Artificial Sequence: Synthetic oligonucleotide
  Sense strand starting at position 1365 of SEQ ID NO: 1882087
gguacauguuuaucuaauu

SEQ ID NO: 2094141 - RNA, 19 nt, Artificial Sequence
  Description of Artificial Sequence: Synthetic oligonucleotide
  Antisense strand to SEQ ID NO: 2094140
aauuagauaaacauguacc

SEQ ID NO: 2094142 - RNA, 19 nt, Artificial Sequence
  Description of Artificial Sequence: Synthetic oligonucleotide
  Sense strand starting at position 1366 of SEQ ID NO: 1882087
guacauguuuaucuaauuc

SEQ ID NO: 2094143 - RNA, 19 nt, Artificial Sequence
  Description of Artificial Sequence: Synthetic oligonucleotide
  Antisense strand to SEQ ID NO: 2094142
gaauuagauaaacauguac

SEQ ID NO: 2094144 - RNA, 19 nt, Artificial Sequence
  Description of Artificial Sequence: Synthetic oligonucleotide
  Sense strand starting at position 1394 of SEQ ID NO: 1882087
aguauacuauucccuugua

SEQ ID NO: 2094145 - RNA, 19 nt, Artificial Sequence
  Description of Artificial Sequence: Synthetic oligonucleotide
  Antisense strand to SEQ ID NO: 2094144
uacaagggaauaguauacu

SEQ ID NO: 2094146 - RNA, 19 nt, Artificial Sequence
  Description of Artificial Sequence: Synthetic oligonucleotide
  Sense strand starting at position 1395 of SEQ ID NO: 1882087
guauacuauucccuuguau

SEQ ID NO: 2094147 - RNA, 19 nt, Artificial Sequence
  Description of Artificial Sequence: Synthetic oligonucleotide
  Antisense strand to SEQ ID NO: 2094146
auacaagggaauaguauac

SEQ ID NO: 2094148 - RNA, 19 nt, Artificial Sequence
  Description of Artificial Sequence: Synthetic oligonucleotide
  Sense strand starting at position 1505 of SEQ ID NO: 1882087
ccuuuaucugaccagaggu

SEQ ID NO: 2094149 - RNA, 19 nt, Artificial Sequence
  Description of Artificial Sequence: Synthetic oligonucleotide
  Antisense strand to SEQ ID NO: 2094148
accucuggucagauaaagg

SEQ ID NO: 2094150 - RNA, 19 nt, Artificial Sequence
  Description of Artificial Sequence: Synthetic oligonucleotide
  Sense strand starting at position 2193 of SEQ ID NO: 1882087
auguuuaugugcucuuaag

SEQ ID NO: 2094151 - RNA, 19 nt, Artificial Sequence
  Description of Artificial Sequence: Synthetic oligonucleotide
  Antisense strand to SEQ ID NO: 2094150
cuuaagagcacauaaacau

SEQ ID NO: 2094152 - RNA, 19 nt, Artificial Sequence
  Description of Artificial Sequence: Synthetic oligonucleotide
  Sense strand starting at position 3090 of SEQ ID NO: 1882087
aagcaaacaucuguagguu

SEQ ID NO: 2094153 - RNA, 19 nt, Artificial Sequence
  Description of Artificial Sequence: Synthetic oligonucleotide
  Antisense strand to SEQ ID NO: 2094152
aaccuacagauguuugcuu

SEQ ID NO: 2094154 - RNA, 19 nt, Artificial Sequence
  Description of Artificial Sequence: Synthetic oligonucleotide
  Sense strand starting at position 3091 of SEQ ID NO: 1882087
agcaaacaucuguagguuu

SEQ ID NO: 2094155 - RNA, 19 nt, Artificial Sequence
  Description of Artificial Sequence: Synthetic oligonucleotide
  Antisense strand to SEQ ID NO: 2094154
aaaccuacagauguuugcu

SEQ ID NO: 2094156 - RNA, 19 nt, Artificial Sequence
  Description of Artificial Sequence: Synthetic oligonucleotide
  Sense strand starting at position 3195 of SEQ ID NO: 1882087
augaaaucuugacuuugca

SEQ ID NO: 2094157 - RNA, 19 nt, Artificial Sequence
  Description of Artificial Sequence: Synthetic oligonucleotide
  Antisense strand to SEQ ID NO: 2094156
ugcaaagucaagauuucau

SEQ ID NO: 2094158 - RNA, 19 nt, Artificial Sequence
  Description of Artificial Sequence: Synthetic oligonucleotide
  Sense strand starting at position 3203 of SEQ ID NO: 1882087
uugacuuugcagcaucauu

SEQ ID NO: 2094159 - RNA, 19 nt, Artificial Sequence
  Description of Artificial Sequence: Synthetic oligonucleotide
  Antisense strand to SEQ ID NO: 2094158
aaugaugcugcaaagucaa

SEQ ID NO: 2094160 - RNA, 19 nt, Artificial Sequence
  Description of Artificial Sequence: Synthetic oligonucleotide
  Sense strand starting at position 3237 of SEQ ID NO: 1882087
ugauauuaguuuccgguuu

SEQ ID NO: 2094161 - RNA, 19 nt, Artificial Sequence
  Description of Artificial Sequence: Synthetic oligonucleotide
  Antisense strand to SEQ ID NO: 2094160
aaaccggaaacuaauauca

SEQ ID NO: 2094162 - RNA, 19 nt, Artificial Sequence
  Description of Artificial Sequence: Synthetic oligonucleotide
  Sense strand starting at position 3290 of SEQ ID NO: 1882087
uaguaugagucauuagcca

SEQ ID NO: 2094163 - RNA, 19 nt, Artificial Sequence
  Description of Artificial Sequence: Synthetic oligonucleotide
  Antisense strand to SEQ ID NO: 2094162
uggcuaaugacucauacua

SEQ ID NO: 2094164 - RNA, 19 nt, Artificial Sequence
  Description of Artificial Sequence: Synthetic oligonucleotide
  Sense strand starting at position 3312 of SEQ ID NO: 1882087
ucccauaauguuuauggua

SEQ ID NO: 2094165 - RNA, 19 nt, Artificial Sequence
  Description of Artificial Sequence: Synthetic oligonucleotide
  Antisense strand to SEQ ID NO: 2094164
uaccauaaacauuauggga

SEQ ID NO: 2094166 - RNA, 19 nt, Artificial Sequence
  Description of Artificial Sequence: Synthetic oligonucleotide
  Sense strand starting at position 3380 of SEQ ID NO: 1882087
auaacuagaugauacgaaa

SEQ ID NO: 2094167 - RNA, 19 nt, Artificial Sequence
  Description of Artificial Sequence: Synthetic oligonucleotide
  Antisense strand to SEQ ID NO: 2094166
uuucguaucaucuaguuau

SEQ ID NO: 2094168 - RNA, 19 nt, Artificial Sequence
  Description of Artificial Sequence: Synthetic oligonucleotide
  Sense strand starting at position 3406 of SEQ ID NO: 1882087
cauguaagccaucagauga

SEQ ID NO: 2094169 - RNA, 19 nt, Artificial Sequence
  Description of Artificial Sequence: Synthetic oligonucleotide
  Antisense strand to SEQ ID NO: 2094168
ucaucugauggcuuacaug

SEQ ID NO: 2094170 - RNA, 19 nt, Artificial Sequence
  Description of Artificial Sequence: Synthetic oligonucleotide
  Sense strand starting at position 3436 of SEQ ID NO: 1882087
cagguauucugguuaccac

SEQ ID NO: 2094171 - RNA, 19 nt, Artificial Sequence
  Description of Artificial Sequence: Synthetic oligonucleotide
  Antisense strand to SEQ ID NO: 2094170
gugguaaccagaauaccug

SEQ ID NO: 2094172 - RNA, 19 nt, Artificial Sequence
  Description of Artificial Sequence: Synthetic oligonucleotide
  Sense strand starting at position 3437 of SEQ ID NO: 1882087
agguauucugguuaccacu

SEQ ID NO: 2094173 - RNA, 19 nt, Artificial Sequence
  Description of Artificial Sequence: Synthetic oligonucleotide
  Antisense strand to SEQ ID NO: 2094172
agugguaaccagaauaccu

SEQ ID NO: 2094174 - RNA, 19 nt, Artificial Sequence
  Description of Artificial Sequence: Synthetic oligonucleotide
  Sense strand starting at position 3580 of SEQ ID NO: 1882087
cuaccagauucuguguaua

SEQ ID NO: 2094175 - RNA, 19 nt, Artificial Sequence
  Description of Artificial Sequence: Synthetic oligonucleotide
  Antisense strand to SEQ ID NO: 2094174
uauacacagaaucugguag

SEQ ID NO: 2094176 - RNA, 19 nt, Artificial Sequence
  Description of Artificial Sequence: Synthetic oligonucleotide
  Sense strand starting at position 3582 of SEQ ID NO: 1882087
accagauucuguguauaua

SEQ ID NO: 2094177 - RNA, 19 nt, Artificial Sequence
  Description of Artificial Sequence: Synthetic oligonucleotide
  Antisense strand to SEQ ID NO: 2094176
uauauacacagaaucuggu

SEQ ID NO: 2094178 - RNA, 19 nt, Artificial Sequence
  Description of Artificial Sequence: Synthetic oligonucleotide
  Sense strand starting at position 3583 of SEQ ID NO: 1882087
ccagauucuguguauauau

SEQ ID NO: 2094179 - RNA, 19 nt, Artificial Sequence
  Description of Artificial Sequence: Synthetic oligonucleotide
  Antisense strand to SEQ ID NO: 2094178
auauauacacagaaucugg

SEQ ID NO: 2094180 - RNA, 19 nt, Artificial Sequence
  Description of Artificial Sequence: Synthetic oligonucleotide
  Sense strand starting at position 3592 of SEQ ID NO: 1882087
guguauauauugccacauu

SEQ ID NO: 2094181 - RNA, 19 nt, Artificial Sequence
  Description of Artificial Sequence: Synthetic oligonucleotide
  Antisense strand to SEQ ID NO: 2094180
aauguggcaauauauacac

SEQ ID NO: 2094182 - RNA, 19 nt, Artificial Sequence
  Description of Artificial Sequence: Synthetic oligonucleotide
  Sense strand starting at position 3623 of SEQ ID NO: 1882087
aacagaagguuuguaauca

SEQ ID NO: 2094183 - RNA, 19 nt, Artificial Sequence
  Description of Artificial Sequence: Synthetic oligonucleotide
  Antisense strand to SEQ ID NO: 2094182
ugauuacaaaccuucuguu

SEQ ID NO: 2094184 - RNA, 19 nt, Artificial Sequence
  Description of Artificial Sequence: Synthetic oligonucleotide
  Sense strand starting at position 3627 of SEQ ID NO: 1882087
gaagguuuguaaucagguu

SEQ ID NO: 2094185 - RNA, 19 nt, Artificial Sequence
  Description of Artificial Sequence: Synthetic oligonucleotide
  Antisense strand to SEQ ID NO: 2094184
aaccugauuacaaaccuuc

SEQ ID NO: 2094186 - RNA, 19 nt, Artificial Sequence
  Description of Artificial Sequence: Synthetic oligonucleotide
  Sense strand starting at position 3704 of SEQ ID NO: 1882087
agcuuagauuuggaaguuu

SEQ ID NO: 2094187 - RNA, 19 nt, Artificial Sequence
  Description of Artificial Sequence: Synthetic oligonucleotide
  Antisense strand to SEQ ID NO: 2094186
aaacuuccaaaucuaagcu

SEQ ID NO: 2094188 - RNA, 19 nt, Artificial Sequence
  Description of Artificial Sequence: Synthetic oligonucleotide
  Sense strand starting at position 3712 of SEQ ID NO: 1882087
uuuggaaguuuaucucuca

SEQ ID NO: 2094189 - RNA, 19 nt, Artificial Sequence
  Description of Artificial Sequence: Synthetic oligonucleotide
  Antisense strand to SEQ ID NO: 2094188
ugagagauaaacuuccaaa

SEQ ID NO: 2094190 - RNA, 19 nt, Artificial Sequence
  Description of Artificial Sequence: Synthetic oligonucleotide
  Sense strand starting at position 3713 of SEQ ID NO: 1882087
uuggaaguuuaucucucau

SEQ ID NO: 2094191 - RNA, 19 nt, Artificial Sequence
  Description of Artificial Sequence: Synthetic oligonucleotide
  Antisense strand to SEQ ID NO: 2094190
augagagauaaacuuccaa

SEQ ID NO: 2094192 - RNA, 19 nt, Artificial Sequence
  Description of Artificial Sequence: Synthetic oligonucleotide
  Sense strand starting at position 3715 of SEQ ID NO: 1882087
ggaaguuuaucucucauaa

SEQ ID NO: 2094193 - RNA, 19 nt, Artificial Sequence
  Description of Artificial Sequence: Synthetic oligonucleotide
  Antisense strand to SEQ ID NO: 2094192
uuaugagagauaaacuucc

SEQ ID NO: 2094194 - RNA, 19 nt, Artificial Sequence
  Description of Artificial Sequence: Synthetic oligonucleotide
  Sense strand starting at position 3770 of SEQ ID NO: 1882087
guaggcuaucccuaugacu

SEQ ID NO: 2094195 - RNA, 19 nt, Artificial Sequence
  Description of Artificial Sequence: Synthetic oligonucleotide
  Antisense strand to SEQ ID NO: 2094194
agucauagggauagccuac

SEQ ID NO: 2094196 - RNA, 19 nt, Artificial Sequence
  Description of Artificial Sequence: Synthetic oligonucleotide
  Sense strand starting at position 3772 of SEQ ID NO: 1882087
aggcuaucccuaugacuua

SEQ ID NO: 2094197 - RNA, 19 nt, Artificial Sequence
  Description of Artificial Sequence: Synthetic oligonucleotide
  Antisense strand to SEQ ID NO: 2094196
uaagucauagggauagccu

SEQ ID NO: 2094198 - RNA, 19 nt, Artificial Sequence
  Description of Artificial Sequence: Synthetic oligonucleotide
  Sense strand starting at position 3782 of SEQ ID NO: 1882087
uaugacuuagggugcuaaa

SEQ ID NO: 2094199 - RNA, 19 nt, Artificial Sequence
  Description of Artificial Sequence: Synthetic oligonucleotide
  Antisense strand to SEQ ID NO: 2094198
uuuagcacccuaagucaua

SEQ ID NO: 2094200 - RNA, 19 nt, Artificial Sequence
  Description of Artificial Sequence: Synthetic oligonucleotide
  Sense strand starting at position 27 of SEQ ID NO: 1882088
uugguaugccuagaauuaa

SEQ ID NO: 2094201 - RNA, 19 nt, Artificial Sequence
  Description of Artificial Sequence: Synthetic oligonucleotide
  Antisense strand to SEQ ID NO: 2094200
uuaauucuaggcauaccaa

SEQ ID NO: 2094202 - RNA, 19 nt, Artificial Sequence
  Description of Artificial Sequence: Synthetic oligonucleotide
  Sense strand starting at position 655 of SEQ ID NO: 1882088
auuauuagugcaugucuaa

SEQ ID NO: 2094203 - RNA, 19 nt, Artificial Sequence
  Description of Artificial Sequence: Synthetic oligonucleotide
  Antisense strand to SEQ ID NO: 2094202
uuagacaugcacuaauaau

SEQ ID NO: 2094204 - RNA, 19 nt, Artificial Sequence
  Description of Artificial Sequence: Synthetic oligonucleotide
  Sense strand starting at position 822 of SEQ ID NO: 1882088
gcauaccuacaauguguua

SEQ ID NO: 2094205 - RNA, 19 nt, Artificial Sequence
  Description of Artificial Sequence: Synthetic oligonucleotide
  Antisense strand to SEQ ID NO: 2094204
uaacacauuguagguaugc

SEQ ID NO: 2094206 - RNA, 19 nt, Artificial Sequence
  Description of Artificial Sequence: Synthetic oligonucleotide
  Sense strand starting at position 834 of SEQ ID NO: 1882088
uguguuaggcaacaugaua

SEQ ID NO: 2094207 - RNA, 19 nt, Artificial Sequence
  Description of Artificial Sequence: Synthetic oligonucleotide
  Antisense strand to SEQ ID NO: 2094206
uaucauguugccuaacaca

SEQ ID NO: 2094208 - RNA, 19 nt, Artificial Sequence
  Description of Artificial Sequence: Synthetic oligonucleotide
  Sense strand starting at position 969 of SEQ ID NO: 1882088
gcagcuagaguuuaacaau

SEQ ID NO: 2094209 - RNA, 19 nt, Artificial Sequence
  Description of Artificial Sequence: Synthetic oligonucleotide
  Antisense strand to SEQ ID NO: 2094208
auuguuaaacucuagcugc

SEQ ID NO: 2094210 - RNA, 19 nt, Artificial Sequence
  Description of Artificial Sequence: Synthetic oligonucleotide
  Sense strand starting at position 975 of SEQ ID NO: 1882088
agaguuuaacaauagugca

SEQ ID NO: 2094211 - RNA, 19 nt, Artificial Sequence
  Description of Artificial Sequence: Synthetic oligonucleotide
  Antisense strand to SEQ ID NO: 2094210
ugcacuauuguuaaacucu

SEQ ID NO: 2094212 - RNA, 19 nt, Artificial Sequence
  Description of Artificial Sequence: Synthetic oligonucleotide
  Sense strand starting at position 1164 of SEQ ID NO: 1882088
acacguuauuuggagaaac

SEQ ID NO: 2094213 - RNA, 19 nt, Artificial Sequence
  Description of Artificial Sequence: Synthetic oligonucleotide
  Antisense strand to SEQ ID NO: 2094212
guuucuccaaauaacgugu

SEQ ID NO: 2094214 - RNA, 19 nt, Artificial Sequence
  Description of Artificial Sequence: Synthetic oligonucleotide
  Sense strand starting at position 1273 of SEQ ID NO: 1882088
auacuuauguugcccggaa

SEQ ID NO: 2094215 - RNA, 19 nt, Artificial Sequence
  Description of Artificial Sequence: Synthetic oligonucleotide
  Antisense strand to SEQ ID NO: 2094214
uuccgggcaacauaaguau

SEQ ID NO: 2094216 - RNA, 19 nt, Artificial Sequence
  Description of Artificial Sequence: Synthetic oligonucleotide
  Sense strand starting at position 1274 of SEQ ID NO: 1882088
uacuuauguugcccggaau

SEQ ID NO: 2094217 - RNA, 19 nt, Artificial Sequence
  Description of Artificial Sequence: Synthetic oligonucleotide
  Antisense strand to SEQ ID NO: 2094216
auuccgggcaacauaagua

SEQ ID NO: 2094218 - RNA, 19 nt, Artificial Sequence
  Description of Artificial Sequence: Synthetic oligonucleotide
  Sense strand starting at position 1275 of SEQ ID NO: 1882088
acuuauguugcccggaaua

SEQ ID NO: 2094219 - RNA, 19 nt, Artificial Sequence
  Description of Artificial Sequence: Synthetic oligonucleotide
  Antisense strand to SEQ ID NO: 2094218
uauuccgggcaacauaagu

SEQ ID NO: 2094220 - RNA, 19 nt, Artificial Sequence
  Description of Artificial Sequence: Synthetic oligonucleotide
  Sense strand starting at position 1277 of SEQ ID NO: 1882088
uuauguugcccggaauaca

SEQ ID NO: 2094221 - RNA, 19 nt, Artificial Sequence
  Description of Artificial Sequence: Synthetic oligonucleotide
  Antisense strand to SEQ ID NO: 2094220
uguauuccgggcaacauaa

SEQ ID NO: 2094222 - RNA, 19 nt, Artificial Sequence
  Description of Artificial Sequence: Synthetic oligonucleotide
  Sense strand starting at position 1300 of SEQ ID NO: 1882088
aucauauaacccugcgaau

SEQ ID NO: 2094223 - RNA, 19 nt, Artificial Sequence
  Description of Artificial Sequence: Synthetic oligonucleotide
  Antisense strand to SEQ ID NO: 2094222
auucgcaggguuauaugau

SEQ ID NO: 2094224 - RNA, 19 nt, Artificial Sequence
  Description of Artificial Sequence: Synthetic oligonucleotide
  Sense strand starting at position 1502 of SEQ ID NO: 1882088
ggagcauucgcggauuagg

SEQ ID NO: 2094225 - RNA, 19 nt, Artificial Sequence
  Description of Artificial Sequence: Synthetic oligonucleotide
  Antisense strand to SEQ ID NO: 2094224
ccuaauccgcgaaugcucc

SEQ ID NO: 2094226 - RNA, 19 nt, Artificial Sequence
  Description of Artificial Sequence: Synthetic oligonucleotide
  Sense strand starting at position 1552 of SEQ ID NO: 1882088
ccacguagcguuucucaau

SEQ ID NO: 2094227 - RNA, 19 nt, Artificial Sequence
  Description of Artificial Sequence: Synthetic oligonucleotide
  Antisense strand to SEQ ID NO: 2094226
auugagaaacgcuacgugg

SEQ ID NO: 2094228 - RNA, 19 nt, Artificial Sequence
  Description of Artificial Sequence: Synthetic oligonucleotide
  Sense strand starting at position 1726 of SEQ ID NO: 1882088
gacauaaguggaugcgaau

SEQ ID NO: 2094229 - RNA, 19 nt, Artificial Sequence
  Description of Artificial Sequence: Synthetic oligonucleotide
  Antisense strand to SEQ ID NO: 2094228
auucgcauccacuuauguc

SEQ ID NO: 2094230 - RNA, 19 nt, Artificial Sequence
  Description of Artificial Sequence: Synthetic oligonucleotide
  Sense strand starting at position 1907 of SEQ ID NO: 1882088
gguaaagcuuggccaauga

SEQ ID NO: 2094231 - RNA, 19 nt, Artificial Sequence
  Description of Artificial Sequence: Synthetic oligonucleotide
  Antisense strand to SEQ ID NO: 2094230
ucauuggccaagcuuuacc

SEQ ID NO: 2094232 - RNA, 19 nt, Artificial Sequence
  Description of Artificial Sequence: Synthetic oligonucleotide
  Sense strand starting at position 2182 of SEQ ID NO: 1882088
gggcacuuggcgcauuauu

SEQ ID NO: 2094233 - RNA, 19 nt, Artificial Sequence
  Description of Artificial Sequence: Synthetic oligonucleotide
  Antisense strand to SEQ ID NO: 2094232
aauaaugcgccaagugccc

SEQ ID NO: 2094234 - RNA, 19 nt, Artificial Sequence
  Description of Artificial Sequence: Synthetic oligonucleotide
  Sense strand starting at position 2193 of SEQ ID NO: 1882088
gcauuauuguagcuucuga

SEQ ID NO: 2094235 - RNA, 19 nt, Artificial Sequence
  Description of Artificial Sequence: Synthetic oligonucleotide
  Antisense strand to SEQ ID NO: 2094234
ucagaagcuacaauaaugc

SEQ ID NO: 2094236 - RNA, 19 nt, Artificial Sequence
  Description of Artificial Sequence: Synthetic oligonucleotide
  Sense strand starting at position 2275 of SEQ ID NO: 1882088
gacgcuugagcccggagaa

SEQ ID NO: 2094237 - RNA, 19 nt, Artificial Sequence
  Description of Artificial Sequence: Synthetic oligonucleotide
  Antisense strand to SEQ ID NO: 2094236
uucuccgggcucaagcguc

SEQ ID NO: 2094238 - RNA, 19 nt, Artificial Sequence
  Description of Artificial Sequence: Synthetic oligonucleotide
  Sense strand starting at position 2421 of SEQ ID NO: 1882088
cuggguugcgcguauuuau

SEQ ID NO: 2094239 - RNA, 19 nt, Artificial Sequence
  Description of Artificial Sequence: Synthetic oligonucleotide
  Antisense strand to SEQ ID NO: 2094238
auaaauacgcgcaacccag

SEQ ID NO: 2094240 - RNA, 19 nt, Artificial Sequence
  Description of Artificial Sequence: Synthetic oligonucleotide
  Sense strand starting at position 2460 of SEQ ID NO: 1882088
cgugaucuuccggaagucu

SEQ ID NO: 2094241 - RNA, 19 nt, Artificial Sequence
  Description of Artificial Sequence: Synthetic oligonucleotide
  Antisense strand to SEQ ID NO: 2094240
agacuuccggaagaucacg

SEQ ID NO: 2094242 - RNA, 19 nt, Artificial Sequence
  Description of Artificial Sequence: Synthetic oligonucleotide
  Sense strand starting at position 2469 of SEQ ID NO: 1882088
ccggaagucuucucugauc

SEQ ID NO: 2094243 - RNA, 19 nt, Artificial Sequence
  Description of Artificial Sequence: Synthetic oligonucleotide
  Antisense strand to SEQ ID NO: 2094242
gaucagagaagacuuccgg

SEQ ID NO: 2094244 - RNA, 19 nt, Artificial Sequence
  Description of Artificial Sequence: Synthetic oligonucleotide
  Sense strand starting at position 2471 of SEQ ID NO: 1882088
ggaagucuucucugauccu

SEQ ID NO: 2094245 - RNA, 19 nt, Artificial Sequence
  Description of Artificial Sequence: Synthetic oligonucleotide
  Antisense strand to SEQ ID NO: 2094244
aggaucagagaagacuucc

SEQ ID NO: 2094246 - RNA, 19 nt, Artificial Sequence
  Description of Artificial Sequence: Synthetic oligonucleotide
  Sense strand starting at position 2498 of SEQ ID NO: 1882088
ggauuaggguccucugcuu

SEQ ID NO: 2094247 - RNA, 19 nt, Artificial Sequence
  Description of Artificial Sequence: Synthetic oligonucleotide
  Antisense strand to SEQ ID NO: 2094246
aagcagaggacccuaaucc

SEQ ID NO: 2094248 - RNA, 19 nt, Artificial Sequence
  Description of Artificial Sequence: Synthetic oligonucleotide
  Sense strand starting at position 2556 of SEQ ID NO: 1882088
uuauuacauuguguugaca

SEQ ID NO: 2094249 - RNA, 19 nt, Artificial Sequence
  Description of Artificial Sequence: Synthetic oligonucleotide
  Antisense strand to SEQ ID NO: 2094248
ugucaacacaauguaauaa

SEQ ID NO: 2094250 - RNA, 19 nt, Artificial Sequence
  Description of Artificial Sequence: Synthetic oligonucleotide
  Sense strand starting at position 2643 of SEQ ID NO: 1882088
cacguaagagacugauuaa

SEQ ID NO: 2094251 - RNA, 19 nt, Artificial Sequence
  Description of Artificial Sequence: Synthetic oligonucleotide
  Antisense strand to SEQ ID NO: 2094250
uuaaucagucucuuacgug

SEQ ID NO: 2094252 - RNA, 19 nt, Artificial Sequence
  Description of Artificial Sequence: Synthetic oligonucleotide
  Sense strand starting at position 2742 of SEQ ID NO: 1882088
uccuuccaccagugaguau

SEQ ID NO: 2094253 - RNA, 19 nt, Artificial Sequence
  Description of Artificial Sequence: Synthetic oligonucleotide
  Antisense strand to SEQ ID NO: 2094252
auacucacugguggaagga

SEQ ID NO: 2094254 - RNA, 19 nt, Artificial Sequence
  Description of Artificial Sequence: Synthetic oligonucleotide
  Sense strand starting at position 2764 of SEQ ID NO: 1882088
gugcuaggaccauggaaau

SEQ ID NO: 2094255 - RNA, 19 nt, Artificial Sequence
  Description of Artificial Sequence: Synthetic oligonucleotide
  Antisense strand to SEQ ID NO: 2094254
auuuccaugguccuagcac

SEQ ID NO: 2094256 - RNA, 19 nt, Artificial Sequence
  Description of Artificial Sequence: Synthetic oligonucleotide
  Sense strand starting at position 2775 of SEQ ID NO: 1882088
auggaaaugaguugggcaa

SEQ ID NO: 2094257 - RNA, 19 nt, Artificial Sequence
  Description of Artificial Sequence: Synthetic oligonucleotide
  Antisense strand to SEQ ID NO: 2094256
uugcccaacucauuuccau

SEQ ID NO: 2094258 - RNA, 19 nt, Artificial Sequence
  Description of Artificial Sequence: Synthetic oligonucleotide
  Sense strand starting at position 2776 of SEQ ID NO: 1882088
uggaaaugaguugggcaau

SEQ ID NO: 2094259 - RNA, 19 nt, Artificial Sequence
  Description of Artificial Sequence: Synthetic oligonucleotide
  Antisense strand to SEQ ID NO: 2094258
auugcccaacucauuucca

SEQ ID NO: 2094260 - RNA, 19 nt, Artificial Sequence
  Description of Artificial Sequence: Synthetic oligonucleotide
  Sense strand starting at position 2782 of SEQ ID NO: 1882088
ugaguugggcaaugaauag

SEQ ID NO: 2094261 - RNA, 19 nt, Artificial Sequence
  Description of Artificial Sequence: Synthetic oligonucleotide
  Antisense strand to SEQ ID NO: 2094260
cuauucauugcccaacuca

SEQ ID NO: 2094262 - RNA, 19 nt, Artificial Sequence
  Description of Artificial Sequence: Synthetic oligonucleotide
  Sense strand starting at position 2828 of SEQ ID NO: 1882088
cugaaugucuugucaucaa

SEQ ID NO: 2094263 - RNA, 19 nt, Artificial Sequence
  Description of Artificial Sequence: Synthetic oligonucleotide
  Antisense strand to SEQ ID NO: 2094262
uugaugacaagacauucag

SEQ ID NO: 2094264 - RNA, 19 nt, Artificial Sequence
  Description of Artificial Sequence: Synthetic oligonucleotide
  Sense strand starting at position 2831 of SEQ ID NO: 1882088
aaugucuugucaucaagga

SEQ ID NO: 2094265 - RNA, 19 nt, Artificial Sequence
  Description of Artificial Sequence: Synthetic oligonucleotide
  Antisense strand to SEQ ID NO: 2094264
uccuugaugacaagacauu

SEQ ID NO: 2094266 - RNA, 19 nt, Artificial Sequence
  Description of Artificial Sequence: Synthetic oligonucleotide
  Sense strand starting at position 2832 of SEQ ID NO: 1882088
augucuugucaucaaggau

SEQ ID NO: 2094267 - RNA, 19 nt, Artificial Sequence
  Description of Artificial Sequence: Synthetic oligonucleotide
  Antisense strand to SEQ ID NO: 2094266
auccuugaugacaagacau

SEQ ID NO: 2094268 - RNA, 19 nt, Artificial Sequence
  Description of Artificial Sequence: Synthetic oligonucleotide
  Sense strand starting at position 2836 of SEQ ID NO: 1882088
cuugucaucaaggauggua

SEQ ID NO: 2094269 - RNA, 19 nt, Artificial Sequence
  Description of Artificial Sequence: Synthetic oligonucleotide
  Antisense strand to SEQ ID NO: 2094268
uaccauccuugaugacaag

SEQ ID NO: 2094270 - RNA, 19 nt, Artificial Sequence
  Description of Artificial Sequence: Synthetic oligonucleotide
  Sense strand starting at position 2838 of SEQ ID NO: 1882088
ugucaucaaggaugguaaa

SEQ ID NO: 2094271 - RNA, 19 nt, Artificial Sequence
  Description of Artificial Sequence: Synthetic oligonucleotide
  Antisense strand to SEQ ID NO: 2094270
uuuaccauccuugaugaca

SEQ ID NO: 2094272 - RNA, 19 nt, Artificial Sequence
  Description of Artificial Sequence: Synthetic oligonucleotide
  Sense strand starting at position 2877 of SEQ ID NO: 1882088
uuaucucugugagccuuaa

SEQ ID NO: 2094273 - RNA, 19 nt, Artificial Sequence
  Description of Artificial Sequence: Synthetic oligonucleotide
  Antisense strand to SEQ ID NO: 2094272
uuaaggcucacagagauaa

SEQ ID NO: 2094274 - RNA, 19 nt, Artificial Sequence
  Description of Artificial Sequence: Synthetic oligonucleotide
  Sense strand starting at position 2909 of SEQ ID NO: 1882088
agugcauaaggguauuaga

SEQ ID NO: 2094275 - RNA, 19 nt, Artificial Sequence
  Description of Artificial Sequence: Synthetic oligonucleotide
  Antisense strand to SEQ ID NO: 2094274
ucuaauacccuuaugcacu

SEQ ID NO: 2094276 - RNA, 19 nt, Artificial Sequence
  Description of Artificial Sequence: Synthetic oligonucleotide
  Sense strand starting at position 2972 of SEQ ID NO: 1882088
auacguguuguguaauuac

SEQ ID NO: 2094277 - RNA, 19 nt, Artificial Sequence
  Description of Artificial Sequence: Synthetic oligonucleotide
  Antisense strand to SEQ ID NO: 2094276
guaauuacacaacacguau

SEQ ID NO: 2094278 - RNA, 19 nt, Artificial Sequence
  Description of Artificial Sequence: Synthetic oligonucleotide
  Sense strand starting at position 3809 of SEQ ID NO: 1882088
ggcauuauuucugcucaca

SEQ ID NO: 2094279 - RNA, 19 nt, Artificial Sequence
  Description of Artificial Sequence: Synthetic oligonucleotide
  Antisense strand to SEQ ID NO: 2094278
ugugagcagaaauaaugcc

SEQ ID NO: 2094280 - RNA, 19 nt, Artificial Sequence
  Description of Artificial Sequence: Synthetic oligonucleotide
  Sense strand starting at position 131 of SEQ ID NO: 1882089
acaugcuaucaauguuaga

SEQ ID NO: 2094281 - RNA, 19 nt, Artificial Sequence
  Description of Artificial Sequence: Synthetic oligonucleotide
  Antisense strand to SEQ ID NO: 2094280
ucuaacauugauagcaugu

SEQ ID NO: 2094282 - RNA, 19 nt, Artificial Sequence
  Description of Artificial Sequence: Synthetic oligonucleotide
  Sense strand starting at position 136 of SEQ ID NO: 1882089
cuaucaauguuagaauuug

SEQ ID NO: 2094283 - RNA, 19 nt, Artificial Sequence
  Description of Artificial Sequence: Synthetic oligonucleotide
  Antisense strand to SEQ ID NO: 2094282
caaauucuaacauugauag

SEQ ID NO: 2094284 - RNA, 19 nt, Artificial Sequence
  Description of Artificial Sequence: Synthetic oligonucleotide
  Sense strand starting at position 158 of SEQ ID NO: 1882089
cucagaaaucguggaugug

SEQ ID NO: 2094285 - RNA, 19 nt, Artificial Sequence
  Description of Artificial Sequence: Synthetic oligonucleotide
  Antisense strand to SEQ ID NO: 2094284
cacauccacgauuucugag

SEQ ID NO: 2094286 - RNA, 19 nt, Artificial Sequence
  Description of Artificial Sequence: Synthetic oligonucleotide
  Sense strand starting at position 159 of SEQ ID NO: 1882089
ucagaaaucguggaugugu

SEQ ID NO: 2094287 - RNA, 19 nt, Artificial Sequence
  Description of Artificial Sequence: Synthetic oligonucleotide
  Antisense strand to SEQ ID NO: 2094286
acacauccacgauuucuga

SEQ ID NO: 2094288 - RNA, 19 nt, Artificial Sequence
  Description of Artificial Sequence: Synthetic oligonucleotide
  Sense strand starting at position 161 of SEQ ID NO: 1882089
agaaaucguggauguguaa

SEQ ID NO: 2094289 - RNA, 19 nt, Artificial Sequence
  Description of Artificial Sequence: Synthetic oligonucleotide
  Antisense strand to SEQ ID NO: 2094288
uuacacauccacgauuucu

SEQ ID NO: 2094290 - RNA, 19 nt, Artificial Sequence
  Description of Artificial Sequence: Synthetic oligonucleotide
  Sense strand starting at position 164 of SEQ ID NO: 1882089
aaucguggauguguaauga

SEQ ID NO: 2094291 - RNA, 19 nt, Artificial Sequence
  Description of Artificial Sequence: Synthetic oligonucleotide
  Antisense strand to SEQ ID NO: 2094290
ucauuacacauccacgauu

SEQ ID NO: 2094292 - RNA, 19 nt, Artificial Sequence
  Description of Artificial Sequence: Synthetic oligonucleotide
  Sense strand starting at position 173 of SEQ ID NO: 1882089
uguguaaugaauuacgguu

SEQ ID NO: 2094293 - RNA, 19 nt, Artificial Sequence
  Description of Artificial Sequence: Synthetic oligonucleotide
  Antisense strand to SEQ ID NO: 2094292
aaccguaauucauuacaca

SEQ ID NO: 2094294 - RNA, 19 nt, Artificial Sequence
  Description of Artificial Sequence: Synthetic oligonucleotide
  Sense strand starting at position 181 of SEQ ID NO: 1882089
gaauuacgguucuuuaaag

SEQ ID NO: 2094295 - RNA, 19 nt, Artificial Sequence
  Description of Artificial Sequence: Synthetic oligonucleotide
  Antisense strand to SEQ ID NO: 2094294
cuuuaaagaaccguaauuc

SEQ ID NO: 2094296 - RNA, 19 nt, Artificial Sequence
  Description of Artificial Sequence: Synthetic oligonucleotide
  Sense strand starting at position 182 of SEQ ID NO: 1882089
aauuacgguucuuuaaaga

SEQ ID NO: 2094297 - RNA, 19 nt, Artificial Sequence
  Description of Artificial Sequence: Synthetic oligonucleotide
  Antisense strand to SEQ ID NO: 2094296
ucuuuaaagaaccguaauu

SEQ ID NO: 2094298 - RNA, 19 nt, Artificial Sequence
  Description of Artificial Sequence: Synthetic oligonucleotide
  Sense strand starting at position 304 of SEQ ID NO: 1882089
ucuauaaccuaucuguagu

SEQ ID NO: 2094299 - RNA, 19 nt, Artificial Sequence
  Description of Artificial Sequence: Synthetic oligonucleotide
  Antisense strand to SEQ ID NO: 2094298
acuacagauagguuauaga

SEQ ID NO: 2094300 - RNA, 19 nt, Artificial Sequence
  Description of Artificial Sequence: Synthetic oligonucleotide
  Sense strand starting at position 307 of SEQ ID NO: 1882089
auaaccuaucuguaguuau

SEQ ID NO: 2094301 - RNA, 19 nt, Artificial Sequence
  Description of Artificial Sequence: Synthetic oligonucleotide
  Antisense strand to SEQ ID NO: 2094300
auaacuacagauagguuau

SEQ ID NO: 2094302 - RNA, 19 nt, Artificial Sequence
  Description of Artificial Sequence: Synthetic oligonucleotide
  Sense strand starting at position 433 of SEQ ID NO: 1882089
gaaggaggcuucucugaag

SEQ ID NO: 2094303 - RNA, 19 nt, Artificial Sequence
  Description of Artificial Sequence: Synthetic oligonucleotide
  Antisense strand to SEQ ID NO: 2094302
cuucagagaagccuccuuc

SEQ ID NO: 2094304 - RNA, 19 nt, Artificial Sequence
  Description of Artificial Sequence: Synthetic oligonucleotide
  Sense strand starting at position 471 of SEQ ID NO: 1882089
uuaacagugguccagcuaa

SEQ ID NO: 2094305 - RNA, 19 nt, Artificial Sequence
  Description of Artificial Sequence: Synthetic oligonucleotide
  Antisense strand to SEQ ID NO: 2094304
uuagcuggaccacuguuaa

SEQ ID NO: 2094306 - RNA, 19 nt, Artificial Sequence
  Description of Artificial Sequence: Synthetic oligonucleotide
  Sense strand starting at position 502 of SEQ ID NO: 1882089
gaggguuuacuaggcaaau

SEQ ID NO: 2094307 - RNA, 19 nt, Artificial Sequence
  Description of Artificial Sequence: Synthetic oligonucleotide
  Antisense strand to SEQ ID NO: 2094306
auuugccuaguaaacccuc

SEQ ID NO: 2094308 - RNA, 19 nt, Artificial Sequence
  Description of Artificial Sequence: Synthetic oligonucleotide
  Sense strand starting at position 503 of SEQ ID NO: 1882089
aggguuuacuaggcaaauu

SEQ ID NO: 2094309 - RNA, 19 nt, Artificial Sequence
  Description of Artificial Sequence: Synthetic oligonucleotide
  Antisense strand to SEQ ID NO: 2094308
aauuugccuaguaaacccu

SEQ ID NO: 2094310 - RNA, 19 nt, Artificial Sequence
  Description of Artificial Sequence: Synthetic oligonucleotide
  Sense strand starting at position 504 of SEQ ID NO: 1882089
ggguuuacuaggcaaauuc

SEQ ID NO: 2094311 - RNA, 19 nt, Artificial Sequence
  Description of Artificial Sequence: Synthetic oligonucleotide
  Antisense strand to SEQ ID NO: 2094310
gaauuugccuaguaaaccc

SEQ ID NO: 2094312 - RNA, 19 nt, Artificial Sequence
  Description of Artificial Sequence: Synthetic oligonucleotide
  Sense strand starting at position 682 of SEQ ID NO: 1882089
ccaggauucguggaacauc

SEQ ID NO: 2094313 - RNA, 19 nt, Artificial Sequence
  Description of Artificial Sequence: Synthetic oligonucleotide
  Antisense strand to SEQ ID NO: 2094312
gauguuccacgaauccugg

SEQ ID NO: 2094314 - RNA, 19 nt, Artificial Sequence
  Description of Artificial Sequence: Synthetic oligonucleotide
  Sense strand starting at position 716 of SEQ ID NO: 1882089
uccucuguucgugcaguga

SEQ ID NO: 2094315 - RNA, 19 nt, Artificial Sequence
  Description of Artificial Sequence: Synthetic oligonucleotide
  Antisense strand to SEQ ID NO: 2094314
ucacugcacgaacagagga

SEQ ID NO: 2094316 - RNA, 19 nt, Artificial Sequence
  Description of Artificial Sequence: Synthetic oligonucleotide
  Sense strand starting at position 796 of SEQ ID NO: 1882089
uguuuacucucauuugucu

SEQ ID NO: 2094317 - RNA, 19 nt, Artificial Sequence
  Description of Artificial Sequence: Synthetic oligonucleotide
  Antisense strand to SEQ ID NO: 2094316
agacaaaugagaguaaaca

SEQ ID NO: 2094318 - RNA, 19 nt, Artificial Sequence
  Description of Artificial Sequence: Synthetic oligonucleotide
  Sense strand starting at position 1022 of SEQ ID NO: 1882089
gggcgacuucuucaguaac

SEQ ID NO: 2094319 - RNA, 19 nt, Artificial Sequence
  Description of Artificial Sequence: Synthetic oligonucleotide
  Antisense strand to SEQ ID NO: 2094318
guuacugaagaagucgccc

SEQ ID NO: 2094320 - RNA, 19 nt, Artificial Sequence
  Description of Artificial Sequence: Synthetic oligonucleotide
  Sense strand starting at position 1104 of SEQ ID NO: 1882089
ugugaaucacauugaauac

SEQ ID NO: 2094321 - RNA, 19 nt, Artificial Sequence
  Description of Artificial Sequence: Synthetic oligonucleotide
  Antisense strand to SEQ ID NO: 2094320
guauucaaugugauucaca

SEQ ID NO: 2094322 - RNA, 19 nt, Artificial Sequence
  Description of Artificial Sequence: Synthetic oligonucleotide
  Sense strand starting at position 2862 of SEQ ID NO: 1882089
gugauugggccugacgcaa

SEQ ID NO: 2094323 - RNA, 19 nt, Artificial Sequence
  Description of Artificial Sequence: Synthetic oligonucleotide
  Antisense strand to SEQ ID NO: 2094322
uugcgucaggcccaaucac

SEQ ID NO: 2094324 - RNA, 19 nt, Artificial Sequence
  Description of Artificial Sequence: Synthetic oligonucleotide
  Sense strand starting at position 2992 of SEQ ID NO: 1882089
guuuccauguccuugggaa

SEQ ID NO: 2094325 - RNA, 19 nt, Artificial Sequence
  Description of Artificial Sequence: Synthetic oligonucleotide
  Antisense strand to SEQ ID NO: 2094324
uucccaaggacauggaaac

SEQ ID NO: 2094326 - RNA, 19 nt, Artificial Sequence
  Description of Artificial Sequence: Synthetic oligonucleotide
  Sense strand starting at position 2993 of SEQ ID NO: 1882089
uuuccauguccuugggaaa

SEQ ID NO: 2094327 - RNA, 19 nt, Artificial Sequence
  Description of Artificial Sequence: Synthetic oligonucleotide
  Antisense strand to SEQ ID NO: 2094326
uuucccaaggacauggaaa

SEQ ID NO: 2094328 - RNA, 19 nt, Artificial Sequence
  Description of Artificial Sequence: Synthetic oligonucleotide
  Sense strand starting at position 2994 of SEQ ID NO: 1882089
uuccauguccuugggaaac

SEQ ID NO: 2094329 - RNA, 19 nt, Artificial Sequence
  Description of Artificial Sequence: Synthetic oligonucleotide
  Antisense strand to SEQ ID NO: 2094328
guuucccaaggacauggaa

SEQ ID NO: 2094330 - RNA, 19 nt, Artificial Sequence
  Description of Artificial Sequence: Synthetic oligonucleotide
  Sense strand starting at position 3091 of SEQ ID NO: 1882089
gguuuagguucugcagaaa

SEQ ID NO: 2094331 - RNA, 19 nt, Artificial Sequence
  Description of Artificial Sequence: Synthetic oligonucleotide
  Antisense strand to SEQ ID NO: 2094330
uuucugcagaaccuaaacc

SEQ ID NO: 2094332 - RNA, 19 nt, Artificial Sequence
  Description of Artificial Sequence: Synthetic oligonucleotide
  Sense strand starting at position 3102 of SEQ ID NO: 1882089
ugcagaaagaagugcuaau

SEQ ID NO: 2094333 - RNA, 19 nt, Artificial Sequence
  Description of Artificial Sequence: Synthetic oligonucleotide
  Antisense strand to SEQ ID NO: 2094332
auuagcacuucuuucugca

SEQ ID NO: 2094334 - RNA, 19 nt, Artificial Sequence
  Description of Artificial Sequence: Synthetic oligonucleotide
  Sense strand starting at position 3201 of SEQ ID NO: 1882089
gagauacucucggcuguga

SEQ ID NO: 2094335 - RNA, 19 nt, Artificial Sequence
  Description of Artificial Sequence: Synthetic oligonucleotide
  Antisense strand to SEQ ID NO: 2094334
ucacagccgagaguaucuc

SEQ ID NO: 2094336 - RNA, 19 nt, Artificial Sequence
  Description of Artificial Sequence: Synthetic oligonucleotide
  Sense strand starting at position 3260 of SEQ ID NO: 1882089
gaaauaccgucacuggauu

SEQ ID NO: 2094337 - RNA, 19 nt, Artificial Sequence
  Description of Artificial Sequence: Synthetic oligonucleotide
  Antisense strand to SEQ ID NO: 2094336
aauccagugacgguauuuc

SEQ ID NO: 2094338 - RNA, 19 nt, Artificial Sequence
  Description of Artificial Sequence: Synthetic oligonucleotide
  Sense strand starting at position 3272 of SEQ ID NO: 1882089
cuggauugaacguagaguu

SEQ ID NO: 2094339 - RNA, 19 nt, Artificial Sequence
  Description of Artificial Sequence: Synthetic oligonucleotide
  Antisense strand to SEQ ID NO: 2094338
aacucuacguucaauccag

SEQ ID NO: 2094340 - RNA, 19 nt, Artificial Sequence
  Description of Artificial Sequence: Synthetic oligonucleotide
  Sense strand starting at position 3279 of SEQ ID NO: 1882089
gaacguagaguuggaaaug

SEQ ID NO: 2094341 - RNA, 19 nt, Artificial Sequence
  Description of Artificial Sequence: Synthetic oligonucleotide
  Antisense strand to SEQ ID NO: 2094340
cauuuccaacucuacguuc

SEQ ID NO: 2094342 - RNA, 19 nt, Artificial Sequence
  Description of Artificial Sequence: Synthetic oligonucleotide
  Sense strand starting at position 3494 of SEQ ID NO: 1882089
cucuccauccuguauugau

SEQ ID NO: 2094343 - RNA, 19 nt, Artificial Sequence
  Description of Artificial Sequence: Synthetic oligonucleotide
  Antisense strand to SEQ ID NO: 2094342
aucaauacaggauggagag

SEQ ID NO: 2094344 - RNA, 19 nt, Artificial Sequence
  Description of Artificial Sequence: Synthetic oligonucleotide
  Sense strand starting at position 3501 of SEQ ID NO: 1882089
uccuguauugauugccaga

SEQ ID NO: 2094345 - RNA, 19 nt, Artificial Sequence
  Description of Artificial Sequence: Synthetic oligonucleotide
  Antisense strand to SEQ ID NO: 2094344
ucuggcaaucaauacagga

SEQ ID NO: 2094346 - RNA, 19 nt, Artificial Sequence
  Description of Artificial Sequence: Synthetic oligonucleotide
  Sense strand starting at position 3672 of SEQ ID NO: 1882089
caugauaaucuauggguua

SEQ ID NO: 2094347 - RNA, 19 nt, Artificial Sequence
  Description of Artificial Sequence: Synthetic oligonucleotide
  Antisense strand to SEQ ID NO: 2094346
uaacccauagauuaucaug

SEQ ID NO: 2094348 - RNA, 19 nt, Artificial Sequence
  Description of Artificial Sequence: Synthetic oligonucleotide
  Sense strand starting at position 3675 of SEQ ID NO: 1882089
gauaaucuauggguuaggu

SEQ ID NO: 2094349 - RNA, 19 nt, Artificial Sequence
  Description of Artificial Sequence: Synthetic oligonucleotide
  Antisense strand to SEQ ID NO: 2094348
accuaacccauagauuauc

SEQ ID NO: 2094350 - RNA, 19 nt, Artificial Sequence
  Description of Artificial Sequence: Synthetic oligonucleotide
  Sense strand starting at position 3779 of SEQ ID NO: 1882089
gaaugcuggcucugggacu

SEQ ID NO: 2094351 - RNA, 19 nt, Artificial Sequence
  Description of Artificial Sequence: Synthetic oligonucleotide
  Antisense strand to SEQ ID NO: 2094350
agucccagagccagcauuc

SEQ ID NO: 2094352 - RNA, 19 nt, Artificial Sequence
  Description of Artificial Sequence: Synthetic oligonucleotide
  Sense strand starting at position 3804 of SEQ ID NO: 1882089
caguuuguuugacuccaga

SEQ ID NO: 2094353 - RNA, 19 nt, Artificial Sequence
  Description of Artificial Sequence: Synthetic oligonucleotide
  Antisense strand to SEQ ID NO: 2094352
ucuggagucaaacaaacug

SEQ ID NO: 2094354 - RNA, 19 nt, Artificial Sequence
  Description of Artificial Sequence: Synthetic oligonucleotide
  Sense strand starting at position 3807 of SEQ ID NO: 1882089
uuuguuugacuccagaguu

SEQ ID NO: 2094355 - RNA, 19 nt, Artificial Sequence
  Description of Artificial Sequence: Synthetic oligonucleotide
  Antisense strand to SEQ ID NO: 2094354
aacucuggagucaaacaaa

SEQ ID NO: 2094356 - RNA, 19 nt, Artificial Sequence
  Description of Artificial Sequence: Synthetic oligonucleotide
  Sense strand starting at position 3929 of SEQ ID NO: 1882089
gacgguugagauuggaaag

SEQ ID NO: 2094357 - RNA, 19 nt, Artificial Sequence
  Description of Artificial Sequence: Synthetic oligonucleotide
  Antisense strand to SEQ ID NO: 2094356
cuuuccaaucucaaccguc

SEQ ID NO: 2094358 - RNA, 19 nt, Artificial Sequence
  Description of Artificial Sequence: Synthetic oligonucleotide
  Sense strand starting at position 3930 of SEQ ID NO: 1882089
acgguugagauuggaaaga

SEQ ID NO: 2094359 - RNA, 19 nt, Artificial Sequence
  Description of Artificial Sequence: Synthetic oligonucleotide
  Antisense strand to SEQ ID NO: 2094358
ucuuuccaaucucaaccgu

SEQ ID NO: 2094360 - RNA, 19 nt, Artificial Sequence
  Description of Artificial Sequence: Synthetic oligonucleotide
  Sense strand starting at position 24 of SEQ ID NO: 1882090
auacuugcugaaugaacuu

SEQ ID NO: 2094361 - RNA, 19 nt, Artificial Sequence
  Description of Artificial Sequence: Synthetic oligonucleotide
  Antisense strand to SEQ ID NO: 2094360
aaguucauucagcaaguau

SEQ ID NO: 2094362 - RNA, 19 nt, Artificial Sequence
  Description of Artificial Sequence: Synthetic oligonucleotide
  Sense strand starting at position 54 of SEQ ID NO: 1882090
cuggauuugcucugagcca

SEQ ID NO: 2094363 - RNA, 19 nt, Artificial Sequence
  Description of Artificial Sequence: Synthetic oligonucleotide
  Antisense strand to SEQ ID NO: 2094362
uggcucagagcaaauccag

SEQ ID NO: 2094364 - RNA, 19 nt, Artificial Sequence
  Description of Artificial Sequence: Synthetic oligonucleotide
  Sense strand starting at position 123 of SEQ ID NO: 1882090
aagaaugcaguuugagacu

SEQ ID NO: 2094365 - RNA, 19 nt, Artificial Sequence
  Description of Artificial Sequence: Synthetic oligonucleotide
  Antisense strand to SEQ ID NO: 2094364
agucucaaacugcauucuu

SEQ ID NO: 2094366 - RNA, 19 nt, Artificial Sequence
  Description of Artificial Sequence: Synthetic oligonucleotide
  Sense strand starting at position 198 of SEQ ID NO: 1882090
cgggcaugcucauuuacag

SEQ ID NO: 2094367 - RNA, 19 nt, Artificial Sequence
  Description of Artificial Sequence: Synthetic oligonucleotide
  Antisense strand to SEQ ID NO: 2094366
cuguaaaugagcaugcccg

SEQ ID NO: 2094368 - RNA, 19 nt, Artificial Sequence
  Description of Artificial Sequence: Synthetic oligonucleotide
  Sense strand starting at position 267 of SEQ ID NO: 1882090
agggcuuuccaauguuuag

SEQ ID NO: 2094369 - RNA, 19 nt, Artificial Sequence
  Description of Artificial Sequence: Synthetic oligonucleotide
  Antisense strand to SEQ ID NO: 2094368
cuaaacauuggaaagcccu

SEQ ID NO: 2094370 - RNA, 19 nt, Artificial Sequence
  Description of Artificial Sequence: Synthetic oligonucleotide
  Sense strand starting at position 270 of SEQ ID NO: 1882090
gcuuuccaauguuuagaag

SEQ ID NO: 2094371 - RNA, 19 nt, Artificial Sequence
  Description of Artificial Sequence: Synthetic oligonucleotide
  Antisense strand to SEQ ID NO: 2094370
cuucuaaacauuggaaagc

SEQ ID NO: 2094372 - RNA, 19 nt, Artificial Sequence
  Description of Artificial Sequence: Synthetic oligonucleotide
  Sense strand starting at position 342 of SEQ ID NO: 1882090
cucucuguagcauauaagu

SEQ ID NO: 2094373 - RNA, 19 nt, Artificial Sequence
  Description of Artificial Sequence: Synthetic oligonucleotide
  Antisense strand to SEQ ID NO: 2094372
acuuauaugcuacagagag

SEQ ID NO: 2094374 - RNA, 19 nt, Artificial Sequence
  Description of Artificial Sequence: Synthetic oligonucleotide
  Sense strand starting at position 552 of SEQ ID NO: 1882090
ggauauguagacuguccaa

SEQ ID NO: 2094375 - RNA, 19 nt, Artificial Sequence
  Description of Artificial Sequence: Synthetic oligonucleotide
  Antisense strand to SEQ ID NO: 2094374
uuggacagucuacauaucc

SEQ ID NO: 2094376 - RNA, 19 nt, Artificial Sequence
  Description of Artificial Sequence: Synthetic oligonucleotide
  Sense strand starting at position 863 of SEQ ID NO: 1882090
ggaauaaucuaagcaaguu

SEQ ID NO: 2094377 - RNA, 19 nt, Artificial Sequence
  Description of Artificial Sequence: Synthetic oligonucleotide
  Antisense strand to SEQ ID NO: 2094376
aacuugcuuagauuauucc

SEQ ID NO: 2094378 - RNA, 19 nt, Artificial Sequence
  Description of Artificial Sequence: Synthetic oligonucleotide
  Sense strand starting at position 939 of SEQ ID NO: 1882090
acacgaauuucgucccggu

SEQ ID NO: 2094379 - RNA, 19 nt, Artificial Sequence
  Description of Artificial Sequence: Synthetic oligonucleotide
  Antisense strand to SEQ ID NO: 2094378
accgggacgaaauucgugu

SEQ ID NO: 2094380 - RNA, 19 nt, Artificial Sequence
  Description of Artificial Sequence: Synthetic oligonucleotide
  Sense strand starting at position 1083 of SEQ ID NO: 1882090
accauaguacuguacguau

SEQ ID NO: 2094381 - RNA, 19 nt, Artificial Sequence
  Description of Artificial Sequence: Synthetic oligonucleotide
  Antisense strand to SEQ ID NO: 2094380
auacguacaguacuauggu

SEQ ID NO: 2094382 - RNA, 19 nt, Artificial Sequence
  Description of Artificial Sequence: Synthetic oligonucleotide
  Sense strand starting at position 1086 of SEQ ID NO: 1882090
auaguacuguacguauaau

SEQ ID NO: 2094383 - RNA, 19 nt, Artificial Sequence
  Description of Artificial Sequence: Synthetic oligonucleotide
  Antisense strand to SEQ ID NO: 2094382
auuauacguacaguacuau

SEQ ID NO: 2094384 - RNA, 19 nt, Artificial Sequence
  Description of Artificial Sequence: Synthetic oligonucleotide
  Sense strand starting at position 1092 of SEQ ID NO: 1882090
cuguacguauaaucacaua

SEQ ID NO: 2094385 - RNA, 19 nt, Artificial Sequence
  Description of Artificial Sequence: Synthetic oligonucleotide
  Antisense strand to SEQ ID NO: 2094384
uaugugauuauacguacag

SEQ ID NO: 2094386 - RNA, 19 nt, Artificial Sequence
  Description of Artificial Sequence: Synthetic oligonucleotide
  Sense strand starting at position 1329 of SEQ ID NO: 1882090
cuuuauccugaccguuaga

SEQ ID NO: 2094387 - RNA, 19 nt, Artificial Sequence
  Description of Artificial Sequence: Synthetic oligonucleotide
  Antisense strand to SEQ ID NO: 2094386
ucuaacggucaggauaaag

SEQ ID NO: 2094388 - RNA, 19 nt, Artificial Sequence
  Description of Artificial Sequence: Synthetic oligonucleotide
  Sense strand starting at position 1332 of SEQ ID NO: 1882090
uauccugaccguuagagaa

SEQ ID NO: 2094389 - RNA, 19 nt, Artificial Sequence
  Description of Artificial Sequence: Synthetic oligonucleotide
  Antisense strand to SEQ ID NO: 2094388
uucucuaacggucaggaua

SEQ ID NO: 2094390 - RNA, 19 nt, Artificial Sequence
  Description of Artificial Sequence: Synthetic oligonucleotide
  Sense strand starting at position 1390 of SEQ ID NO: 1882090
gaccgcguauuuccagaaa

SEQ ID NO: 2094391 - RNA, 19 nt, Artificial Sequence
  Description of Artificial Sequence: Synthetic oligonucleotide
  Antisense strand to SEQ ID NO: 2094390
uuucuggaaauacgcgguc

SEQ ID NO: 2094392 - RNA, 19 nt, Artificial Sequence
  Description of Artificial Sequence: Synthetic oligonucleotide
  Sense strand starting at position 1479 of SEQ ID NO: 1882090
uucuuauucgcagaaauaa

SEQ ID NO: 2094393 - RNA, 19 nt, Artificial Sequence
  Description of Artificial Sequence: Synthetic oligonucleotide
  Antisense strand to SEQ ID NO: 2094392
uuauuucugcgaauaagaa

SEQ ID NO: 2094394 - RNA, 19 nt, Artificial Sequence
  Description of Artificial Sequence: Synthetic oligonucleotide
  Sense strand starting at position 1536 of SEQ ID NO: 1882090
agguguacgauccauccau

SEQ ID NO: 2094395 - RNA, 19 nt, Artificial Sequence
  Description of Artificial Sequence: Synthetic oligonucleotide
  Antisense strand to SEQ ID NO: 2094394
auggauggaucguacaccu

SEQ ID NO: 2094396 - RNA, 19 nt, Artificial Sequence
  Description of Artificial Sequence: Synthetic oligonucleotide
  Sense strand starting at position 3044 of SEQ ID NO: 1882090
agugguaauucuuucucuu

SEQ ID NO: 2094397 - RNA, 19 nt, Artificial Sequence
  Description of Artificial Sequence: Synthetic oligonucleotide
  Antisense strand to SEQ ID NO: 2094396
aagagaaagaauuaccacu

SEQ ID NO: 2094398 - RNA, 19 nt, Artificial Sequence
  Description of Artificial Sequence: Synthetic oligonucleotide
  Sense strand starting at position 3117 of SEQ ID NO: 1882090
agaauuaaaucguccacau

SEQ ID NO: 2094399 - RNA, 19 nt, Artificial Sequence
  Description of Artificial Sequence: Synthetic oligonucleotide
  Antisense strand to SEQ ID NO: 2094398
auguggacgauuuaauucu

SEQ ID NO: 2094400 - RNA, 19 nt, Artificial Sequence
  Description of Artificial Sequence: Synthetic oligonucleotide
  Sense strand starting at position 3121 of SEQ ID NO: 1882090
uuaaaucguccacaugaau

SEQ ID NO: 2094401 - RNA, 19 nt, Artificial Sequence
  Description of Artificial Sequence: Synthetic oligonucleotide
  Antisense strand to SEQ ID NO: 2094400
auucauguggacgauuuaa

SEQ ID NO: 2094402 - RNA, 19 nt, Artificial Sequence
  Description of Artificial Sequence: Synthetic oligonucleotide
  Sense strand starting at position 3219 of SEQ ID NO: 1882090
guguguuguugcacaugga

SEQ ID NO: 2094403 - RNA, 19 nt, Artificial Sequence
  Description of Artificial Sequence: Synthetic oligonucleotide
  Antisense strand to SEQ ID NO: 2094402
uccaugugcaacaacacac

SEQ ID NO: 2094404 - RNA, 19 nt, Artificial Sequence
  Description of Artificial Sequence: Synthetic oligonucleotide
  Sense strand starting at position 3288 of SEQ ID NO: 1882090
uuucuauuuguaugcguua

SEQ ID NO: 2094405 - RNA, 19 nt, Artificial Sequence
  Description of Artificial Sequence: Synthetic oligonucleotide
  Antisense strand to SEQ ID NO: 2094404
uaacgcauacaaauagaaa

SEQ ID NO: 2094406 - RNA, 19 nt, Artificial Sequence
  Description of Artificial Sequence: Synthetic oligonucleotide
  Sense strand starting at position 3289 of SEQ ID NO: 1882090
uucuauuuguaugcguuau

SEQ ID NO: 2094407 - RNA, 19 nt, Artificial Sequence
  Description of Artificial Sequence: Synthetic oligonucleotide
  Antisense strand to SEQ ID NO: 2094406
auaacgcauacaaauagaa

SEQ ID NO: 2094408 - RNA, 19 nt, Artificial Sequence
  Description of Artificial Sequence: Synthetic oligonucleotide
  Sense strand starting at position 3290 of SEQ ID NO: 1882090
ucuauuuguaugcguuaug

SEQ ID NO: 2094409 - RNA, 19 nt, Artificial Sequence
  Description of Artificial Sequence: Synthetic oligonucleotide
  Antisense strand to SEQ ID NO: 2094408
cauaacgcauacaaauaga

SEQ ID NO: 2094410 - RNA, 19 nt, Artificial Sequence
  Description of Artificial Sequence: Synthetic oligonucleotide
  Sense strand starting at position 3291 of SEQ ID NO: 1882090
cuauuuguaugcguuaugu

SEQ ID NO: 2094411 - RNA, 19 nt, Artificial Sequence
  Description of Artificial Sequence: Synthetic oligonucleotide
  Antisense strand to SEQ ID NO: 2094410
acauaacgcauacaaauag

SEQ ID NO: 2094412 - RNA, 19 nt, Artificial Sequence
  Description of Artificial Sequence: Synthetic oligonucleotide
  Sense strand starting at position 3293 of SEQ ID NO: 1882090
auuuguaugcguuauguaa

SEQ ID NO: 2094413 - RNA, 19 nt, Artificial Sequence
  Description of Artificial Sequence: Synthetic oligonucleotide
  Antisense strand to SEQ ID NO: 2094412
uuacauaacgcauacaaau

SEQ ID NO: 2094414 - RNA, 19 nt, Artificial Sequence
  Description of Artificial Sequence: Synthetic oligonucleotide
  Sense strand starting at position 3566 of SEQ ID NO: 1882090
caugauguuugacugugua

SEQ ID NO: 2094415 - RNA, 19 nt, Artificial Sequence
  Description of Artificial Sequence: Synthetic oligonucleotide
  Antisense strand to SEQ ID NO: 2094414
uacacagucaaacaucaug

SEQ ID NO: 2094416 - RNA, 19 nt, Artificial Sequence
  Description of Artificial Sequence: Synthetic oligonucleotide
  Sense strand starting at position 3569 of SEQ ID NO: 1882090
gauguuugacuguguaaug

SEQ ID NO: 2094417 - RNA, 19 nt, Artificial Sequence
  Description of Artificial Sequence: Synthetic oligonucleotide
  Antisense strand to SEQ ID NO: 2094416
cauuacacagucaaacauc

SEQ ID NO: 2094418 - RNA, 19 nt, Artificial Sequence
  Description of Artificial Sequence: Synthetic oligonucleotide
  Sense strand starting at position 3570 of SEQ ID NO: 1882090
auguuugacuguguaauga

SEQ ID NO: 2094419 - RNA, 19 nt, Artificial Sequence
  Description of Artificial Sequence: Synthetic oligonucleotide
  Antisense strand to SEQ ID NO: 2094418
ucauuacacagucaaacau

SEQ ID NO: 2094420 - RNA, 19 nt, Artificial Sequence
  Description of Artificial Sequence: Synthetic oligonucleotide
  Sense strand starting at position 3579 of SEQ ID NO: 1882090
uguguaaugagagaggugu

SEQ ID NO: 2094421 - RNA, 19 nt, Artificial Sequence
  Description of Artificial Sequence: Synthetic oligonucleotide
  Antisense strand to SEQ ID NO: 2094420
acaccucucucauuacaca

SEQ ID NO: 2094422 - RNA, 19 nt, Artificial Sequence
  Description of Artificial Sequence: Synthetic oligonucleotide
  Sense strand starting at position 3583 of SEQ ID NO: 1882090
uaaugagagaggugucauu

SEQ ID NO: 2094423 - RNA, 19 nt, Artificial Sequence
  Description of Artificial Sequence: Synthetic oligonucleotide
  Antisense strand to SEQ ID NO: 2094422
aaugacaccucucucauua

SEQ ID NO: 2094424 - RNA, 19 nt, Artificial Sequence
  Description of Artificial Sequence: Synthetic oligonucleotide
  Sense strand starting at position 3666 of SEQ ID NO: 1882090
guucaugaguaaguuaagu

SEQ ID NO: 2094425 - RNA, 19 nt, Artificial Sequence
  Description of Artificial Sequence: Synthetic oligonucleotide
  Antisense strand to SEQ ID NO: 2094424
acuuaacuuacucaugaac

SEQ ID NO: 2094426 - RNA, 19 nt, Artificial Sequence
  Description of Artificial Sequence: Synthetic oligonucleotide
  Sense strand starting at position 3668 of SEQ ID NO: 1882090
ucaugaguaaguuaagugu

SEQ ID NO: 2094427 - RNA, 19 nt, Artificial Sequence
  Description of Artificial Sequence: Synthetic oligonucleotide
  Antisense strand to SEQ ID NO: 2094426
acacuuaacuuacucauga

SEQ ID NO: 2094428 - RNA, 19 nt, Artificial Sequence
  Description of Artificial Sequence: Synthetic oligonucleotide
  Sense strand starting at position 3681 of SEQ ID NO: 1882090
aaguguuucgagcuuguuu

SEQ ID NO: 2094429 - RNA, 19 nt, Artificial Sequence
  Description of Artificial Sequence: Synthetic oligonucleotide
  Antisense strand to SEQ ID NO: 2094428
aaacaagcucgaaacacuu

SEQ ID NO: 2094430 - RNA, 19 nt, Artificial Sequence
  Description of Artificial Sequence: Synthetic oligonucleotide
  Sense strand starting at position 3682 of SEQ ID NO: 1882090
aguguuucgagcuuguuua

SEQ ID NO: 2094431 - RNA, 19 nt, Artificial Sequence
  Description of Artificial Sequence: Synthetic oligonucleotide
  Antisense strand to SEQ ID NO: 2094430
uaaacaagcucgaaacacu

SEQ ID NO: 2094432 - RNA, 19 nt, Artificial Sequence
  Description of Artificial Sequence: Synthetic oligonucleotide
  Sense strand starting at position 3711 of SEQ ID NO: 1882090
cauaauguagguugguaua

SEQ ID NO: 2094433 - RNA, 19 nt, Artificial Sequence
  Description of Artificial Sequence: Synthetic oligonucleotide
  Antisense strand to SEQ ID NO: 2094432
uauaccaaccuacauuaug

SEQ ID NO: 2094434 - RNA, 19 nt, Artificial Sequence
  Description of Artificial Sequence: Synthetic oligonucleotide
  Sense strand starting at position 3760 of SEQ ID NO: 1882090
ucaggcaaauugcuagaaa

SEQ ID NO: 2094435 - RNA, 19 nt, Artificial Sequence
  Description of Artificial Sequence: Synthetic oligonucleotide
  Antisense strand to SEQ ID NO: 2094434
uuucuagcaauuugccuga

SEQ ID NO: 2094436 - RNA, 19 nt, Artificial Sequence
  Description of Artificial Sequence: Synthetic oligonucleotide
  Sense strand starting at position 3931 of SEQ ID NO: 1882090
gucacuguagaauaaguua

SEQ ID NO: 2094437 - RNA, 19 nt, Artificial Sequence
  Description of Artificial Sequence: Synthetic oligonucleotide
  Antisense strand to SEQ ID NO: 2094436
uaacuuauucuacagugac

SEQ ID NO: 2094438 - RNA, 19 nt, Artificial Sequence
  Description of Artificial Sequence: Synthetic oligonucleotide
  Sense strand starting at position 3974 of SEQ ID NO: 1882090
uagcguccugauuacaaua

SEQ ID NO: 2094439 - RNA, 19 nt, Artificial Sequence
  Description of Artificial Sequence: Synthetic oligonucleotide
  Antisense strand to SEQ ID NO: 2094438
uauuguaaucaggacgcua

SEQ ID NO: 2094440 - RNA, 19 nt, Artificial Sequence
  Description of Artificial Sequence: Synthetic oligonucleotide
  Sense strand starting at position 166 of SEQ ID NO: 1882091
uccguuuaugaauaauaug

SEQ ID NO: 2094441 - RNA, 19 nt, Artificial Sequence
  Description of Artificial Sequence: Synthetic oligonucleotide
  Antisense strand to SEQ ID NO: 2094440
cauauuauucauaaacgga

SEQ ID NO: 2094442 - RNA, 19 nt, Artificial Sequence
  Description of Artificial Sequence: Synthetic oligonucleotide
  Sense strand starting at position 185 of SEQ ID NO: 1882091
cuguaauuauacguagaag

SEQ ID NO: 2094443 - RNA, 19 nt, Artificial Sequence
  Description of Artificial Sequence: Synthetic oligonucleotide
  Antisense strand to SEQ ID NO: 2094442
cuucuacguauaauuacag

SEQ ID NO: 2094444 - RNA, 19 nt, Artificial Sequence
  Description of Artificial Sequence: Synthetic oligonucleotide
  Sense strand starting at position 186 of SEQ ID NO: 1882091
uguaauuauacguagaagc

SEQ ID NO: 2094445 - RNA, 19 nt, Artificial Sequence
  Description of Artificial Sequence: Synthetic oligonucleotide
  Antisense strand to SEQ ID NO: 2094444
gcuucuacguauaauuaca

SEQ ID NO: 2094446 - RNA, 19 nt, Artificial Sequence
  Description of Artificial Sequence: Synthetic oligonucleotide
  Sense strand starting at position 188 of SEQ ID NO: 1882091
uaauuauacguagaagcuu

SEQ ID NO: 2094447 - RNA, 19 nt, Artificial Sequence
  Description of Artificial Sequence: Synthetic oligonucleotide
  Antisense strand to SEQ ID NO: 2094446
aagcuucuacguauaauua

SEQ ID NO: 2094448 - RNA, 19 nt, Artificial Sequence
  Description of Artificial Sequence: Synthetic oligonucleotide
  Sense strand starting at position 359 of SEQ ID NO: 1882091
acaguauguuaucuuugag

SEQ ID NO: 2094449 - RNA, 19 nt, Artificial Sequence
  Description of Artificial Sequence: Synthetic oligonucleotide
  Antisense strand to SEQ ID NO: 2094448
cucaaagauaacauacugu

SEQ ID NO: 2094450 - RNA, 19 nt, Artificial Sequence
  Description of Artificial Sequence: Synthetic oligonucleotide
  Sense strand starting at position 509 of SEQ ID NO: 1882091
cuguguagugugagguguu

SEQ ID NO: 2094451 - RNA, 19 nt, Artificial Sequence
  Description of Artificial Sequence: Synthetic oligonucleotide
  Antisense strand to SEQ ID NO: 2094450
aacaccucacacuacacag

SEQ ID NO: 2094452 - RNA, 19 nt, Artificial Sequence
  Description of Artificial Sequence: Synthetic oligonucleotide
  Sense strand starting at position 602 of SEQ ID NO: 1882091
ugccaaauaucccucggaa

SEQ ID NO: 2094453 - RNA, 19 nt, Artificial Sequence
  Description of Artificial Sequence: Synthetic oligonucleotide
  Antisense strand to SEQ ID NO: 2094452
uuccgagggauauuuggca

SEQ ID NO: 2094454 - RNA, 19 nt, Artificial Sequence
  Description of Artificial Sequence: Synthetic oligonucleotide
  Sense strand starting at position 604 of SEQ ID NO: 1882091
ccaaauaucccucggaacu

SEQ ID NO: 2094455 - RNA, 19 nt, Artificial Sequence
  Description of Artificial Sequence: Synthetic oligonucleotide
  Antisense strand to SEQ ID NO: 2094454
aguuccgagggauauuugg

SEQ ID NO: 2094456 - RNA, 19 nt, Artificial Sequence
  Description of Artificial Sequence: Synthetic oligonucleotide
  Sense strand starting at position 735 of SEQ ID NO: 1882091
gugggaucauuacuaaucu

SEQ ID NO: 2094457 - RNA, 19 nt, Artificial Sequence
  Description of Artificial Sequence: Synthetic oligonucleotide
  Antisense strand to SEQ ID NO: 2094456
agauuaguaaugaucccac

SEQ ID NO: 2094458 - RNA, 19 nt, Artificial Sequence
  Description of Artificial Sequence: Synthetic oligonucleotide
  Sense strand starting at position 840 of SEQ ID NO: 1882091
ucauuuccugucugugagu

SEQ ID NO: 2094459 - RNA, 19 nt, Artificial Sequence
  Description of Artificial Sequence: Synthetic oligonucleotide
  Antisense strand to SEQ ID NO: 2094458
acucacagacaggaaauga

SEQ ID NO: 2094460 - RNA, 19 nt, Artificial Sequence
  Description of Artificial Sequence: Synthetic oligonucleotide
  Sense strand starting at position 841 of SEQ ID NO: 1882091
cauuuccugucugugaguu

SEQ ID NO: 2094461 - RNA, 19 nt, Artificial Sequence
  Description of Artificial Sequence: Synthetic oligonucleotide
  Antisense strand to SEQ ID NO: 2094460
aacucacagacaggaaaug

SEQ ID NO: 2094462 - RNA, 19 nt, Artificial Sequence
  Description of Artificial Sequence: Synthetic oligonucleotide
  Sense strand starting at position 842 of SEQ ID NO: 1882091
auuuccugucugugaguuu

SEQ ID NO: 2094463 - RNA, 19 nt, Artificial Sequence
  Description of Artificial Sequence: Synthetic oligonucleotide
  Antisense strand to SEQ ID NO: 2094462
aaacucacagacaggaaau

SEQ ID NO: 2094464 - RNA, 19 nt, Artificial Sequence
  Description of Artificial Sequence: Synthetic oligonucleotide
  Sense strand starting at position 869 of SEQ ID NO: 1882091
gugggaauccauuaguuga

SEQ ID NO: 2094465 - RNA, 19 nt, Artificial Sequence
  Description of Artificial Sequence: Synthetic oligonucleotide
  Antisense strand to SEQ ID NO: 2094464
ucaacuaauggauucccac

SEQ ID NO: 2094466 - RNA, 19 nt, Artificial Sequence
  Description of Artificial Sequence: Synthetic oligonucleotide
  Sense strand starting at position 871 of SEQ ID NO: 1882091
gggaauccauuaguugaau

SEQ ID NO: 2094467 - RNA, 19 nt, Artificial Sequence
  Description of Artificial Sequence: Synthetic oligonucleotide
  Antisense strand to SEQ ID NO: 2094466
auucaacuaauggauuccc

SEQ ID NO: 2094468 - RNA, 19 nt, Artificial Sequence
  Description of Artificial Sequence: Synthetic oligonucleotide
  Sense strand starting at position 877 of SEQ ID NO: 1882091
ccauuaguugaaugaccuu

SEQ ID NO: 2094469 - RNA, 19 nt, Artificial Sequence
  Description of Artificial Sequence: Synthetic oligonucleotide
  Antisense strand to SEQ ID NO: 2094468
aaggucauucaacuaaugg

SEQ ID NO: 2094470 - RNA, 19 nt, Artificial Sequence
  Description of Artificial Sequence: Synthetic oligonucleotide
  Sense strand starting at position 889 of SEQ ID NO: 1882091
ugaccuucuguguagguua

SEQ ID NO: 2094471 - RNA, 19 nt, Artificial Sequence
  Description of Artificial Sequence: Synthetic oligonucleotide
  Antisense strand to SEQ ID NO: 2094470
uaaccuacacagaagguca

SEQ ID NO: 2094472 - RNA, 19 nt, Artificial Sequence
  Description of Artificial Sequence: Synthetic oligonucleotide
  Sense strand starting at position 1150 of SEQ ID NO: 1882091
guaacagaacugugugaaa

SEQ ID NO: 2094473 - RNA, 19 nt, Artificial Sequence
  Description of Artificial Sequence: Synthetic oligonucleotide
  Antisense strand to SEQ ID NO: 2094472
uuucacacaguucuguuac

SEQ ID NO: 2094474 - RNA, 19 nt, Artificial Sequence
  Description of Artificial Sequence: Synthetic oligonucleotide
  Sense strand starting at position 1179 of SEQ ID NO: 1882091
ggucauuacgguuaauagu

SEQ ID NO: 2094475 - RNA, 19 nt, Artificial Sequence
  Description of Artificial Sequence: Synthetic oligonucleotide
  Antisense strand to SEQ ID NO: 2094474
acuauuaaccguaaugacc

SEQ ID NO: 2094476 - RNA, 19 nt, Artificial Sequence
  Description of Artificial Sequence: Synthetic oligonucleotide
  Sense strand starting at position 1334 of SEQ ID NO: 1882091
cgcagauguguguuacuuu

SEQ ID NO: 2094477 - RNA, 19 nt, Artificial Sequence
  Description of Artificial Sequence: Synthetic oligonucleotide
  Antisense strand to SEQ ID NO: 2094476
aaaguaacacacaucugcg

SEQ ID NO: 2094478 - RNA, 19 nt, Artificial Sequence
  Description of Artificial Sequence: Synthetic oligonucleotide
  Sense strand starting at position 1360 of SEQ ID NO: 1882091
uggacaucguuucugagga

SEQ ID NO: 2094479 - RNA, 19 nt, Artificial Sequence
  Description of Artificial Sequence: Synthetic oligonucleotide
  Antisense strand to SEQ ID NO: 2094478
uccucagaaacgaugucca

SEQ ID NO: 2094480 - RNA, 19 nt, Artificial Sequence
  Description of Artificial Sequence: Synthetic oligonucleotide
  Sense strand starting at position 1778 of SEQ ID NO: 1882091
acuagccuuugagcucaaa

SEQ ID NO: 2094481 - RNA, 19 nt, Artificial Sequence
  Description of Artificial Sequence: Synthetic oligonucleotide
  Antisense strand to SEQ ID NO: 2094480
uuugagcucaaaggcuagu

SEQ ID NO: 2094482 - RNA, 19 nt, Artificial Sequence
  Description of Artificial Sequence: Synthetic oligonucleotide
  Sense strand starting at position 2470 of SEQ ID NO: 1882091
ggaggucauagaggacuuu

SEQ ID NO: 2094483 - RNA, 19 nt, Artificial Sequence
  Description of Artificial Sequence: Synthetic oligonucleotide
  Antisense strand to SEQ ID NO: 2094482
aaaguccucuaugaccucc

SEQ ID NO: 2094484 - RNA, 19 nt, Artificial Sequence
  Description of Artificial Sequence: Synthetic oligonucleotide
  Sense strand starting at position 2495 of SEQ ID NO: 1882091
gcgguucauccagagaggu

SEQ ID NO: 2094485 - RNA, 19 nt, Artificial Sequence
  Description of Artificial Sequence: Synthetic oligonucleotide
  Antisense strand to SEQ ID NO: 2094484
accucucuggaugaaccgc

SEQ ID NO: 2094486 - RNA, 19 nt, Artificial Sequence
  Description of Artificial Sequence: Synthetic oligonucleotide
  Sense strand starting at position 2519 of SEQ ID NO: 1882091
cuggaugcccuugagguau

SEQ ID NO: 2094487 - RNA, 19 nt, Artificial Sequence
  Description of Artificial Sequence: Synthetic oligonucleotide
  Antisense strand to SEQ ID NO: 2094486
auaccucaagggcauccag

SEQ ID NO: 2094488 - RNA, 19 nt, Artificial Sequence
  Description of Artificial Sequence: Synthetic oligonucleotide
  Sense strand starting at position 2530 of SEQ ID NO: 1882091
ugagguaugcuugacccuu

SEQ ID NO: 2094489 - RNA, 19 nt, Artificial Sequence
  Description of Artificial Sequence: Synthetic oligonucleotide
  Antisense strand to SEQ ID NO: 2094488
aagggucaagcauaccuca

SEQ ID NO: 2094490 - RNA, 19 nt, Artificial Sequence
  Description of Artificial Sequence: Synthetic oligonucleotide
  Sense strand starting at position 2536 of SEQ ID NO: 1882091
augcuugacccuugaggga

SEQ ID NO: 2094491 - RNA, 19 nt, Artificial Sequence
  Description of Artificial Sequence: Synthetic oligonucleotide
  Antisense strand to SEQ ID NO: 2094490
ucccucaagggucaagcau

SEQ ID NO: 2094492 - RNA, 19 nt, Artificial Sequence
  Description of Artificial Sequence: Synthetic oligonucleotide
  Sense strand starting at position 2585 of SEQ ID NO: 1882091
ggagauugcgagcacaaau

SEQ ID NO: 2094493 - RNA, 19 nt, Artificial Sequence
  Description of Artificial Sequence: Synthetic oligonucleotide
  Antisense strand to SEQ ID NO: 2094492
auuugugcucgcaaucucc

SEQ ID NO: 2094494 - RNA, 19 nt, Artificial Sequence
  Description of Artificial Sequence: Synthetic oligonucleotide
  Sense strand starting at position 2753 of SEQ ID NO: 1882091
cggcuuccuagggagguua

SEQ ID NO: 2094495 - RNA, 19 nt, Artificial Sequence
  Description of Artificial Sequence: Synthetic oligonucleotide
  Antisense strand to SEQ ID NO: 2094494
uaaccucccuaggaagccg

SEQ ID NO: 2094496 - RNA, 19 nt, Artificial Sequence
  Description of Artificial Sequence: Synthetic oligonucleotide
  Sense strand starting at position 2755 of SEQ ID NO: 1882091
gcuuccuagggagguuaua

SEQ ID NO: 2094497 - RNA, 19 nt, Artificial Sequence
  Description of Artificial Sequence: Synthetic oligonucleotide
  Antisense strand to SEQ ID NO: 2094496
uauaaccucccuaggaagc

SEQ ID NO: 2094498 - RNA, 19 nt, Artificial Sequence
  Description of Artificial Sequence: Synthetic oligonucleotide
  Sense strand starting at position 3020 of SEQ ID NO: 1882091
aggagucuuguaggacaga

SEQ ID NO: 2094499 - RNA, 19 nt, Artificial Sequence
  Description of Artificial Sequence: Synthetic oligonucleotide
  Antisense strand to SEQ ID NO: 2094498
ucuguccuacaagacuccu

SEQ ID NO: 2094500 - RNA, 19 nt, Artificial Sequence
  Description of Artificial Sequence: Synthetic oligonucleotide
  Sense strand starting at position 3023 of SEQ ID NO: 1882091
agucuuguaggacagacuu

SEQ ID NO: 2094501 - RNA, 19 nt, Artificial Sequence
  Description of Artificial Sequence: Synthetic oligonucleotide
  Antisense strand to SEQ ID NO: 2094500
aagucuguccuacaagacu

SEQ ID NO: 2094502 - RNA, 19 nt, Artificial Sequence
  Description of Artificial Sequence: Synthetic oligonucleotide
  Sense strand starting at position 3195 of SEQ ID NO: 1882091
gcuuaccuuggugauagaa

SEQ ID NO: 2094503 - RNA, 19 nt, Artificial Sequence
  Description of Artificial Sequence: Synthetic oligonucleotide
  Antisense strand to SEQ ID NO: 2094502
uucuaucaccaagguaagc

SEQ ID NO: 2094504 - RNA, 19 nt, Artificial Sequence
  Description of Artificial Sequence: Synthetic oligonucleotide
  Sense strand starting at position 3402 of SEQ ID NO: 1882091
ugauaaggauauucucagu

SEQ ID NO: 2094505 - RNA, 19 nt, Artificial Sequence
  Description of Artificial Sequence: Synthetic oligonucleotide
  Antisense strand to SEQ ID NO: 2094504
acugagaauauccuuauca

SEQ ID NO: 2094506 - RNA, 19 nt, Artificial Sequence
  Description of Artificial Sequence: Synthetic oligonucleotide
  Sense strand starting at position 3698 of SEQ ID NO: 1882091
ucccaaagagauggcauua

SEQ ID NO: 2094507 - RNA, 19 nt, Artificial Sequence
  Description of Artificial Sequence: Synthetic oligonucleotide
  Antisense strand to SEQ ID NO: 2094506
uaaugccaucucuuuggga

SEQ ID NO: 2094508 - RNA, 19 nt, Artificial Sequence
  Description of Artificial Sequence: Synthetic oligonucleotide
  Sense strand starting at position 3774 of SEQ ID NO: 1882091
aauuaaguacagggaaguu

SEQ ID NO: 2094509 - RNA, 19 nt, Artificial Sequence
  Description of Artificial Sequence: Synthetic oligonucleotide
  Antisense strand to SEQ ID NO: 2094508
aacuucccuguacuuaauu

SEQ ID NO: 2094510 - RNA, 19 nt, Artificial Sequence
  Description of Artificial Sequence: Synthetic oligonucleotide
  Sense strand starting at position 3856 of SEQ ID NO: 1882091
agagcugacucucuuaaau

SEQ ID NO: 2094511 - RNA, 19 nt, Artificial Sequence
  Description of Artificial Sequence: Synthetic oligonucleotide
  Antisense strand to SEQ ID NO: 2094510
auuuaagagagucagcucu

SEQ ID NO: 2094512 - RNA, 19 nt, Artificial Sequence
  Description of Artificial Sequence: Synthetic oligonucleotide
  Sense strand starting at position 3867 of SEQ ID NO: 1882091
ucuuaaauaucugugguau

SEQ ID NO: 2094513 - RNA, 19 nt, Artificial Sequence
  Description of Artificial Sequence: Synthetic oligonucleotide
  Antisense strand to SEQ ID NO: 2094512
auaccacagauauuuaaga

SEQ ID NO: 2094514 - RNA, 19 nt, Artificial Sequence
  Description of Artificial Sequence: Synthetic oligonucleotide
  Sense strand starting at position 3868 of SEQ ID NO: 1882091
cuuaaauaucugugguauc

SEQ ID NO: 2094515 - RNA, 19 nt, Artificial Sequence
  Description of Artificial Sequence: Synthetic oligonucleotide
  Antisense strand to SEQ ID NO: 2094514
gauaccacagauauuuaag

SEQ ID NO: 2094516 - RNA, 19 nt, Artificial Sequence
  Description of Artificial Sequence: Synthetic oligonucleotide
  Sense strand starting at position 3903 of SEQ ID NO: 1882091
ggugcuuucccucaaggau

SEQ ID NO: 2094517 - RNA, 19 nt, Artificial Sequence
  Description of Artificial Sequence: Synthetic oligonucleotide
  Antisense strand to SEQ ID NO: 2094516
auccuugagggaaagcacc

SEQ ID NO: 2094518 - RNA, 19 nt, Artificial Sequence
  Description of Artificial Sequence: Synthetic oligonucleotide
  Sense strand starting at position 3971 of SEQ ID NO: 1882091
auaugaaagcaaugcuuaa

SEQ ID NO: 2094519 - RNA, 19 nt, Artificial Sequence
  Description of Artificial Sequence: Synthetic oligonucleotide
  Antisense strand to SEQ ID NO: 2094518
uuaagcauugcuuucauau

SEQ ID NO: 2094520 - RNA, 19 nt, Artificial Sequence
  Description of Artificial Sequence: Synthetic oligonucleotide
  Sense strand starting at position 28 of SEQ ID NO: 1882092
cccuuaauuguccauggca

SEQ ID NO: 2094521 - RNA, 19 nt, Artificial Sequence
  Description of Artificial Sequence: Synthetic oligonucleotide
  Antisense strand to SEQ ID NO: 2094520
ugccauggacaauuaaggg

SEQ ID NO: 2094522 - RNA, 19 nt, Artificial Sequence
  Description of Artificial Sequence: Synthetic oligonucleotide
  Sense strand starting at position 95 of SEQ ID NO: 1882092
ggugcuuugaucugaaaga

SEQ ID NO: 2094523 - RNA, 19 nt, Artificial Sequence
  Description of Artificial Sequence: Synthetic oligonucleotide
  Antisense strand to SEQ ID NO: 2094522
ucuuucagaucaaagcacc

SEQ ID NO: 2094524 - RNA, 19 nt, Artificial Sequence
  Description of Artificial Sequence: Synthetic oligonucleotide
  Sense strand starting at position 151 of SEQ ID NO: 1882092
cagauauugcagcauugca

SEQ ID NO: 2094525 - RNA, 19 nt, Artificial Sequence
  Description of Artificial Sequence: Synthetic oligonucleotide
  Antisense strand to SEQ ID NO: 2094524
ugcaaugcugcaauaucug

SEQ ID NO: 2094526 - RNA, 19 nt, Artificial Sequence
  Description of Artificial Sequence: Synthetic oligonucleotide
  Sense strand starting at position 169 of SEQ ID NO: 1882092
aguuaaauauuagcagaac

SEQ ID NO: 2094527 - RNA, 19 nt, Artificial Sequence
  Description of Artificial Sequence: Synthetic oligonucleotide
  Antisense strand to SEQ ID NO: 2094526
guucugcuaauauuuaacu

SEQ ID NO: 2094528 - RNA, 19 nt, Artificial Sequence
  Description of Artificial Sequence: Synthetic oligonucleotide
  Sense strand starting at position 330 of SEQ ID NO: 1882092
cuauucguucuauaugaac

SEQ ID NO: 2094529 - RNA, 19 nt, Artificial Sequence
  Description of Artificial Sequence: Synthetic oligonucleotide
  Antisense strand to SEQ ID NO: 2094528
guucauauagaacgaauag

SEQ ID NO: 2094530 - RNA, 19 nt, Artificial Sequence
  Description of Artificial Sequence: Synthetic oligonucleotide
  Sense strand starting at position 411 of SEQ ID NO: 1882092
ccaaguauauaugugagga

SEQ ID NO: 2094531 - RNA, 19 nt, Artificial Sequence
  Description of Artificial Sequence: Synthetic oligonucleotide
  Antisense strand to SEQ ID NO: 2094530
uccucacauauauacuugg

SEQ ID NO: 2094532 - RNA, 19 nt, Artificial Sequence
  Description of Artificial Sequence: Synthetic oligonucleotide
  Sense strand starting at position 412 of SEQ ID NO: 1882092
caaguauauaugugaggag

SEQ ID NO: 2094533 - RNA, 19 nt, Artificial Sequence
  Description of Artificial Sequence: Synthetic oligonucleotide
  Antisense strand to SEQ ID NO: 2094532
cuccucacauauauacuug

SEQ ID NO: 2094534 - RNA, 19 nt, Artificial Sequence
  Description of Artificial Sequence: Synthetic oligonucleotide
  Sense strand starting at position 756 of SEQ ID NO: 1882092
acagacgucuacuuccuaa

SEQ ID NO: 2094535 - RNA, 19 nt, Artificial Sequence
  Description of Artificial Sequence: Synthetic oligonucleotide
  Antisense strand to SEQ ID NO: 2094534
uuaggaaguagacgucugu

SEQ ID NO: 2094536 - RNA, 19 nt, Artificial Sequence
  Description of Artificial Sequence: Synthetic oligonucleotide
  Sense strand starting at position 869 of SEQ ID NO: 1882092
acuagaaucucuguaaagg

SEQ ID NO: 2094537 - RNA, 19 nt, Artificial Sequence
  Description of Artificial Sequence: Synthetic oligonucleotide
  Antisense strand to SEQ ID NO: 2094536
ccuuuacagagauucuagu

SEQ ID NO: 2094538 - RNA, 19 nt, Artificial Sequence
  Description of Artificial Sequence: Synthetic oligonucleotide
  Sense strand starting at position 870 of SEQ ID NO: 1882092
cuagaaucucuguaaaggu

SEQ ID NO: 2094539 - RNA, 19 nt, Artificial Sequence
  Description of Artificial Sequence: Synthetic oligonucleotide
  Antisense strand to SEQ ID NO: 2094538
accuuuacagagauucuag

SEQ ID NO: 2094540 - RNA, 19 nt, Artificial Sequence
  Description of Artificial Sequence: Synthetic oligonucleotide
  Sense strand starting at position 878 of SEQ ID NO: 1882092
ucuguaaagguacaucuua

SEQ ID NO: 2094541 - RNA, 19 nt, Artificial Sequence
  Description of Artificial Sequence: Synthetic oligonucleotide
  Antisense strand to SEQ ID NO: 2094540
uaagauguaccuuuacaga

SEQ ID NO: 2094542 - RNA, 19 nt, Artificial Sequence
  Description of Artificial Sequence: Synthetic oligonucleotide
  Sense strand starting at position 893 of SEQ ID NO: 1882092
cuuagagcuuacccuaaga

SEQ ID NO: 2094543 - RNA, 19 nt, Artificial Sequence
  Description of Artificial Sequence: Synthetic oligonucleotide
  Antisense strand to SEQ ID NO: 2094542
ucuuaggguaagcucuaag

SEQ ID NO: 2094544 - RNA, 19 nt, Artificial Sequence
  Description of Artificial Sequence: Synthetic oligonucleotide
  Sense strand starting at position 965 of SEQ ID NO: 1882092
cucuuacagcguuauuaaa

SEQ ID NO: 2094545 - RNA, 19 nt, Artificial Sequence
  Description of Artificial Sequence: Synthetic oligonucleotide
  Antisense strand to SEQ ID NO: 2094544
uuuaauaacgcuguaagag

SEQ ID NO: 2094546 - RNA, 19 nt, Artificial Sequence
  Description of Artificial Sequence: Synthetic oligonucleotide
  Sense strand starting at position 1106 of SEQ ID NO: 1882092
acuugaggauuacauuuga

SEQ ID NO: 2094547 - RNA, 19 nt, Artificial Sequence
  Description of Artificial Sequence: Synthetic oligonucleotide
  Antisense strand to SEQ ID NO: 2094546
ucaaauguaauccucaagu

SEQ ID NO: 2094548 - RNA, 19 nt, Artificial Sequence
  Description of Artificial Sequence: Synthetic oligonucleotide
  Sense strand starting at position 1111 of SEQ ID NO: 1882092
aggauuacauuugacccaa

SEQ ID NO: 2094549 - RNA, 19 nt, Artificial Sequence
  Description of Artificial Sequence: Synthetic oligonucleotide
  Antisense strand to SEQ ID NO: 2094548
uugggucaaauguaauccu

SEQ ID NO: 2094550 - RNA, 19 nt, Artificial Sequence
  Description of Artificial Sequence: Synthetic oligonucleotide
  Sense strand starting at position 1201 of SEQ ID NO: 1882092
ugaccauugccugaaucca

SEQ ID NO: 2094551 - RNA, 19 nt, Artificial Sequence
  Description of Artificial Sequence: Synthetic oligonucleotide
  Antisense strand to SEQ ID NO: 2094550
uggauucaggcaaugguca

SEQ ID NO: 2094552 - RNA, 19 nt, Artificial Sequence
  Description of Artificial Sequence: Synthetic oligonucleotide
  Sense strand starting at position 1314 of SEQ ID NO: 1882092
gaagguuaauaaccgaacu

SEQ ID NO: 2094553 - RNA, 19 nt, Artificial Sequence
  Description of Artificial Sequence: Synthetic oligonucleotide
  Antisense strand to SEQ ID NO: 2094552
aguucgguuauuaaccuuc

SEQ ID NO: 2094554 - RNA, 19 nt, Artificial Sequence
  Description of Artificial Sequence: Synthetic oligonucleotide
  Sense strand starting at position 2023 of SEQ ID NO: 1882092
cagaaaucucagcagcagu

SEQ ID NO: 2094555 - RNA, 19 nt, Artificial Sequence
  Description of Artificial Sequence: Synthetic oligonucleotide
  Antisense strand to SEQ ID NO: 2094554
acugcugcugagauuucug

SEQ ID NO: 2094556 - RNA, 19 nt, Artificial Sequence
  Description of Artificial Sequence: Synthetic oligonucleotide
  Sense strand starting at position 2108 of SEQ ID NO: 1882092
uaauaagagugccucuuga

SEQ ID NO: 2094557 - RNA, 19 nt, Artificial Sequence
  Description of Artificial Sequence: Synthetic oligonucleotide
  Antisense strand to SEQ ID NO: 2094556
ucaagaggcacucuuauua

SEQ ID NO: 2094558 - RNA, 19 nt, Artificial Sequence
  Description of Artificial Sequence: Synthetic oligonucleotide
  Sense strand starting at position 2248 of SEQ ID NO: 1882092
auuaaugguuguucuuaga

SEQ ID NO: 2094559 - RNA, 19 nt, Artificial Sequence
  Description of Artificial Sequence: Synthetic oligonucleotide
  Antisense strand to SEQ ID NO: 2094558
ucuaagaacaaccauuaau

SEQ ID NO: 2094560 - RNA, 19 nt, Artificial Sequence
  Description of Artificial Sequence: Synthetic oligonucleotide
  Sense strand starting at position 2566 of SEQ ID NO: 1882092
caaguuucugagcaaguau

SEQ ID NO: 2094561 - RNA, 19 nt, Artificial Sequence
  Description of Artificial Sequence: Synthetic oligonucleotide
  Antisense strand to SEQ ID NO: 2094560
auacuugcucagaaacuug

SEQ ID NO: 2094562 - RNA, 19 nt, Artificial Sequence
  Description of Artificial Sequence: Synthetic oligonucleotide
  Sense strand starting at position 2638 of SEQ ID NO: 1882092
cugcuuauagacuauagau

SEQ ID NO: 2094563 - RNA, 19 nt, Artificial Sequence
  Description of Artificial Sequence: Synthetic oligonucleotide
  Antisense strand to SEQ ID NO: 2094562
aucuauagucuauaagcag

SEQ ID NO: 2094564 - RNA, 19 nt, Artificial Sequence
  Description of Artificial Sequence: Synthetic oligonucleotide
  Sense strand starting at position 2778 of SEQ ID NO: 1882092
uauagugaguguuugaaga

SEQ ID NO: 2094565 - RNA, 19 nt, Artificial Sequence
  Description of Artificial Sequence: Synthetic oligonucleotide
  Antisense strand to SEQ ID NO: 2094564
ucuucaaacacucacuaua

SEQ ID NO: 2094566 - RNA, 19 nt, Artificial Sequence
  Description of Artificial Sequence: Synthetic oligonucleotide
  Sense strand starting at position 2811 of SEQ ID NO: 1882092
guuguagaagauugaguau

SEQ ID NO: 2094567 - RNA, 19 nt, Artificial Sequence
  Description of Artificial Sequence: Synthetic oligonucleotide
  Antisense strand to SEQ ID NO: 2094566
auacucaaucuucuacaac

SEQ ID NO: 2094568 - RNA, 19 nt, Artificial Sequence
  Description of Artificial Sequence: Synthetic oligonucleotide
  Sense strand starting at position 2814 of SEQ ID NO: 1882092
guagaagauugaguauggu

SEQ ID NO: 2094569 - RNA, 19 nt, Artificial Sequence
  Description of Artificial Sequence: Synthetic oligonucleotide
  Antisense strand to SEQ ID NO: 2094568
accauacucaaucuucuac

SEQ ID NO: 2094570 - RNA, 19 nt, Artificial Sequence
  Description of Artificial Sequence: Synthetic oligonucleotide
  Sense strand starting at position 2817 of SEQ ID NO: 1882092
gaagauugaguaugguuga

SEQ ID NO: 2094571 - RNA, 19 nt, Artificial Sequence
  Description of Artificial Sequence: Synthetic oligonucleotide
  Antisense strand to SEQ ID NO: 2094570
ucaaccauacucaaucuuc

SEQ ID NO: 2094572 - RNA, 19 nt, Artificial Sequence
  Description of Artificial Sequence: Synthetic oligonucleotide
  Sense strand starting at position 2838 of SEQ ID NO: 1882092
auauuuguggcauggucua

SEQ ID NO: 2094573 - RNA, 19 nt, Artificial Sequence
  Description of Artificial Sequence: Synthetic oligonucleotide
  Antisense strand to SEQ ID NO: 2094572
uagaccaugccacaaauau

SEQ ID NO: 2094574 - RNA, 19 nt, Artificial Sequence
  Description of Artificial Sequence: Synthetic oligonucleotide
  Sense strand starting at position 3090 of SEQ ID NO: 1882092
aggagugggauguguacua

SEQ ID NO: 2094575 - RNA, 19 nt, Artificial Sequence
  Description of Artificial Sequence: Synthetic oligonucleotide
  Antisense strand to SEQ ID NO: 2094574
uaguacacaucccacuccu

SEQ ID NO: 2094576 - RNA, 19 nt, Artificial Sequence
  Description of Artificial Sequence: Synthetic oligonucleotide
  Sense strand starting at position 3252 of SEQ ID NO: 1882092
aguagcaaacuuuggaaga

SEQ ID NO: 2094577 - RNA, 19 nt, Artificial Sequence
  Description of Artificial Sequence: Synthetic oligonucleotide
  Antisense strand to SEQ ID NO: 2094576
ucuuccaaaguuugcuacu

SEQ ID NO: 2094578 - RNA, 19 nt, Artificial Sequence
  Description of Artificial Sequence: Synthetic oligonucleotide
  Sense strand starting at position 3333 of SEQ ID NO: 1882092
acagguuugguggauauua

SEQ ID NO: 2094579 - RNA, 19 nt, Artificial Sequence
  Description of Artificial Sequence: Synthetic oligonucleotide
  Antisense strand to SEQ ID NO: 2094578
uaauauccaccaaaccugu

SEQ ID NO: 2094580 - RNA, 19 nt, Artificial Sequence
  Description of Artificial Sequence: Synthetic oligonucleotide
  Sense strand starting at position 3364 of SEQ ID NO: 1882092
aguuaucugugaucaugau

SEQ ID NO: 2094581 - RNA, 19 nt, Artificial Sequence
  Description of Artificial Sequence: Synthetic oligonucleotide
  Antisense strand to SEQ ID NO: 2094580
aucaugaucacagauaacu

SEQ ID NO: 2094582 - RNA, 19 nt, Artificial Sequence
  Description of Artificial Sequence: Synthetic oligonucleotide
  Sense strand starting at position 3365 of SEQ ID NO: 1882092
guuaucugugaucaugaug

SEQ ID NO: 2094583 - RNA, 19 nt, Artificial Sequence
  Description of Artificial Sequence: Synthetic oligonucleotide
  Antisense strand to SEQ ID NO: 2094582
caucaugaucacagauaac

SEQ ID NO: 2094584 - RNA, 19 nt, Artificial Sequence
  Description of Artificial Sequence: Synthetic oligonucleotide
  Sense strand starting at position 3671 of SEQ ID NO: 1882092
aggugaauauagccaccua

SEQ ID NO: 2094585 - RNA, 19 nt, Artificial Sequence
  Description of Artificial Sequence: Synthetic oligonucleotide
  Antisense strand to SEQ ID NO: 2094584
uagguggcuauauucaccu

SEQ ID NO: 2094586 - RNA, 19 nt, Artificial Sequence
  Description of Artificial Sequence: Synthetic oligonucleotide
  Sense strand starting at position 3683 of SEQ ID NO: 1882092
ccaccuauccugcaggauu

SEQ ID NO: 2094587 - RNA, 19 nt, Artificial Sequence
  Description of Artificial Sequence: Synthetic oligonucleotide
  Antisense strand to SEQ ID NO: 2094586
aauccugcaggauaggugg

SEQ ID NO: 2094588 - RNA, 19 nt, Artificial Sequence
  Description of Artificial Sequence: Synthetic oligonucleotide
  Sense strand starting at position 3685 of SEQ ID NO: 1882092
accuauccugcaggauuau

SEQ ID NO: 2094589 - RNA, 19 nt, Artificial Sequence
  Description of Artificial Sequence: Synthetic oligonucleotide
  Antisense strand to SEQ ID NO: 2094588
auaauccugcaggauaggu

SEQ ID NO: 2094590 - RNA, 19 nt, Artificial Sequence
  Description of Artificial Sequence: Synthetic oligonucleotide
  Sense strand starting at position 3686 of SEQ ID NO: 1882092
ccuauccugcaggauuauu

SEQ ID NO: 2094591 - RNA, 19 nt, Artificial Sequence
  Description of Artificial Sequence: Synthetic oligonucleotide
  Antisense strand to SEQ ID NO: 2094590
aauaauccugcaggauagg

SEQ ID NO: 2094592 - RNA, 19 nt, Artificial Sequence
  Description of Artificial Sequence: Synthetic oligonucleotide
  Sense strand starting at position 3768 of SEQ ID NO: 1882092
uuuagaauuucgcuuagua

SEQ ID NO: 2094593 - RNA, 19 nt, Artificial Sequence
  Description of Artificial Sequence: Synthetic oligonucleotide
  Antisense strand to SEQ ID NO: 2094592
uacuaagcgaaauucuaaa

SEQ ID NO: 2094594 - RNA, 19 nt, Artificial Sequence
  Description of Artificial Sequence: Synthetic oligonucleotide
  Sense strand starting at position 3775 of SEQ ID NO: 1882092
uuucgcuuaguagaaacau

SEQ ID NO: 2094595 - RNA, 19 nt, Artificial Sequence
  Description of Artificial Sequence: Synthetic oligonucleotide
  Antisense strand to SEQ ID NO: 2094594
auguuucuacuaagcgaaa

SEQ ID NO: 2094596 - RNA, 19 nt, Artificial Sequence
  Description of Artificial Sequence: Synthetic oligonucleotide
  Sense strand starting at position 3843 of SEQ ID NO: 1882092
cuguaaugagugugggaaa

SEQ ID NO: 2094597 - RNA, 19 nt, Artificial Sequence
  Description of Artificial Sequence: Synthetic oligonucleotide
  Antisense strand to SEQ ID NO: 2094596
uuucccacacucauuacag

SEQ ID NO: 2094598 - RNA, 19 nt, Artificial Sequence
  Description of Artificial Sequence: Synthetic oligonucleotide
  Sense strand starting at position 3908 of SEQ ID NO: 1882092
ggauguuugguguaaaucu

SEQ ID NO: 2094599 - RNA, 19 nt, Artificial Sequence
  Description of Artificial Sequence: Synthetic oligonucleotide
  Antisense strand to SEQ ID NO: 2094598
agauuuacaccaaacaucc

SEQ ID NO: 2094600 - RNA, 19 nt, Artificial Sequence
  Description of Artificial Sequence: Synthetic oligonucleotide
  Sense strand starting at position 603 of SEQ ID NO: 1882094
gccaucgaucgcguuacau

SEQ ID NO: 2094601 - RNA, 19 nt, Artificial Sequence
  Description of Artificial Sequence: Synthetic oligonucleotide
  Antisense strand to SEQ ID NO: 2094600
auguaacgcgaucgauggc

SEQ ID NO: 2094602 - RNA, 19 nt, Artificial Sequence
  Description of Artificial Sequence: Synthetic oligonucleotide
  Sense strand starting at position 1006 of SEQ ID NO: 1882094
gaagaaaguucuccucguc

SEQ ID NO: 2094603 - RNA, 19 nt, Artificial Sequence
  Description of Artificial Sequence: Synthetic oligonucleotide
  Antisense strand to SEQ ID NO: 2094602
gacgaggagaacuuucuuc

SEQ ID NO: 2094604 - RNA, 19 nt, Artificial Sequence
  Description of Artificial Sequence: Synthetic oligonucleotide
  Sense strand starting at position 1155 of SEQ ID NO: 1882094
gcaggauuuggccgagucu

SEQ ID NO: 2094605 - RNA, 19 nt, Artificial Sequence
  Description of Artificial Sequence: Synthetic oligonucleotide
  Antisense strand to SEQ ID NO: 2094604
agacucggccaaauccugc

SEQ ID NO: 2094606 - RNA, 19 nt, Artificial Sequence
  Description of Artificial Sequence: Synthetic oligonucleotide
  Sense strand starting at position 1487 of SEQ ID NO: 1882094
cgcguuugcgcguuuauuu

SEQ ID NO: 2094607 - RNA, 19 nt, Artificial Sequence
  Description of Artificial Sequence: Synthetic oligonucleotide
  Antisense strand to SEQ ID NO: 2094606
aaauaaacgcgcaaacgcg

SEQ ID NO: 2094608 - RNA, 19 nt, Artificial Sequence
  Description of Artificial Sequence: Synthetic oligonucleotide
  Sense strand starting at position 1488 of SEQ ID NO: 1882094
gcguuugcgcguuuauuug

SEQ ID NO: 2094609 - RNA, 19 nt, Artificial Sequence
  Description of Artificial Sequence: Synthetic oligonucleotide
  Antisense strand to SEQ ID NO: 2094608
caaauaaacgcgcaaacgc

SEQ ID NO: 2094610 - RNA, 19 nt, Artificial Sequence
  Description of Artificial Sequence: Synthetic oligonucleotide
  Sense strand starting at position 1596 of SEQ ID NO: 1882094
auugacaguucuccauuau

SEQ ID NO: 2094611 - RNA, 19 nt, Artificial Sequence
  Description of Artificial Sequence: Synthetic oligonucleotide
  Antisense strand to SEQ ID NO: 2094610
auaauggagaacugucaau

SEQ ID NO: 2094612 - RNA, 19 nt, Artificial Sequence
  Description of Artificial Sequence: Synthetic oligonucleotide
  Sense strand starting at position 1600 of SEQ ID NO: 1882094
acaguucuccauuauucga

SEQ ID NO: 2094613 - RNA, 19 nt, Artificial Sequence
  Description of Artificial Sequence: Synthetic oligonucleotide
  Antisense strand to SEQ ID NO: 2094612
ucgaauaauggagaacugu

SEQ ID NO: 2094614 - RNA, 19 nt, Artificial Sequence
  Description of Artificial Sequence: Synthetic oligonucleotide
  Sense strand starting at position 1775 of SEQ ID NO: 1882094
ccuggugagacuuaaagug

SEQ ID NO: 2094615 - RNA, 19 nt, Artificial Sequence
  Description of Artificial Sequence: Synthetic oligonucleotide
  Antisense strand to SEQ ID NO: 2094614
cacuuuaagucucaccagg

SEQ ID NO: 2094616 - RNA, 19 nt, Artificial Sequence
  Description of Artificial Sequence: Synthetic oligonucleotide
  Sense strand starting at position 1866 of SEQ ID NO: 1882094
ggcguguuggcgcuaggaa

SEQ ID NO: 2094617 - RNA, 19 nt, Artificial Sequence
  Description of Artificial Sequence: Synthetic oligonucleotide
  Antisense strand to SEQ ID NO: 2094616
uuccuagcgccaacacgcc

SEQ ID NO: 2094618 - RNA, 19 nt, Artificial Sequence
  Description of Artificial Sequence: Synthetic oligonucleotide
  Sense strand starting at position 1868 of SEQ ID NO: 1882094
cguguuggcgcuaggaaug

SEQ ID NO: 2094619 - RNA, 19 nt, Artificial Sequence
  Description of Artificial Sequence: Synthetic oligonucleotide
  Antisense strand to SEQ ID NO: 2094618
cauuccuagcgccaacacg

SEQ ID NO: 2094620 - RNA, 19 nt, Artificial Sequence
  Description of Artificial Sequence: Synthetic oligonucleotide
  Sense strand starting at position 1878 of SEQ ID NO: 1882094
cuaggaaugcucgagcuga

SEQ ID NO: 2094621 - RNA, 19 nt, Artificial Sequence
  Description of Artificial Sequence: Synthetic oligonucleotide
  Antisense strand to SEQ ID NO: 2094620
ucagcucgagcauuccuag

SEQ ID NO: 2094622 - RNA, 19 nt, Artificial Sequence
  Description of Artificial Sequence: Synthetic oligonucleotide
  Sense strand starting at position 1882 of SEQ ID NO: 1882094
gaaugcucgagcugagaca

SEQ ID NO: 2094623 - RNA, 19 nt, Artificial Sequence
  Description of Artificial Sequence: Synthetic oligonucleotide
  Antisense strand to SEQ ID NO: 2094622
ugucucagcucgagcauuc

SEQ ID NO: 2094624 - RNA, 19 nt, Artificial Sequence
  Description of Artificial Sequence: Synthetic oligonucleotide
  Sense strand starting at position 2045 of SEQ ID NO: 1882094
cgaguaugcgauuggagaa

SEQ ID NO: 2094625 - RNA, 19 nt, Artificial Sequence
  Description of Artificial Sequence: Synthetic oligonucleotide
  Antisense strand to SEQ ID NO: 2094624
uucuccaaucgcauacucg

SEQ ID NO: 2094626 - RNA, 19 nt, Artificial Sequence
  Description of Artificial Sequence: Synthetic oligonucleotide
  Sense strand starting at position 2046 of SEQ ID NO: 1882094
gaguaugcgauuggagaau

SEQ ID NO: 2094627 - RNA, 19 nt, Artificial Sequence
  Description of Artificial Sequence: Synthetic oligonucleotide
  Antisense strand to SEQ ID NO: 2094626
auucuccaaucgcauacuc

SEQ ID NO: 2094628 - RNA, 19 nt, Artificial Sequence
  Description of Artificial Sequence: Synthetic oligonucleotide
  Sense strand starting at position 2052 of SEQ ID NO: 1882094
gcgauuggagaauauguaa

SEQ ID NO: 2094629 - RNA, 19 nt, Artificial Sequence
  Description of Artificial Sequence: Synthetic oligonucleotide
  Antisense strand to SEQ ID NO: 2094628
uuacauauucuccaaucgc

SEQ ID NO: 2094630 - RNA, 19 nt, Artificial Sequence
  Description of Artificial Sequence: Synthetic oligonucleotide
  Sense strand starting at position 2138 of SEQ ID NO: 1882094
caaagugcugucuucguuu

SEQ ID NO: 2094631 - RNA, 19 nt, Artificial Sequence
  Description of Artificial Sequence: Synthetic oligonucleotide
  Antisense strand to SEQ ID NO: 2094630
aaacgaagacagcacuuug

SEQ ID NO: 2094632 - RNA, 19 nt, Artificial Sequence
  Description of Artificial Sequence: Synthetic oligonucleotide
  Sense strand starting at position 2842 of SEQ ID NO: 1882094
gacugacuuggccacacua

SEQ ID NO: 2094633 - RNA, 19 nt, Artificial Sequence
  Description of Artificial Sequence: Synthetic oligonucleotide
  Antisense strand to SEQ ID NO: 2094632
uaguguggccaagucaguc

SEQ ID NO: 2094634 - RNA, 19 nt, Artificial Sequence
  Description of Artificial Sequence: Synthetic oligonucleotide
  Sense strand starting at position 2844 of SEQ ID NO: 1882094
cugacuuggccacacuaau

SEQ ID NO: 2094635 - RNA, 19 nt, Artificial Sequence
  Description of Artificial Sequence: Synthetic oligonucleotide
  Antisense strand to SEQ ID NO: 2094634
auuaguguggccaagucag

SEQ ID NO: 2094636 - RNA, 19 nt, Artificial Sequence
  Description of Artificial Sequence: Synthetic oligonucleotide
  Sense strand starting at position 2917 of SEQ ID NO: 1882094
ugaagcauuguuggaguuu

SEQ ID NO: 2094637 - RNA, 19 nt, Artificial Sequence
  Description of Artificial Sequence: Synthetic oligonucleotide
  Antisense strand to SEQ ID NO: 2094636
aaacuccaacaaugcuuca

SEQ ID NO: 2094638 - RNA, 19 nt, Artificial Sequence
  Description of Artificial Sequence: Synthetic oligonucleotide
  Sense strand starting at position 2923 of SEQ ID NO: 1882094
auuguuggaguuuggaaca

SEQ ID NO: 2094639 - RNA, 19 nt, Artificial Sequence
  Description of Artificial Sequence: Synthetic oligonucleotide
  Antisense strand to SEQ ID NO: 2094638
uguuccaaacuccaacaau

SEQ ID NO: 2094640 - RNA, 19 nt, Artificial Sequence
  Description of Artificial Sequence: Synthetic oligonucleotide
  Sense strand starting at position 2934 of SEQ ID NO: 1882094
uuggaacagccaggugaua

SEQ ID NO: 2094641 - RNA, 19 nt, Artificial Sequence
  Description of Artificial Sequence: Synthetic oligonucleotide
  Antisense strand to SEQ ID NO: 2094640
uaucaccuggcuguuccaa

SEQ ID NO: 2094642 - RNA, 19 nt, Artificial Sequence
  Description of Artificial Sequence: Synthetic oligonucleotide
  Sense strand starting at position 2936 of SEQ ID NO: 1882094
ggaacagccaggugauaaa

SEQ ID NO: 2094643 - RNA, 19 nt, Artificial Sequence
  Description of Artificial Sequence: Synthetic oligonucleotide
  Antisense strand to SEQ ID NO: 2094642
uuuaucaccuggcuguucc

SEQ ID NO: 2094644 - RNA, 19 nt, Artificial Sequence
  Description of Artificial Sequence: Synthetic oligonucleotide
  Sense strand starting at position 3063 of SEQ ID NO: 1882094
cugcaaauuccaggagugu

SEQ ID NO: 2094645 - RNA, 19 nt, Artificial Sequence
  Description of Artificial Sequence: Synthetic oligonucleotide
  Antisense strand to SEQ ID NO: 2094644
acacuccuggaauuugcag

SEQ ID NO: 2094646 - RNA, 19 nt, Artificial Sequence
  Description of Artificial Sequence: Synthetic oligonucleotide
  Sense strand starting at position 3080 of SEQ ID NO: 1882094
gugcuuugucaucauuaaa

SEQ ID NO: 2094647 - RNA, 19 nt, Artificial Sequence
  Description of Artificial Sequence: Synthetic oligonucleotide
  Antisense strand to SEQ ID NO: 2094646
uuuaaugaugacaaagcac

SEQ ID NO: 2094648 - RNA, 19 nt, Artificial Sequence
  Description of Artificial Sequence: Synthetic oligonucleotide
  Sense strand starting at position 3109 of SEQ ID NO: 1882094
caagguauacuuuggauua

SEQ ID NO: 2094649 - RNA, 19 nt, Artificial Sequence
  Description of Artificial Sequence: Synthetic oligonucleotide
  Antisense strand to SEQ ID NO: 2094648
uaauccaaaguauaccuug

SEQ ID NO: 2094650 - RNA, 19 nt, Artificial Sequence
  Description of Artificial Sequence: Synthetic oligonucleotide
  Sense strand starting at position 3135 of SEQ ID NO: 1882094
gggagauccuacccuguuu

SEQ ID NO: 2094651 - RNA, 19 nt, Artificial Sequence
  Description of Artificial Sequence: Synthetic oligonucleotide
  Antisense strand to SEQ ID NO: 2094650
aaacaggguaggaucuccc

SEQ ID NO: 2094652 - RNA, 19 nt, Artificial Sequence
  Description of Artificial Sequence: Synthetic oligonucleotide
  Sense strand starting at position 3150 of SEQ ID NO: 1882094
guuucuacuuguuucuaaa

SEQ ID NO: 2094653 - RNA, 19 nt, Artificial Sequence
  Description of Artificial Sequence: Synthetic oligonucleotide
  Antisense strand to SEQ ID NO: 2094652
uuuagaaacaaguagaaac

SEQ ID NO: 2094654 - RNA, 19 nt, Artificial Sequence
  Description of Artificial Sequence: Synthetic oligonucleotide
  Sense strand starting at position 3196 of SEQ ID NO: 1882094
cuuggauugugcuuauaug

SEQ ID NO: 2094655 - RNA, 19 nt, Artificial Sequence
  Description of Artificial Sequence: Synthetic oligonucleotide
  Antisense strand to SEQ ID NO: 2094654
cauauaagcacaauccaag

SEQ ID NO: 2094656 - RNA, 19 nt, Artificial Sequence
  Description of Artificial Sequence: Synthetic oligonucleotide
  Sense strand starting at position 3197 of SEQ ID NO: 1882094
uuggauugugcuuauaugu

SEQ ID NO: 2094657 - RNA, 19 nt, Artificial Sequence
  Description of Artificial Sequence: Synthetic oligonucleotide
  Antisense strand to SEQ ID NO: 2094656
acauauaagcacaauccaa

SEQ ID NO: 2094658 - RNA, 19 nt, Artificial Sequence
  Description of Artificial Sequence: Synthetic oligonucleotide
  Sense strand starting at position 3203 of SEQ ID NO: 1882094
ugugcuuauaugugagaga

SEQ ID NO: 2094659 - RNA, 19 nt, Artificial Sequence
  Description of Artificial Sequence: Synthetic oligonucleotide
  Antisense strand to SEQ ID NO: 2094658
ucucucacauauaagcaca

SEQ ID NO: 2094660 - RNA, 19 nt, Artificial Sequence
  Description of Artificial Sequence: Synthetic oligonucleotide
  Sense strand starting at position 3531 of SEQ ID NO: 1882094
gggcgaucucaauguaaau

SEQ ID NO: 2094661 - RNA, 19 nt, Artificial Sequence
  Description of Artificial Sequence: Synthetic oligonucleotide
  Antisense strand to SEQ ID NO: 2094660
auuuacauugagaucgccc

SEQ ID NO: 2094662 - RNA, 19 nt, Artificial Sequence
  Description of Artificial Sequence: Synthetic oligonucleotide
  Sense strand starting at position 3533 of SEQ ID NO: 1882094
gcgaucucaauguaaauug

SEQ ID NO: 2094663 - RNA, 19 nt, Artificial Sequence
  Description of Artificial Sequence: Synthetic oligonucleotide
  Antisense strand to SEQ ID NO: 2094662
caauuuacauugagaucgc

SEQ ID NO: 2094664 - RNA, 19 nt, Artificial Sequence
  Description of Artificial Sequence: Synthetic oligonucleotide
  Sense strand starting at position 3542 of SEQ ID NO: 1882094
auguaaauugcgcuuguca

SEQ ID NO: 2094665 - RNA, 19 nt, Artificial Sequence
  Description of Artificial Sequence: Synthetic oligonucleotide
  Antisense strand to SEQ ID NO: 2094664
ugacaagcgcaauuuacau

SEQ ID NO: 2094666 - RNA, 19 nt, Artificial Sequence
  Description of Artificial Sequence: Synthetic oligonucleotide
  Sense strand starting at position 3543 of SEQ ID NO: 1882094
uguaaauugcgcuugucag

SEQ ID NO: 2094667 - RNA, 19 nt, Artificial Sequence
  Description of Artificial Sequence: Synthetic oligonucleotide
  Antisense strand to SEQ ID NO: 2094666
cugacaagcgcaauuuaca

SEQ ID NO: 2094668 - RNA, 19 nt, Artificial Sequence
  Description of Artificial Sequence: Synthetic oligonucleotide
  Sense strand starting at position 3758 of SEQ ID NO: 1882094
cuuugauuaucaguugcca

SEQ ID NO: 2094669 - RNA, 19 nt, Artificial Sequence
  Description of Artificial Sequence: Synthetic oligonucleotide
  Antisense strand to SEQ ID NO: 2094668
uggcaacugauaaucaaag

SEQ ID NO: 2094670 - RNA, 19 nt, Artificial Sequence
  Description of Artificial Sequence: Synthetic oligonucleotide
  Sense strand starting at position 3798 of SEQ ID NO: 1882094
ugacacgagcuccauauaa

SEQ ID NO: 2094671 - RNA, 19 nt, Artificial Sequence
  Description of Artificial Sequence: Synthetic oligonucleotide
  Antisense strand to SEQ ID NO: 2094670
uuauauggagcucguguca

SEQ ID NO: 2094672 - RNA, 19 nt, Artificial Sequence
  Description of Artificial Sequence: Synthetic oligonucleotide
  Sense strand starting at position 3817 of SEQ ID NO: 1882094
ggcagcgaucuccauagaa

SEQ ID NO: 2094673 - RNA, 19 nt, Artificial Sequence
  Description of Artificial Sequence: Synthetic oligonucleotide
  Antisense strand to SEQ ID NO: 2094672
uucuauggagaucgcugcc

SEQ ID NO: 2094674 - RNA, 19 nt, Artificial Sequence
  Description of Artificial Sequence: Synthetic oligonucleotide
  Sense strand starting at position 3821 of SEQ ID NO: 1882094
gcgaucuccauagaaacgu

SEQ ID NO: 2094675 - RNA, 19 nt, Artificial Sequence
  Description of Artificial Sequence: Synthetic oligonucleotide
  Antisense strand to SEQ ID NO: 2094674
acguuucuauggagaucgc

SEQ ID NO: 2094676 - RNA, 19 nt, Artificial Sequence
  Description of Artificial Sequence: Synthetic oligonucleotide
  Sense strand starting at position 3914 of SEQ ID NO: 1882094
cugcgaguccucccguuua

SEQ ID NO: 2094677 - RNA, 19 nt, Artificial Sequence
  Description of Artificial Sequence: Synthetic oligonucleotide
  Antisense strand to SEQ ID NO: 2094676
uaaacgggaggacucgcag

SEQ ID NO: 2094678 - RNA, 19 nt, Artificial Sequence
  Description of Artificial Sequence: Synthetic oligonucleotide
  Sense strand starting at position 3916 of SEQ ID NO: 1882094
gcgaguccucccguuuaaa

SEQ ID NO: 2094679 - RNA, 19 nt, Artificial Sequence
  Description of Artificial Sequence: Synthetic oligonucleotide
  Antisense strand to SEQ ID NO: 2094678
uuuaaacgggaggacucgc

SEQ ID NO: 2094680 - RNA, 19 nt, Artificial Sequence
  Description of Artificial Sequence: Synthetic oligonucleotide
  Sense strand starting at position 134 of SEQ ID NO: 1882093
uuucccugacuuugaagaa

SEQ ID NO: 2094681 - RNA, 19 nt, Artificial Sequence
  Description of Artificial Sequence: Synthetic oligonucleotide
  Antisense strand to SEQ ID NO: 2094680
uucuucaaagucagggaaa

SEQ ID NO: 2094682 - RNA, 19 nt, Artificial Sequence
  Description of Artificial Sequence: Synthetic oligonucleotide
  Sense strand starting at position 188 of SEQ ID NO: 1882093
aaacuaugcuaauugguga

SEQ ID NO: 2094683 - RNA, 19 nt, Artificial Sequence
  Description of Artificial Sequence: Synthetic oligonucleotide
  Antisense strand to SEQ ID NO: 2094682
ucaccaauuagcauaguuu

SEQ ID NO: 2094684 - RNA, 19 nt, Artificial Sequence
  Description of Artificial Sequence: Synthetic oligonucleotide
  Sense strand starting at position 193 of SEQ ID NO: 1882093
augcuaauuggugaaccua

SEQ ID NO: 2094685 - RNA, 19 nt, Artificial Sequence
  Description of Artificial Sequence: Synthetic oligonucleotide
  Antisense strand to SEQ ID NO: 2094684
uagguucaccaauuagcau

SEQ ID NO: 2094686 - RNA, 19 nt, Artificial Sequence
  Description of Artificial Sequence: Synthetic oligonucleotide
  Sense strand starting at position 230 of SEQ ID NO: 1882093
gccucuaaacauggagaga

SEQ ID NO: 2094687 - RNA, 19 nt, Artificial Sequence
  Description of Artificial Sequence: Synthetic oligonucleotide
  Antisense strand to SEQ ID NO: 2094686
ucucuccauguuuagaggc

SEQ ID NO: 2094688 - RNA, 19 nt, Artificial Sequence
  Description of Artificial Sequence: Synthetic oligonucleotide
  Sense strand starting at position 261 of SEQ ID NO: 1882093
gagucagucuguuccugau

SEQ ID NO: 2094689 - RNA, 19 nt, Artificial Sequence
  Description of Artificial Sequence: Synthetic oligonucleotide
  Antisense strand to SEQ ID NO: 2094688
aucaggaacagacugacuc

SEQ ID NO: 2094690 - RNA, 19 nt, Artificial Sequence
  Description of Artificial Sequence: Synthetic oligonucleotide
  Sense strand starting at position 263 of SEQ ID NO: 1882093
gucagucuguuccugauaa

SEQ ID NO: 2094691 - RNA, 19 nt, Artificial Sequence
  Description of Artificial Sequence: Synthetic oligonucleotide
  Antisense strand to SEQ ID NO: 2094690
uuaucaggaacagacugac

SEQ ID NO: 2094692 - RNA, 19 nt, Artificial Sequence
  Description of Artificial Sequence: Synthetic oligonucleotide
  Sense strand starting at position 359 of SEQ ID NO: 1882093
uguuauuaccucuaagaug

SEQ ID NO: 2094693 - RNA, 19 nt, Artificial Sequence
  Description of Artificial Sequence: Synthetic oligonucleotide
  Antisense strand to SEQ ID NO: 2094692
caucuuagagguaauaaca

SEQ ID NO: 2094694 - RNA, 19 nt, Artificial Sequence
  Description of Artificial Sequence: Synthetic oligonucleotide
  Sense strand starting at position 418 of SEQ ID NO: 1882093
ucauaaauuggcugagcuu

SEQ ID NO: 2094695 - RNA, 19 nt, Artificial Sequence
  Description of Artificial Sequence: Synthetic oligonucleotide
  Antisense strand to SEQ ID NO: 2094694
aagcucagccaauuuauga

SEQ ID NO: 2094696 - RNA, 19 nt, Artificial Sequence
  Description of Artificial Sequence: Synthetic oligonucleotide
  Sense strand starting at position 432 of SEQ ID NO: 1882093
agcuuaggccagugaaucu

SEQ ID NO: 2094697 - RNA, 19 nt, Artificial Sequence
  Description of Artificial Sequence: Synthetic oligonucleotide
  Antisense strand to SEQ ID NO: 2094696
agauucacuggccuaagcu

SEQ ID NO: 2094698 - RNA, 19 nt, Artificial Sequence
  Description of Artificial Sequence: Synthetic oligonucleotide
  Sense strand starting at position 501 of SEQ ID NO: 1882093
uuaauuagaugcuuucugu

SEQ ID NO: 2094699 - RNA, 19 nt, Artificial Sequence
  Description of Artificial Sequence: Synthetic oligonucleotide
  Antisense strand to SEQ ID NO: 2094698
acagaaagcaucuaauuaa

SEQ ID NO: 2094700 - RNA, 19 nt, Artificial Sequence
  Description of Artificial Sequence: Synthetic oligonucleotide
  Sense strand starting at position 504 of SEQ ID NO: 1882093
auuagaugcuuucuguuaa

SEQ ID NO: 2094701 - RNA, 19 nt, Artificial Sequence
  Description of Artificial Sequence: Synthetic oligonucleotide
  Antisense strand to SEQ ID NO: 2094700
uuaacagaaagcaucuaau

SEQ ID NO: 2094702 - RNA, 19 nt, Artificial Sequence
  Description of Artificial Sequence: Synthetic oligonucleotide
  Sense strand starting at position 514 of SEQ ID NO: 1882093
uucuguuaacaaugucacu

SEQ ID NO: 2094703 - RNA, 19 nt, Artificial Sequence
  Description of Artificial Sequence: Synthetic oligonucleotide
  Antisense strand to SEQ ID NO: 2094702
agugacauuguuaacagaa

SEQ ID NO: 2094704 - RNA, 19 nt, Artificial Sequence
  Description of Artificial Sequence: Synthetic oligonucleotide
  Sense strand starting at position 613 of SEQ ID NO: 1882093
aacagauuggcuggaggau

SEQ ID NO: 2094705 - RNA, 19 nt, Artificial Sequence
  Description of Artificial Sequence: Synthetic oligonucleotide
  Antisense strand to SEQ ID NO: 2094704
auccuccagccaaucuguu

SEQ ID NO: 2094706 - RNA, 19 nt, Artificial Sequence
  Description of Artificial Sequence: Synthetic oligonucleotide
  Sense strand starting at position 632 of SEQ ID NO: 1882093
gguaguauuuccguuucuc

SEQ ID NO: 2094707 - RNA, 19 nt, Artificial Sequence
  Description of Artificial Sequence: Synthetic oligonucleotide
  Antisense strand to SEQ ID NO: 2094706
gagaaacggaaauacuacc

SEQ ID NO: 2094708 - RNA, 19 nt, Artificial Sequence
  Description of Artificial Sequence: Synthetic oligonucleotide
  Sense strand starting at position 708 of SEQ ID NO: 1882093
ucucuaaacugagagauua

SEQ ID NO: 2094709 - RNA, 19 nt, Artificial Sequence
  Description of Artificial Sequence: Synthetic oligonucleotide
  Antisense strand to SEQ ID NO: 2094708
uaaucucucaguuuagaga

SEQ ID NO: 2094710 - RNA, 19 nt, Artificial Sequence
  Description of Artificial Sequence: Synthetic oligonucleotide
  Sense strand starting at position 1603 of SEQ ID NO: 1882093
gaucccaguccgcagaauu

SEQ ID NO: 2094711 - RNA, 19 nt, Artificial Sequence
  Description of Artificial Sequence: Synthetic oligonucleotide
  Antisense strand to SEQ ID NO: 2094710
aauucugcggacugggauc

SEQ ID NO: 2094712 - RNA, 19 nt, Artificial Sequence
  Description of Artificial Sequence: Synthetic oligonucleotide
  Sense strand starting at position 1913 of SEQ ID NO: 1882093
ggagcuucuaagcaggagu

SEQ ID NO: 2094713 - RNA, 19 nt, Artificial Sequence
  Description of Artificial Sequence: Synthetic oligonucleotide
  Antisense strand to SEQ ID NO: 2094712
acuccugcuuagaagcucc

SEQ ID NO: 2094714 - RNA, 19 nt, Artificial Sequence
  Description of Artificial Sequence: Synthetic oligonucleotide
  Sense strand starting at position 2060 of SEQ ID NO: 1882093
agggaauccugaguuccua

SEQ ID NO: 2094715 - RNA, 19 nt, Artificial Sequence
  Description of Artificial Sequence: Synthetic oligonucleotide
  Antisense strand to SEQ ID NO: 2094714
uaggaacucaggauucccu

SEQ ID NO: 2094716 - RNA, 19 nt, Artificial Sequence
  Description of Artificial Sequence: Synthetic oligonucleotide
  Sense strand starting at position 2064 of SEQ ID NO: 1882093
aauccugaguuccuagaga

SEQ ID NO: 2094717 - RNA, 19 nt, Artificial Sequence
  Description of Artificial Sequence: Synthetic oligonucleotide
  Antisense strand to SEQ ID NO: 2094716
ucucuaggaacucaggauu

SEQ ID NO: 2094718 - RNA, 19 nt, Artificial Sequence
  Description of Artificial Sequence: Synthetic oligonucleotide
  Sense strand starting at position 2193 of SEQ ID NO: 1882093
uuaaguccuugauuccgaa

SEQ ID NO: 2094719 - RNA, 19 nt, Artificial Sequence
  Description of Artificial Sequence: Synthetic oligonucleotide
  Antisense strand to SEQ ID NO: 2094718
uucggaaucaaggacuuaa

SEQ ID NO: 2094720 - RNA, 19 nt, Artificial Sequence
  Description of Artificial Sequence: Synthetic oligonucleotide
  Sense strand starting at position 2343 of SEQ ID NO: 1882093
auaagauauagacggugau

SEQ ID NO: 2094721 - RNA, 19 nt, Artificial Sequence
  Description of Artificial Sequence: Synthetic oligonucleotide
  Antisense strand to SEQ ID NO: 2094720
aucaccgucuauaucuuau

SEQ ID NO: 2094722 - RNA, 19 nt, Artificial Sequence
  Description of Artificial Sequence: Synthetic oligonucleotide
  Sense strand starting at position 2344 of SEQ ID NO: 1882093
uaagauauagacggugauu

SEQ ID NO: 2094723 - RNA, 19 nt, Artificial Sequence
  Description of Artificial Sequence: Synthetic oligonucleotide
  Antisense strand to SEQ ID NO: 2094722
aaucaccgucuauaucuua

SEQ ID NO: 2094724 - RNA, 19 nt, Artificial Sequence
  Description of Artificial Sequence: Synthetic oligonucleotide
  Sense strand starting at position 2536 of SEQ ID NO: 1882093
uaggauuugugugaaccua

SEQ ID NO: 2094725 - RNA, 19 nt, Artificial Sequence
  Description of Artificial Sequence: Synthetic oligonucleotide
  Antisense strand to SEQ ID NO: 2094724
uagguucacacaaauccua

SEQ ID NO: 2094726 - RNA, 19 nt, Artificial Sequence
  Description of Artificial Sequence: Synthetic oligonucleotide
  Sense strand starting at position 2560 of SEQ ID NO: 1882093
gguaccugcgacgaguaaa

SEQ ID NO: 2094727 - RNA, 19 nt, Artificial Sequence
  Description of Artificial Sequence: Synthetic oligonucleotide
  Antisense strand to SEQ ID NO: 2094726
uuuacucgucgcagguacc

SEQ ID NO: 2094728 - RNA, 19 nt, Artificial Sequence
  Description of Artificial Sequence: Synthetic oligonucleotide
  Sense strand starting at position 2595 of SEQ ID NO: 1882093
ucuagagacucagcuagaa

SEQ ID NO: 2094729 - RNA, 19 nt, Artificial Sequence
  Description of Artificial Sequence: Synthetic oligonucleotide
  Antisense strand to SEQ ID NO: 2094728
uucuagcugagucucuaga

SEQ ID NO: 2094730 - RNA, 19 nt, Artificial Sequence
  Description of Artificial Sequence: Synthetic oligonucleotide
  Sense strand starting at position 2607 of SEQ ID NO: 1882093
gcuagaacugacugagcaa

SEQ ID NO: 2094731 - RNA, 19 nt, Artificial Sequence
  Description of Artificial Sequence: Synthetic oligonucleotide
  Antisense strand to SEQ ID NO: 2094730
uugcucagucaguucuagc

SEQ ID NO: 2094732 - RNA, 19 nt, Artificial Sequence
  Description of Artificial Sequence: Synthetic oligonucleotide
  Sense strand starting at position 2773 of SEQ ID NO: 1882093
ucuggacagacuuggucua

SEQ ID NO: 2094733 - RNA, 19 nt, Artificial Sequence
  Description of Artificial Sequence: Synthetic oligonucleotide
  Antisense strand to SEQ ID NO: 2094732
uagaccaagucuguccaga

SEQ ID NO: 2094734 - RNA, 19 nt, Artificial Sequence
  Description of Artificial Sequence: Synthetic oligonucleotide
  Sense strand starting at position 2774 of SEQ ID NO: 1882093
cuggacagacuuggucuaa

SEQ ID NO: 2094735 - RNA, 19 nt, Artificial Sequence
  Description of Artificial Sequence: Synthetic oligonucleotide
  Antisense strand to SEQ ID NO: 2094734
uuagaccaagucuguccag

SEQ ID NO: 2094736 - RNA, 19 nt, Artificial Sequence
  Description of Artificial Sequence: Synthetic oligonucleotide
  Sense strand starting at position 2775 of SEQ ID NO: 1882093
uggacagacuuggucuaaa

SEQ ID NO: 2094737 - RNA, 19 nt, Artificial Sequence
  Description of Artificial Sequence: Synthetic oligonucleotide
  Antisense strand to SEQ ID NO: 2094736
uuuagaccaagucugucca

SEQ ID NO: 2094738 - RNA, 19 nt, Artificial Sequence
  Description of Artificial Sequence: Synthetic oligonucleotide
  Sense strand starting at position 2955 of SEQ ID NO: 1882093
gaugaugucgcucaaacua

SEQ ID NO: 2094739 - RNA, 19 nt, Artificial Sequence
  Description of Artificial Sequence: Synthetic oligonucleotide
  Antisense strand to SEQ ID NO: 2094738
uaguuugagcgacaucauc

SEQ ID NO: 2094740 - RNA, 19 nt, Artificial Sequence
  Description of Artificial Sequence: Synthetic oligonucleotide
  Sense strand starting at position 2980 of SEQ ID NO: 1882093
gggucucucuagucaagga

SEQ ID NO: 2094741 - RNA, 19 nt, Artificial Sequence
  Description of Artificial Sequence: Synthetic oligonucleotide
  Antisense strand to SEQ ID NO: 2094740
uccuugacuagagagaccc

SEQ ID NO: 2094742 - RNA, 19 nt, Artificial Sequence
  Description of Artificial Sequence: Synthetic oligonucleotide
  Sense strand starting at position 3302 of SEQ ID NO: 1882093
gccguuauuccagacucca

SEQ ID NO: 2094743 - RNA, 19 nt, Artificial Sequence
  Description of Artificial Sequence: Synthetic oligonucleotide
  Antisense strand to SEQ ID NO: 2094742
uggagucuggaauaacggc

SEQ ID NO: 2094744 - RNA, 19 nt, Artificial Sequence
  Description of Artificial Sequence: Synthetic oligonucleotide
  Sense strand starting at position 3408 of SEQ ID NO: 1882093
uggcgucucccugucaagu

SEQ ID NO: 2094745 - RNA, 19 nt, Artificial Sequence
  Description of Artificial Sequence: Synthetic oligonucleotide
  Antisense strand to SEQ ID NO: 2094744
acuugacagggagacgcca

SEQ ID NO: 2094746 - RNA, 19 nt, Artificial Sequence
  Description of Artificial Sequence: Synthetic oligonucleotide
  Sense strand starting at position 3421 of SEQ ID NO: 1882093
ucaagucauuacgccuuua

SEQ ID NO: 2094747 - RNA, 19 nt, Artificial Sequence
  Description of Artificial Sequence: Synthetic oligonucleotide
  Antisense strand to SEQ ID NO: 2094746
uaaaggcguaaugacuuga

SEQ ID NO: 2094748 - RNA, 19 nt, Artificial Sequence
  Description of Artificial Sequence: Synthetic oligonucleotide
  Sense strand starting at position 3458 of SEQ ID NO: 1882093
accucagagggcugcuauu

SEQ ID NO: 2094749 - RNA, 19 nt, Artificial Sequence
  Description of Artificial Sequence: Synthetic oligonucleotide
  Antisense strand to SEQ ID NO: 2094748
aauagcagcccucugaggu

SEQ ID NO: 2094750 - RNA, 19 nt, Artificial Sequence
  Description of Artificial Sequence: Synthetic oligonucleotide
  Sense strand starting at position 3523 of SEQ ID NO: 1882093
uguuguuaucucccgcuga

SEQ ID NO: 2094751 - RNA, 19 nt, Artificial Sequence
  Description of Artificial Sequence: Synthetic oligonucleotide
  Antisense strand to SEQ ID NO: 2094750
ucagcgggagauaacaaca

SEQ ID NO: 2094752 - RNA, 19 nt, Artificial Sequence
  Description of Artificial Sequence: Synthetic oligonucleotide
  Sense strand starting at position 3742 of SEQ ID NO: 1882093
ggaguugugccaggaagaa

SEQ ID NO: 2094753 - RNA, 19 nt, Artificial Sequence
  Description of Artificial Sequence: Synthetic oligonucleotide
  Antisense strand to SEQ ID NO: 2094752
uucuuccuggcacaacucc

SEQ ID NO: 2094754 - RNA, 19 nt, Artificial Sequence
  Description of Artificial Sequence: Synthetic oligonucleotide
  Sense strand starting at position 3792 of SEQ ID NO: 1882093
agaaguagucuucgcaaga

SEQ ID NO: 2094755 - RNA, 19 nt, Artificial Sequence
  Description of Artificial Sequence: Synthetic oligonucleotide
  Antisense strand to SEQ ID NO: 2094754
ucuugcgaagacuacuucu

SEQ ID NO: 2094756 - RNA, 19 nt, Artificial Sequence
  Description of Artificial Sequence: Synthetic oligonucleotide
  Sense strand starting at position 3793 of SEQ ID NO: 1882093
gaaguagucuucgcaagac

SEQ ID NO: 2094757 - RNA, 19 nt, Artificial Sequence
  Description of Artificial Sequence: Synthetic oligonucleotide
  Antisense strand to SEQ ID NO: 2094756
gucuugcgaagacuacuuc

SEQ ID NO: 2094758 - RNA, 19 nt, Artificial Sequence
  Description of Artificial Sequence: Synthetic oligonucleotide
  Sense strand starting at position 3982 of SEQ ID NO: 1882093
ggaugcaggauauggaauu

SEQ ID NO: 2094759 - RNA, 19 nt, Artificial Sequence
  Description of Artificial Sequence: Synthetic oligonucleotide
  Antisense strand to SEQ ID NO: 2094758
aauuccauauccugcaucc

SEQ ID NO: 2094760 - RNA, 19 nt, Artificial Sequence
  Description of Artificial Sequence: Synthetic oligonucleotide
  Sense strand starting at position 280 of SEQ ID NO: 1882095
guuuauuccuaauuggaca

SEQ ID NO: 2094761 - RNA, 19 nt, Artificial Sequence
  Description of Artificial Sequence: Synthetic oligonucleotide
  Antisense strand to SEQ ID NO: 2094760
uguccaauuaggaauaaac

SEQ ID NO: 2094762 - RNA, 19 nt, Artificial Sequence
  Description of Artificial Sequence: Synthetic oligonucleotide
  Sense strand starting at position 360 of SEQ ID NO: 1882095
acauucuuagauggaucuu

SEQ ID NO: 2094763 - RNA, 19 nt, Artificial Sequence
  Description of Artificial Sequence: Synthetic oligonucleotide
  Antisense strand to SEQ ID NO: 2094762
aagauccaucuaagaaugu

SEQ ID NO: 2094764 - RNA, 19 nt, Artificial Sequence
  Description of Artificial Sequence: Synthetic oligonucleotide
  Sense strand starting at position 366 of SEQ ID NO: 1882095
uuagauggaucuuuacagu

SEQ ID NO: 2094765 - RNA, 19 nt, Artificial Sequence
  Description of Artificial Sequence: Synthetic oligonucleotide
  Antisense strand to SEQ ID NO: 2094764
acuguaaagauccaucuaa

SEQ ID NO: 2094766 - RNA, 19 nt, Artificial Sequence
  Description of Artificial Sequence: Synthetic oligonucleotide
  Sense strand starting at position 372 of SEQ ID NO: 1882095
ggaucuuuacagugaucua

SEQ ID NO: 2094767 - RNA, 19 nt, Artificial Sequence
  Description of Artificial Sequence: Synthetic oligonucleotide
  Antisense strand to SEQ ID NO: 2094766
uagaucacuguaaagaucc

SEQ ID NO: 2094768 - RNA, 19 nt, Artificial Sequence
  Description of Artificial Sequence: Synthetic oligonucleotide
  Sense strand starting at position 379 of SEQ ID NO: 1882095
uacagugaucuauggaccu

SEQ ID NO: 2094769 - RNA, 19 nt, Artificial Sequence
  Description of Artificial Sequence: Synthetic oligonucleotide
  Antisense strand to SEQ ID NO: 2094768
agguccauagaucacugua

SEQ ID NO: 2094770 - RNA, 19 nt, Artificial Sequence
  Description of Artificial Sequence: Synthetic oligonucleotide
  Sense strand starting at position 519 of SEQ ID NO: 1882095
gcauuuagaugcguaagga

SEQ ID NO: 2094771 - RNA, 19 nt, Artificial Sequence
  Description of Artificial Sequence: Synthetic oligonucleotide
  Antisense strand to SEQ ID NO: 2094770
uccuuacgcaucuaaaugc

SEQ ID NO: 2094772 - RNA, 19 nt, Artificial Sequence
  Description of Artificial Sequence: Synthetic oligonucleotide
  Sense strand starting at position 590 of SEQ ID NO: 1882095
aaaguaaaucuguaguuug

SEQ ID NO: 2094773 - RNA, 19 nt, Artificial Sequence
  Description of Artificial Sequence: Synthetic oligonucleotide
  Antisense strand to SEQ ID NO: 2094772
caaacuacagauuuacuuu

SEQ ID NO: 2094774 - RNA, 19 nt, Artificial Sequence
  Description of Artificial Sequence: Synthetic oligonucleotide
  Sense strand starting at position 756 of SEQ ID NO: 1882095
gaagguagagcugggaauu

SEQ ID NO: 2094775 - RNA, 19 nt, Artificial Sequence
  Description of Artificial Sequence: Synthetic oligonucleotide
  Antisense strand to SEQ ID NO: 2094774
aauucccagcucuaccuuc

SEQ ID NO: 2094776 - RNA, 19 nt, Artificial Sequence
  Description of Artificial Sequence: Synthetic oligonucleotide
  Sense strand starting at position 909 of SEQ ID NO: 1882095
ugucucaucugggcauuua

SEQ ID NO: 2094777 - RNA, 19 nt, Artificial Sequence
  Description of Artificial Sequence: Synthetic oligonucleotide
  Antisense strand to SEQ ID NO: 2094776
uaaaugcccagaugagaca

SEQ ID NO: 2094778 - RNA, 19 nt, Artificial Sequence
  Description of Artificial Sequence: Synthetic oligonucleotide
  Sense strand starting at position 982 of SEQ ID NO: 1882095
ccuguuaaucugggaagau

SEQ ID NO: 2094779 - RNA, 19 nt, Artificial Sequence
  Description of Artificial Sequence: Synthetic oligonucleotide
  Antisense strand to SEQ ID NO: 2094778
aucuucccagauuaacagg

SEQ ID NO: 2094780 - RNA, 19 nt, Artificial Sequence
  Description of Artificial Sequence: Synthetic oligonucleotide
  Sense strand starting at position 995 of SEQ ID NO: 1882095
gaagaugucuauccuuuga

SEQ ID NO: 2094781 - RNA, 19 nt, Artificial Sequence
  Description of Artificial Sequence: Synthetic oligonucleotide
  Antisense strand to SEQ ID NO: 2094780
ucaaaggauagacaucuuc

SEQ ID NO: 2094782 - RNA, 19 nt, Artificial Sequence
  Description of Artificial Sequence: Synthetic oligonucleotide
  Sense strand starting at position 997 of SEQ ID NO: 1882095
agaugucuauccuuugaau

SEQ ID NO: 2094783 - RNA, 19 nt, Artificial Sequence
  Description of Artificial Sequence: Synthetic oligonucleotide
  Antisense strand to SEQ ID NO: 2094782
auucaaaggauagacaucu

SEQ ID NO: 2094784 - RNA, 19 nt, Artificial Sequence
  Description of Artificial Sequence: Synthetic oligonucleotide
  Sense strand starting at position 1570 of SEQ ID NO: 1882095
uaaacacuuuguguaggaa

SEQ ID NO: 2094785 - RNA, 19 nt, Artificial Sequence
  Description of Artificial Sequence: Synthetic oligonucleotide
  Antisense strand to SEQ ID NO: 2094784
uuccuacacaaaguguuua

SEQ ID NO: 2094786 - RNA, 19 nt, Artificial Sequence
  Description of Artificial Sequence: Synthetic oligonucleotide
  Sense strand starting at position 1573 of SEQ ID NO: 1882095
acacuuuguguaggaagaa

SEQ ID NO: 2094787 - RNA, 19 nt, Artificial Sequence
  Description of Artificial Sequence: Synthetic oligonucleotide
  Antisense strand to SEQ ID NO: 2094786
uucuuccuacacaaagugu

SEQ ID NO: 2094788 - RNA, 19 nt, Artificial Sequence
  Description of Artificial Sequence: Synthetic oligonucleotide
  Sense strand starting at position 1637 of SEQ ID NO: 1882095
gcacgaugccaguucuucu

SEQ ID NO: 2094789 - RNA, 19 nt, Artificial Sequence
  Description of Artificial Sequence: Synthetic oligonucleotide
  Antisense strand to SEQ ID NO: 2094788
agaagaacuggcaucgugc

SEQ ID NO: 2094790 - RNA, 19 nt, Artificial Sequence
  Description of Artificial Sequence: Synthetic oligonucleotide
  Sense strand starting at position 1728 of SEQ ID NO: 1882095
aaggcuggacuggguaaua

SEQ ID NO: 2094791 - RNA, 19 nt, Artificial Sequence
  Description of Artificial Sequence: Synthetic oligonucleotide
  Antisense strand to SEQ ID NO: 2094790
uauuacccaguccagccuu

SEQ ID NO: 2094792 - RNA, 19 nt, Artificial Sequence
  Description of Artificial Sequence: Synthetic oligonucleotide
  Sense strand starting at position 2154 of SEQ ID NO: 1882095
ugaggagggucaagaagua

SEQ ID NO: 2094793 - RNA, 19 nt, Artificial Sequence
  Description of Artificial Sequence: Synthetic oligonucleotide
  Antisense strand to SEQ ID NO: 2094792
uacuucuugacccuccuca

SEQ ID NO: 2094794 - RNA, 19 nt, Artificial Sequence
  Description of Artificial Sequence: Synthetic oligonucleotide
  Sense strand starting at position 2186 of SEQ ID NO: 1882095
ugaauuauagcagggcaga

SEQ ID NO: 2094795 - RNA, 19 nt, Artificial Sequence
  Description of Artificial Sequence: Synthetic oligonucleotide
  Antisense strand to SEQ ID NO: 2094794
ucugcccugcuauaauuca

SEQ ID NO: 2094796 - RNA, 19 nt, Artificial Sequence
  Description of Artificial Sequence: Synthetic oligonucleotide
  Sense strand starting at position 2335 of SEQ ID NO: 1882095
augugugcacaagaugaaa

SEQ ID NO: 2094797 - RNA, 19 nt, Artificial Sequence
  Description of Artificial Sequence: Synthetic oligonucleotide
  Antisense strand to SEQ ID NO: 2094796
uuucaucuugugcacacau

SEQ ID NO: 2094798 - RNA, 19 nt, Artificial Sequence
  Description of Artificial Sequence: Synthetic oligonucleotide
  Sense strand starting at position 2586 of SEQ ID NO: 1882095
cuaguacuugcuuauagga

SEQ ID NO: 2094799 - RNA, 19 nt, Artificial Sequence
  Description of Artificial Sequence: Synthetic oligonucleotide
  Antisense strand to SEQ ID NO: 2094798
uccuauaagcaaguacuag

SEQ ID NO: 2094800 - RNA, 19 nt, Artificial Sequence
  Description of Artificial Sequence: Synthetic oligonucleotide
  Sense strand starting at position 2667 of SEQ ID NO: 1882095
uagguaggcaaugaguaua

SEQ ID NO: 2094801 - RNA, 19 nt, Artificial Sequence
  Description of Artificial Sequence: Synthetic oligonucleotide
  Antisense strand to SEQ ID NO: 2094800
uauacucauugccuaccua

SEQ ID NO: 2094802 - RNA, 19 nt, Artificial Sequence
  Description of Artificial Sequence: Synthetic oligonucleotide
  Sense strand starting at position 2670 of SEQ ID NO: 1882095
guaggcaaugaguauaaau

SEQ ID NO: 2094803 - RNA, 19 nt, Artificial Sequence
  Description of Artificial Sequence: Synthetic oligonucleotide
  Antisense strand to SEQ ID NO: 2094802
auuuauacucauugccuac

SEQ ID NO: 2094804 - RNA, 19 nt, Artificial Sequence
  Description of Artificial Sequence: Synthetic oligonucleotide
  Sense strand starting at position 2822 of SEQ ID NO: 1882095
ucagauugagccugaauaa

SEQ ID NO: 2094805 - RNA, 19 nt, Artificial Sequence
  Description of Artificial Sequence: Synthetic oligonucleotide
  Antisense strand to SEQ ID NO: 2094804
uuauucaggcucaaucuga

SEQ ID NO: 2094806 - RNA, 19 nt, Artificial Sequence
  Description of Artificial Sequence: Synthetic oligonucleotide
  Sense strand starting at position 3030 of SEQ ID NO: 1882095
gauuaauggcauuggaagu

SEQ ID NO: 2094807 - RNA, 19 nt, Artificial Sequence
  Description of Artificial Sequence: Synthetic oligonucleotide
  Antisense strand to SEQ ID NO: 2094806
acuuccaaugccauuaauc

SEQ ID NO: 2094808 - RNA, 19 nt, Artificial Sequence
  Description of Artificial Sequence: Synthetic oligonucleotide
  Sense strand starting at position 3031 of SEQ ID NO: 1882095
auuaauggcauuggaagua

SEQ ID NO: 2094809 - RNA, 19 nt, Artificial Sequence
  Description of Artificial Sequence: Synthetic oligonucleotide
  Antisense strand to SEQ ID NO: 2094808
uacuuccaaugccauuaau

SEQ ID NO: 2094810 - RNA, 19 nt, Artificial Sequence
  Description of Artificial Sequence: Synthetic oligonucleotide
  Sense strand starting at position 3053 of SEQ ID NO: 1882095
auaauagcagugcagaauu

SEQ ID NO: 2094811 - RNA, 19 nt, Artificial Sequence
  Description of Artificial Sequence: Synthetic oligonucleotide
  Antisense strand to SEQ ID NO: 2094810
aauucugcacugcuauuau

SEQ ID NO: 2094812 - RNA, 19 nt, Artificial Sequence
  Description of Artificial Sequence: Synthetic oligonucleotide
  Sense strand starting at position 3064 of SEQ ID NO: 1882095
gcagaauuaaugggcuaga

SEQ ID NO: 2094813 - RNA, 19 nt, Artificial Sequence
  Description of Artificial Sequence: Synthetic oligonucleotide
  Antisense strand to SEQ ID NO: 2094812
ucuagcccauuaauucugc

SEQ ID NO: 2094814 - RNA, 19 nt, Artificial Sequence
  Description of Artificial Sequence: Synthetic oligonucleotide
  Sense strand starting at position 3065 of SEQ ID NO: 1882095
cagaauuaaugggcuagau

SEQ ID NO: 2094815 - RNA, 19 nt, Artificial Sequence
  Description of Artificial Sequence: Synthetic oligonucleotide
  Antisense strand to SEQ ID NO: 2094814
aucuagcccauuaauucug

SEQ ID NO: 2094816 - RNA, 19 nt, Artificial Sequence
  Description of Artificial Sequence: Synthetic oligonucleotide
  Sense strand starting at position 3078 of SEQ ID NO: 1882095
cuagauacuuuguuauuga

SEQ ID NO: 2094817 - RNA, 19 nt, Artificial Sequence
  Description of Artificial Sequence: Synthetic oligonucleotide
  Antisense strand to SEQ ID NO: 2094816
ucaauaacaaaguaucuag

SEQ ID NO: 2094818 - RNA, 19 nt, Artificial Sequence
  Description of Artificial Sequence: Synthetic oligonucleotide
  Sense strand starting at position 3103 of SEQ ID NO: 1882095
uuguguaggguugaacuaa

SEQ ID NO: 2094819 - RNA, 19 nt, Artificial Sequence
  Description of Artificial Sequence: Synthetic oligonucleotide
  Antisense strand to SEQ ID NO: 2094818
uuaguucaacccuacacaa

SEQ ID NO: 2094820 - RNA, 19 nt, Artificial Sequence
  Description of Artificial Sequence: Synthetic oligonucleotide
  Sense strand starting at position 3305 of SEQ ID NO: 1882095
gggugauauccagauugcu

SEQ ID NO: 2094821 - RNA, 19 nt, Artificial Sequence
  Description of Artificial Sequence: Synthetic oligonucleotide
  Antisense strand to SEQ ID NO: 2094820
agcaaucuggauaucaccc

SEQ ID NO: 2094822 - RNA, 19 nt, Artificial Sequence
  Description of Artificial Sequence: Synthetic oligonucleotide
  Sense strand starting at position 3419 of SEQ ID NO: 1882095
uauugagaucacuggguac

SEQ ID NO: 2094823 - RNA, 19 nt, Artificial Sequence
  Description of Artificial Sequence: Synthetic oligonucleotide
  Antisense strand to SEQ ID NO: 2094822
guacccagugaucucaaua

SEQ ID NO: 2094824 - RNA, 19 nt, Artificial Sequence
  Description of Artificial Sequence: Synthetic oligonucleotide
  Sense strand starting at position 3439 of SEQ ID NO: 1882095
gggugauagccaggauacu

SEQ ID NO: 2094825 - RNA, 19 nt, Artificial Sequence
  Description of Artificial Sequence: Synthetic oligonucleotide
  Antisense strand to SEQ ID NO: 2094824
aguauccuggcuaucaccc

SEQ ID NO: 2094826 - RNA, 19 nt, Artificial Sequence
  Description of Artificial Sequence: Synthetic oligonucleotide
  Sense strand starting at position 3440 of SEQ ID NO: 1882095
ggugauagccaggauacuu

SEQ ID NO: 2094827 - RNA, 19 nt, Artificial Sequence
  Description of Artificial Sequence: Synthetic oligonucleotide
  Antisense strand to SEQ ID NO: 2094826
aaguauccuggcuaucacc

SEQ ID NO: 2094828 - RNA, 19 nt, Artificial Sequence
  Description of Artificial Sequence: Synthetic oligonucleotide
  Sense strand starting at position 3472 of SEQ ID NO: 1882095
ccuagagcauuagucagaa

SEQ ID NO: 2094829 - RNA, 19 nt, Artificial Sequence
  Description of Artificial Sequence: Synthetic oligonucleotide
  Antisense strand to SEQ ID NO: 2094828
uucugacuaaugcucuagg

SEQ ID NO: 2094830 - RNA, 19 nt, Artificial Sequence
  Description of Artificial Sequence: Synthetic oligonucleotide
  Sense strand starting at position 3608 of SEQ ID NO: 1882095
ggagaucauuuggaggagu

SEQ ID NO: 2094831 - RNA, 19 nt, Artificial Sequence
  Description of Artificial Sequence: Synthetic oligonucleotide
  Antisense strand to SEQ ID NO: 2094830
acuccuccaaaugaucucc

SEQ ID NO: 2094832 - RNA, 19 nt, Artificial Sequence
  Description of Artificial Sequence: Synthetic oligonucleotide
  Sense strand starting at position 3634 of SEQ ID NO: 1882095
gcagcuauccaugaacuag

SEQ ID NO: 2094833 - RNA, 19 nt, Artificial Sequence
  Description of Artificial Sequence: Synthetic oligonucleotide
  Antisense strand to SEQ ID NO: 2094832
cuaguucauggauagcugc

SEQ ID NO: 2094834 - RNA, 19 nt, Artificial Sequence
  Description of Artificial Sequence: Synthetic oligonucleotide
  Sense strand starting at position 3684 of SEQ ID NO: 1882095
cuuuaauaagcugagcaaa

SEQ ID NO: 2094835 - RNA, 19 nt, Artificial Sequence
  Description of Artificial Sequence: Synthetic oligonucleotide
  Antisense strand to SEQ ID NO: 2094834
uuugcucagcuuauuaaag

SEQ ID NO: 2094836 - RNA, 19 nt, Artificial Sequence
  Description of Artificial Sequence: Synthetic oligonucleotide
  Sense strand starting at position 3711 of SEQ ID NO: 1882095
ucuggcugugaccaagaua

SEQ ID NO: 2094837 - RNA, 19 nt, Artificial Sequence
  Description of Artificial Sequence: Synthetic oligonucleotide
  Antisense strand to SEQ ID NO: 2094836
uaucuuggucacagccaga

SEQ ID NO: 2094838 - RNA, 19 nt, Artificial Sequence
  Description of Artificial Sequence: Synthetic oligonucleotide
  Sense strand starting at position 3973 of SEQ ID NO: 1882095
auaaguuucuucucaggaa

SEQ ID NO: 2094839 - RNA, 19 nt, Artificial Sequence
  Description of Artificial Sequence: Synthetic oligonucleotide
  Antisense strand to SEQ ID NO: 2094838
uuccugagaagaaacuuau

SEQ ID NO: 2094840 - RNA, 19 nt, Artificial Sequence
  Description of Artificial Sequence: Synthetic oligonucleotide
  Sense strand starting at position 178 of SEQ ID NO: 1882096
ugauucuugcaccauuaag

SEQ ID NO: 2094841 - RNA, 19 nt, Artificial Sequence
  Description of Artificial Sequence: Synthetic oligonucleotide
  Antisense strand to SEQ ID NO: 2094840
cuuaauggugcaagaauca

SEQ ID NO: 2094842 - RNA, 19 nt, Artificial Sequence
  Description of Artificial Sequence: Synthetic oligonucleotide
  Sense strand starting at position 222 of SEQ ID NO: 1882096
uuuggucuugaaugauaug

SEQ ID NO: 2094843 - RNA, 19 nt, Artificial Sequence
  Description of Artificial Sequence: Synthetic oligonucleotide
  Antisense strand to SEQ ID NO: 2094842
cauaucauucaagaccaaa

SEQ ID NO: 2094844 - RNA, 19 nt, Artificial Sequence
  Description of Artificial Sequence: Synthetic oligonucleotide
  Sense strand starting at position 227 of SEQ ID NO: 1882096
ucuugaaugauaugaggca

SEQ ID NO: 2094845 - RNA, 19 nt, Artificial Sequence
  Description of Artificial Sequence: Synthetic oligonucleotide
  Antisense strand to SEQ ID NO: 2094844
ugccucauaucauucaaga

SEQ ID NO: 2094846 - RNA, 19 nt, Artificial Sequence
  Description of Artificial Sequence: Synthetic oligonucleotide
  Sense strand starting at position 249 of SEQ ID NO: 1882096
gggcuuacaucucuaauaa

SEQ ID NO: 2094847 - RNA, 19 nt, Artificial Sequence
  Description of Artificial Sequence: Synthetic oligonucleotide
  Antisense strand to SEQ ID NO: 2094846
uuauuagagauguaagccc

SEQ ID NO: 2094848 - RNA, 19 nt, Artificial Sequence
  Description of Artificial Sequence: Synthetic oligonucleotide
  Sense strand starting at position 270 of SEQ ID NO: 1882096
ucauuagggaaugguccaa

SEQ ID NO: 2094849 - RNA, 19 nt, Artificial Sequence
  Description of Artificial Sequence: Synthetic oligonucleotide
  Antisense strand to SEQ ID NO: 2094848
uuggaccauucccuaauga

SEQ ID NO: 2094850 - RNA, 19 nt, Artificial Sequence
  Description of Artificial Sequence: Synthetic oligonucleotide
  Sense strand starting at position 593 of SEQ ID NO: 1882096
uugccuuucccagaaugaa

SEQ ID NO: 2094851 - RNA, 19 nt, Artificial Sequence
  Description of Artificial Sequence: Synthetic oligonucleotide
  Antisense strand to SEQ ID NO: 2094850
uucauucugggaaaggcaa

SEQ ID NO: 2094852 - RNA, 19 nt, Artificial Sequence
  Description of Artificial Sequence: Synthetic oligonucleotide
  Sense strand starting at position 749 of SEQ ID NO: 1882096
acccgcugaccagaugaua

SEQ ID NO: 2094853 - RNA, 19 nt, Artificial Sequence
  Description of Artificial Sequence: Synthetic oligonucleotide
  Antisense strand to SEQ ID NO: 2094852
uaucaucuggucagcgggu

SEQ ID NO: 2094854 - RNA, 19 nt, Artificial Sequence
  Description of Artificial Sequence: Synthetic oligonucleotide
  Sense strand starting at position 800 of SEQ ID NO: 1882096
acgaauaaaucugcaauaa

SEQ ID NO: 2094855 - RNA, 19 nt, Artificial Sequence
  Description of Artificial Sequence: Synthetic oligonucleotide
  Antisense strand to SEQ ID NO: 2094854
uuauugcagauuuauucgu

SEQ ID NO: 2094856 - RNA, 19 nt, Artificial Sequence
  Description of Artificial Sequence: Synthetic oligonucleotide
  Sense strand starting at position 951 of SEQ ID NO: 1882096
aggcgugagucuauucgua

SEQ ID NO: 2094857 - RNA, 19 nt, Artificial Sequence
  Description of Artificial Sequence: Synthetic oligonucleotide
  Antisense strand to SEQ ID NO: 2094856
uacgaauagacucacgccu

SEQ ID NO: 2094858 - RNA, 19 nt, Artificial Sequence
  Description of Artificial Sequence: Synthetic oligonucleotide
  Sense strand starting at position 1013 of SEQ ID NO: 1882096
cacagagagcaauguuaag

SEQ ID NO: 2094859 - RNA, 19 nt, Artificial Sequence
  Description of Artificial Sequence: Synthetic oligonucleotide
  Antisense strand to SEQ ID NO: 2094858
cuuaacauugcucucugug

SEQ ID NO: 2094860 - RNA, 19 nt, Artificial Sequence
  Description of Artificial Sequence: Synthetic oligonucleotide
  Sense strand starting at position 1019 of SEQ ID NO: 1882096
gagcaauguuaaguaacaa

SEQ ID NO: 2094861 - RNA, 19 nt, Artificial Sequence
  Description of Artificial Sequence: Synthetic oligonucleotide
  Antisense strand to SEQ ID NO: 2094860
uuguuacuuaacauugcuc

SEQ ID NO: 2094862 - RNA, 19 nt, Artificial Sequence
  Description of Artificial Sequence: Synthetic oligonucleotide
  Sense strand starting at position 1096 of SEQ ID NO: 1882096
ggguguauggaaugccauu

SEQ ID NO: 2094863 - RNA, 19 nt, Artificial Sequence
  Description of Artificial Sequence: Synthetic oligonucleotide
  Antisense strand to SEQ ID NO: 2094862
aauggcauuccauacaccc

SEQ ID NO: 2094864 - RNA, 19 nt, Artificial Sequence
  Description of Artificial Sequence: Synthetic oligonucleotide
  Sense strand starting at position 1127 of SEQ ID NO: 1882096
gcagauuauagagacguaa

SEQ ID NO: 2094865 - RNA, 19 nt, Artificial Sequence
  Description of Artificial Sequence: Synthetic oligonucleotide
  Antisense strand to SEQ ID NO: 2094864
uuacgucucuauaaucugc

SEQ ID NO: 2094866 - RNA, 19 nt, Artificial Sequence
  Description of Artificial Sequence: Synthetic oligonucleotide
  Sense strand starting at position 1129 of SEQ ID NO: 1882096
agauuauagagacguaaca

SEQ ID NO: 2094867 - RNA, 19 nt, Artificial Sequence
  Description of Artificial Sequence: Synthetic oligonucleotide
  Antisense strand to SEQ ID NO: 2094866
uguuacgucucuauaaucu

SEQ ID NO: 2094868 - RNA, 19 nt, Artificial Sequence
  Description of Artificial Sequence: Synthetic oligonucleotide
  Sense strand starting at position 1330 of SEQ ID NO: 1882096
cacgcuuguggugaaauca

SEQ ID NO: 2094869 - RNA, 19 nt, Artificial Sequence
  Description of Artificial Sequence: Synthetic oligonucleotide
  Antisense strand to SEQ ID NO: 2094868
ugauuucaccacaagcgug

SEQ ID NO: 2094870 - RNA, 19 nt, Artificial Sequence
  Description of Artificial Sequence: Synthetic oligonucleotide
  Sense strand starting at position 1358 of SEQ ID NO: 1882096
aggacucuuagcgguggau

SEQ ID NO: 2094871 - RNA, 19 nt, Artificial Sequence
  Description of Artificial Sequence: Synthetic oligonucleotide
  Antisense strand to SEQ ID NO: 2094870
auccaccgcuaagaguccu

SEQ ID NO: 2094872 - RNA, 19 nt, Artificial Sequence
  Description of Artificial Sequence: Synthetic oligonucleotide
  Sense strand starting at position 1362 of SEQ ID NO: 1882096
cucuuagcgguggaucaaa

SEQ ID NO: 2094873 - RNA, 19 nt, Artificial Sequence
  Description of Artificial Sequence: Synthetic oligonucleotide
  Antisense strand to SEQ ID NO: 2094872
uuugauccaccgcuaagag

SEQ ID NO: 2094874 - RNA, 19 nt, Artificial Sequence
  Description of Artificial Sequence: Synthetic oligonucleotide
  Sense strand starting at position 2055 of SEQ ID NO: 1882096
gugaguacugcuccgagcu

SEQ ID NO: 2094875 - RNA, 19 nt, Artificial Sequence
  Description of Artificial Sequence: Synthetic oligonucleotide
  Antisense strand to SEQ ID NO: 2094874
agcucggagcaguacucac

SEQ ID NO: 2094876 - RNA, 19 nt, Artificial Sequence
  Description of Artificial Sequence: Synthetic oligonucleotide
  Sense strand starting at position 2185 of SEQ ID NO: 1882096
cucgguguucgcucaguau

SEQ ID NO: 2094877 - RNA, 19 nt, Artificial Sequence
  Description of Artificial Sequence: Synthetic oligonucleotide
  Antisense strand to SEQ ID NO: 2094876
auacugagcgaacaccgag

SEQ ID NO: 2094878 - RNA, 19 nt, Artificial Sequence
  Description of Artificial Sequence: Synthetic oligonucleotide
  Sense strand starting at position 2271 of SEQ ID NO: 1882096
caugauugugaaggauacu

SEQ ID NO: 2094879 - RNA, 19 nt, Artificial Sequence
  Description of Artificial Sequence: Synthetic oligonucleotide
  Antisense strand to SEQ ID NO: 2094878
aguauccuucacaaucaug

SEQ ID NO: 2094880 - RNA, 19 nt, Artificial Sequence
  Description of Artificial Sequence: Synthetic oligonucleotide
  Sense strand starting at position 2541 of SEQ ID NO: 1882096
ugcagaaguucccuuaauu

SEQ ID NO: 2094881 - RNA, 19 nt, Artificial Sequence
  Description of Artificial Sequence: Synthetic oligonucleotide
  Antisense strand to SEQ ID NO: 2094880
aauuaagggaacuucugca

SEQ ID NO: 2094882 - RNA, 19 nt, Artificial Sequence
  Description of Artificial Sequence: Synthetic oligonucleotide
  Sense strand starting at position 2576 of SEQ ID NO: 1882096
cgugauucaguugaugaac

SEQ ID NO: 2094883 - RNA, 19 nt, Artificial Sequence
  Description of Artificial Sequence: Synthetic oligonucleotide
  Antisense strand to SEQ ID NO: 2094882
guucaucaacugaaucacg

SEQ ID NO: 2094884 - RNA, 19 nt, Artificial Sequence
  Description of Artificial Sequence: Synthetic oligonucleotide
  Sense strand starting at position 2628 of SEQ ID NO: 1882096
auucuuagugcuuguauuu

SEQ ID NO: 2094885 - RNA, 19 nt, Artificial Sequence
  Description of Artificial Sequence: Synthetic oligonucleotide
  Antisense strand to SEQ ID NO: 2094884
aaauacaagcacuaagaau

SEQ ID NO: 2094886 - RNA, 19 nt, Artificial Sequence
  Description of Artificial Sequence: Synthetic oligonucleotide
  Sense strand starting at position 2634 of SEQ ID NO: 1882096
agugcuuguauuugaggca

SEQ ID NO: 2094887 - RNA, 19 nt, Artificial Sequence
  Description of Artificial Sequence: Synthetic oligonucleotide
  Antisense strand to SEQ ID NO: 2094886
ugccucaaauacaagcacu

SEQ ID NO: 2094888 - RNA, 19 nt, Artificial Sequence
  Description of Artificial Sequence: Synthetic oligonucleotide
  Sense strand starting at position 3110 of SEQ ID NO: 1882096
gaauuauaggcgcucgcca

SEQ ID NO: 2094889 - RNA, 19 nt, Artificial Sequence
  Description of Artificial Sequence: Synthetic oligonucleotide
  Antisense strand to SEQ ID NO: 2094888
uggcgagcgccuauaauuc

SEQ ID NO: 2094890 - RNA, 19 nt, Artificial Sequence
  Description of Artificial Sequence: Synthetic oligonucleotide
  Sense strand starting at position 3310 of SEQ ID NO: 1882096
aggugaucucaucauucuc

SEQ ID NO: 2094891 - RNA, 19 nt, Artificial Sequence
  Description of Artificial Sequence: Synthetic oligonucleotide
  Antisense strand to SEQ ID NO: 2094890
gagaaugaugagaucaccu

SEQ ID NO: 2094892 - RNA, 19 nt, Artificial Sequence
  Description of Artificial Sequence: Synthetic oligonucleotide
  Sense strand starting at position 3312 of SEQ ID NO: 1882096
gugaucucaucauucucuu

SEQ ID NO: 2094893 - RNA, 19 nt, Artificial Sequence
  Description of Artificial Sequence: Synthetic oligonucleotide
  Antisense strand to SEQ ID NO: 2094892
aagagaaugaugagaucac

SEQ ID NO: 2094894 - RNA, 19 nt, Artificial Sequence
  Description of Artificial Sequence: Synthetic oligonucleotide
  Sense strand starting at position 3368 of SEQ ID NO: 1882096
gguacaguacguuauauaa

SEQ ID NO: 2094895 - RNA, 19 nt, Artificial Sequence
  Description of Artificial Sequence: Synthetic oligonucleotide
  Antisense strand to SEQ ID NO: 2094894
uuauauaacguacuguacc

SEQ ID NO: 2094896 - RNA, 19 nt, Artificial Sequence
  Description of Artificial Sequence: Synthetic oligonucleotide
  Sense strand starting at position 3468 of SEQ ID NO: 1882096
aaaugucacuguuugaaug

SEQ ID NO: 2094897 - RNA, 19 nt, Artificial Sequence
  Description of Artificial Sequence: Synthetic oligonucleotide
  Antisense strand to SEQ ID NO: 2094896
cauucaaacagugacauuu

SEQ ID NO: 2094898 - RNA, 19 nt, Artificial Sequence
  Description of Artificial Sequence: Synthetic oligonucleotide
  Sense strand starting at position 3469 of SEQ ID NO: 1882096
aaugucacuguuugaauga

SEQ ID NO: 2094899 - RNA, 19 nt, Artificial Sequence
  Description of Artificial Sequence: Synthetic oligonucleotide
  Antisense strand to SEQ ID NO: 2094898
ucauucaaacagugacauu

SEQ ID NO: 2094900 - RNA, 19 nt, Artificial Sequence
  Description of Artificial Sequence: Synthetic oligonucleotide
  Sense strand starting at position 3497 of SEQ ID NO: 1882096
ugaucucuuuacuuacagu

SEQ ID NO: 2094901 - RNA, 19 nt, Artificial Sequence
  Description of Artificial Sequence: Synthetic oligonucleotide
  Antisense strand to SEQ ID NO: 2094900
acuguaaguaaagagauca

SEQ ID NO: 2094902 - RNA, 19 nt, Artificial Sequence
  Description of Artificial Sequence: Synthetic oligonucleotide
  Sense strand starting at position 3513 of SEQ ID NO: 1882096
aguucuaacugucccaauu

SEQ ID NO: 2094903 - RNA, 19 nt, Artificial Sequence
  Description of Artificial Sequence: Synthetic oligonucleotide
  Antisense strand to SEQ ID NO: 2094902
aauugggacaguuagaacu

SEQ ID NO: 2094904 - RNA, 19 nt, Artificial Sequence
  Description of Artificial Sequence: Synthetic oligonucleotide
  Sense strand starting at position 3575 of SEQ ID NO: 1882096
gggagagacuauguauugu

SEQ ID NO: 2094905 - RNA, 19 nt, Artificial Sequence
  Description of Artificial Sequence: Synthetic oligonucleotide
  Antisense strand to SEQ ID NO: 2094904
acaauacauagucucuccc

SEQ ID NO: 2094906 - RNA, 19 nt, Artificial Sequence
  Description of Artificial Sequence: Synthetic oligonucleotide
  Sense strand starting at position 3640 of SEQ ID NO: 1882096
gcaguaugagggcagagau

SEQ ID NO: 2094907 - RNA, 19 nt, Artificial Sequence
  Description of Artificial Sequence: Synthetic oligonucleotide
  Antisense strand to SEQ ID NO: 2094906
aucucugcccucauacugc

SEQ ID NO: 2094908 - RNA, 19 nt, Artificial Sequence
  Description of Artificial Sequence: Synthetic oligonucleotide
  Sense strand starting at position 3676 of SEQ ID NO: 1882096
ugcauuaacgcugauaucu

SEQ ID NO: 2094909 - RNA, 19 nt, Artificial Sequence
  Description of Artificial Sequence: Synthetic oligonucleotide
  Antisense strand to SEQ ID NO: 2094908
agauaucagcguuaaugca

SEQ ID NO: 2094910 - RNA, 19 nt, Artificial Sequence
  Description of Artificial Sequence: Synthetic oligonucleotide
  Sense strand starting at position 3684 of SEQ ID NO: 1882096
cgcugauaucuagaaagca

SEQ ID NO: 2094911 - RNA, 19 nt, Artificial Sequence
  Description of Artificial Sequence: Synthetic oligonucleotide
  Antisense strand to SEQ ID NO: 2094910
ugcuuucuagauaucagcg

SEQ ID NO: 2094912 - RNA, 19 nt, Artificial Sequence
  Description of Artificial Sequence: Synthetic oligonucleotide
  Sense strand starting at position 3733 of SEQ ID NO: 1882096
uugaauaaaugggaacgaa

SEQ ID NO: 2094913 - RNA, 19 nt, Artificial Sequence
  Description of Artificial Sequence: Synthetic oligonucleotide
  Antisense strand to SEQ ID NO: 2094912
uucguucccauuuauucaa

SEQ ID NO: 2094914 - RNA, 19 nt, Artificial Sequence
  Description of Artificial Sequence: Synthetic oligonucleotide
  Sense strand starting at position 3796 of SEQ ID NO: 1882096
auugacaaccacugaguua

SEQ ID NO: 2094915 - RNA, 19 nt, Artificial Sequence
  Description of Artificial Sequence: Synthetic oligonucleotide
  Antisense strand to SEQ ID NO: 2094914
uaacucagugguugucaau

SEQ ID NO: 2094916 - RNA, 19 nt, Artificial Sequence
  Description of Artificial Sequence: Synthetic oligonucleotide
  Sense strand starting at position 3857 of SEQ ID NO: 1882096
cuaugaggcccugaacuuu

SEQ ID NO: 2094917 - RNA, 19 nt, Artificial Sequence
  Description of Artificial Sequence: Synthetic oligonucleotide
  Antisense strand to SEQ ID NO: 2094916
aaaguucagggccucauag

SEQ ID NO: 2094918 - RNA, 19 nt, Artificial Sequence
  Description of Artificial Sequence: Synthetic oligonucleotide
  Sense strand starting at position 3869 of SEQ ID NO: 1882096
gaacuuuggcguuaccaau

SEQ ID NO: 2094919 - RNA, 19 nt, Artificial Sequence
  Description of Artificial Sequence: Synthetic oligonucleotide
  Antisense strand to SEQ ID NO: 2094918
auugguaacgccaaaguuc

SEQ ID NO: 2094920 - RNA, 19 nt, Artificial Sequence
  Description of Artificial Sequence: Synthetic oligonucleotide
  Sense strand starting at position 23 of SEQ ID NO: 1882097
ggugcugagacucggaaau

SEQ ID NO: 2094921 - RNA, 19 nt, Artificial Sequence
  Description of Artificial Sequence: Synthetic oligonucleotide
  Antisense strand to SEQ ID NO: 2094920
auuuccgagucucagcacc

SEQ ID NO: 2094922 - RNA, 19 nt, Artificial Sequence
  Description of Artificial Sequence: Synthetic oligonucleotide
  Sense strand starting at position 102 of SEQ ID NO: 1882097
gugguaaccugucuguaau

SEQ ID NO: 2094923 - RNA, 19 nt, Artificial Sequence
  Description of Artificial Sequence: Synthetic oligonucleotide
  Antisense strand to SEQ ID NO: 2094922
auuacagacagguuaccac

SEQ ID NO: 2094924 - RNA, 19 nt, Artificial Sequence
  Description of Artificial Sequence: Synthetic oligonucleotide
  Sense strand starting at position 103 of SEQ ID NO: 1882097
ugguaaccugucuguaaug

SEQ ID NO: 2094925 - RNA, 19 nt, Artificial Sequence
  Description of Artificial Sequence: Synthetic oligonucleotide
  Antisense strand to SEQ ID NO: 2094924
cauuacagacagguuacca

SEQ ID NO: 2094926 - RNA, 19 nt, Artificial Sequence
  Description of Artificial Sequence: Synthetic oligonucleotide
  Sense strand starting at position 105 of SEQ ID NO: 1882097
guaaccugucuguaaugga

SEQ ID NO: 2094927 - RNA, 19 nt, Artificial Sequence
  Description of Artificial Sequence: Synthetic oligonucleotide
  Antisense strand to SEQ ID NO: 2094926
uccauuacagacagguuac

SEQ ID NO: 2094928 - RNA, 19 nt, Artificial Sequence
  Description of Artificial Sequence: Synthetic oligonucleotide
  Sense strand starting at position 146 of SEQ ID NO: 1882097
aggagacuguugucaagcu

SEQ ID NO: 2094929 - RNA, 19 nt, Artificial Sequence
  Description of Artificial Sequence: Synthetic oligonucleotide
  Antisense strand to SEQ ID NO: 2094928
agcuugacaacagucuccu

SEQ ID NO: 2094930 - RNA, 19 nt, Artificial Sequence
  Description of Artificial Sequence: Synthetic oligonucleotide
  Sense strand starting at position 246 of SEQ ID NO: 1882097
ggcggaaguggugacauaa

SEQ ID NO: 2094931 - RNA, 19 nt, Artificial Sequence
  Description of Artificial Sequence: Synthetic oligonucleotide
  Antisense strand to SEQ ID NO: 2094930
uuaugucaccacuuccgcc

SEQ ID NO: 2094932 - RNA, 19 nt, Artificial Sequence
  Description of Artificial Sequence: Synthetic oligonucleotide
  Sense strand starting at position 286 of SEQ ID NO: 1882097
ggaagagcuggcugaaauc

SEQ ID NO: 2094933 - RNA, 19 nt, Artificial Sequence
  Description of Artificial Sequence: Synthetic oligonucleotide
  Antisense strand to SEQ ID NO: 2094932
gauuucagccagcucuucc

SEQ ID NO: 2094934 - RNA, 19 nt, Artificial Sequence
  Description of Artificial Sequence: Synthetic oligonucleotide
  Sense strand starting at position 295 of SEQ ID NO: 1882097
ggcugaaaucagugacuca

SEQ ID NO: 2094935 - RNA, 19 nt, Artificial Sequence
  Description of Artificial Sequence: Synthetic oligonucleotide
  Antisense strand to SEQ ID NO: 2094934
ugagucacugauuucagcc

SEQ ID NO: 2094936 - RNA, 19 nt, Artificial Sequence
  Description of Artificial Sequence: Synthetic oligonucleotide
  Sense strand starting at position 387 of SEQ ID NO: 1882097
acauuaggauguuugcaaa

SEQ ID NO: 2094937 - RNA, 19 nt, Artificial Sequence
  Description of Artificial Sequence: Synthetic oligonucleotide
  Antisense strand to SEQ ID NO: 2094936
uuugcaaacauccuaaugu

SEQ ID NO: 2094938 - RNA, 19 nt, Artificial Sequence
  Description of Artificial Sequence: Synthetic oligonucleotide
  Sense strand starting at position 481 of SEQ ID NO: 1882097
aaauauucggcaugaagca

SEQ ID NO: 2094939 - RNA, 19 nt, Artificial Sequence
  Description of Artificial Sequence: Synthetic oligonucleotide
  Antisense strand to SEQ ID NO: 2094938
ugcuucaugccgaauauuu

SEQ ID NO: 2094940 - RNA, 19 nt, Artificial Sequence
  Description of Artificial Sequence: Synthetic oligonucleotide
  Sense strand starting at position 585 of SEQ ID NO: 1882097
uucuuuaagcaauggagaa

SEQ ID NO: 2094941 - RNA, 19 nt, Artificial Sequence
  Description of Artificial Sequence: Synthetic oligonucleotide
  Antisense strand to SEQ ID NO: 2094940
uucuccauugcuuaaagaa

SEQ ID NO: 2094942 - RNA, 19 nt, Artificial Sequence
  Description of Artificial Sequence: Synthetic oligonucleotide
  Sense strand starting at position 838 of SEQ ID NO: 1882097
auauccuaccguuaaguuu

SEQ ID NO: 2094943 - RNA, 19 nt, Artificial Sequence
  Description of Artificial Sequence: Synthetic oligonucleotide
  Antisense strand to SEQ ID NO: 2094942
aaacuuaacgguaggauau

SEQ ID NO: 2094944 - RNA, 19 nt, Artificial Sequence
  Description of Artificial Sequence: Synthetic oligonucleotide
  Sense strand starting at position 862 of SEQ ID NO: 1882097
gcgacucauuuagaaagau

SEQ ID NO: 2094945 - RNA, 19 nt, Artificial Sequence
  Description of Artificial Sequence: Synthetic oligonucleotide
  Antisense strand to SEQ ID NO: 2094944
aucuuucuaaaugagucgc

SEQ ID NO: 2094946 - RNA, 19 nt, Artificial Sequence
  Description of Artificial Sequence: Synthetic oligonucleotide
  Sense strand starting at position 980 of SEQ ID NO: 1882097
agcuucccuccuggaagau

SEQ ID NO: 2094947 - RNA, 19 nt, Artificial Sequence
  Description of Artificial Sequence: Synthetic oligonucleotide
  Antisense strand to SEQ ID NO: 2094946
aucuuccaggagggaagcu

SEQ ID NO: 2094948 - RNA, 19 nt, Artificial Sequence
  Description of Artificial Sequence: Synthetic oligonucleotide
  Sense strand starting at position 981 of SEQ ID NO: 1882097
gcuucccuccuggaagauu

SEQ ID NO: 2094949 - RNA, 19 nt, Artificial Sequence
  Description of Artificial Sequence: Synthetic oligonucleotide
  Antisense strand to SEQ ID NO: 2094948
aaucuuccaggagggaagc

SEQ ID NO: 2094950 - RNA, 19 nt, Artificial Sequence
  Description of Artificial Sequence: Synthetic oligonucleotide
  Sense strand starting at position 1007 of SEQ ID NO: 1882097
agccgaaucuuccucagau

SEQ ID NO: 2094951 - RNA, 19 nt, Artificial Sequence
  Description of Artificial Sequence: Synthetic oligonucleotide
  Antisense strand to SEQ ID NO: 2094950
aucugaggaagauucggcu

SEQ ID NO: 2094952 - RNA, 19 nt, Artificial Sequence
  Description of Artificial Sequence: Synthetic oligonucleotide
  Sense strand starting at position 1008 of SEQ ID NO: 1882097
gccgaaucuuccucagauc

SEQ ID NO: 2094953 - RNA, 19 nt, Artificial Sequence
  Description of Artificial Sequence: Synthetic oligonucleotide
  Antisense strand to SEQ ID NO: 2094952
gaucugaggaagauucggc

SEQ ID NO: 2094954 - RNA, 19 nt, Artificial Sequence
  Description of Artificial Sequence: Synthetic oligonucleotide
  Sense strand starting at position 1009 of SEQ ID NO: 1882097
ccgaaucuuccucagaucu

SEQ ID NO: 2094955 - RNA, 19 nt, Artificial Sequence
  Description of Artificial Sequence: Synthetic oligonucleotide
  Antisense strand to SEQ ID NO: 2094954
agaucugaggaagauucgg

SEQ ID NO: 2094956 - RNA, 19 nt, Artificial Sequence
  Description of Artificial Sequence: Synthetic oligonucleotide
  Sense strand starting at position 1059 of SEQ ID NO: 1882097
gcaauaccuccgugaccau

SEQ ID NO: 2094957 - RNA, 19 nt, Artificial Sequence
  Description of Artificial Sequence: Synthetic oligonucleotide
  Antisense strand to SEQ ID NO: 2094956
auggucacggagguauugc

SEQ ID NO: 2094958 - RNA, 19 nt, Artificial Sequence
  Description of Artificial Sequence: Synthetic oligonucleotide
  Sense strand starting at position 1140 of SEQ ID NO: 1882097
guucucuggcacuguaaca

SEQ ID NO: 2094959 - RNA, 19 nt, Artificial Sequence
  Description of Artificial Sequence: Synthetic oligonucleotide
  Antisense strand to SEQ ID NO: 2094958
uguuacagugccagagaac

SEQ ID NO: 2094960 - RNA, 19 nt, Artificial Sequence
  Description of Artificial Sequence: Synthetic oligonucleotide
  Sense strand starting at position 1151 of SEQ ID NO: 1882097
cuguaacacuugucgaaga

SEQ ID NO: 2094961 - RNA, 19 nt, Artificial Sequence
  Description of Artificial Sequence: Synthetic oligonucleotide
  Antisense strand to SEQ ID NO: 2094960
ucuucgacaaguguuacag

SEQ ID NO: 2094962 - RNA, 19 nt, Artificial Sequence
  Description of Artificial Sequence: Synthetic oligonucleotide
  Sense strand starting at position 1153 of SEQ ID NO: 1882097
guaacacuugucgaagaaa

SEQ ID NO: 2094963 - RNA, 19 nt, Artificial Sequence
  Description of Artificial Sequence: Synthetic oligonucleotide
  Antisense strand to SEQ ID NO: 2094962
uuucuucgacaaguguuac

SEQ ID NO: 2094964 - RNA, 19 nt, Artificial Sequence
  Description of Artificial Sequence: Synthetic oligonucleotide
  Sense strand starting at position 1324 of SEQ ID NO: 1882097
ucuugagcuccugguagua

SEQ ID NO: 2094965 - RNA, 19 nt, Artificial Sequence
  Description of Artificial Sequence: Synthetic oligonucleotide
  Antisense strand to SEQ ID NO: 2094964
uacuaccaggagcucaaga

SEQ ID NO: 2094966 - RNA, 19 nt, Artificial Sequence
  Description of Artificial Sequence: Synthetic oligonucleotide
  Sense strand starting at position 2706 of SEQ ID NO: 1882097
aagggauucgucuggaaag

SEQ ID NO: 2094967 - RNA, 19 nt, Artificial Sequence
  Description of Artificial Sequence: Synthetic oligonucleotide
  Antisense strand to SEQ ID NO: 2094966
cuuuccagacgaaucccuu

SEQ ID NO: 2094968 - RNA, 19 nt, Artificial Sequence
  Description of Artificial Sequence: Synthetic oligonucleotide
  Sense strand starting at position 2770 of SEQ ID NO: 1882097
ugaaacugaucuggaaaga

SEQ ID NO: 2094969 - RNA, 19 nt, Artificial Sequence
  Description of Artificial Sequence: Synthetic oligonucleotide
  Antisense strand to SEQ ID NO: 2094968
ucuuuccagaucaguuuca

SEQ ID NO: 2094970 - RNA, 19 nt, Artificial Sequence
  Description of Artificial Sequence: Synthetic oligonucleotide
  Sense strand starting at position 3230 of SEQ ID NO: 1882097
cuagcaguuucuccuuaua

SEQ ID NO: 2094971 - RNA, 19 nt, Artificial Sequence
  Description of Artificial Sequence: Synthetic oligonucleotide
  Antisense strand to SEQ ID NO: 2094970
uauaaggagaaacugcuag

SEQ ID NO: 2094972 - RNA, 19 nt, Artificial Sequence
  Description of Artificial Sequence: Synthetic oligonucleotide
  Sense strand starting at position 3241 of SEQ ID NO: 1882097
uccuuauaggcuugaucac

SEQ ID NO: 2094973 - RNA, 19 nt, Artificial Sequence
  Description of Artificial Sequence: Synthetic oligonucleotide
  Antisense strand to SEQ ID NO: 2094972
gugaucaagccuauaagga

SEQ ID NO: 2094974 - RNA, 19 nt, Artificial Sequence
  Description of Artificial Sequence: Synthetic oligonucleotide
  Sense strand starting at position 3242 of SEQ ID NO: 1882097
ccuuauaggcuugaucacu

SEQ ID NO: 2094975 - RNA, 19 nt, Artificial Sequence
  Description of Artificial Sequence: Synthetic oligonucleotide
  Antisense strand to SEQ ID NO: 2094974
agugaucaagccuauaagg

SEQ ID NO: 2094976 - RNA, 19 nt, Artificial Sequence
  Description of Artificial Sequence: Synthetic oligonucleotide
  Sense strand starting at position 3404 of SEQ ID NO: 1882097
acuggcugugucugaaauc

SEQ ID NO: 2094977 - RNA, 19 nt, Artificial Sequence
  Description of Artificial Sequence: Synthetic oligonucleotide
  Antisense strand to SEQ ID NO: 2094976
gauuucagacacagccagu

SEQ ID NO: 2094978 - RNA, 19 nt, Artificial Sequence
  Description of Artificial Sequence: Synthetic oligonucleotide
  Sense strand starting at position 3489 of SEQ ID NO: 1882097
aaacgacaggucgaaaguu

SEQ ID NO: 2094979 - RNA, 19 nt, Artificial Sequence
  Description of Artificial Sequence: Synthetic oligonucleotide
  Antisense strand to SEQ ID NO: 2094978
aacuuucgaccugucguuu

SEQ ID NO: 2094980 - RNA, 19 nt, Artificial Sequence
  Description of Artificial Sequence: Synthetic oligonucleotide
  Sense strand starting at position 3721 of SEQ ID NO: 1882097
gugucaugcauuccagcga

SEQ ID NO: 2094981 - RNA, 19 nt, Artificial Sequence
  Description of Artificial Sequence: Synthetic oligonucleotide
  Antisense strand to SEQ ID NO: 2094980
ucgcuggaaugcaugacac

SEQ ID NO: 2094982 - RNA, 19 nt, Artificial Sequence
  Description of Artificial Sequence: Synthetic oligonucleotide
  Sense strand starting at position 3725 of SEQ ID NO: 1882097
caugcauuccagcgaagag

SEQ ID NO: 2094983 - RNA, 19 nt, Artificial Sequence
  Description of Artificial Sequence: Synthetic oligonucleotide
  Antisense strand to SEQ ID NO: 2094982
cucuucgcuggaaugcaug

SEQ ID NO: 2094984 - RNA, 19 nt, Artificial Sequence
  Description of Artificial Sequence: Synthetic oligonucleotide
  Sense strand starting at position 3726 of SEQ ID NO: 1882097
augcauuccagcgaagaga

SEQ ID NO: 2094985 - RNA, 19 nt, Artificial Sequence
  Description of Artificial Sequence: Synthetic oligonucleotide
  Antisense strand to SEQ ID NO: 2094984
ucucuucgcuggaaugcau

SEQ ID NO: 2094986 - RNA, 19 nt, Artificial Sequence
  Description of Artificial Sequence: Synthetic oligonucleotide
  Sense strand starting at position 3797 of SEQ ID NO: 1882097
guaccugaguucccugaaa

SEQ ID NO: 2094987 - RNA, 19 nt, Artificial Sequence
  Description of Artificial Sequence: Synthetic oligonucleotide
  Antisense strand to SEQ ID NO: 2094986
uuucagggaacucagguac

SEQ ID NO: 2094988 - RNA, 19 nt, Artificial Sequence
  Description of Artificial Sequence: Synthetic oligonucleotide
  Sense strand starting at position 3853 of SEQ ID NO: 1882097
cucagugugcuuugaugac

SEQ ID NO: 2094989 - RNA, 19 nt, Artificial Sequence
  Description of Artificial Sequence: Synthetic oligonucleotide
  Antisense strand to SEQ ID NO: 2094988
gucaucaaagcacacugag

SEQ ID NO: 2094990 - RNA, 19 nt, Artificial Sequence
  Description of Artificial Sequence: Synthetic oligonucleotide
  Sense strand starting at position 3903 of SEQ ID NO: 1882097
aucagaggcuuagugagua

SEQ ID NO: 2094991 - RNA, 19 nt, Artificial Sequence
  Description of Artificial Sequence: Synthetic oligonucleotide
  Antisense strand to SEQ ID NO: 2094990
uacucacuaagccucugau

SEQ ID NO: 2094992 - RNA, 19 nt, Artificial Sequence
  Description of Artificial Sequence: Synthetic oligonucleotide
  Sense strand starting at position 3907 of SEQ ID NO: 1882097
gaggcuuagugaguacugu

SEQ ID NO: 2094993 - RNA, 19 nt, Artificial Sequence
  Description of Artificial Sequence: Synthetic oligonucleotide
  Antisense strand to SEQ ID NO: 2094992
acaguacucacuaagccuc

SEQ ID NO: 2094994 - RNA, 19 nt, Artificial Sequence
  Description of Artificial Sequence: Synthetic oligonucleotide
  Sense strand starting at position 3916 of SEQ ID NO: 1882097
ugaguacugugugccugaa

SEQ ID NO: 2094995 - RNA, 19 nt, Artificial Sequence
  Description of Artificial Sequence: Synthetic oligonucleotide
  Antisense strand to SEQ ID NO: 2094994
uucaggcacacaguacuca

SEQ ID NO: 2094996 - RNA, 19 nt, Artificial Sequence
  Description of Artificial Sequence: Synthetic oligonucleotide
  Sense strand starting at position 3918 of SEQ ID NO: 1882097
aguacugugugccugaaac

SEQ ID NO: 2094997 - RNA, 19 nt, Artificial Sequence
  Description of Artificial Sequence: Synthetic oligonucleotide
  Antisense strand to SEQ ID NO: 2094996
guuucaggcacacaguacu

SEQ ID NO: 2094998 - RNA, 19 nt, Artificial Sequence
  Description of Artificial Sequence: Synthetic oligonucleotide
  Sense strand starting at position 3969 of SEQ ID NO: 1882097
gggaucaaccauugcuaca

SEQ ID NO: 2094999 - RNA, 19 nt, Artificial Sequence
  Description of Artificial Sequence: Synthetic oligonucleotide
  Antisense strand to SEQ ID NO: 2094998
uguagcaaugguugauccc

SEQ ID NO: 2095000 - RNA, 19 nt, Artificial Sequence
  Description of Artificial Sequence: Synthetic oligonucleotide
  Sense strand starting at position 28 of SEQ ID NO: 1882098
cuuggcuugagucagcaua

SEQ ID NO: 2095001 - RNA, 19 nt, Artificial Sequence
  Description of Artificial Sequence: Synthetic oligonucleotide
  Antisense strand to SEQ ID NO: 2095000
uaugcugacucaagccaag

SEQ ID NO: 2095002 - RNA, 19 nt, Artificial Sequence
  Description of Artificial Sequence: Synthetic oligonucleotide
  Sense strand starting at position 30 of SEQ ID NO: 1882098
uggcuugagucagcauaag

SEQ ID NO: 2095003 - RNA, 19 nt, Artificial Sequence
  Description of Artificial Sequence: Synthetic oligonucleotide
  Antisense strand to SEQ ID NO: 2095002
cuuaugcugacucaagcca

SEQ ID NO: 2095004 - RNA, 19 nt, Artificial Sequence
  Description of Artificial Sequence: Synthetic oligonucleotide
  Sense strand starting at position 141 of SEQ ID NO: 1882098
cuuauaugaccucagguua

SEQ ID NO: 2095005 - RNA, 19 nt, Artificial Sequence
  Description of Artificial Sequence: Synthetic oligonucleotide
  Antisense strand to SEQ ID NO: 2095004
uaaccugaggucauauaag

SEQ ID NO: 2095006 - RNA, 19 nt, Artificial Sequence
  Description of Artificial Sequence: Synthetic oligonucleotide
  Sense strand starting at position 155 of SEQ ID NO: 1882098
gguuaacuugauuaaagcu

SEQ ID NO: 2095007 - RNA, 19 nt, Artificial Sequence
  Description of Artificial Sequence: Synthetic oligonucleotide
  Antisense strand to SEQ ID NO: 2095006
agcuuuaaucaaguuaacc

SEQ ID NO: 2095008 - RNA, 19 nt, Artificial Sequence
  Description of Artificial Sequence: Synthetic oligonucleotide
  Sense strand starting at position 196 of SEQ ID NO: 1882098
aacugauauuuggagguuu

SEQ ID NO: 2095009 - RNA, 19 nt, Artificial Sequence
  Description of Artificial Sequence: Synthetic oligonucleotide
  Antisense strand to SEQ ID NO: 2095008
aaaccuccaaauaucaguu

SEQ ID NO: 2095010 - RNA, 19 nt, Artificial Sequence
  Description of Artificial Sequence: Synthetic oligonucleotide
  Sense strand starting at position 248 of SEQ ID NO: 1882098
cacuguuaaggguauaauc

SEQ ID NO: 2095011 - RNA, 19 nt, Artificial Sequence
  Description of Artificial Sequence: Synthetic oligonucleotide
  Antisense strand to SEQ ID NO: 2095010
gauuauacccuuaacagug

SEQ ID NO: 2095012 - RNA, 19 nt, Artificial Sequence
  Description of Artificial Sequence: Synthetic oligonucleotide
  Sense strand starting at position 266 of SEQ ID NO: 1882098
cgcgaauuuauauggugcu

SEQ ID NO: 2095013 - RNA, 19 nt, Artificial Sequence
  Description of Artificial Sequence: Synthetic oligonucleotide
  Antisense strand to SEQ ID NO: 2095012
agcaccauauaaauucgcg

SEQ ID NO: 2095014 - RNA, 19 nt, Artificial Sequence
  Description of Artificial Sequence: Synthetic oligonucleotide
  Sense strand starting at position 344 of SEQ ID NO: 1882098
gauaaauuauaugugggca

SEQ ID NO: 2095015 - RNA, 19 nt, Artificial Sequence
  Description of Artificial Sequence: Synthetic oligonucleotide
  Antisense strand to SEQ ID NO: 2095014
ugcccacauauaauuuauc

SEQ ID NO: 2095016 - RNA, 19 nt, Artificial Sequence
  Description of Artificial Sequence: Synthetic oligonucleotide
  Sense strand starting at position 349 of SEQ ID NO: 1882098
auuauaugugggcaccaaa

SEQ ID NO: 2095017 - RNA, 19 nt, Artificial Sequence
  Description of Artificial Sequence: Synthetic oligonucleotide
  Antisense strand to SEQ ID NO: 2095016
uuuggugcccacauauaau

SEQ ID NO: 2095018 - RNA, 19 nt, Artificial Sequence
  Description of Artificial Sequence: Synthetic oligonucleotide
  Sense strand starting at position 432 of SEQ ID NO: 1882098
ucauacugggcugaauauu

SEQ ID NO: 2095019 - RNA, 19 nt, Artificial Sequence
  Description of Artificial Sequence: Synthetic oligonucleotide
  Antisense strand to SEQ ID NO: 2095018
aauauucagcccaguauga

SEQ ID NO: 2095020 - RNA, 19 nt, Artificial Sequence
  Description of Artificial Sequence: Synthetic oligonucleotide
  Sense strand starting at position 623 of SEQ ID NO: 1882098
uaaugagagguguggcaaa

SEQ ID NO: 2095021 - RNA, 19 nt, Artificial Sequence
  Description of Artificial Sequence: Synthetic oligonucleotide
  Antisense strand to SEQ ID NO: 2095020
uuugccacaccucucauua

SEQ ID NO: 2095022 - RNA, 19 nt, Artificial Sequence
  Description of Artificial Sequence: Synthetic oligonucleotide
  Sense strand starting at position 788 of SEQ ID NO: 1882098
ucagcuuuccuugggauga

SEQ ID NO: 2095023 - RNA, 19 nt, Artificial Sequence
  Description of Artificial Sequence: Synthetic oligonucleotide
  Antisense strand to SEQ ID NO: 2095022
ucaucccaaggaaagcuga

SEQ ID NO: 2095024 - RNA, 19 nt, Artificial Sequence
  Description of Artificial Sequence: Synthetic oligonucleotide
  Sense strand starting at position 792 of SEQ ID NO: 1882098
cuuuccuugggaugacauu

SEQ ID NO: 2095025 - RNA, 19 nt, Artificial Sequence
  Description of Artificial Sequence: Synthetic oligonucleotide
  Antisense strand to SEQ ID NO: 2095024
aaugucaucccaaggaaag

SEQ ID NO: 2095026 - RNA, 19 nt, Artificial Sequence
  Description of Artificial Sequence: Synthetic oligonucleotide
  Sense strand starting at position 905 of SEQ ID NO: 1882098
cuaagauauguuuaugguc

SEQ ID NO: 2095027 - RNA, 19 nt, Artificial Sequence
  Description of Artificial Sequence: Synthetic oligonucleotide
  Antisense strand to SEQ ID NO: 2095026
gaccauaaacauaucuuag

SEQ ID NO: 2095028 - RNA, 19 nt, Artificial Sequence
  Description of Artificial Sequence: Synthetic oligonucleotide
  Sense strand starting at position 910 of SEQ ID NO: 1882098
auauguuuauggucgauac

SEQ ID NO: 2095029 - RNA, 19 nt, Artificial Sequence
  Description of Artificial Sequence: Synthetic oligonucleotide
  Antisense strand to SEQ ID NO: 2095028
guaucgaccauaaacauau

SEQ ID NO: 2095030 - RNA, 19 nt, Artificial Sequence
  Description of Artificial Sequence: Synthetic oligonucleotide
  Sense strand starting at position 912 of SEQ ID NO: 1882098
auguuuauggucgauacuu

SEQ ID NO: 2095031 - RNA, 19 nt, Artificial Sequence
  Description of Artificial Sequence: Synthetic oligonucleotide
  Antisense strand to SEQ ID NO: 2095030
aaguaucgaccauaaacau

SEQ ID NO: 2095032 - RNA, 19 nt, Artificial Sequence
  Description of Artificial Sequence: Synthetic oligonucleotide
  Sense strand starting at position 918 of SEQ ID NO: 1882098
auggucgauacuuguugau

SEQ ID NO: 2095033 - RNA, 19 nt, Artificial Sequence
  Description of Artificial Sequence: Synthetic oligonucleotide
  Antisense strand to SEQ ID NO: 2095032
aucaacaaguaucgaccau

SEQ ID NO: 2095034 - RNA, 19 nt, Artificial Sequence
  Description of Artificial Sequence: Synthetic oligonucleotide
  Sense strand starting at position 920 of SEQ ID NO: 1882098
ggucgauacuuguugauca

SEQ ID NO: 2095035 - RNA, 19 nt, Artificial Sequence
  Description of Artificial Sequence: Synthetic oligonucleotide
  Antisense strand to SEQ ID NO: 2095034
ugaucaacaaguaucgacc

SEQ ID NO: 2095036 - RNA, 19 nt, Artificial Sequence
  Description of Artificial Sequence: Synthetic oligonucleotide
  Sense strand starting at position 922 of SEQ ID NO: 1882098
ucgauacuuguugaucacu

SEQ ID NO: 2095037 - RNA, 19 nt, Artificial Sequence
  Description of Artificial Sequence: Synthetic oligonucleotide
  Antisense strand to SEQ ID NO: 2095036
agugaucaacaaguaucga

SEQ ID NO: 2095038 - RNA, 19 nt, Artificial Sequence
  Description of Artificial Sequence: Synthetic oligonucleotide
  Sense strand starting at position 980 of SEQ ID NO: 1882098
uugugauacuuuccagggu

SEQ ID NO: 2095039 - RNA, 19 nt, Artificial Sequence
  Description of Artificial Sequence: Synthetic oligonucleotide
  Antisense strand to SEQ ID NO: 2095038
acccuggaaaguaucacaa

SEQ ID NO: 2095040 - RNA, 19 nt, Artificial Sequence
  Description of Artificial Sequence: Synthetic oligonucleotide
  Sense strand starting at position 1050 of SEQ ID NO: 1882098
ccugcugauuugucaggca

SEQ ID NO: 2095041 - RNA, 19 nt, Artificial Sequence
  Description of Artificial Sequence: Synthetic oligonucleotide
  Antisense strand to SEQ ID NO: 2095040
ugccugacaaaucagcagg

SEQ ID NO: 2095042 - RNA, 19 nt, Artificial Sequence
  Description of Artificial Sequence: Synthetic oligonucleotide
  Sense strand starting at position 1122 of SEQ ID NO: 1882098
ccuguuauccucuaagaga

SEQ ID NO: 2095043 - RNA, 19 nt, Artificial Sequence
  Description of Artificial Sequence: Synthetic oligonucleotide
  Antisense strand to SEQ ID NO: 2095042
ucucuuagaggauaacagg

SEQ ID NO: 2095044 - RNA, 19 nt, Artificial Sequence
  Description of Artificial Sequence: Synthetic oligonucleotide
  Sense strand starting at position 1576 of SEQ ID NO: 1882098
acuguuguagccgaagaaa

SEQ ID NO: 2095045 - RNA, 19 nt, Artificial Sequence
  Description of Artificial Sequence: Synthetic oligonucleotide
  Antisense strand to SEQ ID NO: 2095044
uuucuucggcuacaacagu

SEQ ID NO: 2095046 - RNA, 19 nt, Artificial Sequence
  Description of Artificial Sequence: Synthetic oligonucleotide
  Sense strand starting at position 1579 of SEQ ID NO: 1882098
guuguagccgaagaaacuu

SEQ ID NO: 2095047 - RNA, 19 nt, Artificial Sequence
  Description of Artificial Sequence: Synthetic oligonucleotide
  Antisense strand to SEQ ID NO: 2095046
aaguuucuucggcuacaac

SEQ ID NO: 2095048 - RNA, 19 nt, Artificial Sequence
  Description of Artificial Sequence: Synthetic oligonucleotide
  Sense strand starting at position 1588 of SEQ ID NO: 1882098
gaagaaacuuugucggaca

SEQ ID NO: 2095049 - RNA, 19 nt, Artificial Sequence
  Description of Artificial Sequence: Synthetic oligonucleotide
  Antisense strand to SEQ ID NO: 2095048
uguccgacaaaguuucuuc

SEQ ID NO: 2095050 - RNA, 19 nt, Artificial Sequence
  Description of Artificial Sequence: Synthetic oligonucleotide
  Sense strand starting at position 1724 of SEQ ID NO: 1882098
cuucucuugccugaagauu

SEQ ID NO: 2095051 - RNA, 19 nt, Artificial Sequence
  Description of Artificial Sequence: Synthetic oligonucleotide
  Antisense strand to SEQ ID NO: 2095050
aaucuucaggcaagagaag

SEQ ID NO: 2095052 - RNA, 19 nt, Artificial Sequence
  Description of Artificial Sequence: Synthetic oligonucleotide
  Sense strand starting at position 2616 of SEQ ID NO: 1882098
uucucagacuguuugaaau

SEQ ID NO: 2095053 - RNA, 19 nt, Artificial Sequence
  Description of Artificial Sequence: Synthetic oligonucleotide
  Antisense strand to SEQ ID NO: 2095052
auuucaaacagucugagaa

SEQ ID NO: 2095054 - RNA, 19 nt, Artificial Sequence
  Description of Artificial Sequence: Synthetic oligonucleotide
  Sense strand starting at position 2804 of SEQ ID NO: 1882098
ugggaauccguguaucucu

SEQ ID NO: 2095055 - RNA, 19 nt, Artificial Sequence
  Description of Artificial Sequence: Synthetic oligonucleotide
  Antisense strand to SEQ ID NO: 2095054
agagauacacggauuccca

SEQ ID NO: 2095056 - RNA, 19 nt, Artificial Sequence
  Description of Artificial Sequence: Synthetic oligonucleotide
  Sense strand starting at position 3017 of SEQ ID NO: 1882098
cugugagggcacugaaauc

SEQ ID NO: 2095057 - RNA, 19 nt, Artificial Sequence
  Description of Artificial Sequence: Synthetic oligonucleotide
  Antisense strand to SEQ ID NO: 2095056
gauuucagugcccucacag

SEQ ID NO: 2095058 - RNA, 19 nt, Artificial Sequence
  Description of Artificial Sequence: Synthetic oligonucleotide
  Sense strand starting at position 3075 of SEQ ID NO: 1882098
ccgcgauuccuuucucgau

SEQ ID NO: 2095059 - RNA, 19 nt, Artificial Sequence
  Description of Artificial Sequence: Synthetic oligonucleotide
  Antisense strand to SEQ ID NO: 2095058
aucgagaaaggaaucgcgg

SEQ ID NO: 2095060 - RNA, 19 nt, Artificial Sequence
  Description of Artificial Sequence: Synthetic oligonucleotide
  Sense strand starting at position 3079 of SEQ ID NO: 1882098
gauuccuuucucgauaguu

SEQ ID NO: 2095061 - RNA, 19 nt, Artificial Sequence
  Description of Artificial Sequence: Synthetic oligonucleotide
  Antisense strand to SEQ ID NO: 2095060
aacuaucgagaaaggaauc

SEQ ID NO: 2095062 - RNA, 19 nt, Artificial Sequence
  Description of Artificial Sequence: Synthetic oligonucleotide
  Sense strand starting at position 3081 of SEQ ID NO: 1882098
uuccuuucucgauaguucu

SEQ ID NO: 2095063 - RNA, 19 nt, Artificial Sequence
  Description of Artificial Sequence: Synthetic oligonucleotide
  Antisense strand to SEQ ID NO: 2095062
agaacuaucgagaaaggaa

SEQ ID NO: 2095064 - RNA, 19 nt, Artificial Sequence
  Description of Artificial Sequence: Synthetic oligonucleotide
  Sense strand starting at position 3193 of SEQ ID NO: 1882098
gauggaguggcuugguaac

SEQ ID NO: 2095065 - RNA, 19 nt, Artificial Sequence
  Description of Artificial Sequence: Synthetic oligonucleotide
  Antisense strand to SEQ ID NO: 2095064
guuaccaagccacuccauc

SEQ ID NO: 2095066 - RNA, 19 nt, Artificial Sequence
  Description of Artificial Sequence: Synthetic oligonucleotide
  Sense strand starting at position 3296 of SEQ ID NO: 1882098
aauguaggauacuuaguuu

SEQ ID NO: 2095067 - RNA, 19 nt, Artificial Sequence
  Description of Artificial Sequence: Synthetic oligonucleotide
  Antisense strand to SEQ ID NO: 2095066
aaacuaaguauccuacauu

SEQ ID NO: 2095068 - RNA, 19 nt, Artificial Sequence
  Description of Artificial Sequence: Synthetic oligonucleotide
  Sense strand starting at position 3299 of SEQ ID NO: 1882098
guaggauacuuaguuugag

SEQ ID NO: 2095069 - RNA, 19 nt, Artificial Sequence
  Description of Artificial Sequence: Synthetic oligonucleotide
  Antisense strand to SEQ ID NO: 2095068
cucaaacuaaguauccuac

SEQ ID NO: 2095070 - RNA, 19 nt, Artificial Sequence
  Description of Artificial Sequence: Synthetic oligonucleotide
  Sense strand starting at position 3302 of SEQ ID NO: 1882098
ggauacuuaguuugagcua

SEQ ID NO: 2095071 - RNA, 19 nt, Artificial Sequence
  Description of Artificial Sequence: Synthetic oligonucleotide
  Antisense strand to SEQ ID NO: 2095070
uagcucaaacuaaguaucc

SEQ ID NO: 2095072 - RNA, 19 nt, Artificial Sequence
  Description of Artificial Sequence: Synthetic oligonucleotide
  Sense strand starting at position 3305 of SEQ ID NO: 1882098
uacuuaguuugagcuagaa

SEQ ID NO: 2095073 - RNA, 19 nt, Artificial Sequence
  Description of Artificial Sequence: Synthetic oligonucleotide
  Antisense strand to SEQ ID NO: 2095072
uucuagcucaaacuaagua

SEQ ID NO: 2095074 - RNA, 19 nt, Artificial Sequence
  Description of Artificial Sequence: Synthetic oligonucleotide
  Sense strand starting at position 3392 of SEQ ID NO: 1882098
gggucaaacuacuuaucac

SEQ ID NO: 2095075 - RNA, 19 nt, Artificial Sequence
  Description of Artificial Sequence: Synthetic oligonucleotide
  Antisense strand to SEQ ID NO: 2095074
gugauaaguaguuugaccc

SEQ ID NO: 2095076 - RNA, 19 nt, Artificial Sequence
  Description of Artificial Sequence: Synthetic oligonucleotide
  Sense strand starting at position 3625 of SEQ ID NO: 1882098
uuuggagucugcucaugau

SEQ ID NO: 2095077 - RNA, 19 nt, Artificial Sequence
  Description of Artificial Sequence: Synthetic oligonucleotide
  Antisense strand to SEQ ID NO: 2095076
aucaugagcagacuccaaa

SEQ ID NO: 2095078 - RNA, 19 nt, Artificial Sequence
  Description of Artificial Sequence: Synthetic oligonucleotide
  Sense strand starting at position 3925 of SEQ ID NO: 1882098
aguucucugcuguaaauug

SEQ ID NO: 2095079 - RNA, 19 nt, Artificial Sequence
  Description of Artificial Sequence: Synthetic oligonucleotide
  Antisense strand to SEQ ID NO: 2095078
caauuuacagcagagaacu

SEQ ID NO: 2095080 - RNA, 19 nt, Artificial Sequence
  Description of Artificial Sequence: Synthetic oligonucleotide
  Sense strand starting at position 1295 of SEQ ID NO: 1882099
ggccaagacucauccacaa

SEQ ID NO: 2095081 - RNA, 19 nt, Artificial Sequence
  Description of Artificial Sequence: Synthetic oligonucleotide
  Antisense strand to SEQ ID NO: 2095080
uuguggaugagucuuggcc

SEQ ID NO: 2095082 - RNA, 19 nt, Artificial Sequence
  Description of Artificial Sequence: Synthetic oligonucleotide
  Sense strand starting at position 2134 of SEQ ID NO: 1882099
gagguuuaggagugaggca

SEQ ID NO: 2095083 - RNA, 19 nt, Artificial Sequence
  Description of Artificial Sequence: Synthetic oligonucleotide
  Antisense strand to SEQ ID NO: 2095082
ugccucacuccuaaaccuc

SEQ ID NO: 2095084 - RNA, 19 nt, Artificial Sequence
  Description of Artificial Sequence: Synthetic oligonucleotide
  Sense strand starting at position 2135 of SEQ ID NO: 1882099
agguuuaggagugaggcaa

SEQ ID NO: 2095085 - RNA, 19 nt, Artificial Sequence
  Description of Artificial Sequence: Synthetic oligonucleotide
  Antisense strand to SEQ ID NO: 2095084
uugccucacuccuaaaccu

SEQ ID NO: 2095086 - RNA, 19 nt, Artificial Sequence
  Description of Artificial Sequence: Synthetic oligonucleotide
  Sense strand starting at position 2524 of SEQ ID NO: 1882099
gugguauccggaggcauuc

SEQ ID NO: 2095087 - RNA, 19 nt, Artificial Sequence
  Description of Artificial Sequence: Synthetic oligonucleotide
  Antisense strand to SEQ ID NO: 2095086
gaaugccuccggauaccac

SEQ ID NO: 2095088 - RNA, 19 nt, Artificial Sequence
  Description of Artificial Sequence: Synthetic oligonucleotide
  Sense strand starting at position 2547 of SEQ ID NO: 1882099
cguggacugacuugugguu

SEQ ID NO: 2095089 - RNA, 19 nt, Artificial Sequence
  Description of Artificial Sequence: Synthetic oligonucleotide
  Antisense strand to SEQ ID NO: 2095088
aaccacaagucaguccacg

SEQ ID NO: 2095090 - RNA, 19 nt, Artificial Sequence
  Description of Artificial Sequence: Synthetic oligonucleotide
  Sense strand starting at position 2684 of SEQ ID NO: 1882099
ggagccucuuccuugguau

SEQ ID NO: 2095091 - RNA, 19 nt, Artificial Sequence
  Description of Artificial Sequence: Synthetic oligonucleotide
  Antisense strand to SEQ ID NO: 2095090
auaccaaggaagaggcucc

SEQ ID NO: 2095092 - RNA, 19 nt, Artificial Sequence
  Description of Artificial Sequence: Synthetic oligonucleotide
  Sense strand starting at position 2685 of SEQ ID NO: 1882099
gagccucuuccuugguauu

SEQ ID NO: 2095093 - RNA, 19 nt, Artificial Sequence
  Description of Artificial Sequence: Synthetic oligonucleotide
  Antisense strand to SEQ ID NO: 2095092
aauaccaaggaagaggcuc

SEQ ID NO: 2095094 - RNA, 19 nt, Artificial Sequence
  Description of Artificial Sequence: Synthetic oligonucleotide
  Sense strand starting at position 2704 of SEQ ID NO: 1882099
caguaauaggucugagcuu

SEQ ID NO: 2095095 - RNA, 19 nt, Artificial Sequence
  Description of Artificial Sequence: Synthetic oligonucleotide
  Antisense strand to SEQ ID NO: 2095094
aagcucagaccuauuacug

SEQ ID NO: 2095096 - RNA, 19 nt, Artificial Sequence
  Description of Artificial Sequence: Synthetic oligonucleotide
  Sense strand starting at position 2743 of SEQ ID NO: 1882099
gugcuuacuccugaagcgu

SEQ ID NO: 2095097 - RNA, 19 nt, Artificial Sequence
  Description of Artificial Sequence: Synthetic oligonucleotide
  Antisense strand to SEQ ID NO: 2095096
acgcuucaggaguaagcac

SEQ ID NO: 2095098 - RNA, 19 nt, Artificial Sequence
  Description of Artificial Sequence: Synthetic oligonucleotide
  Sense strand starting at position 2881 of SEQ ID NO: 1882099
uuaaaugccucuuaggaag

SEQ ID NO: 2095099 - RNA, 19 nt, Artificial Sequence
  Description of Artificial Sequence: Synthetic oligonucleotide
  Antisense strand to SEQ ID NO: 2095098
cuuccuaagaggcauuuaa

SEQ ID NO: 2095100 - RNA, 19 nt, Artificial Sequence
  Description of Artificial Sequence: Synthetic oligonucleotide
  Sense strand starting at position 2912 of SEQ ID NO: 1882099
ugcagauagacuuggauau

SEQ ID NO: 2095101 - RNA, 19 nt, Artificial Sequence
  Description of Artificial Sequence: Synthetic oligonucleotide
  Antisense strand to SEQ ID NO: 2095100
auauccaagucuaucugca

SEQ ID NO: 2095102 - RNA, 19 nt, Artificial Sequence
  Description of Artificial Sequence: Synthetic oligonucleotide
  Sense strand starting at position 2913 of SEQ ID NO: 1882099
gcagauagacuuggauaua

SEQ ID NO: 2095103 - RNA, 19 nt, Artificial Sequence
  Description of Artificial Sequence: Synthetic oligonucleotide
  Antisense strand to SEQ ID NO: 2095102
uauauccaagucuaucugc

SEQ ID NO: 2095104 - RNA, 19 nt, Artificial Sequence
  Description of Artificial Sequence: Synthetic oligonucleotide
  Sense strand starting at position 2914 of SEQ ID NO: 1882099
cagauagacuuggauauau

SEQ ID NO: 2095105 - RNA, 19 nt, Artificial Sequence
  Description of Artificial Sequence: Synthetic oligonucleotide
  Antisense strand to SEQ ID NO: 2095104
auauauccaagucuaucug

SEQ ID NO: 2095106 - RNA, 19 nt, Artificial Sequence
  Description of Artificial Sequence: Synthetic oligonucleotide
  Sense strand starting at position 3092 of SEQ ID NO: 1882099
uuuccaucuugaguauauc

SEQ ID NO: 2095107 - RNA, 19 nt, Artificial Sequence
  Description of Artificial Sequence: Synthetic oligonucleotide
  Antisense strand to SEQ ID NO: 2095106
gauauacucaagauggaaa

SEQ ID NO: 2095108 - RNA, 19 nt, Artificial Sequence
  Description of Artificial Sequence: Synthetic oligonucleotide
  Sense strand starting at position 3093 of SEQ ID NO: 1882099
uuccaucuugaguauauca

SEQ ID NO: 2095109 - RNA, 19 nt, Artificial Sequence
  Description of Artificial Sequence: Synthetic oligonucleotide
  Antisense strand to SEQ ID NO: 2095108
ugauauacucaagauggaa

SEQ ID NO: 2095110 - RNA, 19 nt, Artificial Sequence
  Description of Artificial Sequence: Synthetic oligonucleotide
  Sense strand starting at position 3095 of SEQ ID NO: 1882099
ccaucuugaguauaucauu

SEQ ID NO: 2095111 - RNA, 19 nt, Artificial Sequence
  Description of Artificial Sequence: Synthetic oligonucleotide
  Antisense strand to SEQ ID NO: 2095110
aaugauauacucaagaugg

SEQ ID NO: 2095112 - RNA, 19 nt, Artificial Sequence
  Description of Artificial Sequence: Synthetic oligonucleotide
  Sense strand starting at position 3216 of SEQ ID NO: 1882099
cccugucaggcuugauuau

SEQ ID NO: 2095113 - RNA, 19 nt, Artificial Sequence
  Description of Artificial Sequence: Synthetic oligonucleotide
  Antisense strand to SEQ ID NO: 2095112
auaaucaagccugacaggg

SEQ ID NO: 2095114 - RNA, 19 nt, Artificial Sequence
  Description of Artificial Sequence: Synthetic oligonucleotide
  Sense strand starting at position 3223 of SEQ ID NO: 1882099
aggcuugauuaucauaggu

SEQ ID NO: 2095115 - RNA, 19 nt, Artificial Sequence
  Description of Artificial Sequence: Synthetic oligonucleotide
  Antisense strand to SEQ ID NO: 2095114
accuaugauaaucaagccu

SEQ ID NO: 2095116 - RNA, 19 nt, Artificial Sequence
  Description of Artificial Sequence: Synthetic oligonucleotide
  Sense strand starting at position 3225 of SEQ ID NO: 1882099
gcuugauuaucauaggucu

SEQ ID NO: 2095117 - RNA, 19 nt, Artificial Sequence
  Description of Artificial Sequence: Synthetic oligonucleotide
  Antisense strand to SEQ ID NO: 2095116
agaccuaugauaaucaagc

SEQ ID NO: 2095118 - RNA, 19 nt, Artificial Sequence
  Description of Artificial Sequence: Synthetic oligonucleotide
  Sense strand starting at position 3228 of SEQ ID NO: 1882099
ugauuaucauaggucuaac

SEQ ID NO: 2095119 - RNA, 19 nt, Artificial Sequence
  Description of Artificial Sequence: Synthetic oligonucleotide
  Antisense strand to SEQ ID NO: 2095118
guuagaccuaugauaauca

SEQ ID NO: 2095120 - RNA, 19 nt, Artificial Sequence
  Description of Artificial Sequence: Synthetic oligonucleotide
  Sense strand starting at position 3276 of SEQ ID NO: 1882099
ggcucuuagugcccuuauu

SEQ ID NO: 2095121 - RNA, 19 nt, Artificial Sequence
  Description of Artificial Sequence: Synthetic oligonucleotide
  Antisense strand to SEQ ID NO: 2095120
aauaagggcacuaagagcc

SEQ ID NO: 2095122 - RNA, 19 nt, Artificial Sequence
  Description of Artificial Sequence: Synthetic oligonucleotide
  Sense strand starting at position 3570 of SEQ ID NO: 1882099
cuuauuguuuagcacuuua

SEQ ID NO: 2095123 - RNA, 19 nt, Artificial Sequence
  Description of Artificial Sequence: Synthetic oligonucleotide
  Antisense strand to SEQ ID NO: 2095122
uaaagugcuaaacaauaag

SEQ ID NO: 2095124 - RNA, 19 nt, Artificial Sequence
  Description of Artificial Sequence: Synthetic oligonucleotide
  Sense strand starting at position 3609 of SEQ ID NO: 1882099
guugaacuguaccacuuau

SEQ ID NO: 2095125 - RNA, 19 nt, Artificial Sequence
  Description of Artificial Sequence: Synthetic oligonucleotide
  Antisense strand to SEQ ID NO: 2095124
auaagugguacaguucaac

SEQ ID NO: 2095126 - RNA, 19 nt, Artificial Sequence
  Description of Artificial Sequence: Synthetic oligonucleotide
  Sense strand starting at position 3651 of SEQ ID NO: 1882099
uguauauugucuccucaac

SEQ ID NO: 2095127 - RNA, 19 nt, Artificial Sequence
  Description of Artificial Sequence: Synthetic oligonucleotide
  Antisense strand to SEQ ID NO: 2095126
guugaggagacaauauaca

SEQ ID NO: 2095128 - RNA, 19 nt, Artificial Sequence
  Description of Artificial Sequence: Synthetic oligonucleotide
  Sense strand starting at position 3741 of SEQ ID NO: 1882099
cucugcauagaucagauau

SEQ ID NO: 2095129 - RNA, 19 nt, Artificial Sequence
  Description of Artificial Sequence: Synthetic oligonucleotide
  Antisense strand to SEQ ID NO: 2095128
auaucugaucuaugcagag

SEQ ID NO: 2095130 - RNA, 19 nt, Artificial Sequence
  Description of Artificial Sequence: Synthetic oligonucleotide
  Sense strand starting at position 3743 of SEQ ID NO: 1882099
cugcauagaucagauauuc

SEQ ID NO: 2095131 - RNA, 19 nt, Artificial Sequence
  Description of Artificial Sequence: Synthetic oligonucleotide
  Antisense strand to SEQ ID NO: 2095130
gaauaucugaucuaugcag

SEQ ID NO: 2095132 - RNA, 19 nt, Artificial Sequence
  Description of Artificial Sequence: Synthetic oligonucleotide
  Sense strand starting at position 3760 of SEQ ID NO: 1882099
ucuacacauguuuaaagua

SEQ ID NO: 2095133 - RNA, 19 nt, Artificial Sequence
  Description of Artificial Sequence: Synthetic oligonucleotide
  Antisense strand to SEQ ID NO: 2095132
uacuuuaaacauguguaga

SEQ ID NO: 2095134 - RNA, 19 nt, Artificial Sequence
  Description of Artificial Sequence: Synthetic oligonucleotide
  Sense strand starting at position 3765 of SEQ ID NO: 1882099
acauguuuaaaguacggau

SEQ ID NO: 2095135 - RNA, 19 nt, Artificial Sequence
  Description of Artificial Sequence: Synthetic oligonucleotide
  Antisense strand to SEQ ID NO: 2095134
auccguacuuuaaacaugu

SEQ ID NO: 2095136 - RNA, 19 nt, Artificial Sequence
  Description of Artificial Sequence: Synthetic oligonucleotide
  Sense strand starting at position 3769 of SEQ ID NO: 1882099
guuuaaaguacggaugaga

SEQ ID NO: 2095137 - RNA, 19 nt, Artificial Sequence
  Description of Artificial Sequence: Synthetic oligonucleotide
  Antisense strand to SEQ ID NO: 2095136
ucucauccguacuuuaaac

SEQ ID NO: 2095138 - RNA, 19 nt, Artificial Sequence
  Description of Artificial Sequence: Synthetic oligonucleotide
  Sense strand starting at position 3912 of SEQ ID NO: 1882099
cugagagugcaucagcauu

SEQ ID NO: 2095139 - RNA, 19 nt, Artificial Sequence
  Description of Artificial Sequence: Synthetic oligonucleotide
  Antisense strand to SEQ ID NO: 2095138
aaugcugaugcacucucag

SEQ ID NO: 2095140 - RNA, 19 nt, Artificial Sequence
  Description of Artificial Sequence: Synthetic oligonucleotide
  Sense strand starting at position 3923 of SEQ ID NO: 1882099
ucagcauuaccuggagguu

SEQ ID NO: 2095141 - RNA, 19 nt, Artificial Sequence
  Description of Artificial Sequence: Synthetic oligonucleotide
  Antisense strand to SEQ ID NO: 2095140
aaccuccagguaaugcuga

SEQ ID NO: 2095142 - RNA, 19 nt, Artificial Sequence
  Description of Artificial Sequence: Synthetic oligonucleotide
  Sense strand starting at position 3924 of SEQ ID NO: 1882099
cagcauuaccuggagguuu

SEQ ID NO: 2095143 - RNA, 19 nt, Artificial Sequence
  Description of Artificial Sequence: Synthetic oligonucleotide
  Antisense strand to SEQ ID NO: 2095142
aaaccuccagguaaugcug

SEQ ID NO: 2095144 - RNA, 19 nt, Artificial Sequence
  Description of Artificial Sequence: Synthetic oligonucleotide
  Sense strand starting at position 297 of SEQ ID NO: 1882100
uuaugcuuuggacauuauu

SEQ ID NO: 2095145 - RNA, 19 nt, Artificial Sequence
  Description of Artificial Sequence: Synthetic oligonucleotide
  Antisense strand to SEQ ID NO: 2095144
aauaauguccaaagcauaa

SEQ ID NO: 2095146 - RNA, 19 nt, Artificial Sequence
  Description of Artificial Sequence: Synthetic oligonucleotide
  Sense strand starting at position 400 of SEQ ID NO: 1882100
ugauguagcuaaucauaaa

SEQ ID NO: 2095147 - RNA, 19 nt, Artificial Sequence
  Description of Artificial Sequence: Synthetic oligonucleotide
  Antisense strand to SEQ ID NO: 2095146
uuuaugauuagcuacauca

SEQ ID NO: 2095148 - RNA, 19 nt, Artificial Sequence
  Description of Artificial Sequence: Synthetic oligonucleotide
  Sense strand starting at position 422 of SEQ ID NO: 1882100
gaauuugugucuuauuugu

SEQ ID NO: 2095149 - RNA, 19 nt, Artificial Sequence
  Description of Artificial Sequence: Synthetic oligonucleotide
  Antisense strand to SEQ ID NO: 2095148
acaaauaagacacaaauuc

SEQ ID NO: 2095150 - RNA, 19 nt, Artificial Sequence
  Description of Artificial Sequence: Synthetic oligonucleotide
  Sense strand starting at position 427 of SEQ ID NO: 1882100
ugugucuuauuugucuaau

SEQ ID NO: 2095151 - RNA, 19 nt, Artificial Sequence
  Description of Artificial Sequence: Synthetic oligonucleotide
  Antisense strand to SEQ ID NO: 2095150
auuagacaaauaagacaca

SEQ ID NO: 2095152 - RNA, 19 nt, Artificial Sequence
  Description of Artificial Sequence: Synthetic oligonucleotide
  Sense strand starting at position 428 of SEQ ID NO: 1882100
gugucuuauuugucuaaua

SEQ ID NO: 2095153 - RNA, 19 nt, Artificial Sequence
  Description of Artificial Sequence: Synthetic oligonucleotide
  Antisense strand to SEQ ID NO: 2095152
uauuagacaaauaagacac

SEQ ID NO: 2095154 - RNA, 19 nt, Artificial Sequence
  Description of Artificial Sequence: Synthetic oligonucleotide
  Sense strand starting at position 541 of SEQ ID NO: 1882100
cuuacuguuccagaggcua

SEQ ID NO: 2095155 - RNA, 19 nt, Artificial Sequence
  Description of Artificial Sequence: Synthetic oligonucleotide
  Antisense strand to SEQ ID NO: 2095154
uagccucuggaacaguaag

SEQ ID NO: 2095156 - RNA, 19 nt, Artificial Sequence
  Description of Artificial Sequence: Synthetic oligonucleotide
  Sense strand starting at position 556 of SEQ ID NO: 1882100
gcuagaagucuaggaucaa

SEQ ID NO: 2095157 - RNA, 19 nt, Artificial Sequence
  Description of Artificial Sequence: Synthetic oligonucleotide
  Antisense strand to SEQ ID NO: 2095156
uugauccuagacuucuagc

SEQ ID NO: 2095158 - RNA, 19 nt, Artificial Sequence
  Description of Artificial Sequence: Synthetic oligonucleotide
  Sense strand starting at position 565 of SEQ ID NO: 1882100
cuaggaucaaggugucaac

SEQ ID NO: 2095159 - RNA, 19 nt, Artificial Sequence
  Description of Artificial Sequence: Synthetic oligonucleotide
  Antisense strand to SEQ ID NO: 2095158
guugacaccuugauccuag

SEQ ID NO: 2095160 - RNA, 19 nt, Artificial Sequence
  Description of Artificial Sequence: Synthetic oligonucleotide
  Sense strand starting at position 743 of SEQ ID NO: 1882100
gucacauauuggguuagga

SEQ ID NO: 2095161 - RNA, 19 nt, Artificial Sequence
  Description of Artificial Sequence: Synthetic oligonucleotide
  Antisense strand to SEQ ID NO: 2095160
uccuaacccaauaugugac

SEQ ID NO: 2095162 - RNA, 19 nt, Artificial Sequence
  Description of Artificial Sequence: Synthetic oligonucleotide
  Sense strand starting at position 855 of SEQ ID NO: 1882100
uuacucuuuguacaucaga

SEQ ID NO: 2095163 - RNA, 19 nt, Artificial Sequence
  Description of Artificial Sequence: Synthetic oligonucleotide
  Antisense strand to SEQ ID NO: 2095162
ucugauguacaaagaguaa

SEQ ID NO: 2095164 - RNA, 19 nt, Artificial Sequence
  Description of Artificial Sequence: Synthetic oligonucleotide
  Sense strand starting at position 858 of SEQ ID NO: 1882100
cucuuuguacaucagauau

SEQ ID NO: 2095165 - RNA, 19 nt, Artificial Sequence
  Description of Artificial Sequence: Synthetic oligonucleotide
  Antisense strand to SEQ ID NO: 2095164
auaucugauguacaaagag

SEQ ID NO: 2095166 - RNA, 19 nt, Artificial Sequence
  Description of Artificial Sequence: Synthetic oligonucleotide
  Sense strand starting at position 869 of SEQ ID NO: 1882100
ucagauauagcccaucaug

SEQ ID NO: 2095167 - RNA, 19 nt, Artificial Sequence
  Description of Artificial Sequence: Synthetic oligonucleotide
  Antisense strand to SEQ ID NO: 2095166
caugaugggcuauaucuga

SEQ ID NO: 2095168 - RNA, 19 nt, Artificial Sequence
  Description of Artificial Sequence: Synthetic oligonucleotide
  Sense strand starting at position 931 of SEQ ID NO: 1882100
gucauaacacuagaaguuu

SEQ ID NO: 2095169 - RNA, 19 nt, Artificial Sequence
  Description of Artificial Sequence: Synthetic oligonucleotide
  Antisense strand to SEQ ID NO: 2095168
aaacuucuaguguuaugac

SEQ ID NO: 2095170 - RNA, 19 nt, Artificial Sequence
  Description of Artificial Sequence: Synthetic oligonucleotide
  Sense strand starting at position 1024 of SEQ ID NO: 1882100
cuuugaggccauggauaua

SEQ ID NO: 2095171 - RNA, 19 nt, Artificial Sequence
  Description of Artificial Sequence: Synthetic oligonucleotide
  Antisense strand to SEQ ID NO: 2095170
uauauccauggccucaaag

SEQ ID NO: 2095172 - RNA, 19 nt, Artificial Sequence
  Description of Artificial Sequence: Synthetic oligonucleotide
  Sense strand starting at position 1062 of SEQ ID NO: 1882100
uguguauauaaggguggaa

SEQ ID NO: 2095173 - RNA, 19 nt, Artificial Sequence
  Description of Artificial Sequence: Synthetic oligonucleotide
  Antisense strand to SEQ ID NO: 2095172
uuccacccuuauauacaca

SEQ ID NO: 2095174 - RNA, 19 nt, Artificial Sequence
  Description of Artificial Sequence: Synthetic oligonucleotide
  Sense strand starting at position 1173 of SEQ ID NO: 1882100
guguguacaaaugauacau

SEQ ID NO: 2095175 - RNA, 19 nt, Artificial Sequence
  Description of Artificial Sequence: Synthetic oligonucleotide
  Antisense strand to SEQ ID NO: 2095174
auguaucauuuguacacac

SEQ ID NO: 2095176 - RNA, 19 nt, Artificial Sequence
  Description of Artificial Sequence: Synthetic oligonucleotide
  Sense strand starting at position 1205 of SEQ ID NO: 1882100
uucauugagcaguggaaug

SEQ ID NO: 2095177 - RNA, 19 nt, Artificial Sequence
  Description of Artificial Sequence: Synthetic oligonucleotide
  Antisense strand to SEQ ID NO: 2095176
cauuccacugcucaaugaa

SEQ ID NO: 2095178 - RNA, 19 nt, Artificial Sequence
  Description of Artificial Sequence: Synthetic oligonucleotide
  Sense strand starting at position 1207 of SEQ ID NO: 1882100
cauugagcaguggaauguu

SEQ ID NO: 2095179 - RNA, 19 nt, Artificial Sequence
  Description of Artificial Sequence: Synthetic oligonucleotide
  Antisense strand to SEQ ID NO: 2095178
aacauuccacugcucaaug

SEQ ID NO: 2095180 - RNA, 19 nt, Artificial Sequence
  Description of Artificial Sequence: Synthetic oligonucleotide
  Sense strand starting at position 1274 of SEQ ID NO: 1882100
agucaaauaugaucaaggu

SEQ ID NO: 2095181 - RNA, 19 nt, Artificial Sequence
  Description of Artificial Sequence: Synthetic oligonucleotide
  Antisense strand to SEQ ID NO: 2095180
accuugaucauauuugacu

SEQ ID NO: 2095182 - RNA, 19 nt, Artificial Sequence
  Description of Artificial Sequence: Synthetic oligonucleotide
  Sense strand starting at position 1298 of SEQ ID NO: 1882100
acacaaagauguuugucaa

SEQ ID NO: 2095183 - RNA, 19 nt, Artificial Sequence
  Description of Artificial Sequence: Synthetic oligonucleotide
  Antisense strand to SEQ ID NO: 2095182
uugacaaacaucuuugugu

SEQ ID NO: 2095184 - RNA, 19 nt, Artificial Sequence
  Description of Artificial Sequence: Synthetic oligonucleotide
  Sense strand starting at position 1360 of SEQ ID NO: 1882100
aggaaccaucuuuguguga

SEQ ID NO: 2095185 - RNA, 19 nt, Artificial Sequence
  Description of Artificial Sequence: Synthetic oligonucleotide
  Antisense strand to SEQ ID NO: 2095184
ucacacaaagaugguuccu

SEQ ID NO: 2095186 - RNA, 19 nt, Artificial Sequence
  Description of Artificial Sequence: Synthetic oligonucleotide
  Sense strand starting at position 1361 of SEQ ID NO: 1882100
ggaaccaucuuugugugaa

SEQ ID NO: 2095187 - RNA, 19 nt, Artificial Sequence
  Description of Artificial Sequence: Synthetic oligonucleotide
  Antisense strand to SEQ ID NO: 2095186
uucacacaaagaugguucc

SEQ ID NO: 2095188 - RNA, 19 nt, Artificial Sequence
  Description of Artificial Sequence: Synthetic oligonucleotide
  Sense strand starting at position 1375 of SEQ ID NO: 1882100
gugaacagauuacaaauuu

SEQ ID NO: 2095189 - RNA, 19 nt, Artificial Sequence
  Description of Artificial Sequence: Synthetic oligonucleotide
  Antisense strand to SEQ ID NO: 2095188
aaauuuguaaucuguucac

SEQ ID NO: 2095190 - RNA, 19 nt, Artificial Sequence
  Description of Artificial Sequence: Synthetic oligonucleotide
  Sense strand starting at position 1493 of SEQ ID NO: 1882100
aggccuauucguuugcuua

SEQ ID NO: 2095191 - RNA, 19 nt, Artificial Sequence
  Description of Artificial Sequence: Synthetic oligonucleotide
  Antisense strand to SEQ ID NO: 2095190
uaagcaaacgaauaggccu

SEQ ID NO: 2095192 - RNA, 19 nt, Artificial Sequence
  Description of Artificial Sequence: Synthetic oligonucleotide
  Sense strand starting at position 1645 of SEQ ID NO: 1882100
guucgucgaauagaaauua

SEQ ID NO: 2095193 - RNA, 19 nt, Artificial Sequence
  Description of Artificial Sequence: Synthetic oligonucleotide
  Antisense strand to SEQ ID NO: 2095192
uaauuucuauucgacgaac

SEQ ID NO: 2095194 - RNA, 19 nt, Artificial Sequence
  Description of Artificial Sequence: Synthetic oligonucleotide
  Sense strand starting at position 2107 of SEQ ID NO: 1882100
guuuccaucucauuuguau

SEQ ID NO: 2095195 - RNA, 19 nt, Artificial Sequence
  Description of Artificial Sequence: Synthetic oligonucleotide
  Antisense strand to SEQ ID NO: 2095194
auacaaaugagauggaaac

SEQ ID NO: 2095196 - RNA, 19 nt, Artificial Sequence
  Description of Artificial Sequence: Synthetic oligonucleotide
  Sense strand starting at position 2267 of SEQ ID NO: 1882100
cucuuucuuccagggaacu

SEQ ID NO: 2095197 - RNA, 19 nt, Artificial Sequence
  Description of Artificial Sequence: Synthetic oligonucleotide
  Antisense strand to SEQ ID NO: 2095196
aguucccuggaagaaagag

SEQ ID NO: 2095198 - RNA, 19 nt, Artificial Sequence
  Description of Artificial Sequence: Synthetic oligonucleotide
  Sense strand starting at position 2268 of SEQ ID NO: 1882100
ucuuucuuccagggaacuu

SEQ ID NO: 2095199 - RNA, 19 nt, Artificial Sequence
  Description of Artificial Sequence: Synthetic oligonucleotide
  Antisense strand to SEQ ID NO: 2095198
aaguucccuggaagaaaga

SEQ ID NO: 2095200 - RNA, 19 nt, Artificial Sequence
  Description of Artificial Sequence: Synthetic oligonucleotide
  Sense strand starting at position 2490 of SEQ ID NO: 1882100
cugguagucggugauuaga

SEQ ID NO: 2095201 - RNA, 19 nt, Artificial Sequence
  Description of Artificial Sequence: Synthetic oligonucleotide
  Antisense strand to SEQ ID NO: 2095200
ucuaaucaccgacuaccag

SEQ ID NO: 2095202 - RNA, 19 nt, Artificial Sequence
  Description of Artificial Sequence: Synthetic oligonucleotide
  Sense strand starting at position 2567 of SEQ ID NO: 1882100
ucuugauagugaguuauug

SEQ ID NO: 2095203 - RNA, 19 nt, Artificial Sequence
  Description of Artificial Sequence: Synthetic oligonucleotide
  Antisense strand to SEQ ID NO: 2095202
caauaacucacuaucaaga

SEQ ID NO: 2095204 - RNA, 19 nt, Artificial Sequence
  Description of Artificial Sequence: Synthetic oligonucleotide
  Sense strand starting at position 3042 of SEQ ID NO: 1882100
guagaaccaugagccaaua

SEQ ID NO: 2095205 - RNA, 19 nt, Artificial Sequence
  Description of Artificial Sequence: Synthetic oligonucleotide
  Antisense strand to SEQ ID NO: 2095204
uauuggcucaugguucuac

SEQ ID NO: 2095206 - RNA, 19 nt, Artificial Sequence
  Description of Artificial Sequence: Synthetic oligonucleotide
  Sense strand starting at position 3470 of SEQ ID NO: 1882100
uuaagaucgucacuuaaga

SEQ ID NO: 2095207 - RNA, 19 nt, Artificial Sequence
  Description of Artificial Sequence: Synthetic oligonucleotide
  Antisense strand to SEQ ID NO: 2095206
ucuuaagugacgaucuuaa

SEQ ID NO: 2095208 - RNA, 19 nt, Artificial Sequence
  Description of Artificial Sequence: Synthetic oligonucleotide
  Sense strand starting at position 3518 of SEQ ID NO: 1882100
guuuacuuccauuaaaguc

SEQ ID NO: 2095209 - RNA, 19 nt, Artificial Sequence
  Description of Artificial Sequence: Synthetic oligonucleotide
  Antisense strand to SEQ ID NO: 2095208
gacuuuaauggaaguaaac

SEQ ID NO: 2095210 - RNA, 19 nt, Artificial Sequence
  Description of Artificial Sequence: Synthetic oligonucleotide
  Sense strand starting at position 3526 of SEQ ID NO: 1882100
ccauuaaagucauugguau

SEQ ID NO: 2095211 - RNA, 19 nt, Artificial Sequence
  Description of Artificial Sequence: Synthetic oligonucleotide
  Antisense strand to SEQ ID NO: 2095210
auaccaaugacuuuaaugg

SEQ ID NO: 2095212 - RNA, 19 nt, Artificial Sequence
  Description of Artificial Sequence: Synthetic oligonucleotide
  Sense strand starting at position 3899 of SEQ ID NO: 1882100
auuaucuuacaugguugaa

SEQ ID NO: 2095213 - RNA, 19 nt, Artificial Sequence
  Description of Artificial Sequence: Synthetic oligonucleotide
  Antisense strand to SEQ ID NO: 2095212
uucaaccauguaagauaau

SEQ ID NO: 2095214 - RNA, 19 nt, Artificial Sequence
  Description of Artificial Sequence: Synthetic oligonucleotide
  Sense strand starting at position 3960 of SEQ ID NO: 1882100
accgucuugccuguuugau

SEQ ID NO: 2095215 - RNA, 19 nt, Artificial Sequence
  Description of Artificial Sequence: Synthetic oligonucleotide
  Antisense strand to SEQ ID NO: 2095214
aucaaacaggcaagacggu

SEQ ID NO: 2095216 - RNA, 19 nt, Artificial Sequence
  Description of Artificial Sequence: Synthetic oligonucleotide
  Sense strand starting at position 3961 of SEQ ID NO: 1882100
ccgucuugccuguuugauu

SEQ ID NO: 2095217 - RNA, 19 nt, Artificial Sequence
  Description of Artificial Sequence: Synthetic oligonucleotide
  Antisense strand to SEQ ID NO: 2095216
aaucaaacaggcaagacgg

SEQ ID NO: 2095218 - RNA, 19 nt, Artificial Sequence
  Description of Artificial Sequence: Synthetic oligonucleotide
  Sense strand starting at position 3968 of SEQ ID NO: 1882100
gccuguuugauugcugguu

SEQ ID NO: 2095219 - RNA, 19 nt, Artificial Sequence
  Description of Artificial Sequence: Synthetic oligonucleotide
  Antisense strand to SEQ ID NO: 2095218
aaccagcaaucaaacaggc

SEQ ID NO: 2095220 - RNA, 19 nt, Artificial Sequence
  Description of Artificial Sequence: Synthetic oligonucleotide
  Sense strand starting at position 3980 of SEQ ID NO: 1882100
gcugguuauguggaugacu

SEQ ID NO: 2095221 - RNA, 19 nt, Artificial Sequence
  Description of Artificial Sequence: Synthetic oligonucleotide
  Antisense strand to SEQ ID NO: 2095220
agucauccacauaaccagc

SEQ ID NO: 2095222 - RNA, 19 nt, Artificial Sequence
  Description of Artificial Sequence: Synthetic oligonucleotide
  Sense strand starting at position 3982 of SEQ ID NO: 1882100
ugguuauguggaugacuga

SEQ ID NO: 2095223 - RNA, 19 nt, Artificial Sequence
  Description of Artificial Sequence: Synthetic oligonucleotide
  Antisense strand to SEQ ID NO: 2095222
ucagucauccacauaacca

SEQ ID NO: 2095224 - RNA, 19 nt, Artificial Sequence
  Description of Artificial Sequence: Synthetic oligonucleotide
  Sense strand starting at position 157 of SEQ ID NO: 1882101
gaaugacaauaggauguaa

SEQ ID NO: 2095225 - RNA, 19 nt, Artificial Sequence
  Description of Artificial Sequence: Synthetic oligonucleotide
  Antisense strand to SEQ ID NO: 2095224
uuacauccuauugucauuc

SEQ ID NO: 2095226 - RNA, 19 nt, Artificial Sequence
  Description of Artificial Sequence: Synthetic oligonucleotide
  Sense strand starting at position 168 of SEQ ID NO: 1882101
ggauguaaauuacaagaaa

SEQ ID NO: 2095227 - RNA, 19 nt, Artificial Sequence
  Description of Artificial Sequence: Synthetic oligonucleotide
  Antisense strand to SEQ ID NO: 2095226
uuucuuguaauuuacaucc

SEQ ID NO: 2095228 - RNA, 19 nt, Artificial Sequence
  Description of Artificial Sequence: Synthetic oligonucleotide
  Sense strand starting at position 270 of SEQ ID NO: 1882101
accaaauugcugugcuaag

SEQ ID NO: 2095229 - RNA, 19 nt, Artificial Sequence
  Description of Artificial Sequence: Synthetic oligonucleotide
  Antisense strand to SEQ ID NO: 2095228
cuuagcacagcaauuuggu

SEQ ID NO: 2095230 - RNA, 19 nt, Artificial Sequence
  Description of Artificial Sequence: Synthetic oligonucleotide
  Sense strand starting at position 271 of SEQ ID NO: 1882101
ccaaauugcugugcuaagu

SEQ ID NO: 2095231 - RNA, 19 nt, Artificial Sequence
  Description of Artificial Sequence: Synthetic oligonucleotide
  Antisense strand to SEQ ID NO: 2095230
acuuagcacagcaauuugg

SEQ ID NO: 2095232 - RNA, 19 nt, Artificial Sequence
  Description of Artificial Sequence: Synthetic oligonucleotide
  Sense strand starting at position 280 of SEQ ID NO: 1882101
ugugcuaaguguucaaguu

SEQ ID NO: 2095233 - RNA, 19 nt, Artificial Sequence
  Description of Artificial Sequence: Synthetic oligonucleotide
  Antisense strand to SEQ ID NO: 2095232
aacuugaacacuuagcaca

SEQ ID NO: 2095234 - RNA, 19 nt, Artificial Sequence
  Description of Artificial Sequence: Synthetic oligonucleotide
  Sense strand starting at position 281 of SEQ ID NO: 1882101
gugcuaaguguucaaguuu

SEQ ID NO: 2095235 - RNA, 19 nt, Artificial Sequence
  Description of Artificial Sequence: Synthetic oligonucleotide
  Antisense strand to SEQ ID NO: 2095234
aaacuugaacacuuagcac

SEQ ID NO: 2095236 - RNA, 19 nt, Artificial Sequence
  Description of Artificial Sequence: Synthetic oligonucleotide
  Sense strand starting at position 322 of SEQ ID NO: 1882101
acucuagagucauaaagug

SEQ ID NO: 2095237 - RNA, 19 nt, Artificial Sequence
  Description of Artificial Sequence: Synthetic oligonucleotide
  Antisense strand to SEQ ID NO: 2095236
cacuuuaugacucuagagu

SEQ ID NO: 2095238 - RNA, 19 nt, Artificial Sequence
  Description of Artificial Sequence: Synthetic oligonucleotide
  Sense strand starting at position 330 of SEQ ID NO: 1882101
gucauaaagugauaaaccu

SEQ ID NO: 2095239 - RNA, 19 nt, Artificial Sequence
  Description of Artificial Sequence: Synthetic oligonucleotide
  Antisense strand to SEQ ID NO: 2095238
agguuuaucacuuuaugac

SEQ ID NO: 2095240 - RNA, 19 nt, Artificial Sequence
  Description of Artificial Sequence: Synthetic oligonucleotide
  Sense strand starting at position 355 of SEQ ID NO: 1882101
agugcagagugcuuauuua

SEQ ID NO: 2095241 - RNA, 19 nt, Artificial Sequence
  Description of Artificial Sequence: Synthetic oligonucleotide
  Antisense strand to SEQ ID NO: 2095240
uaaauaagcacucugcacu

SEQ ID NO: 2095242 - RNA, 19 nt, Artificial Sequence
  Description of Artificial Sequence: Synthetic oligonucleotide
  Sense strand starting at position 453 of SEQ ID NO: 1882101
gugcacagccuugaaucau

SEQ ID NO: 2095243 - RNA, 19 nt, Artificial Sequence
  Description of Artificial Sequence: Synthetic oligonucleotide
  Antisense strand to SEQ ID NO: 2095242
augauucaaggcugugcac

SEQ ID NO: 2095244 - RNA, 19 nt, Artificial Sequence
  Description of Artificial Sequence: Synthetic oligonucleotide
  Sense strand starting at position 523 of SEQ ID NO: 1882101
guucuauaguucuugucaa

SEQ ID NO: 2095245 - RNA, 19 nt, Artificial Sequence
  Description of Artificial Sequence: Synthetic oligonucleotide
  Antisense strand to SEQ ID NO: 2095244
uugacaagaacuauagaac

SEQ ID NO: 2095246 - RNA, 19 nt, Artificial Sequence
  Description of Artificial Sequence: Synthetic oligonucleotide
  Sense strand starting at position 783 of SEQ ID NO: 1882101
cugaucuaacugugcuaau

SEQ ID NO: 2095247 - RNA, 19 nt, Artificial Sequence
  Description of Artificial Sequence: Synthetic oligonucleotide
  Antisense strand to SEQ ID NO: 2095246
auuagcacaguuagaucag

SEQ ID NO: 2095248 - RNA, 19 nt, Artificial Sequence
  Description of Artificial Sequence: Synthetic oligonucleotide
  Sense strand starting at position 784 of SEQ ID NO: 1882101
ugaucuaacugugcuaaug

SEQ ID NO: 2095249 - RNA, 19 nt, Artificial Sequence
  Description of Artificial Sequence: Synthetic oligonucleotide
  Antisense strand to SEQ ID NO: 2095248
cauuagcacaguuagauca

SEQ ID NO: 2095250 - RNA, 19 nt, Artificial Sequence
  Description of Artificial Sequence: Synthetic oligonucleotide
  Sense strand starting at position 864 of SEQ ID NO: 1882101
ucuacuuuccguugaaaua

SEQ ID NO: 2095251 - RNA, 19 nt, Artificial Sequence
  Description of Artificial Sequence: Synthetic oligonucleotide
  Antisense strand to SEQ ID NO: 2095250
uauuucaacggaaaguaga

SEQ ID NO: 2095252 - RNA, 19 nt, Artificial Sequence
  Description of Artificial Sequence: Synthetic oligonucleotide
  Sense strand starting at position 865 of SEQ ID NO: 1882101
cuacuuuccguugaaauaa

SEQ ID NO: 2095253 - RNA, 19 nt, Artificial Sequence
  Description of Artificial Sequence: Synthetic oligonucleotide
  Antisense strand to SEQ ID NO: 2095252
uuauuucaacggaaaguag

SEQ ID NO: 2095254 - RNA, 19 nt, Artificial Sequence
  Description of Artificial Sequence: Synthetic oligonucleotide
  Sense strand starting at position 873 of SEQ ID NO: 1882101
cguugaaauaaacgucaaa

SEQ ID NO: 2095255 - RNA, 19 nt, Artificial Sequence
  Description of Artificial Sequence: Synthetic oligonucleotide
  Antisense strand to SEQ ID NO: 2095254
uuugacguuuauuucaacg

SEQ ID NO: 2095256 - RNA, 19 nt, Artificial Sequence
  Description of Artificial Sequence: Synthetic oligonucleotide
  Sense strand starting at position 962 of SEQ ID NO: 1882101
aguugauacgggugccaaa

SEQ ID NO: 2095257 - RNA, 19 nt, Artificial Sequence
  Description of Artificial Sequence: Synthetic oligonucleotide
  Antisense strand to SEQ ID NO: 2095256
uuuggcacccguaucaacu

SEQ ID NO: 2095258 - RNA, 19 nt, Artificial Sequence
  Description of Artificial Sequence: Synthetic oligonucleotide
  Sense strand starting at position 1097 of SEQ ID NO: 1882101
auuuauuucugguggcgau

SEQ ID NO: 2095259 - RNA, 19 nt, Artificial Sequence
  Description of Artificial Sequence: Synthetic oligonucleotide
  Antisense strand to SEQ ID NO: 2095258
aucgccaccagaaauaaau

SEQ ID NO: 2095260 - RNA, 19 nt, Artificial Sequence
  Description of Artificial Sequence: Synthetic oligonucleotide
  Sense strand starting at position 1446 of SEQ ID NO: 1882101
ggcguaaaguggguagaaa

SEQ ID NO: 2095261 - RNA, 19 nt, Artificial Sequence
  Description of Artificial Sequence: Synthetic oligonucleotide
  Antisense strand to SEQ ID NO: 2095260
uuucuacccacuuuacgcc

SEQ ID NO: 2095262 - RNA, 19 nt, Artificial Sequence
  Description of Artificial Sequence: Synthetic oligonucleotide
  Sense strand starting at position 1649 of SEQ ID NO: 1882101
cggccaugucucggagaag

SEQ ID NO: 2095263 - RNA, 19 nt, Artificial Sequence
  Description of Artificial Sequence: Synthetic oligonucleotide
  Antisense strand to SEQ ID NO: 2095262
cuucuccgagacauggccg

SEQ ID NO: 2095264 - RNA, 19 nt, Artificial Sequence
  Description of Artificial Sequence: Synthetic oligonucleotide
  Sense strand starting at position 1695 of SEQ ID NO: 1882101
cccucagacuugguggaaa

SEQ ID NO: 2095265 - RNA, 19 nt, Artificial Sequence
  Description of Artificial Sequence: Synthetic oligonucleotide
  Antisense strand to SEQ ID NO: 2095264
uuuccaccaagucugaggg

SEQ ID NO: 2095266 - RNA, 19 nt, Artificial Sequence
  Description of Artificial Sequence: Synthetic oligonucleotide
  Sense strand starting at position 2237 of SEQ ID NO: 1882101
cccaucuuccgagaaugau

SEQ ID NO: 2095267 - RNA, 19 nt, Artificial Sequence
  Description of Artificial Sequence: Synthetic oligonucleotide
  Antisense strand to SEQ ID NO: 2095266
aucauucucggaagauggg

SEQ ID NO: 2095268 - RNA, 19 nt, Artificial Sequence
  Description of Artificial Sequence: Synthetic oligonucleotide
  Sense strand starting at position 2246 of SEQ ID NO: 1882101
cgagaaugaugauaugcaa

SEQ ID NO: 2095269 - RNA, 19 nt, Artificial Sequence
  Description of Artificial Sequence: Synthetic oligonucleotide
  Antisense strand to SEQ ID NO: 2095268
uugcauaucaucauucucg

SEQ ID NO: 2095270 - RNA, 19 nt, Artificial Sequence
  Description of Artificial Sequence: Synthetic oligonucleotide
  Sense strand starting at position 2253 of SEQ ID NO: 1882101
gaugauaugcaaugaguga

SEQ ID NO: 2095271 - RNA, 19 nt, Artificial Sequence
  Description of Artificial Sequence: Synthetic oligonucleotide
  Antisense strand to SEQ ID NO: 2095270
ucacucauugcauaucauc

SEQ ID NO: 2095272 - RNA, 19 nt, Artificial Sequence
  Description of Artificial Sequence: Synthetic oligonucleotide
  Sense strand starting at position 2288 of SEQ ID NO: 1882101
agagcacccugacaagaua

SEQ ID NO: 2095273 - RNA, 19 nt, Artificial Sequence
  Description of Artificial Sequence: Synthetic oligonucleotide
  Antisense strand to SEQ ID NO: 2095272
uaucuugucagggugcucu

SEQ ID NO: 2095274 - RNA, 19 nt, Artificial Sequence
  Description of Artificial Sequence: Synthetic oligonucleotide
  Sense strand starting at position 2349 of SEQ ID NO: 1882101
acguaauauuuagguaaug

SEQ ID NO: 2095275 - RNA, 19 nt, Artificial Sequence
  Description of Artificial Sequence: Synthetic oligonucleotide
  Antisense strand to SEQ ID NO: 2095274
cauuaccuaaauauuacgu

SEQ ID NO: 2095276 - RNA, 19 nt, Artificial Sequence
  Description of Artificial Sequence: Synthetic oligonucleotide
  Sense strand starting at position 2446 of SEQ ID NO: 1882101
ucaagauccugacacagaa

SEQ ID NO: 2095277 - RNA, 19 nt, Artificial Sequence
  Description of Artificial Sequence: Synthetic oligonucleotide
  Antisense strand to SEQ ID NO: 2095276
uucugugucaggaucuuga

SEQ ID NO: 2095278 - RNA, 19 nt, Artificial Sequence
  Description of Artificial Sequence: Synthetic oligonucleotide
  Sense strand starting at position 2484 of SEQ ID NO: 1882101
aucacagaggcguacuaaa

SEQ ID NO: 2095279 - RNA, 19 nt, Artificial Sequence
  Description of Artificial Sequence: Synthetic oligonucleotide
  Antisense strand to SEQ ID NO: 2095278
uuuaguacgccucugugau

SEQ ID NO: 2095280 - RNA, 19 nt, Artificial Sequence
  Description of Artificial Sequence: Synthetic oligonucleotide
  Sense strand starting at position 2595 of SEQ ID NO: 1882101
cuucuuuguggcuaaagga

SEQ ID NO: 2095281 - RNA, 19 nt, Artificial Sequence
  Description of Artificial Sequence: Synthetic oligonucleotide
  Antisense strand to SEQ ID NO: 2095280
uccuuuagccacaaagaag

SEQ ID NO: 2095282 - RNA, 19 nt, Artificial Sequence
  Description of Artificial Sequence: Synthetic oligonucleotide
  Sense strand starting at position 2612 of SEQ ID NO: 1882101
gaggaaaugcccuguccac

SEQ ID NO: 2095283 - RNA, 19 nt, Artificial Sequence
  Description of Artificial Sequence: Synthetic oligonucleotide
  Antisense strand to SEQ ID NO: 2095282
guggacagggcauuuccuc

SEQ ID NO: 2095284 - RNA, 19 nt, Artificial Sequence
  Description of Artificial Sequence: Synthetic oligonucleotide
  Sense strand starting at position 2644 of SEQ ID NO: 1882101
gugugaccuccggguucaa

SEQ ID NO: 2095285 - RNA, 19 nt, Artificial Sequence
  Description of Artificial Sequence: Synthetic oligonucleotide
  Antisense strand to SEQ ID NO: 2095284
uugaacccggaggucacac

SEQ ID NO: 2095286 - RNA, 19 nt, Artificial Sequence
  Description of Artificial Sequence: Synthetic oligonucleotide
  Sense strand starting at position 2675 of SEQ ID NO: 1882101
ccgugauccugggugcacu

SEQ ID NO: 2095287 - RNA, 19 nt, Artificial Sequence
  Description of Artificial Sequence: Synthetic oligonucleotide
  Antisense strand to SEQ ID NO: 2095286
agugcacccaggaucacgg

SEQ ID NO: 2095288 - RNA, 19 nt, Artificial Sequence
  Description of Artificial Sequence: Synthetic oligonucleotide
  Sense strand starting at position 2725 of SEQ ID NO: 1882101
uccugucaucguugacaag

SEQ ID NO: 2095289 - RNA, 19 nt, Artificial Sequence
  Description of Artificial Sequence: Synthetic oligonucleotide
  Antisense strand to SEQ ID NO: 2095288
cuugucaacgaugacagga

SEQ ID NO: 2095290 - RNA, 19 nt, Artificial Sequence
  Description of Artificial Sequence: Synthetic oligonucleotide
  Sense strand starting at position 2751 of SEQ ID NO: 1882101
auauauuucuagugacacu

SEQ ID NO: 2095291 - RNA, 19 nt, Artificial Sequence
  Description of Artificial Sequence: Synthetic oligonucleotide
  Antisense strand to SEQ ID NO: 2095290
agugucacuagaaauauau

SEQ ID NO: 2095292 - RNA, 19 nt, Artificial Sequence
  Description of Artificial Sequence: Synthetic oligonucleotide
  Sense strand starting at position 3142 of SEQ ID NO: 1882101
uguagauacuaucuuugaa

SEQ ID NO: 2095293 - RNA, 19 nt, Artificial Sequence
  Description of Artificial Sequence: Synthetic oligonucleotide
  Antisense strand to SEQ ID NO: 2095292
uucaaagauaguaucuaca

SEQ ID NO: 2095294 - RNA, 19 nt, Artificial Sequence
  Description of Artificial Sequence: Synthetic oligonucleotide
  Sense strand starting at position 3209 of SEQ ID NO: 1882101
cuaggaaaugggugcaaau

SEQ ID NO: 2095295 - RNA, 19 nt, Artificial Sequence
  Description of Artificial Sequence: Synthetic oligonucleotide
  Antisense strand to SEQ ID NO: 2095294
auuugcacccauuuccuag

SEQ ID NO: 2095296 - RNA, 19 nt, Artificial Sequence
  Description of Artificial Sequence: Synthetic oligonucleotide
  Sense strand starting at position 3277 of SEQ ID NO: 1882101
uguaguauuuacuaagaca

SEQ ID NO: 2095297 - RNA, 19 nt, Artificial Sequence
  Description of Artificial Sequence: Synthetic oligonucleotide
  Antisense strand to SEQ ID NO: 2095296
ugucuuaguaaauacuaca

SEQ ID NO: 2095298 - RNA, 19 nt, Artificial Sequence
  Description of Artificial Sequence: Synthetic oligonucleotide
  Sense strand starting at position 3467 of SEQ ID NO: 1882101
auucuaaacugugaagaua

SEQ ID NO: 2095299 - RNA, 19 nt, Artificial Sequence
  Description of Artificial Sequence: Synthetic oligonucleotide
  Antisense strand to SEQ ID NO: 2095298
uaucuucacaguuuagaau

SEQ ID NO: 2095300 - RNA, 19 nt, Artificial Sequence
  Description of Artificial Sequence: Synthetic oligonucleotide
  Sense strand starting at position 3534 of SEQ ID NO: 1882101
uuuauauagucugagauga

SEQ ID NO: 2095301 - RNA, 19 nt, Artificial Sequence
  Description of Artificial Sequence: Synthetic oligonucleotide
  Antisense strand to SEQ ID NO: 2095300
ucaucucagacuauauaaa

SEQ ID NO: 2095302 - RNA, 19 nt, Artificial Sequence
  Description of Artificial Sequence: Synthetic oligonucleotide
  Sense strand starting at position 3536 of SEQ ID NO: 1882101
uauauagucugagaugacu

SEQ ID NO: 2095303 - RNA, 19 nt, Artificial Sequence
  Description of Artificial Sequence: Synthetic oligonucleotide
  Antisense strand to SEQ ID NO: 2095302
agucaucucagacuauaua

SEQ ID NO: 2095304 - RNA, 19 nt, Artificial Sequence
  Description of Artificial Sequence: Synthetic oligonucleotide
  Sense strand starting at position 22 of SEQ ID NO: 1882102
cuugacuugugguugcaau

SEQ ID NO: 2095305 - RNA, 19 nt, Artificial Sequence
  Description of Artificial Sequence: Synthetic oligonucleotide
  Antisense strand to SEQ ID NO: 2095304
auugcaaccacaagucaag

SEQ ID NO: 2095306 - RNA, 19 nt, Artificial Sequence
  Description of Artificial Sequence: Synthetic oligonucleotide
  Sense strand starting at position 23 of SEQ ID NO: 1882102
uugacuugugguugcaaua

SEQ ID NO: 2095307 - RNA, 19 nt, Artificial Sequence
  Description of Artificial Sequence: Synthetic oligonucleotide
  Antisense strand to SEQ ID NO: 2095306
uauugcaaccacaagucaa

SEQ ID NO: 2095308 - RNA, 19 nt, Artificial Sequence
  Description of Artificial Sequence: Synthetic oligonucleotide
  Sense strand starting at position 320 of SEQ ID NO: 1882102
agcaaaugccuacguuuaa

SEQ ID NO: 2095309 - RNA, 19 nt, Artificial Sequence
  Description of Artificial Sequence: Synthetic oligonucleotide
  Antisense strand to SEQ ID NO: 2095308
uuaaacguaggcauuugcu

SEQ ID NO: 2095310 - RNA, 19 nt, Artificial Sequence
  Description of Artificial Sequence: Synthetic oligonucleotide
  Sense strand starting at position 321 of SEQ ID NO: 1882102
gcaaaugccuacguuuaaa

SEQ ID NO: 2095311 - RNA, 19 nt, Artificial Sequence
  Description of Artificial Sequence: Synthetic oligonucleotide
  Antisense strand to SEQ ID NO: 2095310
uuuaaacguaggcauuugc

SEQ ID NO: 2095312 - RNA, 19 nt, Artificial Sequence
  Description of Artificial Sequence: Synthetic oligonucleotide
  Sense strand starting at position 670 of SEQ ID NO: 1882102
cucuaaagaugugaugacu

SEQ ID NO: 2095313 - RNA, 19 nt, Artificial Sequence
  Description of Artificial Sequence: Synthetic oligonucleotide
  Antisense strand to SEQ ID NO: 2095312
agucaucacaucuuuagag

SEQ ID NO: 2095314 - RNA, 19 nt, Artificial Sequence
  Description of Artificial Sequence: Synthetic oligonucleotide
  Sense strand starting at position 686 of SEQ ID NO: 1882102
acuacacaauguucguaaa

SEQ ID NO: 2095315 - RNA, 19 nt, Artificial Sequence
  Description of Artificial Sequence: Synthetic oligonucleotide
  Antisense strand to SEQ ID NO: 2095314
uuuacgaacauuguguagu

SEQ ID NO: 2095316 - RNA, 19 nt, Artificial Sequence
  Description of Artificial Sequence: Synthetic oligonucleotide
  Sense strand starting at position 698 of SEQ ID NO: 1882102
ucguaaacauacucagauu

SEQ ID NO: 2095317 - RNA, 19 nt, Artificial Sequence
  Description of Artificial Sequence: Synthetic oligonucleotide
  Antisense strand to SEQ ID NO: 2095316
aaucugaguauguuuacga

SEQ ID NO: 2095318 - RNA, 19 nt, Artificial Sequence
  Description of Artificial Sequence: Synthetic oligonucleotide
  Sense strand starting at position 1029 of SEQ ID NO: 1882102
accauaaucuugcuaggag

SEQ ID NO: 2095319 - RNA, 19 nt, Artificial Sequence
  Description of Artificial Sequence: Synthetic oligonucleotide
  Antisense strand to SEQ ID NO: 2095318
cuccuagcaagauuauggu

SEQ ID NO: 2095320 - RNA, 19 nt, Artificial Sequence
  Description of Artificial Sequence: Synthetic oligonucleotide
  Sense strand starting at position 1079 of SEQ ID NO: 1882102
ugcgaugugaauuacaaau

SEQ ID NO: 2095321 - RNA, 19 nt, Artificial Sequence
  Description of Artificial Sequence: Synthetic oligonucleotide
  Antisense strand to SEQ ID NO: 2095320
auuuguaauucacaucgca

SEQ ID NO: 2095322 - RNA, 19 nt, Artificial Sequence
  Description of Artificial Sequence: Synthetic oligonucleotide
  Sense strand starting at position 1124 of SEQ ID NO: 1882102
guaauuaugaggcguuugu

SEQ ID NO: 2095323 - RNA, 19 nt, Artificial Sequence
  Description of Artificial Sequence: Synthetic oligonucleotide
  Antisense strand to SEQ ID NO: 2095322
acaaacgccucauaauuac

SEQ ID NO: 2095324 - RNA, 19 nt, Artificial Sequence
  Description of Artificial Sequence: Synthetic oligonucleotide
  Sense strand starting at position 1128 of SEQ ID NO: 1882102
uuaugaggcguuuguauac

SEQ ID NO: 2095325 - RNA, 19 nt, Artificial Sequence
  Description of Artificial Sequence: Synthetic oligonucleotide
  Antisense strand to SEQ ID NO: 2095324
guauacaaacgccucauaa

SEQ ID NO: 2095326 - RNA, 19 nt, Artificial Sequence
  Description of Artificial Sequence: Synthetic oligonucleotide
  Sense strand starting at position 1155 of SEQ ID NO: 1882102
guuuccuugugagcuauua

SEQ ID NO: 2095327 - RNA, 19 nt, Artificial Sequence
  Description of Artificial Sequence: Synthetic oligonucleotide
  Antisense strand to SEQ ID NO: 2095326
uaauagcucacaaggaaac

SEQ ID NO: 2095328 - RNA, 19 nt, Artificial Sequence
  Description of Artificial Sequence: Synthetic oligonucleotide
  Sense strand starting at position 1167 of SEQ ID NO: 1882102
gcuauuacagucuaugauc

SEQ ID NO: 2095329 - RNA, 19 nt, Artificial Sequence
  Description of Artificial Sequence: Synthetic oligonucleotide
  Antisense strand to SEQ ID NO: 2095328
gaucauagacuguaauagc

SEQ ID NO: 2095330 - RNA, 19 nt, Artificial Sequence
  Description of Artificial Sequence: Synthetic oligonucleotide
  Sense strand starting at position 1187 of SEQ ID NO: 1882102
gcuucuccucgacacugau

SEQ ID NO: 2095331 - RNA, 19 nt, Artificial Sequence
  Description of Artificial Sequence: Synthetic oligonucleotide
  Antisense strand to SEQ ID NO: 2095330
aucagugucgaggagaagc

SEQ ID NO: 2095332 - RNA, 19 nt, Artificial Sequence
  Description of Artificial Sequence: Synthetic oligonucleotide
  Sense strand starting at position 1190 of SEQ ID NO: 1882102
ucuccucgacacugaugua

SEQ ID NO: 2095333 - RNA, 19 nt, Artificial Sequence
  Description of Artificial Sequence: Synthetic oligonucleotide
  Antisense strand to SEQ ID NO: 2095332
uacaucagugucgaggaga

SEQ ID NO: 2095334 - RNA, 19 nt, Artificial Sequence
  Description of Artificial Sequence: Synthetic oligonucleotide
  Sense strand starting at position 1200 of SEQ ID NO: 1882102
acugauguauccuuauauu

SEQ ID NO: 2095335 - RNA, 19 nt, Artificial Sequence
  Description of Artificial Sequence: Synthetic oligonucleotide
  Antisense strand to SEQ ID NO: 2095334
aauauaaggauacaucagu

SEQ ID NO: 2095336 - RNA, 19 nt, Artificial Sequence
  Description of Artificial Sequence: Synthetic oligonucleotide
  Sense strand starting at position 1270 of SEQ ID NO: 1882102
auuguaguuccugaaauac

SEQ ID NO: 2095337 - RNA, 19 nt, Artificial Sequence
  Description of Artificial Sequence: Synthetic oligonucleotide
  Antisense strand to SEQ ID NO: 2095336
guauuucaggaacuacaau

SEQ ID NO: 2095338 - RNA, 19 nt, Artificial Sequence
  Description of Artificial Sequence: Synthetic oligonucleotide
  Sense strand starting at position 1350 of SEQ ID NO: 1882102
agaacugcuuggcuacaau

SEQ ID NO: 2095339 - RNA, 19 nt, Artificial Sequence
  Description of Artificial Sequence: Synthetic oligonucleotide
  Antisense strand to SEQ ID NO: 2095338
auuguagccaagcaguucu

SEQ ID NO: 2095340 - RNA, 19 nt, Artificial Sequence
  Description of Artificial Sequence: Synthetic oligonucleotide
  Sense strand starting at position 2025 of SEQ ID NO: 1882102
ggaugacuaacacguuaca

SEQ ID NO: 2095341 - RNA, 19 nt, Artificial Sequence
  Description of Artificial Sequence: Synthetic oligonucleotide
  Antisense strand to SEQ ID NO: 2095340
uguaacguguuagucaucc

SEQ ID NO: 2095342 - RNA, 19 nt, Artificial Sequence
  Description of Artificial Sequence: Synthetic oligonucleotide
  Sense strand starting at position 2066 of SEQ ID NO: 1882102
agcugagguucuuuaauac

SEQ ID NO: 2095343 - RNA, 19 nt, Artificial Sequence
  Description of Artificial Sequence: Synthetic oligonucleotide
  Antisense strand to SEQ ID NO: 2095342
guauuaaagaaccucagcu

SEQ ID NO: 2095344 - RNA, 19 nt, Artificial Sequence
  Description of Artificial Sequence: Synthetic oligonucleotide
  Sense strand starting at position 2203 of SEQ ID NO: 1882102
cgguguucugucuuugcuu

SEQ ID NO: 2095345 - RNA, 19 nt, Artificial Sequence
  Description of Artificial Sequence: Synthetic oligonucleotide
  Antisense strand to SEQ ID NO: 2095344
aagcaaagacagaacaccg

SEQ ID NO: 2095346 - RNA, 19 nt, Artificial Sequence
  Description of Artificial Sequence: Synthetic oligonucleotide
  Sense strand starting at position 2485 of SEQ ID NO: 1882102
agaacaaaggcaugcuuau

SEQ ID NO: 2095347 - RNA, 19 nt, Artificial Sequence
  Description of Artificial Sequence: Synthetic oligonucleotide
  Antisense strand to SEQ ID NO: 2095346
auaagcaugccuuuguucu

SEQ ID NO: 2095348 - RNA, 19 nt, Artificial Sequence
  Description of Artificial Sequence: Synthetic oligonucleotide
  Sense strand starting at position 2579 of SEQ ID NO: 1882102
uugcccaaguucucagaau

SEQ ID NO: 2095349 - RNA, 19 nt, Artificial Sequence
  Description of Artificial Sequence: Synthetic oligonucleotide
  Antisense strand to SEQ ID NO: 2095348
auucugagaacuugggcaa

SEQ ID NO: 2095350 - RNA, 19 nt, Artificial Sequence
  Description of Artificial Sequence: Synthetic oligonucleotide
  Sense strand starting at position 2811 of SEQ ID NO: 1882102
gguuaugaucaagaacguc

SEQ ID NO: 2095351 - RNA, 19 nt, Artificial Sequence
  Description of Artificial Sequence: Synthetic oligonucleotide
  Antisense strand to SEQ ID NO: 2095350
gacguucuugaucauaacc

SEQ ID NO: 2095352 - RNA, 19 nt, Artificial Sequence
  Description of Artificial Sequence: Synthetic oligonucleotide
  Sense strand starting at position 2819 of SEQ ID NO: 1882102
ucaagaacgucacauuaau

SEQ ID NO: 2095353 - RNA, 19 nt, Artificial Sequence
  Description of Artificial Sequence: Synthetic oligonucleotide
  Antisense strand to SEQ ID NO: 2095352
auuaaugugacguucuuga

SEQ ID NO: 2095354 - RNA, 19 nt, Artificial Sequence
  Description of Artificial Sequence: Synthetic oligonucleotide
  Sense strand starting at position 2889 of SEQ ID NO: 1882102
ggacucaacuagguuaaac

SEQ ID NO: 2095355 - RNA, 19 nt, Artificial Sequence
  Description of Artificial Sequence: Synthetic oligonucleotide
  Antisense strand to SEQ ID NO: 2095354
guuuaaccuaguugagucc

SEQ ID NO: 2095356 - RNA, 19 nt, Artificial Sequence
  Description of Artificial Sequence: Synthetic oligonucleotide
  Sense strand starting at position 3062 of SEQ ID NO: 1882102
cuauaaacaucguuccaag

SEQ ID NO: 2095357 - RNA, 19 nt, Artificial Sequence
  Description of Artificial Sequence: Synthetic oligonucleotide
  Antisense strand to SEQ ID NO: 2095356
cuuggaacgauguuuauag

SEQ ID NO: 2095358 - RNA, 19 nt, Artificial Sequence
  Description of Artificial Sequence: Synthetic oligonucleotide
  Sense strand starting at position 3087 of SEQ ID NO: 1882102
aaaugaauuugaugggaag

SEQ ID NO: 2095359 - RNA, 19 nt, Artificial Sequence
  Description of Artificial Sequence: Synthetic oligonucleotide
  Antisense strand to SEQ ID NO: 2095358
cuucccaucaaauucauuu

SEQ ID NO: 2095360 - RNA, 19 nt, Artificial Sequence
  Description of Artificial Sequence: Synthetic oligonucleotide
  Sense strand starting at position 3099 of SEQ ID NO: 1882102
ugggaagauguguaacagu

SEQ ID NO: 2095361 - RNA, 19 nt, Artificial Sequence
  Description of Artificial Sequence: Synthetic oligonucleotide
  Antisense strand to SEQ ID NO: 2095360
acuguuacacaucuuccca

SEQ ID NO: 2095362 - RNA, 19 nt, Artificial Sequence
  Description of Artificial Sequence: Synthetic oligonucleotide
  Sense strand starting at position 3278 of SEQ ID NO: 1882102
caugauaagugcuuucuag

SEQ ID NO: 2095363 - RNA, 19 nt, Artificial Sequence
  Description of Artificial Sequence: Synthetic oligonucleotide
  Antisense strand to SEQ ID NO: 2095362
cuagaaagcacuuaucaug

SEQ ID NO: 2095364 - RNA, 19 nt, Artificial Sequence
  Description of Artificial Sequence: Synthetic oligonucleotide
  Sense strand starting at position 3370 of SEQ ID NO: 1882102
agucaagggucagcuaauu

SEQ ID NO: 2095365 - RNA, 19 nt, Artificial Sequence
  Description of Artificial Sequence: Synthetic oligonucleotide
  Antisense strand to SEQ ID NO: 2095364
aauuagcugacccuugacu

SEQ ID NO: 2095366 - RNA, 19 nt, Artificial Sequence
  Description of Artificial Sequence: Synthetic oligonucleotide
  Sense strand starting at position 3487 of SEQ ID NO: 1882102
auccuuauccuguggguaa

SEQ ID NO: 2095367 - RNA, 19 nt, Artificial Sequence
  Description of Artificial Sequence: Synthetic oligonucleotide
  Antisense strand to SEQ ID NO: 2095366
uuacccacaggauaaggau

SEQ ID NO: 2095368 - RNA, 19 nt, Artificial Sequence
  Description of Artificial Sequence: Synthetic oligonucleotide
  Sense strand starting at position 3491 of SEQ ID NO: 1882102
uuauccuguggguaaagga

SEQ ID NO: 2095369 - RNA, 19 nt, Artificial Sequence
  Description of Artificial Sequence: Synthetic oligonucleotide
  Antisense strand to SEQ ID NO: 2095368
uccuuuacccacaggauaa

SEQ ID NO: 2095370 - RNA, 19 nt, Artificial Sequence
  Description of Artificial Sequence: Synthetic oligonucleotide
  Sense strand starting at position 3511 of SEQ ID NO: 1882102
agaacuccuucuggaggaa

SEQ ID NO: 2095371 - RNA, 19 nt, Artificial Sequence
  Description of Artificial Sequence: Synthetic oligonucleotide
  Antisense strand to SEQ ID NO: 2095370
uuccuccagaaggaguucu

SEQ ID NO: 2095372 - RNA, 19 nt, Artificial Sequence
  Description of Artificial Sequence: Synthetic oligonucleotide
  Sense strand starting at position 3542 of SEQ ID NO: 1882102
gcaggaaggcuaugcuauu

SEQ ID NO: 2095373 - RNA, 19 nt, Artificial Sequence
  Description of Artificial Sequence: Synthetic oligonucleotide
  Antisense strand to SEQ ID NO: 2095372
aauagcauagccuuccugc

SEQ ID NO: 2095374 - RNA, 19 nt, Artificial Sequence
  Description of Artificial Sequence: Synthetic oligonucleotide
  Sense strand starting at position 3719 of SEQ ID NO: 1882102
uccaguuggcaaggagauu

SEQ ID NO: 2095375 - RNA, 19 nt, Artificial Sequence
  Description of Artificial Sequence: Synthetic oligonucleotide
  Antisense strand to SEQ ID NO: 2095374
aaucuccuugccaacugga

SEQ ID NO: 2095376 - RNA, 19 nt, Artificial Sequence
  Description of Artificial Sequence: Synthetic oligonucleotide
  Sense strand starting at position 3732 of SEQ ID NO: 1882102
gagauuugguauuacacaa

SEQ ID NO: 2095377 - RNA, 19 nt, Artificial Sequence
  Description of Artificial Sequence: Synthetic oligonucleotide
  Antisense strand to SEQ ID NO: 2095376
uuguguaauaccaaaucuc

SEQ ID NO: 2095378 - RNA, 19 nt, Artificial Sequence
  Description of Artificial Sequence: Synthetic oligonucleotide
  Sense strand starting at position 3887 of SEQ ID NO: 1882102
gggaauuaaaguugugggu

SEQ ID NO: 2095379 - RNA, 19 nt, Artificial Sequence
  Description of Artificial Sequence: Synthetic oligonucleotide
  Antisense strand to SEQ ID NO: 2095378
acccacaacuuuaauuccc

SEQ ID NO: 2095380 - RNA, 19 nt, Artificial Sequence
  Description of Artificial Sequence: Synthetic oligonucleotide
  Sense strand starting at position 3891 of SEQ ID NO: 1882102
auuaaaguuguggguagaa

SEQ ID NO: 2095381 - RNA, 19 nt, Artificial Sequence
  Description of Artificial Sequence: Synthetic oligonucleotide
  Antisense strand to SEQ ID NO: 2095380
uucuacccacaacuuuaau

SEQ ID NO: 2095382 - RNA, 19 nt, Artificial Sequence
  Description of Artificial Sequence: Synthetic oligonucleotide
  Sense strand starting at position 3980 of SEQ ID NO: 1882102
guuucuggaugacuuguaa

SEQ ID NO: 2095383 - RNA, 19 nt, Artificial Sequence
  Description of Artificial Sequence: Synthetic oligonucleotide
  Antisense strand to SEQ ID NO: 2095382
uuacaagucauccagaaac

SEQ ID NO: 2095384 - RNA, 19 nt, Artificial Sequence
  Description of Artificial Sequence: Synthetic oligonucleotide
  Sense strand starting at position 101 of SEQ ID NO: 1882103
gcagaaauauucuucccug

SEQ ID NO: 2095385 - RNA, 19 nt, Artificial Sequence
  Description of Artificial Sequence: Synthetic oligonucleotide
  Antisense strand to SEQ ID NO: 2095384
cagggaagaauauuucugc

SEQ ID NO: 2095386 - RNA, 19 nt, Artificial Sequence
  Description of Artificial Sequence: Synthetic oligonucleotide
  Sense strand starting at position 118 of SEQ ID NO: 1882103
uggcuagucacagauugga

SEQ ID NO: 2095387 - RNA, 19 nt, Artificial Sequence
  Description of Artificial Sequence: Synthetic oligonucleotide
  Antisense strand to SEQ ID NO: 2095386
uccaaucugugacuagcca

SEQ ID NO: 2095388 - RNA, 19 nt, Artificial Sequence
  Description of Artificial Sequence: Synthetic oligonucleotide
  Sense strand starting at position 121 of SEQ ID NO: 1882103
cuagucacagauuggacaa

SEQ ID NO: 2095389 - RNA, 19 nt, Artificial Sequence
  Description of Artificial Sequence: Synthetic oligonucleotide
  Antisense strand to SEQ ID NO: 2095388
uuguccaaucugugacuag

SEQ ID NO: 2095390 - RNA, 19 nt, Artificial Sequence
  Description of Artificial Sequence: Synthetic oligonucleotide
  Sense strand starting at position 161 of SEQ ID NO: 1882103
ggaaauugccaauggauua

SEQ ID NO: 2095391 - RNA, 19 nt, Artificial Sequence
  Description of Artificial Sequence: Synthetic oligonucleotide
  Antisense strand to SEQ ID NO: 2095390
uaauccauuggcaauuucc

SEQ ID NO: 2095392 - RNA, 19 nt, Artificial Sequence
  Description of Artificial Sequence: Synthetic oligonucleotide
  Sense strand starting at position 389 of SEQ ID NO: 1882103
uucuaucgucacuaugaaa

SEQ ID NO: 2095393 - RNA, 19 nt, Artificial Sequence
  Description of Artificial Sequence: Synthetic oligonucleotide
  Antisense strand to SEQ ID NO: 2095392
uuucauagugacgauagaa

SEQ ID NO: 2095394 - RNA, 19 nt, Artificial Sequence
  Description of Artificial Sequence: Synthetic oligonucleotide
  Sense strand starting at position 528 of SEQ ID NO: 1882103
uugucauuggguuaaguac

SEQ ID NO: 2095395 - RNA, 19 nt, Artificial Sequence
  Description of Artificial Sequence: Synthetic oligonucleotide
  Antisense strand to SEQ ID NO: 2095394
guacuuaacccaaugacaa

SEQ ID NO: 2095396 - RNA, 19 nt, Artificial Sequence
  Description of Artificial Sequence: Synthetic oligonucleotide
  Sense strand starting at position 537 of SEQ ID NO: 1882103
gguuaaguacauuaaguau

SEQ ID NO: 2095397 - RNA, 19 nt, Artificial Sequence
  Description of Artificial Sequence: Synthetic oligonucleotide
  Antisense strand to SEQ ID NO: 2095396
auacuuaauguacuuaacc

SEQ ID NO: 2095398 - RNA, 19 nt, Artificial Sequence
  Description of Artificial Sequence: Synthetic oligonucleotide
  Sense strand starting at position 564 of SEQ ID NO: 1882103
ugugguguucugguuaugu

SEQ ID NO: 2095399 - RNA, 19 nt, Artificial Sequence
  Description of Artificial Sequence: Synthetic oligonucleotide
  Antisense strand to SEQ ID NO: 2095398
acauaaccagaacaccaca

SEQ ID NO: 2095400 - RNA, 19 nt, Artificial Sequence
  Description of Artificial Sequence: Synthetic oligonucleotide
  Sense strand starting at position 675 of SEQ ID NO: 1882103
acugcaaauguagaaguau

SEQ ID NO: 2095401 - RNA, 19 nt, Artificial Sequence
  Description of Artificial Sequence: Synthetic oligonucleotide
  Antisense strand to SEQ ID NO: 2095400
auacuucuacauuugcagu

SEQ ID NO: 2095402 - RNA, 19 nt, Artificial Sequence
  Description of Artificial Sequence: Synthetic oligonucleotide
  Sense strand starting at position 702 of SEQ ID NO: 1882103
aaguaauugguaugacuaa

SEQ ID NO: 2095403 - RNA, 19 nt, Artificial Sequence
  Description of Artificial Sequence: Synthetic oligonucleotide
  Antisense strand to SEQ ID NO: 2095402
uuagucauaccaauuacuu

SEQ ID NO: 2095404 - RNA, 19 nt, Artificial Sequence
  Description of Artificial Sequence: Synthetic oligonucleotide
  Sense strand starting at position 789 of SEQ ID NO: 1882103
aguauugauucucucuuag

SEQ ID NO: 2095405 - RNA, 19 nt, Artificial Sequence
  Description of Artificial Sequence: Synthetic oligonucleotide
  Antisense strand to SEQ ID NO: 2095404
cuaagagagaaucaauacu

SEQ ID NO: 2095406 - RNA, 19 nt, Artificial Sequence
  Description of Artificial Sequence: Synthetic oligonucleotide
  Sense strand starting at position 801 of SEQ ID NO: 1882103
cucuuaggauuccuaagau

SEQ ID NO: 2095407 - RNA, 19 nt, Artificial Sequence
  Description of Artificial Sequence: Synthetic oligonucleotide
  Antisense strand to SEQ ID NO: 2095406
aucuuaggaauccuaagag

SEQ ID NO: 2095408 - RNA, 19 nt, Artificial Sequence
  Description of Artificial Sequence: Synthetic oligonucleotide
  Sense strand starting at position 1050 of SEQ ID NO: 1882103
cucugaaacuguucuggaa

SEQ ID NO: 2095409 - RNA, 19 nt, Artificial Sequence
  Description of Artificial Sequence: Synthetic oligonucleotide
  Antisense strand to SEQ ID NO: 2095408
uuccagaacaguuucagag

SEQ ID NO: 2095410 - RNA, 19 nt, Artificial Sequence
  Description of Artificial Sequence: Synthetic oligonucleotide
  Sense strand starting at position 1160 of SEQ ID NO: 1882103
gauccugcacacgauuaga

SEQ ID NO: 2095411 - RNA, 19 nt, Artificial Sequence
  Description of Artificial Sequence: Synthetic oligonucleotide
  Antisense strand to SEQ ID NO: 2095410
ucuaaucgugugcaggauc

SEQ ID NO: 2095412 - RNA, 19 nt, Artificial Sequence
  Description of Artificial Sequence: Synthetic oligonucleotide
  Sense strand starting at position 1163 of SEQ ID NO: 1882103
ccugcacacgauuagaaua

SEQ ID NO: 2095413 - RNA, 19 nt, Artificial Sequence
  Description of Artificial Sequence: Synthetic oligonucleotide
  Antisense strand to SEQ ID NO: 2095412
uauucuaaucgugugcagg

SEQ ID NO: 2095414 - RNA, 19 nt, Artificial Sequence
  Description of Artificial Sequence: Synthetic oligonucleotide
  Sense strand starting at position 2009 of SEQ ID NO: 1882103
uugcuagcucuguuuguuu

SEQ ID NO: 2095415 - RNA, 19 nt, Artificial Sequence
  Description of Artificial Sequence: Synthetic oligonucleotide
  Antisense strand to SEQ ID NO: 2095414
aaacaaacagagcuagcaa

SEQ ID NO: 2095416 - RNA, 19 nt, Artificial Sequence
  Description of Artificial Sequence: Synthetic oligonucleotide
  Sense strand starting at position 2103 of SEQ ID NO: 1882103
acuugagucaggcaaguuu

SEQ ID NO: 2095417 - RNA, 19 nt, Artificial Sequence
  Description of Artificial Sequence: Synthetic oligonucleotide
  Antisense strand to SEQ ID NO: 2095416
aaacuugccugacucaagu

SEQ ID NO: 2095418 - RNA, 19 nt, Artificial Sequence
  Description of Artificial Sequence: Synthetic oligonucleotide
  Sense strand starting at position 2378 of SEQ ID NO: 1882103
aaccaugcgcuuguuguaa

SEQ ID NO: 2095419 - RNA, 19 nt, Artificial Sequence
  Description of Artificial Sequence: Synthetic oligonucleotide
  Antisense strand to SEQ ID NO: 2095418
uuacaacaagcgcaugguu

SEQ ID NO: 2095420 - RNA, 19 nt, Artificial Sequence
  Description of Artificial Sequence: Synthetic oligonucleotide
  Sense strand starting at position 2446 of SEQ ID NO: 1882103
gaagaaaguauguggauug

SEQ ID NO: 2095421 - RNA, 19 nt, Artificial Sequence
  Description of Artificial Sequence: Synthetic oligonucleotide
  Antisense strand to SEQ ID NO: 2095420
caauccacauacuuucuuc

SEQ ID NO: 2095422 - RNA, 19 nt, Artificial Sequence
  Description of Artificial Sequence: Synthetic oligonucleotide
  Sense strand starting at position 2451 of SEQ ID NO: 1882103
aaguauguggauuggaauu

SEQ ID NO: 2095423 - RNA, 19 nt, Artificial Sequence
  Description of Artificial Sequence: Synthetic oligonucleotide
  Antisense strand to SEQ ID NO: 2095422
aauuccaauccacauacuu

SEQ ID NO: 2095424 - RNA, 19 nt, Artificial Sequence
  Description of Artificial Sequence: Synthetic oligonucleotide
  Sense strand starting at position 2461 of SEQ ID NO: 1882103
auuggaauuugugauugga

SEQ ID NO: 2095425 - RNA, 19 nt, Artificial Sequence
  Description of Artificial Sequence: Synthetic oligonucleotide
  Antisense strand to SEQ ID NO: 2095424
uccaaucacaaauuccaau

SEQ ID NO: 2095426 - RNA, 19 nt, Artificial Sequence
  Description of Artificial Sequence: Synthetic oligonucleotide
  Sense strand starting at position 2469 of SEQ ID NO: 1882103
uugugauuggagcagauca

SEQ ID NO: 2095427 - RNA, 19 nt, Artificial Sequence
  Description of Artificial Sequence: Synthetic oligonucleotide
  Antisense strand to SEQ ID NO: 2095426
ugaucugcuccaaucacaa

SEQ ID NO: 2095428 - RNA, 19 nt, Artificial Sequence
  Description of Artificial Sequence: Synthetic oligonucleotide
  Sense strand starting at position 2503 of SEQ ID NO: 1882103
gccguuauuagguuuguau

SEQ ID NO: 2095429 - RNA, 19 nt, Artificial Sequence
  Description of Artificial Sequence: Synthetic oligonucleotide
  Antisense strand to SEQ ID NO: 2095428
auacaaaccuaauaacggc

SEQ ID NO: 2095430 - RNA, 19 nt, Artificial Sequence
  Description of Artificial Sequence: Synthetic oligonucleotide
  Sense strand starting at position 2650 of SEQ ID NO: 1882103
cugaguauagacugguaaa

SEQ ID NO: 2095431 - RNA, 19 nt, Artificial Sequence
  Description of Artificial Sequence: Synthetic oligonucleotide
  Antisense strand to SEQ ID NO: 2095430
uuuaccagucuauacucag

SEQ ID NO: 2095432 - RNA, 19 nt, Artificial Sequence
  Description of Artificial Sequence: Synthetic oligonucleotide
  Sense strand starting at position 2651 of SEQ ID NO: 1882103
ugaguauagacugguaaau

SEQ ID NO: 2095433 - RNA, 19 nt, Artificial Sequence
  Description of Artificial Sequence: Synthetic oligonucleotide
  Antisense strand to SEQ ID NO: 2095432
auuuaccagucuauacuca

SEQ ID NO: 2095434 - RNA, 19 nt, Artificial Sequence
  Description of Artificial Sequence: Synthetic oligonucleotide
  Sense strand starting at position 2663 of SEQ ID NO: 1882103
gguaaaugugagcaguuua

SEQ ID NO: 2095435 - RNA, 19 nt, Artificial Sequence
  Description of Artificial Sequence: Synthetic oligonucleotide
  Antisense strand to SEQ ID NO: 2095434
uaaacugcucacauuuacc

SEQ ID NO: 2095436 - RNA, 19 nt, Artificial Sequence
  Description of Artificial Sequence: Synthetic oligonucleotide
  Sense strand starting at position 2749 of SEQ ID NO: 1882103
ugaaauuagugcuuagaaa

SEQ ID NO: 2095437 - RNA, 19 nt, Artificial Sequence
  Description of Artificial Sequence: Synthetic oligonucleotide
  Antisense strand to SEQ ID NO: 2095436
uuucuaagcacuaauuuca

SEQ ID NO: 2095438 - RNA, 19 nt, Artificial Sequence
  Description of Artificial Sequence: Synthetic oligonucleotide
  Sense strand starting at position 2813 of SEQ ID NO: 1882103
gcacaaagguaggucauua

SEQ ID NO: 2095439 - RNA, 19 nt, Artificial Sequence
  Description of Artificial Sequence: Synthetic oligonucleotide
  Antisense strand to SEQ ID NO: 2095438
uaaugaccuaccuuugugc

SEQ ID NO: 2095440 - RNA, 19 nt, Artificial Sequence
  Description of Artificial Sequence: Synthetic oligonucleotide
  Sense strand starting at position 2878 of SEQ ID NO: 1882103
ucuuuagaccuguagauac

SEQ ID NO: 2095441 - RNA, 19 nt, Artificial Sequence
  Description of Artificial Sequence: Synthetic oligonucleotide
  Antisense strand to SEQ ID NO: 2095440
guaucuacaggucuaaaga

SEQ ID NO: 2095442 - RNA, 19 nt, Artificial Sequence
  Description of Artificial Sequence: Synthetic oligonucleotide
  Sense strand starting at position 2905 of SEQ ID NO: 1882103
guauuugugcuauguauaa

SEQ ID NO: 2095443 - RNA, 19 nt, Artificial Sequence
  Description of Artificial Sequence: Synthetic oligonucleotide
  Antisense strand to SEQ ID NO: 2095442
uuauacauagcacaaauac

SEQ ID NO: 2095444 - RNA, 19 nt, Artificial Sequence
  Description of Artificial Sequence: Synthetic oligonucleotide
  Sense strand starting at position 3069 of SEQ ID NO: 1882103
uggcaugauuuagccagua

SEQ ID NO: 2095445 - RNA, 19 nt, Artificial Sequence
  Description of Artificial Sequence: Synthetic oligonucleotide
  Antisense strand to SEQ ID NO: 2095444
uacuggcuaaaucaugcca

SEQ ID NO: 2095446 - RNA, 19 nt, Artificial Sequence
  Description of Artificial Sequence: Synthetic oligonucleotide
  Sense strand starting at position 3090 of SEQ ID NO: 1882103
agagaaauauuaguugugu

SEQ ID NO: 2095447 - RNA, 19 nt, Artificial Sequence
  Description of Artificial Sequence: Synthetic oligonucleotide
  Antisense strand to SEQ ID NO: 2095446
acacaacuaauauuucucu

SEQ ID NO: 2095448 - RNA, 19 nt, Artificial Sequence
  Description of Artificial Sequence: Synthetic oligonucleotide
  Sense strand starting at position 3208 of SEQ ID NO: 1882103
augaaugaaguuuguagaa

SEQ ID NO: 2095449 - RNA, 19 nt, Artificial Sequence
  Description of Artificial Sequence: Synthetic oligonucleotide
  Antisense strand to SEQ ID NO: 2095448
uucuacaaacuucauucau

SEQ ID NO: 2095450 - RNA, 19 nt, Artificial Sequence
  Description of Artificial Sequence: Synthetic oligonucleotide
  Sense strand starting at position 3375 of SEQ ID NO: 1882103
ccagaauagugaguugauu

SEQ ID NO: 2095451 - RNA, 19 nt, Artificial Sequence
  Description of Artificial Sequence: Synthetic oligonucleotide
  Antisense strand to SEQ ID NO: 2095450
aaucaacucacuauucugg

SEQ ID NO: 2095452 - RNA, 19 nt, Artificial Sequence
  Description of Artificial Sequence: Synthetic oligonucleotide
  Sense strand starting at position 3456 of SEQ ID NO: 1882103
ccuaacugacuguauuagu

SEQ ID NO: 2095453 - RNA, 19 nt, Artificial Sequence
  Description of Artificial Sequence: Synthetic oligonucleotide
  Antisense strand to SEQ ID NO: 2095452
acuaauacagucaguuagg

SEQ ID NO: 2095454 - RNA, 19 nt, Artificial Sequence
  Description of Artificial Sequence: Synthetic oligonucleotide
  Sense strand starting at position 3463 of SEQ ID NO: 1882103
gacuguauuagugggagaa

SEQ ID NO: 2095455 - RNA, 19 nt, Artificial Sequence
  Description of Artificial Sequence: Synthetic oligonucleotide
  Antisense strand to SEQ ID NO: 2095454
uucucccacuaauacaguc

SEQ ID NO: 2095456 - RNA, 19 nt, Artificial Sequence
  Description of Artificial Sequence: Synthetic oligonucleotide
  Sense strand starting at position 3464 of SEQ ID NO: 1882103
acuguauuagugggagaaa

SEQ ID NO: 2095457 - RNA, 19 nt, Artificial Sequence
  Description of Artificial Sequence: Synthetic oligonucleotide
  Antisense strand to SEQ ID NO: 2095456
uuucucccacuaauacagu

SEQ ID NO: 2095458 - RNA, 19 nt, Artificial Sequence
  Description of Artificial Sequence: Synthetic oligonucleotide
  Sense strand starting at position 3697 of SEQ ID NO: 1882103
ugggcucuuauugagauga

SEQ ID NO: 2095459 - RNA, 19 nt, Artificial Sequence
  Description of Artificial Sequence: Synthetic oligonucleotide
  Antisense strand to SEQ ID NO: 2095458
ucaucucaauaagagccca

SEQ ID NO: 2095460 - RNA, 19 nt, Artificial Sequence
  Description of Artificial Sequence: Synthetic oligonucleotide
  Sense strand starting at position 3887 of SEQ ID NO: 1882103
agagucauaucucuuacuu

SEQ ID NO: 2095461 - RNA, 19 nt, Artificial Sequence
  Description of Artificial Sequence: Synthetic oligonucleotide
  Antisense strand to SEQ ID NO: 2095460
aaguaagagauaugacucu

SEQ ID NO: 2095462 - RNA, 19 nt, Artificial Sequence
  Description of Artificial Sequence: Synthetic oligonucleotide
  Sense strand starting at position 3919 of SEQ ID NO: 1882103
gcuuuaagaaauggagucu

SEQ ID NO: 2095463 - RNA, 19 nt, Artificial Sequence
  Description of Artificial Sequence: Synthetic oligonucleotide
  Antisense strand to SEQ ID NO: 2095462
agacuccauuucuuaaagc

SEQ ID NO: 2095464 - RNA, 19 nt, Artificial Sequence
  Description of Artificial Sequence: Synthetic oligonucleotide
  Sense strand starting at position 320 of SEQ ID NO: 1882104
gcagaaauauucuucccug

SEQ ID NO: 2095465 - RNA, 19 nt, Artificial Sequence
  Description of Artificial Sequence: Synthetic oligonucleotide
  Antisense strand to SEQ ID NO: 2095464
cagggaagaauauuucugc

SEQ ID NO: 2095466 - RNA, 19 nt, Artificial Sequence
  Description of Artificial Sequence: Synthetic oligonucleotide
  Sense strand starting at position 337 of SEQ ID NO: 1882104
uggcuagucacagauugga

SEQ ID NO: 2095467 - RNA, 19 nt, Artificial Sequence
  Description of Artificial Sequence: Synthetic oligonucleotide
  Antisense strand to SEQ ID NO: 2095466
uccaaucugugacuagcca

SEQ ID NO: 2095468 - RNA, 19 nt, Artificial Sequence
  Description of Artificial Sequence: Synthetic oligonucleotide
  Sense strand starting at position 340 of SEQ ID NO: 1882104
cuagucacagauuggacaa

SEQ ID NO: 2095469 - RNA, 19 nt, Artificial Sequence
  Description of Artificial Sequence: Synthetic oligonucleotide
  Antisense strand to SEQ ID NO: 2095468
uuguccaaucugugacuag

SEQ ID NO: 2095470 - RNA, 19 nt, Artificial Sequence
  Description of Artificial Sequence: Synthetic oligonucleotide
  Sense strand starting at position 380 of SEQ ID NO: 1882104
ggaaauugccaauggauua

SEQ ID NO: 2095471 - RNA, 19 nt, Artificial Sequence
  Description of Artificial Sequence: Synthetic oligonucleotide
  Antisense strand to SEQ ID NO: 2095470
uaauccauuggcaauuucc

SEQ ID NO: 2095472 - RNA, 19 nt, Artificial Sequence
  Description of Artificial Sequence: Synthetic oligonucleotide
  Sense strand starting at position 608 of SEQ ID NO: 1882104
uucuaucgucacuaugaaa

SEQ ID NO: 2095473 - RNA, 19 nt, Artificial Sequence
  Description of Artificial Sequence: Synthetic oligonucleotide
  Antisense strand to SEQ ID NO: 2095472
uuucauagugacgauagaa

SEQ ID NO: 2095474 - RNA, 19 nt, Artificial Sequence
  Description of Artificial Sequence: Synthetic oligonucleotide
  Sense strand starting at position 747 of SEQ ID NO: 1882104
uugucauuggguuaaguac

SEQ ID NO: 2095475 - RNA, 19 nt, Artificial Sequence
  Description of Artificial Sequence: Synthetic oligonucleotide
  Antisense strand to SEQ ID NO: 2095474
guacuuaacccaaugacaa

SEQ ID NO: 2095476 - RNA, 19 nt, Artificial Sequence
  Description of Artificial Sequence: Synthetic oligonucleotide
  Sense strand starting at position 756 of SEQ ID NO: 1882104
gguuaaguacauuaaguau

SEQ ID NO: 2095477 - RNA, 19 nt, Artificial Sequence
  Description of Artificial Sequence: Synthetic oligonucleotide
  Antisense strand to SEQ ID NO: 2095476
auacuuaauguacuuaacc

SEQ ID NO: 2095478 - RNA, 19 nt, Artificial Sequence
  Description of Artificial Sequence: Synthetic oligonucleotide
  Sense strand starting at position 783 of SEQ ID NO: 1882104
ugugguguucugguuaugu

SEQ ID NO: 2095479 - RNA, 19 nt, Artificial Sequence
  Description of Artificial Sequence: Synthetic oligonucleotide
  Antisense strand to SEQ ID NO: 2095478
acauaaccagaacaccaca

SEQ ID NO: 2095480 - RNA, 19 nt, Artificial Sequence
  Description of Artificial Sequence: Synthetic oligonucleotide
  Sense strand starting at position 894 of SEQ ID NO: 1882104
acugcaaauguagaaguau

SEQ ID NO: 2095481 - RNA, 19 nt, Artificial Sequence
  Description of Artificial Sequence: Synthetic oligonucleotide
  Antisense strand to SEQ ID NO: 2095480
auacuucuacauuugcagu

SEQ ID NO: 2095482 - RNA, 19 nt, Artificial Sequence
  Description of Artificial Sequence: Synthetic oligonucleotide
  Sense strand starting at position 921 of SEQ ID NO: 1882104
aaguaauugguaugacuaa

SEQ ID NO: 2095483 - RNA, 19 nt, Artificial Sequence
  Description of Artificial Sequence: Synthetic oligonucleotide
  Antisense strand to SEQ ID NO: 2095482
uuagucauaccaauuacuu

SEQ ID NO: 2095484 - RNA, 19 nt, Artificial Sequence
  Description of Artificial Sequence: Synthetic oligonucleotide
  Sense strand starting at position 1008 of SEQ ID NO: 1882104
aguauugauucucucuuag

SEQ ID NO: 2095485 - RNA, 19 nt, Artificial Sequence
  Description of Artificial Sequence: Synthetic oligonucleotide
  Antisense strand to SEQ ID NO: 2095484
cuaagagagaaucaauacu

SEQ ID NO: 2095486 - RNA, 19 nt, Artificial Sequence
  Description of Artificial Sequence: Synthetic oligonucleotide
  Sense strand starting at position 1020 of SEQ ID NO: 1882104
cucuuaggauuccuaagau

SEQ ID NO: 2095487 - RNA, 19 nt, Artificial Sequence
  Description of Artificial Sequence: Synthetic oligonucleotide
  Antisense strand to SEQ ID NO: 2095486
aucuuaggaauccuaagag

SEQ ID NO: 2095488 - RNA, 19 nt, Artificial Sequence
  Description of Artificial Sequence: Synthetic oligonucleotide
  Sense strand starting at position 1269 of SEQ ID NO: 1882104
cucugaaacuguucuggaa

SEQ ID NO: 2095489 - RNA, 19 nt, Artificial Sequence
  Description of Artificial Sequence: Synthetic oligonucleotide
  Antisense strand to SEQ ID NO: 2095488
uuccagaacaguuucagag

SEQ ID NO: 2095490 - RNA, 19 nt, Artificial Sequence
  Description of Artificial Sequence: Synthetic oligonucleotide
  Sense strand starting at position 1379 of SEQ ID NO: 1882104
gauccugcacacgauuaga

SEQ ID NO: 2095491 - RNA, 19 nt, Artificial Sequence
  Description of Artificial Sequence: Synthetic oligonucleotide
  Antisense strand to SEQ ID NO: 2095490
ucuaaucgugugcaggauc

SEQ ID NO: 2095492 - RNA, 19 nt, Artificial Sequence
  Description of Artificial Sequence: Synthetic oligonucleotide
  Sense strand starting at position 1382 of SEQ ID NO: 1882104
ccugcacacgauuagaaua

SEQ ID NO: 2095493 - RNA, 19 nt, Artificial Sequence
  Description of Artificial Sequence: Synthetic oligonucleotide
  Antisense strand to SEQ ID NO: 2095492
uauucuaaucgugugcagg

SEQ ID NO: 2095494 - RNA, 19 nt, Artificial Sequence
  Description of Artificial Sequence: Synthetic oligonucleotide
  Sense strand starting at position 2228 of SEQ ID NO: 1882104
uugcuagcucuguuuguuu

SEQ ID NO: 2095495 - RNA, 19 nt, Artificial Sequence
  Description of Artificial Sequence: Synthetic oligonucleotide
  Antisense strand to SEQ ID NO: 2095494
aaacaaacagagcuagcaa

SEQ ID NO: 2095496 - RNA, 19 nt, Artificial Sequence
  Description of Artificial Sequence: Synthetic oligonucleotide
  Sense strand starting at position 2322 of SEQ ID NO: 1882104
acuugagucaggcaaguuu

SEQ ID NO: 2095497 - RNA, 19 nt, Artificial Sequence
  Description of Artificial Sequence: Synthetic oligonucleotide
  Antisense strand to SEQ ID NO: 2095496
aaacuugccugacucaagu

SEQ ID NO: 2095498 - RNA, 19 nt, Artificial Sequence
  Description of Artificial Sequence: Synthetic oligonucleotide
  Sense strand starting at position 2597 of SEQ ID NO: 1882104
aaccaugcgcuuguuguaa

SEQ ID NO: 2095499 - RNA, 19 nt, Artificial Sequence
  Description of Artificial Sequence: Synthetic oligonucleotide
  Antisense strand to SEQ ID NO: 2095498
uuacaacaagcgcaugguu

SEQ ID NO: 2095500 - RNA, 19 nt, Artificial Sequence
  Description of Artificial Sequence: Synthetic oligonucleotide
  Sense strand starting at position 2665 of SEQ ID NO: 1882104
gaagaaaguauguggauug

SEQ ID NO: 2095501 - RNA, 19 nt, Artificial Sequence
  Description of Artificial Sequence: Synthetic oligonucleotide
  Antisense strand to SEQ ID NO: 2095500
caauccacauacuuucuuc

SEQ ID NO: 2095502 - RNA, 19 nt, Artificial Sequence
  Description of Artificial Sequence: Synthetic oligonucleotide
  Sense strand starting at position 2670 of SEQ ID NO: 1882104
aaguauguggauuggaauu

SEQ ID NO: 2095503 - RNA, 19 nt, Artificial Sequence
  Description of Artificial Sequence: Synthetic oligonucleotide
  Antisense strand to SEQ ID NO: 2095502
aauuccaauccacauacuu

SEQ ID NO: 2095504 - RNA, 19 nt, Artificial Sequence
  Description of Artificial Sequence: Synthetic oligonucleotide
  Sense strand starting at position 2680 of SEQ ID NO: 1882104
auuggaauuugugauugga

SEQ ID NO: 2095505 - RNA, 19 nt, Artificial Sequence
  Description of Artificial Sequence: Synthetic oligonucleotide
  Antisense strand to SEQ ID NO: 2095504
uccaaucacaaauuccaau

SEQ ID NO: 2095506 - RNA, 19 nt, Artificial Sequence
  Description of Artificial Sequence: Synthetic oligonucleotide
  Sense strand starting at position 2688 of SEQ ID NO: 1882104
uugugauuggagcagauca

SEQ ID NO: 2095507 - RNA, 19 nt, Artificial Sequence
  Description of Artificial Sequence: Synthetic oligonucleotide
  Antisense strand to SEQ ID NO: 2095506
ugaucugcuccaaucacaa

SEQ ID NO: 2095508 - RNA, 19 nt, Artificial Sequence
  Description of Artificial Sequence: Synthetic oligonucleotide
  Sense strand starting at position 2722 of SEQ ID NO: 1882104
gccguuauuagguuuguau

SEQ ID NO: 2095509 - RNA, 19 nt, Artificial Sequence
  Description of Artificial Sequence: Synthetic oligonucleotide
  Antisense strand to SEQ ID NO: 2095508
auacaaaccuaauaacggc

SEQ ID NO: 2095510 - RNA, 19 nt, Artificial Sequence
  Description of Artificial Sequence: Synthetic oligonucleotide
  Sense strand starting at position 2869 of SEQ ID NO: 1882104
cugaguauagacugguaaa

SEQ ID NO: 2095511 - RNA, 19 nt, Artificial Sequence
  Description of Artificial Sequence: Synthetic oligonucleotide
  Antisense strand to SEQ ID NO: 2095510
uuuaccagucuauacucag

SEQ ID NO: 2095512 - RNA, 19 nt, Artificial Sequence
  Description of Artificial Sequence: Synthetic oligonucleotide
  Sense strand starting at position 2870 of SEQ ID NO: 1882104
ugaguauagacugguaaau

SEQ ID NO: 2095513 - RNA, 19 nt, Artificial Sequence
  Description of Artificial Sequence: Synthetic oligonucleotide
  Antisense strand to SEQ ID NO: 2095512
auuuaccagucuauacuca

SEQ ID NO: 2095514 - RNA, 19 nt, Artificial Sequence
  Description of Artificial Sequence: Synthetic oligonucleotide
  Sense strand starting at position 2882 of SEQ ID NO: 1882104
gguaaaugugagcaguuua

SEQ ID NO: 2095515 - RNA, 19 nt, Artificial Sequence
  Description of Artificial Sequence: Synthetic oligonucleotide
  Antisense strand to SEQ ID NO: 2095514
uaaacugcucacauuuacc

SEQ ID NO: 2095516 - RNA, 19 nt, Artificial Sequence
  Description of Artificial Sequence: Synthetic oligonucleotide
  Sense strand starting at position 2968 of SEQ ID NO: 1882104
ugaaauuagugcuuagaaa

SEQ ID NO: 2095517 - RNA, 19 nt, Artificial Sequence
  Description of Artificial Sequence: Synthetic oligonucleotide
  Antisense strand to SEQ ID NO: 2095516
uuucuaagcacuaauuuca

SEQ ID NO: 2095518 - RNA, 19 nt, Artificial Sequence
  Description of Artificial Sequence: Synthetic oligonucleotide
  Sense strand starting at position 3032 of SEQ ID NO: 1882104
gcacaaagguaggucauua

SEQ ID NO: 2095519 - RNA, 19 nt, Artificial Sequence
  Description of Artificial Sequence: Synthetic oligonucleotide
  Antisense strand to SEQ ID NO: 2095518
uaaugaccuaccuuugugc

SEQ ID NO: 2095520 - RNA, 19 nt, Artificial Sequence
  Description of Artificial Sequence: Synthetic oligonucleotide
  Sense strand starting at position 3097 of SEQ ID NO: 1882104
ucuuuagaccuguagauac

SEQ ID NO: 2095521 - RNA, 19 nt, Artificial Sequence
  Description of Artificial Sequence: Synthetic oligonucleotide
  Antisense strand to SEQ ID NO: 2095520
guaucuacaggucuaaaga

SEQ ID NO: 2095522 - RNA, 19 nt, Artificial Sequence
  Description of Artificial Sequence: Synthetic oligonucleotide
  Sense strand starting at position 3107 of SEQ ID NO: 1882104
uguagauacaaauguaugu

SEQ ID NO: 2095523 - RNA, 19 nt, Artificial Sequence
  Description of Artificial Sequence: Synthetic oligonucleotide
  Antisense strand to SEQ ID NO: 2095522
acauacauuuguaucuaca

SEQ ID NO: 2095524 - RNA, 19 nt, Artificial Sequence
  Description of Artificial Sequence: Synthetic oligonucleotide
  Sense strand starting at position 3124 of SEQ ID NO: 1882104
guauuugugcuauguauaa

SEQ ID NO: 2095525 - RNA, 19 nt, Artificial Sequence
  Description of Artificial Sequence: Synthetic oligonucleotide
  Antisense strand to SEQ ID NO: 2095524
uuauacauagcacaaauac

SEQ ID NO: 2095526 - RNA, 19 nt, Artificial Sequence
  Description of Artificial Sequence: Synthetic oligonucleotide
  Sense strand starting at position 3288 of SEQ ID NO: 1882104
uggcaugauuuagccagua

SEQ ID NO: 2095527 - RNA, 19 nt, Artificial Sequence
  Description of Artificial Sequence: Synthetic oligonucleotide
  Antisense strand to SEQ ID NO: 2095526
uacuggcuaaaucaugcca

SEQ ID NO: 2095528 - RNA, 19 nt, Artificial Sequence
  Description of Artificial Sequence: Synthetic oligonucleotide
  Sense strand starting at position 3309 of SEQ ID NO: 1882104
agagaaauauuaguugugu

SEQ ID NO: 2095529 - RNA, 19 nt, Artificial Sequence
  Description of Artificial Sequence: Synthetic oligonucleotide
  Antisense strand to SEQ ID NO: 2095528
acacaacuaauauuucucu

SEQ ID NO: 2095530 - RNA, 19 nt, Artificial Sequence
  Description of Artificial Sequence: Synthetic oligonucleotide
  Sense strand starting at position 3310 of SEQ ID NO: 1882104
gagaaauauuaguuguguu

SEQ ID NO: 2095531 - RNA, 19 nt, Artificial Sequence
  Description of Artificial Sequence: Synthetic oligonucleotide
  Antisense strand to SEQ ID NO: 2095530
aacacaacuaauauuucuc

SEQ ID NO: 2095532 - RNA, 19 nt, Artificial Sequence
  Description of Artificial Sequence: Synthetic oligonucleotide
  Sense strand starting at position 3427 of SEQ ID NO: 1882104
augaaugaaguuuguagaa

SEQ ID NO: 2095533 - RNA, 19 nt, Artificial Sequence
  Description of Artificial Sequence: Synthetic oligonucleotide
  Antisense strand to SEQ ID NO: 2095532
uucuacaaacuucauucau

SEQ ID NO: 2095534 - RNA, 19 nt, Artificial Sequence
  Description of Artificial Sequence: Synthetic oligonucleotide
  Sense strand starting at position 3594 of SEQ ID NO: 1882104
ccagaauagugaguugauu

SEQ ID NO: 2095535 - RNA, 19 nt, Artificial Sequence
  Description of Artificial Sequence: Synthetic oligonucleotide
  Antisense strand to SEQ ID NO: 2095534
aaucaacucacuauucugg

SEQ ID NO: 2095536 - RNA, 19 nt, Artificial Sequence
  Description of Artificial Sequence: Synthetic oligonucleotide
  Sense strand starting at position 3675 of SEQ ID NO: 1882104
ccuaacugacuguauuagu

SEQ ID NO: 2095537 - RNA, 19 nt, Artificial Sequence
  Description of Artificial Sequence: Synthetic oligonucleotide
  Antisense strand to SEQ ID NO: 2095536
acuaauacagucaguuagg

SEQ ID NO: 2095538 - RNA, 19 nt, Artificial Sequence
  Description of Artificial Sequence: Synthetic oligonucleotide
  Sense strand starting at position 3682 of SEQ ID NO: 1882104
gacuguauuagugggagaa

SEQ ID NO: 2095539 - RNA, 19 nt, Artificial Sequence
  Description of Artificial Sequence: Synthetic oligonucleotide
  Antisense strand to SEQ ID NO: 2095538
uucucccacuaauacaguc

SEQ ID NO: 2095540 - RNA, 19 nt, Artificial Sequence
  Description of Artificial Sequence: Synthetic oligonucleotide
  Sense strand starting at position 3683 of SEQ ID NO: 1882104
acuguauuagugggagaaa

SEQ ID NO: 2095541 - RNA, 19 nt, Artificial Sequence
  Description of Artificial Sequence: Synthetic oligonucleotide
  Antisense strand to SEQ ID NO: 2095540
uuucucccacuaauacagu

SEQ ID NO: 2095542 - RNA, 19 nt, Artificial Sequence
  Description of Artificial Sequence: Synthetic oligonucleotide
  Sense strand starting at position 3916 of SEQ ID NO: 1882104
ugggcucuuauugagauga

SEQ ID NO: 2095543 - RNA, 19 nt, Artificial Sequence
  Description of Artificial Sequence: Synthetic oligonucleotide
  Antisense strand to SEQ ID NO: 2095542
ucaucucaauaagagccca

SEQ ID NO: 2095544 - RNA, 19 nt, Artificial Sequence
  Description of Artificial Sequence: Synthetic oligonucleotide
  Sense strand starting at position 2205 of SEQ ID NO: 1882105
gacacugauucugcaguuu

SEQ ID NO: 2095545 - RNA, 19 nt, Artificial Sequence
  Description of Artificial Sequence: Synthetic oligonucleotide
  Antisense strand to SEQ ID NO: 2095544
aaacugcagaaucaguguc

SEQ ID NO: 2095546 - RNA, 19 nt, Artificial Sequence
  Description of Artificial Sequence: Synthetic oligonucleotide
  Sense strand starting at position 2248 of SEQ ID NO: 1882105
agcguucugcuuuacaacu

SEQ ID NO: 2095547 - RNA, 19 nt, Artificial Sequence
  Description of Artificial Sequence: Synthetic oligonucleotide
  Antisense strand to SEQ ID NO: 2095546
aguuguaaagcagaacgcu

SEQ ID NO: 2095548 - RNA, 19 nt, Artificial Sequence
  Description of Artificial Sequence: Synthetic oligonucleotide
  Sense strand starting at position 2294 of SEQ ID NO: 1882105
uguauacuguaauagcuaa

SEQ ID NO: 2095549 - RNA, 19 nt, Artificial Sequence
  Description of Artificial Sequence: Synthetic oligonucleotide
  Antisense strand to SEQ ID NO: 2095548
uuagcuauuacaguauaca

SEQ ID NO: 2095550 - RNA, 19 nt, Artificial Sequence
  Description of Artificial Sequence: Synthetic oligonucleotide
  Sense strand starting at position 2331 of SEQ ID NO: 1882105
uaggucauagccuguuaua

SEQ ID NO: 2095551 - RNA, 19 nt, Artificial Sequence
  Description of Artificial Sequence: Synthetic oligonucleotide
  Antisense strand to SEQ ID NO: 2095550
uauaacaggcuaugaccua

SEQ ID NO: 2095552 - RNA, 19 nt, Artificial Sequence
  Description of Artificial Sequence: Synthetic oligonucleotide
  Sense strand starting at position 2334 of SEQ ID NO: 1882105
gucauagccuguuauauac

SEQ ID NO: 2095553 - RNA, 19 nt, Artificial Sequence
  Description of Artificial Sequence: Synthetic oligonucleotide
  Antisense strand to SEQ ID NO: 2095552
guauauaacaggcuaugac

SEQ ID NO: 2095554 - RNA, 19 nt, Artificial Sequence
  Description of Artificial Sequence: Synthetic oligonucleotide
  Sense strand starting at position 2395 of SEQ ID NO: 1882105
aagaaugguuguuacagca

SEQ ID NO: 2095555 - RNA, 19 nt, Artificial Sequence
  Description of Artificial Sequence: Synthetic oligonucleotide
  Antisense strand to SEQ ID NO: 2095554
ugcuguaacaaccauucuu

SEQ ID NO: 2095556 - RNA, 19 nt, Artificial Sequence
  Description of Artificial Sequence: Synthetic oligonucleotide
  Sense strand starting at position 2525 of SEQ ID NO: 1882105
ucauguagcuuccugggau

SEQ ID NO: 2095557 - RNA, 19 nt, Artificial Sequence
  Description of Artificial Sequence: Synthetic oligonucleotide
  Antisense strand to SEQ ID NO: 2095556
aucccaggaagcuacauga

SEQ ID NO: 2095558 - RNA, 19 nt, Artificial Sequence
  Description of Artificial Sequence: Synthetic oligonucleotide
  Sense strand starting at position 2526 of SEQ ID NO: 1882105
cauguagcuuccugggaua

SEQ ID NO: 2095559 - RNA, 19 nt, Artificial Sequence
  Description of Artificial Sequence: Synthetic oligonucleotide
  Antisense strand to SEQ ID NO: 2095558
uaucccaggaagcuacaug

SEQ ID NO: 2095560 - RNA, 19 nt, Artificial Sequence
  Description of Artificial Sequence: Synthetic oligonucleotide
  Sense strand starting at position 2528 of SEQ ID NO: 1882105
uguagcuuccugggauaau

SEQ ID NO: 2095561 - RNA, 19 nt, Artificial Sequence
  Description of Artificial Sequence: Synthetic oligonucleotide
  Antisense strand to SEQ ID NO: 2095560
auuaucccaggaagcuaca

SEQ ID NO: 2095562 - RNA, 19 nt, Artificial Sequence
  Description of Artificial Sequence: Synthetic oligonucleotide
  Sense strand starting at position 2529 of SEQ ID NO: 1882105
guagcuuccugggauaaua

SEQ ID NO: 2095563 - RNA, 19 nt, Artificial Sequence
  Description of Artificial Sequence: Synthetic oligonucleotide
  Antisense strand to SEQ ID NO: 2095562
uauuaucccaggaagcuac

SEQ ID NO: 2095564 - RNA, 19 nt, Artificial Sequence
  Description of Artificial Sequence: Synthetic oligonucleotide
  Sense strand starting at position 2604 of SEQ ID NO: 1882105
augcuaauuuguucuauug

SEQ ID NO: 2095565 - RNA, 19 nt, Artificial Sequence
  Description of Artificial Sequence: Synthetic oligonucleotide
  Antisense strand to SEQ ID NO: 2095564
caauagaacaaauuagcau

SEQ ID NO: 2095566 - RNA, 19 nt, Artificial Sequence
  Description of Artificial Sequence: Synthetic oligonucleotide
  Sense strand starting at position 2606 of SEQ ID NO: 1882105
gcuaauuuguucuauugua

SEQ ID NO: 2095567 - RNA, 19 nt, Artificial Sequence
  Description of Artificial Sequence: Synthetic oligonucleotide
  Antisense strand to SEQ ID NO: 2095566
uacaauagaacaaauuagc

SEQ ID NO: 2095568 - RNA, 19 nt, Artificial Sequence
  Description of Artificial Sequence: Synthetic oligonucleotide
  Sense strand starting at position 2614 of SEQ ID NO: 1882105
guucuauuguacuggaaga

SEQ ID NO: 2095569 - RNA, 19 nt, Artificial Sequence
  Description of Artificial Sequence: Synthetic oligonucleotide
  Antisense strand to SEQ ID NO: 2095568
ucuuccaguacaauagaac

SEQ ID NO: 2095570 - RNA, 19 nt, Artificial Sequence
  Description of Artificial Sequence: Synthetic oligonucleotide
  Sense strand starting at position 2668 of SEQ ID NO: 1882105
auuguaaugugccuguaac

SEQ ID NO: 2095571 - RNA, 19 nt, Artificial Sequence
  Description of Artificial Sequence: Synthetic oligonucleotide
  Antisense strand to SEQ ID NO: 2095570
guuacaggcacauuacaau

SEQ ID NO: 2095572 - RNA, 19 nt, Artificial Sequence
  Description of Artificial Sequence: Synthetic oligonucleotide
  Sense strand starting at position 2669 of SEQ ID NO: 1882105
uuguaaugugccuguaacu

SEQ ID NO: 2095573 - RNA, 19 nt, Artificial Sequence
  Description of Artificial Sequence: Synthetic oligonucleotide
  Antisense strand to SEQ ID NO: 2095572
aguuacaggcacauuacaa

SEQ ID NO: 2095574 - RNA, 19 nt, Artificial Sequence
  Description of Artificial Sequence: Synthetic oligonucleotide
  Sense strand starting at position 2679 of SEQ ID NO: 1882105
ccuguaacucccgaaagaa

SEQ ID NO: 2095575 - RNA, 19 nt, Artificial Sequence
  Description of Artificial Sequence: Synthetic oligonucleotide
  Antisense strand to SEQ ID NO: 2095574
uucuuucgggaguuacagg

SEQ ID NO: 2095576 - RNA, 19 nt, Artificial Sequence
  Description of Artificial Sequence: Synthetic oligonucleotide
  Sense strand starting at position 2706 of SEQ ID NO: 1882105
uauuguuucuuguuagucu

SEQ ID NO: 2095577 - RNA, 19 nt, Artificial Sequence
  Description of Artificial Sequence: Synthetic oligonucleotide
  Antisense strand to SEQ ID NO: 2095576
agacuaacaagaaacaaua

SEQ ID NO: 2095578 - RNA, 19 nt, Artificial Sequence
  Description of Artificial Sequence: Synthetic oligonucleotide
  Sense strand starting at position 2714 of SEQ ID NO: 1882105
cuuguuagucucuggucua

SEQ ID NO: 2095579 - RNA, 19 nt, Artificial Sequence
  Description of Artificial Sequence: Synthetic oligonucleotide
  Antisense strand to SEQ ID NO: 2095578
uagaccagagacuaacaag

SEQ ID NO: 2095580 - RNA, 19 nt, Artificial Sequence
  Description of Artificial Sequence: Synthetic oligonucleotide
  Sense strand starting at position 2717 of SEQ ID NO: 1882105
guuagucucuggucuacau

SEQ ID NO: 2095581 - RNA, 19 nt, Artificial Sequence
  Description of Artificial Sequence: Synthetic oligonucleotide
  Antisense strand to SEQ ID NO: 2095580
auguagaccagagacuaac

SEQ ID NO: 2095582 - RNA, 19 nt, Artificial Sequence
  Description of Artificial Sequence: Synthetic oligonucleotide
  Sense strand starting at position 2732 of SEQ ID NO: 1882105
acauaaccauugggaauuu

SEQ ID NO: 2095583 - RNA, 19 nt, Artificial Sequence
  Description of Artificial Sequence: Synthetic oligonucleotide
  Antisense strand to SEQ ID NO: 2095582
aaauucccaaugguuaugu

SEQ ID NO: 2095584 - RNA, 19 nt, Artificial Sequence
  Description of Artificial Sequence: Synthetic oligonucleotide
  Sense strand starting at position 3088 of SEQ ID NO: 1882105
ugcaaugcccagugaaauu

SEQ ID NO: 2095585 - RNA, 19 nt, Artificial Sequence
  Description of Artificial Sequence: Synthetic oligonucleotide
  Antisense strand to SEQ ID NO: 2095584
aauuucacugggcauugca

SEQ ID NO: 2095586 - RNA, 19 nt, Artificial Sequence
  Description of Artificial Sequence: Synthetic oligonucleotide
  Sense strand starting at position 3114 of SEQ ID NO: 1882105
aauggugguuugucuuauu

SEQ ID NO: 2095587 - RNA, 19 nt, Artificial Sequence
  Description of Artificial Sequence: Synthetic oligonucleotide
  Antisense strand to SEQ ID NO: 2095586
aauaagacaaaccaccauu

SEQ ID NO: 2095588 - RNA, 19 nt, Artificial Sequence
  Description of Artificial Sequence: Synthetic oligonucleotide
  Sense strand starting at position 3117 of SEQ ID NO: 1882105
ggugguuugucuuauuaaa

SEQ ID NO: 2095589 - RNA, 19 nt, Artificial Sequence
  Description of Artificial Sequence: Synthetic oligonucleotide
  Antisense strand to SEQ ID NO: 2095588
uuuaauaagacaaaccacc

SEQ ID NO: 2095590 - RNA, 19 nt, Artificial Sequence
  Description of Artificial Sequence: Synthetic oligonucleotide
  Sense strand starting at position 3456 of SEQ ID NO: 1882105
cucagaaucuaggcaaugu

SEQ ID NO: 2095591 - RNA, 19 nt, Artificial Sequence
  Description of Artificial Sequence: Synthetic oligonucleotide
  Antisense strand to SEQ ID NO: 2095590
acauugccuagauucugag

SEQ ID NO: 2095592 - RNA, 19 nt, Artificial Sequence
  Description of Artificial Sequence: Synthetic oligonucleotide
  Sense strand starting at position 3460 of SEQ ID NO: 1882105
gaaucuaggcaaugucuuu

SEQ ID NO: 2095593 - RNA, 19 nt, Artificial Sequence
  Description of Artificial Sequence: Synthetic oligonucleotide
  Antisense strand to SEQ ID NO: 2095592
aaagacauugccuagauuc

SEQ ID NO: 2095594 - RNA, 19 nt, Artificial Sequence
  Description of Artificial Sequence: Synthetic oligonucleotide
  Sense strand starting at position 3550 of SEQ ID NO: 1882105
gucugcauuggacaguaua

SEQ ID NO: 2095595 - RNA, 19 nt, Artificial Sequence
  Description of Artificial Sequence: Synthetic oligonucleotide
  Antisense strand to SEQ ID NO: 2095594
uauacuguccaaugcagac

SEQ ID NO: 2095596 - RNA, 19 nt, Artificial Sequence
  Description of Artificial Sequence: Synthetic oligonucleotide
  Sense strand starting at position 3553 of SEQ ID NO: 1882105
ugcauuggacaguauacua

SEQ ID NO: 2095597 - RNA, 19 nt, Artificial Sequence
  Description of Artificial Sequence: Synthetic oligonucleotide
  Antisense strand to SEQ ID NO: 2095596
uaguauacuguccaaugca

SEQ ID NO: 2095598 - RNA, 19 nt, Artificial Sequence
  Description of Artificial Sequence: Synthetic oligonucleotide
  Sense strand starting at position 3575 of SEQ ID NO: 1882105
caguguacauucucuagga

SEQ ID NO: 2095599 - RNA, 19 nt, Artificial Sequence
  Description of Artificial Sequence: Synthetic oligonucleotide
  Antisense strand to SEQ ID NO: 2095598
uccuagagaauguacacug

SEQ ID NO: 2095600 - RNA, 19 nt, Artificial Sequence
  Description of Artificial Sequence: Synthetic oligonucleotide
  Sense strand starting at position 3576 of SEQ ID NO: 1882105
aguguacauucucuaggau

SEQ ID NO: 2095601 - RNA, 19 nt, Artificial Sequence
  Description of Artificial Sequence: Synthetic oligonucleotide
  Antisense strand to SEQ ID NO: 2095600
auccuagagaauguacacu

SEQ ID NO: 2095602 - RNA, 19 nt, Artificial Sequence
  Description of Artificial Sequence: Synthetic oligonucleotide
  Sense strand starting at position 3577 of SEQ ID NO: 1882105
guguacauucucuaggauu

SEQ ID NO: 2095603 - RNA, 19 nt, Artificial Sequence
  Description of Artificial Sequence: Synthetic oligonucleotide
  Antisense strand to SEQ ID NO: 2095602
aauccuagagaauguacac

SEQ ID NO: 2095604 - RNA, 19 nt, Artificial Sequence
  Description of Artificial Sequence: Synthetic oligonucleotide
  Sense strand starting at position 3579 of SEQ ID NO: 1882105
guacauucucuaggauuag

SEQ ID NO: 2095605 - RNA, 19 nt, Artificial Sequence
  Description of Artificial Sequence: Synthetic oligonucleotide
  Antisense strand to SEQ ID NO: 2095604
cuaauccuagagaauguac

SEQ ID NO: 2095606 - RNA, 19 nt, Artificial Sequence
  Description of Artificial Sequence: Synthetic oligonucleotide
  Sense strand starting at position 3681 of SEQ ID NO: 1882105
aaggaagaaugcuguucua

SEQ ID NO: 2095607 - RNA, 19 nt, Artificial Sequence
  Description of Artificial Sequence: Synthetic oligonucleotide
  Antisense strand to SEQ ID NO: 2095606
uagaacagcauucuuccuu

SEQ ID NO: 2095608 - RNA, 19 nt, Artificial Sequence
  Description of Artificial Sequence: Synthetic oligonucleotide
  Sense strand starting at position 3684 of SEQ ID NO: 1882105
gaagaaugcuguucuaagg

SEQ ID NO: 2095609 - RNA, 19 nt, Artificial Sequence
  Description of Artificial Sequence: Synthetic oligonucleotide
  Antisense strand to SEQ ID NO: 2095608
ccuuagaacagcauucuuc

SEQ ID NO: 2095610 - RNA, 19 nt, Artificial Sequence
  Description of Artificial Sequence: Synthetic oligonucleotide
  Sense strand starting at position 3690 of SEQ ID NO: 1882105
ugcuguucuaaggagaaua

SEQ ID NO: 2095611 - RNA, 19 nt, Artificial Sequence
  Description of Artificial Sequence: Synthetic oligonucleotide
  Antisense strand to SEQ ID NO: 2095610
uauucuccuuagaacagca

SEQ ID NO: 2095612 - RNA, 19 nt, Artificial Sequence
  Description of Artificial Sequence: Synthetic oligonucleotide
  Sense strand starting at position 3709 of SEQ ID NO: 1882105
ggguauauaucugagaaca

SEQ ID NO: 2095613 - RNA, 19 nt, Artificial Sequence
  Description of Artificial Sequence: Synthetic oligonucleotide
  Antisense strand to SEQ ID NO: 2095612
uguucucagauauauaccc

SEQ ID NO: 2095614 - RNA, 19 nt, Artificial Sequence
  Description of Artificial Sequence: Synthetic oligonucleotide
  Sense strand starting at position 3711 of SEQ ID NO: 1882105
guauauaucugagaacaca

SEQ ID NO: 2095615 - RNA, 19 nt, Artificial Sequence
  Description of Artificial Sequence: Synthetic oligonucleotide
  Antisense strand to SEQ ID NO: 2095614
uguguucucagauauauac

SEQ ID NO: 2095616 - RNA, 19 nt, Artificial Sequence
  Description of Artificial Sequence: Synthetic oligonucleotide
  Sense strand starting at position 3755 of SEQ ID NO: 1882105
uuuaaucaguugguaauca

SEQ ID NO: 2095617 - RNA, 19 nt, Artificial Sequence
  Description of Artificial Sequence: Synthetic oligonucleotide
  Antisense strand to SEQ ID NO: 2095616
ugauuaccaacugauuaaa

SEQ ID NO: 2095618 - RNA, 19 nt, Artificial Sequence
  Description of Artificial Sequence: Synthetic oligonucleotide
  Sense strand starting at position 3756 of SEQ ID NO: 1882105
uuaaucaguugguaaucau

SEQ ID NO: 2095619 - RNA, 19 nt, Artificial Sequence
  Description of Artificial Sequence: Synthetic oligonucleotide
  Antisense strand to SEQ ID NO: 2095618
augauuaccaacugauuaa

SEQ ID NO: 2095620 - RNA, 19 nt, Artificial Sequence
  Description of Artificial Sequence: Synthetic oligonucleotide
  Sense strand starting at position 3766 of SEQ ID NO: 1882105
gguaaucauccaugacagu

SEQ ID NO: 2095621 - RNA, 19 nt, Artificial Sequence
  Description of Artificial Sequence: Synthetic oligonucleotide
  Antisense strand to SEQ ID NO: 2095620
acugucauggaugauuacc

SEQ ID NO: 2095622 - RNA, 19 nt, Artificial Sequence
  Description of Artificial Sequence: Synthetic oligonucleotide
  Sense strand starting at position 3767 of SEQ ID NO: 1882105
guaaucauccaugacaguc

SEQ ID NO: 2095623 - RNA, 19 nt, Artificial Sequence
  Description of Artificial Sequence: Synthetic oligonucleotide
  Antisense strand to SEQ ID NO: 2095622
gacugucauggaugauuac

SEQ ID NO: 2095624 - RNA, 19 nt, Artificial Sequence
  Description of Artificial Sequence: Synthetic oligonucleotide
  Sense strand starting at position 2217 of SEQ ID NO: 1882106
augugaugccauuaccuuu

SEQ ID NO: 2095625 - RNA, 19 nt, Artificial Sequence
  Description of Artificial Sequence: Synthetic oligonucleotide
  Antisense strand to SEQ ID NO: 2095624
aaagguaauggcaucacau

SEQ ID NO: 2095626 - RNA, 19 nt, Artificial Sequence
  Description of Artificial Sequence: Synthetic oligonucleotide
  Sense strand starting at position 2258 of SEQ ID NO: 1882106
auagcuguaguagauauaa

SEQ ID NO: 2095627 - RNA, 19 nt, Artificial Sequence
  Description of Artificial Sequence: Synthetic oligonucleotide
  Antisense strand to SEQ ID NO: 2095626
uuauaucuacuacagcuau

SEQ ID NO: 2095628 - RNA, 19 nt, Artificial Sequence
  Description of Artificial Sequence: Synthetic oligonucleotide
  Sense strand starting at position 2260 of SEQ ID NO: 1882106
agcuguaguagauauaaga

SEQ ID NO: 2095629 - RNA, 19 nt, Artificial Sequence
  Description of Artificial Sequence: Synthetic oligonucleotide
  Antisense strand to SEQ ID NO: 2095628
ucuuauaucuacuacagcu

SEQ ID NO: 2095630 - RNA, 19 nt, Artificial Sequence
  Description of Artificial Sequence: Synthetic oligonucleotide
  Sense strand starting at position 2314 of SEQ ID NO: 1882106
uuaugaucucucugugaag

SEQ ID NO: 2095631 - RNA, 19 nt, Artificial Sequence
  Description of Artificial Sequence: Synthetic oligonucleotide
  Antisense strand to SEQ ID NO: 2095630
cuucacagagagaucauaa

SEQ ID NO: 2095632 - RNA, 19 nt, Artificial Sequence
  Description of Artificial Sequence: Synthetic oligonucleotide
  Sense strand starting at position 2315 of SEQ ID NO: 1882106
uaugaucucucugugaaga

SEQ ID NO: 2095633 - RNA, 19 nt, Artificial Sequence
  Description of Artificial Sequence: Synthetic oligonucleotide
  Antisense strand to SEQ ID NO: 2095632
ucuucacagagagaucaua

SEQ ID NO: 2095634 - RNA, 19 nt, Artificial Sequence
  Description of Artificial Sequence: Synthetic oligonucleotide
  Sense strand starting at position 2316 of SEQ ID NO: 1882106
augaucucucugugaagac

SEQ ID NO: 2095635 - RNA, 19 nt, Artificial Sequence
  Description of Artificial Sequence: Synthetic oligonucleotide
  Antisense strand to SEQ ID NO: 2095634
gucuucacagagagaucau

SEQ ID NO: 2095636 - RNA, 19 nt, Artificial Sequence
  Description of Artificial Sequence: Synthetic oligonucleotide
  Sense strand starting at position 2373 of SEQ ID NO: 1882106
acauguaauugacuuagua

SEQ ID NO: 2095637 - RNA, 19 nt, Artificial Sequence
  Description of Artificial Sequence: Synthetic oligonucleotide
  Antisense strand to SEQ ID NO: 2095636
uacuaagucaauuacaugu

SEQ ID NO: 2095638 - RNA, 19 nt, Artificial Sequence
  Description of Artificial Sequence: Synthetic oligonucleotide
  Sense strand starting at position 2517 of SEQ ID NO: 1882106
uuuggaaagguuggacauu

SEQ ID NO: 2095639 - RNA, 19 nt, Artificial Sequence
  Description of Artificial Sequence: Synthetic oligonucleotide
  Antisense strand to SEQ ID NO: 2095638
aauguccaaccuuuccaaa

SEQ ID NO: 2095640 - RNA, 19 nt, Artificial Sequence
  Description of Artificial Sequence: Synthetic oligonucleotide
  Sense strand starting at position 2518 of SEQ ID NO: 1882106
uuggaaagguuggacauuu

SEQ ID NO: 2095641 - RNA, 19 nt, Artificial Sequence
  Description of Artificial Sequence: Synthetic oligonucleotide
  Antisense strand to SEQ ID NO: 2095640
aaauguccaaccuuuccaa

SEQ ID NO: 2095642 - RNA, 19 nt, Artificial Sequence
  Description of Artificial Sequence: Synthetic oligonucleotide
  Sense strand starting at position 2555 of SEQ ID NO: 1882106
cgauuuauuuagggauacu

SEQ ID NO: 2095643 - RNA, 19 nt, Artificial Sequence
  Description of Artificial Sequence: Synthetic oligonucleotide
  Antisense strand to SEQ ID NO: 2095642
aguaucccuaaauaaaucg

SEQ ID NO: 2095644 - RNA, 19 nt, Artificial Sequence
  Description of Artificial Sequence: Synthetic oligonucleotide
  Sense strand starting at position 2799 of SEQ ID NO: 1882106
cuuagcagauaguuauuga

SEQ ID NO: 2095645 - RNA, 19 nt, Artificial Sequence
  Description of Artificial Sequence: Synthetic oligonucleotide
  Antisense strand to SEQ ID NO: 2095644
ucaauaacuaucugcuaag

SEQ ID NO: 2095646 - RNA, 19 nt, Artificial Sequence
  Description of Artificial Sequence: Synthetic oligonucleotide
  Sense strand starting at position 2802 of SEQ ID NO: 1882106
agcagauaguuauugagaa

SEQ ID NO: 2095647 - RNA, 19 nt, Artificial Sequence
  Description of Artificial Sequence: Synthetic oligonucleotide
  Antisense strand to SEQ ID NO: 2095646
uucucaauaacuaucugcu

SEQ ID NO: 2095648 - RNA, 19 nt, Artificial Sequence
  Description of Artificial Sequence: Synthetic oligonucleotide
  Sense strand starting at position 2819 of SEQ ID NO: 1882106
aauauacuuugugcaagga

SEQ ID NO: 2095649 - RNA, 19 nt, Artificial Sequence
  Description of Artificial Sequence: Synthetic oligonucleotide
  Antisense strand to SEQ ID NO: 2095648
uccuugcacaaaguauauu

SEQ ID NO: 2095650 - RNA, 19 nt, Artificial Sequence
  Description of Artificial Sequence: Synthetic oligonucleotide
  Sense strand starting at position 2940 of SEQ ID NO: 1882106
ugucaugauaaaggaaguu

SEQ ID NO: 2095651 - RNA, 19 nt, Artificial Sequence
  Description of Artificial Sequence: Synthetic oligonucleotide
  Antisense strand to SEQ ID NO: 2095650
aacuuccuuuaucaugaca

SEQ ID NO: 2095652 - RNA, 19 nt, Artificial Sequence
  Description of Artificial Sequence: Synthetic oligonucleotide
  Sense strand starting at position 2975 of SEQ ID NO: 1882106
cauagaugauggucaucua

SEQ ID NO: 2095653 - RNA, 19 nt, Artificial Sequence
  Description of Artificial Sequence: Synthetic oligonucleotide
  Antisense strand to SEQ ID NO: 2095652
uagaugaccaucaucuaug

SEQ ID NO: 2095654 - RNA, 19 nt, Artificial Sequence
  Description of Artificial Sequence: Synthetic oligonucleotide
  Sense strand starting at position 2983 of SEQ ID NO: 1882106
auggucaucuaaccagaau

SEQ ID NO: 2095655 - RNA, 19 nt, Artificial Sequence
  Description of Artificial Sequence: Synthetic oligonucleotide
  Antisense strand to SEQ ID NO: 2095654
auucugguuagaugaccau

SEQ ID NO: 2095656 - RNA, 19 nt, Artificial Sequence
  Description of Artificial Sequence: Synthetic oligonucleotide
  Sense strand starting at position 3026 of SEQ ID NO: 1882106
uggagaaaguauucucuaa

SEQ ID NO: 2095657 - RNA, 19 nt, Artificial Sequence
  Description of Artificial Sequence: Synthetic oligonucleotide
  Antisense strand to SEQ ID NO: 2095656
uuagagaauacuuucucca

SEQ ID NO: 2095658 - RNA, 19 nt, Artificial Sequence
  Description of Artificial Sequence: Synthetic oligonucleotide
  Sense strand starting at position 3028 of SEQ ID NO: 1882106
gagaaaguauucucuaagu

SEQ ID NO: 2095659 - RNA, 19 nt, Artificial Sequence
  Description of Artificial Sequence: Synthetic oligonucleotide
  Antisense strand to SEQ ID NO: 2095658
acuuagagaauacuuucuc

SEQ ID NO: 2095660 - RNA, 19 nt, Artificial Sequence
  Description of Artificial Sequence: Synthetic oligonucleotide
  Sense strand starting at position 3030 of SEQ ID NO: 1882106
gaaaguauucucuaaguug

SEQ ID NO: 2095661 - RNA, 19 nt, Artificial Sequence
  Description of Artificial Sequence: Synthetic oligonucleotide
  Antisense strand to SEQ ID NO: 2095660
caacuuagagaauacuuuc

SEQ ID NO: 2095662 - RNA, 19 nt, Artificial Sequence
  Description of Artificial Sequence: Synthetic oligonucleotide
  Sense strand starting at position 3146 of SEQ ID NO: 1882106
agagaaguauuuggaggaa

SEQ ID NO: 2095663 - RNA, 19 nt, Artificial Sequence
  Description of Artificial Sequence: Synthetic oligonucleotide
  Antisense strand to SEQ ID NO: 2095662
uuccuccaaauacuucucu

SEQ ID NO: 2095664 - RNA, 19 nt, Artificial Sequence
  Description of Artificial Sequence: Synthetic oligonucleotide
  Sense strand starting at position 3205 of SEQ ID NO: 1882106
agugguaagaguugaaauu

SEQ ID NO: 2095665 - RNA, 19 nt, Artificial Sequence
  Description of Artificial Sequence: Synthetic oligonucleotide
  Antisense strand to SEQ ID NO: 2095664
aauuucaacucuuaccacu

SEQ ID NO: 2095666 - RNA, 19 nt, Artificial Sequence
  Description of Artificial Sequence: Synthetic oligonucleotide
  Sense strand starting at position 3206 of SEQ ID NO: 1882106
gugguaagaguugaaauug

SEQ ID NO: 2095667 - RNA, 19 nt, Artificial Sequence
  Description of Artificial Sequence: Synthetic oligonucleotide
  Antisense strand to SEQ ID NO: 2095666
caauuucaacucuuaccac

SEQ ID NO: 2095668 - RNA, 19 nt, Artificial Sequence
  Description of Artificial Sequence: Synthetic oligonucleotide
  Sense strand starting at position 3267 of SEQ ID NO: 1882106
acuuuaugccaguagaaau

SEQ ID NO: 2095669 - RNA, 19 nt, Artificial Sequence
  Description of Artificial Sequence: Synthetic oligonucleotide
  Antisense strand to SEQ ID NO: 2095668
auuucuacuggcauaaagu

SEQ ID NO: 2095670 - RNA, 19 nt, Artificial Sequence
  Description of Artificial Sequence: Synthetic oligonucleotide
  Sense strand starting at position 3277 of SEQ ID NO: 1882106
aguagaaaugcaggguuau

SEQ ID NO: 2095671 - RNA, 19 nt, Artificial Sequence
  Description of Artificial Sequence: Synthetic oligonucleotide
  Antisense strand to SEQ ID NO: 2095670
auaacccugcauuucuacu

SEQ ID NO: 2095672 - RNA, 19 nt, Artificial Sequence
  Description of Artificial Sequence: Synthetic oligonucleotide
  Sense strand starting at position 3317 of SEQ ID NO: 1882106
aggaaaguggcaugauuau

SEQ ID NO: 2095673 - RNA, 19 nt, Artificial Sequence
  Description of Artificial Sequence: Synthetic oligonucleotide
  Antisense strand to SEQ ID NO: 2095672
auaaucaugccacuuuccu

SEQ ID NO: 2095674 - RNA, 19 nt, Artificial Sequence
  Description of Artificial Sequence: Synthetic oligonucleotide
  Sense strand starting at position 3374 of SEQ ID NO: 1882106
gagaauaaauuagagagga

SEQ ID NO: 2095675 - RNA, 19 nt, Artificial Sequence
  Description of Artificial Sequence: Synthetic oligonucleotide
  Antisense strand to SEQ ID NO: 2095674
uccucucuaauuuauucuc

SEQ ID NO: 2095676 - RNA, 19 nt, Artificial Sequence
  Description of Artificial Sequence: Synthetic oligonucleotide
  Sense strand starting at position 3415 of SEQ ID NO: 1882106
gauuacaaaugguugcaau

SEQ ID NO: 2095677 - RNA, 19 nt, Artificial Sequence
  Description of Artificial Sequence: Synthetic oligonucleotide
  Antisense strand to SEQ ID NO: 2095676
auugcaaccauuuguaauc

SEQ ID NO: 2095678 - RNA, 19 nt, Artificial Sequence
  Description of Artificial Sequence: Synthetic oligonucleotide
  Sense strand starting at position 3416 of SEQ ID NO: 1882106
auuacaaaugguugcaaua

SEQ ID NO: 2095679 - RNA, 19 nt, Artificial Sequence
  Description of Artificial Sequence: Synthetic oligonucleotide
  Antisense strand to SEQ ID NO: 2095678
uauugcaaccauuuguaau

SEQ ID NO: 2095680 - RNA, 19 nt, Artificial Sequence
  Description of Artificial Sequence: Synthetic oligonucleotide
  Sense strand starting at position 3509 of SEQ ID NO: 1882106
ggguguggugaucaacaua

SEQ ID NO: 2095681 - RNA, 19 nt, Artificial Sequence
  Description of Artificial Sequence: Synthetic oligonucleotide
  Antisense strand to SEQ ID NO: 2095680
uauguugaucaccacaccc

SEQ ID NO: 2095682 - RNA, 19 nt, Artificial Sequence
  Description of Artificial Sequence: Synthetic oligonucleotide
  Sense strand starting at position 3567 of SEQ ID NO: 1882106
ugucuucaggcuuagggaa

SEQ ID NO: 2095683 - RNA, 19 nt, Artificial Sequence
  Description of Artificial Sequence: Synthetic oligonucleotide
  Antisense strand to SEQ ID NO: 2095682
uucccuaagccugaagaca

SEQ ID NO: 2095684 - RNA, 19 nt, Artificial Sequence
  Description of Artificial Sequence: Synthetic oligonucleotide
  Sense strand starting at position 3598 of SEQ ID NO: 1882106
ugguucuauuaacugauaa

SEQ ID NO: 2095685 - RNA, 19 nt, Artificial Sequence
  Description of Artificial Sequence: Synthetic oligonucleotide
  Antisense strand to SEQ ID NO: 2095684
uuaucaguuaauagaacca

SEQ ID NO: 2095686 - RNA, 19 nt, Artificial Sequence
  Description of Artificial Sequence: Synthetic oligonucleotide
  Sense strand starting at position 3710 of SEQ ID NO: 1882106
ggaugaguuugagcaucca

SEQ ID NO: 2095687 - RNA, 19 nt, Artificial Sequence
  Description of Artificial Sequence: Synthetic oligonucleotide
  Antisense strand to SEQ ID NO: 2095686
uggaugcucaaacucaucc

SEQ ID NO: 2095688 - RNA, 19 nt, Artificial Sequence
  Description of Artificial Sequence: Synthetic oligonucleotide
  Sense strand starting at position 3774 of SEQ ID NO: 1882106
aggaaagacguuugggcua

SEQ ID NO: 2095689 - RNA, 19 nt, Artificial Sequence
  Description of Artificial Sequence: Synthetic oligonucleotide
  Antisense strand to SEQ ID NO: 2095688
uagcccaaacgucuuuccu

SEQ ID NO: 2095690 - RNA, 19 nt, Artificial Sequence
  Description of Artificial Sequence: Synthetic oligonucleotide
  Sense strand starting at position 3779 of SEQ ID NO: 1882106
agacguuugggcuauagag

SEQ ID NO: 2095691 - RNA, 19 nt, Artificial Sequence
  Description of Artificial Sequence: Synthetic oligonucleotide
  Antisense strand to SEQ ID NO: 2095690
cucuauagcccaaacgucu

SEQ ID NO: 2095692 - RNA, 19 nt, Artificial Sequence
  Description of Artificial Sequence: Synthetic oligonucleotide
  Sense strand starting at position 3920 of SEQ ID NO: 1882106
gagagaggccaugguuaua

SEQ ID NO: 2095693 - RNA, 19 nt, Artificial Sequence
  Description of Artificial Sequence: Synthetic oligonucleotide
  Antisense strand to SEQ ID NO: 2095692
uauaaccauggccucucuc

SEQ ID NO: 2095694 - RNA, 19 nt, Artificial Sequence
  Description of Artificial Sequence: Synthetic oligonucleotide
  Sense strand starting at position 3933 of SEQ ID NO: 1882106
guuauaggugacuaagcua

SEQ ID NO: 2095695 - RNA, 19 nt, Artificial Sequence
  Description of Artificial Sequence: Synthetic oligonucleotide
  Antisense strand to SEQ ID NO: 2095694
uagcuuagucaccuauaac

SEQ ID NO: 2095696 - RNA, 19 nt, Artificial Sequence
  Description of Artificial Sequence: Synthetic oligonucleotide
  Sense strand starting at position 3938 of SEQ ID NO: 1882106
aggugacuaagcuagagua

SEQ ID NO: 2095697 - RNA, 19 nt, Artificial Sequence
  Description of Artificial Sequence: Synthetic oligonucleotide
  Antisense strand to SEQ ID NO: 2095696
uacucuagcuuagucaccu

SEQ ID NO: 2095698 - RNA, 19 nt, Artificial Sequence
  Description of Artificial Sequence: Synthetic oligonucleotide
  Sense strand starting at position 3940 of SEQ ID NO: 1882106
gugacuaagcuagaguaga

SEQ ID NO: 2095699 - RNA, 19 nt, Artificial Sequence
  Description of Artificial Sequence: Synthetic oligonucleotide
  Antisense strand to SEQ ID NO: 2095698
ucuacucuagcuuagucac

SEQ ID NO: 2095700 - RNA, 19 nt, Artificial Sequence
  Description of Artificial Sequence: Synthetic oligonucleotide
  Sense strand starting at position 3953 of SEQ ID NO: 1882106
aguagaagugaaugucauu

SEQ ID NO: 2095701 - RNA, 19 nt, Artificial Sequence
  Description of Artificial Sequence: Synthetic oligonucleotide
  Antisense strand to SEQ ID NO: 2095700
aaugacauucacuucuacu

SEQ ID NO: 2095702 - RNA, 19 nt, Artificial Sequence
  Description of Artificial Sequence: Synthetic oligonucleotide
  Sense strand starting at position 3958 of SEQ ID NO: 1882106
aagugaaugucauuagaga

SEQ ID NO: 2095703 - RNA, 19 nt, Artificial Sequence
  Description of Artificial Sequence: Synthetic oligonucleotide
  Antisense strand to SEQ ID NO: 2095702
ucucuaaugacauucacuu

SEQ ID NO: 2095704 - RNA, 19 nt, Artificial Sequence
  Description of Artificial Sequence: Synthetic oligonucleotide
  Sense strand starting at position 2008 of SEQ ID NO: 1882107
cugguauauuacucuuacu

SEQ ID NO: 2095705 - RNA, 19 nt, Artificial Sequence
  Description of Artificial Sequence: Synthetic oligonucleotide
  Antisense strand to SEQ ID NO: 2095704
aguaagaguaauauaccag

SEQ ID NO: 2095706 - RNA, 19 nt, Artificial Sequence
  Description of Artificial Sequence: Synthetic oligonucleotide
  Sense strand starting at position 2034 of SEQ ID NO: 1882107
cuggguccuuuguuagauu

SEQ ID NO: 2095707 - RNA, 19 nt, Artificial Sequence
  Description of Artificial Sequence: Synthetic oligonucleotide
  Antisense strand to SEQ ID NO: 2095706
aaucuaacaaaggacccag

SEQ ID NO: 2095708 - RNA, 19 nt, Artificial Sequence
  Description of Artificial Sequence: Synthetic oligonucleotide
  Sense strand starting at position 2042 of SEQ ID NO: 1882107
uuuguuagauuggccacaa

SEQ ID NO: 2095709 - RNA, 19 nt, Artificial Sequence
  Description of Artificial Sequence: Synthetic oligonucleotide
  Antisense strand to SEQ ID NO: 2095708
uuguggccaaucuaacaaa

SEQ ID NO: 2095710 - RNA, 19 nt, Artificial Sequence
  Description of Artificial Sequence: Synthetic oligonucleotide
  Sense strand starting at position 2076 of SEQ ID NO: 1882107
uuucuucugcuacaguaua

SEQ ID NO: 2095711 - RNA, 19 nt, Artificial Sequence
  Description of Artificial Sequence: Synthetic oligonucleotide
  Antisense strand to SEQ ID NO: 2095710
uauacuguagcagaagaaa

SEQ ID NO: 2095712 - RNA, 19 nt, Artificial Sequence
  Description of Artificial Sequence: Synthetic oligonucleotide
  Sense strand starting at position 2162 of SEQ ID NO: 1882107
ugccuuauucuaggaaagu

SEQ ID NO: 2095713 - RNA, 19 nt, Artificial Sequence
  Description of Artificial Sequence: Synthetic oligonucleotide
  Antisense strand to SEQ ID NO: 2095712
acuuuccuagaauaaggca

SEQ ID NO: 2095714 - RNA, 19 nt, Artificial Sequence
  Description of Artificial Sequence: Synthetic oligonucleotide
  Sense strand starting at position 2251 of SEQ ID NO: 1882107
ggcaaucugcucugggaau

SEQ ID NO: 2095715 - RNA, 19 nt, Artificial Sequence
  Description of Artificial Sequence: Synthetic oligonucleotide
  Antisense strand to SEQ ID NO: 2095714
auucccagagcagauugcc

SEQ ID NO: 2095716 - RNA, 19 nt, Artificial Sequence
  Description of Artificial Sequence: Synthetic oligonucleotide
  Sense strand starting at position 2265 of SEQ ID NO: 1882107
ggaaucaauccuugcagca

SEQ ID NO: 2095717 - RNA, 19 nt, Artificial Sequence
  Description of Artificial Sequence: Synthetic oligonucleotide
  Antisense strand to SEQ ID NO: 2095716
ugcugcaaggauugauucc

SEQ ID NO: 2095718 - RNA, 19 nt, Artificial Sequence
  Description of Artificial Sequence: Synthetic oligonucleotide
  Sense strand starting at position 2305 of SEQ ID NO: 1882107
gccucuucucuuugaugga

SEQ ID NO: 2095719 - RNA, 19 nt, Artificial Sequence
  Description of Artificial Sequence: Synthetic oligonucleotide
  Antisense strand to SEQ ID NO: 2095718
uccaucaaagagaagaggc

SEQ ID NO: 2095720 - RNA, 19 nt, Artificial Sequence
  Description of Artificial Sequence: Synthetic oligonucleotide
  Sense strand starting at position 2310 of SEQ ID NO: 1882107
uucucuuugauggaucgaa

SEQ ID NO: 2095721 - RNA, 19 nt, Artificial Sequence
  Description of Artificial Sequence: Synthetic oligonucleotide
  Antisense strand to SEQ ID NO: 2095720
uucgauccaucaaagagaa

SEQ ID NO: 2095722 - RNA, 19 nt, Artificial Sequence
  Description of Artificial Sequence: Synthetic oligonucleotide
  Sense strand starting at position 2388 of SEQ ID NO: 1882107
gugauauacuagcuaaauc

SEQ ID NO: 2095723 - RNA, 19 nt, Artificial Sequence
  Description of Artificial Sequence: Synthetic oligonucleotide
  Antisense strand to SEQ ID NO: 2095722
gauuuagcuaguauaucac

SEQ ID NO: 2095724 - RNA, 19 nt, Artificial Sequence
  Description of Artificial Sequence: Synthetic oligonucleotide
  Sense strand starting at position 2398 of SEQ ID NO: 1882107
agcuaaaucugguuuauua

SEQ ID NO: 2095725 - RNA, 19 nt, Artificial Sequence
  Description of Artificial Sequence: Synthetic oligonucleotide
  Antisense strand to SEQ ID NO: 2095724
uaauaaaccagauuuagcu

SEQ ID NO: 2095726 - RNA, 19 nt, Artificial Sequence
  Description of Artificial Sequence: Synthetic oligonucleotide
  Sense strand starting at position 2400 of SEQ ID NO: 1882107
cuaaaucugguuuauuaug

SEQ ID NO: 2095727 - RNA, 19 nt, Artificial Sequence
  Description of Artificial Sequence: Synthetic oligonucleotide
  Antisense strand to SEQ ID NO: 2095726
cauaauaaaccagauuuag

SEQ ID NO: 2095728 - RNA, 19 nt, Artificial Sequence
  Description of Artificial Sequence: Synthetic oligonucleotide
  Sense strand starting at position 2406 of SEQ ID NO: 1882107
cugguuuauuaugcaaacu

SEQ ID NO: 2095729 - RNA, 19 nt, Artificial Sequence
  Description of Artificial Sequence: Synthetic oligonucleotide
  Antisense strand to SEQ ID NO: 2095728
aguuugcauaauaaaccag

SEQ ID NO: 2095730 - RNA, 19 nt, Artificial Sequence
  Description of Artificial Sequence: Synthetic oligonucleotide
  Sense strand starting at position 2432 of SEQ ID NO: 1882107
uagccuaagaguuguggau

SEQ ID NO: 2095731 - RNA, 19 nt, Artificial Sequence
  Description of Artificial Sequence: Synthetic oligonucleotide
  Antisense strand to SEQ ID NO: 2095730
auccacaacucuuaggcua

SEQ ID NO: 2095732 - RNA, 19 nt, Artificial Sequence
  Description of Artificial Sequence: Synthetic oligonucleotide
  Sense strand starting at position 2459 of SEQ ID NO: 1882107
ugugaauauugccuaagga

SEQ ID NO: 2095733 - RNA, 19 nt, Artificial Sequence
  Description of Artificial Sequence: Synthetic oligonucleotide
  Antisense strand to SEQ ID NO: 2095732
uccuuaggcaauauucaca

SEQ ID NO: 2095734 - RNA, 19 nt, Artificial Sequence
  Description of Artificial Sequence: Synthetic oligonucleotide
  Sense strand starting at position 2460 of SEQ ID NO: 1882107
gugaauauugccuaaggac

SEQ ID NO: 2095735 - RNA, 19 nt, Artificial Sequence
  Description of Artificial Sequence: Synthetic oligonucleotide
  Antisense strand to SEQ ID NO: 2095734
guccuuaggcaauauucac

SEQ ID NO: 2095736 - RNA, 19 nt, Artificial Sequence
  Description of Artificial Sequence: Synthetic oligonucleotide
  Sense strand starting at position 2563 of SEQ ID NO: 1882107
acauguugaagcugagagu

SEQ ID NO: 2095737 - RNA, 19 nt, Artificial Sequence
  Description of Artificial Sequence: Synthetic oligonucleotide
  Antisense strand to SEQ ID NO: 2095736
acucucagcuucaacaugu

SEQ ID NO: 2095738 - RNA, 19 nt, Artificial Sequence
  Description of Artificial Sequence: Synthetic oligonucleotide
  Sense strand starting at position 2606 of SEQ ID NO: 1882107
agccaagaucauggauaua

SEQ ID NO: 2095739 - RNA, 19 nt, Artificial Sequence
  Description of Artificial Sequence: Synthetic oligonucleotide
  Antisense strand to SEQ ID NO: 2095738
uauauccaugaucuuggcu

SEQ ID NO: 2095740 - RNA, 19 nt, Artificial Sequence
  Description of Artificial Sequence: Synthetic oligonucleotide
  Sense strand starting at position 2618 of SEQ ID NO: 1882107
ggauauaaaggcugaaguu

SEQ ID NO: 2095741 - RNA, 19 nt, Artificial Sequence
  Description of Artificial Sequence: Synthetic oligonucleotide
  Antisense strand to SEQ ID NO: 2095740
aacuucagccuuuauaucc

SEQ ID NO: 2095742 - RNA, 19 nt, Artificial Sequence
  Description of Artificial Sequence: Synthetic oligonucleotide
  Sense strand starting at position 2678 of SEQ ID NO: 1882107
ccugaaauagcagguuaag

SEQ ID NO: 2095743 - RNA, 19 nt, Artificial Sequence
  Description of Artificial Sequence: Synthetic oligonucleotide
  Antisense strand to SEQ ID NO: 2095742
cuuaaccugcuauuucagg

SEQ ID NO: 2095744 - RNA, 19 nt, Artificial Sequence
  Description of Artificial Sequence: Synthetic oligonucleotide
  Sense strand starting at position 2681 of SEQ ID NO: 1882107
gaaauagcagguuaagcau

SEQ ID NO: 2095745 - RNA, 19 nt, Artificial Sequence
  Description of Artificial Sequence: Synthetic oligonucleotide
  Antisense strand to SEQ ID NO: 2095744
augcuuaaccugcuauuuc

SEQ ID NO: 2095746 - RNA, 19 nt, Artificial Sequence
  Description of Artificial Sequence: Synthetic oligonucleotide
  Sense strand starting at position 2918 of SEQ ID NO: 1882107
guggcauucuaauuaucua

SEQ ID NO: 2095747 - RNA, 19 nt, Artificial Sequence
  Description of Artificial Sequence: Synthetic oligonucleotide
  Antisense strand to SEQ ID NO: 2095746
uagauaauuagaaugccac

SEQ ID NO: 2095748 - RNA, 19 nt, Artificial Sequence
  Description of Artificial Sequence: Synthetic oligonucleotide
  Sense strand starting at position 2930 of SEQ ID NO: 1882107
uuaucuagcuaacugagaa

SEQ ID NO: 2095749 - RNA, 19 nt, Artificial Sequence
  Description of Artificial Sequence: Synthetic oligonucleotide
  Antisense strand to SEQ ID NO: 2095748
uucucaguuagcuagauaa

SEQ ID NO: 2095750 - RNA, 19 nt, Artificial Sequence
  Description of Artificial Sequence: Synthetic oligonucleotide
  Sense strand starting at position 2955 of SEQ ID NO: 1882107
ggaugagccaaguguaaga

SEQ ID NO: 2095751 - RNA, 19 nt, Artificial Sequence
  Description of Artificial Sequence: Synthetic oligonucleotide
  Antisense strand to SEQ ID NO: 2095750
ucuuacacuuggcucaucc

SEQ ID NO: 2095752 - RNA, 19 nt, Artificial Sequence
  Description of Artificial Sequence: Synthetic oligonucleotide
  Sense strand starting at position 2964 of SEQ ID NO: 1882107
aaguguaagaacugugguu

SEQ ID NO: 2095753 - RNA, 19 nt, Artificial Sequence
  Description of Artificial Sequence: Synthetic oligonucleotide
  Antisense strand to SEQ ID NO: 2095752
aaccacaguucuuacacuu

SEQ ID NO: 2095754 - RNA, 19 nt, Artificial Sequence
  Description of Artificial Sequence: Synthetic oligonucleotide
  Sense strand starting at position 2966 of SEQ ID NO: 1882107
guguaagaacugugguuca

SEQ ID NO: 2095755 - RNA, 19 nt, Artificial Sequence
  Description of Artificial Sequence: Synthetic oligonucleotide
  Antisense strand to SEQ ID NO: 2095754
ugaaccacaguucuuacac

SEQ ID NO: 2095756 - RNA, 19 nt, Artificial Sequence
  Description of Artificial Sequence: Synthetic oligonucleotide
  Sense strand starting at position 3187 of SEQ ID NO: 1882107
ccugaaugucuaugcauuu

SEQ ID NO: 2095757 - RNA, 19 nt, Artificial Sequence
  Description of Artificial Sequence: Synthetic oligonucleotide
  Antisense strand to SEQ ID NO: 2095756
aaaugcauagacauucagg

SEQ ID NO: 2095758 - RNA, 19 nt, Artificial Sequence
  Description of Artificial Sequence: Synthetic oligonucleotide
  Sense strand starting at position 3218 of SEQ ID NO: 1882107
gggauagaagcuuguaccu

SEQ ID NO: 2095759 - RNA, 19 nt, Artificial Sequence
  Description of Artificial Sequence: Synthetic oligonucleotide
  Antisense strand to SEQ ID NO: 2095758
agguacaagcuucuauccc

SEQ ID NO: 2095760 - RNA, 19 nt, Artificial Sequence
  Description of Artificial Sequence: Synthetic oligonucleotide
  Sense strand starting at position 3321 of SEQ ID NO: 1882107
gcuccuaggcuuggaagaa

SEQ ID NO: 2095761 - RNA, 19 nt, Artificial Sequence
  Description of Artificial Sequence: Synthetic oligonucleotide
  Antisense strand to SEQ ID NO: 2095760
uucuuccaagccuaggagc

SEQ ID NO: 2095762 - RNA, 19 nt, Artificial Sequence
  Description of Artificial Sequence: Synthetic oligonucleotide
  Sense strand starting at position 3360 of SEQ ID NO: 1882107
gcuuucuagcaauagagga

SEQ ID NO: 2095763 - RNA, 19 nt, Artificial Sequence
  Description of Artificial Sequence: Synthetic oligonucleotide
  Antisense strand to SEQ ID NO: 2095762
uccucuauugcuagaaagc

SEQ ID NO: 2095764 - RNA, 19 nt, Artificial Sequence
  Description of Artificial Sequence: Synthetic oligonucleotide
  Sense strand starting at position 3440 of SEQ ID NO: 1882107
ugggauuauuuauggagca

SEQ ID NO: 2095765 - RNA, 19 nt, Artificial Sequence
  Description of Artificial Sequence: Synthetic oligonucleotide
  Antisense strand to SEQ ID NO: 2095764
ugcuccauaaauaauccca

SEQ ID NO: 2095766 - RNA, 19 nt, Artificial Sequence
  Description of Artificial Sequence: Synthetic oligonucleotide
  Sense strand starting at position 3441 of SEQ ID NO: 1882107
gggauuauuuauggagcaa

SEQ ID NO: 2095767 - RNA, 19 nt, Artificial Sequence
  Description of Artificial Sequence: Synthetic oligonucleotide
  Antisense strand to SEQ ID NO: 2095766
uugcuccauaaauaauccc

SEQ ID NO: 2095768 - RNA, 19 nt, Artificial Sequence
  Description of Artificial Sequence: Synthetic oligonucleotide
  Sense strand starting at position 3820 of SEQ ID NO: 1882107
auauuagaagcaugcaaua

SEQ ID NO: 2095769 - RNA, 19 nt, Artificial Sequence
  Description of Artificial Sequence: Synthetic oligonucleotide
  Antisense strand to SEQ ID NO: 2095768
uauugcaugcuucuaauau

SEQ ID NO: 2095770 - RNA, 19 nt, Artificial Sequence
  Description of Artificial Sequence: Synthetic oligonucleotide
  Sense strand starting at position 3853 of SEQ ID NO: 1882107
caugguagauagucuaauu

SEQ ID NO: 2095771 - RNA, 19 nt, Artificial Sequence
  Description of Artificial Sequence: Synthetic oligonucleotide
  Antisense strand to SEQ ID NO: 2095770
aauuagacuaucuaccaug

SEQ ID NO: 2095772 - RNA, 19 nt, Artificial Sequence
  Description of Artificial Sequence: Synthetic oligonucleotide
  Sense strand starting at position 3858 of SEQ ID NO: 1882107
uagauagucuaauugagua

SEQ ID NO: 2095773 - RNA, 19 nt, Artificial Sequence
  Description of Artificial Sequence: Synthetic oligonucleotide
  Antisense strand to SEQ ID NO: 2095772
uacucaauuagacuaucua

SEQ ID NO: 2095774 - RNA, 19 nt, Artificial Sequence
  Description of Artificial Sequence: Synthetic oligonucleotide
  Sense strand starting at position 3863 of SEQ ID NO: 1882107
agucuaauugaguacucaa

SEQ ID NO: 2095775 - RNA, 19 nt, Artificial Sequence
  Description of Artificial Sequence: Synthetic oligonucleotide
  Antisense strand to SEQ ID NO: 2095774
uugaguacucaauuagacu

SEQ ID NO: 2095776 - RNA, 19 nt, Artificial Sequence
  Description of Artificial Sequence: Synthetic oligonucleotide
  Sense strand starting at position 3866 of SEQ ID NO: 1882107
cuaauugaguacucaaggu

SEQ ID NO: 2095777 - RNA, 19 nt, Artificial Sequence
  Description of Artificial Sequence: Synthetic oligonucleotide
  Antisense strand to SEQ ID NO: 2095776
accuugaguacucaauuag

SEQ ID NO: 2095778 - RNA, 19 nt, Artificial Sequence
  Description of Artificial Sequence: Synthetic oligonucleotide
  Sense strand starting at position 3870 of SEQ ID NO: 1882107
uugaguacucaagguugua

SEQ ID NO: 2095779 - RNA, 19 nt, Artificial Sequence
  Description of Artificial Sequence: Synthetic oligonucleotide
  Antisense strand to SEQ ID NO: 2095778
uacaaccuugaguacucaa

SEQ ID NO: 2095780 - RNA, 19 nt, Artificial Sequence
  Description of Artificial Sequence: Synthetic oligonucleotide
  Sense strand starting at position 3873 of SEQ ID NO: 1882107
aguacucaagguuguacau

SEQ ID NO: 2095781 - RNA, 19 nt, Artificial Sequence
  Description of Artificial Sequence: Synthetic oligonucleotide
  Antisense strand to SEQ ID NO: 2095780
auguacaaccuugaguacu

SEQ ID NO: 2095782 - RNA, 19 nt, Artificial Sequence
  Description of Artificial Sequence: Synthetic oligonucleotide
  Sense strand starting at position 3965 of SEQ ID NO: 1882107
aauggagucuuacuguaga

SEQ ID NO: 2095783 - RNA, 19 nt, Artificial Sequence
  Description of Artificial Sequence: Synthetic oligonucleotide
  Antisense strand to SEQ ID NO: 2095782
ucuacaguaagacuccauu

SEQ ID NO: 2095784 - RNA, 19 nt, Artificial Sequence
  Description of Artificial Sequence: Synthetic oligonucleotide
  Sense strand starting at position 20 of SEQ ID NO: 1882108
acaggacugucacugaagu

SEQ ID NO: 2095785 - RNA, 19 nt, Artificial Sequence
  Description of Artificial Sequence: Synthetic oligonucleotide
  Antisense strand to SEQ ID NO: 2095784
acuucagugacaguccugu

SEQ ID NO: 2095786 - RNA, 19 nt, Artificial Sequence
  Description of Artificial Sequence: Synthetic oligonucleotide
  Sense strand starting at position 2176 of SEQ ID NO: 1882108
uugcuucugugacugaaca

SEQ ID NO: 2095787 - RNA, 19 nt, Artificial Sequence
  Description of Artificial Sequence: Synthetic oligonucleotide
  Antisense strand to SEQ ID NO: 2095786
uguucagucacagaagcaa

SEQ ID NO: 2095788 - RNA, 19 nt, Artificial Sequence
  Description of Artificial Sequence: Synthetic oligonucleotide
  Sense strand starting at position 2178 of SEQ ID NO: 1882108
gcuucugugacugaacaga

SEQ ID NO: 2095789 - RNA, 19 nt, Artificial Sequence
  Description of Artificial Sequence: Synthetic oligonucleotide
  Antisense strand to SEQ ID NO: 2095788
ucuguucagucacagaagc

SEQ ID NO: 2095790 - RNA, 19 nt, Artificial Sequence
  Description of Artificial Sequence: Synthetic oligonucleotide
  Sense strand starting at position 2191 of SEQ ID NO: 1882108
aacagaauaucguccuggu

SEQ ID NO: 2095791 - RNA, 19 nt, Artificial Sequence
  Description of Artificial Sequence: Synthetic oligonucleotide
  Antisense strand to SEQ ID NO: 2095790
accaggacgauauucuguu

SEQ ID NO: 2095792 - RNA, 19 nt, Artificial Sequence
  Description of Artificial Sequence: Synthetic oligonucleotide
  Sense strand starting at position 2195 of SEQ ID NO: 1882108
gaauaucguccugguagau

SEQ ID NO: 2095793 - RNA, 19 nt, Artificial Sequence
  Description of Artificial Sequence: Synthetic oligonucleotide
  Antisense strand to SEQ ID NO: 2095792
aucuaccaggacgauauuc

SEQ ID NO: 2095794 - RNA, 19 nt, Artificial Sequence
  Description of Artificial Sequence: Synthetic oligonucleotide
  Sense strand starting at position 2280 of SEQ ID NO: 1882108
gccggaagccuuugcuaau

SEQ ID NO: 2095795 - RNA, 19 nt, Artificial Sequence
  Description of Artificial Sequence: Synthetic oligonucleotide
  Antisense strand to SEQ ID NO: 2095794
auuagcaaaggcuuccggc

SEQ ID NO: 2095796 - RNA, 19 nt, Artificial Sequence
  Description of Artificial Sequence: Synthetic oligonucleotide
  Sense strand starting at position 2281 of SEQ ID NO: 1882108
ccggaagccuuugcuaauu

SEQ ID NO: 2095797 - RNA, 19 nt, Artificial Sequence
  Description of Artificial Sequence: Synthetic oligonucleotide
  Antisense strand to SEQ ID NO: 2095796
aauuagcaaaggcuuccgg

SEQ ID NO: 2095798 - RNA, 19 nt, Artificial Sequence
  Description of Artificial Sequence: Synthetic oligonucleotide
  Sense strand starting at position 2309 of SEQ ID NO: 1882108
ucagaauuagacugaugug

SEQ ID NO: 2095799 - RNA, 19 nt, Artificial Sequence
  Description of Artificial Sequence: Synthetic oligonucleotide
  Antisense strand to SEQ ID NO: 2095798
cacaucagucuaauucuga

SEQ ID NO: 2095800 - RNA, 19 nt, Artificial Sequence
  Description of Artificial Sequence: Synthetic oligonucleotide
  Sense strand starting at position 2314 of SEQ ID NO: 1882108
auuagacugauguguugga

SEQ ID NO: 2095801 - RNA, 19 nt, Artificial Sequence
  Description of Artificial Sequence: Synthetic oligonucleotide
  Antisense strand to SEQ ID NO: 2095800
uccaacacaucagucuaau

SEQ ID NO: 2095802 - RNA, 19 nt, Artificial Sequence
  Description of Artificial Sequence: Synthetic oligonucleotide
  Sense strand starting at position 2318 of SEQ ID NO: 1882108
gacugauguguuggacuaa

SEQ ID NO: 2095803 - RNA, 19 nt, Artificial Sequence
  Description of Artificial Sequence: Synthetic oligonucleotide
  Antisense strand to SEQ ID NO: 2095802
uuaguccaacacaucaguc

SEQ ID NO: 2095804 - RNA, 19 nt, Artificial Sequence
  Description of Artificial Sequence: Synthetic oligonucleotide
  Sense strand starting at position 2332 of SEQ ID NO: 1882108
acuaauguauaggaaacua

SEQ ID NO: 2095805 - RNA, 19 nt, Artificial Sequence
  Description of Artificial Sequence: Synthetic oligonucleotide
  Antisense strand to SEQ ID NO: 2095804
uaguuuccuauacauuagu

SEQ ID NO: 2095806 - RNA, 19 nt, Artificial Sequence
  Description of Artificial Sequence: Synthetic oligonucleotide
  Sense strand starting at position 2401 of SEQ ID NO: 1882108
gaagauuccuuagagaugg

SEQ ID NO: 2095807 - RNA, 19 nt, Artificial Sequence
  Description of Artificial Sequence: Synthetic oligonucleotide
  Antisense strand to SEQ ID NO: 2095806
ccaucucuaaggaaucuuc

SEQ ID NO: 2095808 - RNA, 19 nt, Artificial Sequence
  Description of Artificial Sequence: Synthetic oligonucleotide
  Sense strand starting at position 2561 of SEQ ID NO: 1882108
caucaagugguaugggaaa

SEQ ID NO: 2095809 - RNA, 19 nt, Artificial Sequence
  Description of Artificial Sequence: Synthetic oligonucleotide
  Antisense strand to SEQ ID NO: 2095808
uuucccauaccacuugaug

SEQ ID NO: 2095810 - RNA, 19 nt, Artificial Sequence
  Description of Artificial Sequence: Synthetic oligonucleotide
  Sense strand starting at position 2592 of SEQ ID NO: 1882108
augaaaugauaugcaguau

SEQ ID NO: 2095811 - RNA, 19 nt, Artificial Sequence
  Description of Artificial Sequence: Synthetic oligonucleotide
  Antisense strand to SEQ ID NO: 2095810
auacugcauaucauuucau

SEQ ID NO: 2095812 - RNA, 19 nt, Artificial Sequence
  Description of Artificial Sequence: Synthetic oligonucleotide
  Sense strand starting at position 2616 of SEQ ID NO: 1882108
ucaaucugaugugcagaua

SEQ ID NO: 2095813 - RNA, 19 nt, Artificial Sequence
  Description of Artificial Sequence: Synthetic oligonucleotide
  Antisense strand to SEQ ID NO: 2095812
uaucugcacaucagauuga

SEQ ID NO: 2095814 - RNA, 19 nt, Artificial Sequence
  Description of Artificial Sequence: Synthetic oligonucleotide
  Sense strand starting at position 2617 of SEQ ID NO: 1882108
caaucugaugugcagauaa

SEQ ID NO: 2095815 - RNA, 19 nt, Artificial Sequence
  Description of Artificial Sequence: Synthetic oligonucleotide
  Antisense strand to SEQ ID NO: 2095814
uuaucugcacaucagauug

SEQ ID NO: 2095816 - RNA, 19 nt, Artificial Sequence
  Description of Artificial Sequence: Synthetic oligonucleotide
  Sense strand starting at position 2619 of SEQ ID NO: 1882108
aucugaugugcagauaauu

SEQ ID NO: 2095817 - RNA, 19 nt, Artificial Sequence
  Description of Artificial Sequence: Synthetic oligonucleotide
  Antisense strand to SEQ ID NO: 2095816
aauuaucugcacaucagau

SEQ ID NO: 2095818 - RNA, 19 nt, Artificial Sequence
  Description of Artificial Sequence: Synthetic oligonucleotide
  Sense strand starting at position 2826 of SEQ ID NO: 1882108
augaaaugugaugguguuu

SEQ ID NO: 2095819 - RNA, 19 nt, Artificial Sequence
  Description of Artificial Sequence: Synthetic oligonucleotide
  Antisense strand to SEQ ID NO: 2095818
aaacaccaucacauuucau

SEQ ID NO: 2095820 - RNA, 19 nt, Artificial Sequence
  Description of Artificial Sequence: Synthetic oligonucleotide
  Sense strand starting at position 2856 of SEQ ID NO: 1882108
ucuauuuaaugggacuaua

SEQ ID NO: 2095821 - RNA, 19 nt, Artificial Sequence
  Description of Artificial Sequence: Synthetic oligonucleotide
  Antisense strand to SEQ ID NO: 2095820
uauagucccauuaaauaga

SEQ ID NO: 2095822 - RNA, 19 nt, Artificial Sequence
  Description of Artificial Sequence: Synthetic oligonucleotide
  Sense strand starting at position 2974 of SEQ ID NO: 1882108
uugggaaguuaguuuagau

SEQ ID NO: 2095823 - RNA, 19 nt, Artificial Sequence
  Description of Artificial Sequence: Synthetic oligonucleotide
  Antisense strand to SEQ ID NO: 2095822
aucuaaacuaacuucccaa

SEQ ID NO: 2095824 - RNA, 19 nt, Artificial Sequence
  Description of Artificial Sequence: Synthetic oligonucleotide
  Sense strand starting at position 2981 of SEQ ID NO: 1882108
guuaguuuagaugagguuu

SEQ ID NO: 2095825 - RNA, 19 nt, Artificial Sequence
  Description of Artificial Sequence: Synthetic oligonucleotide
  Antisense strand to SEQ ID NO: 2095824
aaaccucaucuaaacuaac

SEQ ID NO: 2095826 - RNA, 19 nt, Artificial Sequence
  Description of Artificial Sequence: Synthetic oligonucleotide
  Sense strand starting at position 3197 of SEQ ID NO: 1882108
uugccuuuccuacaguuga

SEQ ID NO: 2095827 - RNA, 19 nt, Artificial Sequence
  Description of Artificial Sequence: Synthetic oligonucleotide
  Antisense strand to SEQ ID NO: 2095826
ucaacuguaggaaaggcaa

SEQ ID NO: 2095828 - RNA, 19 nt, Artificial Sequence
  Description of Artificial Sequence: Synthetic oligonucleotide
  Sense strand starting at position 3234 of SEQ ID NO: 1882108
ccuagauagucaguuuaca

SEQ ID NO: 2095829 - RNA, 19 nt, Artificial Sequence
  Description of Artificial Sequence: Synthetic oligonucleotide
  Antisense strand to SEQ ID NO: 2095828
uguaaacugacuaucuagg

SEQ ID NO: 2095830 - RNA, 19 nt, Artificial Sequence
  Description of Artificial Sequence: Synthetic oligonucleotide
  Sense strand starting at position 3336 of SEQ ID NO: 1882108
cuagaagugaugugagagu

SEQ ID NO: 2095831 - RNA, 19 nt, Artificial Sequence
  Description of Artificial Sequence: Synthetic oligonucleotide
  Antisense strand to SEQ ID NO: 2095830
acucucacaucacuucuag

SEQ ID NO: 2095832 - RNA, 19 nt, Artificial Sequence
  Description of Artificial Sequence: Synthetic oligonucleotide
  Sense strand starting at position 3349 of SEQ ID NO: 1882108
gagaguguugacugaauug

SEQ ID NO: 2095833 - RNA, 19 nt, Artificial Sequence
  Description of Artificial Sequence: Synthetic oligonucleotide
  Antisense strand to SEQ ID NO: 2095832
caauucagucaacacucuc

SEQ ID NO: 2095834 - RNA, 19 nt, Artificial Sequence
  Description of Artificial Sequence: Synthetic oligonucleotide
  Sense strand starting at position 3360 of SEQ ID NO: 1882108
cugaauugauuauggaaau

SEQ ID NO: 2095835 - RNA, 19 nt, Artificial Sequence
  Description of Artificial Sequence: Synthetic oligonucleotide
  Antisense strand to SEQ ID NO: 2095834
auuuccauaaucaauucag

SEQ ID NO: 2095836 - RNA, 19 nt, Artificial Sequence
  Description of Artificial Sequence: Synthetic oligonucleotide
  Sense strand starting at position 3361 of SEQ ID NO: 1882108
ugaauugauuauggaaaug

SEQ ID NO: 2095837 - RNA, 19 nt, Artificial Sequence
  Description of Artificial Sequence: Synthetic oligonucleotide
  Antisense strand to SEQ ID NO: 2095836
cauuuccauaaucaauuca

SEQ ID NO: 2095838 - RNA, 19 nt, Artificial Sequence
  Description of Artificial Sequence: Synthetic oligonucleotide
  Sense strand starting at position 3372 of SEQ ID NO: 1882108
uggaaaugauuccugugau

SEQ ID NO: 2095839 - RNA, 19 nt, Artificial Sequence
  Description of Artificial Sequence: Synthetic oligonucleotide
  Antisense strand to SEQ ID NO: 2095838
aucacaggaaucauuucca

SEQ ID NO: 2095840 - RNA, 19 nt, Artificial Sequence
  Description of Artificial Sequence: Synthetic oligonucleotide
  Sense strand starting at position 3422 of SEQ ID NO: 1882108
uuggcuuuccuagacauug

SEQ ID NO: 2095841 - RNA, 19 nt, Artificial Sequence
  Description of Artificial Sequence: Synthetic oligonucleotide
  Antisense strand to SEQ ID NO: 2095840
caaugucuaggaaagccaa

SEQ ID NO: 2095842 - RNA, 19 nt, Artificial Sequence
  Description of Artificial Sequence: Synthetic oligonucleotide
  Sense strand starting at position 3480 of SEQ ID NO: 1882108
auaacaaguuggucugaau

SEQ ID NO: 2095843 - RNA, 19 nt, Artificial Sequence
  Description of Artificial Sequence: Synthetic oligonucleotide
  Antisense strand to SEQ ID NO: 2095842
auucagaccaacuuguuau

SEQ ID NO: 2095844 - RNA, 19 nt, Artificial Sequence
  Description of Artificial Sequence: Synthetic oligonucleotide
  Sense strand starting at position 3483 of SEQ ID NO: 1882108
acaaguuggucugaauaaa

SEQ ID NO: 2095845 - RNA, 19 nt, Artificial Sequence
  Description of Artificial Sequence: Synthetic oligonucleotide
  Antisense strand to SEQ ID NO: 2095844
uuuauucagaccaacuugu

SEQ ID NO: 2095846 - RNA, 19 nt, Artificial Sequence
  Description of Artificial Sequence: Synthetic oligonucleotide
  Sense strand starting at position 3511 of SEQ ID NO: 1882108
uguacuauuugccauaaga

SEQ ID NO: 2095847 - RNA, 19 nt, Artificial Sequence
  Description of Artificial Sequence: Synthetic oligonucleotide
  Antisense strand to SEQ ID NO: 2095846
ucuuauggcaaauaguaca

SEQ ID NO: 2095848 - RNA, 19 nt, Artificial Sequence
  Description of Artificial Sequence: Synthetic oligonucleotide
  Sense strand starting at position 3599 of SEQ ID NO: 1882108
ccagaaggauacuagcuaa

SEQ ID NO: 2095849 - RNA, 19 nt, Artificial Sequence
  Description of Artificial Sequence: Synthetic oligonucleotide
  Antisense strand to SEQ ID NO: 2095848
uuagcuaguauccuucugg

SEQ ID NO: 2095850 - RNA, 19 nt, Artificial Sequence
  Description of Artificial Sequence: Synthetic oligonucleotide
  Sense strand starting at position 3689 of SEQ ID NO: 1882108
uguagacaucuuuagcaca

SEQ ID NO: 2095851 - RNA, 19 nt, Artificial Sequence
  Description of Artificial Sequence: Synthetic oligonucleotide
  Antisense strand to SEQ ID NO: 2095850
ugugcuaaagaugucuaca

SEQ ID NO: 2095852 - RNA, 19 nt, Artificial Sequence
  Description of Artificial Sequence: Synthetic oligonucleotide
  Sense strand starting at position 3969 of SEQ ID NO: 1882108
cagucaauaugucuguguu

SEQ ID NO: 2095853 - RNA, 19 nt, Artificial Sequence
  Description of Artificial Sequence: Synthetic oligonucleotide
  Antisense strand to SEQ ID NO: 2095852
aacacagacauauugacug

SEQ ID NO: 2095854 - RNA, 19 nt, Artificial Sequence
  Description of Artificial Sequence: Synthetic oligonucleotide
  Sense strand starting at position 3970 of SEQ ID NO: 1882108
agucaauaugucuguguug

SEQ ID NO: 2095855 - RNA, 19 nt, Artificial Sequence
  Description of Artificial Sequence: Synthetic oligonucleotide
  Antisense strand to SEQ ID NO: 2095854
caacacagacauauugacu

SEQ ID NO: 2095856 - RNA, 19 nt, Artificial Sequence
  Description of Artificial Sequence: Synthetic oligonucleotide
  Sense strand starting at position 3971 of SEQ ID NO: 1882108
gucaauaugucuguguuga

SEQ ID NO: 2095857 - RNA, 19 nt, Artificial Sequence
  Description of Artificial Sequence: Synthetic oligonucleotide
  Antisense strand to SEQ ID NO: 2095856
ucaacacagacauauugac

SEQ ID NO: 2095858 - RNA, 19 nt, Artificial Sequence
  Description of Artificial Sequence: Synthetic oligonucleotide
  Sense strand starting at position 3972 of SEQ ID NO: 1882108
ucaauaugucuguguugau

SEQ ID NO: 2095859 - RNA, 19 nt, Artificial Sequence
  Description of Artificial Sequence: Synthetic oligonucleotide
  Antisense strand to SEQ ID NO: 2095858
aucaacacagacauauuga

SEQ ID NO: 2095860 - RNA, 19 nt, Artificial Sequence
  Description of Artificial Sequence: Synthetic oligonucleotide
  Sense strand starting at position 3973 of SEQ ID NO: 1882108
caauaugucuguguugaua

SEQ ID NO: 2095861 - RNA, 19 nt, Artificial Sequence
  Description of Artificial Sequence: Synthetic oligonucleotide
  Antisense strand to SEQ ID NO: 2095860
uaucaacacagacauauug

SEQ ID NO: 2095862 - RNA, 19 nt, Artificial Sequence
  Description of Artificial Sequence: Synthetic oligonucleotide
  Sense strand starting at position 3976 of SEQ ID NO: 1882108
uaugucuguguugauagga

SEQ ID NO: 2095863 - RNA, 19 nt, Artificial Sequence
  Description of Artificial Sequence: Synthetic oligonucleotide
  Antisense strand to SEQ ID NO: 2095862
uccuaucaacacagacaua

SEQ ID NO: 2095864 - RNA, 19 nt, Artificial Sequence
  Description of Artificial Sequence: Synthetic oligonucleotide
  Sense strand starting at position 178 of SEQ ID NO: 1882109
aaauguguccaaugauagc

SEQ ID NO: 2095865 - RNA, 19 nt, Artificial Sequence
  Description of Artificial Sequence: Synthetic oligonucleotide
  Antisense strand to SEQ ID NO: 2095864
gcuaucauuggacacauuu

SEQ ID NO: 2095866 - RNA, 19 nt, Artificial Sequence
  Description of Artificial Sequence: Synthetic oligonucleotide
  Sense strand starting at position 234 of SEQ ID NO: 1882109
aacguaauuccagggagcu

SEQ ID NO: 2095867 - RNA, 19 nt, Artificial Sequence
  Description of Artificial Sequence: Synthetic oligonucleotide
  Antisense strand to SEQ ID NO: 2095866
agcucccuggaauuacguu

SEQ ID NO: 2095868 - RNA, 19 nt, Artificial Sequence
  Description of Artificial Sequence: Synthetic oligonucleotide
  Sense strand starting at position 235 of SEQ ID NO: 1882109
acguaauuccagggagcuc

SEQ ID NO: 2095869 - RNA, 19 nt, Artificial Sequence
  Description of Artificial Sequence: Synthetic oligonucleotide
  Antisense strand to SEQ ID NO: 2095868
gagcucccuggaauuacgu

SEQ ID NO: 2095870 - RNA, 19 nt, Artificial Sequence
  Description of Artificial Sequence: Synthetic oligonucleotide
  Sense strand starting at position 236 of SEQ ID NO: 1882109
cguaauuccagggagcuca

SEQ ID NO: 2095871 - RNA, 19 nt, Artificial Sequence
  Description of Artificial Sequence: Synthetic oligonucleotide
  Antisense strand to SEQ ID NO: 2095870
ugagcucccuggaauuacg

SEQ ID NO: 2095872 - RNA, 19 nt, Artificial Sequence
  Description of Artificial Sequence: Synthetic oligonucleotide
  Sense strand starting at position 270 of SEQ ID NO: 1882109
cggauuucccgcugccuga

SEQ ID NO: 2095873 - RNA, 19 nt, Artificial Sequence
  Description of Artificial Sequence: Synthetic oligonucleotide
  Antisense strand to SEQ ID NO: 2095872
ucaggcagcgggaaauccg

SEQ ID NO: 2095874 - RNA, 19 nt, Artificial Sequence
  Description of Artificial Sequence: Synthetic oligonucleotide
  Sense strand starting at position 293 of SEQ ID NO: 1882109
ccaguauucgcacacugau

SEQ ID NO: 2095875 - RNA, 19 nt, Artificial Sequence
  Description of Artificial Sequence: Synthetic oligonucleotide
  Antisense strand to SEQ ID NO: 2095874
aucagugugcgaauacugg

SEQ ID NO: 2095876 - RNA, 19 nt, Artificial Sequence
  Description of Artificial Sequence: Synthetic oligonucleotide
  Sense strand starting at position 296 of SEQ ID NO: 1882109
guauucgcacacugauaag

SEQ ID NO: 2095877 - RNA, 19 nt, Artificial Sequence
  Description of Artificial Sequence: Synthetic oligonucleotide
  Antisense strand to SEQ ID NO: 2095876
cuuaucagugugcgaauac

SEQ ID NO: 2095878 - RNA, 19 nt, Artificial Sequence
  Description of Artificial Sequence: Synthetic oligonucleotide
  Sense strand starting at position 772 of SEQ ID NO: 1882109
ucagaaaguuauccacugu

SEQ ID NO: 2095879 - RNA, 19 nt, Artificial Sequence
  Description of Artificial Sequence: Synthetic oligonucleotide
  Antisense strand to SEQ ID NO: 2095878
acaguggauaacuuucuga

SEQ ID NO: 2095880 - RNA, 19 nt, Artificial Sequence
  Description of Artificial Sequence: Synthetic oligonucleotide
  Sense strand starting at position 778 of SEQ ID NO: 1882109
aguuauccacugugaacag

SEQ ID NO: 2095881 - RNA, 19 nt, Artificial Sequence
  Description of Artificial Sequence: Synthetic oligonucleotide
  Antisense strand to SEQ ID NO: 2095880
cuguucacaguggauaacu

SEQ ID NO: 2095882 - RNA, 19 nt, Artificial Sequence
  Description of Artificial Sequence: Synthetic oligonucleotide
  Sense strand starting at position 1232 of SEQ ID NO: 1882109
gccaucagucacuacaguu

SEQ ID NO: 2095883 - RNA, 19 nt, Artificial Sequence
  Description of Artificial Sequence: Synthetic oligonucleotide
  Antisense strand to SEQ ID NO: 2095882
aacuguagugacugauggc

SEQ ID NO: 2095884 - RNA, 19 nt, Artificial Sequence
  Description of Artificial Sequence: Synthetic oligonucleotide
  Sense strand starting at position 1250 of SEQ ID NO: 1882109
uucggacauucgguggaaa

SEQ ID NO: 2095885 - RNA, 19 nt, Artificial Sequence
  Description of Artificial Sequence: Synthetic oligonucleotide
  Antisense strand to SEQ ID NO: 2095884
uuuccaccgaauguccgaa

SEQ ID NO: 2095886 - RNA, 19 nt, Artificial Sequence
  Description of Artificial Sequence: Synthetic oligonucleotide
  Sense strand starting at position 1422 of SEQ ID NO: 1882109
cggcucuugaggcgagaaa

SEQ ID NO: 2095887 - RNA, 19 nt, Artificial Sequence
  Description of Artificial Sequence: Synthetic oligonucleotide
  Antisense strand to SEQ ID NO: 2095886
uuucucgccucaagagccg

SEQ ID NO: 2095888 - RNA, 19 nt, Artificial Sequence
  Description of Artificial Sequence: Synthetic oligonucleotide
  Sense strand starting at position 2175 of SEQ ID NO: 1882109
caggaaagcgcuuggagaa

SEQ ID NO: 2095889 - RNA, 19 nt, Artificial Sequence
  Description of Artificial Sequence: Synthetic oligonucleotide
  Antisense strand to SEQ ID NO: 2095888
uucuccaagcgcuuuccug

SEQ ID NO: 2095890 - RNA, 19 nt, Artificial Sequence
  Description of Artificial Sequence: Synthetic oligonucleotide
  Sense strand starting at position 2176 of SEQ ID NO: 1882109
aggaaagcgcuuggagaaa

SEQ ID NO: 2095891 - RNA, 19 nt, Artificial Sequence
  Description of Artificial Sequence: Synthetic oligonucleotide
  Antisense strand to SEQ ID NO: 2095890
uuucuccaagcgcuuuccu

SEQ ID NO: 2095892 - RNA, 19 nt, Artificial Sequence
  Description of Artificial Sequence: Synthetic oligonucleotide
  Sense strand starting at position 2252 of SEQ ID NO: 1882109
ucaguucuuguauaaauag

SEQ ID NO: 2095893 - RNA, 19 nt, Artificial Sequence
  Description of Artificial Sequence: Synthetic oligonucleotide
  Antisense strand to SEQ ID NO: 2095892
cuauuuauacaagaacuga

SEQ ID NO: 2095894 - RNA, 19 nt, Artificial Sequence
  Description of Artificial Sequence: Synthetic oligonucleotide
  Sense strand starting at position 2289 of SEQ ID NO: 1882109
uugcuaacagucggaaacu

SEQ ID NO: 2095895 - RNA, 19 nt, Artificial Sequence
  Description of Artificial Sequence: Synthetic oligonucleotide
  Antisense strand to SEQ ID NO: 2095894
aguuuccgacuguuagcaa

SEQ ID NO: 2095896 - RNA, 19 nt, Artificial Sequence
  Description of Artificial Sequence: Synthetic oligonucleotide
  Sense strand starting at position 2921 of SEQ ID NO: 1882109
acacaauucgggugggaaa

SEQ ID NO: 2095897 - RNA, 19 nt, Artificial Sequence
  Description of Artificial Sequence: Synthetic oligonucleotide
  Antisense strand to SEQ ID NO: 2095896
uuucccacccgaauugugu

SEQ ID NO: 2095898 - RNA, 19 nt, Artificial Sequence
  Description of Artificial Sequence: Synthetic oligonucleotide
  Sense strand starting at position 2948 of SEQ ID NO: 1882109
gcagcauucucgguugucu

SEQ ID NO: 2095899 - RNA, 19 nt, Artificial Sequence
  Description of Artificial Sequence: Synthetic oligonucleotide
  Antisense strand to SEQ ID NO: 2095898
agacaaccgagaaugcugc

SEQ ID NO: 2095900 - RNA, 19 nt, Artificial Sequence
  Description of Artificial Sequence: Synthetic oligonucleotide
  Sense strand starting at position 3230 of SEQ ID NO: 1882109
cugugaucccugggucuuu

SEQ ID NO: 2095901 - RNA, 19 nt, Artificial Sequence
  Description of Artificial Sequence: Synthetic oligonucleotide
  Antisense strand to SEQ ID NO: 2095900
aaagacccagggaucacag

SEQ ID NO: 2095902 - RNA, 19 nt, Artificial Sequence
  Description of Artificial Sequence: Synthetic oligonucleotide
  Sense strand starting at position 3431 of SEQ ID NO: 1882109
ucacucaguugucuaccaa

SEQ ID NO: 2095903 - RNA, 19 nt, Artificial Sequence
  Description of Artificial Sequence: Synthetic oligonucleotide
  Antisense strand to SEQ ID NO: 2095902
uugguagacaacugaguga

SEQ ID NO: 2095904 - RNA, 19 nt, Artificial Sequence
  Description of Artificial Sequence: Synthetic oligonucleotide
  Sense strand starting at position 3499 of SEQ ID NO: 1882109
cugagacuuucuucccugu

SEQ ID NO: 2095905 - RNA, 19 nt, Artificial Sequence
  Description of Artificial Sequence: Synthetic oligonucleotide
  Antisense strand to SEQ ID NO: 2095904
acagggaagaaagucucag

SEQ ID NO: 2095906 - RNA, 19 nt, Artificial Sequence
  Description of Artificial Sequence: Synthetic oligonucleotide
  Sense strand starting at position 3502 of SEQ ID NO: 1882109
agacuuucuucccugugga

SEQ ID NO: 2095907 - RNA, 19 nt, Artificial Sequence
  Description of Artificial Sequence: Synthetic oligonucleotide
  Antisense strand to SEQ ID NO: 2095906
uccacagggaagaaagucu

SEQ ID NO: 2095908 - RNA, 19 nt, Artificial Sequence
  Description of Artificial Sequence: Synthetic oligonucleotide
  Sense strand starting at position 3610 of SEQ ID NO: 1882109
cugucucucuuguccacaa

SEQ ID NO: 2095909 - RNA, 19 nt, Artificial Sequence
  Description of Artificial Sequence: Synthetic oligonucleotide
  Antisense strand to SEQ ID NO: 2095908
uuguggacaagagagacag

SEQ ID NO: 2095910 - RNA, 19 nt, Artificial Sequence
  Description of Artificial Sequence: Synthetic oligonucleotide
  Sense strand starting at position 3628 of SEQ ID NO: 1882109
aggcauauaccugagaguu

SEQ ID NO: 2095911 - RNA, 19 nt, Artificial Sequence
  Description of Artificial Sequence: Synthetic oligonucleotide
  Antisense strand to SEQ ID NO: 2095910
aacucucagguauaugccu

SEQ ID NO: 2095912 - RNA, 19 nt, Artificial Sequence
  Description of Artificial Sequence: Synthetic oligonucleotide
  Sense strand starting at position 3666 of SEQ ID NO: 1882109
uuuagauauucuguggcuu

SEQ ID NO: 2095913 - RNA, 19 nt, Artificial Sequence
  Description of Artificial Sequence: Synthetic oligonucleotide
  Antisense strand to SEQ ID NO: 2095912
aagccacagaauaucuaaa

SEQ ID NO: 2095914 - RNA, 19 nt, Artificial Sequence
  Description of Artificial Sequence: Synthetic oligonucleotide
  Sense strand starting at position 3667 of SEQ ID NO: 1882109
uuagauauucuguggcuuu

SEQ ID NO: 2095915 - RNA, 19 nt, Artificial Sequence
  Description of Artificial Sequence: Synthetic oligonucleotide
  Antisense strand to SEQ ID NO: 2095914
aaagccacagaauaucuaa

SEQ ID NO: 2095916 - RNA, 19 nt, Artificial Sequence
  Description of Artificial Sequence: Synthetic oligonucleotide
  Sense strand starting at position 3699 of SEQ ID NO: 1882109
uguguuaaucuacaaaccu

SEQ ID NO: 2095917 - RNA, 19 nt, Artificial Sequence
  Description of Artificial Sequence: Synthetic oligonucleotide
  Antisense strand to SEQ ID NO: 2095916
agguuuguagauuaacaca

SEQ ID NO: 2095918 - RNA, 19 nt, Artificial Sequence
  Description of Artificial Sequence: Synthetic oligonucleotide
  Sense strand starting at position 3753 of SEQ ID NO: 1882109
ucaagugguuucuaauggu

SEQ ID NO: 2095919 - RNA, 19 nt, Artificial Sequence
  Description of Artificial Sequence: Synthetic oligonucleotide
  Antisense strand to SEQ ID NO: 2095918
accauuagaaaccacuuga

SEQ ID NO: 2095920 - RNA, 19 nt, Artificial Sequence
  Description of Artificial Sequence: Synthetic oligonucleotide
  Sense strand starting at position 3902 of SEQ ID NO: 1882109
gugggacauggcugacuau

SEQ ID NO: 2095921 - RNA, 19 nt, Artificial Sequence
  Description of Artificial Sequence: Synthetic oligonucleotide
  Antisense strand to SEQ ID NO: 2095920
auagucagccaugucccac

SEQ ID NO: 2095922 - RNA, 19 nt, Artificial Sequence
  Description of Artificial Sequence: Synthetic oligonucleotide
  Sense strand starting at position 3961 of SEQ ID NO: 1882109
ccuuaagucuaaugagaaa

SEQ ID NO: 2095923 - RNA, 19 nt, Artificial Sequence
  Description of Artificial Sequence: Synthetic oligonucleotide
  Antisense strand to SEQ ID NO: 2095922
uuucucauuagacuuaagg

SEQ ID NO: 2095924 - RNA, 19 nt, Artificial Sequence
  Description of Artificial Sequence: Synthetic oligonucleotide
  Sense strand starting at position 72 of SEQ ID NO: 1882110
ggcugcauucuugggcuua

SEQ ID NO: 2095925 - RNA, 19 nt, Artificial Sequence
  Description of Artificial Sequence: Synthetic oligonucleotide
  Antisense strand to SEQ ID NO: 2095924
uaagcccaagaaugcagcc

SEQ ID NO: 2095926 - RNA, 19 nt, Artificial Sequence
  Description of Artificial Sequence: Synthetic oligonucleotide
  Sense strand starting at position 74 of SEQ ID NO: 1882110
cugcauucuugggcuuaua

SEQ ID NO: 2095927 - RNA, 19 nt, Artificial Sequence
  Description of Artificial Sequence: Synthetic oligonucleotide
  Antisense strand to SEQ ID NO: 2095926
uauaagcccaagaaugcag

SEQ ID NO: 2095928 - RNA, 19 nt, Artificial Sequence
  Description of Artificial Sequence: Synthetic oligonucleotide
  Sense strand starting at position 244 of SEQ ID NO: 1882110
ggauguggguccuuacaua

SEQ ID NO: 2095929 - RNA, 19 nt, Artificial Sequence
  Description of Artificial Sequence: Synthetic oligonucleotide
  Antisense strand to SEQ ID NO: 2095928
uauguaaggacccacaucc

SEQ ID NO: 2095930 - RNA, 19 nt, Artificial Sequence
  Description of Artificial Sequence: Synthetic oligonucleotide
  Sense strand starting at position 370 of SEQ ID NO: 1882110
augaguucuucucucaucu

SEQ ID NO: 2095931 - RNA, 19 nt, Artificial Sequence
  Description of Artificial Sequence: Synthetic oligonucleotide
  Antisense strand to SEQ ID NO: 2095930
agaugagagaagaacucau

SEQ ID NO: 2095932 - RNA, 19 nt, Artificial Sequence
  Description of Artificial Sequence: Synthetic oligonucleotide
  Sense strand starting at position 396 of SEQ ID NO: 1882110
cgggaugaggauugcuauu

SEQ ID NO: 2095933 - RNA, 19 nt, Artificial Sequence
  Description of Artificial Sequence: Synthetic oligonucleotide
  Antisense strand to SEQ ID NO: 2095932
aauagcaauccucaucccg

SEQ ID NO: 2095934 - RNA, 19 nt, Artificial Sequence
  Description of Artificial Sequence: Synthetic oligonucleotide
  Sense strand starting at position 437 of SEQ ID NO: 1882110
agugaaauccuauagucac

SEQ ID NO: 2095935 - RNA, 19 nt, Artificial Sequence
  Description of Artificial Sequence: Synthetic oligonucleotide
  Antisense strand to SEQ ID NO: 2095934
gugacuauaggauuucacu

SEQ ID NO: 2095936 - RNA, 19 nt, Artificial Sequence
  Description of Artificial Sequence: Synthetic oligonucleotide
  Sense strand starting at position 500 of SEQ ID NO: 1882110
uuagauaccuccugaaaug

SEQ ID NO: 2095937 - RNA, 19 nt, Artificial Sequence
  Description of Artificial Sequence: Synthetic oligonucleotide
  Antisense strand to SEQ ID NO: 2095936
cauuucaggagguaucuaa

SEQ ID NO: 2095938 - RNA, 19 nt, Artificial Sequence
  Description of Artificial Sequence: Synthetic oligonucleotide
  Sense strand starting at position 802 of SEQ ID NO: 1882110
cuaggcucacccgggaaau

SEQ ID NO: 2095939 - RNA, 19 nt, Artificial Sequence
  Description of Artificial Sequence: Synthetic oligonucleotide
  Antisense strand to SEQ ID NO: 2095938
auuucccgggugagccuag

SEQ ID NO: 2095940 - RNA, 19 nt, Artificial Sequence
  Description of Artificial Sequence: Synthetic oligonucleotide
  Sense strand starting at position 1095 of SEQ ID NO: 1882110
ggaccucacuuuggaaaga

SEQ ID NO: 2095941 - RNA, 19 nt, Artificial Sequence
  Description of Artificial Sequence: Synthetic oligonucleotide
  Antisense strand to SEQ ID NO: 2095940
ucuuuccaaagugaggucc

SEQ ID NO: 2095942 - RNA, 19 nt, Artificial Sequence
  Description of Artificial Sequence: Synthetic oligonucleotide
  Sense strand starting at position 1169 of SEQ ID NO: 1882110
gcuugagguucuuugcaac

SEQ ID NO: 2095943 - RNA, 19 nt, Artificial Sequence
  Description of Artificial Sequence: Synthetic oligonucleotide
  Antisense strand to SEQ ID NO: 2095942
guugcaaagaaccucaagc

SEQ ID NO: 2095944 - RNA, 19 nt, Artificial Sequence
  Description of Artificial Sequence: Synthetic oligonucleotide
  Sense strand starting at position 1318 of SEQ ID NO: 1882110
ggagccugcucggacuaua

SEQ ID NO: 2095945 - RNA, 19 nt, Artificial Sequence
  Description of Artificial Sequence: Synthetic oligonucleotide
  Antisense strand to SEQ ID NO: 2095944
uauaguccgagcaggcucc

SEQ ID NO: 2095946 - RNA, 19 nt, Artificial Sequence
  Description of Artificial Sequence: Synthetic oligonucleotide
  Sense strand starting at position 1321 of SEQ ID NO: 1882110
gccugcucggacuauauaa

SEQ ID NO: 2095947 - RNA, 19 nt, Artificial Sequence
  Description of Artificial Sequence: Synthetic oligonucleotide
  Antisense strand to SEQ ID NO: 2095946
uuauauaguccgagcaggc

SEQ ID NO: 2095948 - RNA, 19 nt, Artificial Sequence
  Description of Artificial Sequence: Synthetic oligonucleotide
  Sense strand starting at position 1452 of SEQ ID NO: 1882110
agcggauccuccuagccau

SEQ ID NO: 2095949 - RNA, 19 nt, Artificial Sequence
  Description of Artificial Sequence: Synthetic oligonucleotide
  Antisense strand to SEQ ID NO: 2095948
auggcuaggaggauccgcu

SEQ ID NO: 2095950 - RNA, 19 nt, Artificial Sequence
  Description of Artificial Sequence: Synthetic oligonucleotide
  Sense strand starting at position 1464 of SEQ ID NO: 1882110
uagccauuccgggaccagu

SEQ ID NO: 2095951 - RNA, 19 nt, Artificial Sequence
  Description of Artificial Sequence: Synthetic oligonucleotide
  Antisense strand to SEQ ID NO: 2095950
acuggucccggaauggcua

SEQ ID NO: 2095952 - RNA, 19 nt, Artificial Sequence
  Description of Artificial Sequence: Synthetic oligonucleotide
  Sense strand starting at position 1962 of SEQ ID NO: 1882110
cagggagccucguugggau

SEQ ID NO: 2095953 - RNA, 19 nt, Artificial Sequence
  Description of Artificial Sequence: Synthetic oligonucleotide
  Antisense strand to SEQ ID NO: 2095952
aucccaacgaggcucccug

SEQ ID NO: 2095954 - RNA, 19 nt, Artificial Sequence
  Description of Artificial Sequence: Synthetic oligonucleotide
  Sense strand starting at position 2317 of SEQ ID NO: 1882110
gggacauaguagucucuga

SEQ ID NO: 2095955 - RNA, 19 nt, Artificial Sequence
  Description of Artificial Sequence: Synthetic oligonucleotide
  Antisense strand to SEQ ID NO: 2095954
ucagagacuacuauguccc

SEQ ID NO: 2095956 - RNA, 19 nt, Artificial Sequence
  Description of Artificial Sequence: Synthetic oligonucleotide
  Sense strand starting at position 2322 of SEQ ID NO: 1882110
auaguagucucugaaccuu

SEQ ID NO: 2095957 - RNA, 19 nt, Artificial Sequence
  Description of Artificial Sequence: Synthetic oligonucleotide
  Antisense strand to SEQ ID NO: 2095956
aagguucagagacuacuau

SEQ ID NO: 2095958 - RNA, 19 nt, Artificial Sequence
  Description of Artificial Sequence: Synthetic oligonucleotide
  Sense strand starting at position 2339 of SEQ ID NO: 1882110
uuaguuugcuacuccgaaa

SEQ ID NO: 2095959 - RNA, 19 nt, Artificial Sequence
  Description of Artificial Sequence: Synthetic oligonucleotide
  Antisense strand to SEQ ID NO: 2095958
uuucggaguagcaaacuaa

SEQ ID NO: 2095960 - RNA, 19 nt, Artificial Sequence
  Description of Artificial Sequence: Synthetic oligonucleotide
  Sense strand starting at position 2391 of SEQ ID NO: 1882110
cgcgagugucgguaucgua

SEQ ID NO: 2095961 - RNA, 19 nt, Artificial Sequence
  Description of Artificial Sequence: Synthetic oligonucleotide
  Antisense strand to SEQ ID NO: 2095960
uacgauaccgacacucgcg

SEQ ID NO: 2095962 - RNA, 19 nt, Artificial Sequence
  Description of Artificial Sequence: Synthetic oligonucleotide
  Sense strand starting at position 2426 of SEQ ID NO: 1882110
acugcagaaucuguaaauc

SEQ ID NO: 2095963 - RNA, 19 nt, Artificial Sequence
  Description of Artificial Sequence: Synthetic oligonucleotide
  Antisense strand to SEQ ID NO: 2095962
gauuuacagauucugcagu

SEQ ID NO: 2095964 - RNA, 19 nt, Artificial Sequence
  Description of Artificial Sequence: Synthetic oligonucleotide
  Sense strand starting at position 2480 of SEQ ID NO: 1882110
ggcguuuaaagcuagaguu

SEQ ID NO: 2095965 - RNA, 19 nt, Artificial Sequence
  Description of Artificial Sequence: Synthetic oligonucleotide
  Antisense strand to SEQ ID NO: 2095964
aacucuagcuuuaaacgcc

SEQ ID NO: 2095966 - RNA, 19 nt, Artificial Sequence
  Description of Artificial Sequence: Synthetic oligonucleotide
  Sense strand starting at position 2849 of SEQ ID NO: 1882110
ccgugagaguucucgucgu

SEQ ID NO: 2095967 - RNA, 19 nt, Artificial Sequence
  Description of Artificial Sequence: Synthetic oligonucleotide
  Antisense strand to SEQ ID NO: 2095966
acgacgagaacucucacgg

SEQ ID NO: 2095968 - RNA, 19 nt, Artificial Sequence
  Description of Artificial Sequence: Synthetic oligonucleotide
  Sense strand starting at position 2851 of SEQ ID NO: 1882110
gugagaguucucgucguua

SEQ ID NO: 2095969 - RNA, 19 nt, Artificial Sequence
  Description of Artificial Sequence: Synthetic oligonucleotide
  Antisense strand to SEQ ID NO: 2095968
uaacgacgagaacucucac

SEQ ID NO: 2095970 - RNA, 19 nt, Artificial Sequence
  Description of Artificial Sequence: Synthetic oligonucleotide
  Sense strand starting at position 2853 of SEQ ID NO: 1882110
gagaguucucgucguuaaa

SEQ ID NO: 2095971 - RNA, 19 nt, Artificial Sequence
  Description of Artificial Sequence: Synthetic oligonucleotide
  Antisense strand to SEQ ID NO: 2095970
uuuaacgacgagaacucuc

SEQ ID NO: 2095972 - RNA, 19 nt, Artificial Sequence
  Description of Artificial Sequence: Synthetic oligonucleotide
  Sense strand starting at position 2855 of SEQ ID NO: 1882110
gaguucucgucguuaaaga

SEQ ID NO: 2095973 - RNA, 19 nt, Artificial Sequence
  Description of Artificial Sequence: Synthetic oligonucleotide
  Antisense strand to SEQ ID NO: 2095972
ucuuuaacgacgagaacuc

SEQ ID NO: 2095974 - RNA, 19 nt, Artificial Sequence
  Description of Artificial Sequence: Synthetic oligonucleotide
  Sense strand starting at position 2856 of SEQ ID NO: 1882110
aguucucgucguuaaagac

SEQ ID NO: 2095975 - RNA, 19 nt, Artificial Sequence
  Description of Artificial Sequence: Synthetic oligonucleotide
  Antisense strand to SEQ ID NO: 2095974
gucuuuaacgacgagaacu

SEQ ID NO: 2095976 - RNA, 19 nt, Artificial Sequence
  Description of Artificial Sequence: Synthetic oligonucleotide
  Sense strand starting at position 2911 of SEQ ID NO: 1882110
cuuuaauucuccucucgag

SEQ ID NO: 2095977 - RNA, 19 nt, Artificial Sequence
  Description of Artificial Sequence: Synthetic oligonucleotide
  Antisense strand to SEQ ID NO: 2095976
cucgagaggagaauuaaag

SEQ ID NO: 2095978 - RNA, 19 nt, Artificial Sequence
  Description of Artificial Sequence: Synthetic oligonucleotide
  Sense strand starting at position 2914 of SEQ ID NO: 1882110
uaauucuccucucgagagu

SEQ ID NO: 2095979 - RNA, 19 nt, Artificial Sequence
  Description of Artificial Sequence: Synthetic oligonucleotide
  Antisense strand to SEQ ID NO: 2095978
acucucgagaggagaauua

SEQ ID NO: 2095980 - RNA, 19 nt, Artificial Sequence
  Description of Artificial Sequence: Synthetic oligonucleotide
  Sense strand starting at position 2915 of SEQ ID NO: 1882110
aauucuccucucgagagua

SEQ ID NO: 2095981 - RNA, 19 nt, Artificial Sequence
  Description of Artificial Sequence: Synthetic oligonucleotide
  Antisense strand to SEQ ID NO: 2095980
uacucucgagaggagaauu

SEQ ID NO: 2095982 - RNA, 19 nt, Artificial Sequence
  Description of Artificial Sequence: Synthetic oligonucleotide
  Sense strand starting at position 2917 of SEQ ID NO: 1882110
uucuccucucgagaguaaa

SEQ ID NO: 2095983 - RNA, 19 nt, Artificial Sequence
  Description of Artificial Sequence: Synthetic oligonucleotide
  Antisense strand to SEQ ID NO: 2095982
uuuacucucgagaggagaa

SEQ ID NO: 2095984 - RNA, 19 nt, Artificial Sequence
  Description of Artificial Sequence: Synthetic oligonucleotide
  Sense strand starting at position 2943 of SEQ ID NO: 1882110
cagggaguugucuguuuau

SEQ ID NO: 2095985 - RNA, 19 nt, Artificial Sequence
  Description of Artificial Sequence: Synthetic oligonucleotide
  Antisense strand to SEQ ID NO: 2095984
auaaacagacaacucccug

SEQ ID NO: 2095986 - RNA, 19 nt, Artificial Sequence
  Description of Artificial Sequence: Synthetic oligonucleotide
  Sense strand starting at position 3035 of SEQ ID NO: 1882110
ugagaucucucuucucaag

SEQ ID NO: 2095987 - RNA, 19 nt, Artificial Sequence
  Description of Artificial Sequence: Synthetic oligonucleotide
  Antisense strand to SEQ ID NO: 2095986
cuugagaagagagaucuca

SEQ ID NO: 2095988 - RNA, 19 nt, Artificial Sequence
  Description of Artificial Sequence: Synthetic oligonucleotide
  Sense strand starting at position 3037 of SEQ ID NO: 1882110
agaucucucuucucaaggu

SEQ ID NO: 2095989 - RNA, 19 nt, Artificial Sequence
  Description of Artificial Sequence: Synthetic oligonucleotide
  Antisense strand to SEQ ID NO: 2095988
accuugagaagagagaucu

SEQ ID NO: 2095990 - RNA, 19 nt, Artificial Sequence
  Description of Artificial Sequence: Synthetic oligonucleotide
  Sense strand starting at position 3082 of SEQ ID NO: 1882110
cauggaauccguggugguu

SEQ ID NO: 2095991 - RNA, 19 nt, Artificial Sequence
  Description of Artificial Sequence: Synthetic oligonucleotide
  Antisense strand to SEQ ID NO: 2095990
aaccaccacggauuccaug

SEQ ID NO: 2095992 - RNA, 19 nt, Artificial Sequence
  Description of Artificial Sequence: Synthetic oligonucleotide
  Sense strand starting at position 3128 of SEQ ID NO: 1882110
agcacugguccagguugau

SEQ ID NO: 2095993 - RNA, 19 nt, Artificial Sequence
  Description of Artificial Sequence: Synthetic oligonucleotide
  Antisense strand to SEQ ID NO: 2095992
aucaaccuggaccagugcu

SEQ ID NO: 2095994 - RNA, 19 nt, Artificial Sequence
  Description of Artificial Sequence: Synthetic oligonucleotide
  Sense strand starting at position 3387 of SEQ ID NO: 1882110
ugccuagauguuuacuaga

SEQ ID NO: 2095995 - RNA, 19 nt, Artificial Sequence
  Description of Artificial Sequence: Synthetic oligonucleotide
  Antisense strand to SEQ ID NO: 2095994
ucuaguaaacaucuaggca

SEQ ID NO: 2095996 - RNA, 19 nt, Artificial Sequence
  Description of Artificial Sequence: Synthetic oligonucleotide
  Sense strand starting at position 3389 of SEQ ID NO: 1882110
ccuagauguuuacuagauc

SEQ ID NO: 2095997 - RNA, 19 nt, Artificial Sequence
  Description of Artificial Sequence: Synthetic oligonucleotide
  Antisense strand to SEQ ID NO: 2095996
gaucuaguaaacaucuagg

SEQ ID NO: 2095998 - RNA, 19 nt, Artificial Sequence
  Description of Artificial Sequence: Synthetic oligonucleotide
  Sense strand starting at position 3390 of SEQ ID NO: 1882110
cuagauguuuacuagauca

SEQ ID NO: 2095999 - RNA, 19 nt, Artificial Sequence
  Description of Artificial Sequence: Synthetic oligonucleotide
  Antisense strand to SEQ ID NO: 2095998
ugaucuaguaaacaucuag

SEQ ID NO: 2096000 - RNA, 19 nt, Artificial Sequence
  Description of Artificial Sequence: Synthetic oligonucleotide
  Sense strand starting at position 3746 of SEQ ID NO: 1882110
uggcgcauaugccuauaau

SEQ ID NO: 2096001 - RNA, 19 nt, Artificial Sequence
  Description of Artificial Sequence: Synthetic oligonucleotide
  Antisense strand to SEQ ID NO: 2096000
auuauaggcauaugcgcca

SEQ ID NO: 2096002 - RNA, 19 nt, Artificial Sequence
  Description of Artificial Sequence: Synthetic oligonucleotide
  Sense strand starting at position 3747 of SEQ ID NO: 1882110
ggcgcauaugccuauaauc

SEQ ID NO: 2096003 - RNA, 19 nt, Artificial Sequence
  Description of Artificial Sequence: Synthetic oligonucleotide
  Antisense strand to SEQ ID NO: 2096002
gauuauaggcauaugcgcc

SEQ ID NO: 2096004 - RNA, 19 nt, Artificial Sequence
  Description of Artificial Sequence: Synthetic oligonucleotide
  Sense strand starting at position 36 of SEQ ID NO: 1882111
gaucacaaguuaguaagua

SEQ ID NO: 2096005 - RNA, 19 nt, Artificial Sequence
  Description of Artificial Sequence: Synthetic oligonucleotide
  Antisense strand to SEQ ID NO: 2096004
uacuuacuaacuugugauc

SEQ ID NO: 2096006 - RNA, 19 nt, Artificial Sequence
  Description of Artificial Sequence: Synthetic oligonucleotide
  Sense strand starting at position 71 of SEQ ID NO: 1882111
gcccaagcagucuaagacu

SEQ ID NO: 2096007 - RNA, 19 nt, Artificial Sequence
  Description of Artificial Sequence: Synthetic oligonucleotide
  Antisense strand to SEQ ID NO: 2096006
agucuuagacugcuugggc

SEQ ID NO: 2096008 - RNA, 19 nt, Artificial Sequence
  Description of Artificial Sequence: Synthetic oligonucleotide
  Sense strand starting at position 85 of SEQ ID NO: 1882111
agacuagagucucugcuuu

SEQ ID NO: 2096009 - RNA, 19 nt, Artificial Sequence
  Description of Artificial Sequence: Synthetic oligonucleotide
  Antisense strand to SEQ ID NO: 2096008
aaagcagagacucuagucu

SEQ ID NO: 2096010 - RNA, 19 nt, Artificial Sequence
  Description of Artificial Sequence: Synthetic oligonucleotide
  Sense strand starting at position 181 of SEQ ID NO: 1882111
cuggcagccucaucaagau

SEQ ID NO: 2096011 - RNA, 19 nt, Artificial Sequence
  Description of Artificial Sequence: Synthetic oligonucleotide
  Antisense strand to SEQ ID NO: 2096010
aucuugaugaggcugccag

SEQ ID NO: 2096012 - RNA, 19 nt, Artificial Sequence
  Description of Artificial Sequence: Synthetic oligonucleotide
  Sense strand starting at position 329 of SEQ ID NO: 1882111
uugugagcucaucaucagu

SEQ ID NO: 2096013 - RNA, 19 nt, Artificial Sequence
  Description of Artificial Sequence: Synthetic oligonucleotide
  Antisense strand to SEQ ID NO: 2096012
acugaugaugagcucacaa

SEQ ID NO: 2096014 - RNA, 19 nt, Artificial Sequence
  Description of Artificial Sequence: Synthetic oligonucleotide
  Sense strand starting at position 414 of SEQ ID NO: 1882111
ugcagaauuccacagcuau

SEQ ID NO: 2096015 - RNA, 19 nt, Artificial Sequence
  Description of Artificial Sequence: Synthetic oligonucleotide
  Antisense strand to SEQ ID NO: 2096014
auagcuguggaauucugca

SEQ ID NO: 2096016 - RNA, 19 nt, Artificial Sequence
  Description of Artificial Sequence: Synthetic oligonucleotide
  Sense strand starting at position 596 of SEQ ID NO: 1882111
gcugaugcaaucgauguau

SEQ ID NO: 2096017 - RNA, 19 nt, Artificial Sequence
  Description of Artificial Sequence: Synthetic oligonucleotide
  Antisense strand to SEQ ID NO: 2096016
auacaucgauugcaucagc

SEQ ID NO: 2096018 - RNA, 19 nt, Artificial Sequence
  Description of Artificial Sequence: Synthetic oligonucleotide
  Sense strand starting at position 752 of SEQ ID NO: 1882111
gaagucuacucaucgcaga

SEQ ID NO: 2096019 - RNA, 19 nt, Artificial Sequence
  Description of Artificial Sequence: Synthetic oligonucleotide
  Antisense strand to SEQ ID NO: 2096018
ucugcgaugaguagacuuc

SEQ ID NO: 2096020 - RNA, 19 nt, Artificial Sequence
  Description of Artificial Sequence: Synthetic oligonucleotide
  Sense strand starting at position 907 of SEQ ID NO: 1882111
gaaacuucggauuguuucu

SEQ ID NO: 2096021 - RNA, 19 nt, Artificial Sequence
  Description of Artificial Sequence: Synthetic oligonucleotide
  Antisense strand to SEQ ID NO: 2096020
agaaacaauccgaaguuuc

SEQ ID NO: 2096022 - RNA, 19 nt, Artificial Sequence
  Description of Artificial Sequence: Synthetic oligonucleotide
  Sense strand starting at position 912 of SEQ ID NO: 1882111
uucggauuguuucugaaag

SEQ ID NO: 2096023 - RNA, 19 nt, Artificial Sequence
  Description of Artificial Sequence: Synthetic oligonucleotide
  Antisense strand to SEQ ID NO: 2096022
cuuucagaaacaauccgaa

SEQ ID NO: 2096024 - RNA, 19 nt, Artificial Sequence
  Description of Artificial Sequence: Synthetic oligonucleotide
  Sense strand starting at position 955 of SEQ ID NO: 1882111
ugcucauuucugcaugugu

SEQ ID NO: 2096025 - RNA, 19 nt, Artificial Sequence
  Description of Artificial Sequence: Synthetic oligonucleotide
  Antisense strand to SEQ ID NO: 2096024
acacaugcagaaaugagca

SEQ ID NO: 2096026 - RNA, 19 nt, Artificial Sequence
  Description of Artificial Sequence: Synthetic oligonucleotide
  Sense strand starting at position 1207 of SEQ ID NO: 1882111
ucaagugugcugccuguga

SEQ ID NO: 2096027 - RNA, 19 nt, Artificial Sequence
  Description of Artificial Sequence: Synthetic oligonucleotide
  Antisense strand to SEQ ID NO: 2096026
ucacaggcagcacacuuga

SEQ ID NO: 2096028 - RNA, 19 nt, Artificial Sequence
  Description of Artificial Sequence: Synthetic oligonucleotide
  Sense strand starting at position 1344 of SEQ ID NO: 1882111
gaaggucuucuccggagua

SEQ ID NO: 2096029 - RNA, 19 nt, Artificial Sequence
  Description of Artificial Sequence: Synthetic oligonucleotide
  Antisense strand to SEQ ID NO: 2096028
uacuccggagaagaccuuc

SEQ ID NO: 2096030 - RNA, 19 nt, Artificial Sequence
  Description of Artificial Sequence: Synthetic oligonucleotide
  Sense strand starting at position 1346 of SEQ ID NO: 1882111
aggucuucuccggaguaaa

SEQ ID NO: 2096031 - RNA, 19 nt, Artificial Sequence
  Description of Artificial Sequence: Synthetic oligonucleotide
  Antisense strand to SEQ ID NO: 2096030
uuuacuccggagaagaccu

SEQ ID NO: 2096032 - RNA, 19 nt, Artificial Sequence
  Description of Artificial Sequence: Synthetic oligonucleotide
  Sense strand starting at position 2140 of SEQ ID NO: 1882111
cuuugagucgccuugugca

SEQ ID NO: 2096033 - RNA, 19 nt, Artificial Sequence
  Description of Artificial Sequence: Synthetic oligonucleotide
  Antisense strand to SEQ ID NO: 2096032
ugcacaaggcgacucaaag

SEQ ID NO: 2096034 - RNA, 19 nt, Artificial Sequence
  Description of Artificial Sequence: Synthetic oligonucleotide
  Sense strand starting at position 2142 of SEQ ID NO: 1882111
uugagucgccuugugcaua

SEQ ID NO: 2096035 - RNA, 19 nt, Artificial Sequence
  Description of Artificial Sequence: Synthetic oligonucleotide
  Antisense strand to SEQ ID NO: 2096034
uaugcacaaggcgacucaa

SEQ ID NO: 2096036 - RNA, 19 nt, Artificial Sequence
  Description of Artificial Sequence: Synthetic oligonucleotide
  Sense strand starting at position 2179 of SEQ ID NO: 1882111
ggccuaagugcgaguaugu

SEQ ID NO: 2096037 - RNA, 19 nt, Artificial Sequence
  Description of Artificial Sequence: Synthetic oligonucleotide
  Antisense strand to SEQ ID NO: 2096036
acauacucgcacuuaggcc

SEQ ID NO: 2096038 - RNA, 19 nt, Artificial Sequence
  Description of Artificial Sequence: Synthetic oligonucleotide
  Sense strand starting at position 2334 of SEQ ID NO: 1882111
aggagaucaccaugggcuu

SEQ ID NO: 2096039 - RNA, 19 nt, Artificial Sequence
  Description of Artificial Sequence: Synthetic oligonucleotide
  Antisense strand to SEQ ID NO: 2096038
aagcccauggugaucuccu

SEQ ID NO: 2096040 - RNA, 19 nt, Artificial Sequence
  Description of Artificial Sequence: Synthetic oligonucleotide
  Sense strand starting at position 2406 of SEQ ID NO: 1882111
agcuguaucgucgcugaga

SEQ ID NO: 2096041 - RNA, 19 nt, Artificial Sequence
  Description of Artificial Sequence: Synthetic oligonucleotide
  Antisense strand to SEQ ID NO: 2096040
ucucagcgacgauacagcu

SEQ ID NO: 2096042 - RNA, 19 nt, Artificial Sequence
  Description of Artificial Sequence: Synthetic oligonucleotide
  Sense strand starting at position 2421 of SEQ ID NO: 1882111
gagagaaucaugcagcguu

SEQ ID NO: 2096043 - RNA, 19 nt, Artificial Sequence
  Description of Artificial Sequence: Synthetic oligonucleotide
  Antisense strand to SEQ ID NO: 2096042
aacgcugcaugauucucuc

SEQ ID NO: 2096044 - RNA, 19 nt, Artificial Sequence
  Description of Artificial Sequence: Synthetic oligonucleotide
  Sense strand starting at position 2435 of SEQ ID NO: 1882111
gcguuugggcaagaagaga

SEQ ID NO: 2096045 - RNA, 19 nt, Artificial Sequence
  Description of Artificial Sequence: Synthetic oligonucleotide
  Antisense strand to SEQ ID NO: 2096044
ucucuucuugcccaaacgc

SEQ ID NO: 2096046 - RNA, 19 nt, Artificial Sequence
  Description of Artificial Sequence: Synthetic oligonucleotide
  Sense strand starting at position 2457 of SEQ ID NO: 1882111
ugggaauccuccuuguggu

SEQ ID NO: 2096047 - RNA, 19 nt, Artificial Sequence
  Description of Artificial Sequence: Synthetic oligonucleotide
  Antisense strand to SEQ ID NO: 2096046
accacaaggaggauuccca

SEQ ID NO: 2096048 - RNA, 19 nt, Artificial Sequence
  Description of Artificial Sequence: Synthetic oligonucleotide
  Sense strand starting at position 2458 of SEQ ID NO: 1882111
gggaauccuccuuguggua

SEQ ID NO: 2096049 - RNA, 19 nt, Artificial Sequence
  Description of Artificial Sequence: Synthetic oligonucleotide
  Antisense strand to SEQ ID NO: 2096048
uaccacaaggaggauuccc

SEQ ID NO: 2096050 - RNA, 19 nt, Artificial Sequence
  Description of Artificial Sequence: Synthetic oligonucleotide
  Sense strand starting at position 2657 of SEQ ID NO: 1882111
ggcuuucugccuugaagaa

SEQ ID NO: 2096051 - RNA, 19 nt, Artificial Sequence
  Description of Artificial Sequence: Synthetic oligonucleotide
  Antisense strand to SEQ ID NO: 2096050
uucuucaaggcagaaagcc

SEQ ID NO: 2096052 - RNA, 19 nt, Artificial Sequence
  Description of Artificial Sequence: Synthetic oligonucleotide
  Sense strand starting at position 2658 of SEQ ID NO: 1882111
gcuuucugccuugaagaac

SEQ ID NO: 2096053 - RNA, 19 nt, Artificial Sequence
  Description of Artificial Sequence: Synthetic oligonucleotide
  Antisense strand to SEQ ID NO: 2096052
guucuucaaggcagaaagc

SEQ ID NO: 2096054 - RNA, 19 nt, Artificial Sequence
  Description of Artificial Sequence: Synthetic oligonucleotide
  Sense strand starting at position 2736 of SEQ ID NO: 1882111
uucuguccacaucaugauu

SEQ ID NO: 2096055 - RNA, 19 nt, Artificial Sequence
  Description of Artificial Sequence: Synthetic oligonucleotide
  Antisense strand to SEQ ID NO: 2096054
aaucaugauguggacagaa

SEQ ID NO: 2096056 - RNA, 19 nt, Artificial Sequence
  Description of Artificial Sequence: Synthetic oligonucleotide
  Sense strand starting at position 2747 of SEQ ID NO: 1882111
ucaugauucccaggccucu

SEQ ID NO: 2096057 - RNA, 19 nt, Artificial Sequence
  Description of Artificial Sequence: Synthetic oligonucleotide
  Antisense strand to SEQ ID NO: 2096056
agaggccugggaaucauga

SEQ ID NO: 2096058 - RNA, 19 nt, Artificial Sequence
  Description of Artificial Sequence: Synthetic oligonucleotide
  Sense strand starting at position 2811 of SEQ ID NO: 1882111
uuguaagaugcauaaggca

SEQ ID NO: 2096059 - RNA, 19 nt, Artificial Sequence
  Description of Artificial Sequence: Synthetic oligonucleotide
  Antisense strand to SEQ ID NO: 2096058
ugccuuaugcaucuuacaa

SEQ ID NO: 2096060 - RNA, 19 nt, Artificial Sequence
  Description of Artificial Sequence: Synthetic oligonucleotide
  Sense strand starting at position 2934 of SEQ ID NO: 1882111
uaaagaacauuuggaguuu

SEQ ID NO: 2096061 - RNA, 19 nt, Artificial Sequence
  Description of Artificial Sequence: Synthetic oligonucleotide
  Antisense strand to SEQ ID NO: 2096060
aaacuccaaauguucuuua

SEQ ID NO: 2096062 - RNA, 19 nt, Artificial Sequence
  Description of Artificial Sequence: Synthetic oligonucleotide
  Sense strand starting at position 3173 of SEQ ID NO: 1882111
ccaaauuaacugcgagguu

SEQ ID NO: 2096063 - RNA, 19 nt, Artificial Sequence
  Description of Artificial Sequence: Synthetic oligonucleotide
  Antisense strand to SEQ ID NO: 2096062
aaccucgcaguuaauuugg

SEQ ID NO: 2096064 - RNA, 19 nt, Artificial Sequence
  Description of Artificial Sequence: Synthetic oligonucleotide
  Sense strand starting at position 3176 of SEQ ID NO: 1882111
aauuaacugcgagguuaac

SEQ ID NO: 2096065 - RNA, 19 nt, Artificial Sequence
  Description of Artificial Sequence: Synthetic oligonucleotide
  Antisense strand to SEQ ID NO: 2096064
guuaaccucgcaguuaauu

SEQ ID NO: 2096066 - RNA, 19 nt, Artificial Sequence
  Description of Artificial Sequence: Synthetic oligonucleotide
  Sense strand starting at position 3502 of SEQ ID NO: 1882111
gaggaaucagguuggcuca

SEQ ID NO: 2096067 - RNA, 19 nt, Artificial Sequence
  Description of Artificial Sequence: Synthetic oligonucleotide
  Antisense strand to SEQ ID NO: 2096066
ugagccaaccugauuccuc

SEQ ID NO: 2096068 - RNA, 19 nt, Artificial Sequence
  Description of Artificial Sequence: Synthetic oligonucleotide
  Sense strand starting at position 3592 of SEQ ID NO: 1882111
ugggucaagaggugauaua

SEQ ID NO: 2096069 - RNA, 19 nt, Artificial Sequence
  Description of Artificial Sequence: Synthetic oligonucleotide
  Antisense strand to SEQ ID NO: 2096068
uauaucaccucuugaccca

SEQ ID NO: 2096070 - RNA, 19 nt, Artificial Sequence
  Description of Artificial Sequence: Synthetic oligonucleotide
  Sense strand starting at position 3601 of SEQ ID NO: 1882111
aggugauauaguuggaggu

SEQ ID NO: 2096071 - RNA, 19 nt, Artificial Sequence
  Description of Artificial Sequence: Synthetic oligonucleotide
  Antisense strand to SEQ ID NO: 2096070
accuccaacuauaucaccu

SEQ ID NO: 2096072 - RNA, 19 nt, Artificial Sequence
  Description of Artificial Sequence: Synthetic oligonucleotide
  Sense strand starting at position 3605 of SEQ ID NO: 1882111
gauauaguuggaggucaga

SEQ ID NO: 2096073 - RNA, 19 nt, Artificial Sequence
  Description of Artificial Sequence: Synthetic oligonucleotide
  Antisense strand to SEQ ID NO: 2096072
ucugaccuccaacuauauc

SEQ ID NO: 2096074 - RNA, 19 nt, Artificial Sequence
  Description of Artificial Sequence: Synthetic oligonucleotide
  Sense strand starting at position 3783 of SEQ ID NO: 1882111
guuggaguccaagagggua

SEQ ID NO: 2096075 - RNA, 19 nt, Artificial Sequence
  Description of Artificial Sequence: Synthetic oligonucleotide
  Antisense strand to SEQ ID NO: 2096074
uacccucuuggacuccaac

SEQ ID NO: 2096076 - RNA, 19 nt, Artificial Sequence
  Description of Artificial Sequence: Synthetic oligonucleotide
  Sense strand starting at position 3843 of SEQ ID NO: 1882111
gguguuucucaacaggguu

SEQ ID NO: 2096077 - RNA, 19 nt, Artificial Sequence
  Description of Artificial Sequence: Synthetic oligonucleotide
  Antisense strand to SEQ ID NO: 2096076
aacccuguugagaaacacc

SEQ ID NO: 2096078 - RNA, 19 nt, Artificial Sequence
  Description of Artificial Sequence: Synthetic oligonucleotide
  Sense strand starting at position 3866 of SEQ ID NO: 1882111
ccgggauucuuguugagau

SEQ ID NO: 2096079 - RNA, 19 nt, Artificial Sequence
  Description of Artificial Sequence: Synthetic oligonucleotide
  Antisense strand to SEQ ID NO: 2096078
aucucaacaagaaucccgg

SEQ ID NO: 2096080 - RNA, 19 nt, Artificial Sequence
  Description of Artificial Sequence: Synthetic oligonucleotide
  Sense strand starting at position 3956 of SEQ ID NO: 1882111
ccagguguccugcaaucau

SEQ ID NO: 2096081 - RNA, 19 nt, Artificial Sequence
  Description of Artificial Sequence: Synthetic oligonucleotide
  Antisense strand to SEQ ID NO: 2096080
augauugcaggacaccugg

SEQ ID NO: 2096082 - RNA, 19 nt, Artificial Sequence
  Description of Artificial Sequence: Synthetic oligonucleotide
  Sense strand starting at position 3974 of SEQ ID NO: 1882111
uugugcuaaccagaagcau

SEQ ID NO: 2096083 - RNA, 19 nt, Artificial Sequence
  Description of Artificial Sequence: Synthetic oligonucleotide
  Antisense strand to SEQ ID NO: 2096082
augcuucugguuagcacaa

SEQ ID NO: 2096084 - RNA, 19 nt, Artificial Sequence
  Description of Artificial Sequence: Synthetic oligonucleotide
  Sense strand starting at position 6 of SEQ ID NO: 1882112
ggauaaaguuaacauuaac

SEQ ID NO: 2096085 - RNA, 19 nt, Artificial Sequence
  Description of Artificial Sequence: Synthetic oligonucleotide
  Antisense strand to SEQ ID NO: 2096084
guuaauguuaacuuuaucc

SEQ ID NO: 2096086 - RNA, 19 nt, Artificial Sequence
  Description of Artificial Sequence: Synthetic oligonucleotide
  Sense strand starting at position 1459 of SEQ ID NO: 1882112
ccagcaagauugguagacu

SEQ ID NO: 2096087 - RNA, 19 nt, Artificial Sequence
  Description of Artificial Sequence: Synthetic oligonucleotide
  Antisense strand to SEQ ID NO: 2096086
agucuaccaaucuugcugg

SEQ ID NO: 2096088 - RNA, 19 nt, Artificial Sequence
  Description of Artificial Sequence: Synthetic oligonucleotide
  Sense strand starting at position 1462 of SEQ ID NO: 1882112
gcaagauugguagacucuu

SEQ ID NO: 2096089 - RNA, 19 nt, Artificial Sequence
  Description of Artificial Sequence: Synthetic oligonucleotide
  Antisense strand to SEQ ID NO: 2096088
aagagucuaccaaucuugc

SEQ ID NO: 2096090 - RNA, 19 nt, Artificial Sequence
  Description of Artificial Sequence: Synthetic oligonucleotide
  Sense strand starting at position 1657 of SEQ ID NO: 1882112
guaauugagccauggucuu

SEQ ID NO: 2096091 - RNA, 19 nt, Artificial Sequence
  Description of Artificial Sequence: Synthetic oligonucleotide
  Antisense strand to SEQ ID NO: 2096090
aagaccauggcucaauuac

SEQ ID NO: 2096092 - RNA, 19 nt, Artificial Sequence
  Description of Artificial Sequence: Synthetic oligonucleotide
  Sense strand starting at position 1663 of SEQ ID NO: 1882112
gagccauggucuuauuuga

SEQ ID NO: 2096093 - RNA, 19 nt, Artificial Sequence
  Description of Artificial Sequence: Synthetic oligonucleotide
  Antisense strand to SEQ ID NO: 2096092
ucaaauaagaccauggcuc

SEQ ID NO: 2096094 - RNA, 19 nt, Artificial Sequence
  Description of Artificial Sequence: Synthetic oligonucleotide
  Sense strand starting at position 1706 of SEQ ID NO: 1882112
ugcuuaaacucagaguucu

SEQ ID NO: 2096095 - RNA, 19 nt, Artificial Sequence
  Description of Artificial Sequence: Synthetic oligonucleotide
  Antisense strand to SEQ ID NO: 2096094
agaacucugaguuuaagca

SEQ ID NO: 2096096 - RNA, 19 nt, Artificial Sequence
  Description of Artificial Sequence: Synthetic oligonucleotide
  Sense strand starting at position 1716 of SEQ ID NO: 1882112
cagaguucuguuuaauggu

SEQ ID NO: 2096097 - RNA, 19 nt, Artificial Sequence
  Description of Artificial Sequence: Synthetic oligonucleotide
  Antisense strand to SEQ ID NO: 2096096
accauuaaacagaacucug

SEQ ID NO: 2096098 - RNA, 19 nt, Artificial Sequence
  Description of Artificial Sequence: Synthetic oligonucleotide
  Sense strand starting at position 2185 of SEQ ID NO: 1882112
ugucaucucuaguugccua

SEQ ID NO: 2096099 - RNA, 19 nt, Artificial Sequence
  Description of Artificial Sequence: Synthetic oligonucleotide
  Antisense strand to SEQ ID NO: 2096098
uaggcaacuagagaugaca

SEQ ID NO: 2096100 - RNA, 19 nt, Artificial Sequence
  Description of Artificial Sequence: Synthetic oligonucleotide
  Sense strand starting at position 2382 of SEQ ID NO: 1882112
guacaacucugggcaaguu

SEQ ID NO: 2096101 - RNA, 19 nt, Artificial Sequence
  Description of Artificial Sequence: Synthetic oligonucleotide
  Antisense strand to SEQ ID NO: 2096100
aacuugcccagaguuguac

SEQ ID NO: 2096102 - RNA, 19 nt, Artificial Sequence
  Description of Artificial Sequence: Synthetic oligonucleotide
  Sense strand starting at position 2429 of SEQ ID NO: 1882112
caucaaugauguuugagua

SEQ ID NO: 2096103 - RNA, 19 nt, Artificial Sequence
  Description of Artificial Sequence: Synthetic oligonucleotide
  Antisense strand to SEQ ID NO: 2096102
uacucaaacaucauugaug

SEQ ID NO: 2096104 - RNA, 19 nt, Artificial Sequence
  Description of Artificial Sequence: Synthetic oligonucleotide
  Sense strand starting at position 2430 of SEQ ID NO: 1882112
aucaaugauguuugaguau

SEQ ID NO: 2096105 - RNA, 19 nt, Artificial Sequence
  Description of Artificial Sequence: Synthetic oligonucleotide
  Antisense strand to SEQ ID NO: 2096104
auacucaaacaucauugau

SEQ ID NO: 2096106 - RNA, 19 nt, Artificial Sequence
  Description of Artificial Sequence: Synthetic oligonucleotide
  Sense strand starting at position 2523 of SEQ ID NO: 1882112
cuagcaaugcauuaugagu

SEQ ID NO: 2096107 - RNA, 19 nt, Artificial Sequence
  Description of Artificial Sequence: Synthetic oligonucleotide
  Antisense strand to SEQ ID NO: 2096106
acucauaaugcauugcuag

SEQ ID NO: 2096108 - RNA, 19 nt, Artificial Sequence
  Description of Artificial Sequence: Synthetic oligonucleotide
  Sense strand starting at position 2528 of SEQ ID NO: 1882112
aaugcauuaugaguguuaa

SEQ ID NO: 2096109 - RNA, 19 nt, Artificial Sequence
  Description of Artificial Sequence: Synthetic oligonucleotide
  Antisense strand to SEQ ID NO: 2096108
uuaacacucauaaugcauu

SEQ ID NO: 2096110 - RNA, 19 nt, Artificial Sequence
  Description of Artificial Sequence: Synthetic oligonucleotide
  Sense strand starting at position 2529 of SEQ ID NO: 1882112
augcauuaugaguguuaac

SEQ ID NO: 2096111 - RNA, 19 nt, Artificial Sequence
  Description of Artificial Sequence: Synthetic oligonucleotide
  Antisense strand to SEQ ID NO: 2096110
guuaacacucauaaugcau

SEQ ID NO: 2096112 - RNA, 19 nt, Artificial Sequence
  Description of Artificial Sequence: Synthetic oligonucleotide
  Sense strand starting at position 2603 of SEQ ID NO: 1882112
aucagugaaucgcuaaauu

SEQ ID NO: 2096113 - RNA, 19 nt, Artificial Sequence
  Description of Artificial Sequence: Synthetic oligonucleotide
  Antisense strand to SEQ ID NO: 2096112
aauuuagcgauucacugau

SEQ ID NO: 2096114 - RNA, 19 nt, Artificial Sequence
  Description of Artificial Sequence: Synthetic oligonucleotide
  Sense strand starting at position 2810 of SEQ ID NO: 1882112
uuuagaauacuucgucuuu

SEQ ID NO: 2096115 - RNA, 19 nt, Artificial Sequence
  Description of Artificial Sequence: Synthetic oligonucleotide
  Antisense strand to SEQ ID NO: 2096114
aaagacgaaguauucuaaa

SEQ ID NO: 2096116 - RNA, 19 nt, Artificial Sequence
  Description of Artificial Sequence: Synthetic oligonucleotide
  Sense strand starting at position 2811 of SEQ ID NO: 1882112
uuagaauacuucgucuuuc

SEQ ID NO: 2096117 - RNA, 19 nt, Artificial Sequence
  Description of Artificial Sequence: Synthetic oligonucleotide
  Antisense strand to SEQ ID NO: 2096116
gaaagacgaaguauucuaa

SEQ ID NO: 2096118 - RNA, 19 nt, Artificial Sequence
  Description of Artificial Sequence: Synthetic oligonucleotide
  Sense strand starting at position 2822 of SEQ ID NO: 1882112
cgucuuucagaaugugugu

SEQ ID NO: 2096119 - RNA, 19 nt, Artificial Sequence
  Description of Artificial Sequence: Synthetic oligonucleotide
  Antisense strand to SEQ ID NO: 2096118
acacacauucugaaagacg

SEQ ID NO: 2096120 - RNA, 19 nt, Artificial Sequence
  Description of Artificial Sequence: Synthetic oligonucleotide
  Sense strand starting at position 3059 of SEQ ID NO: 1882112
aaguaauaauguguagcuu

SEQ ID NO: 2096121 - RNA, 19 nt, Artificial Sequence
  Description of Artificial Sequence: Synthetic oligonucleotide
  Antisense strand to SEQ ID NO: 2096120
aagcuacacauuauuacuu

SEQ ID NO: 2096122 - RNA, 19 nt, Artificial Sequence
  Description of Artificial Sequence: Synthetic oligonucleotide
  Sense strand starting at position 3060 of SEQ ID NO: 1882112
aguaauaauguguagcuuu

SEQ ID NO: 2096123 - RNA, 19 nt, Artificial Sequence
  Description of Artificial Sequence: Synthetic oligonucleotide
  Antisense strand to SEQ ID NO: 2096122
aaagcuacacauuauuacu

SEQ ID NO: 2096124 - RNA, 19 nt, Artificial Sequence
  Description of Artificial Sequence: Synthetic oligonucleotide
  Sense strand starting at position 3227 of SEQ ID NO: 1882112
guaagcuacccuuauggau

SEQ ID NO: 2096125 - RNA, 19 nt, Artificial Sequence
  Description of Artificial Sequence: Synthetic oligonucleotide
  Antisense strand to SEQ ID NO: 2096124
auccauaaggguagcuuac

SEQ ID NO: 2096126 - RNA, 19 nt, Artificial Sequence
  Description of Artificial Sequence: Synthetic oligonucleotide
  Sense strand starting at position 3241 of SEQ ID NO: 1882112
uggauaccauaguuuaaua

SEQ ID NO: 2096127 - RNA, 19 nt, Artificial Sequence
  Description of Artificial Sequence: Synthetic oligonucleotide
  Antisense strand to SEQ ID NO: 2096126
uauuaaacuaugguaucca

SEQ ID NO: 2096128 - RNA, 19 nt, Artificial Sequence
  Description of Artificial Sequence: Synthetic oligonucleotide
  Sense strand starting at position 3246 of SEQ ID NO: 1882112
accauaguuuaauaaggaa

SEQ ID NO: 2096129 - RNA, 19 nt, Artificial Sequence
  Description of Artificial Sequence: Synthetic oligonucleotide
  Antisense strand to SEQ ID NO: 2096128
uuccuuauuaaacuauggu

SEQ ID NO: 2096130 - RNA, 19 nt, Artificial Sequence
  Description of Artificial Sequence: Synthetic oligonucleotide
  Sense strand starting at position 3503 of SEQ ID NO: 1882112
cgguguagucuguguagca

SEQ ID NO: 2096131 - RNA, 19 nt, Artificial Sequence
  Description of Artificial Sequence: Synthetic oligonucleotide
  Antisense strand to SEQ ID NO: 2096130
ugcuacacagacuacaccg

SEQ ID NO: 2096132 - RNA, 19 nt, Artificial Sequence
  Description of Artificial Sequence: Synthetic oligonucleotide
  Sense strand starting at position 3668 of SEQ ID NO: 1882112
ggaagaacuuagucaugua

SEQ ID NO: 2096133 - RNA, 19 nt, Artificial Sequence
  Description of Artificial Sequence: Synthetic oligonucleotide
  Antisense strand to SEQ ID NO: 2096132
uacaugacuaaguucuucc

SEQ ID NO: 2096134 - RNA, 19 nt, Artificial Sequence
  Description of Artificial Sequence: Synthetic oligonucleotide
  Sense strand starting at position 3671 of SEQ ID NO: 1882112
agaacuuagucauguaaug

SEQ ID NO: 2096135 - RNA, 19 nt, Artificial Sequence
  Description of Artificial Sequence: Synthetic oligonucleotide
  Antisense strand to SEQ ID NO: 2096134
cauuacaugacuaaguucu

SEQ ID NO: 2096136 - RNA, 19 nt, Artificial Sequence
  Description of Artificial Sequence: Synthetic oligonucleotide
  Sense strand starting at position 36 of SEQ ID NO: 1882113
cugcuuauuuccuggaagu

SEQ ID NO: 2096137 - RNA, 19 nt, Artificial Sequence
  Description of Artificial Sequence: Synthetic oligonucleotide
  Antisense strand to SEQ ID NO: 2096136
acuuccaggaaauaagcag

SEQ ID NO: 2096138 - RNA, 19 nt, Artificial Sequence
  Description of Artificial Sequence: Synthetic oligonucleotide
  Sense strand starting at position 1485 of SEQ ID NO: 1882113
gcauacaucugagugcuga

SEQ ID NO: 2096139 - RNA, 19 nt, Artificial Sequence
  Description of Artificial Sequence: Synthetic oligonucleotide
  Antisense strand to SEQ ID NO: 2096138
ucagcacucagauguaugc

SEQ ID NO: 2096140 - RNA, 19 nt, Artificial Sequence
  Description of Artificial Sequence: Synthetic oligonucleotide
  Sense strand starting at position 1486 of SEQ ID NO: 1882113
cauacaucugagugcugaa

SEQ ID NO: 2096141 - RNA, 19 nt, Artificial Sequence
  Description of Artificial Sequence: Synthetic oligonucleotide
  Antisense strand to SEQ ID NO: 2096140
uucagcacucagauguaug

SEQ ID NO: 2096142 - RNA, 19 nt, Artificial Sequence
  Description of Artificial Sequence: Synthetic oligonucleotide
  Sense strand starting at position 1489 of SEQ ID NO: 1882113
acaucugagugcugaagga

SEQ ID NO: 2096143 - RNA, 19 nt, Artificial Sequence
  Description of Artificial Sequence: Synthetic oligonucleotide
  Antisense strand to SEQ ID NO: 2096142
uccuucagcacucagaugu

SEQ ID NO: 2096144 - RNA, 19 nt, Artificial Sequence
  Description of Artificial Sequence: Synthetic oligonucleotide
  Sense strand starting at position 1657 of SEQ ID NO: 1882113
guaauugagccauggucgu

SEQ ID NO: 2096145 - RNA, 19 nt, Artificial Sequence
  Description of Artificial Sequence: Synthetic oligonucleotide
  Antisense strand to SEQ ID NO: 2096144
acgaccauggcucaauuac

SEQ ID NO: 2096146 - RNA, 19 nt, Artificial Sequence
  Description of Artificial Sequence: Synthetic oligonucleotide
  Sense strand starting at position 1663 of SEQ ID NO: 1882113
gagccauggucguauuuga

SEQ ID NO: 2096147 - RNA, 19 nt, Artificial Sequence
  Description of Artificial Sequence: Synthetic oligonucleotide
  Antisense strand to SEQ ID NO: 2096146
ucaaauacgaccauggcuc

SEQ ID NO: 2096148 - RNA, 19 nt, Artificial Sequence
  Description of Artificial Sequence: Synthetic oligonucleotide
  Sense strand starting at position 1706 of SEQ ID NO: 1882113
ugcuuaaacucagaguuau

SEQ ID NO: 2096149 - RNA, 19 nt, Artificial Sequence
  Description of Artificial Sequence: Synthetic oligonucleotide
  Antisense strand to SEQ ID NO: 2096148
auaacucugaguuuaagca

SEQ ID NO: 2096150 - RNA, 19 nt, Artificial Sequence
  Description of Artificial Sequence: Synthetic oligonucleotide
  Sense strand starting at position 1716 of SEQ ID NO: 1882113
cagaguuauguuuaauggu

SEQ ID NO: 2096151 - RNA, 19 nt, Artificial Sequence
  Description of Artificial Sequence: Synthetic oligonucleotide
  Antisense strand to SEQ ID NO: 2096150
accauuaaacauaacucug

SEQ ID NO: 2096152 - RNA, 19 nt, Artificial Sequence
  Description of Artificial Sequence: Synthetic oligonucleotide
  Sense strand starting at position 2237 of SEQ ID NO: 1882113
agaucaucuugugccuuaa

SEQ ID NO: 2096153 - RNA, 19 nt, Artificial Sequence
  Description of Artificial Sequence: Synthetic oligonucleotide
  Antisense strand to SEQ ID NO: 2096152
uuaaggcacaagaugaucu

SEQ ID NO: 2096154 - RNA, 19 nt, Artificial Sequence
  Description of Artificial Sequence: Synthetic oligonucleotide
  Sense strand starting at position 2383 of SEQ ID NO: 1882113
guacaacuuugggcaaguu

SEQ ID NO: 2096155 - RNA, 19 nt, Artificial Sequence
  Description of Artificial Sequence: Synthetic oligonucleotide
  Antisense strand to SEQ ID NO: 2096154
aacuugcccaaaguuguac

SEQ ID NO: 2096156 - RNA, 19 nt, Artificial Sequence
  Description of Artificial Sequence: Synthetic oligonucleotide
  Sense strand starting at position 2420 of SEQ ID NO: 1882113
uuacuuuccucaucgauga

SEQ ID NO: 2096157 - RNA, 19 nt, Artificial Sequence
  Description of Artificial Sequence: Synthetic oligonucleotide
  Antisense strand to SEQ ID NO: 2096156
ucaucgaugaggaaaguaa

SEQ ID NO: 2096158 - RNA, 19 nt, Artificial Sequence
  Description of Artificial Sequence: Synthetic oligonucleotide
  Sense strand starting at position 2424 of SEQ ID NO: 1882113
uuuccucaucgaugauguu

SEQ ID NO: 2096159 - RNA, 19 nt, Artificial Sequence
  Description of Artificial Sequence: Synthetic oligonucleotide
  Antisense strand to SEQ ID NO: 2096158
aacaucaucgaugaggaaa

SEQ ID NO: 2096160 - RNA, 19 nt, Artificial Sequence
  Description of Artificial Sequence: Synthetic oligonucleotide
  Sense strand starting at position 2425 of SEQ ID NO: 1882113
uuccucaucgaugauguuu

SEQ ID NO: 2096161 - RNA, 19 nt, Artificial Sequence
  Description of Artificial Sequence: Synthetic oligonucleotide
  Antisense strand to SEQ ID NO: 2096160
aaacaucaucgaugaggaa

SEQ ID NO: 2096162 - RNA, 19 nt, Artificial Sequence
  Description of Artificial Sequence: Synthetic oligonucleotide
  Sense strand starting at position 2427 of SEQ ID NO: 1882113
ccucaucgaugauguuuga

SEQ ID NO: 2096163 - RNA, 19 nt, Artificial Sequence
  Description of Artificial Sequence: Synthetic oligonucleotide
  Antisense strand to SEQ ID NO: 2096162
ucaaacaucaucgaugagg

SEQ ID NO: 2096164 - RNA, 19 nt, Artificial Sequence
  Description of Artificial Sequence: Synthetic oligonucleotide
  Sense strand starting at position 2430 of SEQ ID NO: 1882113
caucgaugauguuugagua

SEQ ID NO: 2096165 - RNA, 19 nt, Artificial Sequence
  Description of Artificial Sequence: Synthetic oligonucleotide
  Antisense strand to SEQ ID NO: 2096164
uacucaaacaucaucgaug

SEQ ID NO: 2096166 - RNA, 19 nt, Artificial Sequence
  Description of Artificial Sequence: Synthetic oligonucleotide
  Sense strand starting at position 2431 of SEQ ID NO: 1882113
aucgaugauguuugaguaa

SEQ ID NO: 2096167 - RNA, 19 nt, Artificial Sequence
  Description of Artificial Sequence: Synthetic oligonucleotide
  Antisense strand to SEQ ID NO: 2096166
uuacucaaacaucaucgau

SEQ ID NO: 2096168 - RNA, 19 nt, Artificial Sequence
  Description of Artificial Sequence: Synthetic oligonucleotide
  Sense strand starting at position 2434 of SEQ ID NO: 1882113
gaugauguuugaguaauaa

SEQ ID NO: 2096169 - RNA, 19 nt, Artificial Sequence
  Description of Artificial Sequence: Synthetic oligonucleotide
  Antisense strand to SEQ ID NO: 2096168
uuauuacucaaacaucauc

SEQ ID NO: 2096170 - RNA, 19 nt, Artificial Sequence
  Description of Artificial Sequence: Synthetic oligonucleotide
  Sense strand starting at position 2526 of SEQ ID NO: 1882113
uagcaagugcauuaugagu

SEQ ID NO: 2096171 - RNA, 19 nt, Artificial Sequence
  Description of Artificial Sequence: Synthetic oligonucleotide
  Antisense strand to SEQ ID NO: 2096170
acucauaaugcacuugcua

SEQ ID NO: 2096172 - RNA, 19 nt, Artificial Sequence
  Description of Artificial Sequence: Synthetic oligonucleotide
  Sense strand starting at position 2531 of SEQ ID NO: 1882113
agugcauuaugaguguuaa

SEQ ID NO: 2096173 - RNA, 19 nt, Artificial Sequence
  Description of Artificial Sequence: Synthetic oligonucleotide
  Antisense strand to SEQ ID NO: 2096172
uuaacacucauaaugcacu

SEQ ID NO: 2096174 - RNA, 19 nt, Artificial Sequence
  Description of Artificial Sequence: Synthetic oligonucleotide
  Sense strand starting at position 2532 of SEQ ID NO: 1882113
gugcauuaugaguguuaac

SEQ ID NO: 2096175 - RNA, 19 nt, Artificial Sequence
  Description of Artificial Sequence: Synthetic oligonucleotide
  Antisense strand to SEQ ID NO: 2096174
guuaacacucauaaugcac

SEQ ID NO: 2096176 - RNA, 19 nt, Artificial Sequence
  Description of Artificial Sequence: Synthetic oligonucleotide
  Sense strand starting at position 3063 of SEQ ID NO: 1882113
aguaauaauguguggcuuu

SEQ ID NO: 2096177 - RNA, 19 nt, Artificial Sequence
  Description of Artificial Sequence: Synthetic oligonucleotide
  Antisense strand to SEQ ID NO: 2096176
aaagccacacauuauuacu

SEQ ID NO: 2096178 - RNA, 19 nt, Artificial Sequence
  Description of Artificial Sequence: Synthetic oligonucleotide
  Sense strand starting at position 3230 of SEQ ID NO: 1882113
guaagcuacgcuuauggau

SEQ ID NO: 2096179 - RNA, 19 nt, Artificial Sequence
  Description of Artificial Sequence: Synthetic oligonucleotide
  Antisense strand to SEQ ID NO: 2096178
auccauaagcguagcuuac

SEQ ID NO: 2096180 - RNA, 19 nt, Artificial Sequence
  Description of Artificial Sequence: Synthetic oligonucleotide
  Sense strand starting at position 3236 of SEQ ID NO: 1882113
uacgcuuauggauaccaua

SEQ ID NO: 2096181 - RNA, 19 nt, Artificial Sequence
  Description of Artificial Sequence: Synthetic oligonucleotide
  Antisense strand to SEQ ID NO: 2096180
uaugguauccauaagcgua

SEQ ID NO: 2096182 - RNA, 19 nt, Artificial Sequence
  Description of Artificial Sequence: Synthetic oligonucleotide
  Sense strand starting at position 3239 of SEQ ID NO: 1882113
gcuuauggauaccauaguu

SEQ ID NO: 2096183 - RNA, 19 nt, Artificial Sequence
  Description of Artificial Sequence: Synthetic oligonucleotide
  Antisense strand to SEQ ID NO: 2096182
aacuaugguauccauaagc

SEQ ID NO: 2096184 - RNA, 19 nt, Artificial Sequence
  Description of Artificial Sequence: Synthetic oligonucleotide
  Sense strand starting at position 3244 of SEQ ID NO: 1882113
uggauaccauaguuuagua

SEQ ID NO: 2096185 - RNA, 19 nt, Artificial Sequence
  Description of Artificial Sequence: Synthetic oligonucleotide
  Antisense strand to SEQ ID NO: 2096184
uacuaaacuaugguaucca

SEQ ID NO: 2096186 - RNA, 19 nt, Artificial Sequence
  Description of Artificial Sequence: Synthetic oligonucleotide
  Sense strand starting at position 3248 of SEQ ID NO: 1882113
uaccauaguuuaguaagga

SEQ ID NO: 2096187 - RNA, 19 nt, Artificial Sequence
  Description of Artificial Sequence: Synthetic oligonucleotide
  Antisense strand to SEQ ID NO: 2096186
uccuuacuaaacuauggua

SEQ ID NO: 2096188 - RNA, 19 nt, Artificial Sequence
  Description of Artificial Sequence: Synthetic oligonucleotide
  Sense strand starting at position 3249 of SEQ ID NO: 1882113
accauaguuuaguaaggaa

SEQ ID NO: 2096189 - RNA, 19 nt, Artificial Sequence
  Description of Artificial Sequence: Synthetic oligonucleotide
  Antisense strand to SEQ ID NO: 2096188
uuccuuacuaaacuauggu

SEQ ID NO: 2096190 - RNA, 19 nt, Artificial Sequence
  Description of Artificial Sequence: Synthetic oligonucleotide
  Sense strand starting at position 3252 of SEQ ID NO: 1882113
auaguuuaguaaggaagca

SEQ ID NO: 2096191 - RNA, 19 nt, Artificial Sequence
  Description of Artificial Sequence: Synthetic oligonucleotide
  Antisense strand to SEQ ID NO: 2096190
ugcuuccuuacuaaacuau

SEQ ID NO: 2096192 - RNA, 19 nt, Artificial Sequence
  Description of Artificial Sequence: Synthetic oligonucleotide
  Sense strand starting at position 3506 of SEQ ID NO: 1882113
ugguguagucuguguagca

SEQ ID NO: 2096193 - RNA, 19 nt, Artificial Sequence
  Description of Artificial Sequence: Synthetic oligonucleotide
  Antisense strand to SEQ ID NO: 2096192
ugcuacacagacuacacca

SEQ ID NO: 2096194 - RNA, 19 nt, Artificial Sequence
  Description of Artificial Sequence: Synthetic oligonucleotide
  Sense strand starting at position 114 of SEQ ID NO: 1882114
gguuccguguuuguguuua

SEQ ID NO: 2096195 - RNA, 19 nt, Artificial Sequence
  Description of Artificial Sequence: Synthetic oligonucleotide
  Antisense strand to SEQ ID NO: 2096194
uaaacacaaacacggaacc

SEQ ID NO: 2096196 - RNA, 19 nt, Artificial Sequence
  Description of Artificial Sequence: Synthetic oligonucleotide
  Sense strand starting at position 124 of SEQ ID NO: 1882114
uuguguuuagccugugcaa

SEQ ID NO: 2096197 - RNA, 19 nt, Artificial Sequence
  Description of Artificial Sequence: Synthetic oligonucleotide
  Antisense strand to SEQ ID NO: 2096196
uugcacaggcuaaacacaa

SEQ ID NO: 2096198 - RNA, 19 nt, Artificial Sequence
  Description of Artificial Sequence: Synthetic oligonucleotide
  Sense strand starting at position 125 of SEQ ID NO: 1882114
uguguuuagccugugcaau

SEQ ID NO: 2096199 - RNA, 19 nt, Artificial Sequence
  Description of Artificial Sequence: Synthetic oligonucleotide
  Antisense strand to SEQ ID NO: 2096198
auugcacaggcuaaacaca

SEQ ID NO: 2096200 - RNA, 19 nt, Artificial Sequence
  Description of Artificial Sequence: Synthetic oligonucleotide
  Sense strand starting at position 126 of SEQ ID NO: 1882114
guguuuagccugugcaauu

SEQ ID NO: 2096201 - RNA, 19 nt, Artificial Sequence
  Description of Artificial Sequence: Synthetic oligonucleotide
  Antisense strand to SEQ ID NO: 2096200
aauugcacaggcuaaacac

SEQ ID NO: 2096202 - RNA, 19 nt, Artificial Sequence
  Description of Artificial Sequence: Synthetic oligonucleotide
  Sense strand starting at position 137 of SEQ ID NO: 1882114
gugcaauucucgucaacac

SEQ ID NO: 2096203 - RNA, 19 nt, Artificial Sequence
  Description of Artificial Sequence: Synthetic oligonucleotide
  Antisense strand to SEQ ID NO: 2096202
guguugacgagaauugcac

SEQ ID NO: 2096204 - RNA, 19 nt, Artificial Sequence
  Description of Artificial Sequence: Synthetic oligonucleotide
  Sense strand starting at position 138 of SEQ ID NO: 1882114
ugcaauucucgucaacaca

SEQ ID NO: 2096205 - RNA, 19 nt, Artificial Sequence
  Description of Artificial Sequence: Synthetic oligonucleotide
  Antisense strand to SEQ ID NO: 2096204
uguguugacgagaauugca

SEQ ID NO: 2096206 - RNA, 19 nt, Artificial Sequence
  Description of Artificial Sequence: Synthetic oligonucleotide
  Sense strand starting at position 212 of SEQ ID NO: 1882114
gugggaguguuguguucac

SEQ ID NO: 2096207 - RNA, 19 nt, Artificial Sequence
  Description of Artificial Sequence: Synthetic oligonucleotide
  Antisense strand to SEQ ID NO: 2096206
gugaacacaacacucccac

SEQ ID NO: 2096208 - RNA, 19 nt, Artificial Sequence
  Description of Artificial Sequence: Synthetic oligonucleotide
  Sense strand starting at position 248 of SEQ ID NO: 1882114
gcgauuaccgcaucuucuu

SEQ ID NO: 2096209 - RNA, 19 nt, Artificial Sequence
  Description of Artificial Sequence: Synthetic oligonucleotide
  Antisense strand to SEQ ID NO: 2096208
aagaagaugcgguaaucgc

SEQ ID NO: 2096210 - RNA, 19 nt, Artificial Sequence
  Description of Artificial Sequence: Synthetic oligonucleotide
  Sense strand starting at position 386 of SEQ ID NO: 1882114
guuguucagcgccuggaau

SEQ ID NO: 2096211 - RNA, 19 nt, Artificial Sequence
  Description of Artificial Sequence: Synthetic oligonucleotide
  Antisense strand to SEQ ID NO: 2096210
auuccaggcgcugaacaac

SEQ ID NO: 2096212 - RNA, 19 nt, Artificial Sequence
  Description of Artificial Sequence: Synthetic oligonucleotide
  Sense strand starting at position 667 of SEQ ID NO: 1882114
gggcuugcugcauagagga

SEQ ID NO: 2096213 - RNA, 19 nt, Artificial Sequence
  Description of Artificial Sequence: Synthetic oligonucleotide
  Antisense strand to SEQ ID NO: 2096212
uccucuaugcagcaagccc

SEQ ID NO: 2096214 - RNA, 19 nt, Artificial Sequence
  Description of Artificial Sequence: Synthetic oligonucleotide
  Sense strand starting at position 698 of SEQ ID NO: 1882114
gugcucagaguugguugaa

SEQ ID NO: 2096215 - RNA, 19 nt, Artificial Sequence
  Description of Artificial Sequence: Synthetic oligonucleotide
  Antisense strand to SEQ ID NO: 2096214
uucaaccaacucugagcac

SEQ ID NO: 2096216 - RNA, 19 nt, Artificial Sequence
  Description of Artificial Sequence: Synthetic oligonucleotide
  Sense strand starting at position 699 of SEQ ID NO: 1882114
ugcucagaguugguugaaa

SEQ ID NO: 2096217 - RNA, 19 nt, Artificial Sequence
  Description of Artificial Sequence: Synthetic oligonucleotide
  Antisense strand to SEQ ID NO: 2096216
uuucaaccaacucugagca

SEQ ID NO: 2096218 - RNA, 19 nt, Artificial Sequence
  Description of Artificial Sequence: Synthetic oligonucleotide
  Sense strand starting at position 701 of SEQ ID NO: 1882114
cucagaguugguugaaaug

SEQ ID NO: 2096219 - RNA, 19 nt, Artificial Sequence
  Description of Artificial Sequence: Synthetic oligonucleotide
  Antisense strand to SEQ ID NO: 2096218
cauuucaaccaacucugag

SEQ ID NO: 2096220 - RNA, 19 nt, Artificial Sequence
  Description of Artificial Sequence: Synthetic oligonucleotide
  Sense strand starting at position 710 of SEQ ID NO: 1882114
gguugaaauggcuacgaag

SEQ ID NO: 2096221 - RNA, 19 nt, Artificial Sequence
  Description of Artificial Sequence: Synthetic oligonucleotide
  Antisense strand to SEQ ID NO: 2096220
cuucguagccauuucaacc

SEQ ID NO: 2096222 - RNA, 19 nt, Artificial Sequence
  Description of Artificial Sequence: Synthetic oligonucleotide
  Sense strand starting at position 721 of SEQ ID NO: 1882114
cuacgaaguguggagaaua

SEQ ID NO: 2096223 - RNA, 19 nt, Artificial Sequence
  Description of Artificial Sequence: Synthetic oligonucleotide
  Antisense strand to SEQ ID NO: 2096222
uauucuccacacuucguag

SEQ ID NO: 2096224 - RNA, 19 nt, Artificial Sequence
  Description of Artificial Sequence: Synthetic oligonucleotide
  Sense strand starting at position 762 of SEQ ID NO: 1882114
cugcgcuugaucugaucca

SEQ ID NO: 2096225 - RNA, 19 nt, Artificial Sequence
  Description of Artificial Sequence: Synthetic oligonucleotide
  Antisense strand to SEQ ID NO: 2096224
uggaucagaucaagcgcag

SEQ ID NO: 2096226 - RNA, 19 nt, Artificial Sequence
  Description of Artificial Sequence: Synthetic oligonucleotide
  Sense strand starting at position 763 of SEQ ID NO: 1882114
ugcgcuugaucugauccaa

SEQ ID NO: 2096227 - RNA, 19 nt, Artificial Sequence
  Description of Artificial Sequence: Synthetic oligonucleotide
  Antisense strand to SEQ ID NO: 2096226
uuggaucagaucaagcgca

SEQ ID NO: 2096228 - RNA, 19 nt, Artificial Sequence
  Description of Artificial Sequence: Synthetic oligonucleotide
  Sense strand starting at position 886 of SEQ ID NO: 1882114
augggaaauuguggacuuu

SEQ ID NO: 2096229 - RNA, 19 nt, Artificial Sequence
  Description of Artificial Sequence: Synthetic oligonucleotide
  Antisense strand to SEQ ID NO: 2096228
aaaguccacaauuucccau

SEQ ID NO: 2096230 - RNA, 19 nt, Artificial Sequence
  Description of Artificial Sequence: Synthetic oligonucleotide
  Sense strand starting at position 924 of SEQ ID NO: 1882114
gggacucaaugugcaauau

SEQ ID NO: 2096231 - RNA, 19 nt, Artificial Sequence
  Description of Artificial Sequence: Synthetic oligonucleotide
  Antisense strand to SEQ ID NO: 2096230
auauugcacauugaguccc

SEQ ID NO: 2096232 - RNA, 19 nt, Artificial Sequence
  Description of Artificial Sequence: Synthetic oligonucleotide
  Sense strand starting at position 925 of SEQ ID NO: 1882114
ggacucaaugugcaauauu

SEQ ID NO: 2096233 - RNA, 19 nt, Artificial Sequence
  Description of Artificial Sequence: Synthetic oligonucleotide
  Antisense strand to SEQ ID NO: 2096232
aauauugcacauugagucc

SEQ ID NO: 2096234 - RNA, 19 nt, Artificial Sequence
  Description of Artificial Sequence: Synthetic oligonucleotide
  Sense strand starting at position 986 of SEQ ID NO: 1882114
cugucaacacuugaucuga

SEQ ID NO: 2096235 - RNA, 19 nt, Artificial Sequence
  Description of Artificial Sequence: Synthetic oligonucleotide
  Antisense strand to SEQ ID NO: 2096234
ucagaucaaguguugacag

SEQ ID NO: 2096236 - RNA, 19 nt, Artificial Sequence
  Description of Artificial Sequence: Synthetic oligonucleotide
  Sense strand starting at position 988 of SEQ ID NO: 1882114
gucaacacuugaucugaaa

SEQ ID NO: 2096237 - RNA, 19 nt, Artificial Sequence
  Description of Artificial Sequence: Synthetic oligonucleotide
  Antisense strand to SEQ ID NO: 2096236
uuucagaucaaguguugac

SEQ ID NO: 2096238 - RNA, 19 nt, Artificial Sequence
  Description of Artificial Sequence: Synthetic oligonucleotide
  Sense strand starting at position 991 of SEQ ID NO: 1882114
aacacuugaucugaaacgu

SEQ ID NO: 2096239 - RNA, 19 nt, Artificial Sequence
  Description of Artificial Sequence: Synthetic oligonucleotide
  Antisense strand to SEQ ID NO: 2096238
acguuucagaucaaguguu

SEQ ID NO: 2096240 - RNA, 19 nt, Artificial Sequence
  Description of Artificial Sequence: Synthetic oligonucleotide
  Sense strand starting at position 995 of SEQ ID NO: 1882114
cuugaucugaaacgugaau

SEQ ID NO: 2096241 - RNA, 19 nt, Artificial Sequence
  Description of Artificial Sequence: Synthetic oligonucleotide
  Antisense strand to SEQ ID NO: 2096240
auucacguuucagaucaag

SEQ ID NO: 2096242 - RNA, 19 nt, Artificial Sequence
  Description of Artificial Sequence: Synthetic oligonucleotide
  Sense strand starting at position 997 of SEQ ID NO: 1882114
ugaucugaaacgugaauag

SEQ ID NO: 2096243 - RNA, 19 nt, Artificial Sequence
  Description of Artificial Sequence: Synthetic oligonucleotide
  Antisense strand to SEQ ID NO: 2096242
cuauucacguuucagauca

SEQ ID NO: 2096244 - RNA, 19 nt, Artificial Sequence
  Description of Artificial Sequence: Synthetic oligonucleotide
  Sense strand starting at position 1001 of SEQ ID NO: 1882114
cugaaacgugaauaguuua

SEQ ID NO: 2096245 - RNA, 19 nt, Artificial Sequence
  Description of Artificial Sequence: Synthetic oligonucleotide
  Antisense strand to SEQ ID NO: 2096244
uaaacuauucacguuucag

SEQ ID NO: 2096246 - RNA, 19 nt, Artificial Sequence
  Description of Artificial Sequence: Synthetic oligonucleotide
  Sense strand starting at position 1038 of SEQ ID NO: 1882114
cugcgagucuagcuuuaga

SEQ ID NO: 2096247 - RNA, 19 nt, Artificial Sequence
  Description of Artificial Sequence: Synthetic oligonucleotide
  Antisense strand to SEQ ID NO: 2096246
ucuaaagcuagacucgcag

SEQ ID NO: 2096248 - RNA, 19 nt, Artificial Sequence
  Description of Artificial Sequence: Synthetic oligonucleotide
  Sense strand starting at position 1128 of SEQ ID NO: 1882114
ggacuugccgucugaggga

SEQ ID NO: 2096249 - RNA, 19 nt, Artificial Sequence
  Description of Artificial Sequence: Synthetic oligonucleotide
  Antisense strand to SEQ ID NO: 2096248
ucccucagacggcaagucc

SEQ ID NO: 2096250 - RNA, 19 nt, Artificial Sequence
  Description of Artificial Sequence: Synthetic oligonucleotide
  Sense strand starting at position 1133 of SEQ ID NO: 1882114
ugccgucugagggauggau

SEQ ID NO: 2096251 - RNA, 19 nt, Artificial Sequence
  Description of Artificial Sequence: Synthetic oligonucleotide
  Antisense strand to SEQ ID NO: 2096250
auccaucccucagacggca

SEQ ID NO: 2096252 - RNA, 19 nt, Artificial Sequence
  Description of Artificial Sequence: Synthetic oligonucleotide
  Sense strand starting at position 1462 of SEQ ID NO: 1882114
ggccgugauucuuggcaag

SEQ ID NO: 2096253 - RNA, 19 nt, Artificial Sequence
  Description of Artificial Sequence: Synthetic oligonucleotide
  Antisense strand to SEQ ID NO: 2096252
cuugccaagaaucacggcc

SEQ ID NO: 2096254 - RNA, 19 nt, Artificial Sequence
  Description of Artificial Sequence: Synthetic oligonucleotide
  Sense strand starting at position 1464 of SEQ ID NO: 1882114
ccgugauucuuggcaagcu

SEQ ID NO: 2096255 - RNA, 19 nt, Artificial Sequence
  Description of Artificial Sequence: Synthetic oligonucleotide
  Antisense strand to SEQ ID NO: 2096254
agcuugccaagaaucacgg

SEQ ID NO: 2096256 - RNA, 19 nt, Artificial Sequence
  Description of Artificial Sequence: Synthetic oligonucleotide
  Sense strand starting at position 1691 of SEQ ID NO: 1882114
ggaagacguuccugccacu

SEQ ID NO: 2096257 - RNA, 19 nt, Artificial Sequence
  Description of Artificial Sequence: Synthetic oligonucleotide
  Antisense strand to SEQ ID NO: 2096256
aguggcaggaacgucuucc

SEQ ID NO: 2096258 - RNA, 19 nt, Artificial Sequence
  Description of Artificial Sequence: Synthetic oligonucleotide
  Sense strand starting at position 1694 of SEQ ID NO: 1882114
agacguuccugccacuuua

SEQ ID NO: 2096259 - RNA, 19 nt, Artificial Sequence
  Description of Artificial Sequence: Synthetic oligonucleotide
  Antisense strand to SEQ ID NO: 2096258
uaaaguggcaggaacgucu

SEQ ID NO: 2096260 - RNA, 19 nt, Artificial Sequence
  Description of Artificial Sequence: Synthetic oligonucleotide
  Sense strand starting at position 2877 of SEQ ID NO: 1882114
ccuguaucccugugagagg

SEQ ID NO: 2096261 - RNA, 19 nt, Artificial Sequence
  Description of Artificial Sequence: Synthetic oligonucleotide
  Antisense strand to SEQ ID NO: 2096260
ccucucacagggauacagg

SEQ ID NO: 2096262 - RNA, 19 nt, Artificial Sequence
  Description of Artificial Sequence: Synthetic oligonucleotide
  Sense strand starting at position 467 of SEQ ID NO: 1882115
aucuccugucacugagaaa

SEQ ID NO: 2096263 - RNA, 19 nt, Artificial Sequence
  Description of Artificial Sequence: Synthetic oligonucleotide
  Antisense strand to SEQ ID NO: 2096262
uuucucagugacaggagau

SEQ ID NO: 2096264 - RNA, 19 nt, Artificial Sequence
  Description of Artificial Sequence: Synthetic oligonucleotide
  Sense strand starting at position 572 of SEQ ID NO: 1882115
ucaacaugaguaggacuau

SEQ ID NO: 2096265 - RNA, 19 nt, Artificial Sequence
  Description of Artificial Sequence: Synthetic oligonucleotide
  Antisense strand to SEQ ID NO: 2096264
auaguccuacucauguuga

SEQ ID NO: 2096266 - RNA, 19 nt, Artificial Sequence
  Description of Artificial Sequence: Synthetic oligonucleotide
  Sense strand starting at position 805 of SEQ ID NO: 1882115
gcgaaaucugcugcagcca

SEQ ID NO: 2096267 - RNA, 19 nt, Artificial Sequence
  Description of Artificial Sequence: Synthetic oligonucleotide
  Antisense strand to SEQ ID NO: 2096266
uggcugcagcagauuucgc

SEQ ID NO: 2096268 - RNA, 19 nt, Artificial Sequence
  Description of Artificial Sequence: Synthetic oligonucleotide
  Sense strand starting at position 806 of SEQ ID NO: 1882115
cgaaaucugcugcagccaa

SEQ ID NO: 2096269 - RNA, 19 nt, Artificial Sequence
  Description of Artificial Sequence: Synthetic oligonucleotide
  Antisense strand to SEQ ID NO: 2096268
uuggcugcagcagauuucg

SEQ ID NO: 2096270 - RNA, 19 nt, Artificial Sequence
  Description of Artificial Sequence: Synthetic oligonucleotide
  Sense strand starting at position 830 of SEQ ID NO: 1882115
gucuacugcuccuugagac

SEQ ID NO: 2096271 - RNA, 19 nt, Artificial Sequence
  Description of Artificial Sequence: Synthetic oligonucleotide
  Antisense strand to SEQ ID NO: 2096270
gucucaaggagcaguagac

SEQ ID NO: 2096272 - RNA, 19 nt, Artificial Sequence
  Description of Artificial Sequence: Synthetic oligonucleotide
  Sense strand starting at position 831 of SEQ ID NO: 1882115
ucuacugcuccuugagaca

SEQ ID NO: 2096273 - RNA, 19 nt, Artificial Sequence
  Description of Artificial Sequence: Synthetic oligonucleotide
  Antisense strand to SEQ ID NO: 2096272
ugucucaaggagcaguaga

SEQ ID NO: 2096274 - RNA, 19 nt, Artificial Sequence
  Description of Artificial Sequence: Synthetic oligonucleotide
  Sense strand starting at position 943 of SEQ ID NO: 1882115
ucuuuagaccuauacgcaa

SEQ ID NO: 2096275 - RNA, 19 nt, Artificial Sequence
  Description of Artificial Sequence: Synthetic oligonucleotide
  Antisense strand to SEQ ID NO: 2096274
uugcguauaggucuaaaga

SEQ ID NO: 2096276 - RNA, 19 nt, Artificial Sequence
  Description of Artificial Sequence: Synthetic oligonucleotide
  Sense strand starting at position 1058 of SEQ ID NO: 1882115
uuaaacugcuucucacgau

SEQ ID NO: 2096277 - RNA, 19 nt, Artificial Sequence
  Description of Artificial Sequence: Synthetic oligonucleotide
  Antisense strand to SEQ ID NO: 2096276
aucgugagaagcaguuuaa

SEQ ID NO: 2096278 - RNA, 19 nt, Artificial Sequence
  Description of Artificial Sequence: Synthetic oligonucleotide
  Sense strand starting at position 1062 of SEQ ID NO: 1882115
acugcuucucacgauaaau

SEQ ID NO: 2096279 - RNA, 19 nt, Artificial Sequence
  Description of Artificial Sequence: Synthetic oligonucleotide
  Antisense strand to SEQ ID NO: 2096278
auuuaucgugagaagcagu

SEQ ID NO: 2096280 - RNA, 19 nt, Artificial Sequence
  Description of Artificial Sequence: Synthetic oligonucleotide
  Sense strand starting at position 1064 of SEQ ID NO: 1882115
ugcuucucacgauaaauca

SEQ ID NO: 2096281 - RNA, 19 nt, Artificial Sequence
  Description of Artificial Sequence: Synthetic oligonucleotide
  Antisense strand to SEQ ID NO: 2096280
ugauuuaucgugagaagca

SEQ ID NO: 2096282 - RNA, 19 nt, Artificial Sequence
  Description of Artificial Sequence: Synthetic oligonucleotide
  Sense strand starting at position 1899 of SEQ ID NO: 1882115
uccagacucucgcuuuaag

SEQ ID NO: 2096283 - RNA, 19 nt, Artificial Sequence
  Description of Artificial Sequence: Synthetic oligonucleotide
  Antisense strand to SEQ ID NO: 2096282
cuuaaagcgagagucugga

SEQ ID NO: 2096284 - RNA, 19 nt, Artificial Sequence
  Description of Artificial Sequence: Synthetic oligonucleotide
  Sense strand starting at position 1902 of SEQ ID NO: 1882115
agacucucgcuuuaaggau

SEQ ID NO: 2096285 - RNA, 19 nt, Artificial Sequence
  Description of Artificial Sequence: Synthetic oligonucleotide
  Antisense strand to SEQ ID NO: 2096284
auccuuaaagcgagagucu

SEQ ID NO: 2096286 - RNA, 19 nt, Artificial Sequence
  Description of Artificial Sequence: Synthetic oligonucleotide
  Sense strand starting at position 2329 of SEQ ID NO: 1882115
gucagauuguuaccacuga

SEQ ID NO: 2096287 - RNA, 19 nt, Artificial Sequence
  Description of Artificial Sequence: Synthetic oligonucleotide
  Antisense strand to SEQ ID NO: 2096286
ucagugguaacaaucugac

SEQ ID NO: 2096288 - RNA, 19 nt, Artificial Sequence
  Description of Artificial Sequence: Synthetic oligonucleotide
  Sense strand starting at position 2333 of SEQ ID NO: 1882115
gauuguuaccacugaguuu

SEQ ID NO: 2096289 - RNA, 19 nt, Artificial Sequence
  Description of Artificial Sequence: Synthetic oligonucleotide
  Antisense strand to SEQ ID NO: 2096288
aaacucagugguaacaauc

SEQ ID NO: 2096290 - RNA, 19 nt, Artificial Sequence
  Description of Artificial Sequence: Synthetic oligonucleotide
  Sense strand starting at position 2466 of SEQ ID NO: 1882115
gcccaaauguuagcaagaa

SEQ ID NO: 2096291 - RNA, 19 nt, Artificial Sequence
  Description of Artificial Sequence: Synthetic oligonucleotide
  Antisense strand to SEQ ID NO: 2096290
uucuugcuaacauuugggc

SEQ ID NO: 2096292 - RNA, 19 nt, Artificial Sequence
  Description of Artificial Sequence: Synthetic oligonucleotide
  Sense strand starting at position 2508 of SEQ ID NO: 1882115
auaccugaucaccguugaa

SEQ ID NO: 2096293 - RNA, 19 nt, Artificial Sequence
  Description of Artificial Sequence: Synthetic oligonucleotide
  Antisense strand to SEQ ID NO: 2096292
uucaacggugaucagguau

SEQ ID NO: 2096294 - RNA, 19 nt, Artificial Sequence
  Description of Artificial Sequence: Synthetic oligonucleotide
  Sense strand starting at position 2511 of SEQ ID NO: 1882115
ccugaucaccguugaauuc

SEQ ID NO: 2096295 - RNA, 19 nt, Artificial Sequence
  Description of Artificial Sequence: Synthetic oligonucleotide
  Antisense strand to SEQ ID NO: 2096294
gaauucaacggugaucagg

SEQ ID NO: 2096296 - RNA, 19 nt, Artificial Sequence
  Description of Artificial Sequence: Synthetic oligonucleotide
  Sense strand starting at position 2518 of SEQ ID NO: 1882115
accguugaauucuugauau

SEQ ID NO: 2096297 - RNA, 19 nt, Artificial Sequence
  Description of Artificial Sequence: Synthetic oligonucleotide
  Antisense strand to SEQ ID NO: 2096296
auaucaagaauucaacggu

SEQ ID NO: 2096298 - RNA, 19 nt, Artificial Sequence
  Description of Artificial Sequence: Synthetic oligonucleotide
  Sense strand starting at position 2529 of SEQ ID NO: 1882115
cuugauauuuaauaucgga

SEQ ID NO: 2096299 - RNA, 19 nt, Artificial Sequence
  Description of Artificial Sequence: Synthetic oligonucleotide
  Antisense strand to SEQ ID NO: 2096298
uccgauauuaaauaucaag

SEQ ID NO: 2096300 - RNA, 19 nt, Artificial Sequence
  Description of Artificial Sequence: Synthetic oligonucleotide
  Sense strand starting at position 2544 of SEQ ID NO: 1882115
cggauuagauuccuuauau

SEQ ID NO: 2096301 - RNA, 19 nt, Artificial Sequence
  Description of Artificial Sequence: Synthetic oligonucleotide
  Antisense strand to SEQ ID NO: 2096300
auauaaggaaucuaauccg

SEQ ID NO: 2096302 - RNA, 19 nt, Artificial Sequence
  Description of Artificial Sequence: Synthetic oligonucleotide
  Sense strand starting at position 2545 of SEQ ID NO: 1882115
ggauuagauuccuuauauu

SEQ ID NO: 2096303 - RNA, 19 nt, Artificial Sequence
  Description of Artificial Sequence: Synthetic oligonucleotide
  Antisense strand to SEQ ID NO: 2096302
aauauaaggaaucuaaucc

SEQ ID NO: 2096304 - RNA, 19 nt, Artificial Sequence
  Description of Artificial Sequence: Synthetic oligonucleotide
  Sense strand starting at position 2559 of SEQ ID NO: 1882115
auauuacaccuuuguugua

SEQ ID NO: 2096305 - RNA, 19 nt, Artificial Sequence
  Description of Artificial Sequence: Synthetic oligonucleotide
  Antisense strand to SEQ ID NO: 2096304
uacaacaaagguguaauau

SEQ ID NO: 2096306 - RNA, 19 nt, Artificial Sequence
  Description of Artificial Sequence: Synthetic oligonucleotide
  Sense strand starting at position 2751 of SEQ ID NO: 1882115
agucaugacccuuauugua

SEQ ID NO: 2096307 - RNA, 19 nt, Artificial Sequence
  Description of Artificial Sequence: Synthetic oligonucleotide
  Antisense strand to SEQ ID NO: 2096306
uacaauaagggucaugacu

SEQ ID NO: 2096308 - RNA, 19 nt, Artificial Sequence
  Description of Artificial Sequence: Synthetic oligonucleotide
  Sense strand starting at position 2877 of SEQ ID NO: 1882115
uuaguaaucucaguuuccu

SEQ ID NO: 2096309 - RNA, 19 nt, Artificial Sequence
  Description of Artificial Sequence: Synthetic oligonucleotide
  Antisense strand to SEQ ID NO: 2096308
aggaaacugagauuacuaa

SEQ ID NO: 2096310 - RNA, 19 nt, Artificial Sequence
  Description of Artificial Sequence: Synthetic oligonucleotide
  Sense strand starting at position 2976 of SEQ ID NO: 1882115
aucugaggcccuuguaacu

SEQ ID NO: 2096311 - RNA, 19 nt, Artificial Sequence
  Description of Artificial Sequence: Synthetic oligonucleotide
  Antisense strand to SEQ ID NO: 2096310
aguuacaagggccucagau

SEQ ID NO: 2096312 - RNA, 19 nt, Artificial Sequence
  Description of Artificial Sequence: Synthetic oligonucleotide
  Sense strand starting at position 2986 of SEQ ID NO: 1882115
cuuguaacucuggaaguaa

SEQ ID NO: 2096313 - RNA, 19 nt, Artificial Sequence
  Description of Artificial Sequence: Synthetic oligonucleotide
  Antisense strand to SEQ ID NO: 2096312
uuacuuccagaguuacaag

SEQ ID NO: 2096314 - RNA, 19 nt, Artificial Sequence
  Description of Artificial Sequence: Synthetic oligonucleotide
  Sense strand starting at position 3041 of SEQ ID NO: 1882115
agguguaaauugcuuaaag

SEQ ID NO: 2096315 - RNA, 19 nt, Artificial Sequence
  Description of Artificial Sequence: Synthetic oligonucleotide
  Antisense strand to SEQ ID NO: 2096314
cuuuaagcaauuuacaccu

SEQ ID NO: 2096316 - RNA, 19 nt, Artificial Sequence
  Description of Artificial Sequence: Synthetic oligonucleotide
  Sense strand starting at position 3043 of SEQ ID NO: 1882115
guguaaauugcuuaaagcu

SEQ ID NO: 2096317 - RNA, 19 nt, Artificial Sequence
  Description of Artificial Sequence: Synthetic oligonucleotide
  Antisense strand to SEQ ID NO: 2096316
agcuuuaagcaauuuacac

SEQ ID NO: 2096318 - RNA, 19 nt, Artificial Sequence
  Description of Artificial Sequence: Synthetic oligonucleotide
  Sense strand starting at position 3124 of SEQ ID NO: 1882115
auaugauaguggcuuuauc

SEQ ID NO: 2096319 - RNA, 19 nt, Artificial Sequence
  Description of Artificial Sequence: Synthetic oligonucleotide
  Antisense strand to SEQ ID NO: 2096318
gauaaagccacuaucauau

SEQ ID NO: 2096320 - RNA, 19 nt, Artificial Sequence
  Description of Artificial Sequence: Synthetic oligonucleotide
  Sense strand starting at position 3131 of SEQ ID NO: 1882115
aguggcuuuaucuagaguu

SEQ ID NO: 2096321 - RNA, 19 nt, Artificial Sequence
  Description of Artificial Sequence: Synthetic oligonucleotide
  Antisense strand to SEQ ID NO: 2096320
aacucuagauaaagccacu

SEQ ID NO: 2096322 - RNA, 19 nt, Artificial Sequence
  Description of Artificial Sequence: Synthetic oligonucleotide
  Sense strand starting at position 3133 of SEQ ID NO: 1882115
uggcuuuaucuagaguuaa

SEQ ID NO: 2096323 - RNA, 19 nt, Artificial Sequence
  Description of Artificial Sequence: Synthetic oligonucleotide
  Antisense strand to SEQ ID NO: 2096322
uuaacucuagauaaagcca

SEQ ID NO: 2096324 - RNA, 19 nt, Artificial Sequence
  Description of Artificial Sequence: Synthetic oligonucleotide
  Sense strand starting at position 3146 of SEQ ID NO: 1882115
aguuaaaccgucuacagau

SEQ ID NO: 2096325 - RNA, 19 nt, Artificial Sequence
  Description of Artificial Sequence: Synthetic oligonucleotide
  Antisense strand to SEQ ID NO: 2096324
aucuguagacgguuuaacu

SEQ ID NO: 2096326 - RNA, 19 nt, Artificial Sequence
  Description of Artificial Sequence: Synthetic oligonucleotide
  Sense strand starting at position 3161 of SEQ ID NO: 1882115
agauguuaaugauugguau

SEQ ID NO: 2096327 - RNA, 19 nt, Artificial Sequence
  Description of Artificial Sequence: Synthetic oligonucleotide
  Antisense strand to SEQ ID NO: 2096326
auaccaaucauuaacaucu

SEQ ID NO: 2096328 - RNA, 19 nt, Artificial Sequence
  Description of Artificial Sequence: Synthetic oligonucleotide
  Sense strand starting at position 3162 of SEQ ID NO: 1882115
gauguuaaugauugguaua

SEQ ID NO: 2096329 - RNA, 19 nt, Artificial Sequence
  Description of Artificial Sequence: Synthetic oligonucleotide
  Antisense strand to SEQ ID NO: 2096328
uauaccaaucauuaacauc

SEQ ID NO: 2096330 - RNA, 19 nt, Artificial Sequence
  Description of Artificial Sequence: Synthetic oligonucleotide
  Sense strand starting at position 3234 of SEQ ID NO: 1882115
cgacuuauccugcaaagca

SEQ ID NO: 2096331 - RNA, 19 nt, Artificial Sequence
  Description of Artificial Sequence: Synthetic oligonucleotide
  Antisense strand to SEQ ID NO: 2096330
ugcuuugcaggauaagucg

SEQ ID NO: 2096332 - RNA, 19 nt, Artificial Sequence
  Description of Artificial Sequence: Synthetic oligonucleotide
  Sense strand starting at position 3417 of SEQ ID NO: 1882115
auuuacaccugagaaagau

SEQ ID NO: 2096333 - RNA, 19 nt, Artificial Sequence
  Description of Artificial Sequence: Synthetic oligonucleotide
  Antisense strand to SEQ ID NO: 2096332
aucuuucucagguguaaau

SEQ ID NO: 2096334 - RNA, 19 nt, Artificial Sequence
  Description of Artificial Sequence: Synthetic oligonucleotide
  Sense strand starting at position 3460 of SEQ ID NO: 1882115
ucuuuacuuccagaguuac

SEQ ID NO: 2096335 - RNA, 19 nt, Artificial Sequence
  Description of Artificial Sequence: Synthetic oligonucleotide
  Antisense strand to SEQ ID NO: 2096334
guaacucuggaaguaaaga

SEQ ID NO: 2096336 - RNA, 19 nt, Artificial Sequence
  Description of Artificial Sequence: Synthetic oligonucleotide
  Sense strand starting at position 3485 of SEQ ID NO: 1882115
cucagauugcaaggucaca

SEQ ID NO: 2096337 - RNA, 19 nt, Artificial Sequence
  Description of Artificial Sequence: Synthetic oligonucleotide
  Antisense strand to SEQ ID NO: 2096336
ugugaccuugcaaucugag

SEQ ID NO: 2096338 - RNA, 19 nt, Artificial Sequence
  Description of Artificial Sequence: Synthetic oligonucleotide
  Sense strand starting at position 3517 of SEQ ID NO: 1882115
acuugugaugucugaguau

SEQ ID NO: 2096339 - RNA, 19 nt, Artificial Sequence
  Description of Artificial Sequence: Synthetic oligonucleotide
  Antisense strand to SEQ ID NO: 2096338
auacucagacaucacaagu

SEQ ID NO: 2096340 - RNA, 19 nt, Artificial Sequence
  Description of Artificial Sequence: Synthetic oligonucleotide
  Sense strand starting at position 3520 of SEQ ID NO: 1882115
ugugaugucugaguauuag

SEQ ID NO: 2096341 - RNA, 19 nt, Artificial Sequence
  Description of Artificial Sequence: Synthetic oligonucleotide
  Antisense strand to SEQ ID NO: 2096340
cuaauacucagacaucaca

SEQ ID NO: 2096342 - RNA, 19 nt, Artificial Sequence
  Description of Artificial Sequence: Synthetic oligonucleotide
  Sense strand starting at position 2490 of SEQ ID NO: 1882116
uugccuaacucuugacgau

SEQ ID NO: 2096343 - RNA, 19 nt, Artificial Sequence
  Description of Artificial Sequence: Synthetic oligonucleotide
  Antisense strand to SEQ ID NO: 2096342
aucgucaagaguuaggcaa

SEQ ID NO: 2096344 - RNA, 19 nt, Artificial Sequence
  Description of Artificial Sequence: Synthetic oligonucleotide
  Sense strand starting at position 2491 of SEQ ID NO: 1882116
ugccuaacucuugacgauu

SEQ ID NO: 2096345 - RNA, 19 nt, Artificial Sequence
  Description of Artificial Sequence: Synthetic oligonucleotide
  Antisense strand to SEQ ID NO: 2096344
aaucgucaagaguuaggca

SEQ ID NO: 2096346 - RNA, 19 nt, Artificial Sequence
  Description of Artificial Sequence: Synthetic oligonucleotide
  Sense strand starting at position 2494 of SEQ ID NO: 1882116
cuaacucuugacgauuacu

SEQ ID NO: 2096347 - RNA, 19 nt, Artificial Sequence
  Description of Artificial Sequence: Synthetic oligonucleotide
  Antisense strand to SEQ ID NO: 2096346
aguaaucgucaagaguuag

SEQ ID NO: 2096348 - RNA, 19 nt, Artificial Sequence
  Description of Artificial Sequence: Synthetic oligonucleotide
  Sense strand starting at position 2497 of SEQ ID NO: 1882116
acucuugacgauuacugua

SEQ ID NO: 2096349 - RNA, 19 nt, Artificial Sequence
  Description of Artificial Sequence: Synthetic oligonucleotide
  Antisense strand to SEQ ID NO: 2096348
uacaguaaucgucaagagu

SEQ ID NO: 2096350 - RNA, 19 nt, Artificial Sequence
  Description of Artificial Sequence: Synthetic oligonucleotide
  Sense strand starting at position 2502 of SEQ ID NO: 1882116
ugacgauuacuguagcuau

SEQ ID NO: 2096351 - RNA, 19 nt, Artificial Sequence
  Description of Artificial Sequence: Synthetic oligonucleotide
  Antisense strand to SEQ ID NO: 2096350
auagcuacaguaaucguca

SEQ ID NO: 2096352 - RNA, 19 nt, Artificial Sequence
  Description of Artificial Sequence: Synthetic oligonucleotide
  Sense strand starting at position 2505 of SEQ ID NO: 1882116
cgauuacuguagcuauuaa

SEQ ID NO: 2096353 - RNA, 19 nt, Artificial Sequence
  Description of Artificial Sequence: Synthetic oligonucleotide
  Antisense strand to SEQ ID NO: 2096352
uuaauagcuacaguaaucg

SEQ ID NO: 2096354 - RNA, 19 nt, Artificial Sequence
  Description of Artificial Sequence: Synthetic oligonucleotide
  Sense strand starting at position 2583 of SEQ ID NO: 1882116
uuacaaguauuagggcauu

SEQ ID NO: 2096355 - RNA, 19 nt, Artificial Sequence
  Description of Artificial Sequence: Synthetic oligonucleotide
  Antisense strand to SEQ ID NO: 2096354
aaugcccuaauacuuguaa

SEQ ID NO: 2096356 - RNA, 19 nt, Artificial Sequence
  Description of Artificial Sequence: Synthetic oligonucleotide
  Sense strand starting at position 2693 of SEQ ID NO: 1882116
cgaagaauucccgaugugg

SEQ ID NO: 2096357 - RNA, 19 nt, Artificial Sequence
  Description of Artificial Sequence: Synthetic oligonucleotide
  Antisense strand to SEQ ID NO: 2096356
ccacaucgggaauucuucg

SEQ ID NO: 2096358 - RNA, 19 nt, Artificial Sequence
  Description of Artificial Sequence: Synthetic oligonucleotide
  Sense strand starting at position 2695 of SEQ ID NO: 1882116
aagaauucccgauguggca

SEQ ID NO: 2096359 - RNA, 19 nt, Artificial Sequence
  Description of Artificial Sequence: Synthetic oligonucleotide
  Antisense strand to SEQ ID NO: 2096358
ugccacaucgggaauucuu

SEQ ID NO: 2096360 - RNA, 19 nt, Artificial Sequence
  Description of Artificial Sequence: Synthetic oligonucleotide
  Sense strand starting at position 2969 of SEQ ID NO: 1882116
gacugagucucugucucaa

SEQ ID NO: 2096361 - RNA, 19 nt, Artificial Sequence
  Description of Artificial Sequence: Synthetic oligonucleotide
  Antisense strand to SEQ ID NO: 2096360
uugagacagagacucaguc

SEQ ID NO: 2096362 - RNA, 19 nt, Artificial Sequence
  Description of Artificial Sequence: Synthetic oligonucleotide
  Sense strand starting at position 3001 of SEQ ID NO: 1882116
aagaauuccguuuagcauu

SEQ ID NO: 2096363 - RNA, 19 nt, Artificial Sequence
  Description of Artificial Sequence: Synthetic oligonucleotide
  Antisense strand to SEQ ID NO: 2096362
aaugcuaaacggaauucuu

SEQ ID NO: 2096364 - RNA, 19 nt, Artificial Sequence
  Description of Artificial Sequence: Synthetic oligonucleotide
  Sense strand starting at position 3027 of SEQ ID NO: 1882116
ggauggguuugguguugaa

SEQ ID NO: 2096365 - RNA, 19 nt, Artificial Sequence
  Description of Artificial Sequence: Synthetic oligonucleotide
  Antisense strand to SEQ ID NO: 2096364
uucaacaccaaacccaucc

SEQ ID NO: 2096366 - RNA, 19 nt, Artificial Sequence
  Description of Artificial Sequence: Synthetic oligonucleotide
  Sense strand starting at position 3030 of SEQ ID NO: 1882116
uggguuugguguugaauuc

SEQ ID NO: 2096367 - RNA, 19 nt, Artificial Sequence
  Description of Artificial Sequence: Synthetic oligonucleotide
  Antisense strand to SEQ ID NO: 2096366
gaauucaacaccaaaccca

SEQ ID NO: 2096368 - RNA, 19 nt, Artificial Sequence
  Description of Artificial Sequence: Synthetic oligonucleotide
  Sense strand starting at position 3031 of SEQ ID NO: 1882116
ggguuugguguugaauucu

SEQ ID NO: 2096369 - RNA, 19 nt, Artificial Sequence
  Description of Artificial Sequence: Synthetic oligonucleotide
  Antisense strand to SEQ ID NO: 2096368
agaauucaacaccaaaccc

SEQ ID NO: 2096370 - RNA, 19 nt, Artificial Sequence
  Description of Artificial Sequence: Synthetic oligonucleotide
  Sense strand starting at position 3058 of SEQ ID NO: 1882116
uuguucgucugagaaagac

SEQ ID NO: 2096371 - RNA, 19 nt, Artificial Sequence
  Description of Artificial Sequence: Synthetic oligonucleotide
  Antisense strand to SEQ ID NO: 2096370
gucuuucucagacgaacaa

SEQ ID NO: 2096372 - RNA, 19 nt, Artificial Sequence
  Description of Artificial Sequence: Synthetic oligonucleotide
  Sense strand starting at position 3062 of SEQ ID NO: 1882116
ucgucugagaaagacuuua

SEQ ID NO: 2096373 - RNA, 19 nt, Artificial Sequence
  Description of Artificial Sequence: Synthetic oligonucleotide
  Antisense strand to SEQ ID NO: 2096372
uaaagucuuucucagacga

SEQ ID NO: 2096374 - RNA, 19 nt, Artificial Sequence
  Description of Artificial Sequence: Synthetic oligonucleotide
  Sense strand starting at position 3076 of SEQ ID NO: 1882116
cuuuaucccuccuguuuga

SEQ ID NO: 2096375 - RNA, 19 nt, Artificial Sequence
  Description of Artificial Sequence: Synthetic oligonucleotide
  Antisense strand to SEQ ID NO: 2096374
ucaaacaggagggauaaag

SEQ ID NO: 2096376 - RNA, 19 nt, Artificial Sequence
  Description of Artificial Sequence: Synthetic oligonucleotide
  Sense strand starting at position 3080 of SEQ ID NO: 1882116
aucccuccuguuugaauga

SEQ ID NO: 2096377 - RNA, 19 nt, Artificial Sequence
  Description of Artificial Sequence: Synthetic oligonucleotide
  Antisense strand to SEQ ID NO: 2096376
ucauucaaacaggagggau

SEQ ID NO: 2096378 - RNA, 19 nt, Artificial Sequence
  Description of Artificial Sequence: Synthetic oligonucleotide
  Sense strand starting at position 3087 of SEQ ID NO: 1882116
cuguuugaaugauagcuuu

SEQ ID NO: 2096379 - RNA, 19 nt, Artificial Sequence
  Description of Artificial Sequence: Synthetic oligonucleotide
  Antisense strand to SEQ ID NO: 2096378
aaagcuaucauucaaacag

SEQ ID NO: 2096380 - RNA, 19 nt, Artificial Sequence
  Description of Artificial Sequence: Synthetic oligonucleotide
  Sense strand starting at position 3108 of SEQ ID NO: 1882116
uggauacaguagucuuuga

SEQ ID NO: 2096381 - RNA, 19 nt, Artificial Sequence
  Description of Artificial Sequence: Synthetic oligonucleotide
  Antisense strand to SEQ ID NO: 2096380
ucaaagacuacuguaucca

SEQ ID NO: 2096382 - RNA, 19 nt, Artificial Sequence
  Description of Artificial Sequence: Synthetic oligonucleotide
  Sense strand starting at position 3113 of SEQ ID NO: 1882116
acaguagucuuugauggca

SEQ ID NO: 2096383 - RNA, 19 nt, Artificial Sequence
  Description of Artificial Sequence: Synthetic oligonucleotide
  Antisense strand to SEQ ID NO: 2096382
ugccaucaaagacuacugu

SEQ ID NO: 2096384 - RNA, 19 nt, Artificial Sequence
  Description of Artificial Sequence: Synthetic oligonucleotide
  Sense strand starting at position 3183 of SEQ ID NO: 1882116
ugugguuucuguugagaag

SEQ ID NO: 2096385 - RNA, 19 nt, Artificial Sequence
  Description of Artificial Sequence: Synthetic oligonucleotide
  Antisense strand to SEQ ID NO: 2096384
cuucucaacagaaaccaca

SEQ ID NO: 2096386 - RNA, 19 nt, Artificial Sequence
  Description of Artificial Sequence: Synthetic oligonucleotide
  Sense strand starting at position 3184 of SEQ ID NO: 1882116
gugguuucuguugagaagu

SEQ ID NO: 2096387 - RNA, 19 nt, Artificial Sequence
  Description of Artificial Sequence: Synthetic oligonucleotide
  Antisense strand to SEQ ID NO: 2096386
acuucucaacagaaaccac

SEQ ID NO: 2096388 - RNA, 19 nt, Artificial Sequence
  Description of Artificial Sequence: Synthetic oligonucleotide
  Sense strand starting at position 3208 of SEQ ID NO: 1882116
gccagaugaauuggagcuu

SEQ ID NO: 2096389 - RNA, 19 nt, Artificial Sequence
  Description of Artificial Sequence: Synthetic oligonucleotide
  Antisense strand to SEQ ID NO: 2096388
aagcuccaauucaucuggc

SEQ ID NO: 2096390 - RNA, 19 nt, Artificial Sequence
  Description of Artificial Sequence: Synthetic oligonucleotide
  Sense strand starting at position 3217 of SEQ ID NO: 1882116
auuggagcuucuuuauaug

SEQ ID NO: 2096391 - RNA, 19 nt, Artificial Sequence
  Description of Artificial Sequence: Synthetic oligonucleotide
  Antisense strand to SEQ ID NO: 2096390
cauauaaagaagcuccaau

SEQ ID NO: 2096392 - RNA, 19 nt, Artificial Sequence
  Description of Artificial Sequence: Synthetic oligonucleotide
  Sense strand starting at position 3220 of SEQ ID NO: 1882116
ggagcuucuuuauauguca

SEQ ID NO: 2096393 - RNA, 19 nt, Artificial Sequence
  Description of Artificial Sequence: Synthetic oligonucleotide
  Antisense strand to SEQ ID NO: 2096392
ugacauauaaagaagcucc

SEQ ID NO: 2096394 - RNA, 19 nt, Artificial Sequence
  Description of Artificial Sequence: Synthetic oligonucleotide
  Sense strand starting at position 3223 of SEQ ID NO: 1882116
gcuucuuuauaugucauuu

SEQ ID NO: 2096395 - RNA, 19 nt, Artificial Sequence
  Description of Artificial Sequence: Synthetic oligonucleotide
  Antisense strand to SEQ ID NO: 2096394
aaaugacauauaaagaagc

SEQ ID NO: 2096396 - RNA, 19 nt, Artificial Sequence
  Description of Artificial Sequence: Synthetic oligonucleotide
  Sense strand starting at position 3265 of SEQ ID NO: 1882116
aggaguaucucuuuguccu

SEQ ID NO: 2096397 - RNA, 19 nt, Artificial Sequence
  Description of Artificial Sequence: Synthetic oligonucleotide
  Antisense strand to SEQ ID NO: 2096396
aggacaaagagauacuccu

SEQ ID NO: 2096398 - RNA, 19 nt, Artificial Sequence
  Description of Artificial Sequence: Synthetic oligonucleotide
  Sense strand starting at position 3266 of SEQ ID NO: 1882116
ggaguaucucuuuguccuu

SEQ ID NO: 2096399 - RNA, 19 nt, Artificial Sequence
  Description of Artificial Sequence: Synthetic oligonucleotide
  Antisense strand to SEQ ID NO: 2096398
aaggacaaagagauacucc

SEQ ID NO: 2096400 - RNA, 19 nt, Artificial Sequence
  Description of Artificial Sequence: Synthetic oligonucleotide
  Sense strand starting at position 3273 of SEQ ID NO: 1882116
cucuuuguccuugacuuga

SEQ ID NO: 2096401 - RNA, 19 nt, Artificial Sequence
  Description of Artificial Sequence: Synthetic oligonucleotide
  Antisense strand to SEQ ID NO: 2096400
ucaagucaaggacaaagag

SEQ ID NO: 2096402 - RNA, 19 nt, Artificial Sequence
  Description of Artificial Sequence: Synthetic oligonucleotide
  Sense strand starting at position 3275 of SEQ ID NO: 1882116
cuuuguccuugacuugaga

SEQ ID NO: 2096403 - RNA, 19 nt, Artificial Sequence
  Description of Artificial Sequence: Synthetic oligonucleotide
  Antisense strand to SEQ ID NO: 2096402
ucucaagucaaggacaaag

SEQ ID NO: 2096404 - RNA, 19 nt, Artificial Sequence
  Description of Artificial Sequence: Synthetic oligonucleotide
  Sense strand starting at position 3278 of SEQ ID NO: 1882116
uguccuugacuugagaauu

SEQ ID NO: 2096405 - RNA, 19 nt, Artificial Sequence
  Description of Artificial Sequence: Synthetic oligonucleotide
  Antisense strand to SEQ ID NO: 2096404
aauucucaagucaaggaca

SEQ ID NO: 2096406 - RNA, 19 nt, Artificial Sequence
  Description of Artificial Sequence: Synthetic oligonucleotide
  Sense strand starting at position 3318 of SEQ ID NO: 1882116
uacucuuauuuggguugaa

SEQ ID NO: 2096407 - RNA, 19 nt, Artificial Sequence
  Description of Artificial Sequence: Synthetic oligonucleotide
  Antisense strand to SEQ ID NO: 2096406
uucaacccaaauaagagua

SEQ ID NO: 2096408 - RNA, 19 nt, Artificial Sequence
  Description of Artificial Sequence: Synthetic oligonucleotide
  Sense strand starting at position 3676 of SEQ ID NO: 1882116
ucaagagauuccuguggcu

SEQ ID NO: 2096409 - RNA, 19 nt, Artificial Sequence
  Description of Artificial Sequence: Synthetic oligonucleotide
  Antisense strand to SEQ ID NO: 2096408
agccacaggaaucucuuga

SEQ ID NO: 2096410 - RNA, 19 nt, Artificial Sequence
  Description of Artificial Sequence: Synthetic oligonucleotide
  Sense strand starting at position 3678 of SEQ ID NO: 1882116
aagagauuccuguggcuua

SEQ ID NO: 2096411 - RNA, 19 nt, Artificial Sequence
  Description of Artificial Sequence: Synthetic oligonucleotide
  Antisense strand to SEQ ID NO: 2096410
uaagccacaggaaucucuu

SEQ ID NO: 2096412 - RNA, 19 nt, Artificial Sequence
  Description of Artificial Sequence: Synthetic oligonucleotide
  Sense strand starting at position 3679 of SEQ ID NO: 1882116
agagauuccuguggcuuag

SEQ ID NO: 2096413 - RNA, 19 nt, Artificial Sequence
  Description of Artificial Sequence: Synthetic oligonucleotide
  Antisense strand to SEQ ID NO: 2096412
cuaagccacaggaaucucu

SEQ ID NO: 2096414 - RNA, 19 nt, Artificial Sequence
  Description of Artificial Sequence: Synthetic oligonucleotide
  Sense strand starting at position 3956 of SEQ ID NO: 1882116
aguggagugaucuggacuu

SEQ ID NO: 2096415 - RNA, 19 nt, Artificial Sequence
  Description of Artificial Sequence: Synthetic oligonucleotide
  Antisense strand to SEQ ID NO: 2096414
aaguccagaucacuccacu

SEQ ID NO: 2096416 - RNA, 19 nt, Artificial Sequence
  Description of Artificial Sequence: Synthetic oligonucleotide
  Sense strand starting at position 3962 of SEQ ID NO: 1882116
gugaucuggacuuauugcu

SEQ ID NO: 2096417 - RNA, 19 nt, Artificial Sequence
  Description of Artificial Sequence: Synthetic oligonucleotide
  Antisense strand to SEQ ID NO: 2096416
agcaauaaguccagaucac

SEQ ID NO: 2096418 - RNA, 19 nt, Artificial Sequence
  Description of Artificial Sequence: Synthetic oligonucleotide
  Sense strand starting at position 3 of SEQ ID NO: 1882117
uggacauucuuucugucua

SEQ ID NO: 2096419 - RNA, 19 nt, Artificial Sequence
  Description of Artificial Sequence: Synthetic oligonucleotide
  Antisense strand to SEQ ID NO: 2096418
uagacagaaagaaugucca

SEQ ID NO: 2096420 - RNA, 19 nt, Artificial Sequence
  Description of Artificial Sequence: Synthetic oligonucleotide
  Sense strand starting at position 19 of SEQ ID NO: 1882117
cuagaacuuccagggaugu

SEQ ID NO: 2096421 - RNA, 19 nt, Artificial Sequence
  Description of Artificial Sequence: Synthetic oligonucleotide
  Antisense strand to SEQ ID NO: 2096420
acaucccuggaaguucuag

SEQ ID NO: 2096422 - RNA, 19 nt, Artificial Sequence
  Description of Artificial Sequence: Synthetic oligonucleotide
  Sense strand starting at position 20 of SEQ ID NO: 1882117
uagaacuuccagggauguu

SEQ ID NO: 2096423 - RNA, 19 nt, Artificial Sequence
  Description of Artificial Sequence: Synthetic oligonucleotide
  Antisense strand to SEQ ID NO: 2096422
aacaucccuggaaguucua

SEQ ID NO: 2096424 - RNA, 19 nt, Artificial Sequence
  Description of Artificial Sequence: Synthetic oligonucleotide
  Sense strand starting at position 159 of SEQ ID NO: 1882117
acagaaauguuagcaucca

SEQ ID NO: 2096425 - RNA, 19 nt, Artificial Sequence
  Description of Artificial Sequence: Synthetic oligonucleotide
  Antisense strand to SEQ ID NO: 2096424
uggaugcuaacauuucugu

SEQ ID NO: 2096426 - RNA, 19 nt, Artificial Sequence
  Description of Artificial Sequence: Synthetic oligonucleotide
  Sense strand starting at position 167 of SEQ ID NO: 1882117
guuagcauccaagaauaau

SEQ ID NO: 2096427 - RNA, 19 nt, Artificial Sequence
  Description of Artificial Sequence: Synthetic oligonucleotide
  Antisense strand to SEQ ID NO: 2096426
auuauucuuggaugcuaac

SEQ ID NO: 2096428 - RNA, 19 nt, Artificial Sequence
  Description of Artificial Sequence: Synthetic oligonucleotide
  Sense strand starting at position 248 of SEQ ID NO: 1882117
uggauauuacaaugugaua

SEQ ID NO: 2096429 - RNA, 19 nt, Artificial Sequence
  Description of Artificial Sequence: Synthetic oligonucleotide
  Antisense strand to SEQ ID NO: 2096428
uaucacauuguaauaucca

SEQ ID NO: 2096430 - RNA, 19 nt, Artificial Sequence
  Description of Artificial Sequence: Synthetic oligonucleotide
  Sense strand starting at position 277 of SEQ ID NO: 1882117
uuguaugaguggcuaagga

SEQ ID NO: 2096431 - RNA, 19 nt, Artificial Sequence
  Description of Artificial Sequence: Synthetic oligonucleotide
  Antisense strand to SEQ ID NO: 2096430
uccuuagccacucauacaa

SEQ ID NO: 2096432 - RNA, 19 nt, Artificial Sequence
  Description of Artificial Sequence: Synthetic oligonucleotide
  Sense strand starting at position 698 of SEQ ID NO: 1882117
gagguucgcccgucugcaa

SEQ ID NO: 2096433 - RNA, 19 nt, Artificial Sequence
  Description of Artificial Sequence: Synthetic oligonucleotide
  Antisense strand to SEQ ID NO: 2096432
uugcagacgggcgaaccuc

SEQ ID NO: 2096434 - RNA, 19 nt, Artificial Sequence
  Description of Artificial Sequence: Synthetic oligonucleotide
  Sense strand starting at position 1211 of SEQ ID NO: 1882117
cguuaccuucggucgcaua

SEQ ID NO: 2096435 - RNA, 19 nt, Artificial Sequence
  Description of Artificial Sequence: Synthetic oligonucleotide
  Antisense strand to SEQ ID NO: 2096434
uaugcgaccgaagguaacg

SEQ ID NO: 2096436 - RNA, 19 nt, Artificial Sequence
  Description of Artificial Sequence: Synthetic oligonucleotide
  Sense strand starting at position 1323 of SEQ ID NO: 1882117
gcagacaaguauccaugau

SEQ ID NO: 2096437 - RNA, 19 nt, Artificial Sequence
  Description of Artificial Sequence: Synthetic oligonucleotide
  Antisense strand to SEQ ID NO: 2096436
aucauggauacuugucugc

SEQ ID NO: 2096438 - RNA, 19 nt, Artificial Sequence
  Description of Artificial Sequence: Synthetic oligonucleotide
  Sense strand starting at position 2266 of SEQ ID NO: 1882117
acgccugaacuugagaaca

SEQ ID NO: 2096439 - RNA, 19 nt, Artificial Sequence
  Description of Artificial Sequence: Synthetic oligonucleotide
  Antisense strand to SEQ ID NO: 2096438
uguucucaaguucaggcgu

SEQ ID NO: 2096440 - RNA, 19 nt, Artificial Sequence
  Description of Artificial Sequence: Synthetic oligonucleotide
  Sense strand starting at position 2291 of SEQ ID NO: 1882117
agaaguagguuccuuugga

SEQ ID NO: 2096441 - RNA, 19 nt, Artificial Sequence
  Description of Artificial Sequence: Synthetic oligonucleotide
  Antisense strand to SEQ ID NO: 2096440
uccaaaggaaccuacuucu

SEQ ID NO: 2096442 - RNA, 19 nt, Artificial Sequence
  Description of Artificial Sequence: Synthetic oligonucleotide
  Sense strand starting at position 2292 of SEQ ID NO: 1882117
gaaguagguuccuuuggau

SEQ ID NO: 2096443 - RNA, 19 nt, Artificial Sequence
  Description of Artificial Sequence: Synthetic oligonucleotide
  Antisense strand to SEQ ID NO: 2096442
auccaaaggaaccuacuuc

SEQ ID NO: 2096444 - RNA, 19 nt, Artificial Sequence
  Description of Artificial Sequence: Synthetic oligonucleotide
  Sense strand starting at position 2486 of SEQ ID NO: 1882117
gggccagaacuuugcaacu

SEQ ID NO: 2096445 - RNA, 19 nt, Artificial Sequence
  Description of Artificial Sequence: Synthetic oligonucleotide
  Antisense strand to SEQ ID NO: 2096444
aguugcaaaguucuggccc

SEQ ID NO: 2096446 - RNA, 19 nt, Artificial Sequence
  Description of Artificial Sequence: Synthetic oligonucleotide
  Sense strand starting at position 2546 of SEQ ID NO: 1882117
ggaggcugguguucaauaa

SEQ ID NO: 2096447 - RNA, 19 nt, Artificial Sequence
  Description of Artificial Sequence: Synthetic oligonucleotide
  Antisense strand to SEQ ID NO: 2096446
uuauugaacaccagccucc

SEQ ID NO: 2096448 - RNA, 19 nt, Artificial Sequence
  Description of Artificial Sequence: Synthetic oligonucleotide
  Sense strand starting at position 3123 of SEQ ID NO: 1882117
ucaguuaagcuccacaagu

SEQ ID NO: 2096449 - RNA, 19 nt, Artificial Sequence
  Description of Artificial Sequence: Synthetic oligonucleotide
  Antisense strand to SEQ ID NO: 2096448
acuuguggagcuuaacuga

SEQ ID NO: 2096450 - RNA, 19 nt, Artificial Sequence
  Description of Artificial Sequence: Synthetic oligonucleotide
  Sense strand starting at position 3125 of SEQ ID NO: 1882117
aguuaagcuccacaaguuu

SEQ ID NO: 2096451 - RNA, 19 nt, Artificial Sequence
  Description of Artificial Sequence: Synthetic oligonucleotide
  Antisense strand to SEQ ID NO: 2096450
aaacuuguggagcuuaacu

SEQ ID NO: 2096452 - RNA, 19 nt, Artificial Sequence
  Description of Artificial Sequence: Synthetic oligonucleotide
  Sense strand starting at position 3133 of SEQ ID NO: 1882117
uccacaaguuuagcuagau

SEQ ID NO: 2096453 - RNA, 19 nt, Artificial Sequence
  Description of Artificial Sequence: Synthetic oligonucleotide
  Antisense strand to SEQ ID NO: 2096452
aucuagcuaaacuugugga

SEQ ID NO: 2096454 - RNA, 19 nt, Artificial Sequence
  Description of Artificial Sequence: Synthetic oligonucleotide
  Sense strand starting at position 3134 of SEQ ID NO: 1882117
ccacaaguuuagcuagaug

SEQ ID NO: 2096455 - RNA, 19 nt, Artificial Sequence
  Description of Artificial Sequence: Synthetic oligonucleotide
  Antisense strand to SEQ ID NO: 2096454
caucuagcuaaacuugugg

SEQ ID NO: 2096456 - RNA, 19 nt, Artificial Sequence
  Description of Artificial Sequence: Synthetic oligonucleotide
  Sense strand starting at position 3160 of SEQ ID NO: 1882117
agggaccuaugaguuaauu

SEQ ID NO: 2096457 - RNA, 19 nt, Artificial Sequence
  Description of Artificial Sequence: Synthetic oligonucleotide
  Antisense strand to SEQ ID NO: 2096456
aauuaacucauaggucccu

SEQ ID NO: 2096458 - RNA, 19 nt, Artificial Sequence
  Description of Artificial Sequence: Synthetic oligonucleotide
  Sense strand starting at position 3251 of SEQ ID NO: 1882117
uuaacugagguugggaauu

SEQ ID NO: 2096459 - RNA, 19 nt, Artificial Sequence
  Description of Artificial Sequence: Synthetic oligonucleotide
  Antisense strand to SEQ ID NO: 2096458
aauucccaaccucaguuaa

SEQ ID NO: 2096460 - RNA, 19 nt, Artificial Sequence
  Description of Artificial Sequence: Synthetic oligonucleotide
  Sense strand starting at position 3257 of SEQ ID NO: 1882117
gagguugggaauugucauu

SEQ ID NO: 2096461 - RNA, 19 nt, Artificial Sequence
  Description of Artificial Sequence: Synthetic oligonucleotide
  Antisense strand to SEQ ID NO: 2096460
aaugacaauucccaaccuc

SEQ ID NO: 2096462 - RNA, 19 nt, Artificial Sequence
  Description of Artificial Sequence: Synthetic oligonucleotide
  Sense strand starting at position 3262 of SEQ ID NO: 1882117
ugggaauugucauuagauu

SEQ ID NO: 2096463 - RNA, 19 nt, Artificial Sequence
  Description of Artificial Sequence: Synthetic oligonucleotide
  Antisense strand to SEQ ID NO: 2096462
aaucuaaugacaauuccca

SEQ ID NO: 2096464 - RNA, 19 nt, Artificial Sequence
  Description of Artificial Sequence: Synthetic oligonucleotide
  Sense strand starting at position 3343 of SEQ ID NO: 1882117
acugcauaucccugggaga

SEQ ID NO: 2096465 - RNA, 19 nt, Artificial Sequence
  Description of Artificial Sequence: Synthetic oligonucleotide
  Antisense strand to SEQ ID NO: 2096464
ucucccagggauaugcagu

SEQ ID NO: 2096466 - RNA, 19 nt, Artificial Sequence
  Description of Artificial Sequence: Synthetic oligonucleotide
  Sense strand starting at position 3344 of SEQ ID NO: 1882117
cugcauaucccugggagaa

SEQ ID NO: 2096467 - RNA, 19 nt, Artificial Sequence
  Description of Artificial Sequence: Synthetic oligonucleotide
  Antisense strand to SEQ ID NO: 2096466
uucucccagggauaugcag

SEQ ID NO: 2096468 - RNA, 19 nt, Artificial Sequence
  Description of Artificial Sequence: Synthetic oligonucleotide
  Sense strand starting at position 3345 of SEQ ID NO: 1882117
ugcauaucccugggagaaa

SEQ ID NO: 2096469 - RNA, 19 nt, Artificial Sequence
  Description of Artificial Sequence: Synthetic oligonucleotide
  Antisense strand to SEQ ID NO: 2096468
uuucucccagggauaugca

SEQ ID NO: 2096470 - RNA, 19 nt, Artificial Sequence
  Description of Artificial Sequence: Synthetic oligonucleotide
  Sense strand starting at position 3367 of SEQ ID NO: 1882117
gcagaaauguuccuugaca

SEQ ID NO: 2096471 - RNA, 19 nt, Artificial Sequence
  Description of Artificial Sequence: Synthetic oligonucleotide
  Antisense strand to SEQ ID NO: 2096470
ugucaaggaacauuucugc

SEQ ID NO: 2096472 - RNA, 19 nt, Artificial Sequence
  Description of Artificial Sequence: Synthetic oligonucleotide
  Sense strand starting at position 3369 of SEQ ID NO: 1882117
agaaauguuccuugacaua

SEQ ID NO: 2096473 - RNA, 19 nt, Artificial Sequence
  Description of Artificial Sequence: Synthetic oligonucleotide
  Antisense strand to SEQ ID NO: 2096472
uaugucaaggaacauuucu

SEQ ID NO: 2096474 - RNA, 19 nt, Artificial Sequence
  Description of Artificial Sequence: Synthetic oligonucleotide
  Sense strand starting at position 3485 of SEQ ID NO: 1882117
ucaucuagugcuuaagacu

SEQ ID NO: 2096475 - RNA, 19 nt, Artificial Sequence
  Description of Artificial Sequence: Synthetic oligonucleotide
  Antisense strand to SEQ ID NO: 2096474
agucuuaagcacuagauga

SEQ ID NO: 2096476 - RNA, 19 nt, Artificial Sequence
  Description of Artificial Sequence: Synthetic oligonucleotide
  Sense strand starting at position 3601 of SEQ ID NO: 1882117
cugguucuuccaugggaug

SEQ ID NO: 2096477 - RNA, 19 nt, Artificial Sequence
  Description of Artificial Sequence: Synthetic oligonucleotide
  Antisense strand to SEQ ID NO: 2096476
caucccauggaagaaccag

SEQ ID NO: 2096478 - RNA, 19 nt, Artificial Sequence
  Description of Artificial Sequence: Synthetic oligonucleotide
  Sense strand starting at position 3602 of SEQ ID NO: 1882117
ugguucuuccaugggauga

SEQ ID NO: 2096479 - RNA, 19 nt, Artificial Sequence
  Description of Artificial Sequence: Synthetic oligonucleotide
  Antisense strand to SEQ ID NO: 2096478
ucaucccauggaagaacca

SEQ ID NO: 2096480 - RNA, 19 nt, Artificial Sequence
  Description of Artificial Sequence: Synthetic oligonucleotide
  Sense strand starting at position 3603 of SEQ ID NO: 1882117
gguucuuccaugggaugag

SEQ ID NO: 2096481 - RNA, 19 nt, Artificial Sequence
  Description of Artificial Sequence: Synthetic oligonucleotide
  Antisense strand to SEQ ID NO: 2096480
cucaucccauggaagaacc

SEQ ID NO: 2096482 - RNA, 19 nt, Artificial Sequence
  Description of Artificial Sequence: Synthetic oligonucleotide
  Sense strand starting at position 3613 of SEQ ID NO: 1882117
ugggaugagcuguaucuau

SEQ ID NO: 2096483 - RNA, 19 nt, Artificial Sequence
  Description of Artificial Sequence: Synthetic oligonucleotide
  Antisense strand to SEQ ID NO: 2096482
auagauacagcucauccca

SEQ ID NO: 2096484 - RNA, 19 nt, Artificial Sequence
  Description of Artificial Sequence: Synthetic oligonucleotide
  Sense strand starting at position 3624 of SEQ ID NO: 1882117
guaucuaucaccgagguuc

SEQ ID NO: 2096485 - RNA, 19 nt, Artificial Sequence
  Description of Artificial Sequence: Synthetic oligonucleotide
  Antisense strand to SEQ ID NO: 2096484
gaaccucggugauagauac

SEQ ID NO: 2096486 - RNA, 19 nt, Artificial Sequence
  Description of Artificial Sequence: Synthetic oligonucleotide
  Sense strand starting at position 3774 of SEQ ID NO: 1882117
uucgguuggaaugaucuua

SEQ ID NO: 2096487 - RNA, 19 nt, Artificial Sequence
  Description of Artificial Sequence: Synthetic oligonucleotide
  Antisense strand to SEQ ID NO: 2096486
uaagaucauuccaaccgaa

SEQ ID NO: 2096488 - RNA, 19 nt, Artificial Sequence
  Description of Artificial Sequence: Synthetic oligonucleotide
  Sense strand starting at position 3805 of SEQ ID NO: 1882117
gaggccuuggaauaguauu

SEQ ID NO: 2096489 - RNA, 19 nt, Artificial Sequence
  Description of Artificial Sequence: Synthetic oligonucleotide
  Antisense strand to SEQ ID NO: 2096488
aauacuauuccaaggccuc

SEQ ID NO: 2096490 - RNA, 19 nt, Artificial Sequence
  Description of Artificial Sequence: Synthetic oligonucleotide
  Sense strand starting at position 3867 of SEQ ID NO: 1882117
gggacagagcugugugaug

SEQ ID NO: 2096491 - RNA, 19 nt, Artificial Sequence
  Description of Artificial Sequence: Synthetic oligonucleotide
  Antisense strand to SEQ ID NO: 2096490
caucacacagcucuguccc

SEQ ID NO: 2096492 - RNA, 19 nt, Artificial Sequence
  Description of Artificial Sequence: Synthetic oligonucleotide
  Sense strand starting at position 3869 of SEQ ID NO: 1882117
gacagagcugugugaugaa

SEQ ID NO: 2096493 - RNA, 19 nt, Artificial Sequence
  Description of Artificial Sequence: Synthetic oligonucleotide
  Antisense strand to SEQ ID NO: 2096492
uucaucacacagcucuguc

SEQ ID NO: 2096494 - RNA, 19 nt, Artificial Sequence
  Description of Artificial Sequence: Synthetic oligonucleotide
  Sense strand starting at position 3912 of SEQ ID NO: 1882117
caggcugugcuugaggaau

SEQ ID NO: 2096495 - RNA, 19 nt, Artificial Sequence
  Description of Artificial Sequence: Synthetic oligonucleotide
  Antisense strand to SEQ ID NO: 2096494
auuccucaagcacagccug

SEQ ID NO: 2096496 - RNA, 19 nt, Artificial Sequence
  Description of Artificial Sequence: Synthetic oligonucleotide
  Sense strand starting at position 3949 of SEQ ID NO: 1882117
gggagaaugucccuuccac

SEQ ID NO: 2096497 - RNA, 19 nt, Artificial Sequence
  Description of Artificial Sequence: Synthetic oligonucleotide
  Antisense strand to SEQ ID NO: 2096496
guggaagggacauucuccc

SEQ ID NO: 2096498 - RNA, 19 nt, Artificial Sequence
  Description of Artificial Sequence: Synthetic oligonucleotide
  Sense strand starting at position 17 of SEQ ID NO: 1882118
acagaaauguuagcaucca

SEQ ID NO: 2096499 - RNA, 19 nt, Artificial Sequence
  Description of Artificial Sequence: Synthetic oligonucleotide
  Antisense strand to SEQ ID NO: 2096498
uggaugcuaacauuucugu

SEQ ID NO: 2096500 - RNA, 19 nt, Artificial Sequence
  Description of Artificial Sequence: Synthetic oligonucleotide
  Sense strand starting at position 25 of SEQ ID NO: 1882118
guuagcauccaagaauaau

SEQ ID NO: 2096501 - RNA, 19 nt, Artificial Sequence
  Description of Artificial Sequence: Synthetic oligonucleotide
  Antisense strand to SEQ ID NO: 2096500
auuauucuuggaugcuaac

SEQ ID NO: 2096502 - RNA, 19 nt, Artificial Sequence
  Description of Artificial Sequence: Synthetic oligonucleotide
  Sense strand starting at position 106 of SEQ ID NO: 1882118
uggauauuacaaugugaua

SEQ ID NO: 2096503 - RNA, 19 nt, Artificial Sequence
  Description of Artificial Sequence: Synthetic oligonucleotide
  Antisense strand to SEQ ID NO: 2096502
uaucacauuguaauaucca

SEQ ID NO: 2096504 - RNA, 19 nt, Artificial Sequence
  Description of Artificial Sequence: Synthetic oligonucleotide
  Sense strand starting at position 135 of SEQ ID NO: 1882118
uuguaugaguggcuaagga

SEQ ID NO: 2096505 - RNA, 19 nt, Artificial Sequence
  Description of Artificial Sequence: Synthetic oligonucleotide
  Antisense strand to SEQ ID NO: 2096504
uccuuagccacucauacaa

SEQ ID NO: 2096506 - RNA, 19 nt, Artificial Sequence
  Description of Artificial Sequence: Synthetic oligonucleotide
  Sense strand starting at position 556 of SEQ ID NO: 1882118
gagguucgcccgucugcaa

SEQ ID NO: 2096507 - RNA, 19 nt, Artificial Sequence
  Description of Artificial Sequence: Synthetic oligonucleotide
  Antisense strand to SEQ ID NO: 2096506
uugcagacgggcgaaccuc

SEQ ID NO: 2096508 - RNA, 19 nt, Artificial Sequence
  Description of Artificial Sequence: Synthetic oligonucleotide
  Sense strand starting at position 1069 of SEQ ID NO: 1882118
cguuaccuucggucgcaua

SEQ ID NO: 2096509 - RNA, 19 nt, Artificial Sequence
  Description of Artificial Sequence: Synthetic oligonucleotide
  Antisense strand to SEQ ID NO: 2096508
uaugcgaccgaagguaacg

SEQ ID NO: 2096510 - RNA, 19 nt, Artificial Sequence
  Description of Artificial Sequence: Synthetic oligonucleotide
  Sense strand starting at position 1181 of SEQ ID NO: 1882118
gcagacaaguauccaugau

SEQ ID NO: 2096511 - RNA, 19 nt, Artificial Sequence
  Description of Artificial Sequence: Synthetic oligonucleotide
  Antisense strand to SEQ ID NO: 2096510
aucauggauacuugucugc

SEQ ID NO: 2096512 - RNA, 19 nt, Artificial Sequence
  Description of Artificial Sequence: Synthetic oligonucleotide
  Sense strand starting at position 2124 of SEQ ID NO: 1882118
acgccugaacuugagaaca

SEQ ID NO: 2096513 - RNA, 19 nt, Artificial Sequence
  Description of Artificial Sequence: Synthetic oligonucleotide
  Antisense strand to SEQ ID NO: 2096512
uguucucaaguucaggcgu

SEQ ID NO: 2096514 - RNA, 19 nt, Artificial Sequence
  Description of Artificial Sequence: Synthetic oligonucleotide
  Sense strand starting at position 2149 of SEQ ID NO: 1882118
agaaguagguuccuuugga

SEQ ID NO: 2096515 - RNA, 19 nt, Artificial Sequence
  Description of Artificial Sequence: Synthetic oligonucleotide
  Antisense strand to SEQ ID NO: 2096514
uccaaaggaaccuacuucu

SEQ ID NO: 2096516 - RNA, 19 nt, Artificial Sequence
  Description of Artificial Sequence: Synthetic oligonucleotide
  Sense strand starting at position 2150 of SEQ ID NO: 1882118
gaaguagguuccuuuggau

SEQ ID NO: 2096517 - RNA, 19 nt, Artificial Sequence
  Description of Artificial Sequence: Synthetic oligonucleotide
  Antisense strand to SEQ ID NO: 2096516
auccaaaggaaccuacuuc

SEQ ID NO: 2096518 - RNA, 19 nt, Artificial Sequence
  Description of Artificial Sequence: Synthetic oligonucleotide
  Sense strand starting at position 2404 of SEQ ID NO: 1882118
ggaggcugguguucaauaa

SEQ ID NO: 2096519 - RNA, 19 nt, Artificial Sequence
  Description of Artificial Sequence: Synthetic oligonucleotide
  Antisense strand to SEQ ID NO: 2096518
uuauugaacaccagccucc

SEQ ID NO: 2096520 - RNA, 19 nt, Artificial Sequence
  Description of Artificial Sequence: Synthetic oligonucleotide
  Sense strand starting at position 2981 of SEQ ID NO: 1882118
ucaguuaagcuccacaagu

SEQ ID NO: 2096521 - RNA, 19 nt, Artificial Sequence
  Description of Artificial Sequence: Synthetic oligonucleotide
  Antisense strand to SEQ ID NO: 2096520
acuuguggagcuuaacuga

SEQ ID NO: 2096522 - RNA, 19 nt, Artificial Sequence
  Description of Artificial Sequence: Synthetic oligonucleotide
  Sense strand starting at position 2983 of SEQ ID NO: 1882118
aguuaagcuccacaaguuu

SEQ ID NO: 2096523 - RNA, 19 nt, Artificial Sequence
  Description of Artificial Sequence: Synthetic oligonucleotide
  Antisense strand to SEQ ID NO: 2096522
aaacuuguggagcuuaacu

SEQ ID NO: 2096524 - RNA, 19 nt, Artificial Sequence
  Description of Artificial Sequence: Synthetic oligonucleotide
  Sense strand starting at position 2991 of SEQ ID NO: 1882118
uccacaaguuuagcuagau

SEQ ID NO: 2096525 - RNA, 19 nt, Artificial Sequence
  Description of Artificial Sequence: Synthetic oligonucleotide
  Antisense strand to SEQ ID NO: 2096524
aucuagcuaaacuugugga

SEQ ID NO: 2096526 - RNA, 19 nt, Artificial Sequence
  Description of Artificial Sequence: Synthetic oligonucleotide
  Sense strand starting at position 2992 of SEQ ID NO: 1882118
ccacaaguuuagcuagaug

SEQ ID NO: 2096527 - RNA, 19 nt, Artificial Sequence
  Description of Artificial Sequence: Synthetic oligonucleotide
  Antisense strand to SEQ ID NO: 2096526
caucuagcuaaacuugugg

SEQ ID NO: 2096528 - RNA, 19 nt, Artificial Sequence
  Description of Artificial Sequence: Synthetic oligonucleotide
  Sense strand starting at position 3018 of SEQ ID NO: 1882118
agggaccuaugaguuaauu

SEQ ID NO: 2096529 - RNA, 19 nt, Artificial Sequence
  Description of Artificial Sequence: Synthetic oligonucleotide
  Antisense strand to SEQ ID NO: 2096528
aauuaacucauaggucccu

SEQ ID NO: 2096530 - RNA, 19 nt, Artificial Sequence
  Description of Artificial Sequence: Synthetic oligonucleotide
  Sense strand starting at position 3109 of SEQ ID NO: 1882118
uuaacugagguugggaauu

SEQ ID NO: 2096531 - RNA, 19 nt, Artificial Sequence
  Description of Artificial Sequence: Synthetic oligonucleotide
  Antisense strand to SEQ ID NO: 2096530
aauucccaaccucaguuaa

SEQ ID NO: 2096532 - RNA, 19 nt, Artificial Sequence
  Description of Artificial Sequence: Synthetic oligonucleotide
  Sense strand starting at position 3115 of SEQ ID NO: 1882118
gagguugggaauugucauu

SEQ ID NO: 2096533 - RNA, 19 nt, Artificial Sequence
  Description of Artificial Sequence: Synthetic oligonucleotide
  Antisense strand to SEQ ID NO: 2096532
aaugacaauucccaaccuc

SEQ ID NO: 2096534 - RNA, 19 nt, Artificial Sequence
  Description of Artificial Sequence: Synthetic oligonucleotide
  Sense strand starting at position 3120 of SEQ ID NO: 1882118
ugggaauugucauuagauu

SEQ ID NO: 2096535 - RNA, 19 nt, Artificial Sequence
  Description of Artificial Sequence: Synthetic oligonucleotide
  Antisense strand to SEQ ID NO: 2096534
aaucuaaugacaauuccca

SEQ ID NO: 2096536 - RNA, 19 nt, Artificial Sequence
  Description of Artificial Sequence: Synthetic oligonucleotide
  Sense strand starting at position 3201 of SEQ ID NO: 1882118
acugcauaucccugggaga

SEQ ID NO: 2096537 - RNA, 19 nt, Artificial Sequence
  Description of Artificial Sequence: Synthetic oligonucleotide
  Antisense strand to SEQ ID NO: 2096536
ucucccagggauaugcagu

SEQ ID NO: 2096538 - RNA, 19 nt, Artificial Sequence
  Description of Artificial Sequence: Synthetic oligonucleotide
  Sense strand starting at position 3202 of SEQ ID NO: 1882118
cugcauaucccugggagaa

SEQ ID NO: 2096539 - RNA, 19 nt, Artificial Sequence
  Description of Artificial Sequence: Synthetic oligonucleotide
  Antisense strand to SEQ ID NO: 2096538
uucucccagggauaugcag

SEQ ID NO: 2096540 - RNA, 19 nt, Artificial Sequence
  Description of Artificial Sequence: Synthetic oligonucleotide
  Sense strand starting at position 3203 of SEQ ID NO: 1882118
ugcauaucccugggagaaa

SEQ ID NO: 2096541 - RNA, 19 nt, Artificial Sequence
  Description of Artificial Sequence: Synthetic oligonucleotide
  Antisense strand to SEQ ID NO: 2096540
uuucucccagggauaugca

SEQ ID NO: 2096542 - RNA, 19 nt, Artificial Sequence
  Description of Artificial Sequence: Synthetic oligonucleotide
  Sense strand starting at position 3225 of SEQ ID NO: 1882118
gcagaaauguuccuugaca

SEQ ID NO: 2096543 - RNA, 19 nt, Artificial Sequence
  Description of Artificial Sequence: Synthetic oligonucleotide
  Antisense strand to SEQ ID NO: 2096542
ugucaaggaacauuucugc

SEQ ID NO: 2096544 - RNA, 19 nt, Artificial Sequence
  Description of Artificial Sequence: Synthetic oligonucleotide
  Sense strand starting at position 3227 of SEQ ID NO: 1882118
agaaauguuccuugacaua

SEQ ID NO: 2096545 - RNA, 19 nt, Artificial Sequence
  Description of Artificial Sequence: Synthetic oligonucleotide
  Antisense strand to SEQ ID NO: 2096544
uaugucaaggaacauuucu

SEQ ID NO: 2096546 - RNA, 19 nt, Artificial Sequence
  Description of Artificial Sequence: Synthetic oligonucleotide
  Sense strand starting at position 3343 of SEQ ID NO: 1882118
ucaucuagugcuuaagacu

SEQ ID NO: 2096547 - RNA, 19 nt, Artificial Sequence
  Description of Artificial Sequence: Synthetic oligonucleotide
  Antisense strand to SEQ ID NO: 2096546
agucuuaagcacuagauga

SEQ ID NO: 2096548 - RNA, 19 nt, Artificial Sequence
  Description of Artificial Sequence: Synthetic oligonucleotide
  Sense strand starting at position 3459 of SEQ ID NO: 1882118
cugguucuuccaugggaug

SEQ ID NO: 2096549 - RNA, 19 nt, Artificial Sequence
  Description of Artificial Sequence: Synthetic oligonucleotide
  Antisense strand to SEQ ID NO: 2096548
caucccauggaagaaccag

SEQ ID NO: 2096550 - RNA, 19 nt, Artificial Sequence
  Description of Artificial Sequence: Synthetic oligonucleotide
  Sense strand starting at position 3460 of SEQ ID NO: 1882118
ugguucuuccaugggauga

SEQ ID NO: 2096551 - RNA, 19 nt, Artificial Sequence
  Description of Artificial Sequence: Synthetic oligonucleotide
  Antisense strand to SEQ ID NO: 2096550
ucaucccauggaagaacca

SEQ ID NO: 2096552 - RNA, 19 nt, Artificial Sequence
  Description of Artificial Sequence: Synthetic oligonucleotide
  Sense strand starting at position 3461 of SEQ ID NO: 1882118
gguucuuccaugggaugag

SEQ ID NO: 2096553 - RNA, 19 nt, Artificial Sequence
  Description of Artificial Sequence: Synthetic oligonucleotide
  Antisense strand to SEQ ID NO: 2096552
cucaucccauggaagaacc

SEQ ID NO: 2096554 - RNA, 19 nt, Artificial Sequence
  Description of Artificial Sequence: Synthetic oligonucleotide
  Sense strand starting at position 3471 of SEQ ID NO: 1882118
ugggaugagcuguaucuau

SEQ ID NO: 2096555 - RNA, 19 nt, Artificial Sequence
  Description of Artificial Sequence: Synthetic oligonucleotide
  Antisense strand to SEQ ID NO: 2096554
auagauacagcucauccca

SEQ ID NO: 2096556 - RNA, 19 nt, Artificial Sequence
  Description of Artificial Sequence: Synthetic oligonucleotide
  Sense strand starting at position 3482 of SEQ ID NO: 1882118
guaucuaucaccgagguuc

SEQ ID NO: 2096557 - RNA, 19 nt, Artificial Sequence
  Description of Artificial Sequence: Synthetic oligonucleotide
  Antisense strand to SEQ ID NO: 2096556
gaaccucggugauagauac

SEQ ID NO: 2096558 - RNA, 19 nt, Artificial Sequence
  Description of Artificial Sequence: Synthetic oligonucleotide
  Sense strand starting at position 3632 of SEQ ID NO: 1882118
uucgguuggaaugaucuua

SEQ ID NO: 2096559 - RNA, 19 nt, Artificial Sequence
  Description of Artificial Sequence: Synthetic oligonucleotide
  Antisense strand to SEQ ID NO: 2096558
uaagaucauuccaaccgaa

SEQ ID NO: 2096560 - RNA, 19 nt, Artificial Sequence
  Description of Artificial Sequence: Synthetic oligonucleotide
  Sense strand starting at position 3663 of SEQ ID NO: 1882118
gaggccuuggaauaguauu

SEQ ID NO: 2096561 - RNA, 19 nt, Artificial Sequence
  Description of Artificial Sequence: Synthetic oligonucleotide
  Antisense strand to SEQ ID NO: 2096560
aauacuauuccaaggccuc

SEQ ID NO: 2096562 - RNA, 19 nt, Artificial Sequence
  Description of Artificial Sequence: Synthetic oligonucleotide
  Sense strand starting at position 3725 of SEQ ID NO: 1882118
gggacagagcugugugaug

SEQ ID NO: 2096563 - RNA, 19 nt, Artificial Sequence
  Description of Artificial Sequence: Synthetic oligonucleotide
  Antisense strand to SEQ ID NO: 2096562
caucacacagcucuguccc

SEQ ID NO: 2096564 - RNA, 19 nt, Artificial Sequence
  Description of Artificial Sequence: Synthetic oligonucleotide
  Sense strand starting at position 3727 of SEQ ID NO: 1882118
gacagagcugugugaugaa

SEQ ID NO: 2096565 - RNA, 19 nt, Artificial Sequence
  Description of Artificial Sequence: Synthetic oligonucleotide
  Antisense strand to SEQ ID NO: 2096564
uucaucacacagcucuguc

SEQ ID NO: 2096566 - RNA, 19 nt, Artificial Sequence
  Description of Artificial Sequence: Synthetic oligonucleotide
  Sense strand starting at position 3770 of SEQ ID NO: 1882118
caggcugugcuugaggaau

SEQ ID NO: 2096567 - RNA, 19 nt, Artificial Sequence
  Description of Artificial Sequence: Synthetic oligonucleotide
  Antisense strand to SEQ ID NO: 2096566
auuccucaagcacagccug

SEQ ID NO: 2096568 - RNA, 19 nt, Artificial Sequence
  Description of Artificial Sequence: Synthetic oligonucleotide
  Sense strand starting at position 3807 of SEQ ID NO: 1882118
gggagaaugucccuuccac

SEQ ID NO: 2096569 - RNA, 19 nt, Artificial Sequence
  Description of Artificial Sequence: Synthetic oligonucleotide
  Antisense strand to SEQ ID NO: 2096568
guggaagggacauucuccc

SEQ ID NO: 2096570 - RNA, 19 nt, Artificial Sequence
  Description of Artificial Sequence: Synthetic oligonucleotide
  Sense strand starting at position 3914 of SEQ ID NO: 1882118
uaagacacauguucugaga

SEQ ID NO: 2096571 - RNA, 19 nt, Artificial Sequence
  Description of Artificial Sequence: Synthetic oligonucleotide
  Antisense strand to SEQ ID NO: 2096570
ucucagaacaugugucuua

SEQ ID NO: 2096572 - RNA, 19 nt, Artificial Sequence
  Description of Artificial Sequence: Synthetic oligonucleotide
  Sense strand starting at position 3941 of SEQ ID NO: 1882118
uggauaggucuccauuguu

SEQ ID NO: 2096573 - RNA, 19 nt, Artificial Sequence
  Description of Artificial Sequence: Synthetic oligonucleotide
  Antisense strand to SEQ ID NO: 2096572
aacaauggagaccuaucca

SEQ ID NO: 2096574 - RNA, 19 nt, Artificial Sequence
  Description of Artificial Sequence: Synthetic oligonucleotide
  Sense strand starting at position 3951 of SEQ ID NO: 1882118
uccauuguuuaaguagauu

SEQ ID NO: 2096575 - RNA, 19 nt, Artificial Sequence
  Description of Artificial Sequence: Synthetic oligonucleotide
  Antisense strand to SEQ ID NO: 2096574
aaucuacuuaaacaaugga

SEQ ID NO: 2096576 - RNA, 19 nt, Artificial Sequence
  Description of Artificial Sequence: Synthetic oligonucleotide
  Sense strand starting at position 3975 of SEQ ID NO: 1882118
guuuccauuuggccaacua

SEQ ID NO: 2096577 - RNA, 19 nt, Artificial Sequence
  Description of Artificial Sequence: Synthetic oligonucleotide
  Antisense strand to SEQ ID NO: 2096576
uaguuggccaaauggaaac

SEQ ID NO: 2096578 - RNA, 19 nt, Artificial Sequence
  Description of Artificial Sequence: Synthetic oligonucleotide
  Sense strand starting at position 115 of SEQ ID NO: 1882119
uuauaaauaagguggguua

SEQ ID NO: 2096579 - RNA, 19 nt, Artificial Sequence
  Description of Artificial Sequence: Synthetic oligonucleotide
  Antisense strand to SEQ ID NO: 2096578
uaacccaccuuauuuauaa

SEQ ID NO: 2096580 - RNA, 19 nt, Artificial Sequence
  Description of Artificial Sequence: Synthetic oligonucleotide
  Sense strand starting at position 118 of SEQ ID NO: 1882119
uaaauaagguggguuacaa

SEQ ID NO: 2096581 - RNA, 19 nt, Artificial Sequence
  Description of Artificial Sequence: Synthetic oligonucleotide
  Antisense strand to SEQ ID NO: 2096580
uuguaacccaccuuauuua

SEQ ID NO: 2096582 - RNA, 19 nt, Artificial Sequence
  Description of Artificial Sequence: Synthetic oligonucleotide
  Sense strand starting at position 263 of SEQ ID NO: 1882119
aagcaaugugagcagucua

SEQ ID NO: 2096583 - RNA, 19 nt, Artificial Sequence
  Description of Artificial Sequence: Synthetic oligonucleotide
  Antisense strand to SEQ ID NO: 2096582
uagacugcucacauugcuu

SEQ ID NO: 2096584 - RNA, 19 nt, Artificial Sequence
  Description of Artificial Sequence: Synthetic oligonucleotide
  Sense strand starting at position 268 of SEQ ID NO: 1882119
augugagcagucuaaugaa

SEQ ID NO: 2096585 - RNA, 19 nt, Artificial Sequence
  Description of Artificial Sequence: Synthetic oligonucleotide
  Antisense strand to SEQ ID NO: 2096584
uucauuagacugcucacau

SEQ ID NO: 2096586 - RNA, 19 nt, Artificial Sequence
  Description of Artificial Sequence: Synthetic oligonucleotide
  Sense strand starting at position 359 of SEQ ID NO: 1882119
gaaguaucuguuuaacagu

SEQ ID NO: 2096587 - RNA, 19 nt, Artificial Sequence
  Description of Artificial Sequence: Synthetic oligonucleotide
  Antisense strand to SEQ ID NO: 2096586
acuguuaaacagauacuuc

SEQ ID NO: 2096588 - RNA, 19 nt, Artificial Sequence
  Description of Artificial Sequence: Synthetic oligonucleotide
  Sense strand starting at position 365 of SEQ ID NO: 1882119
ucuguuuaacaguaaagug

SEQ ID NO: 2096589 - RNA, 19 nt, Artificial Sequence
  Description of Artificial Sequence: Synthetic oligonucleotide
  Antisense strand to SEQ ID NO: 2096588
cacuuuacuguuaaacaga

SEQ ID NO: 2096590 - RNA, 19 nt, Artificial Sequence
  Description of Artificial Sequence: Synthetic oligonucleotide
  Sense strand starting at position 587 of SEQ ID NO: 1882119
uauguuuaggcucaagcaa

SEQ ID NO: 2096591 - RNA, 19 nt, Artificial Sequence
  Description of Artificial Sequence: Synthetic oligonucleotide
  Antisense strand to SEQ ID NO: 2096590
uugcuugagccuaaacaua

SEQ ID NO: 2096592 - RNA, 19 nt, Artificial Sequence
  Description of Artificial Sequence: Synthetic oligonucleotide
  Sense strand starting at position 667 of SEQ ID NO: 1882119
cugugaauucacuguggag

SEQ ID NO: 2096593 - RNA, 19 nt, Artificial Sequence
  Description of Artificial Sequence: Synthetic oligonucleotide
  Antisense strand to SEQ ID NO: 2096592
cuccacagugaauucacag

SEQ ID NO: 2096594 - RNA, 19 nt, Artificial Sequence
  Description of Artificial Sequence: Synthetic oligonucleotide
  Sense strand starting at position 799 of SEQ ID NO: 1882119
ccauguuugcuccaccaca

SEQ ID NO: 2096595 - RNA, 19 nt, Artificial Sequence
  Description of Artificial Sequence: Synthetic oligonucleotide
  Antisense strand to SEQ ID NO: 2096594
ugugguggagcaaacaugg

SEQ ID NO: 2096596 - RNA, 19 nt, Artificial Sequence
  Description of Artificial Sequence: Synthetic oligonucleotide
  Sense strand starting at position 827 of SEQ ID NO: 1882119
aguuucuuuccauaguaug

SEQ ID NO: 2096597 - RNA, 19 nt, Artificial Sequence
  Description of Artificial Sequence: Synthetic oligonucleotide
  Antisense strand to SEQ ID NO: 2096596
cauacuauggaaagaaacu

SEQ ID NO: 2096598 - RNA, 19 nt, Artificial Sequence
  Description of Artificial Sequence: Synthetic oligonucleotide
  Sense strand starting at position 864 of SEQ ID NO: 1882119
uuaccuaaaguugguaaua

SEQ ID NO: 2096599 - RNA, 19 nt, Artificial Sequence
  Description of Artificial Sequence: Synthetic oligonucleotide
  Antisense strand to SEQ ID NO: 2096598
uauuaccaacuuuagguaa

SEQ ID NO: 2096600 - RNA, 19 nt, Artificial Sequence
  Description of Artificial Sequence: Synthetic oligonucleotide
  Sense strand starting at position 942 of SEQ ID NO: 1882119
cuaauaguaggcuaagcau

SEQ ID NO: 2096601 - RNA, 19 nt, Artificial Sequence
  Description of Artificial Sequence: Synthetic oligonucleotide
  Antisense strand to SEQ ID NO: 2096600
augcuuagccuacuauuag

SEQ ID NO: 2096602 - RNA, 19 nt, Artificial Sequence
  Description of Artificial Sequence: Synthetic oligonucleotide
  Sense strand starting at position 1074 of SEQ ID NO: 1882119
uuaugagacucucugagau

SEQ ID NO: 2096603 - RNA, 19 nt, Artificial Sequence
  Description of Artificial Sequence: Synthetic oligonucleotide
  Antisense strand to SEQ ID NO: 2096602
aucucagagagucucauaa

SEQ ID NO: 2096604 - RNA, 19 nt, Artificial Sequence
  Description of Artificial Sequence: Synthetic oligonucleotide
  Sense strand starting at position 1245 of SEQ ID NO: 1882119
ucccacuagucaccugauu

SEQ ID NO: 2096605 - RNA, 19 nt, Artificial Sequence
  Description of Artificial Sequence: Synthetic oligonucleotide
  Antisense strand to SEQ ID NO: 2096604
aaucaggugacuaguggga

SEQ ID NO: 2096606 - RNA, 19 nt, Artificial Sequence
  Description of Artificial Sequence: Synthetic oligonucleotide
  Sense strand starting at position 1253 of SEQ ID NO: 1882119
gucaccugauuaucucaua

SEQ ID NO: 2096607 - RNA, 19 nt, Artificial Sequence
  Description of Artificial Sequence: Synthetic oligonucleotide
  Antisense strand to SEQ ID NO: 2096606
uaugagauaaucaggugac

SEQ ID NO: 2096608 - RNA, 19 nt, Artificial Sequence
  Description of Artificial Sequence: Synthetic oligonucleotide
  Sense strand starting at position 1437 of SEQ ID NO: 1882119
ugacaccgugucuacuaau

SEQ ID NO: 2096609 - RNA, 19 nt, Artificial Sequence
  Description of Artificial Sequence: Synthetic oligonucleotide
  Antisense strand to SEQ ID NO: 2096608
auuaguagacacgguguca

SEQ ID NO: 2096610 - RNA, 19 nt, Artificial Sequence
  Description of Artificial Sequence: Synthetic oligonucleotide
  Sense strand starting at position 1487 of SEQ ID NO: 1882119
gccugacacgaguagacuu

SEQ ID NO: 2096611 - RNA, 19 nt, Artificial Sequence
  Description of Artificial Sequence: Synthetic oligonucleotide
  Antisense strand to SEQ ID NO: 2096610
aagucuacucgugucaggc

SEQ ID NO: 2096612 - RNA, 19 nt, Artificial Sequence
  Description of Artificial Sequence: Synthetic oligonucleotide
  Sense strand starting at position 1494 of SEQ ID NO: 1882119
acgaguagacuuugaauaa

SEQ ID NO: 2096613 - RNA, 19 nt, Artificial Sequence
  Description of Artificial Sequence: Synthetic oligonucleotide
  Antisense strand to SEQ ID NO: 2096612
uuauucaaagucuacucgu

SEQ ID NO: 2096614 - RNA, 19 nt, Artificial Sequence
  Description of Artificial Sequence: Synthetic oligonucleotide
  Sense strand starting at position 1745 of SEQ ID NO: 1882119
ggauauuugucuuagagaa

SEQ ID NO: 2096615 - RNA, 19 nt, Artificial Sequence
  Description of Artificial Sequence: Synthetic oligonucleotide
  Antisense strand to SEQ ID NO: 2096614
uucucuaagacaaauaucc

SEQ ID NO: 2096616 - RNA, 19 nt, Artificial Sequence
  Description of Artificial Sequence: Synthetic oligonucleotide
  Sense strand starting at position 1990 of SEQ ID NO: 1882119
gaaagugaguuucucacau

SEQ ID NO: 2096617 - RNA, 19 nt, Artificial Sequence
  Description of Artificial Sequence: Synthetic oligonucleotide
  Antisense strand to SEQ ID NO: 2096616
augugagaaacucacuuuc

SEQ ID NO: 2096618 - RNA, 19 nt, Artificial Sequence
  Description of Artificial Sequence: Synthetic oligonucleotide
  Sense strand starting at position 2015 of SEQ ID NO: 1882119
agagauguugcccaggcaa

SEQ ID NO: 2096619 - RNA, 19 nt, Artificial Sequence
  Description of Artificial Sequence: Synthetic oligonucleotide
  Antisense strand to SEQ ID NO: 2096618
uugccugggcaacaucucu

SEQ ID NO: 2096620 - RNA, 19 nt, Artificial Sequence
  Description of Artificial Sequence: Synthetic oligonucleotide
  Sense strand starting at position 2259 of SEQ ID NO: 1882119
guguuuaauguuuaaucug

SEQ ID NO: 2096621 - RNA, 19 nt, Artificial Sequence
  Description of Artificial Sequence: Synthetic oligonucleotide
  Antisense strand to SEQ ID NO: 2096620
cagauuaaacauuaaacac

SEQ ID NO: 2096622 - RNA, 19 nt, Artificial Sequence
  Description of Artificial Sequence: Synthetic oligonucleotide
  Sense strand starting at position 2266 of SEQ ID NO: 1882119
auguuuaaucuguagacua

SEQ ID NO: 2096623 - RNA, 19 nt, Artificial Sequence
  Description of Artificial Sequence: Synthetic oligonucleotide
  Antisense strand to SEQ ID NO: 2096622
uagucuacagauuaaacau

SEQ ID NO: 2096624 - RNA, 19 nt, Artificial Sequence
  Description of Artificial Sequence: Synthetic oligonucleotide
  Sense strand starting at position 2268 of SEQ ID NO: 1882119
guuuaaucuguagacuaug

SEQ ID NO: 2096625 - RNA, 19 nt, Artificial Sequence
  Description of Artificial Sequence: Synthetic oligonucleotide
  Antisense strand to SEQ ID NO: 2096624
cauagucuacagauuaaac

SEQ ID NO: 2096626 - RNA, 19 nt, Artificial Sequence
  Description of Artificial Sequence: Synthetic oligonucleotide
  Sense strand starting at position 2352 of SEQ ID NO: 1882119
auaguugggcacugaauua

SEQ ID NO: 2096627 - RNA, 19 nt, Artificial Sequence
  Description of Artificial Sequence: Synthetic oligonucleotide
  Antisense strand to SEQ ID NO: 2096626
uaauucagugcccaacuau

SEQ ID NO: 2096628 - RNA, 19 nt, Artificial Sequence
  Description of Artificial Sequence: Synthetic oligonucleotide
  Sense strand starting at position 2530 of SEQ ID NO: 1882119
caaagauaucuuugugaga

SEQ ID NO: 2096629 - RNA, 19 nt, Artificial Sequence
  Description of Artificial Sequence: Synthetic oligonucleotide
  Antisense strand to SEQ ID NO: 2096628
ucucacaaagauaucuuug

SEQ ID NO: 2096630 - RNA, 19 nt, Artificial Sequence
  Description of Artificial Sequence: Synthetic oligonucleotide
  Sense strand starting at position 2539 of SEQ ID NO: 1882119
cuuugugagaagugagaaa

SEQ ID NO: 2096631 - RNA, 19 nt, Artificial Sequence
  Description of Artificial Sequence: Synthetic oligonucleotide
  Antisense strand to SEQ ID NO: 2096630
uuucucacuucucacaaag

SEQ ID NO: 2096632 - RNA, 19 nt, Artificial Sequence
  Description of Artificial Sequence: Synthetic oligonucleotide
  Sense strand starting at position 2598 of SEQ ID NO: 1882119
guacaugaagguuauagua

SEQ ID NO: 2096633 - RNA, 19 nt, Artificial Sequence
  Description of Artificial Sequence: Synthetic oligonucleotide
  Antisense strand to SEQ ID NO: 2096632
uacuauaaccuucauguac

SEQ ID NO: 2096634 - RNA, 19 nt, Artificial Sequence
  Description of Artificial Sequence: Synthetic oligonucleotide
  Sense strand starting at position 2702 of SEQ ID NO: 1882119
uugagucuauuugcuaguu

SEQ ID NO: 2096635 - RNA, 19 nt, Artificial Sequence
  Description of Artificial Sequence: Synthetic oligonucleotide
  Antisense strand to SEQ ID NO: 2096634
aacuagcaaauagacucaa

SEQ ID NO: 2096636 - RNA, 19 nt, Artificial Sequence
  Description of Artificial Sequence: Synthetic oligonucleotide
  Sense strand starting at position 2703 of SEQ ID NO: 1882119
ugagucuauuugcuaguuu

SEQ ID NO: 2096637 - RNA, 19 nt, Artificial Sequence
  Description of Artificial Sequence: Synthetic oligonucleotide
  Antisense strand to SEQ ID NO: 2096636
aaacuagcaaauagacuca

SEQ ID NO: 2096638 - RNA, 19 nt, Artificial Sequence
  Description of Artificial Sequence: Synthetic oligonucleotide
  Sense strand starting at position 2912 of SEQ ID NO: 1882119
ggcaguuuaaagcacagua

SEQ ID NO: 2096639 - RNA, 19 nt, Artificial Sequence
  Description of Artificial Sequence: Synthetic oligonucleotide
  Antisense strand to SEQ ID NO: 2096638
uacugugcuuuaaacugcc

SEQ ID NO: 2096640 - RNA, 19 nt, Artificial Sequence
  Description of Artificial Sequence: Synthetic oligonucleotide
  Sense strand starting at position 2962 of SEQ ID NO: 1882119
uucuaagagucauuaaaug

SEQ ID NO: 2096641 - RNA, 19 nt, Artificial Sequence
  Description of Artificial Sequence: Synthetic oligonucleotide
  Antisense strand to SEQ ID NO: 2096640
cauuuaaugacucuuagaa

SEQ ID NO: 2096642 - RNA, 19 nt, Artificial Sequence
  Description of Artificial Sequence: Synthetic oligonucleotide
  Sense strand starting at position 3445 of SEQ ID NO: 1882119
guguuaaguaaguacaucu

SEQ ID NO: 2096643 - RNA, 19 nt, Artificial Sequence
  Description of Artificial Sequence: Synthetic oligonucleotide
  Antisense strand to SEQ ID NO: 2096642
agauguacuuacuuaacac

SEQ ID NO: 2096644 - RNA, 19 nt, Artificial Sequence
  Description of Artificial Sequence: Synthetic oligonucleotide
  Sense strand starting at position 3452 of SEQ ID NO: 1882119
guaaguacaucucuaaauu

SEQ ID NO: 2096645 - RNA, 19 nt, Artificial Sequence
  Description of Artificial Sequence: Synthetic oligonucleotide
  Antisense strand to SEQ ID NO: 2096644
aauuuagagauguacuuac

SEQ ID NO: 2096646 - RNA, 19 nt, Artificial Sequence
  Description of Artificial Sequence: Synthetic oligonucleotide
  Sense strand starting at position 3586 of SEQ ID NO: 1882119
gugaauaaccuccaaaugu

SEQ ID NO: 2096647 - RNA, 19 nt, Artificial Sequence
  Description of Artificial Sequence: Synthetic oligonucleotide
  Antisense strand to SEQ ID NO: 2096646
acauuuggagguuauucac

SEQ ID NO: 2096648 - RNA, 19 nt, Artificial Sequence
  Description of Artificial Sequence: Synthetic oligonucleotide
  Sense strand starting at position 3757 of SEQ ID NO: 1882119
cuaaguagucagcaaacaa

SEQ ID NO: 2096649 - RNA, 19 nt, Artificial Sequence
  Description of Artificial Sequence: Synthetic oligonucleotide
  Antisense strand to SEQ ID NO: 2096648
uuguuugcugacuacuuag

SEQ ID NO: 2096650 - RNA, 19 nt, Artificial Sequence
  Description of Artificial Sequence: Synthetic oligonucleotide
  Sense strand starting at position 3788 of SEQ ID NO: 1882119
ugcucagcugaacagauua

SEQ ID NO: 2096651 - RNA, 19 nt, Artificial Sequence
  Description of Artificial Sequence: Synthetic oligonucleotide
  Antisense strand to SEQ ID NO: 2096650
uaaucuguucagcugagca

SEQ ID NO: 2096652 - RNA, 19 nt, Artificial Sequence
  Description of Artificial Sequence: Synthetic oligonucleotide
  Sense strand starting at position 3806 of SEQ ID NO: 1882119
aucaaaugccuuugggagu

SEQ ID NO: 2096653 - RNA, 19 nt, Artificial Sequence
  Description of Artificial Sequence: Synthetic oligonucleotide
  Antisense strand to SEQ ID NO: 2096652
acucccaaaggcauuugau

SEQ ID NO: 2096654 - RNA, 19 nt, Artificial Sequence
  Description of Artificial Sequence: Synthetic oligonucleotide
  Sense strand starting at position 3981 of SEQ ID NO: 1882119
ucagcauugcucguguauc

SEQ ID NO: 2096655 - RNA, 19 nt, Artificial Sequence
  Description of Artificial Sequence: Synthetic oligonucleotide
  Antisense strand to SEQ ID NO: 2096654
gauacacgagcaaugcuga

SEQ ID NO: 2096656 - RNA, 19 nt, Artificial Sequence
  Description of Artificial Sequence: Synthetic oligonucleotide
  Sense strand starting at position 3983 of SEQ ID NO: 1882119
agcauugcucguguaucuu

SEQ ID NO: 2096657 - RNA, 19 nt, Artificial Sequence
  Description of Artificial Sequence: Synthetic oligonucleotide
  Antisense strand to SEQ ID NO: 2096656
aagauacacgagcaaugcu

SEQ ID NO: 2096658 - RNA, 19 nt, Artificial Sequence
  Description of Artificial Sequence: Synthetic oligonucleotide
  Sense strand starting at position 90 of SEQ ID NO: 1882120
acccuagggcuuuggaauu

SEQ ID NO: 2096659 - RNA, 19 nt, Artificial Sequence
  Description of Artificial Sequence: Synthetic oligonucleotide
  Antisense strand to SEQ ID NO: 2096658
aauuccaaagcccuagggu

SEQ ID NO: 2096660 - RNA, 19 nt, Artificial Sequence
  Description of Artificial Sequence: Synthetic oligonucleotide
  Sense strand starting at position 277 of SEQ ID NO: 1882120
aguggagaauaugucucaa

SEQ ID NO: 2096661 - RNA, 19 nt, Artificial Sequence
  Description of Artificial Sequence: Synthetic oligonucleotide
  Antisense strand to SEQ ID NO: 2096660
uugagacauauucuccacu

SEQ ID NO: 2096662 - RNA, 19 nt, Artificial Sequence
  Description of Artificial Sequence: Synthetic oligonucleotide
  Sense strand starting at position 279 of SEQ ID NO: 1882120
uggagaauaugucucaaau

SEQ ID NO: 2096663 - RNA, 19 nt, Artificial Sequence
  Description of Artificial Sequence: Synthetic oligonucleotide
  Antisense strand to SEQ ID NO: 2096662
auuugagacauauucucca

SEQ ID NO: 2096664 - RNA, 19 nt, Artificial Sequence
  Description of Artificial Sequence: Synthetic oligonucleotide
  Sense strand starting at position 500 of SEQ ID NO: 1882120
aguaaauagcaugaggcau

SEQ ID NO: 2096665 - RNA, 19 nt, Artificial Sequence
  Description of Artificial Sequence: Synthetic oligonucleotide
  Antisense strand to SEQ ID NO: 2096664
augccucaugcuauuuacu

SEQ ID NO: 2096666 - RNA, 19 nt, Artificial Sequence
  Description of Artificial Sequence: Synthetic oligonucleotide
  Sense strand starting at position 508 of SEQ ID NO: 1882120
gcaugaggcauuuggcaug

SEQ ID NO: 2096667 - RNA, 19 nt, Artificial Sequence
  Description of Artificial Sequence: Synthetic oligonucleotide
  Antisense strand to SEQ ID NO: 2096666
caugccaaaugccucaugc

SEQ ID NO: 2096668 - RNA, 19 nt, Artificial Sequence
  Description of Artificial Sequence: Synthetic oligonucleotide
  Sense strand starting at position 675 of SEQ ID NO: 1882120
uucugcaaguauuugcuaa

SEQ ID NO: 2096669 - RNA, 19 nt, Artificial Sequence
  Description of Artificial Sequence: Synthetic oligonucleotide
  Antisense strand to SEQ ID NO: 2096668
uuagcaaauacuugcagaa

SEQ ID NO: 2096670 - RNA, 19 nt, Artificial Sequence
  Description of Artificial Sequence: Synthetic oligonucleotide
  Sense strand starting at position 677 of SEQ ID NO: 1882120
cugcaaguauuugcuaaug

SEQ ID NO: 2096671 - RNA, 19 nt, Artificial Sequence
  Description of Artificial Sequence: Synthetic oligonucleotide
  Antisense strand to SEQ ID NO: 2096670
cauuagcaaauacuugcag

SEQ ID NO: 2096672 - RNA, 19 nt, Artificial Sequence
  Description of Artificial Sequence: Synthetic oligonucleotide
  Sense strand starting at position 694 of SEQ ID NO: 1882120
uguuauugugaacacuaua

SEQ ID NO: 2096673 - RNA, 19 nt, Artificial Sequence
  Description of Artificial Sequence: Synthetic oligonucleotide
  Antisense strand to SEQ ID NO: 2096672
uauaguguucacaauaaca

SEQ ID NO: 2096674 - RNA, 19 nt, Artificial Sequence
  Description of Artificial Sequence: Synthetic oligonucleotide
  Sense strand starting at position 816 of SEQ ID NO: 1882120
uggcaaagccuggaaacau

SEQ ID NO: 2096675 - RNA, 19 nt, Artificial Sequence
  Description of Artificial Sequence: Synthetic oligonucleotide
  Antisense strand to SEQ ID NO: 2096674
auguuuccaggcuuugcca

SEQ ID NO: 2096676 - RNA, 19 nt, Artificial Sequence
  Description of Artificial Sequence: Synthetic oligonucleotide
  Sense strand starting at position 874 of SEQ ID NO: 1882120
cuuggaacugucuggagau

SEQ ID NO: 2096677 - RNA, 19 nt, Artificial Sequence
  Description of Artificial Sequence: Synthetic oligonucleotide
  Antisense strand to SEQ ID NO: 2096676
aucuccagacaguuccaag

SEQ ID NO: 2096678 - RNA, 19 nt, Artificial Sequence
  Description of Artificial Sequence: Synthetic oligonucleotide
  Sense strand starting at position 876 of SEQ ID NO: 1882120
uggaacugucuggagaugu

SEQ ID NO: 2096679 - RNA, 19 nt, Artificial Sequence
  Description of Artificial Sequence: Synthetic oligonucleotide
  Antisense strand to SEQ ID NO: 2096678
acaucuccagacaguucca

SEQ ID NO: 2096680 - RNA, 19 nt, Artificial Sequence
  Description of Artificial Sequence: Synthetic oligonucleotide
  Sense strand starting at position 1014 of SEQ ID NO: 1882120
ccagaaugccuacacuguu

SEQ ID NO: 2096681 - RNA, 19 nt, Artificial Sequence
  Description of Artificial Sequence: Synthetic oligonucleotide
  Antisense strand to SEQ ID NO: 2096680
aacaguguaggcauucugg

SEQ ID NO: 2096682 - RNA, 19 nt, Artificial Sequence
  Description of Artificial Sequence: Synthetic oligonucleotide
  Sense strand starting at position 1024 of SEQ ID NO: 1882120
uacacuguuguuugagaaa

SEQ ID NO: 2096683 - RNA, 19 nt, Artificial Sequence
  Description of Artificial Sequence: Synthetic oligonucleotide
  Antisense strand to SEQ ID NO: 2096682
uuucucaaacaacagugua

SEQ ID NO: 2096684 - RNA, 19 nt, Artificial Sequence
  Description of Artificial Sequence: Synthetic oligonucleotide
  Sense strand starting at position 1133 of SEQ ID NO: 1882120
acuaguaaguuucccuaga

SEQ ID NO: 2096685 - RNA, 19 nt, Artificial Sequence
  Description of Artificial Sequence: Synthetic oligonucleotide
  Antisense strand to SEQ ID NO: 2096684
ucuagggaaacuuacuagu

SEQ ID NO: 2096686 - RNA, 19 nt, Artificial Sequence
  Description of Artificial Sequence: Synthetic oligonucleotide
  Sense strand starting at position 1305 of SEQ ID NO: 1882120
cccauuugccuguagugua

SEQ ID NO: 2096687 - RNA, 19 nt, Artificial Sequence
  Description of Artificial Sequence: Synthetic oligonucleotide
  Antisense strand to SEQ ID NO: 2096686
uacacuacaggcaaauggg

SEQ ID NO: 2096688 - RNA, 19 nt, Artificial Sequence
  Description of Artificial Sequence: Synthetic oligonucleotide
  Sense strand starting at position 1545 of SEQ ID NO: 1882120
uguagaguugcuuaagaaa

SEQ ID NO: 2096689 - RNA, 19 nt, Artificial Sequence
  Description of Artificial Sequence: Synthetic oligonucleotide
  Antisense strand to SEQ ID NO: 2096688
uuucuuaagcaacucuaca

SEQ ID NO: 2096690 - RNA, 19 nt, Artificial Sequence
  Description of Artificial Sequence: Synthetic oligonucleotide
  Sense strand starting at position 1600 of SEQ ID NO: 1882120
gaaguaacauagucauugu

SEQ ID NO: 2096691 - RNA, 19 nt, Artificial Sequence
  Description of Artificial Sequence: Synthetic oligonucleotide
  Antisense strand to SEQ ID NO: 2096690
acaaugacuauguuacuuc

SEQ ID NO: 2096692 - RNA, 19 nt, Artificial Sequence
  Description of Artificial Sequence: Synthetic oligonucleotide
  Sense strand starting at position 1608 of SEQ ID NO: 1882120
auagucauugucgauaauc

SEQ ID NO: 2096693 - RNA, 19 nt, Artificial Sequence
  Description of Artificial Sequence: Synthetic oligonucleotide
  Antisense strand to SEQ ID NO: 2096692
gauuaucgacaaugacuau

SEQ ID NO: 2096694 - RNA, 19 nt, Artificial Sequence
  Description of Artificial Sequence: Synthetic oligonucleotide
  Sense strand starting at position 1816 of SEQ ID NO: 1882120
gacauugacugguuugaga

SEQ ID NO: 2096695 - RNA, 19 nt, Artificial Sequence
  Description of Artificial Sequence: Synthetic oligonucleotide
  Antisense strand to SEQ ID NO: 2096694
ucucaaaccagucaauguc

SEQ ID NO: 2096696 - RNA, 19 nt, Artificial Sequence
  Description of Artificial Sequence: Synthetic oligonucleotide
  Sense strand starting at position 1818 of SEQ ID NO: 1882120
cauugacugguuugagaug

SEQ ID NO: 2096697 - RNA, 19 nt, Artificial Sequence
  Description of Artificial Sequence: Synthetic oligonucleotide
  Antisense strand to SEQ ID NO: 2096696
caucucaaaccagucaaug

SEQ ID NO: 2096698 - RNA, 19 nt, Artificial Sequence
  Description of Artificial Sequence: Synthetic oligonucleotide
  Sense strand starting at position 1823 of SEQ ID NO: 1882120
acugguuugagaugauauu

SEQ ID NO: 2096699 - RNA, 19 nt, Artificial Sequence
  Description of Artificial Sequence: Synthetic oligonucleotide
  Antisense strand to SEQ ID NO: 2096698
aauaucaucucaaaccagu

SEQ ID NO: 2096700 - RNA, 19 nt, Artificial Sequence
  Description of Artificial Sequence: Synthetic oligonucleotide
  Sense strand starting at position 1829 of SEQ ID NO: 1882120
uugagaugauauucuguaa

SEQ ID NO: 2096701 - RNA, 19 nt, Artificial Sequence
  Description of Artificial Sequence: Synthetic oligonucleotide
  Antisense strand to SEQ ID NO: 2096700
uuacagaauaucaucucaa

SEQ ID NO: 2096702 - RNA, 19 nt, Artificial Sequence
  Description of Artificial Sequence: Synthetic oligonucleotide
  Sense strand starting at position 1832 of SEQ ID NO: 1882120
agaugauauucuguaaacc

SEQ ID NO: 2096703 - RNA, 19 nt, Artificial Sequence
  Description of Artificial Sequence: Synthetic oligonucleotide
  Antisense strand to SEQ ID NO: 2096702
gguuuacagaauaucaucu

SEQ ID NO: 2096704 - RNA, 19 nt, Artificial Sequence
  Description of Artificial Sequence: Synthetic oligonucleotide
  Sense strand starting at position 1841 of SEQ ID NO: 1882120
ucuguaaaccaagauaguu

SEQ ID NO: 2096705 - RNA, 19 nt, Artificial Sequence
  Description of Artificial Sequence: Synthetic oligonucleotide
  Antisense strand to SEQ ID NO: 2096704
aacuaucuugguuuacaga

SEQ ID NO: 2096706 - RNA, 19 nt, Artificial Sequence
  Description of Artificial Sequence: Synthetic oligonucleotide
  Sense strand starting at position 1975 of SEQ ID NO: 1882120
ccuccaugaauaggagagu

SEQ ID NO: 2096707 - RNA, 19 nt, Artificial Sequence
  Description of Artificial Sequence: Synthetic oligonucleotide
  Antisense strand to SEQ ID NO: 2096706
acucuccuauucauggagg

SEQ ID NO: 2096708 - RNA, 19 nt, Artificial Sequence
  Description of Artificial Sequence: Synthetic oligonucleotide
  Sense strand starting at position 1986 of SEQ ID NO: 1882120
aggagaguucuuuagcuga

SEQ ID NO: 2096709 - RNA, 19 nt, Artificial Sequence
  Description of Artificial Sequence: Synthetic oligonucleotide
  Antisense strand to SEQ ID NO: 2096708
ucagcuaaagaacucuccu

SEQ ID NO: 2096710 - RNA, 19 nt, Artificial Sequence
  Description of Artificial Sequence: Synthetic oligonucleotide
  Sense strand starting at position 1988 of SEQ ID NO: 1882120
gagaguucuuuagcugaaa

SEQ ID NO: 2096711 - RNA, 19 nt, Artificial Sequence
  Description of Artificial Sequence: Synthetic oligonucleotide
  Antisense strand to SEQ ID NO: 2096710
uuucagcuaaagaacucuc

SEQ ID NO: 2096712 - RNA, 19 nt, Artificial Sequence
  Description of Artificial Sequence: Synthetic oligonucleotide
  Sense strand starting at position 1989 of SEQ ID NO: 1882120
agaguucuuuagcugaaag

SEQ ID NO: 2096713 - RNA, 19 nt, Artificial Sequence
  Description of Artificial Sequence: Synthetic oligonucleotide
  Antisense strand to SEQ ID NO: 2096712
cuuucagcuaaagaacucu

SEQ ID NO: 2096714 - RNA, 19 nt, Artificial Sequence
  Description of Artificial Sequence: Synthetic oligonucleotide
  Sense strand starting at position 1991 of SEQ ID NO: 1882120
aguucuuuagcugaaagag

SEQ ID NO: 2096715 - RNA, 19 nt, Artificial Sequence
  Description of Artificial Sequence: Synthetic oligonucleotide
  Antisense strand to SEQ ID NO: 2096714
cucuuucagcuaaagaacu

SEQ ID NO: 2096716 - RNA, 19 nt, Artificial Sequence
  Description of Artificial Sequence: Synthetic oligonucleotide
  Sense strand starting at position 2102 of SEQ ID NO: 1882120
cagugauaggcaugagaca

SEQ ID NO: 2096717 - RNA, 19 nt, Artificial Sequence
  Description of Artificial Sequence: Synthetic oligonucleotide
  Antisense strand to SEQ ID NO: 2096716
ugucucaugccuaucacug

SEQ ID NO: 2096718 - RNA, 19 nt, Artificial Sequence
  Description of Artificial Sequence: Synthetic oligonucleotide
  Sense strand starting at position 2113 of SEQ ID NO: 1882120
augagacagcucuaguguu

SEQ ID NO: 2096719 - RNA, 19 nt, Artificial Sequence
  Description of Artificial Sequence: Synthetic oligonucleotide
  Antisense strand to SEQ ID NO: 2096718
aacacuagagcugucucau

SEQ ID NO: 2096720 - RNA, 19 nt, Artificial Sequence
  Description of Artificial Sequence: Synthetic oligonucleotide
  Sense strand starting at position 2324 of SEQ ID NO: 1882120
agucacagucaugaugcau

SEQ ID NO: 2096721 - RNA, 19 nt, Artificial Sequence
  Description of Artificial Sequence: Synthetic oligonucleotide
  Antisense strand to SEQ ID NO: 2096720
augcaucaugacugugacu

SEQ ID NO: 2096722 - RNA, 19 nt, Artificial Sequence
  Description of Artificial Sequence: Synthetic oligonucleotide
  Sense strand starting at position 2516 of SEQ ID NO: 1882120
uuugguccuggagacuuua

SEQ ID NO: 2096723 - RNA, 19 nt, Artificial Sequence
  Description of Artificial Sequence: Synthetic oligonucleotide
  Antisense strand to SEQ ID NO: 2096722
uaaagucuccaggaccaaa

SEQ ID NO: 2096724 - RNA, 19 nt, Artificial Sequence
  Description of Artificial Sequence: Synthetic oligonucleotide
  Sense strand starting at position 2654 of SEQ ID NO: 1882120
cuguuagagguauggaucu

SEQ ID NO: 2096725 - RNA, 19 nt, Artificial Sequence
  Description of Artificial Sequence: Synthetic oligonucleotide
  Antisense strand to SEQ ID NO: 2096724
agauccauaccucuaacag

SEQ ID NO: 2096726 - RNA, 19 nt, Artificial Sequence
  Description of Artificial Sequence: Synthetic oligonucleotide
  Sense strand starting at position 2656 of SEQ ID NO: 1882120
guuagagguauggaucuuu

SEQ ID NO: 2096727 - RNA, 19 nt, Artificial Sequence
  Description of Artificial Sequence: Synthetic oligonucleotide
  Antisense strand to SEQ ID NO: 2096726
aaagauccauaccucuaac

SEQ ID NO: 2096728 - RNA, 19 nt, Artificial Sequence
  Description of Artificial Sequence: Synthetic oligonucleotide
  Sense strand starting at position 2815 of SEQ ID NO: 1882120
ggcacaugucauuacaccu

SEQ ID NO: 2096729 - RNA, 19 nt, Artificial Sequence
  Description of Artificial Sequence: Synthetic oligonucleotide
  Antisense strand to SEQ ID NO: 2096728
agguguaaugacaugugcc

SEQ ID NO: 2096730 - RNA, 19 nt, Artificial Sequence
  Description of Artificial Sequence: Synthetic oligonucleotide
  Sense strand starting at position 3326 of SEQ ID NO: 1882120
caaucaagagccuggaagu

SEQ ID NO: 2096731 - RNA, 19 nt, Artificial Sequence
  Description of Artificial Sequence: Synthetic oligonucleotide
  Antisense strand to SEQ ID NO: 2096730
acuuccaggcucuugauug

SEQ ID NO: 2096732 - RNA, 19 nt, Artificial Sequence
  Description of Artificial Sequence: Synthetic oligonucleotide
  Sense strand starting at position 3336 of SEQ ID NO: 1882120
ccuggaagucuuuacaauc

SEQ ID NO: 2096733 - RNA, 19 nt, Artificial Sequence
  Description of Artificial Sequence: Synthetic oligonucleotide
  Antisense strand to SEQ ID NO: 2096732
gauuguaaagacuuccagg

SEQ ID NO: 2096734 - RNA, 19 nt, Artificial Sequence
  Description of Artificial Sequence: Synthetic oligonucleotide
  Sense strand starting at position 3374 of SEQ ID NO: 1882120
gggccaucugagcauaaga

SEQ ID NO: 2096735 - RNA, 19 nt, Artificial Sequence
  Description of Artificial Sequence: Synthetic oligonucleotide
  Antisense strand to SEQ ID NO: 2096734
ucuuaugcucagauggccc

SEQ ID NO: 2096736 - RNA, 19 nt, Artificial Sequence
  Description of Artificial Sequence: Synthetic oligonucleotide
  Sense strand starting at position 3567 of SEQ ID NO: 1882120
ucucucuuugauuagaguu

SEQ ID NO: 2096737 - RNA, 19 nt, Artificial Sequence
  Description of Artificial Sequence: Synthetic oligonucleotide
  Antisense strand to SEQ ID NO: 2096736
aacucuaaucaaagagaga

SEQ ID NO: 2096738 - RNA, 19 nt, Artificial Sequence
  Description of Artificial Sequence: Synthetic oligonucleotide
  Sense strand starting at position 75 of SEQ ID NO: 1882121
cuauuuguuugggaguucu

SEQ ID NO: 2096739 - RNA, 19 nt, Artificial Sequence
  Description of Artificial Sequence: Synthetic oligonucleotide
  Antisense strand to SEQ ID NO: 2096738
agaacucccaaacaaauag

SEQ ID NO: 2096740 - RNA, 19 nt, Artificial Sequence
  Description of Artificial Sequence: Synthetic oligonucleotide
  Sense strand starting at position 150 of SEQ ID NO: 1882121
ucaucuuaagugcaguaga

SEQ ID NO: 2096741 - RNA, 19 nt, Artificial Sequence
  Description of Artificial Sequence: Synthetic oligonucleotide
  Antisense strand to SEQ ID NO: 2096740
ucuacugcacuuaagauga

SEQ ID NO: 2096742 - RNA, 19 nt, Artificial Sequence
  Description of Artificial Sequence: Synthetic oligonucleotide
  Sense strand starting at position 153 of SEQ ID NO: 1882121
ucuuaagugcaguagagaa

SEQ ID NO: 2096743 - RNA, 19 nt, Artificial Sequence
  Description of Artificial Sequence: Synthetic oligonucleotide
  Antisense strand to SEQ ID NO: 2096742
uucucuacugcacuuaaga

SEQ ID NO: 2096744 - RNA, 19 nt, Artificial Sequence
  Description of Artificial Sequence: Synthetic oligonucleotide
  Sense strand starting at position 1063 of SEQ ID NO: 1882121
ggaagauggucccaggacu

SEQ ID NO: 2096745 - RNA, 19 nt, Artificial Sequence
  Description of Artificial Sequence: Synthetic oligonucleotide
  Antisense strand to SEQ ID NO: 2096744
aguccugggaccaucuucc

SEQ ID NO: 2096746 - RNA, 19 nt, Artificial Sequence
  Description of Artificial Sequence: Synthetic oligonucleotide
  Sense strand starting at position 1687 of SEQ ID NO: 1882121
cgacguuucuuaccagggu

SEQ ID NO: 2096747 - RNA, 19 nt, Artificial Sequence
  Description of Artificial Sequence: Synthetic oligonucleotide
  Antisense strand to SEQ ID NO: 2096746
acccugguaagaaacgucg

SEQ ID NO: 2096748 - RNA, 19 nt, Artificial Sequence
  Description of Artificial Sequence: Synthetic oligonucleotide
  Sense strand starting at position 1690 of SEQ ID NO: 1882121
cguuucuuaccaggguaga

SEQ ID NO: 2096749 - RNA, 19 nt, Artificial Sequence
  Description of Artificial Sequence: Synthetic oligonucleotide
  Antisense strand to SEQ ID NO: 2096748
ucuacccugguaagaaacg

SEQ ID NO: 2096750 - RNA, 19 nt, Artificial Sequence
  Description of Artificial Sequence: Synthetic oligonucleotide
  Sense strand starting at position 1691 of SEQ ID NO: 1882121
guuucuuaccaggguagag

SEQ ID NO: 2096751 - RNA, 19 nt, Artificial Sequence
  Description of Artificial Sequence: Synthetic oligonucleotide
  Antisense strand to SEQ ID NO: 2096750
cucuacccugguaagaaac

SEQ ID NO: 2096752 - RNA, 19 nt, Artificial Sequence
  Description of Artificial Sequence: Synthetic oligonucleotide
  Sense strand starting at position 1905 of SEQ ID NO: 1882121
gcccauugucuggaucaca

SEQ ID NO: 2096753 - RNA, 19 nt, Artificial Sequence
  Description of Artificial Sequence: Synthetic oligonucleotide
  Antisense strand to SEQ ID NO: 2096752
ugugauccagacaaugggc

SEQ ID NO: 2096754 - RNA, 19 nt, Artificial Sequence
  Description of Artificial Sequence: Synthetic oligonucleotide
  Sense strand starting at position 1932 of SEQ ID NO: 1882121
uuucuugucugagcacaau

SEQ ID NO: 2096755 - RNA, 19 nt, Artificial Sequence
  Description of Artificial Sequence: Synthetic oligonucleotide
  Antisense strand to SEQ ID NO: 2096754
auugugcucagacaagaaa

SEQ ID NO: 2096756 - RNA, 19 nt, Artificial Sequence
  Description of Artificial Sequence: Synthetic oligonucleotide
  Sense strand starting at position 2044 of SEQ ID NO: 1882121
gagaauggccucugacuca

SEQ ID NO: 2096757 - RNA, 19 nt, Artificial Sequence
  Description of Artificial Sequence: Synthetic oligonucleotide
  Antisense strand to SEQ ID NO: 2096756
ugagucagaggccauucuc

SEQ ID NO: 2096758 - RNA, 19 nt, Artificial Sequence
  Description of Artificial Sequence: Synthetic oligonucleotide
  Sense strand starting at position 2104 of SEQ ID NO: 1882121
gggcaucaugcuggagaga

SEQ ID NO: 2096759 - RNA, 19 nt, Artificial Sequence
  Description of Artificial Sequence: Synthetic oligonucleotide
  Antisense strand to SEQ ID NO: 2096758
ucucuccagcaugaugccc

SEQ ID NO: 2096760 - RNA, 19 nt, Artificial Sequence
  Description of Artificial Sequence: Synthetic oligonucleotide
  Sense strand starting at position 2287 of SEQ ID NO: 1882121
ggcauaagaugcccuuaga

SEQ ID NO: 2096761 - RNA, 19 nt, Artificial Sequence
  Description of Artificial Sequence: Synthetic oligonucleotide
  Antisense strand to SEQ ID NO: 2096760
ucuaagggcaucuuaugcc

SEQ ID NO: 2096762 - RNA, 19 nt, Artificial Sequence
  Description of Artificial Sequence: Synthetic oligonucleotide
  Sense strand starting at position 2623 of SEQ ID NO: 1882121
ucuuguaacccaggagaag

SEQ ID NO: 2096763 - RNA, 19 nt, Artificial Sequence
  Description of Artificial Sequence: Synthetic oligonucleotide
  Antisense strand to SEQ ID NO: 2096762
cuucuccuggguuacaaga

SEQ ID NO: 2096764 - RNA, 19 nt, Artificial Sequence
  Description of Artificial Sequence: Synthetic oligonucleotide
  Sense strand starting at position 2676 of SEQ ID NO: 1882121
ugaggacauucccugucuu

SEQ ID NO: 2096765 - RNA, 19 nt, Artificial Sequence
  Description of Artificial Sequence: Synthetic oligonucleotide
  Antisense strand to SEQ ID NO: 2096764
aagacagggaauguccuca

SEQ ID NO: 2096766 - RNA, 19 nt, Artificial Sequence
  Description of Artificial Sequence: Synthetic oligonucleotide
  Sense strand starting at position 2677 of SEQ ID NO: 1882121
gaggacauucccugucuuu

SEQ ID NO: 2096767 - RNA, 19 nt, Artificial Sequence
  Description of Artificial Sequence: Synthetic oligonucleotide
  Antisense strand to SEQ ID NO: 2096766
aaagacagggaauguccuc

SEQ ID NO: 2096768 - RNA, 19 nt, Artificial Sequence
  Description of Artificial Sequence: Synthetic oligonucleotide
  Sense strand starting at position 2915 of SEQ ID NO: 1882121
cagucuuggcugugggaga

SEQ ID NO: 2096769 - RNA, 19 nt, Artificial Sequence
  Description of Artificial Sequence: Synthetic oligonucleotide
  Antisense strand to SEQ ID NO: 2096768
ucucccacagccaagacug

SEQ ID NO: 2096770 - RNA, 19 nt, Artificial Sequence
  Description of Artificial Sequence: Synthetic oligonucleotide
  Sense strand starting at position 3071 of SEQ ID NO: 1882121
cuccaaucuuugucacugu

SEQ ID NO: 2096771 - RNA, 19 nt, Artificial Sequence
  Description of Artificial Sequence: Synthetic oligonucleotide
  Antisense strand to SEQ ID NO: 2096770
acagugacaaagauuggag

SEQ ID NO: 2096772 - RNA, 19 nt, Artificial Sequence
  Description of Artificial Sequence: Synthetic oligonucleotide
  Sense strand starting at position 3075 of SEQ ID NO: 1882121
aaucuuugucacuguguga

SEQ ID NO: 2096773 - RNA, 19 nt, Artificial Sequence
  Description of Artificial Sequence: Synthetic oligonucleotide
  Antisense strand to SEQ ID NO: 2096772
ucacacagugacaaagauu

SEQ ID NO: 2096774 - RNA, 19 nt, Artificial Sequence
  Description of Artificial Sequence: Synthetic oligonucleotide
  Sense strand starting at position 3079 of SEQ ID NO: 1882121
uuugucacugugugaaaug

SEQ ID NO: 2096775 - RNA, 19 nt, Artificial Sequence
  Description of Artificial Sequence: Synthetic oligonucleotide
  Antisense strand to SEQ ID NO: 2096774
cauuucacacagugacaaa

SEQ ID NO: 2096776 - RNA, 19 nt, Artificial Sequence
  Description of Artificial Sequence: Synthetic oligonucleotide
  Sense strand starting at position 3093 of SEQ ID NO: 1882121
aaauguggacuugguauga

SEQ ID NO: 2096777 - RNA, 19 nt, Artificial Sequence
  Description of Artificial Sequence: Synthetic oligonucleotide
  Antisense strand to SEQ ID NO: 2096776
ucauaccaaguccacauuu

SEQ ID NO: 2096778 - RNA, 19 nt, Artificial Sequence
  Description of Artificial Sequence: Synthetic oligonucleotide
  Sense strand starting at position 3102 of SEQ ID NO: 1882121
cuugguaugaccugacugu

SEQ ID NO: 2096779 - RNA, 19 nt, Artificial Sequence
  Description of Artificial Sequence: Synthetic oligonucleotide
  Antisense strand to SEQ ID NO: 2096778
acagucaggucauaccaag

SEQ ID NO: 2096780 - RNA, 19 nt, Artificial Sequence
  Description of Artificial Sequence: Synthetic oligonucleotide
  Sense strand starting at position 3106 of SEQ ID NO: 1882121
guaugaccugacuguccaa

SEQ ID NO: 2096781 - RNA, 19 nt, Artificial Sequence
  Description of Artificial Sequence: Synthetic oligonucleotide
  Antisense strand to SEQ ID NO: 2096780
uuggacagucaggucauac

SEQ ID NO: 2096782 - RNA, 19 nt, Artificial Sequence
  Description of Artificial Sequence: Synthetic oligonucleotide
  Sense strand starting at position 3182 of SEQ ID NO: 1882121
guuggcaauuaaucagaau

SEQ ID NO: 2096783 - RNA, 19 nt, Artificial Sequence
  Description of Artificial Sequence: Synthetic oligonucleotide
  Antisense strand to SEQ ID NO: 2096782
auucugauuaauugccaac

SEQ ID NO: 2096784 - RNA, 19 nt, Artificial Sequence
  Description of Artificial Sequence: Synthetic oligonucleotide
  Sense strand starting at position 3214 of SEQ ID NO: 1882121
gauugugaacauggauugu

SEQ ID NO: 2096785 - RNA, 19 nt, Artificial Sequence
  Description of Artificial Sequence: Synthetic oligonucleotide
  Antisense strand to SEQ ID NO: 2096784
acaauccauguucacaauc

SEQ ID NO: 2096786 - RNA, 19 nt, Artificial Sequence
  Description of Artificial Sequence: Synthetic oligonucleotide
  Sense strand starting at position 3244 of SEQ ID NO: 1882121
gucugagaacuguguccaa

SEQ ID NO: 2096787 - RNA, 19 nt, Artificial Sequence
  Description of Artificial Sequence: Synthetic oligonucleotide
  Antisense strand to SEQ ID NO: 2096786
uuggacacaguucucagac

SEQ ID NO: 2096788 - RNA, 19 nt, Artificial Sequence
  Description of Artificial Sequence: Synthetic oligonucleotide
  Sense strand starting at position 3248 of SEQ ID NO: 1882121
gagaacuguguccaaccua

SEQ ID NO: 2096789 - RNA, 19 nt, Artificial Sequence
  Description of Artificial Sequence: Synthetic oligonucleotide
  Antisense strand to SEQ ID NO: 2096788
uagguuggacacaguucuc

SEQ ID NO: 2096790 - RNA, 19 nt, Artificial Sequence
  Description of Artificial Sequence: Synthetic oligonucleotide
  Sense strand starting at position 3283 of SEQ ID NO: 1882121
gaccucugguccgugggaa

SEQ ID NO: 2096791 - RNA, 19 nt, Artificial Sequence
  Description of Artificial Sequence: Synthetic oligonucleotide
  Antisense strand to SEQ ID NO: 2096790
uucccacggaccagagguc

SEQ ID NO: 2096792 - RNA, 19 nt, Artificial Sequence
  Description of Artificial Sequence: Synthetic oligonucleotide
  Sense strand starting at position 3284 of SEQ ID NO: 1882121
accucugguccgugggaaa

SEQ ID NO: 2096793 - RNA, 19 nt, Artificial Sequence
  Description of Artificial Sequence: Synthetic oligonucleotide
  Antisense strand to SEQ ID NO: 2096792
uuucccacggaccagaggu

SEQ ID NO: 2096794 - RNA, 19 nt, Artificial Sequence
  Description of Artificial Sequence: Synthetic oligonucleotide
  Sense strand starting at position 3333 of SEQ ID NO: 1882121
ggcuguguacacugugaca

SEQ ID NO: 2096795 - RNA, 19 nt, Artificial Sequence
  Description of Artificial Sequence: Synthetic oligonucleotide
  Antisense strand to SEQ ID NO: 2096794
ugucacaguguacacagcc

SEQ ID NO: 2096796 - RNA, 19 nt, Artificial Sequence
  Description of Artificial Sequence: Synthetic oligonucleotide
  Sense strand starting at position 3438 of SEQ ID NO: 1882121
gguccuacugcugaagaaa

SEQ ID NO: 2096797 - RNA, 19 nt, Artificial Sequence
  Description of Artificial Sequence: Synthetic oligonucleotide
  Antisense strand to SEQ ID NO: 2096796
uuucuucagcaguaggacc

SEQ ID NO: 2096798 - RNA, 19 nt, Artificial Sequence
  Description of Artificial Sequence: Synthetic oligonucleotide
  Sense strand starting at position 3686 of SEQ ID NO: 1882121
ggaggaaccuggucucuga

SEQ ID NO: 2096799 - RNA, 19 nt, Artificial Sequence
  Description of Artificial Sequence: Synthetic oligonucleotide
  Antisense strand to SEQ ID NO: 2096798
ucagagaccagguuccucc

SEQ ID NO: 2096800 - RNA, 19 nt, Artificial Sequence
  Description of Artificial Sequence: Synthetic oligonucleotide
  Sense strand starting at position 3791 of SEQ ID NO: 1882121
cagucucuguggucuuauu

SEQ ID NO: 2096801 - RNA, 19 nt, Artificial Sequence
  Description of Artificial Sequence: Synthetic oligonucleotide
  Antisense strand to SEQ ID NO: 2096800
aauaagaccacagagacug

SEQ ID NO: 2096802 - RNA, 19 nt, Artificial Sequence
  Description of Artificial Sequence: Synthetic oligonucleotide
  Sense strand starting at position 3798 of SEQ ID NO: 1882121
uguggucuuauuuguaguu

SEQ ID NO: 2096803 - RNA, 19 nt, Artificial Sequence
  Description of Artificial Sequence: Synthetic oligonucleotide
  Antisense strand to SEQ ID NO: 2096802
aacuacaaauaagaccaca

SEQ ID NO: 2096804 - RNA, 19 nt, Artificial Sequence
  Description of Artificial Sequence: Synthetic oligonucleotide
  Sense strand starting at position 3799 of SEQ ID NO: 1882121
guggucuuauuuguaguuu

SEQ ID NO: 2096805 - RNA, 19 nt, Artificial Sequence
  Description of Artificial Sequence: Synthetic oligonucleotide
  Antisense strand to SEQ ID NO: 2096804
aaacuacaaauaagaccac

SEQ ID NO: 2096806 - RNA, 19 nt, Artificial Sequence
  Description of Artificial Sequence: Synthetic oligonucleotide
  Sense strand starting at position 3835 of SEQ ID NO: 1882121
uggcuuggugucaggguua

SEQ ID NO: 2096807 - RNA, 19 nt, Artificial Sequence
  Description of Artificial Sequence: Synthetic oligonucleotide
  Antisense strand to SEQ ID NO: 2096806
uaacccugacaccaagcca

SEQ ID NO: 2096808 - RNA, 19 nt, Artificial Sequence
  Description of Artificial Sequence: Synthetic oligonucleotide
  Sense strand starting at position 3847 of SEQ ID NO: 1882121
aggguuaggucaucuaccu

SEQ ID NO: 2096809 - RNA, 19 nt, Artificial Sequence
  Description of Artificial Sequence: Synthetic oligonucleotide
  Antisense strand to SEQ ID NO: 2096808
agguagaugaccuaacccu

SEQ ID NO: 2096810 - RNA, 19 nt, Artificial Sequence
  Description of Artificial Sequence: Synthetic oligonucleotide
  Sense strand starting at position 3855 of SEQ ID NO: 1882121
gucaucuaccugcaagcaa

SEQ ID NO: 2096811 - RNA, 19 nt, Artificial Sequence
  Description of Artificial Sequence: Synthetic oligonucleotide
  Antisense strand to SEQ ID NO: 2096810
uugcuugcagguagaugac

SEQ ID NO: 2096812 - RNA, 19 nt, Artificial Sequence
  Description of Artificial Sequence: Synthetic oligonucleotide
  Sense strand starting at position 3977 of SEQ ID NO: 1882121
gccucaguuccucuguguu

SEQ ID NO: 2096813 - RNA, 19 nt, Artificial Sequence
  Description of Artificial Sequence: Synthetic oligonucleotide
  Antisense strand to SEQ ID NO: 2096812
aacacagaggaacugaggc

SEQ ID NO: 2096814 - RNA, 19 nt, Artificial Sequence
  Description of Artificial Sequence: Synthetic oligonucleotide
  Sense strand starting at position 3979 of SEQ ID NO: 1882121
cucaguuccucuguguuga

SEQ ID NO: 2096815 - RNA, 19 nt, Artificial Sequence
  Description of Artificial Sequence: Synthetic oligonucleotide
  Antisense strand to SEQ ID NO: 2096814
ucaacacagaggaacugag

SEQ ID NO: 2096816 - RNA, 19 nt, Artificial Sequence
  Description of Artificial Sequence: Synthetic oligonucleotide
  Sense strand starting at position 3980 of SEQ ID NO: 1882121
ucaguuccucuguguugau

SEQ ID NO: 2096817 - RNA, 19 nt, Artificial Sequence
  Description of Artificial Sequence: Synthetic oligonucleotide
  Antisense strand to SEQ ID NO: 2096816
aucaacacagaggaacuga

SEQ ID NO: 2096818 - RNA, 19 nt, Artificial Sequence
  Description of Artificial Sequence: Synthetic oligonucleotide
  Sense strand starting at position 52 of SEQ ID NO: 1882122
cgcccuuguccucugucaa

SEQ ID NO: 2096819 - RNA, 19 nt, Artificial Sequence
  Description of Artificial Sequence: Synthetic oligonucleotide
  Antisense strand to SEQ ID NO: 2096818
uugacagaggacaagggcg

SEQ ID NO: 2096820 - RNA, 19 nt, Artificial Sequence
  Description of Artificial Sequence: Synthetic oligonucleotide
  Sense strand starting at position 91 of SEQ ID NO: 1882122
caccauucuguugggauca

SEQ ID NO: 2096821 - RNA, 19 nt, Artificial Sequence
  Description of Artificial Sequence: Synthetic oligonucleotide
  Antisense strand to SEQ ID NO: 2096820
ugaucccaacagaauggug

SEQ ID NO: 2096822 - RNA, 19 nt, Artificial Sequence
  Description of Artificial Sequence: Synthetic oligonucleotide
  Sense strand starting at position 96 of SEQ ID NO: 1882122
uucuguugggaucagguaa

SEQ ID NO: 2096823 - RNA, 19 nt, Artificial Sequence
  Description of Artificial Sequence: Synthetic oligonucleotide
  Antisense strand to SEQ ID NO: 2096822
uuaccugaucccaacagaa

SEQ ID NO: 2096824 - RNA, 19 nt, Artificial Sequence
  Description of Artificial Sequence: Synthetic oligonucleotide
  Sense strand starting at position 345 of SEQ ID NO: 1882122
cugcauguuccugcuguga

SEQ ID NO: 2096825 - RNA, 19 nt, Artificial Sequence
  Description of Artificial Sequence: Synthetic oligonucleotide
  Antisense strand to SEQ ID NO: 2096824
ucacagcaggaacaugcag

SEQ ID NO: 2096826 - RNA, 19 nt, Artificial Sequence
  Description of Artificial Sequence: Synthetic oligonucleotide
  Sense strand starting at position 417 of SEQ ID NO: 1882122
agagcugagcuuugauauc

SEQ ID NO: 2096827 - RNA, 19 nt, Artificial Sequence
  Description of Artificial Sequence: Synthetic oligonucleotide
  Antisense strand to SEQ ID NO: 2096826
gauaucaaagcucagcucu

SEQ ID NO: 2096828 - RNA, 19 nt, Artificial Sequence
  Description of Artificial Sequence: Synthetic oligonucleotide
  Sense strand starting at position 423 of SEQ ID NO: 1882122
gagcuuugauaucuguaaa

SEQ ID NO: 2096829 - RNA, 19 nt, Artificial Sequence
  Description of Artificial Sequence: Synthetic oligonucleotide
  Antisense strand to SEQ ID NO: 2096828
uuuacagauaucaaagcuc

SEQ ID NO: 2096830 - RNA, 19 nt, Artificial Sequence
  Description of Artificial Sequence: Synthetic oligonucleotide
  Sense strand starting at position 455 of SEQ ID NO: 1882122
agccucauaccugagaauu

SEQ ID NO: 2096831 - RNA, 19 nt, Artificial Sequence
  Description of Artificial Sequence: Synthetic oligonucleotide
  Antisense strand to SEQ ID NO: 2096830
aauucucagguaugaggcu

SEQ ID NO: 2096832 - RNA, 19 nt, Artificial Sequence
  Description of Artificial Sequence: Synthetic oligonucleotide
  Sense strand starting at position 463 of SEQ ID NO: 1882122
accugagaauuagauaaac

SEQ ID NO: 2096833 - RNA, 19 nt, Artificial Sequence
  Description of Artificial Sequence: Synthetic oligonucleotide
  Antisense strand to SEQ ID NO: 2096832
guuuaucuaauucucaggu

SEQ ID NO: 2096834 - RNA, 19 nt, Artificial Sequence
  Description of Artificial Sequence: Synthetic oligonucleotide
  Sense strand starting at position 804 of SEQ ID NO: 1882122
uaguguucuagugaggucu

SEQ ID NO: 2096835 - RNA, 19 nt, Artificial Sequence
  Description of Artificial Sequence: Synthetic oligonucleotide
  Antisense strand to SEQ ID NO: 2096834
agaccucacuagaacacua

SEQ ID NO: 2096836 - RNA, 19 nt, Artificial Sequence
  Description of Artificial Sequence: Synthetic oligonucleotide
  Sense strand starting at position 1090 of SEQ ID NO: 1882122
aagaguaaggccugaguca

SEQ ID NO: 2096837 - RNA, 19 nt, Artificial Sequence
  Description of Artificial Sequence: Synthetic oligonucleotide
  Antisense strand to SEQ ID NO: 2096836
ugacucaggccuuacucuu

SEQ ID NO: 2096838 - RNA, 19 nt, Artificial Sequence
  Description of Artificial Sequence: Synthetic oligonucleotide
  Sense strand starting at position 1091 of SEQ ID NO: 1882122
agaguaaggccugagucaa

SEQ ID NO: 2096839 - RNA, 19 nt, Artificial Sequence
  Description of Artificial Sequence: Synthetic oligonucleotide
  Antisense strand to SEQ ID NO: 2096838
uugacucaggccuuacucu

SEQ ID NO: 2096840 - RNA, 19 nt, Artificial Sequence
  Description of Artificial Sequence: Synthetic oligonucleotide
  Sense strand starting at position 1160 of SEQ ID NO: 1882122
gucuaugagaaaugggucu

SEQ ID NO: 2096841 - RNA, 19 nt, Artificial Sequence
  Description of Artificial Sequence: Synthetic oligonucleotide
  Antisense strand to SEQ ID NO: 2096840
agacccauuucucauagac

SEQ ID NO: 2096842 - RNA, 19 nt, Artificial Sequence
  Description of Artificial Sequence: Synthetic oligonucleotide
  Sense strand starting at position 1162 of SEQ ID NO: 1882122
cuaugagaaaugggucugu

SEQ ID NO: 2096843 - RNA, 19 nt, Artificial Sequence
  Description of Artificial Sequence: Synthetic oligonucleotide
  Antisense strand to SEQ ID NO: 2096842
acagacccauuucucauag

SEQ ID NO: 2096844 - RNA, 19 nt, Artificial Sequence
  Description of Artificial Sequence: Synthetic oligonucleotide
  Sense strand starting at position 1166 of SEQ ID NO: 1882122
gagaaaugggucugugagg

SEQ ID NO: 2096845 - RNA, 19 nt, Artificial Sequence
  Description of Artificial Sequence: Synthetic oligonucleotide
  Antisense strand to SEQ ID NO: 2096844
ccucacagacccauuucuc

SEQ ID NO: 2096846 - RNA, 19 nt, Artificial Sequence
  Description of Artificial Sequence: Synthetic oligonucleotide
  Sense strand starting at position 1197 of SEQ ID NO: 1882122
caguaauaggcaggaccua

SEQ ID NO: 2096847 - RNA, 19 nt, Artificial Sequence
  Description of Artificial Sequence: Synthetic oligonucleotide
  Antisense strand to SEQ ID NO: 2096846
uagguccugccuauuacug

SEQ ID NO: 2096848 - RNA, 19 nt, Artificial Sequence
  Description of Artificial Sequence: Synthetic oligonucleotide
  Sense strand starting at position 1357 of SEQ ID NO: 1882122
gggccauaggugcagauua

SEQ ID NO: 2096849 - RNA, 19 nt, Artificial Sequence
  Description of Artificial Sequence: Synthetic oligonucleotide
  Antisense strand to SEQ ID NO: 2096848
uaaucugcaccuauggccc

SEQ ID NO: 2096850 - RNA, 19 nt, Artificial Sequence
  Description of Artificial Sequence: Synthetic oligonucleotide
  Sense strand starting at position 1756 of SEQ ID NO: 1882122
ccgauuauccuucgaagac

SEQ ID NO: 2096851 - RNA, 19 nt, Artificial Sequence
  Description of Artificial Sequence: Synthetic oligonucleotide
  Antisense strand to SEQ ID NO: 2096850
gucuucgaaggauaaucgg

SEQ ID NO: 2096852 - RNA, 19 nt, Artificial Sequence
  Description of Artificial Sequence: Synthetic oligonucleotide
  Sense strand starting at position 2337 of SEQ ID NO: 1882122
cgugguauuuggaagagca

SEQ ID NO: 2096853 - RNA, 19 nt, Artificial Sequence
  Description of Artificial Sequence: Synthetic oligonucleotide
  Antisense strand to SEQ ID NO: 2096852
ugcucuuccaaauaccacg

SEQ ID NO: 2096854 - RNA, 19 nt, Artificial Sequence
  Description of Artificial Sequence: Synthetic oligonucleotide
  Sense strand starting at position 2369 of SEQ ID NO: 1882122
ucgcuaucuggagaucgaa

SEQ ID NO: 2096855 - RNA, 19 nt, Artificial Sequence
  Description of Artificial Sequence: Synthetic oligonucleotide
  Antisense strand to SEQ ID NO: 2096854
uucgaucuccagauagcga

SEQ ID NO: 2096856 - RNA, 19 nt, Artificial Sequence
  Description of Artificial Sequence: Synthetic oligonucleotide
  Sense strand starting at position 2372 of SEQ ID NO: 1882122
cuaucuggagaucgaauua

SEQ ID NO: 2096857 - RNA, 19 nt, Artificial Sequence
  Description of Artificial Sequence: Synthetic oligonucleotide
  Antisense strand to SEQ ID NO: 2096856
uaauucgaucuccagauag

SEQ ID NO: 2096858 - RNA, 19 nt, Artificial Sequence
  Description of Artificial Sequence: Synthetic oligonucleotide
  Sense strand starting at position 2414 of SEQ ID NO: 1882122
ccaggaaggacucgauauc

SEQ ID NO: 2096859 - RNA, 19 nt, Artificial Sequence
  Description of Artificial Sequence: Synthetic oligonucleotide
  Antisense strand to SEQ ID NO: 2096858
gauaucgaguccuuccugg

SEQ ID NO: 2096860 - RNA, 19 nt, Artificial Sequence
  Description of Artificial Sequence: Synthetic oligonucleotide
  Sense strand starting at position 2429 of SEQ ID NO: 1882122
uaucgaauccuagguagac

SEQ ID NO: 2096861 - RNA, 19 nt, Artificial Sequence
  Description of Artificial Sequence: Synthetic oligonucleotide
  Antisense strand to SEQ ID NO: 2096860
gucuaccuaggauucgaua

SEQ ID NO: 2096862 - RNA, 19 nt, Artificial Sequence
  Description of Artificial Sequence: Synthetic oligonucleotide
  Sense strand starting at position 2505 of SEQ ID NO: 1882122
gguggugguuuacuugaga

SEQ ID NO: 2096863 - RNA, 19 nt, Artificial Sequence
  Description of Artificial Sequence: Synthetic oligonucleotide
  Antisense strand to SEQ ID NO: 2096862
ucucaaguaaaccaccacc

SEQ ID NO: 2096864 - RNA, 19 nt, Artificial Sequence
  Description of Artificial Sequence: Synthetic oligonucleotide
  Sense strand starting at position 2508 of SEQ ID NO: 1882122
ggugguuuacuugagaccu

SEQ ID NO: 2096865 - RNA, 19 nt, Artificial Sequence
  Description of Artificial Sequence: Synthetic oligonucleotide
  Antisense strand to SEQ ID NO: 2096864
aggucucaaguaaaccacc

SEQ ID NO: 2096866 - RNA, 19 nt, Artificial Sequence
  Description of Artificial Sequence: Synthetic oligonucleotide
  Sense strand starting at position 2578 of SEQ ID NO: 1882122
gggaguugggagggaucuu

SEQ ID NO: 2096867 - RNA, 19 nt, Artificial Sequence
  Description of Artificial Sequence: Synthetic oligonucleotide
  Antisense strand to SEQ ID NO: 2096866
aagaucccucccaacuccc

SEQ ID NO: 2096868 - RNA, 19 nt, Artificial Sequence
  Description of Artificial Sequence: Synthetic oligonucleotide
  Sense strand starting at position 2590 of SEQ ID NO: 1882122
ggaucuuggaguuggaaau

SEQ ID NO: 2096869 - RNA, 19 nt, Artificial Sequence
  Description of Artificial Sequence: Synthetic oligonucleotide
  Antisense strand to SEQ ID NO: 2096868
auuuccaacuccaagaucc

SEQ ID NO: 2096870 - RNA, 19 nt, Artificial Sequence
  Description of Artificial Sequence: Synthetic oligonucleotide
  Sense strand starting at position 2679 of SEQ ID NO: 1882122
gaauccaggucagucagau

SEQ ID NO: 2096871 - RNA, 19 nt, Artificial Sequence
  Description of Artificial Sequence: Synthetic oligonucleotide
  Antisense strand to SEQ ID NO: 2096870
aucugacugaccuggauuc

SEQ ID NO: 2096872 - RNA, 19 nt, Artificial Sequence
  Description of Artificial Sequence: Synthetic oligonucleotide
  Sense strand starting at position 2729 of SEQ ID NO: 1882122
ccuuaacucugguuugaac

SEQ ID NO: 2096873 - RNA, 19 nt, Artificial Sequence
  Description of Artificial Sequence: Synthetic oligonucleotide
  Antisense strand to SEQ ID NO: 2096872
guucaaaccagaguuaagg

SEQ ID NO: 2096874 - RNA, 19 nt, Artificial Sequence
  Description of Artificial Sequence: Synthetic oligonucleotide
  Sense strand starting at position 2738 of SEQ ID NO: 1882122
ugguuugaaccauagcaca

SEQ ID NO: 2096875 - RNA, 19 nt, Artificial Sequence
  Description of Artificial Sequence: Synthetic oligonucleotide
  Antisense strand to SEQ ID NO: 2096874
ugugcuaugguucaaacca

SEQ ID NO: 2096876 - RNA, 19 nt, Artificial Sequence
  Description of Artificial Sequence: Synthetic oligonucleotide
  Sense strand starting at position 3174 of SEQ ID NO: 1882122
agauacauguggcuagaga

SEQ ID NO: 2096877 - RNA, 19 nt, Artificial Sequence
  Description of Artificial Sequence: Synthetic oligonucleotide
  Antisense strand to SEQ ID NO: 2096876
ucucuagccacauguaucu

SEQ ID NO: 2096878 - RNA, 19 nt, Artificial Sequence
  Description of Artificial Sequence: Synthetic oligonucleotide
  Sense strand starting at position 3239 of SEQ ID NO: 1882122
gguugacagcuguagagua

SEQ ID NO: 2096879 - RNA, 19 nt, Artificial Sequence
  Description of Artificial Sequence: Synthetic oligonucleotide
  Antisense strand to SEQ ID NO: 2096878
uacucuacagcugucaacc

SEQ ID NO: 2096880 - RNA, 19 nt, Artificial Sequence
  Description of Artificial Sequence: Synthetic oligonucleotide
  Sense strand starting at position 3252 of SEQ ID NO: 1882122
agaguaugaccucagguuu

SEQ ID NO: 2096881 - RNA, 19 nt, Artificial Sequence
  Description of Artificial Sequence: Synthetic oligonucleotide
  Antisense strand to SEQ ID NO: 2096880
aaaccugaggucauacucu

SEQ ID NO: 2096882 - RNA, 19 nt, Artificial Sequence
  Description of Artificial Sequence: Synthetic oligonucleotide
  Sense strand starting at position 3298 of SEQ ID NO: 1882122
ggaccuguccuuugacuca

SEQ ID NO: 2096883 - RNA, 19 nt, Artificial Sequence
  Description of Artificial Sequence: Synthetic oligonucleotide
  Antisense strand to SEQ ID NO: 2096882
ugagucaaaggacaggucc

SEQ ID NO: 2096884 - RNA, 19 nt, Artificial Sequence
  Description of Artificial Sequence: Synthetic oligonucleotide
  Sense strand starting at position 3342 of SEQ ID NO: 1882122
aucuuacggaguuguccua

SEQ ID NO: 2096885 - RNA, 19 nt, Artificial Sequence
  Description of Artificial Sequence: Synthetic oligonucleotide
  Antisense strand to SEQ ID NO: 2096884
uaggacaacuccguaagau

SEQ ID NO: 2096886 - RNA, 19 nt, Artificial Sequence
  Description of Artificial Sequence: Synthetic oligonucleotide
  Sense strand starting at position 3389 of SEQ ID NO: 1882122
gcaucuauggcacagauau

SEQ ID NO: 2096887 - RNA, 19 nt, Artificial Sequence
  Description of Artificial Sequence: Synthetic oligonucleotide
  Antisense strand to SEQ ID NO: 2096886
auaucugugccauagaugc

SEQ ID NO: 2096888 - RNA, 19 nt, Artificial Sequence
  Description of Artificial Sequence: Synthetic oligonucleotide
  Sense strand starting at position 3397 of SEQ ID NO: 1882122
ggcacagauauauguugga

SEQ ID NO: 2096889 - RNA, 19 nt, Artificial Sequence
  Description of Artificial Sequence: Synthetic oligonucleotide
  Antisense strand to SEQ ID NO: 2096888
uccaacauauaucugugcc

SEQ ID NO: 2096890 - RNA, 19 nt, Artificial Sequence
  Description of Artificial Sequence: Synthetic oligonucleotide
  Sense strand starting at position 3401 of SEQ ID NO: 1882122
cagauauauguuggacuca

SEQ ID NO: 2096891 - RNA, 19 nt, Artificial Sequence
  Description of Artificial Sequence: Synthetic oligonucleotide
  Antisense strand to SEQ ID NO: 2096890
ugaguccaacauauaucug

SEQ ID NO: 2096892 - RNA, 19 nt, Artificial Sequence
  Description of Artificial Sequence: Synthetic oligonucleotide
  Sense strand starting at position 3879 of SEQ ID NO: 1882122
gcccuuuguugaucucaag

SEQ ID NO: 2096893 - RNA, 19 nt, Artificial Sequence
  Description of Artificial Sequence: Synthetic oligonucleotide
  Antisense strand to SEQ ID NO: 2096892
cuugagaucaacaaagggc

SEQ ID NO: 2096894 - RNA, 19 nt, Artificial Sequence
  Description of Artificial Sequence: Synthetic oligonucleotide
  Sense strand starting at position 3908 of SEQ ID NO: 1882122
uuugccuucuaguuuaaga

SEQ ID NO: 2096895 - RNA, 19 nt, Artificial Sequence
  Description of Artificial Sequence: Synthetic oligonucleotide
  Antisense strand to SEQ ID NO: 2096894
ucuuaaacuagaaggcaaa

SEQ ID NO: 2096896 - RNA, 19 nt, Artificial Sequence
  Description of Artificial Sequence: Synthetic oligonucleotide
  Sense strand starting at position 3910 of SEQ ID NO: 1882122
ugccuucuaguuuaagagu

SEQ ID NO: 2096897 - RNA, 19 nt, Artificial Sequence
  Description of Artificial Sequence: Synthetic oligonucleotide
  Antisense strand to SEQ ID NO: 2096896
acucuuaaacuagaaggca

SEQ ID NO: 2096898 - RNA, 19 nt, Artificial Sequence
  Description of Artificial Sequence: Synthetic oligonucleotide
  Sense strand starting at position 1 of SEQ ID NO: 1882123
agucuuguccugcaaguua

SEQ ID NO: 2096899 - RNA, 19 nt, Artificial Sequence
  Description of Artificial Sequence: Synthetic oligonucleotide
  Antisense strand to SEQ ID NO: 2096898
uaacuugcaggacaagacu

SEQ ID NO: 2096900 - RNA, 19 nt, Artificial Sequence
  Description of Artificial Sequence: Synthetic oligonucleotide
  Sense strand starting at position 101 of SEQ ID NO: 1882123
ugucauauaguaggaucaa

SEQ ID NO: 2096901 - RNA, 19 nt, Artificial Sequence
  Description of Artificial Sequence: Synthetic oligonucleotide
  Antisense strand to SEQ ID NO: 2096900
uugauccuacuauaugaca

SEQ ID NO: 2096902 - RNA, 19 nt, Artificial Sequence
  Description of Artificial Sequence: Synthetic oligonucleotide
  Sense strand starting at position 113 of SEQ ID NO: 1882123
ggaucaacaucagugauua

SEQ ID NO: 2096903 - RNA, 19 nt, Artificial Sequence
  Description of Artificial Sequence: Synthetic oligonucleotide
  Antisense strand to SEQ ID NO: 2096902
uaaucacugauguugaucc

SEQ ID NO: 2096904 - RNA, 19 nt, Artificial Sequence
  Description of Artificial Sequence: Synthetic oligonucleotide
  Sense strand starting at position 145 of SEQ ID NO: 1882123
aggcaagacuucccagauu

SEQ ID NO: 2096905 - RNA, 19 nt, Artificial Sequence
  Description of Artificial Sequence: Synthetic oligonucleotide
  Antisense strand to SEQ ID NO: 2096904
aaucugggaagucuugccu

SEQ ID NO: 2096906 - RNA, 19 nt, Artificial Sequence
  Description of Artificial Sequence: Synthetic oligonucleotide
  Sense strand starting at position 311 of SEQ ID NO: 1882123
aggauaauguaucugaucu

SEQ ID NO: 2096907 - RNA, 19 nt, Artificial Sequence
  Description of Artificial Sequence: Synthetic oligonucleotide
  Antisense strand to SEQ ID NO: 2096906
agaucagauacauuauccu

SEQ ID NO: 2096908 - RNA, 19 nt, Artificial Sequence
  Description of Artificial Sequence: Synthetic oligonucleotide
  Sense strand starting at position 322 of SEQ ID NO: 1882123
ucugaucuaccuugaagaa

SEQ ID NO: 2096909 - RNA, 19 nt, Artificial Sequence
  Description of Artificial Sequence: Synthetic oligonucleotide
  Antisense strand to SEQ ID NO: 2096908
uucuucaagguagaucaga

SEQ ID NO: 2096910 - RNA, 19 nt, Artificial Sequence
  Description of Artificial Sequence: Synthetic oligonucleotide
  Sense strand starting at position 337 of SEQ ID NO: 1882123
agaaacaguucugccuuaa

SEQ ID NO: 2096911 - RNA, 19 nt, Artificial Sequence
  Description of Artificial Sequence: Synthetic oligonucleotide
  Antisense strand to SEQ ID NO: 2096910
uuaaggcagaacuguuucu

SEQ ID NO: 2096912 - RNA, 19 nt, Artificial Sequence
  Description of Artificial Sequence: Synthetic oligonucleotide
  Sense strand starting at position 357 of SEQ ID NO: 1882123
uuagucauccugcauguca

SEQ ID NO: 2096913 - RNA, 19 nt, Artificial Sequence
  Description of Artificial Sequence: Synthetic oligonucleotide
  Antisense strand to SEQ ID NO: 2096912
ugacaugcaggaugacuaa

SEQ ID NO: 2096914 - RNA, 19 nt, Artificial Sequence
  Description of Artificial Sequence: Synthetic oligonucleotide
  Sense strand starting at position 359 of SEQ ID NO: 1882123
agucauccugcaugucaga

SEQ ID NO: 2096915 - RNA, 19 nt, Artificial Sequence
  Description of Artificial Sequence: Synthetic oligonucleotide
  Antisense strand to SEQ ID NO: 2096914
ucugacaugcaggaugacu

SEQ ID NO: 2096916 - RNA, 19 nt, Artificial Sequence
  Description of Artificial Sequence: Synthetic oligonucleotide
  Sense strand starting at position 368 of SEQ ID NO: 1882123
gcaugucagagaggaaugu

SEQ ID NO: 2096917 - RNA, 19 nt, Artificial Sequence
  Description of Artificial Sequence: Synthetic oligonucleotide
  Antisense strand to SEQ ID NO: 2096916
acauuccucucugacaugc

SEQ ID NO: 2096918 - RNA, 19 nt, Artificial Sequence
  Description of Artificial Sequence: Synthetic oligonucleotide
  Sense strand starting at position 441 of SEQ ID NO: 1882123
cuagucacauguccaaauu

SEQ ID NO: 2096919 - RNA, 19 nt, Artificial Sequence
  Description of Artificial Sequence: Synthetic oligonucleotide
  Antisense strand to SEQ ID NO: 2096918
aauuuggacaugugacuag

SEQ ID NO: 2096920 - RNA, 19 nt, Artificial Sequence
  Description of Artificial Sequence: Synthetic oligonucleotide
  Sense strand starting at position 463 of SEQ ID NO: 1882123
guucuugaacuuugaauua

SEQ ID NO: 2096921 - RNA, 19 nt, Artificial Sequence
  Description of Artificial Sequence: Synthetic oligonucleotide
  Antisense strand to SEQ ID NO: 2096920
uaauucaaaguucaagaac

SEQ ID NO: 2096922 - RNA, 19 nt, Artificial Sequence
  Description of Artificial Sequence: Synthetic oligonucleotide
  Sense strand starting at position 694 of SEQ ID NO: 1882123
auacuaagacugggcaauu

SEQ ID NO: 2096923 - RNA, 19 nt, Artificial Sequence
  Description of Artificial Sequence: Synthetic oligonucleotide
  Antisense strand to SEQ ID NO: 2096922
aauugcccagucuuaguau

SEQ ID NO: 2096924 - RNA, 19 nt, Artificial Sequence
  Description of Artificial Sequence: Synthetic oligonucleotide
  Sense strand starting at position 804 of SEQ ID NO: 1882123
acacucauggcagaaugua

SEQ ID NO: 2096925 - RNA, 19 nt, Artificial Sequence
  Description of Artificial Sequence: Synthetic oligonucleotide
  Antisense strand to SEQ ID NO: 2096924
uacauucugccaugagugu

SEQ ID NO: 2096926 - RNA, 19 nt, Artificial Sequence
  Description of Artificial Sequence: Synthetic oligonucleotide
  Sense strand starting at position 1104 of SEQ ID NO: 1882123
uuagcugugugacuuacau

SEQ ID NO: 2096927 - RNA, 19 nt, Artificial Sequence
  Description of Artificial Sequence: Synthetic oligonucleotide
  Antisense strand to SEQ ID NO: 2096926
auguaagucacacagcuaa

SEQ ID NO: 2096928 - RNA, 19 nt, Artificial Sequence
  Description of Artificial Sequence: Synthetic oligonucleotide
  Sense strand starting at position 1106 of SEQ ID NO: 1882123
agcugugugacuuacaugu

SEQ ID NO: 2096929 - RNA, 19 nt, Artificial Sequence
  Description of Artificial Sequence: Synthetic oligonucleotide
  Antisense strand to SEQ ID NO: 2096928
acauguaagucacacagcu

SEQ ID NO: 2096930 - RNA, 19 nt, Artificial Sequence
  Description of Artificial Sequence: Synthetic oligonucleotide
  Sense strand starting at position 1110 of SEQ ID NO: 1882123
gugugacuuacauguuuaa

SEQ ID NO: 2096931 - RNA, 19 nt, Artificial Sequence
  Description of Artificial Sequence: Synthetic oligonucleotide
  Antisense strand to SEQ ID NO: 2096930
uuaaacauguaagucacac

SEQ ID NO: 2096932 - RNA, 19 nt, Artificial Sequence
  Description of Artificial Sequence: Synthetic oligonucleotide
  Sense strand starting at position 1245 of SEQ ID NO: 1882123
agcacuauacauuaguuua

SEQ ID NO: 2096933 - RNA, 19 nt, Artificial Sequence
  Description of Artificial Sequence: Synthetic oligonucleotide
  Antisense strand to SEQ ID NO: 2096932
uaaacuaauguauagugcu

SEQ ID NO: 2096934 - RNA, 19 nt, Artificial Sequence
  Description of Artificial Sequence: Synthetic oligonucleotide
  Sense strand starting at position 1327 of SEQ ID NO: 1882123
uuguguguaccugugaguu

SEQ ID NO: 2096935 - RNA, 19 nt, Artificial Sequence
  Description of Artificial Sequence: Synthetic oligonucleotide
  Antisense strand to SEQ ID NO: 2096934
aacucacagguacacacaa

SEQ ID NO: 2096936 - RNA, 19 nt, Artificial Sequence
  Description of Artificial Sequence: Synthetic oligonucleotide
  Sense strand starting at position 1335 of SEQ ID NO: 1882123
accugugaguuguuuagaa

SEQ ID NO: 2096937 - RNA, 19 nt, Artificial Sequence
  Description of Artificial Sequence: Synthetic oligonucleotide
  Antisense strand to SEQ ID NO: 2096936
uucuaaacaacucacaggu

SEQ ID NO: 2096938 - RNA, 19 nt, Artificial Sequence
  Description of Artificial Sequence: Synthetic oligonucleotide
  Sense strand starting at position 1337 of SEQ ID NO: 1882123
cugugaguuguuuagaaug

SEQ ID NO: 2096939 - RNA, 19 nt, Artificial Sequence
  Description of Artificial Sequence: Synthetic oligonucleotide
  Antisense strand to SEQ ID NO: 2096938
cauucuaaacaacucacag

SEQ ID NO: 2096940 - RNA, 19 nt, Artificial Sequence
  Description of Artificial Sequence: Synthetic oligonucleotide
  Sense strand starting at position 2117 of SEQ ID NO: 1882123
uuauuauaggagugcaaga

SEQ ID NO: 2096941 - RNA, 19 nt, Artificial Sequence
  Description of Artificial Sequence: Synthetic oligonucleotide
  Antisense strand to SEQ ID NO: 2096940
ucuugcacuccuauaauaa

SEQ ID NO: 2096942 - RNA, 19 nt, Artificial Sequence
  Description of Artificial Sequence: Synthetic oligonucleotide
  Sense strand starting at position 2133 of SEQ ID NO: 1882123
agaaauuucucauggccau

SEQ ID NO: 2096943 - RNA, 19 nt, Artificial Sequence
  Description of Artificial Sequence: Synthetic oligonucleotide
  Antisense strand to SEQ ID NO: 2096942
auggccaugagaaauuucu

SEQ ID NO: 2096944 - RNA, 19 nt, Artificial Sequence
  Description of Artificial Sequence: Synthetic oligonucleotide
  Sense strand starting at position 2167 of SEQ ID NO: 1882123
ggcccaucugagugcaaug

SEQ ID NO: 2096945 - RNA, 19 nt, Artificial Sequence
  Description of Artificial Sequence: Synthetic oligonucleotide
  Antisense strand to SEQ ID NO: 2096944
cauugcacucagaugggcc

SEQ ID NO: 2096946 - RNA, 19 nt, Artificial Sequence
  Description of Artificial Sequence: Synthetic oligonucleotide
  Sense strand starting at position 2172 of SEQ ID NO: 1882123
aucugagugcaaugagaac

SEQ ID NO: 2096947 - RNA, 19 nt, Artificial Sequence
  Description of Artificial Sequence: Synthetic oligonucleotide
  Antisense strand to SEQ ID NO: 2096946
guucucauugcacucagau

SEQ ID NO: 2096948 - RNA, 19 nt, Artificial Sequence
  Description of Artificial Sequence: Synthetic oligonucleotide
  Sense strand starting at position 2470 of SEQ ID NO: 1882123
agauguggucagggacaca

SEQ ID NO: 2096949 - RNA, 19 nt, Artificial Sequence
  Description of Artificial Sequence: Synthetic oligonucleotide
  Antisense strand to SEQ ID NO: 2096948
ugugucccugaccacaucu

SEQ ID NO: 2096950 - RNA, 19 nt, Artificial Sequence
  Description of Artificial Sequence: Synthetic oligonucleotide
  Sense strand starting at position 2539 of SEQ ID NO: 1882123
acuacauccuuggauaaag

SEQ ID NO: 2096951 - RNA, 19 nt, Artificial Sequence
  Description of Artificial Sequence: Synthetic oligonucleotide
  Antisense strand to SEQ ID NO: 2096950
cuuuauccaaggauguagu

SEQ ID NO: 2096952 - RNA, 19 nt, Artificial Sequence
  Description of Artificial Sequence: Synthetic oligonucleotide
  Sense strand starting at position 3012 of SEQ ID NO: 1882123
ggauuacaggcgugugaug

SEQ ID NO: 2096953 - RNA, 19 nt, Artificial Sequence
  Description of Artificial Sequence: Synthetic oligonucleotide
  Antisense strand to SEQ ID NO: 2096952
caucacacgccuguaaucc

SEQ ID NO: 2096954 - RNA, 19 nt, Artificial Sequence
  Description of Artificial Sequence: Synthetic oligonucleotide
  Sense strand starting at position 3303 of SEQ ID NO: 1882123
aaguuuaaucucuagugag

SEQ ID NO: 2096955 - RNA, 19 nt, Artificial Sequence
  Description of Artificial Sequence: Synthetic oligonucleotide
  Antisense strand to SEQ ID NO: 2096954
cucacuagagauuaaacuu

SEQ ID NO: 2096956 - RNA, 19 nt, Artificial Sequence
  Description of Artificial Sequence: Synthetic oligonucleotide
  Sense strand starting at position 3324 of SEQ ID NO: 1882123
agcggaauccugggauuac

SEQ ID NO: 2096957 - RNA, 19 nt, Artificial Sequence
  Description of Artificial Sequence: Synthetic oligonucleotide
  Antisense strand to SEQ ID NO: 2096956
guaaucccaggauuccgcu

SEQ ID NO: 2096958 - RNA, 19 nt, Artificial Sequence
  Description of Artificial Sequence: Synthetic oligonucleotide
  Sense strand starting at position 3335 of SEQ ID NO: 1882123
gggauuaccucuuacaaag

SEQ ID NO: 2096959 - RNA, 19 nt, Artificial Sequence
  Description of Artificial Sequence: Synthetic oligonucleotide
  Antisense strand to SEQ ID NO: 2096958
cuuuguaagagguaauccc

SEQ ID NO: 2096960 - RNA, 19 nt, Artificial Sequence
  Description of Artificial Sequence: Synthetic oligonucleotide
  Sense strand starting at position 3486 of SEQ ID NO: 1882123
cuuucugguaaguaguuua

SEQ ID NO: 2096961 - RNA, 19 nt, Artificial Sequence
  Description of Artificial Sequence: Synthetic oligonucleotide
  Antisense strand to SEQ ID NO: 2096960
uaaacuacuuaccagaaag

SEQ ID NO: 2096962 - RNA, 19 nt, Artificial Sequence
  Description of Artificial Sequence: Synthetic oligonucleotide
  Sense strand starting at position 3489 of SEQ ID NO: 1882123
ucugguaaguaguuuaaag

SEQ ID NO: 2096963 - RNA, 19 nt, Artificial Sequence
  Description of Artificial Sequence: Synthetic oligonucleotide
  Antisense strand to SEQ ID NO: 2096962
cuuuaaacuacuuaccaga

SEQ ID NO: 2096964 - RNA, 19 nt, Artificial Sequence
  Description of Artificial Sequence: Synthetic oligonucleotide
  Sense strand starting at position 3491 of SEQ ID NO: 1882123
ugguaaguaguuuaaagua

SEQ ID NO: 2096965 - RNA, 19 nt, Artificial Sequence
  Description of Artificial Sequence: Synthetic oligonucleotide
  Antisense strand to SEQ ID NO: 2096964
uacuuuaaacuacuuacca

SEQ ID NO: 2096966 - RNA, 19 nt, Artificial Sequence
  Description of Artificial Sequence: Synthetic oligonucleotide
  Sense strand starting at position 3508 of SEQ ID NO: 1882123
uauugucauuuggagaaau

SEQ ID NO: 2096967 - RNA, 19 nt, Artificial Sequence
  Description of Artificial Sequence: Synthetic oligonucleotide
  Antisense strand to SEQ ID NO: 2096966
auuucuccaaaugacaaua

SEQ ID NO: 2096968 - RNA, 19 nt, Artificial Sequence
  Description of Artificial Sequence: Synthetic oligonucleotide
  Sense strand starting at position 3668 of SEQ ID NO: 1882123
aucaguuaguaugucauua

SEQ ID NO: 2096969 - RNA, 19 nt, Artificial Sequence
  Description of Artificial Sequence: Synthetic oligonucleotide
  Antisense strand to SEQ ID NO: 2096968
uaaugacauacuaacugau

SEQ ID NO: 2096970 - RNA, 19 nt, Artificial Sequence
  Description of Artificial Sequence: Synthetic oligonucleotide
  Sense strand starting at position 3672 of SEQ ID NO: 1882123
guuaguaugucauuaaucc

SEQ ID NO: 2096971 - RNA, 19 nt, Artificial Sequence
  Description of Artificial Sequence: Synthetic oligonucleotide
  Antisense strand to SEQ ID NO: 2096970
ggauuaaugacauacuaac

SEQ ID NO: 2096972 - RNA, 19 nt, Artificial Sequence
  Description of Artificial Sequence: Synthetic oligonucleotide
  Sense strand starting at position 3673 of SEQ ID NO: 1882123
uuaguaugucauuaauccu

SEQ ID NO: 2096973 - RNA, 19 nt, Artificial Sequence
  Description of Artificial Sequence: Synthetic oligonucleotide
  Antisense strand to SEQ ID NO: 2096972
aggauuaaugacauacuaa

SEQ ID NO: 2096974 - RNA, 19 nt, Artificial Sequence
  Description of Artificial Sequence: Synthetic oligonucleotide
  Sense strand starting at position 3676 of SEQ ID NO: 1882123
guaugucauuaauccuaug

SEQ ID NO: 2096975 - RNA, 19 nt, Artificial Sequence
  Description of Artificial Sequence: Synthetic oligonucleotide
  Antisense strand to SEQ ID NO: 2096974
cauaggauuaaugacauac

SEQ ID NO: 2096976 - RNA, 19 nt, Artificial Sequence
  Description of Artificial Sequence: Synthetic oligonucleotide
  Sense strand starting at position 3831 of SEQ ID NO: 1882123
cucuauuguuuccugcaua

SEQ ID NO: 2096977 - RNA, 19 nt, Artificial Sequence
  Description of Artificial Sequence: Synthetic oligonucleotide
  Antisense strand to SEQ ID NO: 2096976
uaugcaggaaacaauagag

SEQ ID NO: 2096978 - RNA, 19 nt, Artificial Sequence
  Description of Artificial Sequence: Synthetic oligonucleotide
  Sense strand starting at position 52 of SEQ ID NO: 1882124
gugcuaaucccaugagaau

SEQ ID NO: 2096979 - RNA, 19 nt, Artificial Sequence
  Description of Artificial Sequence: Synthetic oligonucleotide
  Antisense strand to SEQ ID NO: 2096978
auucucaugggauuagcac

SEQ ID NO: 2096980 - RNA, 19 nt, Artificial Sequence
  Description of Artificial Sequence: Synthetic oligonucleotide
  Sense strand starting at position 66 of SEQ ID NO: 1882124
agaauaauuucugauuagc

SEQ ID NO: 2096981 - RNA, 19 nt, Artificial Sequence
  Description of Artificial Sequence: Synthetic oligonucleotide
  Antisense strand to SEQ ID NO: 2096980
gcuaaucagaaauuauucu

SEQ ID NO: 2096982 - RNA, 19 nt, Artificial Sequence
  Description of Artificial Sequence: Synthetic oligonucleotide
  Sense strand starting at position 99 of SEQ ID NO: 1882124
agagacauccuuugaagca

SEQ ID NO: 2096983 - RNA, 19 nt, Artificial Sequence
  Description of Artificial Sequence: Synthetic oligonucleotide
  Antisense strand to SEQ ID NO: 2096982
ugcuucaaaggaugucucu

SEQ ID NO: 2096984 - RNA, 19 nt, Artificial Sequence
  Description of Artificial Sequence: Synthetic oligonucleotide
  Sense strand starting at position 192 of SEQ ID NO: 1882124
cugcuaaggucacuuggaa

SEQ ID NO: 2096985 - RNA, 19 nt, Artificial Sequence
  Description of Artificial Sequence: Synthetic oligonucleotide
  Antisense strand to SEQ ID NO: 2096984
uuccaagugaccuuagcag

SEQ ID NO: 2096986 - RNA, 19 nt, Artificial Sequence
  Description of Artificial Sequence: Synthetic oligonucleotide
  Sense strand starting at position 224 of SEQ ID NO: 1882124
cuugauaaugcaugagcaa

SEQ ID NO: 2096987 - RNA, 19 nt, Artificial Sequence
  Description of Artificial Sequence: Synthetic oligonucleotide
  Antisense strand to SEQ ID NO: 2096986
uugcucaugcauuaucaag

SEQ ID NO: 2096988 - RNA, 19 nt, Artificial Sequence
  Description of Artificial Sequence: Synthetic oligonucleotide
  Sense strand starting at position 231 of SEQ ID NO: 1882124
augcaugagcaacauuagu

SEQ ID NO: 2096989 - RNA, 19 nt, Artificial Sequence
  Description of Artificial Sequence: Synthetic oligonucleotide
  Antisense strand to SEQ ID NO: 2096988
acuaauguugcucaugcau

SEQ ID NO: 2096990 - RNA, 19 nt, Artificial Sequence
  Description of Artificial Sequence: Synthetic oligonucleotide
  Sense strand starting at position 409 of SEQ ID NO: 1882124
ggacaagaaccgugucuua

SEQ ID NO: 2096991 - RNA, 19 nt, Artificial Sequence
  Description of Artificial Sequence: Synthetic oligonucleotide
  Antisense strand to SEQ ID NO: 2096990
uaagacacgguucuugucc

SEQ ID NO: 2096992 - RNA, 19 nt, Artificial Sequence
  Description of Artificial Sequence: Synthetic oligonucleotide
  Sense strand starting at position 412 of SEQ ID NO: 1882124
caagaaccgugucuuauuu

SEQ ID NO: 2096993 - RNA, 19 nt, Artificial Sequence
  Description of Artificial Sequence: Synthetic oligonucleotide
  Antisense strand to SEQ ID NO: 2096992
aaauaagacacgguucuug

SEQ ID NO: 2096994 - RNA, 19 nt, Artificial Sequence
  Description of Artificial Sequence: Synthetic oligonucleotide
  Sense strand starting at position 741 of SEQ ID NO: 1882124
acaggacuauuguuaagau

SEQ ID NO: 2096995 - RNA, 19 nt, Artificial Sequence
  Description of Artificial Sequence: Synthetic oligonucleotide
  Antisense strand to SEQ ID NO: 2096994
aucuuaacaauaguccugu

SEQ ID NO: 2096996 - RNA, 19 nt, Artificial Sequence
  Description of Artificial Sequence: Synthetic oligonucleotide
  Sense strand starting at position 1151 of SEQ ID NO: 1882124
uguucucggaaaugaauag

SEQ ID NO: 2096997 - RNA, 19 nt, Artificial Sequence
  Description of Artificial Sequence: Synthetic oligonucleotide
  Antisense strand to SEQ ID NO: 2096996
cuauucauuuccgagaaca

SEQ ID NO: 2096998 - RNA, 19 nt, Artificial Sequence
  Description of Artificial Sequence: Synthetic oligonucleotide
  Sense strand starting at position 1155 of SEQ ID NO: 1882124
cucggaaaugaauagcuuu

SEQ ID NO: 2096999 - RNA, 19 nt, Artificial Sequence
  Description of Artificial Sequence: Synthetic oligonucleotide
  Antisense strand to SEQ ID NO: 2096998
aaagcuauucauuuccgag

SEQ ID NO: 2097000 - RNA, 19 nt, Artificial Sequence
  Description of Artificial Sequence: Synthetic oligonucleotide
  Sense strand starting at position 1241 of SEQ ID NO: 1882124
uggaucuguugggucagaa

SEQ ID NO: 2097001 - RNA, 19 nt, Artificial Sequence
  Description of Artificial Sequence: Synthetic oligonucleotide
  Antisense strand to SEQ ID NO: 2097000
uucugacccaacagaucca

SEQ ID NO: 2097002 - RNA, 19 nt, Artificial Sequence
  Description of Artificial Sequence: Synthetic oligonucleotide
  Sense strand starting at position 1468 of SEQ ID NO: 1882124
cuaucuuuguaauucugga

SEQ ID NO: 2097003 - RNA, 19 nt, Artificial Sequence
  Description of Artificial Sequence: Synthetic oligonucleotide
  Antisense strand to SEQ ID NO: 2097002
uccagaauuacaaagauag

SEQ ID NO: 2097004 - RNA, 19 nt, Artificial Sequence
  Description of Artificial Sequence: Synthetic oligonucleotide
  Sense strand starting at position 1506 of SEQ ID NO: 1882124
gguuuccucgucuccguaa

SEQ ID NO: 2097005 - RNA, 19 nt, Artificial Sequence
  Description of Artificial Sequence: Synthetic oligonucleotide
  Antisense strand to SEQ ID NO: 2097004
uuacggagacgaggaaacc

SEQ ID NO: 2097006 - RNA, 19 nt, Artificial Sequence
  Description of Artificial Sequence: Synthetic oligonucleotide
  Sense strand starting at position 1825 of SEQ ID NO: 1882124
ucagcaaagucccugaaga

SEQ ID NO: 2097007 - RNA, 19 nt, Artificial Sequence
  Description of Artificial Sequence: Synthetic oligonucleotide
  Antisense strand to SEQ ID NO: 2097006
ucuucagggacuuugcuga

SEQ ID NO: 2097008 - RNA, 19 nt, Artificial Sequence
  Description of Artificial Sequence: Synthetic oligonucleotide
  Sense strand starting at position 2328 of SEQ ID NO: 1882124
uggguuacuuacuugacua

SEQ ID NO: 2097009 - RNA, 19 nt, Artificial Sequence
  Description of Artificial Sequence: Synthetic oligonucleotide
  Antisense strand to SEQ ID NO: 2097008
uagucaaguaaguaaccca

SEQ ID NO: 2097010 - RNA, 19 nt, Artificial Sequence
  Description of Artificial Sequence: Synthetic oligonucleotide
  Sense strand starting at position 2330 of SEQ ID NO: 1882124
gguuacuuacuugacuaca

SEQ ID NO: 2097011 - RNA, 19 nt, Artificial Sequence
  Description of Artificial Sequence: Synthetic oligonucleotide
  Antisense strand to SEQ ID NO: 2097010
uguagucaaguaaguaacc

SEQ ID NO: 2097012 - RNA, 19 nt, Artificial Sequence
  Description of Artificial Sequence: Synthetic oligonucleotide
  Sense strand starting at position 2598 of SEQ ID NO: 1882124
cuugguuauuucucgcuau

SEQ ID NO: 2097013 - RNA, 19 nt, Artificial Sequence
  Description of Artificial Sequence: Synthetic oligonucleotide
  Antisense strand to SEQ ID NO: 2097012
auagcgagaaauaaccaag

SEQ ID NO: 2097014 - RNA, 19 nt, Artificial Sequence
  Description of Artificial Sequence: Synthetic oligonucleotide
  Sense strand starting at position 2601 of SEQ ID NO: 1882124
gguuauuucucgcuauuau

SEQ ID NO: 2097015 - RNA, 19 nt, Artificial Sequence
  Description of Artificial Sequence: Synthetic oligonucleotide
  Antisense strand to SEQ ID NO: 2097014
auaauagcgagaaauaacc

SEQ ID NO: 2097016 - RNA, 19 nt, Artificial Sequence
  Description of Artificial Sequence: Synthetic oligonucleotide
  Sense strand starting at position 2602 of SEQ ID NO: 1882124
guuauuucucgcuauuauu

SEQ ID NO: 2097017 - RNA, 19 nt, Artificial Sequence
  Description of Artificial Sequence: Synthetic oligonucleotide
  Antisense strand to SEQ ID NO: 2097016
aauaauagcgagaaauaac

SEQ ID NO: 2097018 - RNA, 19 nt, Artificial Sequence
  Description of Artificial Sequence: Synthetic oligonucleotide
  Sense strand starting at position 2610 of SEQ ID NO: 1882124
ucgcuauuauuucuccagu

SEQ ID NO: 2097019 - RNA, 19 nt, Artificial Sequence
  Description of Artificial Sequence: Synthetic oligonucleotide
  Antisense strand to SEQ ID NO: 2097018
acuggagaaauaauagcga

SEQ ID NO: 2097020 - RNA, 19 nt, Artificial Sequence
  Description of Artificial Sequence: Synthetic oligonucleotide
  Sense strand starting at position 2612 of SEQ ID NO: 1882124
gcuauuauuucuccaguga

SEQ ID NO: 2097021 - RNA, 19 nt, Artificial Sequence
  Description of Artificial Sequence: Synthetic oligonucleotide
  Antisense strand to SEQ ID NO: 2097020
ucacuggagaaauaauagc

SEQ ID NO: 2097022 - RNA, 19 nt, Artificial Sequence
  Description of Artificial Sequence: Synthetic oligonucleotide
  Sense strand starting at position 2628 of SEQ ID NO: 1882124
ugauuaguaugcccauaua

SEQ ID NO: 2097023 - RNA, 19 nt, Artificial Sequence
  Description of Artificial Sequence: Synthetic oligonucleotide
  Antisense strand to SEQ ID NO: 2097022
uauaugggcauacuaauca

SEQ ID NO: 2097024 - RNA, 19 nt, Artificial Sequence
  Description of Artificial Sequence: Synthetic oligonucleotide
  Sense strand starting at position 2631 of SEQ ID NO: 1882124
uuaguaugcccauauacug

SEQ ID NO: 2097025 - RNA, 19 nt, Artificial Sequence
  Description of Artificial Sequence: Synthetic oligonucleotide
  Antisense strand to SEQ ID NO: 2097024
caguauaugggcauacuaa

SEQ ID NO: 2097026 - RNA, 19 nt, Artificial Sequence
  Description of Artificial Sequence: Synthetic oligonucleotide
  Sense strand starting at position 2673 of SEQ ID NO: 1882124
gggauccugaaguacguua

SEQ ID NO: 2097027 - RNA, 19 nt, Artificial Sequence
  Description of Artificial Sequence: Synthetic oligonucleotide
  Antisense strand to SEQ ID NO: 2097026
uaacguacuucaggauccc

SEQ ID NO: 2097028 - RNA, 19 nt, Artificial Sequence
  Description of Artificial Sequence: Synthetic oligonucleotide
  Sense strand starting at position 2744 of SEQ ID NO: 1882124
ccaggucauuaacucaaga

SEQ ID NO: 2097029 - RNA, 19 nt, Artificial Sequence
  Description of Artificial Sequence: Synthetic oligonucleotide
  Antisense strand to SEQ ID NO: 2097028
ucuugaguuaaugaccugg

SEQ ID NO: 2097030 - RNA, 19 nt, Artificial Sequence
  Description of Artificial Sequence: Synthetic oligonucleotide
  Sense strand starting at position 2853 of SEQ ID NO: 1882124
uggguuugagauugcaaag

SEQ ID NO: 2097031 - RNA, 19 nt, Artificial Sequence
  Description of Artificial Sequence: Synthetic oligonucleotide
  Antisense strand to SEQ ID NO: 2097030
cuuugcaaucucaaaccca

SEQ ID NO: 2097032 - RNA, 19 nt, Artificial Sequence
  Description of Artificial Sequence: Synthetic oligonucleotide
  Sense strand starting at position 3027 of SEQ ID NO: 1882124
uacugugaacaaggauuau

SEQ ID NO: 2097033 - RNA, 19 nt, Artificial Sequence
  Description of Artificial Sequence: Synthetic oligonucleotide
  Antisense strand to SEQ ID NO: 2097032
auaauccuuguucacagua

SEQ ID NO: 2097034 - RNA, 19 nt, Artificial Sequence
  Description of Artificial Sequence: Synthetic oligonucleotide
  Sense strand starting at position 3149 of SEQ ID NO: 1882124
agaagugagcucuguggaa

SEQ ID NO: 2097035 - RNA, 19 nt, Artificial Sequence
  Description of Artificial Sequence: Synthetic oligonucleotide
  Antisense strand to SEQ ID NO: 2097034
uuccacagagcucacuucu

SEQ ID NO: 2097036 - RNA, 19 nt, Artificial Sequence
  Description of Artificial Sequence: Synthetic oligonucleotide
  Sense strand starting at position 3153 of SEQ ID NO: 1882124
gugagcucuguggaaugaa

SEQ ID NO: 2097037 - RNA, 19 nt, Artificial Sequence
  Description of Artificial Sequence: Synthetic oligonucleotide
  Antisense strand to SEQ ID NO: 2097036
uucauuccacagagcucac

SEQ ID NO: 2097038 - RNA, 19 nt, Artificial Sequence
  Description of Artificial Sequence: Synthetic oligonucleotide
  Sense strand starting at position 3156 of SEQ ID NO: 1882124
agcucuguggaaugaaaga

SEQ ID NO: 2097039 - RNA, 19 nt, Artificial Sequence
  Description of Artificial Sequence: Synthetic oligonucleotide
  Antisense strand to SEQ ID NO: 2097038
ucuuucauuccacagagcu

SEQ ID NO: 2097040 - RNA, 19 nt, Artificial Sequence
  Description of Artificial Sequence: Synthetic oligonucleotide
  Sense strand starting at position 3194 of SEQ ID NO: 1882124
cguuauuaacagcaacauu

SEQ ID NO: 2097041 - RNA, 19 nt, Artificial Sequence
  Description of Artificial Sequence: Synthetic oligonucleotide
  Antisense strand to SEQ ID NO: 2097040
aauguugcuguuaauaacg

SEQ ID NO: 2097042 - RNA, 19 nt, Artificial Sequence
  Description of Artificial Sequence: Synthetic oligonucleotide
  Sense strand starting at position 3290 of SEQ ID NO: 1882124
guacacuuccaguaaaugu

SEQ ID NO: 2097043 - RNA, 19 nt, Artificial Sequence
  Description of Artificial Sequence: Synthetic oligonucleotide
  Antisense strand to SEQ ID NO: 2097042
acauuuacuggaaguguac

SEQ ID NO: 2097044 - RNA, 19 nt, Artificial Sequence
  Description of Artificial Sequence: Synthetic oligonucleotide
  Sense strand starting at position 3355 of SEQ ID NO: 1882124
gccauacuucgauacauuc

SEQ ID NO: 2097045 - RNA, 19 nt, Artificial Sequence
  Description of Artificial Sequence: Synthetic oligonucleotide
  Antisense strand to SEQ ID NO: 2097044
gaauguaucgaaguauggc

SEQ ID NO: 2097046 - RNA, 19 nt, Artificial Sequence
  Description of Artificial Sequence: Synthetic oligonucleotide
  Sense strand starting at position 3364 of SEQ ID NO: 1882124
cgauacauucuauggaagu

SEQ ID NO: 2097047 - RNA, 19 nt, Artificial Sequence
  Description of Artificial Sequence: Synthetic oligonucleotide
  Antisense strand to SEQ ID NO: 2097046
acuuccauagaauguaucg

SEQ ID NO: 2097048 - RNA, 19 nt, Artificial Sequence
  Description of Artificial Sequence: Synthetic oligonucleotide
  Sense strand starting at position 3436 of SEQ ID NO: 1882124
ggauuuagcccguaagcug

SEQ ID NO: 2097049 - RNA, 19 nt, Artificial Sequence
  Description of Artificial Sequence: Synthetic oligonucleotide
  Antisense strand to SEQ ID NO: 2097048
cagcuuacgggcuaaaucc

SEQ ID NO: 2097050 - RNA, 19 nt, Artificial Sequence
  Description of Artificial Sequence: Synthetic oligonucleotide
  Sense strand starting at position 3453 of SEQ ID NO: 1882124
ugcauaucagaggaagugu

SEQ ID NO: 2097051 - RNA, 19 nt, Artificial Sequence
  Description of Artificial Sequence: Synthetic oligonucleotide
  Antisense strand to SEQ ID NO: 2097050
acacuuccucugauaugca

SEQ ID NO: 2097052 - RNA, 19 nt, Artificial Sequence
  Description of Artificial Sequence: Synthetic oligonucleotide
  Sense strand starting at position 3607 of SEQ ID NO: 1882124
gcaauaaugauguagacgu

SEQ ID NO: 2097053 - RNA, 19 nt, Artificial Sequence
  Description of Artificial Sequence: Synthetic oligonucleotide
  Antisense strand to SEQ ID NO: 2097052
acgucuacaucauuauugc

SEQ ID NO: 2097054 - RNA, 19 nt, Artificial Sequence
  Description of Artificial Sequence: Synthetic oligonucleotide
  Sense strand starting at position 3648 of SEQ ID NO: 1882124
ugucaaagcuaugucauuu

SEQ ID NO: 2097055 - RNA, 19 nt, Artificial Sequence
  Description of Artificial Sequence: Synthetic oligonucleotide
  Antisense strand to SEQ ID NO: 2097054
aaaugacauagcuuugaca

SEQ ID NO: 2097056 - RNA, 19 nt, Artificial Sequence
  Description of Artificial Sequence: Synthetic oligonucleotide
  Sense strand starting at position 3694 of SEQ ID NO: 1882124
uaaggaugugauggaagua

SEQ ID NO: 2097057 - RNA, 19 nt, Artificial Sequence
  Description of Artificial Sequence: Synthetic oligonucleotide
  Antisense strand to SEQ ID NO: 2097056
uacuuccaucacauccuua

SEQ ID NO: 2097058 - RNA, 19 nt, Artificial Sequence
  Description of Artificial Sequence: Synthetic oligonucleotide
  Sense strand starting at position 79 of SEQ ID NO: 1882125
auguguauagcagaaucaa

SEQ ID NO: 2097059 - RNA, 19 nt, Artificial Sequence
  Description of Artificial Sequence: Synthetic oligonucleotide
  Antisense strand to SEQ ID NO: 2097058
uugauucugcuauacacau

SEQ ID NO: 2097060 - RNA, 19 nt, Artificial Sequence
  Description of Artificial Sequence: Synthetic oligonucleotide
  Sense strand starting at position 262 of SEQ ID NO: 1882125
aaacgaugagccugugaca

SEQ ID NO: 2097061 - RNA, 19 nt, Artificial Sequence
  Description of Artificial Sequence: Synthetic oligonucleotide
  Antisense strand to SEQ ID NO: 2097060
ugucacaggcucaucguuu

SEQ ID NO: 2097062 - RNA, 19 nt, Artificial Sequence
  Description of Artificial Sequence: Synthetic oligonucleotide
  Sense strand starting at position 313 of SEQ ID NO: 1882125
agcaaagugucccuuauuu

SEQ ID NO: 2097063 - RNA, 19 nt, Artificial Sequence
  Description of Artificial Sequence: Synthetic oligonucleotide
  Antisense strand to SEQ ID NO: 2097062
aaauaagggacacuuugcu

SEQ ID NO: 2097064 - RNA, 19 nt, Artificial Sequence
  Description of Artificial Sequence: Synthetic oligonucleotide
  Sense strand starting at position 407 of SEQ ID NO: 1882125
aaagaacuucggcaucuga

SEQ ID NO: 2097065 - RNA, 19 nt, Artificial Sequence
  Description of Artificial Sequence: Synthetic oligonucleotide
  Antisense strand to SEQ ID NO: 2097064
ucagaugccgaaguucuuu

SEQ ID NO: 2097066 - RNA, 19 nt, Artificial Sequence
  Description of Artificial Sequence: Synthetic oligonucleotide
  Sense strand starting at position 425 of SEQ ID NO: 1882125
augccuuuccgggaacacu

SEQ ID NO: 2097067 - RNA, 19 nt, Artificial Sequence
  Description of Artificial Sequence: Synthetic oligonucleotide
  Antisense strand to SEQ ID NO: 2097066
aguguucccggaaaggcau

SEQ ID NO: 2097068 - RNA, 19 nt, Artificial Sequence
  Description of Artificial Sequence: Synthetic oligonucleotide
  Sense strand starting at position 557 of SEQ ID NO: 1882125
augggaacguacuuaugga

SEQ ID NO: 2097069 - RNA, 19 nt, Artificial Sequence
  Description of Artificial Sequence: Synthetic oligonucleotide
  Antisense strand to SEQ ID NO: 2097068
uccauaaguacguucccau

SEQ ID NO: 2097070 - RNA, 19 nt, Artificial Sequence
  Description of Artificial Sequence: Synthetic oligonucleotide
  Sense strand starting at position 558 of SEQ ID NO: 1882125
ugggaacguacuuauggau

SEQ ID NO: 2097071 - RNA, 19 nt, Artificial Sequence
  Description of Artificial Sequence: Synthetic oligonucleotide
  Antisense strand to SEQ ID NO: 2097070
auccauaaguacguuccca

SEQ ID NO: 2097072 - RNA, 19 nt, Artificial Sequence
  Description of Artificial Sequence: Synthetic oligonucleotide
  Sense strand starting at position 607 of SEQ ID NO: 1882125
uggguuugugaaagugugu

SEQ ID NO: 2097073 - RNA, 19 nt, Artificial Sequence
  Description of Artificial Sequence: Synthetic oligonucleotide
  Antisense strand to SEQ ID NO: 2097072
acacacuuucacaaaccca

SEQ ID NO: 2097074 - RNA, 19 nt, Artificial Sequence
  Description of Artificial Sequence: Synthetic oligonucleotide
  Sense strand starting at position 622 of SEQ ID NO: 1882125
guguggauucgugcgaaua

SEQ ID NO: 2097075 - RNA, 19 nt, Artificial Sequence
  Description of Artificial Sequence: Synthetic oligonucleotide
  Antisense strand to SEQ ID NO: 2097074
uauucgcacgaauccacac

SEQ ID NO: 2097076 - RNA, 19 nt, Artificial Sequence
  Description of Artificial Sequence: Synthetic oligonucleotide
  Sense strand starting at position 625 of SEQ ID NO: 1882125
uggauucgugcgaauacgu

SEQ ID NO: 2097077 - RNA, 19 nt, Artificial Sequence
  Description of Artificial Sequence: Synthetic oligonucleotide
  Antisense strand to SEQ ID NO: 2097076
acguauucgcacgaaucca

SEQ ID NO: 2097078 - RNA, 19 nt, Artificial Sequence
  Description of Artificial Sequence: Synthetic oligonucleotide
  Sense strand starting at position 669 of SEQ ID NO: 1882125
ggaugaauuugugaaugua

SEQ ID NO: 2097079 - RNA, 19 nt, Artificial Sequence
  Description of Artificial Sequence: Synthetic oligonucleotide
  Antisense strand to SEQ ID NO: 2097078
uacauucacaaauucaucc

SEQ ID NO: 2097080 - RNA, 19 nt, Artificial Sequence
  Description of Artificial Sequence: Synthetic oligonucleotide
  Sense strand starting at position 713 of SEQ ID NO: 1882125
uugauuaucugcuuaugag

SEQ ID NO: 2097081 - RNA, 19 nt, Artificial Sequence
  Description of Artificial Sequence: Synthetic oligonucleotide
  Antisense strand to SEQ ID NO: 2097080
cucauaagcagauaaucaa

SEQ ID NO: 2097082 - RNA, 19 nt, Artificial Sequence
  Description of Artificial Sequence: Synthetic oligonucleotide
  Sense strand starting at position 714 of SEQ ID NO: 1882125
ugauuaucugcuuaugagu

SEQ ID NO: 2097083 - RNA, 19 nt, Artificial Sequence
  Description of Artificial Sequence: Synthetic oligonucleotide
  Antisense strand to SEQ ID NO: 2097082
acucauaagcagauaauca

SEQ ID NO: 2097084 - RNA, 19 nt, Artificial Sequence
  Description of Artificial Sequence: Synthetic oligonucleotide
  Sense strand starting at position 729 of SEQ ID NO: 1882125
gagucuguaugauugugaa

SEQ ID NO: 2097085 - RNA, 19 nt, Artificial Sequence
  Description of Artificial Sequence: Synthetic oligonucleotide
  Antisense strand to SEQ ID NO: 2097084
uucacaaucauacagacuc

SEQ ID NO: 2097086 - RNA, 19 nt, Artificial Sequence
  Description of Artificial Sequence: Synthetic oligonucleotide
  Sense strand starting at position 735 of SEQ ID NO: 1882125
guaugauugugaacgugug

SEQ ID NO: 2097087 - RNA, 19 nt, Artificial Sequence
  Description of Artificial Sequence: Synthetic oligonucleotide
  Antisense strand to SEQ ID NO: 2097086
cacacguucacaaucauac

SEQ ID NO: 2097088 - RNA, 19 nt, Artificial Sequence
  Description of Artificial Sequence: Synthetic oligonucleotide
  Sense strand starting at position 742 of SEQ ID NO: 1882125
ugugaacgugugaguauau

SEQ ID NO: 2097089 - RNA, 19 nt, Artificial Sequence
  Description of Artificial Sequence: Synthetic oligonucleotide
  Antisense strand to SEQ ID NO: 2097088
auauacucacacguucaca

SEQ ID NO: 2097090 - RNA, 19 nt, Artificial Sequence
  Description of Artificial Sequence: Synthetic oligonucleotide
  Sense strand starting at position 797 of SEQ ID NO: 1882125
guaugaauguauguuugaa

SEQ ID NO: 2097091 - RNA, 19 nt, Artificial Sequence
  Description of Artificial Sequence: Synthetic oligonucleotide
  Antisense strand to SEQ ID NO: 2097090
uucaaacauacauucauac

SEQ ID NO: 2097092 - RNA, 19 nt, Artificial Sequence
  Description of Artificial Sequence: Synthetic oligonucleotide
  Sense strand starting at position 799 of SEQ ID NO: 1882125
augaauguauguuugaaug

SEQ ID NO: 2097093 - RNA, 19 nt, Artificial Sequence
  Description of Artificial Sequence: Synthetic oligonucleotide
  Antisense strand to SEQ ID NO: 2097092
cauucaaacauacauucau

SEQ ID NO: 2097094 - RNA, 19 nt, Artificial Sequence
  Description of Artificial Sequence: Synthetic oligonucleotide
  Sense strand starting at position 855 of SEQ ID NO: 1882125
uguguaagugagcauauca

SEQ ID NO: 2097095 - RNA, 19 nt, Artificial Sequence
  Description of Artificial Sequence: Synthetic oligonucleotide
  Antisense strand to SEQ ID NO: 2097094
ugauaugcucacuuacaca

SEQ ID NO: 2097096 - RNA, 19 nt, Artificial Sequence
  Description of Artificial Sequence: Synthetic oligonucleotide
  Sense strand starting at position 893 of SEQ ID NO: 1882125
uccuuaaguguguaucuga

SEQ ID NO: 2097097 - RNA, 19 nt, Artificial Sequence
  Description of Artificial Sequence: Synthetic oligonucleotide
  Antisense strand to SEQ ID NO: 2097096
ucagauacacacuuaagga

SEQ ID NO: 2097098 - RNA, 19 nt, Artificial Sequence
  Description of Artificial Sequence: Synthetic oligonucleotide
  Sense strand starting at position 941 of SEQ ID NO: 1882125
gcacauuguggguguauuu

SEQ ID NO: 2097099 - RNA, 19 nt, Artificial Sequence
  Description of Artificial Sequence: Synthetic oligonucleotide
  Antisense strand to SEQ ID NO: 2097098
aaauacacccacaaugugc

SEQ ID NO: 2097100 - RNA, 19 nt, Artificial Sequence
  Description of Artificial Sequence: Synthetic oligonucleotide
  Sense strand starting at position 948 of SEQ ID NO: 1882125
guggguguauuugucuaua

SEQ ID NO: 2097101 - RNA, 19 nt, Artificial Sequence
  Description of Artificial Sequence: Synthetic oligonucleotide
  Antisense strand to SEQ ID NO: 2097100
uauagacaaauacacccac

SEQ ID NO: 2097102 - RNA, 19 nt, Artificial Sequence
  Description of Artificial Sequence: Synthetic oligonucleotide
  Sense strand starting at position 950 of SEQ ID NO: 1882125
ggguguauuugucuauaug

SEQ ID NO: 2097103 - RNA, 19 nt, Artificial Sequence
  Description of Artificial Sequence: Synthetic oligonucleotide
  Antisense strand to SEQ ID NO: 2097102
cauauagacaaauacaccc

SEQ ID NO: 2097104 - RNA, 19 nt, Artificial Sequence
  Description of Artificial Sequence: Synthetic oligonucleotide
  Sense strand starting at position 951 of SEQ ID NO: 1882125
gguguauuugucuauaugc

SEQ ID NO: 2097105 - RNA, 19 nt, Artificial Sequence
  Description of Artificial Sequence: Synthetic oligonucleotide
  Antisense strand to SEQ ID NO: 2097104
gcauauagacaaauacacc

SEQ ID NO: 2097106 - RNA, 19 nt, Artificial Sequence
  Description of Artificial Sequence: Synthetic oligonucleotide
  Sense strand starting at position 998 of SEQ ID NO: 1882125
gugagcguugugagaaugu

SEQ ID NO: 2097107 - RNA, 19 nt, Artificial Sequence
  Description of Artificial Sequence: Synthetic oligonucleotide
  Antisense strand to SEQ ID NO: 2097106
acauucucacaacgcucac

SEQ ID NO: 2097108 - RNA, 19 nt, Artificial Sequence
  Description of Artificial Sequence: Synthetic oligonucleotide
  Sense strand starting at position 1000 of SEQ ID NO: 1882125
gagcguugugagaaugugu

SEQ ID NO: 2097109 - RNA, 19 nt, Artificial Sequence
  Description of Artificial Sequence: Synthetic oligonucleotide
  Antisense strand to SEQ ID NO: 2097108
acacauucucacaacgcuc

SEQ ID NO: 2097110 - RNA, 19 nt, Artificial Sequence
  Description of Artificial Sequence: Synthetic oligonucleotide
  Sense strand starting at position 1124 of SEQ ID NO: 1882125
guggaucugggugaaugua

SEQ ID NO: 2097111 - RNA, 19 nt, Artificial Sequence
  Description of Artificial Sequence: Synthetic oligonucleotide
  Antisense strand to SEQ ID NO: 2097110
uacauucacccagauccac

SEQ ID NO: 2097112 - RNA, 19 nt, Artificial Sequence
  Description of Artificial Sequence: Synthetic oligonucleotide
  Sense strand starting at position 2220 of SEQ ID NO: 1882125
gggacuaugcuccgaaauc

SEQ ID NO: 2097113 - RNA, 19 nt, Artificial Sequence
  Description of Artificial Sequence: Synthetic oligonucleotide
  Antisense strand to SEQ ID NO: 2097112
gauuucggagcauaguccc

SEQ ID NO: 2097114 - RNA, 19 nt, Artificial Sequence
  Description of Artificial Sequence: Synthetic oligonucleotide
  Sense strand starting at position 2380 of SEQ ID NO: 1882125
ggucgagucguuucagcuu

SEQ ID NO: 2097115 - RNA, 19 nt, Artificial Sequence
  Description of Artificial Sequence: Synthetic oligonucleotide
  Antisense strand to SEQ ID NO: 2097114
aagcugaaacgacucgacc

SEQ ID NO: 2097116 - RNA, 19 nt, Artificial Sequence
  Description of Artificial Sequence: Synthetic oligonucleotide
  Sense strand starting at position 2545 of SEQ ID NO: 1882125
guagauuucuuugccugca

SEQ ID NO: 2097117 - RNA, 19 nt, Artificial Sequence
  Description of Artificial Sequence: Synthetic oligonucleotide
  Antisense strand to SEQ ID NO: 2097116
ugcaggcaaagaaaucuac

SEQ ID NO: 2097118 - RNA, 19 nt, Artificial Sequence
  Description of Artificial Sequence: Synthetic oligonucleotide
  Sense strand starting at position 2547 of SEQ ID NO: 1882125
agauuucuuugccugcaga

SEQ ID NO: 2097119 - RNA, 19 nt, Artificial Sequence
  Description of Artificial Sequence: Synthetic oligonucleotide
  Antisense strand to SEQ ID NO: 2097118
ucugcaggcaaagaaaucu

SEQ ID NO: 2097120 - RNA, 19 nt, Artificial Sequence
  Description of Artificial Sequence: Synthetic oligonucleotide
  Sense strand starting at position 2548 of SEQ ID NO: 1882125
gauuucuuugccugcagau

SEQ ID NO: 2097121 - RNA, 19 nt, Artificial Sequence
  Description of Artificial Sequence: Synthetic oligonucleotide
  Antisense strand to SEQ ID NO: 2097120
aucugcaggcaaagaaauc

SEQ ID NO: 2097122 - RNA, 19 nt, Artificial Sequence
  Description of Artificial Sequence: Synthetic oligonucleotide
  Sense strand starting at position 2642 of SEQ ID NO: 1882125
cagucuuugugauuucggu

SEQ ID NO: 2097123 - RNA, 19 nt, Artificial Sequence
  Description of Artificial Sequence: Synthetic oligonucleotide
  Antisense strand to SEQ ID NO: 2097122
accgaaaucacaaagacug

SEQ ID NO: 2097124 - RNA, 19 nt, Artificial Sequence
  Description of Artificial Sequence: Synthetic oligonucleotide
  Sense strand starting at position 2836 of SEQ ID NO: 1882125
uuaauucugggucauaauu

SEQ ID NO: 2097125 - RNA, 19 nt, Artificial Sequence
  Description of Artificial Sequence: Synthetic oligonucleotide
  Antisense strand to SEQ ID NO: 2097124
aauuaugacccagaauuaa

SEQ ID NO: 2097126 - RNA, 19 nt, Artificial Sequence
  Description of Artificial Sequence: Synthetic oligonucleotide
  Sense strand starting at position 3164 of SEQ ID NO: 1882125
aauggagugauccguaaga

SEQ ID NO: 2097127 - RNA, 19 nt, Artificial Sequence
  Description of Artificial Sequence: Synthetic oligonucleotide
  Antisense strand to SEQ ID NO: 2097126
ucuuacggaucacuccauu

SEQ ID NO: 2097128 - RNA, 19 nt, Artificial Sequence
  Description of Artificial Sequence: Synthetic oligonucleotide
  Sense strand starting at position 3166 of SEQ ID NO: 1882125
uggagugauccguaagaug

SEQ ID NO: 2097129 - RNA, 19 nt, Artificial Sequence
  Description of Artificial Sequence: Synthetic oligonucleotide
  Antisense strand to SEQ ID NO: 2097128
caucuuacggaucacucca

SEQ ID NO: 2097130 - RNA, 19 nt, Artificial Sequence
  Description of Artificial Sequence: Synthetic oligonucleotide
  Sense strand starting at position 3175 of SEQ ID NO: 1882125
ccguaagaugccuaccuaa

SEQ ID NO: 2097131 - RNA, 19 nt, Artificial Sequence
  Description of Artificial Sequence: Synthetic oligonucleotide
  Antisense strand to SEQ ID NO: 2097130
uuagguaggcaucuuacgg

SEQ ID NO: 2097132 - RNA, 19 nt, Artificial Sequence
  Description of Artificial Sequence: Synthetic oligonucleotide
  Sense strand starting at position 3449 of SEQ ID NO: 1882125
gaauuuaaauugggagaag

SEQ ID NO: 2097133 - RNA, 19 nt, Artificial Sequence
  Description of Artificial Sequence: Synthetic oligonucleotide
  Antisense strand to SEQ ID NO: 2097132
cuucucccaauuuaaauuc

SEQ ID NO: 2097134 - RNA, 19 nt, Artificial Sequence
  Description of Artificial Sequence: Synthetic oligonucleotide
  Sense strand starting at position 3568 of SEQ ID NO: 1882125
augaauagguuucuaaaug

SEQ ID NO: 2097135 - RNA, 19 nt, Artificial Sequence
  Description of Artificial Sequence: Synthetic oligonucleotide
  Antisense strand to SEQ ID NO: 2097134
cauuuagaaaccuauucau

SEQ ID NO: 2097136 - RNA, 19 nt, Artificial Sequence
  Description of Artificial Sequence: Synthetic oligonucleotide
  Sense strand starting at position 3957 of SEQ ID NO: 1882125
caugcaaaugaugaguauu

SEQ ID NO: 2097137 - RNA, 19 nt, Artificial Sequence
  Description of Artificial Sequence: Synthetic oligonucleotide
  Antisense strand to SEQ ID NO: 2097136
aauacucaucauuugcaug

SEQ ID NO: 2097138 - RNA, 19 nt, Artificial Sequence
  Description of Artificial Sequence: Synthetic oligonucleotide
  Sense strand starting at position 256 of SEQ ID NO: 1882126
gcgccaugauccuugguua

SEQ ID NO: 2097139 - RNA, 19 nt, Artificial Sequence
  Description of Artificial Sequence: Synthetic oligonucleotide
  Antisense strand to SEQ ID NO: 2097138
uaaccaaggaucauggcgc

SEQ ID NO: 2097140 - RNA, 19 nt, Artificial Sequence
  Description of Artificial Sequence: Synthetic oligonucleotide
  Sense strand starting at position 259 of SEQ ID NO: 1882126
ccaugauccuugguuacac

SEQ ID NO: 2097141 - RNA, 19 nt, Artificial Sequence
  Description of Artificial Sequence: Synthetic oligonucleotide
  Antisense strand to SEQ ID NO: 2097140
guguaaccaaggaucaugg

SEQ ID NO: 2097142 - RNA, 19 nt, Artificial Sequence
  Description of Artificial Sequence: Synthetic oligonucleotide
  Sense strand starting at position 278 of SEQ ID NO: 1882126
acaaauaugucauggagac

SEQ ID NO: 2097143 - RNA, 19 nt, Artificial Sequence
  Description of Artificial Sequence: Synthetic oligonucleotide
  Antisense strand to SEQ ID NO: 2097142
gucuccaugacauauuugu

SEQ ID NO: 2097144 - RNA, 19 nt, Artificial Sequence
  Description of Artificial Sequence: Synthetic oligonucleotide
  Sense strand starting at position 279 of SEQ ID NO: 1882126
caaauaugucauggagacu

SEQ ID NO: 2097145 - RNA, 19 nt, Artificial Sequence
  Description of Artificial Sequence: Synthetic oligonucleotide
  Antisense strand to SEQ ID NO: 2097144
agucuccaugacauauuug

SEQ ID NO: 2097146 - RNA, 19 nt, Artificial Sequence
  Description of Artificial Sequence: Synthetic oligonucleotide
  Sense strand starting at position 1182 of SEQ ID NO: 1882126
cacuuuguccuccgagcau

SEQ ID NO: 2097147 - RNA, 19 nt, Artificial Sequence
  Description of Artificial Sequence: Synthetic oligonucleotide
  Antisense strand to SEQ ID NO: 2097146
augcucggaggacaaagug

SEQ ID NO: 2097148 - RNA, 19 nt, Artificial Sequence
  Description of Artificial Sequence: Synthetic oligonucleotide
  Sense strand starting at position 1195 of SEQ ID NO: 1882126
gagcauuucugcuucccga

SEQ ID NO: 2097149 - RNA, 19 nt, Artificial Sequence
  Description of Artificial Sequence: Synthetic oligonucleotide
  Antisense strand to SEQ ID NO: 2097148
ucgggaagcagaaaugcuc

SEQ ID NO: 2097150 - RNA, 19 nt, Artificial Sequence
  Description of Artificial Sequence: Synthetic oligonucleotide
  Sense strand starting at position 1547 of SEQ ID NO: 1882126
gggugaggucccugggaag

SEQ ID NO: 2097151 - RNA, 19 nt, Artificial Sequence
  Description of Artificial Sequence: Synthetic oligonucleotide
  Antisense strand to SEQ ID NO: 2097150
cuucccagggaccucaccc

SEQ ID NO: 2097152 - RNA, 19 nt, Artificial Sequence
  Description of Artificial Sequence: Synthetic oligonucleotide
  Sense strand starting at position 1674 of SEQ ID NO: 1882126
gcacgaagcuucggagaag

SEQ ID NO: 2097153 - RNA, 19 nt, Artificial Sequence
  Description of Artificial Sequence: Synthetic oligonucleotide
  Antisense strand to SEQ ID NO: 2097152
cuucuccgaagcuucgugc

SEQ ID NO: 2097154 - RNA, 19 nt, Artificial Sequence
  Description of Artificial Sequence: Synthetic oligonucleotide
  Sense strand starting at position 1675 of SEQ ID NO: 1882126
cacgaagcuucggagaagu

SEQ ID NO: 2097155 - RNA, 19 nt, Artificial Sequence
  Description of Artificial Sequence: Synthetic oligonucleotide
  Antisense strand to SEQ ID NO: 2097154
acuucuccgaagcuucgug

SEQ ID NO: 2097156 - RNA, 19 nt, Artificial Sequence
  Description of Artificial Sequence: Synthetic oligonucleotide
  Sense strand starting at position 1986 of SEQ ID NO: 1882126
ggcgguggcggcucuuaaa

SEQ ID NO: 2097157 - RNA, 19 nt, Artificial Sequence
  Description of Artificial Sequence: Synthetic oligonucleotide
  Antisense strand to SEQ ID NO: 2097156
uuuaagagccgccaccgcc

SEQ ID NO: 2097158 - RNA, 19 nt, Artificial Sequence
  Description of Artificial Sequence: Synthetic oligonucleotide
  Sense strand starting at position 2152 of SEQ ID NO: 1882126
cguggaggucuccaugguu

SEQ ID NO: 2097159 - RNA, 19 nt, Artificial Sequence
  Description of Artificial Sequence: Synthetic oligonucleotide
  Antisense strand to SEQ ID NO: 2097158
aaccauggagaccuccacg

SEQ ID NO: 2097160 - RNA, 19 nt, Artificial Sequence
  Description of Artificial Sequence: Synthetic oligonucleotide
  Sense strand starting at position 2155 of SEQ ID NO: 1882126
ggaggucuccaugguuaca

SEQ ID NO: 2097161 - RNA, 19 nt, Artificial Sequence
  Description of Artificial Sequence: Synthetic oligonucleotide
  Antisense strand to SEQ ID NO: 2097160
uguaaccauggagaccucc

SEQ ID NO: 2097162 - RNA, 19 nt, Artificial Sequence
  Description of Artificial Sequence: Synthetic oligonucleotide
  Sense strand starting at position 2165 of SEQ ID NO: 1882126
augguuacauccugaaauc

SEQ ID NO: 2097163 - RNA, 19 nt, Artificial Sequence
  Description of Artificial Sequence: Synthetic oligonucleotide
  Antisense strand to SEQ ID NO: 2097162
gauuucaggauguaaccau

SEQ ID NO: 2097164 - RNA, 19 nt, Artificial Sequence
  Description of Artificial Sequence: Synthetic oligonucleotide
  Sense strand starting at position 2263 of SEQ ID NO: 1882126
gccagugaauccucuugac

SEQ ID NO: 2097165 - RNA, 19 nt, Artificial Sequence
  Description of Artificial Sequence: Synthetic oligonucleotide
  Antisense strand to SEQ ID NO: 2097164
gucaagaggauucacuggc

SEQ ID NO: 2097166 - RNA, 19 nt, Artificial Sequence
  Description of Artificial Sequence: Synthetic oligonucleotide
  Sense strand starting at position 2266 of SEQ ID NO: 1882126
agugaauccucuugaccac

SEQ ID NO: 2097167 - RNA, 19 nt, Artificial Sequence
  Description of Artificial Sequence: Synthetic oligonucleotide
  Antisense strand to SEQ ID NO: 2097166
guggucaagaggauucacu

SEQ ID NO: 2097168 - RNA, 19 nt, Artificial Sequence
  Description of Artificial Sequence: Synthetic oligonucleotide
  Sense strand starting at position 2344 of SEQ ID NO: 1882126
ggcucaauaaucuguugag

SEQ ID NO: 2097169 - RNA, 19 nt, Artificial Sequence
  Description of Artificial Sequence: Synthetic oligonucleotide
  Antisense strand to SEQ ID NO: 2097168
cucaacagauuauugagcc

SEQ ID NO: 2097170 - RNA, 19 nt, Artificial Sequence
  Description of Artificial Sequence: Synthetic oligonucleotide
  Sense strand starting at position 2345 of SEQ ID NO: 1882126
gcucaauaaucuguugaga

SEQ ID NO: 2097171 - RNA, 19 nt, Artificial Sequence
  Description of Artificial Sequence: Synthetic oligonucleotide
  Antisense strand to SEQ ID NO: 2097170
ucucaacagauuauugagc

SEQ ID NO: 2097172 - RNA, 19 nt, Artificial Sequence
  Description of Artificial Sequence: Synthetic oligonucleotide
  Sense strand starting at position 2347 of SEQ ID NO: 1882126
ucaauaaucuguugagagu

SEQ ID NO: 2097173 - RNA, 19 nt, Artificial Sequence
  Description of Artificial Sequence: Synthetic oligonucleotide
  Antisense strand to SEQ ID NO: 2097172
acucucaacagauuauuga

SEQ ID NO: 2097174 - RNA, 19 nt, Artificial Sequence
  Description of Artificial Sequence: Synthetic oligonucleotide
  Sense strand starting at position 2348 of SEQ ID NO: 1882126
caauaaucuguugagaguc

SEQ ID NO: 2097175 - RNA, 19 nt, Artificial Sequence
  Description of Artificial Sequence: Synthetic oligonucleotide
  Antisense strand to SEQ ID NO: 2097174
gacucucaacagauuauug

SEQ ID NO: 2097176 - RNA, 19 nt, Artificial Sequence
  Description of Artificial Sequence: Synthetic oligonucleotide
  Sense strand starting at position 2378 of SEQ ID NO: 1882126
aagucaugcugcuaagaug

SEQ ID NO: 2097177 - RNA, 19 nt, Artificial Sequence
  Description of Artificial Sequence: Synthetic oligonucleotide
  Antisense strand to SEQ ID NO: 2097176
caucuuagcagcaugacuu

SEQ ID NO: 2097178 - RNA, 19 nt, Artificial Sequence
  Description of Artificial Sequence: Synthetic oligonucleotide
  Sense strand starting at position 2905 of SEQ ID NO: 1882126
ggaacagagcuuuaugcuc

SEQ ID NO: 2097179 - RNA, 19 nt, Artificial Sequence
  Description of Artificial Sequence: Synthetic oligonucleotide
  Antisense strand to SEQ ID NO: 2097178
gagcauaaagcucuguucc

SEQ ID NO: 2097180 - RNA, 19 nt, Artificial Sequence
  Description of Artificial Sequence: Synthetic oligonucleotide
  Sense strand starting at position 2910 of SEQ ID NO: 1882126
agagcuuuaugcucucaau

SEQ ID NO: 2097181 - RNA, 19 nt, Artificial Sequence
  Description of Artificial Sequence: Synthetic oligonucleotide
  Antisense strand to SEQ ID NO: 2097180
auugagagcauaaagcucu

SEQ ID NO: 2097182 - RNA, 19 nt, Artificial Sequence
  Description of Artificial Sequence: Synthetic oligonucleotide
  Sense strand starting at position 2913 of SEQ ID NO: 1882126
gcuuuaugcucucaaugug

SEQ ID NO: 2097183 - RNA, 19 nt, Artificial Sequence
  Description of Artificial Sequence: Synthetic oligonucleotide
  Antisense strand to SEQ ID NO: 2097182
cacauugagagcauaaagc

SEQ ID NO: 2097184 - RNA, 19 nt, Artificial Sequence
  Description of Artificial Sequence: Synthetic oligonucleotide
  Sense strand starting at position 2916 of SEQ ID NO: 1882126
uuaugcucucaaugugguu

SEQ ID NO: 2097185 - RNA, 19 nt, Artificial Sequence
  Description of Artificial Sequence: Synthetic oligonucleotide
  Antisense strand to SEQ ID NO: 2097184
aaccacauugagagcauaa

SEQ ID NO: 2097186 - RNA, 19 nt, Artificial Sequence
  Description of Artificial Sequence: Synthetic oligonucleotide
  Sense strand starting at position 2921 of SEQ ID NO: 1882126
cucucaaugugguuacuga

SEQ ID NO: 2097187 - RNA, 19 nt, Artificial Sequence
  Description of Artificial Sequence: Synthetic oligonucleotide
  Antisense strand to SEQ ID NO: 2097186
ucaguaaccacauugagag

SEQ ID NO: 2097188 - RNA, 19 nt, Artificial Sequence
  Description of Artificial Sequence: Synthetic oligonucleotide
  Sense strand starting at position 2925 of SEQ ID NO: 1882126
caaugugguuacugacaac

SEQ ID NO: 2097189 - RNA, 19 nt, Artificial Sequence
  Description of Artificial Sequence: Synthetic oligonucleotide
  Antisense strand to SEQ ID NO: 2097188
guugucaguaaccacauug

SEQ ID NO: 2097190 - RNA, 19 nt, Artificial Sequence
  Description of Artificial Sequence: Synthetic oligonucleotide
  Sense strand starting at position 3026 of SEQ ID NO: 1882126
ggcagugaauguccugauu

SEQ ID NO: 2097191 - RNA, 19 nt, Artificial Sequence
  Description of Artificial Sequence: Synthetic oligonucleotide
  Antisense strand to SEQ ID NO: 2097190
aaucaggacauucacugcc

SEQ ID NO: 2097192 - RNA, 19 nt, Artificial Sequence
  Description of Artificial Sequence: Synthetic oligonucleotide
  Sense strand starting at position 3028 of SEQ ID NO: 1882126
cagugaauguccugauucu

SEQ ID NO: 2097193 - RNA, 19 nt, Artificial Sequence
  Description of Artificial Sequence: Synthetic oligonucleotide
  Antisense strand to SEQ ID NO: 2097192
agaaucaggacauucacug

SEQ ID NO: 2097194 - RNA, 19 nt, Artificial Sequence
  Description of Artificial Sequence: Synthetic oligonucleotide
  Sense strand starting at position 3029 of SEQ ID NO: 1882126
agugaauguccugauucua

SEQ ID NO: 2097195 - RNA, 19 nt, Artificial Sequence
  Description of Artificial Sequence: Synthetic oligonucleotide
  Antisense strand to SEQ ID NO: 2097194
uagaaucaggacauucacu

SEQ ID NO: 2097196 - RNA, 19 nt, Artificial Sequence
  Description of Artificial Sequence: Synthetic oligonucleotide
  Sense strand starting at position 3186 of SEQ ID NO: 1882126
ccuuuauguugaguuguaa

SEQ ID NO: 2097197 - RNA, 19 nt, Artificial Sequence
  Description of Artificial Sequence: Synthetic oligonucleotide
  Antisense strand to SEQ ID NO: 2097196
uuacaacucaacauaaagg

SEQ ID NO: 2097198 - RNA, 19 nt, Artificial Sequence
  Description of Artificial Sequence: Synthetic oligonucleotide
  Sense strand starting at position 3190 of SEQ ID NO: 1882126
uauguugaguuguaauccu

SEQ ID NO: 2097199 - RNA, 19 nt, Artificial Sequence
  Description of Artificial Sequence: Synthetic oligonucleotide
  Antisense strand to SEQ ID NO: 2097198
aggauuacaacucaacaua

SEQ ID NO: 2097200 - RNA, 19 nt, Artificial Sequence
  Description of Artificial Sequence: Synthetic oligonucleotide
  Sense strand starting at position 3198 of SEQ ID NO: 1882126
guuguaauccuucggguga

SEQ ID NO: 2097201 - RNA, 19 nt, Artificial Sequence
  Description of Artificial Sequence: Synthetic oligonucleotide
  Antisense strand to SEQ ID NO: 2097200
ucacccgaaggauuacaac

SEQ ID NO: 2097202 - RNA, 19 nt, Artificial Sequence
  Description of Artificial Sequence: Synthetic oligonucleotide
  Sense strand starting at position 3232 of SEQ ID NO: 1882126
gugcccaucugggcugaaa

SEQ ID NO: 2097203 - RNA, 19 nt, Artificial Sequence
  Description of Artificial Sequence: Synthetic oligonucleotide
  Antisense strand to SEQ ID NO: 2097202
uuucagcccagaugggcac

SEQ ID NO: 2097204 - RNA, 19 nt, Artificial Sequence
  Description of Artificial Sequence: Synthetic oligonucleotide
  Sense strand starting at position 3297 of SEQ ID NO: 1882126
agcucaguaucccugaaca

SEQ ID NO: 2097205 - RNA, 19 nt, Artificial Sequence
  Description of Artificial Sequence: Synthetic oligonucleotide
  Antisense strand to SEQ ID NO: 2097204
uguucagggauacugagcu

SEQ ID NO: 2097206 - RNA, 19 nt, Artificial Sequence
  Description of Artificial Sequence: Synthetic oligonucleotide
  Sense strand starting at position 3463 of SEQ ID NO: 1882126
uggaaugcagucuguuauc

SEQ ID NO: 2097207 - RNA, 19 nt, Artificial Sequence
  Description of Artificial Sequence: Synthetic oligonucleotide
  Antisense strand to SEQ ID NO: 2097206
gauaacagacugcauucca

SEQ ID NO: 2097208 - RNA, 19 nt, Artificial Sequence
  Description of Artificial Sequence: Synthetic oligonucleotide
  Sense strand starting at position 3553 of SEQ ID NO: 1882126
gaucuauggccacacguuu

SEQ ID NO: 2097209 - RNA, 19 nt, Artificial Sequence
  Description of Artificial Sequence: Synthetic oligonucleotide
  Antisense strand to SEQ ID NO: 2097208
aaacguguggccauagauc

SEQ ID NO: 2097210 - RNA, 19 nt, Artificial Sequence
  Description of Artificial Sequence: Synthetic oligonucleotide
  Sense strand starting at position 3584 of SEQ ID NO: 1882126
caggcugccugcuuaagaa

SEQ ID NO: 2097211 - RNA, 19 nt, Artificial Sequence
  Description of Artificial Sequence: Synthetic oligonucleotide
  Antisense strand to SEQ ID NO: 2097210
uucuuaagcaggcagccug

SEQ ID NO: 2097212 - RNA, 19 nt, Artificial Sequence
  Description of Artificial Sequence: Synthetic oligonucleotide
  Sense strand starting at position 3866 of SEQ ID NO: 1882126
guagcacagucaugaagac

SEQ ID NO: 2097213 - RNA, 19 nt, Artificial Sequence
  Description of Artificial Sequence: Synthetic oligonucleotide
  Antisense strand to SEQ ID NO: 2097212
gucuucaugacugugcuac

SEQ ID NO: 2097214 - RNA, 19 nt, Artificial Sequence
  Description of Artificial Sequence: Synthetic oligonucleotide
  Sense strand starting at position 3915 of SEQ ID NO: 1882126
cucccaaucugauguugau

SEQ ID NO: 2097215 - RNA, 19 nt, Artificial Sequence
  Description of Artificial Sequence: Synthetic oligonucleotide
  Antisense strand to SEQ ID NO: 2097214
aucaacaucagauugggag

SEQ ID NO: 2097216 - RNA, 19 nt, Artificial Sequence
  Description of Artificial Sequence: Synthetic oligonucleotide
  Sense strand starting at position 3940 of SEQ ID NO: 1882126
aggguugguacacgaauaa

SEQ ID NO: 2097217 - RNA, 19 nt, Artificial Sequence
  Description of Artificial Sequence: Synthetic oligonucleotide
  Antisense strand to SEQ ID NO: 2097216
uuauucguguaccaacccu

SEQ ID NO: 2097218 - RNA, 19 nt, Artificial Sequence
  Description of Artificial Sequence: Synthetic oligonucleotide
  Sense strand starting at position 59 of SEQ ID NO: 1882127
cuggauucuccggauguac

SEQ ID NO: 2097219 - RNA, 19 nt, Artificial Sequence
  Description of Artificial Sequence: Synthetic oligonucleotide
  Antisense strand to SEQ ID NO: 2097218
guacauccggagaauccag

SEQ ID NO: 2097220 - RNA, 19 nt, Artificial Sequence
  Description of Artificial Sequence: Synthetic oligonucleotide
  Sense strand starting at position 145 of SEQ ID NO: 1882127
caggguggaugugugaauu

SEQ ID NO: 2097221 - RNA, 19 nt, Artificial Sequence
  Description of Artificial Sequence: Synthetic oligonucleotide
  Antisense strand to SEQ ID NO: 2097220
aauucacacauccacccug

SEQ ID NO: 2097222 - RNA, 19 nt, Artificial Sequence
  Description of Artificial Sequence: Synthetic oligonucleotide
  Sense strand starting at position 375 of SEQ ID NO: 1882127
ucuugugaacaguacgaau

SEQ ID NO: 2097223 - RNA, 19 nt, Artificial Sequence
  Description of Artificial Sequence: Synthetic oligonucleotide
  Antisense strand to SEQ ID NO: 2097222
auucguacuguucacaaga

SEQ ID NO: 2097224 - RNA, 19 nt, Artificial Sequence
  Description of Artificial Sequence: Synthetic oligonucleotide
  Sense strand starting at position 387 of SEQ ID NO: 1882127
uacgaauuuacccgcgagu

SEQ ID NO: 2097225 - RNA, 19 nt, Artificial Sequence
  Description of Artificial Sequence: Synthetic oligonucleotide
  Antisense strand to SEQ ID NO: 2097224
acucgcggguaaauucgua

SEQ ID NO: 2097226 - RNA, 19 nt, Artificial Sequence
  Description of Artificial Sequence: Synthetic oligonucleotide
  Sense strand starting at position 412 of SEQ ID NO: 1882127
acugaccuaugucuugaaa

SEQ ID NO: 2097227 - RNA, 19 nt, Artificial Sequence
  Description of Artificial Sequence: Synthetic oligonucleotide
  Antisense strand to SEQ ID NO: 2097226
uuucaagacauaggucagu

SEQ ID NO: 2097228 - RNA, 19 nt, Artificial Sequence
  Description of Artificial Sequence: Synthetic oligonucleotide
  Sense strand starting at position 521 of SEQ ID NO: 1882127
cuuauaaaucucgagcuug

SEQ ID NO: 2097229 - RNA, 19 nt, Artificial Sequence
  Description of Artificial Sequence: Synthetic oligonucleotide
  Antisense strand to SEQ ID NO: 2097228
caagcucgagauuuauaag

SEQ ID NO: 2097230 - RNA, 19 nt, Artificial Sequence
  Description of Artificial Sequence: Synthetic oligonucleotide
  Sense strand starting at position 526 of SEQ ID NO: 1882127
aaaucucgagcuugucaaa

SEQ ID NO: 2097231 - RNA, 19 nt, Artificial Sequence
  Description of Artificial Sequence: Synthetic oligonucleotide
  Antisense strand to SEQ ID NO: 2097230
uuugacaagcucgagauuu

SEQ ID NO: 2097232 - RNA, 19 nt, Artificial Sequence
  Description of Artificial Sequence: Synthetic oligonucleotide
  Sense strand starting at position 610 of SEQ ID NO: 1882127
guuuaacgacaccaggauu

SEQ ID NO: 2097233 - RNA, 19 nt, Artificial Sequence
  Description of Artificial Sequence: Synthetic oligonucleotide
  Antisense strand to SEQ ID NO: 2097232
aauccuggugucguuaaac

SEQ ID NO: 2097234 - RNA, 19 nt, Artificial Sequence
  Description of Artificial Sequence: Synthetic oligonucleotide
  Sense strand starting at position 640 of SEQ ID NO: 1882127
gaggacgcccucuauugau

SEQ ID NO: 2097235 - RNA, 19 nt, Artificial Sequence
  Description of Artificial Sequence: Synthetic oligonucleotide
  Antisense strand to SEQ ID NO: 2097234
aucaauagagggcguccuc

SEQ ID NO: 2097236 - RNA, 19 nt, Artificial Sequence
  Description of Artificial Sequence: Synthetic oligonucleotide
  Sense strand starting at position 777 of SEQ ID NO: 1882127
uauugaguauaugcuuuga

SEQ ID NO: 2097237 - RNA, 19 nt, Artificial Sequence
  Description of Artificial Sequence: Synthetic oligonucleotide
  Antisense strand to SEQ ID NO: 2097236
ucaaagcauauacucaaua

SEQ ID NO: 2097238 - RNA, 19 nt, Artificial Sequence
  Description of Artificial Sequence: Synthetic oligonucleotide
  Sense strand starting at position 779 of SEQ ID NO: 1882127
uugaguauaugcuuugaag

SEQ ID NO: 2097239 - RNA, 19 nt, Artificial Sequence
  Description of Artificial Sequence: Synthetic oligonucleotide
  Antisense strand to SEQ ID NO: 2097238
cuucaaagcauauacucaa

SEQ ID NO: 2097240 - RNA, 19 nt, Artificial Sequence
  Description of Artificial Sequence: Synthetic oligonucleotide
  Sense strand starting at position 781 of SEQ ID NO: 1882127
gaguauaugcuuugaagua

SEQ ID NO: 2097241 - RNA, 19 nt, Artificial Sequence
  Description of Artificial Sequence: Synthetic oligonucleotide
  Antisense strand to SEQ ID NO: 2097240
uacuucaaagcauauacuc

SEQ ID NO: 2097242 - RNA, 19 nt, Artificial Sequence
  Description of Artificial Sequence: Synthetic oligonucleotide
  Sense strand starting at position 788 of SEQ ID NO: 1882127
ugcuuugaaguaugaucaa

SEQ ID NO: 2097243 - RNA, 19 nt, Artificial Sequence
  Description of Artificial Sequence: Synthetic oligonucleotide
  Antisense strand to SEQ ID NO: 2097242
uugaucauacuucaaagca

SEQ ID NO: 2097244 - RNA, 19 nt, Artificial Sequence
  Description of Artificial Sequence: Synthetic oligonucleotide
  Sense strand starting at position 838 of SEQ ID NO: 1882127
auuaaaucuuggguuaaga

SEQ ID NO: 2097245 - RNA, 19 nt, Artificial Sequence
  Description of Artificial Sequence: Synthetic oligonucleotide
  Antisense strand to SEQ ID NO: 2097244
ucuuaacccaagauuuaau

SEQ ID NO: 2097246 - RNA, 19 nt, Artificial Sequence
  Description of Artificial Sequence: Synthetic oligonucleotide
  Sense strand starting at position 920 of SEQ ID NO: 1882127
uuaagaugcuucuuaguau

SEQ ID NO: 2097247 - RNA, 19 nt, Artificial Sequence
  Description of Artificial Sequence: Synthetic oligonucleotide
  Antisense strand to SEQ ID NO: 2097246
auacuaagaagcaucuuaa

SEQ ID NO: 2097248 - RNA, 19 nt, Artificial Sequence
  Description of Artificial Sequence: Synthetic oligonucleotide
  Sense strand starting at position 932 of SEQ ID NO: 1882127
uuaguaugucaugaacugu

SEQ ID NO: 2097249 - RNA, 19 nt, Artificial Sequence
  Description of Artificial Sequence: Synthetic oligonucleotide
  Antisense strand to SEQ ID NO: 2097248
acaguucaugacauacuaa

SEQ ID NO: 2097250 - RNA, 19 nt, Artificial Sequence
  Description of Artificial Sequence: Synthetic oligonucleotide
  Sense strand starting at position 938 of SEQ ID NO: 1882127
ugucaugaacuguaucuaa

SEQ ID NO: 2097251 - RNA, 19 nt, Artificial Sequence
  Description of Artificial Sequence: Synthetic oligonucleotide
  Antisense strand to SEQ ID NO: 2097250
uuagauacaguucaugaca

SEQ ID NO: 2097252 - RNA, 19 nt, Artificial Sequence
  Description of Artificial Sequence: Synthetic oligonucleotide
  Sense strand starting at position 964 of SEQ ID NO: 1882127
aaguaauugcaagauagua

SEQ ID NO: 2097253 - RNA, 19 nt, Artificial Sequence
  Description of Artificial Sequence: Synthetic oligonucleotide
  Antisense strand to SEQ ID NO: 2097252
uacuaucuugcaauuacuu

SEQ ID NO: 2097254 - RNA, 19 nt, Artificial Sequence
  Description of Artificial Sequence: Synthetic oligonucleotide
  Sense strand starting at position 1051 of SEQ ID NO: 1882127
gucauuucuccaggcaacu

SEQ ID NO: 2097255 - RNA, 19 nt, Artificial Sequence
  Description of Artificial Sequence: Synthetic oligonucleotide
  Antisense strand to SEQ ID NO: 2097254
aguugccuggagaaaugac

SEQ ID NO: 2097256 - RNA, 19 nt, Artificial Sequence
  Description of Artificial Sequence: Synthetic oligonucleotide
  Sense strand starting at position 1086 of SEQ ID NO: 1882127
gcguauuauggauauacac

SEQ ID NO: 2097257 - RNA, 19 nt, Artificial Sequence
  Description of Artificial Sequence: Synthetic oligonucleotide
  Antisense strand to SEQ ID NO: 2097256
guguauauccauaauacgc

SEQ ID NO: 2097258 - RNA, 19 nt, Artificial Sequence
  Description of Artificial Sequence: Synthetic oligonucleotide
  Sense strand starting at position 1145 of SEQ ID NO: 1882127
cccuuaagucaucauagua

SEQ ID NO: 2097259 - RNA, 19 nt, Artificial Sequence
  Description of Artificial Sequence: Synthetic oligonucleotide
  Antisense strand to SEQ ID NO: 2097258
uacuaugaugacuuaaggg

SEQ ID NO: 2097260 - RNA, 19 nt, Artificial Sequence
  Description of Artificial Sequence: Synthetic oligonucleotide
  Sense strand starting at position 1152 of SEQ ID NO: 1882127
gucaucauaguauguaaca

SEQ ID NO: 2097261 - RNA, 19 nt, Artificial Sequence
  Description of Artificial Sequence: Synthetic oligonucleotide
  Antisense strand to SEQ ID NO: 2097260
uguuacauacuaugaugac

SEQ ID NO: 2097262 - RNA, 19 nt, Artificial Sequence
  Description of Artificial Sequence: Synthetic oligonucleotide
  Sense strand starting at position 1153 of SEQ ID NO: 1882127
ucaucauaguauguaacaa

SEQ ID NO: 2097263 - RNA, 19 nt, Artificial Sequence
  Description of Artificial Sequence: Synthetic oligonucleotide
  Antisense strand to SEQ ID NO: 2097262
uuguuacauacuaugauga

SEQ ID NO: 2097264 - RNA, 19 nt, Artificial Sequence
  Description of Artificial Sequence: Synthetic oligonucleotide
  Sense strand starting at position 1263 of SEQ ID NO: 1882127
gcuggugagacugaagguu

SEQ ID NO: 2097265 - RNA, 19 nt, Artificial Sequence
  Description of Artificial Sequence: Synthetic oligonucleotide
  Antisense strand to SEQ ID NO: 2097264
aaccuucagucucaccagc

SEQ ID NO: 2097266 - RNA, 19 nt, Artificial Sequence
  Description of Artificial Sequence: Synthetic oligonucleotide
  Sense strand starting at position 1294 of SEQ ID NO: 1882127
auccuaguccauugauuag

SEQ ID NO: 2097267 - RNA, 19 nt, Artificial Sequence
  Description of Artificial Sequence: Synthetic oligonucleotide
  Antisense strand to SEQ ID NO: 2097266
cuaaucaauggacuaggau

SEQ ID NO: 2097268 - RNA, 19 nt, Artificial Sequence
  Description of Artificial Sequence: Synthetic oligonucleotide
  Sense strand starting at position 1317 of SEQ ID NO: 1882127
uuuaaacauguguggaaua

SEQ ID NO: 2097269 - RNA, 19 nt, Artificial Sequence
  Description of Artificial Sequence: Synthetic oligonucleotide
  Antisense strand to SEQ ID NO: 2097268
uauuccacacauguuuaaa

SEQ ID NO: 2097270 - RNA, 19 nt, Artificial Sequence
  Description of Artificial Sequence: Synthetic oligonucleotide
  Sense strand starting at position 1370 of SEQ ID NO: 1882127
uagagauucugaguaacau

SEQ ID NO: 2097271 - RNA, 19 nt, Artificial Sequence
  Description of Artificial Sequence: Synthetic oligonucleotide
  Antisense strand to SEQ ID NO: 2097270
auguuacucagaaucucua

SEQ ID NO: 2097272 - RNA, 19 nt, Artificial Sequence
  Description of Artificial Sequence: Synthetic oligonucleotide
  Sense strand starting at position 1407 of SEQ ID NO: 1882127
cuacgauuuggauguuagu

SEQ ID NO: 2097273 - RNA, 19 nt, Artificial Sequence
  Description of Artificial Sequence: Synthetic oligonucleotide
  Antisense strand to SEQ ID NO: 2097272
acuaacauccaaaucguag

SEQ ID NO: 2097274 - RNA, 19 nt, Artificial Sequence
  Description of Artificial Sequence: Synthetic oligonucleotide
  Sense strand starting at position 1675 of SEQ ID NO: 1882127
uugaauuaauccguagaaa

SEQ ID NO: 2097275 - RNA, 19 nt, Artificial Sequence
  Description of Artificial Sequence: Synthetic oligonucleotide
  Antisense strand to SEQ ID NO: 2097274
uuucuacggauuaauucaa

SEQ ID NO: 2097276 - RNA, 19 nt, Artificial Sequence
  Description of Artificial Sequence: Synthetic oligonucleotide
  Sense strand starting at position 1746 of SEQ ID NO: 1882127
acaacaaaucguggcauaa

SEQ ID NO: 2097277 - RNA, 19 nt, Artificial Sequence
  Description of Artificial Sequence: Synthetic oligonucleotide
  Antisense strand to SEQ ID NO: 2097276
uuaugccacgauuuguugu

SEQ ID NO: 2097278 - RNA, 19 nt, Artificial Sequence
  Description of Artificial Sequence: Synthetic oligonucleotide
  Sense strand starting at position 1794 of SEQ ID NO: 1882127
uuaauuacacuguaaccga

SEQ ID NO: 2097279 - RNA, 19 nt, Artificial Sequence
  Description of Artificial Sequence: Synthetic oligonucleotide
  Antisense strand to SEQ ID NO: 2097278
ucgguuacaguguaauuaa

SEQ ID NO: 2097280 - RNA, 19 nt, Artificial Sequence
  Description of Artificial Sequence: Synthetic oligonucleotide
  Sense strand starting at position 1849 of SEQ ID NO: 1882127
cgcuuucaggaagggaaau

SEQ ID NO: 2097281 - RNA, 19 nt, Artificial Sequence
  Description of Artificial Sequence: Synthetic oligonucleotide
  Antisense strand to SEQ ID NO: 2097280
auuucccuuccugaaagcg

SEQ ID NO: 2097282 - RNA, 19 nt, Artificial Sequence
  Description of Artificial Sequence: Synthetic oligonucleotide
  Sense strand starting at position 1994 of SEQ ID NO: 1882127
gagcuugcuuuaccagaca

SEQ ID NO: 2097283 - RNA, 19 nt, Artificial Sequence
  Description of Artificial Sequence: Synthetic oligonucleotide
  Antisense strand to SEQ ID NO: 2097282
ugucugguaaagcaagcuc

SEQ ID NO: 2097284 - RNA, 19 nt, Artificial Sequence
  Description of Artificial Sequence: Synthetic oligonucleotide
  Sense strand starting at position 2042 of SEQ ID NO: 1882127
agaugugauuggcugaaag

SEQ ID NO: 2097285 - RNA, 19 nt, Artificial Sequence
  Description of Artificial Sequence: Synthetic oligonucleotide
  Antisense strand to SEQ ID NO: 2097284
cuuucagccaaucacaucu

SEQ ID NO: 2097286 - RNA, 19 nt, Artificial Sequence
  Description of Artificial Sequence: Synthetic oligonucleotide
  Sense strand starting at position 3163 of SEQ ID NO: 1882127
agggcuuuguucccaaaua

SEQ ID NO: 2097287 - RNA, 19 nt, Artificial Sequence
  Description of Artificial Sequence: Synthetic oligonucleotide
  Antisense strand to SEQ ID NO: 2097286
uauuugggaacaaagcccu

SEQ ID NO: 2097288 - RNA, 19 nt, Artificial Sequence
  Description of Artificial Sequence: Synthetic oligonucleotide
  Sense strand starting at position 3427 of SEQ ID NO: 1882127
cgagacaaauguuccggau

SEQ ID NO: 2097289 - RNA, 19 nt, Artificial Sequence
  Description of Artificial Sequence: Synthetic oligonucleotide
  Antisense strand to SEQ ID NO: 2097288
auccggaacauuugucucg

SEQ ID NO: 2097290 - RNA, 19 nt, Artificial Sequence
  Description of Artificial Sequence: Synthetic oligonucleotide
  Sense strand starting at position 3431 of SEQ ID NO: 1882127
acaaauguuccggaugcuu

SEQ ID NO: 2097291 - RNA, 19 nt, Artificial Sequence
  Description of Artificial Sequence: Synthetic oligonucleotide
  Antisense strand to SEQ ID NO: 2097290
aagcauccggaacauuugu

SEQ ID NO: 2097292 - RNA, 19 nt, Artificial Sequence
  Description of Artificial Sequence: Synthetic oligonucleotide
  Sense strand starting at position 3612 of SEQ ID NO: 1882127
uuugcaaaccugggaguua

SEQ ID NO: 2097293 - RNA, 19 nt, Artificial Sequence
  Description of Artificial Sequence: Synthetic oligonucleotide
  Antisense strand to SEQ ID NO: 2097292
uaacucccagguuugcaaa

SEQ ID NO: 2097294 - RNA, 19 nt, Artificial Sequence
  Description of Artificial Sequence: Synthetic oligonucleotide
  Sense strand starting at position 3624 of SEQ ID NO: 1882127
ggaguuaaucucgaaguaa

SEQ ID NO: 2097295 - RNA, 19 nt, Artificial Sequence
  Description of Artificial Sequence: Synthetic oligonucleotide
  Antisense strand to SEQ ID NO: 2097294
uuacuucgagauuaacucc

SEQ ID NO: 2097296 - RNA, 19 nt, Artificial Sequence
  Description of Artificial Sequence: Synthetic oligonucleotide
  Sense strand starting at position 3833 of SEQ ID NO: 1882127
gaaguaagccugcaaauga

SEQ ID NO: 2097297 - RNA, 19 nt, Artificial Sequence
  Description of Artificial Sequence: Synthetic oligonucleotide
  Antisense strand to SEQ ID NO: 2097296
ucauuugcaggcuuacuuc

SEQ ID NO: 2097298 - RNA, 19 nt, Artificial Sequence
  Description of Artificial Sequence: Synthetic oligonucleotide
  Sense strand starting at position 6 of SEQ ID NO: 1882128
aggagcuaaucucucuuau

SEQ ID NO: 2097299 - RNA, 19 nt, Artificial Sequence
  Description of Artificial Sequence: Synthetic oligonucleotide
  Antisense strand to SEQ ID NO: 2097298
auaagagagauuagcuccu

SEQ ID NO: 2097300 - RNA, 19 nt, Artificial Sequence
  Description of Artificial Sequence: Synthetic oligonucleotide
  Sense strand starting at position 123 of SEQ ID NO: 1882128
cugucucuggagcaaugua

SEQ ID NO: 2097301 - RNA, 19 nt, Artificial Sequence
  Description of Artificial Sequence: Synthetic oligonucleotide
  Antisense strand to SEQ ID NO: 2097300
uacauugcuccagagacag

SEQ ID NO: 2097302 - RNA, 19 nt, Artificial Sequence
  Description of Artificial Sequence: Synthetic oligonucleotide
  Sense strand starting at position 176 of SEQ ID NO: 1882128
uguauauguguacacaaga

SEQ ID NO: 2097303 - RNA, 19 nt, Artificial Sequence
  Description of Artificial Sequence: Synthetic oligonucleotide
  Antisense strand to SEQ ID NO: 2097302
ucuuguguacacauauaca

SEQ ID NO: 2097304 - RNA, 19 nt, Artificial Sequence
  Description of Artificial Sequence: Synthetic oligonucleotide
  Sense strand starting at position 545 of SEQ ID NO: 1882128
uugcaaugcuuauuugauu

SEQ ID NO: 2097305 - RNA, 19 nt, Artificial Sequence
  Description of Artificial Sequence: Synthetic oligonucleotide
  Antisense strand to SEQ ID NO: 2097304
aaucaaauaagcauugcaa

SEQ ID NO: 2097306 - RNA, 19 nt, Artificial Sequence
  Description of Artificial Sequence: Synthetic oligonucleotide
  Sense strand starting at position 833 of SEQ ID NO: 1882128
gagucuucuggugauggau

SEQ ID NO: 2097307 - RNA, 19 nt, Artificial Sequence
  Description of Artificial Sequence: Synthetic oligonucleotide
  Antisense strand to SEQ ID NO: 2097306
auccaucaccagaagacuc

SEQ ID NO: 2097308 - RNA, 19 nt, Artificial Sequence
  Description of Artificial Sequence: Synthetic oligonucleotide
  Sense strand starting at position 968 of SEQ ID NO: 1882128
uuaaccagucaauggaauu

SEQ ID NO: 2097309 - RNA, 19 nt, Artificial Sequence
  Description of Artificial Sequence: Synthetic oligonucleotide
  Antisense strand to SEQ ID NO: 2097308
aauuccauugacugguuaa

SEQ ID NO: 2097310 - RNA, 19 nt, Artificial Sequence
  Description of Artificial Sequence: Synthetic oligonucleotide
  Sense strand starting at position 994 of SEQ ID NO: 1882128
gcuaucuacagugauuggu

SEQ ID NO: 2097311 - RNA, 19 nt, Artificial Sequence
  Description of Artificial Sequence: Synthetic oligonucleotide
  Antisense strand to SEQ ID NO: 2097310
accaaucacuguagauagc

SEQ ID NO: 2097312 - RNA, 19 nt, Artificial Sequence
  Description of Artificial Sequence: Synthetic oligonucleotide
  Sense strand starting at position 996 of SEQ ID NO: 1882128
uaucuacagugauugguuu

SEQ ID NO: 2097313 - RNA, 19 nt, Artificial Sequence
  Description of Artificial Sequence: Synthetic oligonucleotide
  Antisense strand to SEQ ID NO: 2097312
aaaccaaucacuguagaua

SEQ ID NO: 2097314 - RNA, 19 nt, Artificial Sequence
  Description of Artificial Sequence: Synthetic oligonucleotide
  Sense strand starting at position 997 of SEQ ID NO: 1882128
aucuacagugauugguuua

SEQ ID NO: 2097315 - RNA, 19 nt, Artificial Sequence
  Description of Artificial Sequence: Synthetic oligonucleotide
  Antisense strand to SEQ ID NO: 2097314
uaaaccaaucacuguagau

SEQ ID NO: 2097316 - RNA, 19 nt, Artificial Sequence
  Description of Artificial Sequence: Synthetic oligonucleotide
  Sense strand starting at position 1028 of SEQ ID NO: 1882128
guccaaacagaaugaaguu

SEQ ID NO: 2097317 - RNA, 19 nt, Artificial Sequence
  Description of Artificial Sequence: Synthetic oligonucleotide
  Antisense strand to SEQ ID NO: 2097316
aacuucauucuguuuggac

SEQ ID NO: 2097318 - RNA, 19 nt, Artificial Sequence
  Description of Artificial Sequence: Synthetic oligonucleotide
  Sense strand starting at position 1253 of SEQ ID NO: 1882128
gguacaauccuuugagcca

SEQ ID NO: 2097319 - RNA, 19 nt, Artificial Sequence
  Description of Artificial Sequence: Synthetic oligonucleotide
  Antisense strand to SEQ ID NO: 2097318
uggcucaaaggauuguacc

SEQ ID NO: 2097320 - RNA, 19 nt, Artificial Sequence
  Description of Artificial Sequence: Synthetic oligonucleotide
  Sense strand starting at position 1279 of SEQ ID NO: 1882128
uccuuuaugguuuaagcca

SEQ ID NO: 2097321 - RNA, 19 nt, Artificial Sequence
  Description of Artificial Sequence: Synthetic oligonucleotide
  Antisense strand to SEQ ID NO: 2097320
uggcuuaaaccauaaagga

SEQ ID NO: 2097322 - RNA, 19 nt, Artificial Sequence
  Description of Artificial Sequence: Synthetic oligonucleotide
  Sense strand starting at position 1300 of SEQ ID NO: 1882128
gaaugagguuaucuauuac

SEQ ID NO: 2097323 - RNA, 19 nt, Artificial Sequence
  Description of Artificial Sequence: Synthetic oligonucleotide
  Antisense strand to SEQ ID NO: 2097322
guaauagauaaccucauuc

SEQ ID NO: 2097324 - RNA, 19 nt, Artificial Sequence
  Description of Artificial Sequence: Synthetic oligonucleotide
  Sense strand starting at position 1373 of SEQ ID NO: 1882128
uguaauuuguuucuugcaa

SEQ ID NO: 2097325 - RNA, 19 nt, Artificial Sequence
  Description of Artificial Sequence: Synthetic oligonucleotide
  Antisense strand to SEQ ID NO: 2097324
uugcaagaaacaaauuaca

SEQ ID NO: 2097326 - RNA, 19 nt, Artificial Sequence
  Description of Artificial Sequence: Synthetic oligonucleotide
  Sense strand starting at position 1374 of SEQ ID NO: 1882128
guaauuuguuucuugcaac

SEQ ID NO: 2097327 - RNA, 19 nt, Artificial Sequence
  Description of Artificial Sequence: Synthetic oligonucleotide
  Antisense strand to SEQ ID NO: 2097326
guugcaagaaacaaauuac

SEQ ID NO: 2097328 - RNA, 19 nt, Artificial Sequence
  Description of Artificial Sequence: Synthetic oligonucleotide
  Sense strand starting at position 1412 of SEQ ID NO: 1882128
agcacucuuggauagcauu

SEQ ID NO: 2097329 - RNA, 19 nt, Artificial Sequence
  Description of Artificial Sequence: Synthetic oligonucleotide
  Antisense strand to SEQ ID NO: 2097328
aaugcuauccaagagugcu

SEQ ID NO: 2097330 - RNA, 19 nt, Artificial Sequence
  Description of Artificial Sequence: Synthetic oligonucleotide
  Sense strand starting at position 1636 of SEQ ID NO: 1882128
aucguaauugcauauagau

SEQ ID NO: 2097331 - RNA, 19 nt, Artificial Sequence
  Description of Artificial Sequence: Synthetic oligonucleotide
  Antisense strand to SEQ ID NO: 2097330
aucuauaugcaauuacgau

SEQ ID NO: 2097332 - RNA, 19 nt, Artificial Sequence
  Description of Artificial Sequence: Synthetic oligonucleotide
  Sense strand starting at position 1638 of SEQ ID NO: 1882128
cguaauugcauauagauag

SEQ ID NO: 2097333 - RNA, 19 nt, Artificial Sequence
  Description of Artificial Sequence: Synthetic oligonucleotide
  Antisense strand to SEQ ID NO: 2097332
cuaucuauaugcaauuacg

SEQ ID NO: 2097334 - RNA, 19 nt, Artificial Sequence
  Description of Artificial Sequence: Synthetic oligonucleotide
  Sense strand starting at position 1655 of SEQ ID NO: 1882128
aggcauaugauaugguaua

SEQ ID NO: 2097335 - RNA, 19 nt, Artificial Sequence
  Description of Artificial Sequence: Synthetic oligonucleotide
  Antisense strand to SEQ ID NO: 2097334
uauaccauaucauaugccu

SEQ ID NO: 2097336 - RNA, 19 nt, Artificial Sequence
  Description of Artificial Sequence: Synthetic oligonucleotide
  Sense strand starting at position 1719 of SEQ ID NO: 1882128
uguuuccggcaauauuaaa

SEQ ID NO: 2097337 - RNA, 19 nt, Artificial Sequence
  Description of Artificial Sequence: Synthetic oligonucleotide
  Antisense strand to SEQ ID NO: 2097336
uuuaauauugccggaaaca

SEQ ID NO: 2097338 - RNA, 19 nt, Artificial Sequence
  Description of Artificial Sequence: Synthetic oligonucleotide
  Sense strand starting at position 2051 of SEQ ID NO: 1882128
gucucuuucugacuaacag

SEQ ID NO: 2097339 - RNA, 19 nt, Artificial Sequence
  Description of Artificial Sequence: Synthetic oligonucleotide
  Antisense strand to SEQ ID NO: 2097338
cuguuagucagaaagagac

SEQ ID NO: 2097340 - RNA, 19 nt, Artificial Sequence
  Description of Artificial Sequence: Synthetic oligonucleotide
  Sense strand starting at position 2160 of SEQ ID NO: 1882128
aauugagcuguuggaacaa

SEQ ID NO: 2097341 - RNA, 19 nt, Artificial Sequence
  Description of Artificial Sequence: Synthetic oligonucleotide
  Antisense strand to SEQ ID NO: 2097340
uuguuccaacagcucaauu

SEQ ID NO: 2097342 - RNA, 19 nt, Artificial Sequence
  Description of Artificial Sequence: Synthetic oligonucleotide
  Sense strand starting at position 2289 of SEQ ID NO: 1882128
auauuagggcccuaguaua

SEQ ID NO: 2097343 - RNA, 19 nt, Artificial Sequence
  Description of Artificial Sequence: Synthetic oligonucleotide
  Antisense strand to SEQ ID NO: 2097342
uauacuagggcccuaauau

SEQ ID NO: 2097344 - RNA, 19 nt, Artificial Sequence
  Description of Artificial Sequence: Synthetic oligonucleotide
  Sense strand starting at position 2302 of SEQ ID NO: 1882128
aguauaaugugauuagaga

SEQ ID NO: 2097345 - RNA, 19 nt, Artificial Sequence
  Description of Artificial Sequence: Synthetic oligonucleotide
  Antisense strand to SEQ ID NO: 2097344
ucucuaaucacauuauacu

SEQ ID NO: 2097346 - RNA, 19 nt, Artificial Sequence
  Description of Artificial Sequence: Synthetic oligonucleotide
  Sense strand starting at position 2351 of SEQ ID NO: 1882128
uuugucucagucuaaagau

SEQ ID NO: 2097347 - RNA, 19 nt, Artificial Sequence
  Description of Artificial Sequence: Synthetic oligonucleotide
  Antisense strand to SEQ ID NO: 2097346
aucuuuagacugagacaaa

SEQ ID NO: 2097348 - RNA, 19 nt, Artificial Sequence
  Description of Artificial Sequence: Synthetic oligonucleotide
  Sense strand starting at position 2366 of SEQ ID NO: 1882128
agauucuuccuuuauuguu

SEQ ID NO: 2097349 - RNA, 19 nt, Artificial Sequence
  Description of Artificial Sequence: Synthetic oligonucleotide
  Antisense strand to SEQ ID NO: 2097348
aacaauaaaggaagaaucu

SEQ ID NO: 2097350 - RNA, 19 nt, Artificial Sequence
  Description of Artificial Sequence: Synthetic oligonucleotide
  Sense strand starting at position 2380 of SEQ ID NO: 1882128
uuguuugcuguggcuaauu

SEQ ID NO: 2097351 - RNA, 19 nt, Artificial Sequence
  Description of Artificial Sequence: Synthetic oligonucleotide
  Antisense strand to SEQ ID NO: 2097350
aauuagccacagcaaacaa

SEQ ID NO: 2097352 - RNA, 19 nt, Artificial Sequence
  Description of Artificial Sequence: Synthetic oligonucleotide
  Sense strand starting at position 2382 of SEQ ID NO: 1882128
guuugcuguggcuaauuua

SEQ ID NO: 2097353 - RNA, 19 nt, Artificial Sequence
  Description of Artificial Sequence: Synthetic oligonucleotide
  Antisense strand to SEQ ID NO: 2097352
uaaauuagccacagcaaac

SEQ ID NO: 2097354 - RNA, 19 nt, Artificial Sequence
  Description of Artificial Sequence: Synthetic oligonucleotide
  Sense strand starting at position 2385 of SEQ ID NO: 1882128
ugcuguggcuaauuuauga

SEQ ID NO: 2097355 - RNA, 19 nt, Artificial Sequence
  Description of Artificial Sequence: Synthetic oligonucleotide
  Antisense strand to SEQ ID NO: 2097354
ucauaaauuagccacagca

SEQ ID NO: 2097356 - RNA, 19 nt, Artificial Sequence
  Description of Artificial Sequence: Synthetic oligonucleotide
  Sense strand starting at position 2390 of SEQ ID NO: 1882128
uggcuaauuuaugaaagac

SEQ ID NO: 2097357 - RNA, 19 nt, Artificial Sequence
  Description of Artificial Sequence: Synthetic oligonucleotide
  Antisense strand to SEQ ID NO: 2097356
gucuuucauaaauuagcca

SEQ ID NO: 2097358 - RNA, 19 nt, Artificial Sequence
  Description of Artificial Sequence: Synthetic oligonucleotide
  Sense strand starting at position 2523 of SEQ ID NO: 1882128
ucuaaaguccuguguauuu

SEQ ID NO: 2097359 - RNA, 19 nt, Artificial Sequence
  Description of Artificial Sequence: Synthetic oligonucleotide
  Antisense strand to SEQ ID NO: 2097358
aaauacacaggacuuuaga

SEQ ID NO: 2097360 - RNA, 19 nt, Artificial Sequence
  Description of Artificial Sequence: Synthetic oligonucleotide
  Sense strand starting at position 2528 of SEQ ID NO: 1882128
aguccuguguauuucucua

SEQ ID NO: 2097361 - RNA, 19 nt, Artificial Sequence
  Description of Artificial Sequence: Synthetic oligonucleotide
  Antisense strand to SEQ ID NO: 2097360
uagagaaauacacaggacu

SEQ ID NO: 2097362 - RNA, 19 nt, Artificial Sequence
  Description of Artificial Sequence: Synthetic oligonucleotide
  Sense strand starting at position 2530 of SEQ ID NO: 1882128
uccuguguauuucucuauu

SEQ ID NO: 2097363 - RNA, 19 nt, Artificial Sequence
  Description of Artificial Sequence: Synthetic oligonucleotide
  Antisense strand to SEQ ID NO: 2097362
aauagagaaauacacagga

SEQ ID NO: 2097364 - RNA, 19 nt, Artificial Sequence
  Description of Artificial Sequence: Synthetic oligonucleotide
  Sense strand starting at position 2754 of SEQ ID NO: 1882128
augucuuaaugaguuaacu

SEQ ID NO: 2097365 - RNA, 19 nt, Artificial Sequence
  Description of Artificial Sequence: Synthetic oligonucleotide
  Antisense strand to SEQ ID NO: 2097364
aguuaacucauuaagacau

SEQ ID NO: 2097366 - RNA, 19 nt, Artificial Sequence
  Description of Artificial Sequence: Synthetic oligonucleotide
  Sense strand starting at position 2990 of SEQ ID NO: 1882128
gucgaugagcaagaguuga

SEQ ID NO: 2097367 - RNA, 19 nt, Artificial Sequence
  Description of Artificial Sequence: Synthetic oligonucleotide
  Antisense strand to SEQ ID NO: 2097366
ucaacucuugcucaucgac

SEQ ID NO: 2097368 - RNA, 19 nt, Artificial Sequence
  Description of Artificial Sequence: Synthetic oligonucleotide
  Sense strand starting at position 2994 of SEQ ID NO: 1882128
augagcaagaguugaucua

SEQ ID NO: 2097369 - RNA, 19 nt, Artificial Sequence
  Description of Artificial Sequence: Synthetic oligonucleotide
  Antisense strand to SEQ ID NO: 2097368
uagaucaacucuugcucau

SEQ ID NO: 2097370 - RNA, 19 nt, Artificial Sequence
  Description of Artificial Sequence: Synthetic oligonucleotide
  Sense strand starting at position 3548 of SEQ ID NO: 1882128
ugaagauaaugucuuaauc

SEQ ID NO: 2097371 - RNA, 19 nt, Artificial Sequence
  Description of Artificial Sequence: Synthetic oligonucleotide
  Antisense strand to SEQ ID NO: 2097370
gauuaagacauuaucuuca

SEQ ID NO: 2097372 - RNA, 19 nt, Artificial Sequence
  Description of Artificial Sequence: Synthetic oligonucleotide
  Sense strand starting at position 3676 of SEQ ID NO: 1882128
guggcucauaggcagauau

SEQ ID NO: 2097373 - RNA, 19 nt, Artificial Sequence
  Description of Artificial Sequence: Synthetic oligonucleotide
  Antisense strand to SEQ ID NO: 2097372
auaucugccuaugagccac

SEQ ID NO: 2097374 - RNA, 19 nt, Artificial Sequence
  Description of Artificial Sequence: Synthetic oligonucleotide
  Sense strand starting at position 3858 of SEQ ID NO: 1882128
ucagaauacucuguucuag

SEQ ID NO: 2097375 - RNA, 19 nt, Artificial Sequence
  Description of Artificial Sequence: Synthetic oligonucleotide
  Antisense strand to SEQ ID NO: 2097374
cuagaacagaguauucuga

SEQ ID NO: 2097376 - RNA, 19 nt, Artificial Sequence
  Description of Artificial Sequence: Synthetic oligonucleotide
  Sense strand starting at position 3920 of SEQ ID NO: 1882128
cuacuuacugugcaauaga

SEQ ID NO: 2097377 - RNA, 19 nt, Artificial Sequence
  Description of Artificial Sequence: Synthetic oligonucleotide
  Antisense strand to SEQ ID NO: 2097376
ucuauugcacaguaaguag

SEQ ID NO: 2097378 - RNA, 19 nt, Artificial Sequence
  Description of Artificial Sequence: Synthetic oligonucleotide
  Sense strand starting at position 84 of SEQ ID NO: 1882129
uuaauaagucccgacaucu

SEQ ID NO: 2097379 - RNA, 19 nt, Artificial Sequence
  Description of Artificial Sequence: Synthetic oligonucleotide
  Antisense strand to SEQ ID NO: 2097378
agaugucgggacuuauuaa

SEQ ID NO: 2097380 - RNA, 19 nt, Artificial Sequence
  Description of Artificial Sequence: Synthetic oligonucleotide
  Sense strand starting at position 99 of SEQ ID NO: 1882129
aucugaaaggacuguguuu

SEQ ID NO: 2097381 - RNA, 19 nt, Artificial Sequence
  Description of Artificial Sequence: Synthetic oligonucleotide
  Antisense strand to SEQ ID NO: 2097380
aaacacaguccuuucagau

SEQ ID NO: 2097382 - RNA, 19 nt, Artificial Sequence
  Description of Artificial Sequence: Synthetic oligonucleotide
  Sense strand starting at position 1003 of SEQ ID NO: 1882129
aucuccugucacugagaaa

SEQ ID NO: 2097383 - RNA, 19 nt, Artificial Sequence
  Description of Artificial Sequence: Synthetic oligonucleotide
  Antisense strand to SEQ ID NO: 2097382
uuucucagugacaggagau

SEQ ID NO: 2097384 - RNA, 19 nt, Artificial Sequence
  Description of Artificial Sequence: Synthetic oligonucleotide
  Sense strand starting at position 1108 of SEQ ID NO: 1882129
ucaacaugaguaggacuau

SEQ ID NO: 2097385 - RNA, 19 nt, Artificial Sequence
  Description of Artificial Sequence: Synthetic oligonucleotide
  Antisense strand to SEQ ID NO: 2097384
auaguccuacucauguuga

SEQ ID NO: 2097386 - RNA, 19 nt, Artificial Sequence
  Description of Artificial Sequence: Synthetic oligonucleotide
  Sense strand starting at position 1341 of SEQ ID NO: 1882129
gcgaaaucugcugcagcca

SEQ ID NO: 2097387 - RNA, 19 nt, Artificial Sequence
  Description of Artificial Sequence: Synthetic oligonucleotide
  Antisense strand to SEQ ID NO: 2097386
uggcugcagcagauuucgc

SEQ ID NO: 2097388 - RNA, 19 nt, Artificial Sequence
  Description of Artificial Sequence: Synthetic oligonucleotide
  Sense strand starting at position 1342 of SEQ ID NO: 1882129
cgaaaucugcugcagccaa

SEQ ID NO: 2097389 - RNA, 19 nt, Artificial Sequence
  Description of Artificial Sequence: Synthetic oligonucleotide
  Antisense strand to SEQ ID NO: 2097388
uuggcugcagcagauuucg

SEQ ID NO: 2097390 - RNA, 19 nt, Artificial Sequence
  Description of Artificial Sequence: Synthetic oligonucleotide
  Sense strand starting at position 1366 of SEQ ID NO: 1882129
gucuacugcuccuugagac

SEQ ID NO: 2097391 - RNA, 19 nt, Artificial Sequence
  Description of Artificial Sequence: Synthetic oligonucleotide
  Antisense strand to SEQ ID NO: 2097390
gucucaaggagcaguagac

SEQ ID NO: 2097392 - RNA, 19 nt, Artificial Sequence
  Description of Artificial Sequence: Synthetic oligonucleotide
  Sense strand starting at position 1367 of SEQ ID NO: 1882129
ucuacugcuccuugagaca

SEQ ID NO: 2097393 - RNA, 19 nt, Artificial Sequence
  Description of Artificial Sequence: Synthetic oligonucleotide
  Antisense strand to SEQ ID NO: 2097392
ugucucaaggagcaguaga

SEQ ID NO: 2097394 - RNA, 19 nt, Artificial Sequence
  Description of Artificial Sequence: Synthetic oligonucleotide
  Sense strand starting at position 1380 of SEQ ID NO: 1882129
gagacacugucacaagaga

SEQ ID NO: 2097395 - RNA, 19 nt, Artificial Sequence
  Description of Artificial Sequence: Synthetic oligonucleotide
  Antisense strand to SEQ ID NO: 2097394
ucucuugugacagugucuc

SEQ ID NO: 2097396 - RNA, 19 nt, Artificial Sequence
  Description of Artificial Sequence: Synthetic oligonucleotide
  Sense strand starting at position 1479 of SEQ ID NO: 1882129
ucuuuagaccuauacgcaa

SEQ ID NO: 2097397 - RNA, 19 nt, Artificial Sequence
  Description of Artificial Sequence: Synthetic oligonucleotide
  Antisense strand to SEQ ID NO: 2097396
uugcguauaggucuaaaga

SEQ ID NO: 2097398 - RNA, 19 nt, Artificial Sequence
  Description of Artificial Sequence: Synthetic oligonucleotide
  Sense strand starting at position 1594 of SEQ ID NO: 1882129
uuaaacugcuucucacgau

SEQ ID NO: 2097399 - RNA, 19 nt, Artificial Sequence
  Description of Artificial Sequence: Synthetic oligonucleotide
  Antisense strand to SEQ ID NO: 2097398
aucgugagaagcaguuuaa

SEQ ID NO: 2097400 - RNA, 19 nt, Artificial Sequence
  Description of Artificial Sequence: Synthetic oligonucleotide
  Sense strand starting at position 1598 of SEQ ID NO: 1882129
acugcuucucacgauaaau

SEQ ID NO: 2097401 - RNA, 19 nt, Artificial Sequence
  Description of Artificial Sequence: Synthetic oligonucleotide
  Antisense strand to SEQ ID NO: 2097400
auuuaucgugagaagcagu

SEQ ID NO: 2097402 - RNA, 19 nt, Artificial Sequence
  Description of Artificial Sequence: Synthetic oligonucleotide
  Sense strand starting at position 1600 of SEQ ID NO: 1882129
ugcuucucacgauaaauca

SEQ ID NO: 2097403 - RNA, 19 nt, Artificial Sequence
  Description of Artificial Sequence: Synthetic oligonucleotide
  Antisense strand to SEQ ID NO: 2097402
ugauuuaucgugagaagca

SEQ ID NO: 2097404 - RNA, 19 nt, Artificial Sequence
  Description of Artificial Sequence: Synthetic oligonucleotide
  Sense strand starting at position 2435 of SEQ ID NO: 1882129
uccagacucucgcuuuaag

SEQ ID NO: 2097405 - RNA, 19 nt, Artificial Sequence
  Description of Artificial Sequence: Synthetic oligonucleotide
  Antisense strand to SEQ ID NO: 2097404
cuuaaagcgagagucugga

SEQ ID NO: 2097406 - RNA, 19 nt, Artificial Sequence
  Description of Artificial Sequence: Synthetic oligonucleotide
  Sense strand starting at position 2438 of SEQ ID NO: 1882129
agacucucgcuuuaaggau

SEQ ID NO: 2097407 - RNA, 19 nt, Artificial Sequence
  Description of Artificial Sequence: Synthetic oligonucleotide
  Antisense strand to SEQ ID NO: 2097406
auccuuaaagcgagagucu

SEQ ID NO: 2097408 - RNA, 19 nt, Artificial Sequence
  Description of Artificial Sequence: Synthetic oligonucleotide
  Sense strand starting at position 2865 of SEQ ID NO: 1882129
gucagauuguuaccacuga

SEQ ID NO: 2097409 - RNA, 19 nt, Artificial Sequence
  Description of Artificial Sequence: Synthetic oligonucleotide
  Antisense strand to SEQ ID NO: 2097408
ucagugguaacaaucugac

SEQ ID NO: 2097410 - RNA, 19 nt, Artificial Sequence
  Description of Artificial Sequence: Synthetic oligonucleotide
  Sense strand starting at position 2869 of SEQ ID NO: 1882129
gauuguuaccacugaguuu

SEQ ID NO: 2097411 - RNA, 19 nt, Artificial Sequence
  Description of Artificial Sequence: Synthetic oligonucleotide
  Antisense strand to SEQ ID NO: 2097410
aaacucagugguaacaauc

SEQ ID NO: 2097412 - RNA, 19 nt, Artificial Sequence
  Description of Artificial Sequence: Synthetic oligonucleotide
  Sense strand starting at position 3002 of SEQ ID NO: 1882129
gcccaaauguuagcaagaa

SEQ ID NO: 2097413 - RNA, 19 nt, Artificial Sequence
  Description of Artificial Sequence: Synthetic oligonucleotide
  Antisense strand to SEQ ID NO: 2097412
uucuugcuaacauuugggc

SEQ ID NO: 2097414 - RNA, 19 nt, Artificial Sequence
  Description of Artificial Sequence: Synthetic oligonucleotide
  Sense strand starting at position 3044 of SEQ ID NO: 1882129
auaccugaucaccguugaa

SEQ ID NO: 2097415 - RNA, 19 nt, Artificial Sequence
  Description of Artificial Sequence: Synthetic oligonucleotide
  Antisense strand to SEQ ID NO: 2097414
uucaacggugaucagguau

SEQ ID NO: 2097416 - RNA, 19 nt, Artificial Sequence
  Description of Artificial Sequence: Synthetic oligonucleotide
  Sense strand starting at position 3047 of SEQ ID NO: 1882129
ccugaucaccguugaauuc

SEQ ID NO: 2097417 - RNA, 19 nt, Artificial Sequence
  Description of Artificial Sequence: Synthetic oligonucleotide
  Antisense strand to SEQ ID NO: 2097416
gaauucaacggugaucagg

SEQ ID NO: 2097418 - RNA, 19 nt, Artificial Sequence
  Description of Artificial Sequence: Synthetic oligonucleotide
  Sense strand starting at position 3054 of SEQ ID NO: 1882129
accguugaauucuugauau

SEQ ID NO: 2097419 - RNA, 19 nt, Artificial Sequence
  Description of Artificial Sequence: Synthetic oligonucleotide
  Antisense strand to SEQ ID NO: 2097418
auaucaagaauucaacggu

SEQ ID NO: 2097420 - RNA, 19 nt, Artificial Sequence
  Description of Artificial Sequence: Synthetic oligonucleotide
  Sense strand starting at position 3065 of SEQ ID NO: 1882129
cuugauauuuaauaucgga

SEQ ID NO: 2097421 - RNA, 19 nt, Artificial Sequence
  Description of Artificial Sequence: Synthetic oligonucleotide
  Antisense strand to SEQ ID NO: 2097420
uccgauauuaaauaucaag

SEQ ID NO: 2097422 - RNA, 19 nt, Artificial Sequence
  Description of Artificial Sequence: Synthetic oligonucleotide
  Sense strand starting at position 3080 of SEQ ID NO: 1882129
cggauuagauuccuuauau

SEQ ID NO: 2097423 - RNA, 19 nt, Artificial Sequence
  Description of Artificial Sequence: Synthetic oligonucleotide
  Antisense strand to SEQ ID NO: 2097422
auauaaggaaucuaauccg

SEQ ID NO: 2097424 - RNA, 19 nt, Artificial Sequence
  Description of Artificial Sequence: Synthetic oligonucleotide
  Sense strand starting at position 3081 of SEQ ID NO: 1882129
ggauuagauuccuuauauu

SEQ ID NO: 2097425 - RNA, 19 nt, Artificial Sequence
  Description of Artificial Sequence: Synthetic oligonucleotide
  Antisense strand to SEQ ID NO: 2097424
aauauaaggaaucuaaucc

SEQ ID NO: 2097426 - RNA, 19 nt, Artificial Sequence
  Description of Artificial Sequence: Synthetic oligonucleotide
  Sense strand starting at position 3095 of SEQ ID NO: 1882129
auauuacaccuuuguugua

SEQ ID NO: 2097427 - RNA, 19 nt, Artificial Sequence
  Description of Artificial Sequence: Synthetic oligonucleotide
  Antisense strand to SEQ ID NO: 2097426
uacaacaaagguguaauau

SEQ ID NO: 2097428 - RNA, 19 nt, Artificial Sequence
  Description of Artificial Sequence: Synthetic oligonucleotide
  Sense strand starting at position 3287 of SEQ ID NO: 1882129
agucaugacccuuauugua

SEQ ID NO: 2097429 - RNA, 19 nt, Artificial Sequence
  Description of Artificial Sequence: Synthetic oligonucleotide
  Antisense strand to SEQ ID NO: 2097428
uacaauaagggucaugacu

SEQ ID NO: 2097430 - RNA, 19 nt, Artificial Sequence
  Description of Artificial Sequence: Synthetic oligonucleotide
  Sense strand starting at position 3413 of SEQ ID NO: 1882129
uuaguaaucucaguuuccu

SEQ ID NO: 2097431 - RNA, 19 nt, Artificial Sequence
  Description of Artificial Sequence: Synthetic oligonucleotide
  Antisense strand to SEQ ID NO: 2097430
aggaaacugagauuacuaa

SEQ ID NO: 2097432 - RNA, 19 nt, Artificial Sequence
  Description of Artificial Sequence: Synthetic oligonucleotide
  Sense strand starting at position 3512 of SEQ ID NO: 1882129
aucugaggcccuuguaacu

SEQ ID NO: 2097433 - RNA, 19 nt, Artificial Sequence
  Description of Artificial Sequence: Synthetic oligonucleotide
  Antisense strand to SEQ ID NO: 2097432
aguuacaagggccucagau

SEQ ID NO: 2097434 - RNA, 19 nt, Artificial Sequence
  Description of Artificial Sequence: Synthetic oligonucleotide
  Sense strand starting at position 3522 of SEQ ID NO: 1882129
cuuguaacucuggaaguaa

SEQ ID NO: 2097435 - RNA, 19 nt, Artificial Sequence
  Description of Artificial Sequence: Synthetic oligonucleotide
  Antisense strand to SEQ ID NO: 2097434
uuacuuccagaguuacaag

SEQ ID NO: 2097436 - RNA, 19 nt, Artificial Sequence
  Description of Artificial Sequence: Synthetic oligonucleotide
  Sense strand starting at position 3577 of SEQ ID NO: 1882129
agguguaaauugcuuaaag

SEQ ID NO: 2097437 - RNA, 19 nt, Artificial Sequence
  Description of Artificial Sequence: Synthetic oligonucleotide
  Antisense strand to SEQ ID NO: 2097436
cuuuaagcaauuuacaccu

SEQ ID NO: 2097438 - RNA, 19 nt, Artificial Sequence
  Description of Artificial Sequence: Synthetic oligonucleotide
  Sense strand starting at position 3579 of SEQ ID NO: 1882129
guguaaauugcuuaaagcu

SEQ ID NO: 2097439 - RNA, 19 nt, Artificial Sequence
  Description of Artificial Sequence: Synthetic oligonucleotide
  Antisense strand to SEQ ID NO: 2097438
agcuuuaagcaauuuacac

SEQ ID NO: 2097440 - RNA, 19 nt, Artificial Sequence
  Description of Artificial Sequence: Synthetic oligonucleotide
  Sense strand starting at position 3660 of SEQ ID NO: 1882129
auaugauaguggcuuuauc

SEQ ID NO: 2097441 - RNA, 19 nt, Artificial Sequence
  Description of Artificial Sequence: Synthetic oligonucleotide
  Antisense strand to SEQ ID NO: 2097440
gauaaagccacuaucauau

SEQ ID NO: 2097442 - RNA, 19 nt, Artificial Sequence
  Description of Artificial Sequence: Synthetic oligonucleotide
  Sense strand starting at position 3667 of SEQ ID NO: 1882129
aguggcuuuaucuagaguu

SEQ ID NO: 2097443 - RNA, 19 nt, Artificial Sequence
  Description of Artificial Sequence: Synthetic oligonucleotide
  Antisense strand to SEQ ID NO: 2097442
aacucuagauaaagccacu

SEQ ID NO: 2097444 - RNA, 19 nt, Artificial Sequence
  Description of Artificial Sequence: Synthetic oligonucleotide
  Sense strand starting at position 3669 of SEQ ID NO: 1882129
uggcuuuaucuagaguuaa

SEQ ID NO: 2097445 - RNA, 19 nt, Artificial Sequence
  Description of Artificial Sequence: Synthetic oligonucleotide
  Antisense strand to SEQ ID NO: 2097444
uuaacucuagauaaagcca

SEQ ID NO: 2097446 - RNA, 19 nt, Artificial Sequence
  Description of Artificial Sequence: Synthetic oligonucleotide
  Sense strand starting at position 3682 of SEQ ID NO: 1882129
aguuaaaccgucuacagau

SEQ ID NO: 2097447 - RNA, 19 nt, Artificial Sequence
  Description of Artificial Sequence: Synthetic oligonucleotide
  Antisense strand to SEQ ID NO: 2097446
aucuguagacgguuuaacu

SEQ ID NO: 2097448 - RNA, 19 nt, Artificial Sequence
  Description of Artificial Sequence: Synthetic oligonucleotide
  Sense strand starting at position 3697 of SEQ ID NO: 1882129
agauguuaaugauugguau

SEQ ID NO: 2097449 - RNA, 19 nt, Artificial Sequence
  Description of Artificial Sequence: Synthetic oligonucleotide
  Antisense strand to SEQ ID NO: 2097448
auaccaaucauuaacaucu

SEQ ID NO: 2097450 - RNA, 19 nt, Artificial Sequence
  Description of Artificial Sequence: Synthetic oligonucleotide
  Sense strand starting at position 3698 of SEQ ID NO: 1882129
gauguuaaugauugguaua

SEQ ID NO: 2097451 - RNA, 19 nt, Artificial Sequence
  Description of Artificial Sequence: Synthetic oligonucleotide
  Antisense strand to SEQ ID NO: 2097450
uauaccaaucauuaacauc

SEQ ID NO: 2097452 - RNA, 19 nt, Artificial Sequence
  Description of Artificial Sequence: Synthetic oligonucleotide
  Sense strand starting at position 3770 of SEQ ID NO: 1882129
cgacuuauccugcaaagca

SEQ ID NO: 2097453 - RNA, 19 nt, Artificial Sequence
  Description of Artificial Sequence: Synthetic oligonucleotide
  Antisense strand to SEQ ID NO: 2097452
ugcuuugcaggauaagucg

SEQ ID NO: 2097454 - RNA, 19 nt, Artificial Sequence
  Description of Artificial Sequence: Synthetic oligonucleotide
  Sense strand starting at position 3923 of SEQ ID NO: 1882129
uuguuuaaauagccguaaa

SEQ ID NO: 2097455 - RNA, 19 nt, Artificial Sequence
  Description of Artificial Sequence: Synthetic oligonucleotide
  Antisense strand to SEQ ID NO: 2097454
uuuacggcuauuuaaacaa

SEQ ID NO: 2097456 - RNA, 19 nt, Artificial Sequence
  Description of Artificial Sequence: Synthetic oligonucleotide
  Sense strand starting at position 3953 of SEQ ID NO: 1882129
auuuacaccugagaaagau

SEQ ID NO: 2097457 - RNA, 19 nt, Artificial Sequence
  Description of Artificial Sequence: Synthetic oligonucleotide
  Antisense strand to SEQ ID NO: 2097456
aucuuucucagguguaaau

SEQ ID NO: 2097458 - RNA, 19 nt, Artificial Sequence
  Description of Artificial Sequence: Synthetic oligonucleotide
  Sense strand starting at position 522 of SEQ ID NO: 1882130
ggugucauacuaugcagau

SEQ ID NO: 2097459 - RNA, 19 nt, Artificial Sequence
  Description of Artificial Sequence: Synthetic oligonucleotide
  Antisense strand to SEQ ID NO: 2097458
aucugcauaguaugacacc

SEQ ID NO: 2097460 - RNA, 19 nt, Artificial Sequence
  Description of Artificial Sequence: Synthetic oligonucleotide
  Sense strand starting at position 523 of SEQ ID NO: 1882130
gugucauacuaugcagauu

SEQ ID NO: 2097461 - RNA, 19 nt, Artificial Sequence
  Description of Artificial Sequence: Synthetic oligonucleotide
  Antisense strand to SEQ ID NO: 2097460
aaucugcauaguaugacac

SEQ ID NO: 2097462 - RNA, 19 nt, Artificial Sequence
  Description of Artificial Sequence: Synthetic oligonucleotide
  Sense strand starting at position 531 of SEQ ID NO: 1882130
cuaugcagauuguuugaca

SEQ ID NO: 2097463 - RNA, 19 nt, Artificial Sequence
  Description of Artificial Sequence: Synthetic oligonucleotide
  Antisense strand to SEQ ID NO: 2097462
ugucaaacaaucugcauag

SEQ ID NO: 2097464 - RNA, 19 nt, Artificial Sequence
  Description of Artificial Sequence: Synthetic oligonucleotide
  Sense strand starting at position 532 of SEQ ID NO: 1882130
uaugcagauuguuugacaa

SEQ ID NO: 2097465 - RNA, 19 nt, Artificial Sequence
  Description of Artificial Sequence: Synthetic oligonucleotide
  Antisense strand to SEQ ID NO: 2097464
uugucaaacaaucugcaua

SEQ ID NO: 2097466 - RNA, 19 nt, Artificial Sequence
  Description of Artificial Sequence: Synthetic oligonucleotide
  Sense strand starting at position 539 of SEQ ID NO: 1882130
auuguuugacaagaugcuu

SEQ ID NO: 2097467 - RNA, 19 nt, Artificial Sequence
  Description of Artificial Sequence: Synthetic oligonucleotide
  Antisense strand to SEQ ID NO: 2097466
aagcaucuugucaaacaau

SEQ ID NO: 2097468 - RNA, 19 nt, Artificial Sequence
  Description of Artificial Sequence: Synthetic oligonucleotide
  Sense strand starting at position 632 of SEQ ID NO: 1882130
cccaauuuauauggugaag

SEQ ID NO: 2097469 - RNA, 19 nt, Artificial Sequence
  Description of Artificial Sequence: Synthetic oligonucleotide
  Antisense strand to SEQ ID NO: 2097468
cuucaccauauaaauuggg

SEQ ID NO: 2097470 - RNA, 19 nt, Artificial Sequence
  Description of Artificial Sequence: Synthetic oligonucleotide
  Sense strand starting at position 634 of SEQ ID NO: 1882130
caauuuauauggugaagau

SEQ ID NO: 2097471 - RNA, 19 nt, Artificial Sequence
  Description of Artificial Sequence: Synthetic oligonucleotide
  Antisense strand to SEQ ID NO: 2097470
aucuucaccauauaaauug

SEQ ID NO: 2097472 - RNA, 19 nt, Artificial Sequence
  Description of Artificial Sequence: Synthetic oligonucleotide
  Sense strand starting at position 702 of SEQ ID NO: 1882130
aguaauauugcacgaucau

SEQ ID NO: 2097473 - RNA, 19 nt, Artificial Sequence
  Description of Artificial Sequence: Synthetic oligonucleotide
  Antisense strand to SEQ ID NO: 2097472
augaucgugcaauauuacu

SEQ ID NO: 2097474 - RNA, 19 nt, Artificial Sequence
  Description of Artificial Sequence: Synthetic oligonucleotide
  Sense strand starting at position 703 of SEQ ID NO: 1882130
guaauauugcacgaucauc

SEQ ID NO: 2097475 - RNA, 19 nt, Artificial Sequence
  Description of Artificial Sequence: Synthetic oligonucleotide
  Antisense strand to SEQ ID NO: 2097474
gaugaucgugcaauauuac

SEQ ID NO: 2097476 - RNA, 19 nt, Artificial Sequence
  Description of Artificial Sequence: Synthetic oligonucleotide
  Sense strand starting at position 1145 of SEQ ID NO: 1882130
gcuguuaauuuagaaaugu

SEQ ID NO: 2097477 - RNA, 19 nt, Artificial Sequence
  Description of Artificial Sequence: Synthetic oligonucleotide
  Antisense strand to SEQ ID NO: 2097476
acauuucuaaauuaacagc

SEQ ID NO: 2097478 - RNA, 19 nt, Artificial Sequence
  Description of Artificial Sequence: Synthetic oligonucleotide
  Sense strand starting at position 1185 of SEQ ID NO: 1882130
gguguuuggauggaaacga

SEQ ID NO: 2097479 - RNA, 19 nt, Artificial Sequence
  Description of Artificial Sequence: Synthetic oligonucleotide
  Antisense strand to SEQ ID NO: 2097478
ucguuuccauccaaacacc

SEQ ID NO: 2097480 - RNA, 19 nt, Artificial Sequence
  Description of Artificial Sequence: Synthetic oligonucleotide
  Sense strand starting at position 1186 of SEQ ID NO: 1882130
guguuuggauggaaacgau

SEQ ID NO: 2097481 - RNA, 19 nt, Artificial Sequence
  Description of Artificial Sequence: Synthetic oligonucleotide
  Antisense strand to SEQ ID NO: 2097480
aucguuuccauccaaacac

SEQ ID NO: 2097482 - RNA, 19 nt, Artificial Sequence
  Description of Artificial Sequence: Synthetic oligonucleotide
  Sense strand starting at position 1322 of SEQ ID NO: 1882130
ucuggagucucauccauuc

SEQ ID NO: 2097483 - RNA, 19 nt, Artificial Sequence
  Description of Artificial Sequence: Synthetic oligonucleotide
  Antisense strand to SEQ ID NO: 2097482
gaauggaugagacuccaga

SEQ ID NO: 2097484 - RNA, 19 nt, Artificial Sequence
  Description of Artificial Sequence: Synthetic oligonucleotide
  Sense strand starting at position 1427 of SEQ ID NO: 1882130
caccaaauucgagguuucu

SEQ ID NO: 2097485 - RNA, 19 nt, Artificial Sequence
  Description of Artificial Sequence: Synthetic oligonucleotide
  Antisense strand to SEQ ID NO: 2097484
agaaaccucgaauuuggug

SEQ ID NO: 2097486 - RNA, 19 nt, Artificial Sequence
  Description of Artificial Sequence: Synthetic oligonucleotide
  Sense strand starting at position 1469 of SEQ ID NO: 1882130
uuugacagaugugauuuau

SEQ ID NO: 2097487 - RNA, 19 nt, Artificial Sequence
  Description of Artificial Sequence: Synthetic oligonucleotide
  Antisense strand to SEQ ID NO: 2097486
auaaaucacaucugucaaa

SEQ ID NO: 2097488 - RNA, 19 nt, Artificial Sequence
  Description of Artificial Sequence: Synthetic oligonucleotide
  Sense strand starting at position 1503 of SEQ ID NO: 1882130
gucacauuggcucaagcaa

SEQ ID NO: 2097489 - RNA, 19 nt, Artificial Sequence
  Description of Artificial Sequence: Synthetic oligonucleotide
  Antisense strand to SEQ ID NO: 2097488
uugcuugagccaaugugac

SEQ ID NO: 2097490 - RNA, 19 nt, Artificial Sequence
  Description of Artificial Sequence: Synthetic oligonucleotide
  Sense strand starting at position 1647 of SEQ ID NO: 1882130
guucgaagcccgagaaguu

SEQ ID NO: 2097491 - RNA, 19 nt, Artificial Sequence
  Description of Artificial Sequence: Synthetic oligonucleotide
  Antisense strand to SEQ ID NO: 2097490
aacuucucgggcuucgaac

SEQ ID NO: 2097492 - RNA, 19 nt, Artificial Sequence
  Description of Artificial Sequence: Synthetic oligonucleotide
  Sense strand starting at position 1648 of SEQ ID NO: 1882130
uucgaagcccgagaaguuu

SEQ ID NO: 2097493 - RNA, 19 nt, Artificial Sequence
  Description of Artificial Sequence: Synthetic oligonucleotide
  Antisense strand to SEQ ID NO: 2097492
aaacuucucgggcuucgaa

SEQ ID NO: 2097494 - RNA, 19 nt, Artificial Sequence
  Description of Artificial Sequence: Synthetic oligonucleotide
  Sense strand starting at position 1807 of SEQ ID NO: 1882130
gagggaguccuucgugagu

SEQ ID NO: 2097495 - RNA, 19 nt, Artificial Sequence
  Description of Artificial Sequence: Synthetic oligonucleotide
  Antisense strand to SEQ ID NO: 2097494
acucacgaaggacucccuc

SEQ ID NO: 2097496 - RNA, 19 nt, Artificial Sequence
  Description of Artificial Sequence: Synthetic oligonucleotide
  Sense strand starting at position 1820 of SEQ ID NO: 1882130
gugaguucgccgcucacau

SEQ ID NO: 2097497 - RNA, 19 nt, Artificial Sequence
  Description of Artificial Sequence: Synthetic oligonucleotide
  Antisense strand to SEQ ID NO: 2097496
augugagcggcgaacucac

SEQ ID NO: 2097498 - RNA, 19 nt, Artificial Sequence
  Description of Artificial Sequence: Synthetic oligonucleotide
  Sense strand starting at position 1821 of SEQ ID NO: 1882130
ugaguucgccgcucacauu

SEQ ID NO: 2097499 - RNA, 19 nt, Artificial Sequence
  Description of Artificial Sequence: Synthetic oligonucleotide
  Antisense strand to SEQ ID NO: 2097498
aaugugagcggcgaacuca

SEQ ID NO: 2097500 - RNA, 19 nt, Artificial Sequence
  Description of Artificial Sequence: Synthetic oligonucleotide
  Sense strand starting at position 1847 of SEQ ID NO: 1882130
gggaaaccgauccgaagau

SEQ ID NO: 2097501 - RNA, 19 nt, Artificial Sequence
  Description of Artificial Sequence: Synthetic oligonucleotide
  Antisense strand to SEQ ID NO: 2097500
aucuucggaucgguuuccc

SEQ ID NO: 2097502 - RNA, 19 nt, Artificial Sequence
  Description of Artificial Sequence: Synthetic oligonucleotide
  Sense strand starting at position 2577 of SEQ ID NO: 1882130
cccuuagcauuggugacau

SEQ ID NO: 2097503 - RNA, 19 nt, Artificial Sequence
  Description of Artificial Sequence: Synthetic oligonucleotide
  Antisense strand to SEQ ID NO: 2097502
augucaccaaugcuaaggg

SEQ ID NO: 2097504 - RNA, 19 nt, Artificial Sequence
  Description of Artificial Sequence: Synthetic oligonucleotide
  Sense strand starting at position 2592 of SEQ ID NO: 1882130
acaucuauacuugaguguu

SEQ ID NO: 2097505 - RNA, 19 nt, Artificial Sequence
  Description of Artificial Sequence: Synthetic oligonucleotide
  Antisense strand to SEQ ID NO: 2097504
aacacucaaguauagaugu

SEQ ID NO: 2097506 - RNA, 19 nt, Artificial Sequence
  Description of Artificial Sequence: Synthetic oligonucleotide
  Sense strand starting at position 2741 of SEQ ID NO: 1882130
aaguaauugcauugggcaa

SEQ ID NO: 2097507 - RNA, 19 nt, Artificial Sequence
  Description of Artificial Sequence: Synthetic oligonucleotide
  Antisense strand to SEQ ID NO: 2097506
uugcccaaugcaauuacuu

SEQ ID NO: 2097508 - RNA, 19 nt, Artificial Sequence
  Description of Artificial Sequence: Synthetic oligonucleotide
  Sense strand starting at position 2742 of SEQ ID NO: 1882130
aguaauugcauugggcaaa

SEQ ID NO: 2097509 - RNA, 19 nt, Artificial Sequence
  Description of Artificial Sequence: Synthetic oligonucleotide
  Antisense strand to SEQ ID NO: 2097508
uuugcccaaugcaauuacu

SEQ ID NO: 2097510 - RNA, 19 nt, Artificial Sequence
  Description of Artificial Sequence: Synthetic oligonucleotide
  Sense strand starting at position 2796 of SEQ ID NO: 1882130
ugcagucacuuugugaaau

SEQ ID NO: 2097511 - RNA, 19 nt, Artificial Sequence
  Description of Artificial Sequence: Synthetic oligonucleotide
  Antisense strand to SEQ ID NO: 2097510
auuucacaaagugacugca

SEQ ID NO: 2097512 - RNA, 19 nt, Artificial Sequence
  Description of Artificial Sequence: Synthetic oligonucleotide
  Sense strand starting at position 2854 of SEQ ID NO: 1882130
ugcagagaguccucucaga

SEQ ID NO: 2097513 - RNA, 19 nt, Artificial Sequence
  Description of Artificial Sequence: Synthetic oligonucleotide
  Antisense strand to SEQ ID NO: 2097512
ucugagaggacucucugca

SEQ ID NO: 2097514 - RNA, 19 nt, Artificial Sequence
  Description of Artificial Sequence: Synthetic oligonucleotide
  Sense strand starting at position 2865 of SEQ ID NO: 1882130
cucucagagcuauguauac

SEQ ID NO: 2097515 - RNA, 19 nt, Artificial Sequence
  Description of Artificial Sequence: Synthetic oligonucleotide
  Antisense strand to SEQ ID NO: 2097514
guauacauagcucugagag

SEQ ID NO: 2097516 - RNA, 19 nt, Artificial Sequence
  Description of Artificial Sequence: Synthetic oligonucleotide
  Sense strand starting at position 2880 of SEQ ID NO: 1882130
auacccagagcugguuaaa

SEQ ID NO: 2097517 - RNA, 19 nt, Artificial Sequence
  Description of Artificial Sequence: Synthetic oligonucleotide
  Antisense strand to SEQ ID NO: 2097516
uuuaaccagcucuggguau

SEQ ID NO: 2097518 - RNA, 19 nt, Artificial Sequence
  Description of Artificial Sequence: Synthetic oligonucleotide
  Sense strand starting at position 2912 of SEQ ID NO: 1882130
gaacgaccguggucauacu

SEQ ID NO: 2097519 - RNA, 19 nt, Artificial Sequence
  Description of Artificial Sequence: Synthetic oligonucleotide
  Antisense strand to SEQ ID NO: 2097518
aguaugaccacggucguuc

SEQ ID NO: 2097520 - RNA, 19 nt, Artificial Sequence
  Description of Artificial Sequence: Synthetic oligonucleotide
  Sense strand starting at position 2932 of SEQ ID NO: 1882130
aggucaucaucccuagagu

SEQ ID NO: 2097521 - RNA, 19 nt, Artificial Sequence
  Description of Artificial Sequence: Synthetic oligonucleotide
  Antisense strand to SEQ ID NO: 2097520
acucuagggaugaugaccu

SEQ ID NO: 2097522 - RNA, 19 nt, Artificial Sequence
  Description of Artificial Sequence: Synthetic oligonucleotide
  Sense strand starting at position 2933 of SEQ ID NO: 1882130
ggucaucaucccuagagug

SEQ ID NO: 2097523 - RNA, 19 nt, Artificial Sequence
  Description of Artificial Sequence: Synthetic oligonucleotide
  Antisense strand to SEQ ID NO: 2097522
cacucuagggaugaugacc

SEQ ID NO: 2097524 - RNA, 19 nt, Artificial Sequence
  Description of Artificial Sequence: Synthetic oligonucleotide
  Sense strand starting at position 2945 of SEQ ID NO: 1882130
uagagugcucaggguaaac

SEQ ID NO: 2097525 - RNA, 19 nt, Artificial Sequence
  Description of Artificial Sequence: Synthetic oligonucleotide
  Antisense strand to SEQ ID NO: 2097524
guuuacccugagcacucua

SEQ ID NO: 2097526 - RNA, 19 nt, Artificial Sequence
  Description of Artificial Sequence: Synthetic oligonucleotide
  Sense strand starting at position 2955 of SEQ ID NO: 1882130
aggguaaacuguccagcaa

SEQ ID NO: 2097527 - RNA, 19 nt, Artificial Sequence
  Description of Artificial Sequence: Synthetic oligonucleotide
  Antisense strand to SEQ ID NO: 2097526
uugcuggacaguuuacccu

SEQ ID NO: 2097528 - RNA, 19 nt, Artificial Sequence
  Description of Artificial Sequence: Synthetic oligonucleotide
  Sense strand starting at position 2956 of SEQ ID NO: 1882130
ggguaaacuguccagcaaa

SEQ ID NO: 2097529 - RNA, 19 nt, Artificial Sequence
  Description of Artificial Sequence: Synthetic oligonucleotide
  Antisense strand to SEQ ID NO: 2097528
uuugcuggacaguuuaccc

SEQ ID NO: 2097530 - RNA, 19 nt, Artificial Sequence
  Description of Artificial Sequence: Synthetic oligonucleotide
  Sense strand starting at position 3047 of SEQ ID NO: 1882130
guuacaagucaacagaucu

SEQ ID NO: 2097531 - RNA, 19 nt, Artificial Sequence
  Description of Artificial Sequence: Synthetic oligonucleotide
  Antisense strand to SEQ ID NO: 2097530
agaucuguugacuuguaac

SEQ ID NO: 2097532 - RNA, 19 nt, Artificial Sequence
  Description of Artificial Sequence: Synthetic oligonucleotide
  Sense strand starting at position 3163 of SEQ ID NO: 1882130
agagucagcacagguguaa

SEQ ID NO: 2097533 - RNA, 19 nt, Artificial Sequence
  Description of Artificial Sequence: Synthetic oligonucleotide
  Antisense strand to SEQ ID NO: 2097532
uuacaccugugcugacucu

SEQ ID NO: 2097534 - RNA, 19 nt, Artificial Sequence
  Description of Artificial Sequence: Synthetic oligonucleotide
  Sense strand starting at position 3795 of SEQ ID NO: 1882130
agacauacauucuugcagu

SEQ ID NO: 2097535 - RNA, 19 nt, Artificial Sequence
  Description of Artificial Sequence: Synthetic oligonucleotide
  Antisense strand to SEQ ID NO: 2097534
acugcaagaauguaugucu

SEQ ID NO: 2097536 - RNA, 19 nt, Artificial Sequence
  Description of Artificial Sequence: Synthetic oligonucleotide
  Sense strand starting at position 3927 of SEQ ID NO: 1882130
ggcuucuagagcugcauuu

SEQ ID NO: 2097537 - RNA, 19 nt, Artificial Sequence
  Description of Artificial Sequence: Synthetic oligonucleotide
  Antisense strand to SEQ ID NO: 2097536
aaaugcagcucuagaagcc

SEQ ID NO: 2097538 - RNA, 19 nt, Artificial Sequence
  Description of Artificial Sequence: Synthetic oligonucleotide
  Sense strand starting at position 61 of SEQ ID NO: 1882131
auguauagggcuuggaagu

SEQ ID NO: 2097539 - RNA, 19 nt, Artificial Sequence
  Description of Artificial Sequence: Synthetic oligonucleotide
  Antisense strand to SEQ ID NO: 2097538
acuuccaagcccuauacau

SEQ ID NO: 2097540 - RNA, 19 nt, Artificial Sequence
  Description of Artificial Sequence: Synthetic oligonucleotide
  Sense strand starting at position 62 of SEQ ID NO: 1882131
uguauagggcuuggaagua

SEQ ID NO: 2097541 - RNA, 19 nt, Artificial Sequence
  Description of Artificial Sequence: Synthetic oligonucleotide
  Antisense strand to SEQ ID NO: 2097540
uacuuccaagcccuauaca

SEQ ID NO: 2097542 - RNA, 19 nt, Artificial Sequence
  Description of Artificial Sequence: Synthetic oligonucleotide
  Sense strand starting at position 239 of SEQ ID NO: 1882131
uggagaaauucugauucua

SEQ ID NO: 2097543 - RNA, 19 nt, Artificial Sequence
  Description of Artificial Sequence: Synthetic oligonucleotide
  Antisense strand to SEQ ID NO: 2097542
uagaaucagaauuucucca

SEQ ID NO: 2097544 - RNA, 19 nt, Artificial Sequence
  Description of Artificial Sequence: Synthetic oligonucleotide
  Sense strand starting at position 291 of SEQ ID NO: 1882131
gcuagucuaccugaauauu

SEQ ID NO: 2097545 - RNA, 19 nt, Artificial Sequence
  Description of Artificial Sequence: Synthetic oligonucleotide
  Antisense strand to SEQ ID NO: 2097544
aauauucagguagacuagc

SEQ ID NO: 2097546 - RNA, 19 nt, Artificial Sequence
  Description of Artificial Sequence: Synthetic oligonucleotide
  Sense strand starting at position 353 of SEQ ID NO: 1882131
ucacuuaaggcuuguagca

SEQ ID NO: 2097547 - RNA, 19 nt, Artificial Sequence
  Description of Artificial Sequence: Synthetic oligonucleotide
  Antisense strand to SEQ ID NO: 2097546
ugcuacaagccuuaaguga

SEQ ID NO: 2097548 - RNA, 19 nt, Artificial Sequence
  Description of Artificial Sequence: Synthetic oligonucleotide
  Sense strand starting at position 392 of SEQ ID NO: 1882131
uucuuaauugguugacaau

SEQ ID NO: 2097549 - RNA, 19 nt, Artificial Sequence
  Description of Artificial Sequence: Synthetic oligonucleotide
  Antisense strand to SEQ ID NO: 2097548
auugucaaccaauuaagaa

SEQ ID NO: 2097550 - RNA, 19 nt, Artificial Sequence
  Description of Artificial Sequence: Synthetic oligonucleotide
  Sense strand starting at position 433 of SEQ ID NO: 1882131
acuagaaguggugaaguca

SEQ ID NO: 2097551 - RNA, 19 nt, Artificial Sequence
  Description of Artificial Sequence: Synthetic oligonucleotide
  Antisense strand to SEQ ID NO: 2097550
ugacuucaccacuucuagu

SEQ ID NO: 2097552 - RNA, 19 nt, Artificial Sequence
  Description of Artificial Sequence: Synthetic oligonucleotide
  Sense strand starting at position 577 of SEQ ID NO: 1882131
agucacaucgacugcaaga

SEQ ID NO: 2097553 - RNA, 19 nt, Artificial Sequence
  Description of Artificial Sequence: Synthetic oligonucleotide
  Antisense strand to SEQ ID NO: 2097552
ucuugcagucgaugugacu

SEQ ID NO: 2097554 - RNA, 19 nt, Artificial Sequence
  Description of Artificial Sequence: Synthetic oligonucleotide
  Sense strand starting at position 619 of SEQ ID NO: 1882131
ggccuuauuucugccacau

SEQ ID NO: 2097555 - RNA, 19 nt, Artificial Sequence
  Description of Artificial Sequence: Synthetic oligonucleotide
  Antisense strand to SEQ ID NO: 2097554
auguggcagaaauaaggcc

SEQ ID NO: 2097556 - RNA, 19 nt, Artificial Sequence
  Description of Artificial Sequence: Synthetic oligonucleotide
  Sense strand starting at position 734 of SEQ ID NO: 1882131
ccuuucucugucugaagga

SEQ ID NO: 2097557 - RNA, 19 nt, Artificial Sequence
  Description of Artificial Sequence: Synthetic oligonucleotide
  Antisense strand to SEQ ID NO: 2097556
uccuucagacagagaaagg

SEQ ID NO: 2097558 - RNA, 19 nt, Artificial Sequence
  Description of Artificial Sequence: Synthetic oligonucleotide
  Sense strand starting at position 896 of SEQ ID NO: 1882131
ggaaacugcuguccaaucu

SEQ ID NO: 2097559 - RNA, 19 nt, Artificial Sequence
  Description of Artificial Sequence: Synthetic oligonucleotide
  Antisense strand to SEQ ID NO: 2097558
agauuggacagcaguuucc

SEQ ID NO: 2097560 - RNA, 19 nt, Artificial Sequence
  Description of Artificial Sequence: Synthetic oligonucleotide
  Sense strand starting at position 905 of SEQ ID NO: 1882131
uguccaaucuuuccaggca

SEQ ID NO: 2097561 - RNA, 19 nt, Artificial Sequence
  Description of Artificial Sequence: Synthetic oligonucleotide
  Antisense strand to SEQ ID NO: 2097560
ugccuggaaagauuggaca

SEQ ID NO: 2097562 - RNA, 19 nt, Artificial Sequence
  Description of Artificial Sequence: Synthetic oligonucleotide
  Sense strand starting at position 955 of SEQ ID NO: 1882131
cccggaucuggguagaauc

SEQ ID NO: 2097563 - RNA, 19 nt, Artificial Sequence
  Description of Artificial Sequence: Synthetic oligonucleotide
  Antisense strand to SEQ ID NO: 2097562
gauucuacccagauccggg

SEQ ID NO: 2097564 - RNA, 19 nt, Artificial Sequence
  Description of Artificial Sequence: Synthetic oligonucleotide
  Sense strand starting at position 2461 of SEQ ID NO: 1882131
ccagucauggcgggaaaga

SEQ ID NO: 2097565 - RNA, 19 nt, Artificial Sequence
  Description of Artificial Sequence: Synthetic oligonucleotide
  Antisense strand to SEQ ID NO: 2097564
ucuuucccgccaugacugg

SEQ ID NO: 2097566 - RNA, 19 nt, Artificial Sequence
  Description of Artificial Sequence: Synthetic oligonucleotide
  Sense strand starting at position 2843 of SEQ ID NO: 1882131
gcuguaguucuauugcuuu

SEQ ID NO: 2097567 - RNA, 19 nt, Artificial Sequence
  Description of Artificial Sequence: Synthetic oligonucleotide
  Antisense strand to SEQ ID NO: 2097566
aaagcaauagaacuacagc

SEQ ID NO: 2097568 - RNA, 19 nt, Artificial Sequence
  Description of Artificial Sequence: Synthetic oligonucleotide
  Sense strand starting at position 2958 of SEQ ID NO: 1882131
uaggauaugcucuggucca

SEQ ID NO: 2097569 - RNA, 19 nt, Artificial Sequence
  Description of Artificial Sequence: Synthetic oligonucleotide
  Antisense strand to SEQ ID NO: 2097568
uggaccagagcauauccua

SEQ ID NO: 2097570 - RNA, 19 nt, Artificial Sequence
  Description of Artificial Sequence: Synthetic oligonucleotide
  Sense strand starting at position 3056 of SEQ ID NO: 1882131
cguguaauuauguagggcu

SEQ ID NO: 2097571 - RNA, 19 nt, Artificial Sequence
  Description of Artificial Sequence: Synthetic oligonucleotide
  Antisense strand to SEQ ID NO: 2097570
agcccuacauaauuacacg

SEQ ID NO: 2097572 - RNA, 19 nt, Artificial Sequence
  Description of Artificial Sequence: Synthetic oligonucleotide
  Sense strand starting at position 3113 of SEQ ID NO: 1882131
uuaggugauagguaagcaa

SEQ ID NO: 2097573 - RNA, 19 nt, Artificial Sequence
  Description of Artificial Sequence: Synthetic oligonucleotide
  Antisense strand to SEQ ID NO: 2097572
uugcuuaccuaucaccuaa

SEQ ID NO: 2097574 - RNA, 19 nt, Artificial Sequence
  Description of Artificial Sequence: Synthetic oligonucleotide
  Sense strand starting at position 3134 of SEQ ID NO: 1882131
guuaguacuagagggcaua

SEQ ID NO: 2097575 - RNA, 19 nt, Artificial Sequence
  Description of Artificial Sequence: Synthetic oligonucleotide
  Antisense strand to SEQ ID NO: 2097574
uaugcccucuaguacuaac

SEQ ID NO: 2097576 - RNA, 19 nt, Artificial Sequence
  Description of Artificial Sequence: Synthetic oligonucleotide
  Sense strand starting at position 3197 of SEQ ID NO: 1882131
caguuuccauguuuagaag

SEQ ID NO: 2097577 - RNA, 19 nt, Artificial Sequence
  Description of Artificial Sequence: Synthetic oligonucleotide
  Antisense strand to SEQ ID NO: 2097576
cuucuaaacauggaaacug

SEQ ID NO: 2097578 - RNA, 19 nt, Artificial Sequence
  Description of Artificial Sequence: Synthetic oligonucleotide
  Sense strand starting at position 3238 of SEQ ID NO: 1882131
uuugcucaguggccauaaa

SEQ ID NO: 2097579 - RNA, 19 nt, Artificial Sequence
  Description of Artificial Sequence: Synthetic oligonucleotide
  Antisense strand to SEQ ID NO: 2097578
uuuauggccacugagcaaa

SEQ ID NO: 2097580 - RNA, 19 nt, Artificial Sequence
  Description of Artificial Sequence: Synthetic oligonucleotide
  Sense strand starting at position 3239 of SEQ ID NO: 1882131
uugcucaguggccauaaau

SEQ ID NO: 2097581 - RNA, 19 nt, Artificial Sequence
  Description of Artificial Sequence: Synthetic oligonucleotide
  Antisense strand to SEQ ID NO: 2097580
auuuauggccacugagcaa

SEQ ID NO: 2097582 - RNA, 19 nt, Artificial Sequence
  Description of Artificial Sequence: Synthetic oligonucleotide
  Sense strand starting at position 3295 of SEQ ID NO: 1882131
gacagccaucgucggaaau

SEQ ID NO: 2097583 - RNA, 19 nt, Artificial Sequence
  Description of Artificial Sequence: Synthetic oligonucleotide
  Antisense strand to SEQ ID NO: 2097582
auuuccgacgauggcuguc

SEQ ID NO: 2097584 - RNA, 19 nt, Artificial Sequence
  Description of Artificial Sequence: Synthetic oligonucleotide
  Sense strand starting at position 3296 of SEQ ID NO: 1882131
acagccaucgucggaaaua

SEQ ID NO: 2097585 - RNA, 19 nt, Artificial Sequence
  Description of Artificial Sequence: Synthetic oligonucleotide
  Antisense strand to SEQ ID NO: 2097584
uauuuccgacgauggcugu

SEQ ID NO: 2097586 - RNA, 19 nt, Artificial Sequence
  Description of Artificial Sequence: Synthetic oligonucleotide
  Sense strand starting at position 3331 of SEQ ID NO: 1882131
uaugaaguacagugauguu

SEQ ID NO: 2097587 - RNA, 19 nt, Artificial Sequence
  Description of Artificial Sequence: Synthetic oligonucleotide
  Antisense strand to SEQ ID NO: 2097586
aacaucacuguacuucaua

SEQ ID NO: 2097588 - RNA, 19 nt, Artificial Sequence
  Description of Artificial Sequence: Synthetic oligonucleotide
  Sense strand starting at position 3406 of SEQ ID NO: 1882131
ggaagugguuaaguaaacu

SEQ ID NO: 2097589 - RNA, 19 nt, Artificial Sequence
  Description of Artificial Sequence: Synthetic oligonucleotide
  Antisense strand to SEQ ID NO: 2097588
aguuuacuuaaccacuucc

SEQ ID NO: 2097590 - RNA, 19 nt, Artificial Sequence
  Description of Artificial Sequence: Synthetic oligonucleotide
  Sense strand starting at position 3439 of SEQ ID NO: 1882131
gaaagagauugugcaguua

SEQ ID NO: 2097591 - RNA, 19 nt, Artificial Sequence
  Description of Artificial Sequence: Synthetic oligonucleotide
  Antisense strand to SEQ ID NO: 2097590
uaacugcacaaucucuuuc

SEQ ID NO: 2097592 - RNA, 19 nt, Artificial Sequence
  Description of Artificial Sequence: Synthetic oligonucleotide
  Sense strand starting at position 3451 of SEQ ID NO: 1882131
gcaguuagcauuugaggua

SEQ ID NO: 2097593 - RNA, 19 nt, Artificial Sequence
  Description of Artificial Sequence: Synthetic oligonucleotide
  Antisense strand to SEQ ID NO: 2097592
uaccucaaaugcuaacugc

SEQ ID NO: 2097594 - RNA, 19 nt, Artificial Sequence
  Description of Artificial Sequence: Synthetic oligonucleotide
  Sense strand starting at position 3603 of SEQ ID NO: 1882131
ggauacgaugucuguacau

SEQ ID NO: 2097595 - RNA, 19 nt, Artificial Sequence
  Description of Artificial Sequence: Synthetic oligonucleotide
  Antisense strand to SEQ ID NO: 2097594
auguacagacaucguaucc

SEQ ID NO: 2097596 - RNA, 19 nt, Artificial Sequence
  Description of Artificial Sequence: Synthetic oligonucleotide
  Sense strand starting at position 3605 of SEQ ID NO: 1882131
auacgaugucuguacaucu

SEQ ID NO: 2097597 - RNA, 19 nt, Artificial Sequence
  Description of Artificial Sequence: Synthetic oligonucleotide
  Antisense strand to SEQ ID NO: 2097596
agauguacagacaucguau

SEQ ID NO: 2097598 - RNA, 19 nt, Artificial Sequence
  Description of Artificial Sequence: Synthetic oligonucleotide
  Sense strand starting at position 3613 of SEQ ID NO: 1882131
ucuguacaucuauguuuaa

SEQ ID NO: 2097599 - RNA, 19 nt, Artificial Sequence
  Description of Artificial Sequence: Synthetic oligonucleotide
  Antisense strand to SEQ ID NO: 2097598
uuaaacauagauguacaga

SEQ ID NO: 2097600 - RNA, 19 nt, Artificial Sequence
  Description of Artificial Sequence: Synthetic oligonucleotide
  Sense strand starting at position 3614 of SEQ ID NO: 1882131
cuguacaucuauguuuaaa

SEQ ID NO: 2097601 - RNA, 19 nt, Artificial Sequence
  Description of Artificial Sequence: Synthetic oligonucleotide
  Antisense strand to SEQ ID NO: 2097600
uuuaaacauagauguacag

SEQ ID NO: 2097602 - RNA, 19 nt, Artificial Sequence
  Description of Artificial Sequence: Synthetic oligonucleotide
  Sense strand starting at position 3696 of SEQ ID NO: 1882131
gcaggaauauggcugauau

SEQ ID NO: 2097603 - RNA, 19 nt, Artificial Sequence
  Description of Artificial Sequence: Synthetic oligonucleotide
  Antisense strand to SEQ ID NO: 2097602
auaucagccauauuccugc

SEQ ID NO: 2097604 - RNA, 19 nt, Artificial Sequence
  Description of Artificial Sequence: Synthetic oligonucleotide
  Sense strand starting at position 3697 of SEQ ID NO: 1882131
caggaauauggcugauauu

SEQ ID NO: 2097605 - RNA, 19 nt, Artificial Sequence
  Description of Artificial Sequence: Synthetic oligonucleotide
  Antisense strand to SEQ ID NO: 2097604
aauaucagccauauuccug

SEQ ID NO: 2097606 - RNA, 19 nt, Artificial Sequence
  Description of Artificial Sequence: Synthetic oligonucleotide
  Sense strand starting at position 3819 of SEQ ID NO: 1882131
auaggagucuucccucaga

SEQ ID NO: 2097607 - RNA, 19 nt, Artificial Sequence
  Description of Artificial Sequence: Synthetic oligonucleotide
  Antisense strand to SEQ ID NO: 2097606
ucugagggaagacuccuau

SEQ ID NO: 2097608 - RNA, 19 nt, Artificial Sequence
  Description of Artificial Sequence: Synthetic oligonucleotide
  Sense strand starting at position 3822 of SEQ ID NO: 1882131
ggagucuucccucagaguu

SEQ ID NO: 2097609 - RNA, 19 nt, Artificial Sequence
  Description of Artificial Sequence: Synthetic oligonucleotide
  Antisense strand to SEQ ID NO: 2097608
aacucugagggaagacucc

SEQ ID NO: 2097610 - RNA, 19 nt, Artificial Sequence
  Description of Artificial Sequence: Synthetic oligonucleotide
  Sense strand starting at position 3858 of SEQ ID NO: 1882131
aguaaauuguuguugaacu

SEQ ID NO: 2097611 - RNA, 19 nt, Artificial Sequence
  Description of Artificial Sequence: Synthetic oligonucleotide
  Antisense strand to SEQ ID NO: 2097610
aguucaacaacaauuuacu

SEQ ID NO: 2097612 - RNA, 19 nt, Artificial Sequence
  Description of Artificial Sequence: Synthetic oligonucleotide
  Sense strand starting at position 3868 of SEQ ID NO: 1882131
uguugaacucauuauguau

SEQ ID NO: 2097613 - RNA, 19 nt, Artificial Sequence
  Description of Artificial Sequence: Synthetic oligonucleotide
  Antisense strand to SEQ ID NO: 2097612
auacauaaugaguucaaca

SEQ ID NO: 2097614 - RNA, 19 nt, Artificial Sequence
  Description of Artificial Sequence: Synthetic oligonucleotide
  Sense strand starting at position 3889 of SEQ ID NO: 1882131
caaguauaggguuggcuau

SEQ ID NO: 2097615 - RNA, 19 nt, Artificial Sequence
  Description of Artificial Sequence: Synthetic oligonucleotide
  Antisense strand to SEQ ID NO: 2097614
auagccaacccuauacuug

SEQ ID NO: 2097616 - RNA, 19 nt, Artificial Sequence
  Description of Artificial Sequence: Synthetic oligonucleotide
  Sense strand starting at position 3890 of SEQ ID NO: 1882131
aaguauaggguuggcuaua

SEQ ID NO: 2097617 - RNA, 19 nt, Artificial Sequence
  Description of Artificial Sequence: Synthetic oligonucleotide
  Antisense strand to SEQ ID NO: 2097616
uauagccaacccuauacuu

SEQ ID NO: 2097618 - RNA, 19 nt, Artificial Sequence
  Description of Artificial Sequence: Synthetic oligonucleotide
  Sense strand starting at position 16 of SEQ ID NO: 1882132
gaagaaguuguguaccgca

SEQ ID NO: 2097619 - RNA, 19 nt, Artificial Sequence
  Description of Artificial Sequence: Synthetic oligonucleotide
  Antisense strand to SEQ ID NO: 2097618
ugcgguacacaacuucuuc

SEQ ID NO: 2097620 - RNA, 19 nt, Artificial Sequence
  Description of Artificial Sequence: Synthetic oligonucleotide
  Sense strand starting at position 29 of SEQ ID NO: 1882132
accgcaauagccuagcauu

SEQ ID NO: 2097621 - RNA, 19 nt, Artificial Sequence
  Description of Artificial Sequence: Synthetic oligonucleotide
  Antisense strand to SEQ ID NO: 2097620
aaugcuaggcuauugcggu

SEQ ID NO: 2097622 - RNA, 19 nt, Artificial Sequence
  Description of Artificial Sequence: Synthetic oligonucleotide
  Sense strand starting at position 236 of SEQ ID NO: 1882132
acccuauacuugguauaca

SEQ ID NO: 2097623 - RNA, 19 nt, Artificial Sequence
  Description of Artificial Sequence: Synthetic oligonucleotide
  Antisense strand to SEQ ID NO: 2097622
uguauaccaaguauagggu

SEQ ID NO: 2097624 - RNA, 19 nt, Artificial Sequence
  Description of Artificial Sequence: Synthetic oligonucleotide
  Sense strand starting at position 237 of SEQ ID NO: 1882132
cccuauacuugguauacau

SEQ ID NO: 2097625 - RNA, 19 nt, Artificial Sequence
  Description of Artificial Sequence: Synthetic oligonucleotide
  Antisense strand to SEQ ID NO: 2097624
auguauaccaaguauaggg

SEQ ID NO: 2097626 - RNA, 19 nt, Artificial Sequence
  Description of Artificial Sequence: Synthetic oligonucleotide
  Sense strand starting at position 292 of SEQ ID NO: 1882132
uaugaacucugagggaaga

SEQ ID NO: 2097627 - RNA, 19 nt, Artificial Sequence
  Description of Artificial Sequence: Synthetic oligonucleotide
  Antisense strand to SEQ ID NO: 2097626
ucuucccucagaguucaua

SEQ ID NO: 2097628 - RNA, 19 nt, Artificial Sequence
  Description of Artificial Sequence: Synthetic oligonucleotide
  Sense strand starting at position 303 of SEQ ID NO: 1882132
agggaagacuccuauuaau

SEQ ID NO: 2097629 - RNA, 19 nt, Artificial Sequence
  Description of Artificial Sequence: Synthetic oligonucleotide
  Antisense strand to SEQ ID NO: 2097628
auuaauaggagucuucccu

SEQ ID NO: 2097630 - RNA, 19 nt, Artificial Sequence
  Description of Artificial Sequence: Synthetic oligonucleotide
  Sense strand starting at position 459 of SEQ ID NO: 1882132
guuaguacuuuggugcauu

SEQ ID NO: 2097631 - RNA, 19 nt, Artificial Sequence
  Description of Artificial Sequence: Synthetic oligonucleotide
  Antisense strand to SEQ ID NO: 2097630
aaugcaccaaaguacuaac

SEQ ID NO: 2097632 - RNA, 19 nt, Artificial Sequence
  Description of Artificial Sequence: Synthetic oligonucleotide
  Sense strand starting at position 526 of SEQ ID NO: 1882132
ucguauccuccaugcaauu

SEQ ID NO: 2097633 - RNA, 19 nt, Artificial Sequence
  Description of Artificial Sequence: Synthetic oligonucleotide
  Antisense strand to SEQ ID NO: 2097632
aauugcauggaggauacga

SEQ ID NO: 2097634 - RNA, 19 nt, Artificial Sequence
  Description of Artificial Sequence: Synthetic oligonucleotide
  Sense strand starting at position 623 of SEQ ID NO: 1882132
ggugaauuauucucuauag

SEQ ID NO: 2097635 - RNA, 19 nt, Artificial Sequence
  Description of Artificial Sequence: Synthetic oligonucleotide
  Antisense strand to SEQ ID NO: 2097634
cuauagagaauaauucacc

SEQ ID NO: 2097636 - RNA, 19 nt, Artificial Sequence
  Description of Artificial Sequence: Synthetic oligonucleotide
  Sense strand starting at position 624 of SEQ ID NO: 1882132
gugaauuauucucuauaga

SEQ ID NO: 2097637 - RNA, 19 nt, Artificial Sequence
  Description of Artificial Sequence: Synthetic oligonucleotide
  Antisense strand to SEQ ID NO: 2097636
ucuauagagaauaauucac

SEQ ID NO: 2097638 - RNA, 19 nt, Artificial Sequence
  Description of Artificial Sequence: Synthetic oligonucleotide
  Sense strand starting at position 801 of SEQ ID NO: 1882132
ucauauuaucucugauagg

SEQ ID NO: 2097639 - RNA, 19 nt, Artificial Sequence
  Description of Artificial Sequence: Synthetic oligonucleotide
  Antisense strand to SEQ ID NO: 2097638
ccuaucagagauaauauga

SEQ ID NO: 2097640 - RNA, 19 nt, Artificial Sequence
  Description of Artificial Sequence: Synthetic oligonucleotide
  Sense strand starting at position 835 of SEQ ID NO: 1882132
ggcugucccacgugugaaa

SEQ ID NO: 2097641 - RNA, 19 nt, Artificial Sequence
  Description of Artificial Sequence: Synthetic oligonucleotide
  Antisense strand to SEQ ID NO: 2097640
uuucacacgugggacagcc

SEQ ID NO: 2097642 - RNA, 19 nt, Artificial Sequence
  Description of Artificial Sequence: Synthetic oligonucleotide
  Sense strand starting at position 837 of SEQ ID NO: 1882132
cugucccacgugugaaauu

SEQ ID NO: 2097643 - RNA, 19 nt, Artificial Sequence
  Description of Artificial Sequence: Synthetic oligonucleotide
  Antisense strand to SEQ ID NO: 2097642
aauuucacacgugggacag

SEQ ID NO: 2097644 - RNA, 19 nt, Artificial Sequence
  Description of Artificial Sequence: Synthetic oligonucleotide
  Sense strand starting at position 920 of SEQ ID NO: 1882132
gcuucuaaacauggaaacu

SEQ ID NO: 2097645 - RNA, 19 nt, Artificial Sequence
  Description of Artificial Sequence: Synthetic oligonucleotide
  Antisense strand to SEQ ID NO: 2097644
aguuuccauguuuagaagc

SEQ ID NO: 2097646 - RNA, 19 nt, Artificial Sequence
  Description of Artificial Sequence: Synthetic oligonucleotide
  Sense strand starting at position 929 of SEQ ID NO: 1882132
cauggaaacugguagcuuu

SEQ ID NO: 2097647 - RNA, 19 nt, Artificial Sequence
  Description of Artificial Sequence: Synthetic oligonucleotide
  Antisense strand to SEQ ID NO: 2097646
aaagcuaccaguuuccaug

SEQ ID NO: 2097648 - RNA, 19 nt, Artificial Sequence
  Description of Artificial Sequence: Synthetic oligonucleotide
  Sense strand starting at position 981 of SEQ ID NO: 1882132
uucuaugcccucuaguacu

SEQ ID NO: 2097649 - RNA, 19 nt, Artificial Sequence
  Description of Artificial Sequence: Synthetic oligonucleotide
  Antisense strand to SEQ ID NO: 2097648
aguacuagagggcauagaa

SEQ ID NO: 2097650 - RNA, 19 nt, Artificial Sequence
  Description of Artificial Sequence: Synthetic oligonucleotide
  Sense strand starting at position 1335 of SEQ ID NO: 1882132
caucuagauuccgagauug

SEQ ID NO: 2097651 - RNA, 19 nt, Artificial Sequence
  Description of Artificial Sequence: Synthetic oligonucleotide
  Antisense strand to SEQ ID NO: 2097650
caaucucggaaucuagaug

SEQ ID NO: 2097652 - RNA, 19 nt, Artificial Sequence
  Description of Artificial Sequence: Synthetic oligonucleotide
  Sense strand starting at position 1580 of SEQ ID NO: 1882132
uugcgacugccuugcaaga

SEQ ID NO: 2097653 - RNA, 19 nt, Artificial Sequence
  Description of Artificial Sequence: Synthetic oligonucleotide
  Antisense strand to SEQ ID NO: 2097652
ucuugcaaggcagucgcaa

SEQ ID NO: 2097654 - RNA, 19 nt, Artificial Sequence
  Description of Artificial Sequence: Synthetic oligonucleotide
  Sense strand starting at position 1621 of SEQ ID NO: 1882132
ugucuuuccacguaucugu

SEQ ID NO: 2097655 - RNA, 19 nt, Artificial Sequence
  Description of Artificial Sequence: Synthetic oligonucleotide
  Antisense strand to SEQ ID NO: 2097654
acagauacguggaaagaca

SEQ ID NO: 2097656 - RNA, 19 nt, Artificial Sequence
  Description of Artificial Sequence: Synthetic oligonucleotide
  Sense strand starting at position 1655 of SEQ ID NO: 1882132
ugucuuucccgccaugacu

SEQ ID NO: 2097657 - RNA, 19 nt, Artificial Sequence
  Description of Artificial Sequence: Synthetic oligonucleotide
  Antisense strand to SEQ ID NO: 2097656
agucauggcgggaaagaca

SEQ ID NO: 2097658 - RNA, 19 nt, Artificial Sequence
  Description of Artificial Sequence: Synthetic oligonucleotide
  Sense strand starting at position 1857 of SEQ ID NO: 1882132
ccgaauguguuccucuguu

SEQ ID NO: 2097659 - RNA, 19 nt, Artificial Sequence
  Description of Artificial Sequence: Synthetic oligonucleotide
  Antisense strand to SEQ ID NO: 2097658
aacagaggaacacauucgg

SEQ ID NO: 2097660 - RNA, 19 nt, Artificial Sequence
  Description of Artificial Sequence: Synthetic oligonucleotide
  Sense strand starting at position 3109 of SEQ ID NO: 1882132
ugaguuggacuccgcauuu

SEQ ID NO: 2097661 - RNA, 19 nt, Artificial Sequence
  Description of Artificial Sequence: Synthetic oligonucleotide
  Antisense strand to SEQ ID NO: 2097660
aaaugcggaguccaacuca

SEQ ID NO: 2097662 - RNA, 19 nt, Artificial Sequence
  Description of Artificial Sequence: Synthetic oligonucleotide
  Sense strand starting at position 3144 of SEQ ID NO: 1882132
gcugacaugcucugacugu

SEQ ID NO: 2097663 - RNA, 19 nt, Artificial Sequence
  Description of Artificial Sequence: Synthetic oligonucleotide
  Antisense strand to SEQ ID NO: 2097662
acagucagagcaugucagc

SEQ ID NO: 2097664 - RNA, 19 nt, Artificial Sequence
  Description of Artificial Sequence: Synthetic oligonucleotide
  Sense strand starting at position 3148 of SEQ ID NO: 1882132
acaugcucugacugugauu

SEQ ID NO: 2097665 - RNA, 19 nt, Artificial Sequence
  Description of Artificial Sequence: Synthetic oligonucleotide
  Antisense strand to SEQ ID NO: 2097664
aaucacagucagagcaugu

SEQ ID NO: 2097666 - RNA, 19 nt, Artificial Sequence
  Description of Artificial Sequence: Synthetic oligonucleotide
  Sense strand starting at position 3159 of SEQ ID NO: 1882132
cugugauucuacccagauc

SEQ ID NO: 2097667 - RNA, 19 nt, Artificial Sequence
  Description of Artificial Sequence: Synthetic oligonucleotide
  Antisense strand to SEQ ID NO: 2097666
gaucuggguagaaucacag

SEQ ID NO: 2097668 - RNA, 19 nt, Artificial Sequence
  Description of Artificial Sequence: Synthetic oligonucleotide
  Sense strand starting at position 3204 of SEQ ID NO: 1882132
gacuccugcugccuggaaa

SEQ ID NO: 2097669 - RNA, 19 nt, Artificial Sequence
  Description of Artificial Sequence: Synthetic oligonucleotide
  Antisense strand to SEQ ID NO: 2097668
uuuccaggcagcaggaguc

SEQ ID NO: 2097670 - RNA, 19 nt, Artificial Sequence
  Description of Artificial Sequence: Synthetic oligonucleotide
  Sense strand starting at position 3207 of SEQ ID NO: 1882132
uccugcugccuggaaagau

SEQ ID NO: 2097671 - RNA, 19 nt, Artificial Sequence
  Description of Artificial Sequence: Synthetic oligonucleotide
  Antisense strand to SEQ ID NO: 2097670
aucuuuccaggcagcagga

SEQ ID NO: 2097672 - RNA, 19 nt, Artificial Sequence
  Description of Artificial Sequence: Synthetic oligonucleotide
  Sense strand starting at position 3253 of SEQ ID NO: 1882132
ugguuuagacuuuagagca

SEQ ID NO: 2097673 - RNA, 19 nt, Artificial Sequence
  Description of Artificial Sequence: Synthetic oligonucleotide
  Antisense strand to SEQ ID NO: 2097672
ugcucuaaagucuaaacca

SEQ ID NO: 2097674 - RNA, 19 nt, Artificial Sequence
  Description of Artificial Sequence: Synthetic oligonucleotide
  Sense strand starting at position 3289 of SEQ ID NO: 1882132
uuuguuggcccuugaagga

SEQ ID NO: 2097675 - RNA, 19 nt, Artificial Sequence
  Description of Artificial Sequence: Synthetic oligonucleotide
  Antisense strand to SEQ ID NO: 2097674
uccuucaagggccaacaaa

SEQ ID NO: 2097676 - RNA, 19 nt, Artificial Sequence
  Description of Artificial Sequence: Synthetic oligonucleotide
  Sense strand starting at position 3525 of SEQ ID NO: 1882132
ggucuugagaaauggcucu

SEQ ID NO: 2097677 - RNA, 19 nt, Artificial Sequence
  Description of Artificial Sequence: Synthetic oligonucleotide
  Antisense strand to SEQ ID NO: 2097676
agagccauuucucaagacc

SEQ ID NO: 2097678 - RNA, 19 nt, Artificial Sequence
  Description of Artificial Sequence: Synthetic oligonucleotide
  Sense strand starting at position 3541 of SEQ ID NO: 1882132
ucuugcagucgaugugacu

SEQ ID NO: 2097679 - RNA, 19 nt, Artificial Sequence
  Description of Artificial Sequence: Synthetic oligonucleotide
  Antisense strand to SEQ ID NO: 2097678
agucacaucgacugcaaga

SEQ ID NO: 2097680 - RNA, 19 nt, Artificial Sequence
  Description of Artificial Sequence: Synthetic oligonucleotide
  Sense strand starting at position 3648 of SEQ ID NO: 1882132
ugcucuuuguggcuuauua

SEQ ID NO: 2097681 - RNA, 19 nt, Artificial Sequence
  Description of Artificial Sequence: Synthetic oligonucleotide
  Antisense strand to SEQ ID NO: 2097680
uaauaagccacaaagagca

SEQ ID NO: 2097682 - RNA, 19 nt, Artificial Sequence
  Description of Artificial Sequence: Synthetic oligonucleotide
  Sense strand starting at position 3650 of SEQ ID NO: 1882132
cucuuuguggcuuauuaua

SEQ ID NO: 2097683 - RNA, 19 nt, Artificial Sequence
  Description of Artificial Sequence: Synthetic oligonucleotide
  Antisense strand to SEQ ID NO: 2097682
uauaauaagccacaaagag

SEQ ID NO: 2097684 - RNA, 19 nt, Artificial Sequence
  Description of Artificial Sequence: Synthetic oligonucleotide
  Sense strand starting at position 3655 of SEQ ID NO: 1882132
uguggcuuauuauaggaaa

SEQ ID NO: 2097685 - RNA, 19 nt, Artificial Sequence
  Description of Artificial Sequence: Synthetic oligonucleotide
  Antisense strand to SEQ ID NO: 2097684
uuuccuauaauaagccaca

SEQ ID NO: 2097686 - RNA, 19 nt, Artificial Sequence
  Description of Artificial Sequence: Synthetic oligonucleotide
  Sense strand starting at position 3658 of SEQ ID NO: 1882132
ggcuuauuauaggaaacuc

SEQ ID NO: 2097687 - RNA, 19 nt, Artificial Sequence
  Description of Artificial Sequence: Synthetic oligonucleotide
  Antisense strand to SEQ ID NO: 2097686
gaguuuccuauaauaagcc

SEQ ID NO: 2097688 - RNA, 19 nt, Artificial Sequence
  Description of Artificial Sequence: Synthetic oligonucleotide
  Sense strand starting at position 3765 of SEQ ID NO: 1882132
ugcuacaagccuuaaguga

SEQ ID NO: 2097689 - RNA, 19 nt, Artificial Sequence
  Description of Artificial Sequence: Synthetic oligonucleotide
  Antisense strand to SEQ ID NO: 2097688
ucacuuaaggcuuguagca

SEQ ID NO: 2097690 - RNA, 19 nt, Artificial Sequence
  Description of Artificial Sequence: Synthetic oligonucleotide
  Sense strand starting at position 3849 of SEQ ID NO: 1882132
gagcuuaggugguuaacau

SEQ ID NO: 2097691 - RNA, 19 nt, Artificial Sequence
  Description of Artificial Sequence: Synthetic oligonucleotide
  Antisense strand to SEQ ID NO: 2097690
auguuaaccaccuaagcuc

SEQ ID NO: 2097692 - RNA, 19 nt, Artificial Sequence
  Description of Artificial Sequence: Synthetic oligonucleotide
  Sense strand starting at position 3910 of SEQ ID NO: 1882132
aucagagacugcuuguuaa

SEQ ID NO: 2097693 - RNA, 19 nt, Artificial Sequence
  Description of Artificial Sequence: Synthetic oligonucleotide
  Antisense strand to SEQ ID NO: 2097692
uuaacaagcagucucugau

SEQ ID NO: 2097694 - RNA, 19 nt, Artificial Sequence
  Description of Artificial Sequence: Synthetic oligonucleotide
  Sense strand starting at position 3913 of SEQ ID NO: 1882132
agagacugcuuguuaaacu

SEQ ID NO: 2097695 - RNA, 19 nt, Artificial Sequence
  Description of Artificial Sequence: Synthetic oligonucleotide
  Antisense strand to SEQ ID NO: 2097694
aguuuaacaagcagucucu

SEQ ID NO: 2097696 - RNA, 19 nt, Artificial Sequence
  Description of Artificial Sequence: Synthetic oligonucleotide
  Sense strand starting at position 3914 of SEQ ID NO: 1882132
gagacugcuuguuaaacug

SEQ ID NO: 2097697 - RNA, 19 nt, Artificial Sequence
  Description of Artificial Sequence: Synthetic oligonucleotide
  Antisense strand to SEQ ID NO: 2097696
caguuuaacaagcagucuc

SEQ ID NO: 2097698 - RNA, 19 nt, Artificial Sequence
  Description of Artificial Sequence: Synthetic oligonucleotide
  Sense strand starting at position 6 of SEQ ID NO: 1882133
aacaacuccuggguuuaga

SEQ ID NO: 2097699 - RNA, 19 nt, Artificial Sequence
  Description of Artificial Sequence: Synthetic oligonucleotide
  Antisense strand to SEQ ID NO: 2097698
ucuaaacccaggaguuguu

SEQ ID NO: 2097700 - RNA, 19 nt, Artificial Sequence
  Description of Artificial Sequence: Synthetic oligonucleotide
  Sense strand starting at position 63 of SEQ ID NO: 1882133
gugucauggcaauaucaga

SEQ ID NO: 2097701 - RNA, 19 nt, Artificial Sequence
  Description of Artificial Sequence: Synthetic oligonucleotide
  Antisense strand to SEQ ID NO: 2097700
ucugauauugccaugacac

SEQ ID NO: 2097702 - RNA, 19 nt, Artificial Sequence
  Description of Artificial Sequence: Synthetic oligonucleotide
  Sense strand starting at position 93 of SEQ ID NO: 1882133
gacagucugggcuaagaug

SEQ ID NO: 2097703 - RNA, 19 nt, Artificial Sequence
  Description of Artificial Sequence: Synthetic oligonucleotide
  Antisense strand to SEQ ID NO: 2097702
caucuuagcccagacuguc

SEQ ID NO: 2097704 - RNA, 19 nt, Artificial Sequence
  Description of Artificial Sequence: Synthetic oligonucleotide
  Sense strand starting at position 199 of SEQ ID NO: 1882133
ucgucagaugcugaauaaa

SEQ ID NO: 2097705 - RNA, 19 nt, Artificial Sequence
  Description of Artificial Sequence: Synthetic oligonucleotide
  Antisense strand to SEQ ID NO: 2097704
uuuauucagcaucugacga

SEQ ID NO: 2097706 - RNA, 19 nt, Artificial Sequence
  Description of Artificial Sequence: Synthetic oligonucleotide
  Sense strand starting at position 214 of SEQ ID NO: 1882133
uaaacagcgucagugaauu

SEQ ID NO: 2097707 - RNA, 19 nt, Artificial Sequence
  Description of Artificial Sequence: Synthetic oligonucleotide
  Antisense strand to SEQ ID NO: 2097706
aauucacugacgcuguuua

SEQ ID NO: 2097708 - RNA, 19 nt, Artificial Sequence
  Description of Artificial Sequence: Synthetic oligonucleotide
  Sense strand starting at position 220 of SEQ ID NO: 1882133
gcgucagugaauuaucuga

SEQ ID NO: 2097709 - RNA, 19 nt, Artificial Sequence
  Description of Artificial Sequence: Synthetic oligonucleotide
  Antisense strand to SEQ ID NO: 2097708
ucagauaauucacugacgc

SEQ ID NO: 2097710 - RNA, 19 nt, Artificial Sequence
  Description of Artificial Sequence: Synthetic oligonucleotide
  Sense strand starting at position 222 of SEQ ID NO: 1882133
gucagugaauuaucugaau

SEQ ID NO: 2097711 - RNA, 19 nt, Artificial Sequence
  Description of Artificial Sequence: Synthetic oligonucleotide
  Antisense strand to SEQ ID NO: 2097710
auucagauaauucacugac

SEQ ID NO: 2097712 - RNA, 19 nt, Artificial Sequence
  Description of Artificial Sequence: Synthetic oligonucleotide
  Sense strand starting at position 310 of SEQ ID NO: 1882133
uaugaacggucucuuuaga

SEQ ID NO: 2097713 - RNA, 19 nt, Artificial Sequence
  Description of Artificial Sequence: Synthetic oligonucleotide
  Antisense strand to SEQ ID NO: 2097712
ucuaaagagaccguucaua

SEQ ID NO: 2097714 - RNA, 19 nt, Artificial Sequence
  Description of Artificial Sequence: Synthetic oligonucleotide
  Sense strand starting at position 494 of SEQ ID NO: 1882133
aacagugacugagucuaau

SEQ ID NO: 2097715 - RNA, 19 nt, Artificial Sequence
  Description of Artificial Sequence: Synthetic oligonucleotide
  Antisense strand to SEQ ID NO: 2097714
auuagacucagucacuguu

SEQ ID NO: 2097716 - RNA, 19 nt, Artificial Sequence
  Description of Artificial Sequence: Synthetic oligonucleotide
  Sense strand starting at position 497 of SEQ ID NO: 1882133
agugacugagucuaauucu

SEQ ID NO: 2097717 - RNA, 19 nt, Artificial Sequence
  Description of Artificial Sequence: Synthetic oligonucleotide
  Antisense strand to SEQ ID NO: 2097716
agaauuagacucagucacu

SEQ ID NO: 2097718 - RNA, 19 nt, Artificial Sequence
  Description of Artificial Sequence: Synthetic oligonucleotide
  Sense strand starting at position 530 of SEQ ID NO: 1882133
ugagucgaguugucaauaa

SEQ ID NO: 2097719 - RNA, 19 nt, Artificial Sequence
  Description of Artificial Sequence: Synthetic oligonucleotide
  Antisense strand to SEQ ID NO: 2097718
uuauugacaacucgacuca

SEQ ID NO: 2097720 - RNA, 19 nt, Artificial Sequence
  Description of Artificial Sequence: Synthetic oligonucleotide
  Sense strand starting at position 534 of SEQ ID NO: 1882133
ucgaguugucaauaauaau

SEQ ID NO: 2097721 - RNA, 19 nt, Artificial Sequence
  Description of Artificial Sequence: Synthetic oligonucleotide
  Antisense strand to SEQ ID NO: 2097720
auuauuauugacaacucga

SEQ ID NO: 2097722 - RNA, 19 nt, Artificial Sequence
  Description of Artificial Sequence: Synthetic oligonucleotide
  Sense strand starting at position 596 of SEQ ID NO: 1882133
auuuaauaaucagagcaga

SEQ ID NO: 2097723 - RNA, 19 nt, Artificial Sequence
  Description of Artificial Sequence: Synthetic oligonucleotide
  Antisense strand to SEQ ID NO: 2097722
ucugcucugauuauuaaau

SEQ ID NO: 2097724 - RNA, 19 nt, Artificial Sequence
  Description of Artificial Sequence: Synthetic oligonucleotide
  Sense strand starting at position 627 of SEQ ID NO: 1882133
cuuccaggauucuuaauga

SEQ ID NO: 2097725 - RNA, 19 nt, Artificial Sequence
  Description of Artificial Sequence: Synthetic oligonucleotide
  Antisense strand to SEQ ID NO: 2097724
ucauuaagaauccuggaag

SEQ ID NO: 2097726 - RNA, 19 nt, Artificial Sequence
  Description of Artificial Sequence: Synthetic oligonucleotide
  Sense strand starting at position 687 of SEQ ID NO: 1882133
agaagugacacuuguguga

SEQ ID NO: 2097727 - RNA, 19 nt, Artificial Sequence
  Description of Artificial Sequence: Synthetic oligonucleotide
  Antisense strand to SEQ ID NO: 2097726
ucacacaagugucacuucu

SEQ ID NO: 2097728 - RNA, 19 nt, Artificial Sequence
  Description of Artificial Sequence: Synthetic oligonucleotide
  Sense strand starting at position 694 of SEQ ID NO: 1882133
acacuugugugaccacaaa

SEQ ID NO: 2097729 - RNA, 19 nt, Artificial Sequence
  Description of Artificial Sequence: Synthetic oligonucleotide
  Antisense strand to SEQ ID NO: 2097728
uuuguggucacacaagugu

SEQ ID NO: 2097730 - RNA, 19 nt, Artificial Sequence
  Description of Artificial Sequence: Synthetic oligonucleotide
  Sense strand starting at position 865 of SEQ ID NO: 1882133
gagaguuauuuagauguug

SEQ ID NO: 2097731 - RNA, 19 nt, Artificial Sequence
  Description of Artificial Sequence: Synthetic oligonucleotide
  Antisense strand to SEQ ID NO: 2097730
caacaucuaaauaacucuc

SEQ ID NO: 2097732 - RNA, 19 nt, Artificial Sequence
  Description of Artificial Sequence: Synthetic oligonucleotide
  Sense strand starting at position 893 of SEQ ID NO: 1882133
aaacgcagacgaugaauau

SEQ ID NO: 2097733 - RNA, 19 nt, Artificial Sequence
  Description of Artificial Sequence: Synthetic oligonucleotide
  Antisense strand to SEQ ID NO: 2097732
auauucaucgucugcguuu

SEQ ID NO: 2097734 - RNA, 19 nt, Artificial Sequence
  Description of Artificial Sequence: Synthetic oligonucleotide
  Sense strand starting at position 1002 of SEQ ID NO: 1882133
aggaaaugguauccucaca

SEQ ID NO: 2097735 - RNA, 19 nt, Artificial Sequence
  Description of Artificial Sequence: Synthetic oligonucleotide
  Antisense strand to SEQ ID NO: 2097734
ugugaggauaccauuuccu

SEQ ID NO: 2097736 - RNA, 19 nt, Artificial Sequence
  Description of Artificial Sequence: Synthetic oligonucleotide
  Sense strand starting at position 1215 of SEQ ID NO: 1882133
gugguauuugggugcaaca

SEQ ID NO: 2097737 - RNA, 19 nt, Artificial Sequence
  Description of Artificial Sequence: Synthetic oligonucleotide
  Antisense strand to SEQ ID NO: 2097736
uguugcacccaaauaccac

SEQ ID NO: 2097738 - RNA, 19 nt, Artificial Sequence
  Description of Artificial Sequence: Synthetic oligonucleotide
  Sense strand starting at position 2524 of SEQ ID NO: 1882133
ugcuaaaucacggagagca

SEQ ID NO: 2097739 - RNA, 19 nt, Artificial Sequence
  Description of Artificial Sequence: Synthetic oligonucleotide
  Antisense strand to SEQ ID NO: 2097738
ugcucuccgugauuuagca

SEQ ID NO: 2097740 - RNA, 19 nt, Artificial Sequence
  Description of Artificial Sequence: Synthetic oligonucleotide
  Sense strand starting at position 2695 of SEQ ID NO: 1882133
gaucaaggcccucgaguau

SEQ ID NO: 2097741 - RNA, 19 nt, Artificial Sequence
  Description of Artificial Sequence: Synthetic oligonucleotide
  Antisense strand to SEQ ID NO: 2097740
auacucgagggccuugauc

SEQ ID NO: 2097742 - RNA, 19 nt, Artificial Sequence
  Description of Artificial Sequence: Synthetic oligonucleotide
  Sense strand starting at position 2707 of SEQ ID NO: 1882133
cgaguauuaacuugagcau

SEQ ID NO: 2097743 - RNA, 19 nt, Artificial Sequence
  Description of Artificial Sequence: Synthetic oligonucleotide
  Antisense strand to SEQ ID NO: 2097742
augcucaaguuaauacucg

SEQ ID NO: 2097744 - RNA, 19 nt, Artificial Sequence
  Description of Artificial Sequence: Synthetic oligonucleotide
  Sense strand starting at position 2708 of SEQ ID NO: 1882133
gaguauuaacuugagcauu

SEQ ID NO: 2097745 - RNA, 19 nt, Artificial Sequence
  Description of Artificial Sequence: Synthetic oligonucleotide
  Antisense strand to SEQ ID NO: 2097744
aaugcucaaguuaauacuc

SEQ ID NO: 2097746 - RNA, 19 nt, Artificial Sequence
  Description of Artificial Sequence: Synthetic oligonucleotide
  Sense strand starting at position 3208 of SEQ ID NO: 1882133
gcuacagggagccagaauu

SEQ ID NO: 2097747 - RNA, 19 nt, Artificial Sequence
  Description of Artificial Sequence: Synthetic oligonucleotide
  Antisense strand to SEQ ID NO: 2097746
aauucuggcucccuguagc

SEQ ID NO: 2097748 - RNA, 19 nt, Artificial Sequence
  Description of Artificial Sequence: Synthetic oligonucleotide
  Sense strand starting at position 3289 of SEQ ID NO: 1882133
gggagcuugcucuaugcaa

SEQ ID NO: 2097749 - RNA, 19 nt, Artificial Sequence
  Description of Artificial Sequence: Synthetic oligonucleotide
  Antisense strand to SEQ ID NO: 2097748
uugcauagagcaagcuccc

SEQ ID NO: 2097750 - RNA, 19 nt, Artificial Sequence
  Description of Artificial Sequence: Synthetic oligonucleotide
  Sense strand starting at position 3378 of SEQ ID NO: 1882133
guuguaaucucccuuugac

SEQ ID NO: 2097751 - RNA, 19 nt, Artificial Sequence
  Description of Artificial Sequence: Synthetic oligonucleotide
  Antisense strand to SEQ ID NO: 2097750
gucaaagggagauuacaac

SEQ ID NO: 2097752 - RNA, 19 nt, Artificial Sequence
  Description of Artificial Sequence: Synthetic oligonucleotide
  Sense strand starting at position 3396 of SEQ ID NO: 1882133
cgggauucagguugggaua

SEQ ID NO: 2097753 - RNA, 19 nt, Artificial Sequence
  Description of Artificial Sequence: Synthetic oligonucleotide
  Antisense strand to SEQ ID NO: 2097752
uaucccaaccugaaucccg

SEQ ID NO: 2097754 - RNA, 19 nt, Artificial Sequence
  Description of Artificial Sequence: Synthetic oligonucleotide
  Sense strand starting at position 3431 of SEQ ID NO: 1882133
cuucuagguagucaacgaa

SEQ ID NO: 2097755 - RNA, 19 nt, Artificial Sequence
  Description of Artificial Sequence: Synthetic oligonucleotide
  Antisense strand to SEQ ID NO: 2097754
uucguugacuaccuagaag

SEQ ID NO: 2097756 - RNA, 19 nt, Artificial Sequence
  Description of Artificial Sequence: Synthetic oligonucleotide
  Sense strand starting at position 3434 of SEQ ID NO: 1882133
cuagguagucaacgaagau

SEQ ID NO: 2097757 - RNA, 19 nt, Artificial Sequence
  Description of Artificial Sequence: Synthetic oligonucleotide
  Antisense strand to SEQ ID NO: 2097756
aucuucguugacuaccuag

SEQ ID NO: 2097758 - RNA, 19 nt, Artificial Sequence
  Description of Artificial Sequence: Synthetic oligonucleotide
  Sense strand starting at position 3435 of SEQ ID NO: 1882133
uagguagucaacgaagaug

SEQ ID NO: 2097759 - RNA, 19 nt, Artificial Sequence
  Description of Artificial Sequence: Synthetic oligonucleotide
  Antisense strand to SEQ ID NO: 2097758
caucuucguugacuaccua

SEQ ID NO: 2097760 - RNA, 19 nt, Artificial Sequence
  Description of Artificial Sequence: Synthetic oligonucleotide
  Sense strand starting at position 3457 of SEQ ID NO: 1882133
acuaguaaaugacaacaga

SEQ ID NO: 2097761 - RNA, 19 nt, Artificial Sequence
  Description of Artificial Sequence: Synthetic oligonucleotide
  Antisense strand to SEQ ID NO: 2097760
ucuguugucauuuacuagu

SEQ ID NO: 2097762 - RNA, 19 nt, Artificial Sequence
  Description of Artificial Sequence: Synthetic oligonucleotide
  Sense strand starting at position 3487 of SEQ ID NO: 1882133
acagcagagcuguacgauu

SEQ ID NO: 2097763 - RNA, 19 nt, Artificial Sequence
  Description of Artificial Sequence: Synthetic oligonucleotide
  Antisense strand to SEQ ID NO: 2097762
aaucguacagcucugcugu

SEQ ID NO: 2097764 - RNA, 19 nt, Artificial Sequence
  Description of Artificial Sequence: Synthetic oligonucleotide
  Sense strand starting at position 3522 of SEQ ID NO: 1882133
gcaagcagucuguuguacu

SEQ ID NO: 2097765 - RNA, 19 nt, Artificial Sequence
  Description of Artificial Sequence: Synthetic oligonucleotide
  Antisense strand to SEQ ID NO: 2097764
aguacaacagacugcuugc

SEQ ID NO: 2097766 - RNA, 19 nt, Artificial Sequence
  Description of Artificial Sequence: Synthetic oligonucleotide
  Sense strand starting at position 3579 of SEQ ID NO: 1882133
uaacuuagugcucagugua

SEQ ID NO: 2097767 - RNA, 19 nt, Artificial Sequence
  Description of Artificial Sequence: Synthetic oligonucleotide
  Antisense strand to SEQ ID NO: 2097766
uacacugagcacuaaguua

SEQ ID NO: 2097768 - RNA, 19 nt, Artificial Sequence
  Description of Artificial Sequence: Synthetic oligonucleotide
  Sense strand starting at position 3654 of SEQ ID NO: 1882133
ugagucuguaaaggauuau

SEQ ID NO: 2097769 - RNA, 19 nt, Artificial Sequence
  Description of Artificial Sequence: Synthetic oligonucleotide
  Antisense strand to SEQ ID NO: 2097768
auaauccuuuacagacuca

SEQ ID NO: 2097770 - RNA, 19 nt, Artificial Sequence
  Description of Artificial Sequence: Synthetic oligonucleotide
  Sense strand starting at position 3704 of SEQ ID NO: 1882133
guguccugcauguauauuu

SEQ ID NO: 2097771 - RNA, 19 nt, Artificial Sequence
  Description of Artificial Sequence: Synthetic oligonucleotide
  Antisense strand to SEQ ID NO: 2097770
aaauauacaugcaggacac

SEQ ID NO: 2097772 - RNA, 19 nt, Artificial Sequence
  Description of Artificial Sequence: Synthetic oligonucleotide
  Sense strand starting at position 3731 of SEQ ID NO: 1882133
acaaauauugguugaacgu

SEQ ID NO: 2097773 - RNA, 19 nt, Artificial Sequence
  Description of Artificial Sequence: Synthetic oligonucleotide
  Antisense strand to SEQ ID NO: 2097772
acguucaaccaauauuugu

SEQ ID NO: 2097774 - RNA, 19 nt, Artificial Sequence
  Description of Artificial Sequence: Synthetic oligonucleotide
  Sense strand starting at position 3759 of SEQ ID NO: 1882133
caaggaggcucaguauguu

SEQ ID NO: 2097775 - RNA, 19 nt, Artificial Sequence
  Description of Artificial Sequence: Synthetic oligonucleotide
  Antisense strand to SEQ ID NO: 2097774
aacauacugagccuccuug

SEQ ID NO: 2097776 - RNA, 19 nt, Artificial Sequence
  Description of Artificial Sequence: Synthetic oligonucleotide
  Sense strand starting at position 3950 of SEQ ID NO: 1882133
cgcauugcaggauggaaau

SEQ ID NO: 2097777 - RNA, 19 nt, Artificial Sequence
  Description of Artificial Sequence: Synthetic oligonucleotide
  Antisense strand to SEQ ID NO: 2097776
auuuccauccugcaaugcg

SEQ ID NO: 2097778 - RNA, 19 nt, Artificial Sequence
  Description of Artificial Sequence: Synthetic oligonucleotide
  Sense strand starting at position 23 of SEQ ID NO: 1882134
gacccucauugucuuggaa

SEQ ID NO: 2097779 - RNA, 19 nt, Artificial Sequence
  Description of Artificial Sequence: Synthetic oligonucleotide
  Antisense strand to SEQ ID NO: 2097778
uuccaagacaaugaggguc

SEQ ID NO: 2097780 - RNA, 19 nt, Artificial Sequence
  Description of Artificial Sequence: Synthetic oligonucleotide
  Sense strand starting at position 26 of SEQ ID NO: 1882134
ccucauugucuuggaacau

SEQ ID NO: 2097781 - RNA, 19 nt, Artificial Sequence
  Description of Artificial Sequence: Synthetic oligonucleotide
  Antisense strand to SEQ ID NO: 2097780
auguuccaagacaaugagg

SEQ ID NO: 2097782 - RNA, 19 nt, Artificial Sequence
  Description of Artificial Sequence: Synthetic oligonucleotide
  Sense strand starting at position 30 of SEQ ID NO: 1882134
auugucuuggaacauagua

SEQ ID NO: 2097783 - RNA, 19 nt, Artificial Sequence
  Description of Artificial Sequence: Synthetic oligonucleotide
  Antisense strand to SEQ ID NO: 2097782
uacuauguuccaagacaau

SEQ ID NO: 2097784 - RNA, 19 nt, Artificial Sequence
  Description of Artificial Sequence: Synthetic oligonucleotide
  Sense strand starting at position 76 of SEQ ID NO: 1882134
uugagucauuuggaggaca

SEQ ID NO: 2097785 - RNA, 19 nt, Artificial Sequence
  Description of Artificial Sequence: Synthetic oligonucleotide
  Antisense strand to SEQ ID NO: 2097784
uguccuccaaaugacucaa

SEQ ID NO: 2097786 - RNA, 19 nt, Artificial Sequence
  Description of Artificial Sequence: Synthetic oligonucleotide
  Sense strand starting at position 168 of SEQ ID NO: 1882134
ggaggcaaagcguauaaga

SEQ ID NO: 2097787 - RNA, 19 nt, Artificial Sequence
  Description of Artificial Sequence: Synthetic oligonucleotide
  Antisense strand to SEQ ID NO: 2097786
ucuuauacgcuuugccucc

SEQ ID NO: 2097788 - RNA, 19 nt, Artificial Sequence
  Description of Artificial Sequence: Synthetic oligonucleotide
  Sense strand starting at position 228 of SEQ ID NO: 1882134
uuuguuaggcacuaaauau

SEQ ID NO: 2097789 - RNA, 19 nt, Artificial Sequence
  Description of Artificial Sequence: Synthetic oligonucleotide
  Antisense strand to SEQ ID NO: 2097788
auauuuagugccuaacaaa

SEQ ID NO: 2097790 - RNA, 19 nt, Artificial Sequence
  Description of Artificial Sequence: Synthetic oligonucleotide
  Sense strand starting at position 320 of SEQ ID NO: 1882134
gagaguagcacagguagua

SEQ ID NO: 2097791 - RNA, 19 nt, Artificial Sequence
  Description of Artificial Sequence: Synthetic oligonucleotide
  Antisense strand to SEQ ID NO: 2097790
uacuaccugugcuacucuc

SEQ ID NO: 2097792 - RNA, 19 nt, Artificial Sequence
  Description of Artificial Sequence: Synthetic oligonucleotide
  Sense strand starting at position 483 of SEQ ID NO: 1882134
ccuugucuguugucauuua

SEQ ID NO: 2097793 - RNA, 19 nt, Artificial Sequence
  Description of Artificial Sequence: Synthetic oligonucleotide
  Antisense strand to SEQ ID NO: 2097792
uaaaugacaacagacaagg

SEQ ID NO: 2097794 - RNA, 19 nt, Artificial Sequence
  Description of Artificial Sequence: Synthetic oligonucleotide
  Sense strand starting at position 646 of SEQ ID NO: 1882134
cugggugacuuugcauaga

SEQ ID NO: 2097795 - RNA, 19 nt, Artificial Sequence
  Description of Artificial Sequence: Synthetic oligonucleotide
  Antisense strand to SEQ ID NO: 2097794
ucuaugcaaagucacccag

SEQ ID NO: 2097796 - RNA, 19 nt, Artificial Sequence
  Description of Artificial Sequence: Synthetic oligonucleotide
  Sense strand starting at position 649 of SEQ ID NO: 1882134
ggugacuuugcauagagca

SEQ ID NO: 2097797 - RNA, 19 nt, Artificial Sequence
  Description of Artificial Sequence: Synthetic oligonucleotide
  Antisense strand to SEQ ID NO: 2097796
ugcucuaugcaaagucacc

SEQ ID NO: 2097798 - RNA, 19 nt, Artificial Sequence
  Description of Artificial Sequence: Synthetic oligonucleotide
  Sense strand starting at position 1231 of SEQ ID NO: 1882134
ugcccaaaugcucaaguua

SEQ ID NO: 2097799 - RNA, 19 nt, Artificial Sequence
  Description of Artificial Sequence: Synthetic oligonucleotide
  Antisense strand to SEQ ID NO: 2097798
uaacuugagcauuugggca

SEQ ID NO: 2097800 - RNA, 19 nt, Artificial Sequence
  Description of Artificial Sequence: Synthetic oligonucleotide
  Sense strand starting at position 1292 of SEQ ID NO: 1882134
cccauuauuucugaagaag

SEQ ID NO: 2097801 - RNA, 19 nt, Artificial Sequence
  Description of Artificial Sequence: Synthetic oligonucleotide
  Antisense strand to SEQ ID NO: 2097800
cuucuucagaaauaauggg

SEQ ID NO: 2097802 - RNA, 19 nt, Artificial Sequence
  Description of Artificial Sequence: Synthetic oligonucleotide
  Sense strand starting at position 1419 of SEQ ID NO: 1882134
gcugcucuccgugauuuag

SEQ ID NO: 2097803 - RNA, 19 nt, Artificial Sequence
  Description of Artificial Sequence: Synthetic oligonucleotide
  Antisense strand to SEQ ID NO: 2097802
cuaaaucacggagagcagc

SEQ ID NO: 2097804 - RNA, 19 nt, Artificial Sequence
  Description of Artificial Sequence: Synthetic oligonucleotide
  Sense strand starting at position 1425 of SEQ ID NO: 1882134
cuccgugauuuagcagcaa

SEQ ID NO: 2097805 - RNA, 19 nt, Artificial Sequence
  Description of Artificial Sequence: Synthetic oligonucleotide
  Antisense strand to SEQ ID NO: 2097804
uugcugcuaaaucacggag

SEQ ID NO: 2097806 - RNA, 19 nt, Artificial Sequence
  Description of Artificial Sequence: Synthetic oligonucleotide
  Sense strand starting at position 1718 of SEQ ID NO: 1882134
cugauuugaaaucgguguu

SEQ ID NO: 2097807 - RNA, 19 nt, Artificial Sequence
  Description of Artificial Sequence: Synthetic oligonucleotide
  Antisense strand to SEQ ID NO: 2097806
aacaccgauuucaaaucag

SEQ ID NO: 2097808 - RNA, 19 nt, Artificial Sequence
  Description of Artificial Sequence: Synthetic oligonucleotide
  Sense strand starting at position 1724 of SEQ ID NO: 1882134
ugaaaucgguguucagaag

SEQ ID NO: 2097809 - RNA, 19 nt, Artificial Sequence
  Description of Artificial Sequence: Synthetic oligonucleotide
  Antisense strand to SEQ ID NO: 2097808
cuucugaacaccgauuuca

SEQ ID NO: 2097810 - RNA, 19 nt, Artificial Sequence
  Description of Artificial Sequence: Synthetic oligonucleotide
  Sense strand starting at position 1795 of SEQ ID NO: 1882134
uuccauacucuccgaggau

SEQ ID NO: 2097811 - RNA, 19 nt, Artificial Sequence
  Description of Artificial Sequence: Synthetic oligonucleotide
  Antisense strand to SEQ ID NO: 2097810
auccucggagaguauggaa

SEQ ID NO: 2097812 - RNA, 19 nt, Artificial Sequence
  Description of Artificial Sequence: Synthetic oligonucleotide
  Sense strand starting at position 2784 of SEQ ID NO: 1882134
ugagguugagguuauugau

SEQ ID NO: 2097813 - RNA, 19 nt, Artificial Sequence
  Description of Artificial Sequence: Synthetic oligonucleotide
  Antisense strand to SEQ ID NO: 2097812
aucaauaaccucaaccuca

SEQ ID NO: 2097814 - RNA, 19 nt, Artificial Sequence
  Description of Artificial Sequence: Synthetic oligonucleotide
  Sense strand starting at position 2887 of SEQ ID NO: 1882134
agguaaacgaugggauauu

SEQ ID NO: 2097815 - RNA, 19 nt, Artificial Sequence
  Description of Artificial Sequence: Synthetic oligonucleotide
  Antisense strand to SEQ ID NO: 2097814
aauaucccaucguuuaccu

SEQ ID NO: 2097816 - RNA, 19 nt, Artificial Sequence
  Description of Artificial Sequence: Synthetic oligonucleotide
  Sense strand starting at position 2888 of SEQ ID NO: 1882134
gguaaacgaugggauauuu

SEQ ID NO: 2097817 - RNA, 19 nt, Artificial Sequence
  Description of Artificial Sequence: Synthetic oligonucleotide
  Antisense strand to SEQ ID NO: 2097816
aaauaucccaucguuuacc

SEQ ID NO: 2097818 - RNA, 19 nt, Artificial Sequence
  Description of Artificial Sequence: Synthetic oligonucleotide
  Sense strand starting at position 2982 of SEQ ID NO: 1882134
uggagucgaccuuaucaac

SEQ ID NO: 2097819 - RNA, 19 nt, Artificial Sequence
  Description of Artificial Sequence: Synthetic oligonucleotide
  Antisense strand to SEQ ID NO: 2097818
guugauaaggucgacucca

SEQ ID NO: 2097820 - RNA, 19 nt, Artificial Sequence
  Description of Artificial Sequence: Synthetic oligonucleotide
  Sense strand starting at position 3036 of SEQ ID NO: 1882134
aaggaaggcggcugagaua

SEQ ID NO: 2097821 - RNA, 19 nt, Artificial Sequence
  Description of Artificial Sequence: Synthetic oligonucleotide
  Antisense strand to SEQ ID NO: 2097820
uaucucagccgccuuccuu

SEQ ID NO: 2097822 - RNA, 19 nt, Artificial Sequence
  Description of Artificial Sequence: Synthetic oligonucleotide
  Sense strand starting at position 3057 of SEQ ID NO: 1882134
caucgucugcguuuaaaug

SEQ ID NO: 2097823 - RNA, 19 nt, Artificial Sequence
  Description of Artificial Sequence: Synthetic oligonucleotide
  Antisense strand to SEQ ID NO: 2097822
cauuuaaacgcagacgaug

SEQ ID NO: 2097824 - RNA, 19 nt, Artificial Sequence
  Description of Artificial Sequence: Synthetic oligonucleotide
  Sense strand starting at position 3066 of SEQ ID NO: 1882134
cguuuaaaugaaugcaaca

SEQ ID NO: 2097825 - RNA, 19 nt, Artificial Sequence
  Description of Artificial Sequence: Synthetic oligonucleotide
  Antisense strand to SEQ ID NO: 2097824
uguugcauucauuuaaacg

SEQ ID NO: 2097826 - RNA, 19 nt, Artificial Sequence
  Description of Artificial Sequence: Synthetic oligonucleotide
  Sense strand starting at position 3100 of SEQ ID NO: 1882134
cuuugaaaguauucugaau

SEQ ID NO: 2097827 - RNA, 19 nt, Artificial Sequence
  Description of Artificial Sequence: Synthetic oligonucleotide
  Antisense strand to SEQ ID NO: 2097826
auucagaauacuuucaaag

SEQ ID NO: 2097828 - RNA, 19 nt, Artificial Sequence
  Description of Artificial Sequence: Synthetic oligonucleotide
  Sense strand starting at position 3111 of SEQ ID NO: 1882134
uucugaauuuccuaaugag

SEQ ID NO: 2097829 - RNA, 19 nt, Artificial Sequence
  Description of Artificial Sequence: Synthetic oligonucleotide
  Antisense strand to SEQ ID NO: 2097828
cucauuaggaaauucagaa

SEQ ID NO: 2097830 - RNA, 19 nt, Artificial Sequence
  Description of Artificial Sequence: Synthetic oligonucleotide
  Sense strand starting at position 3118 of SEQ ID NO: 1882134
uuuccuaaugaguguaacu

SEQ ID NO: 2097831 - RNA, 19 nt, Artificial Sequence
  Description of Artificial Sequence: Synthetic oligonucleotide
  Antisense strand to SEQ ID NO: 2097830
aguuacacucauuaggaaa

SEQ ID NO: 2097832 - RNA, 19 nt, Artificial Sequence
  Description of Artificial Sequence: Synthetic oligonucleotide
  Sense strand starting at position 3120 of SEQ ID NO: 1882134
uccuaaugaguguaacugu

SEQ ID NO: 2097833 - RNA, 19 nt, Artificial Sequence
  Description of Artificial Sequence: Synthetic oligonucleotide
  Antisense strand to SEQ ID NO: 2097832
acaguuacacucauuagga

SEQ ID NO: 2097834 - RNA, 19 nt, Artificial Sequence
  Description of Artificial Sequence: Synthetic oligonucleotide
  Sense strand starting at position 3143 of SEQ ID NO: 1882134
acguguaauuuguuuccaa

SEQ ID NO: 2097835 - RNA, 19 nt, Artificial Sequence
  Description of Artificial Sequence: Synthetic oligonucleotide
  Antisense strand to SEQ ID NO: 2097834
uuggaaacaaauuacacgu

SEQ ID NO: 2097836 - RNA, 19 nt, Artificial Sequence
  Description of Artificial Sequence: Synthetic oligonucleotide
  Sense strand starting at position 3144 of SEQ ID NO: 1882134
cguguaauuuguuuccaac

SEQ ID NO: 2097837 - RNA, 19 nt, Artificial Sequence
  Description of Artificial Sequence: Synthetic oligonucleotide
  Antisense strand to SEQ ID NO: 2097836
guuggaaacaaauuacacg

SEQ ID NO: 2097838 - RNA, 19 nt, Artificial Sequence
  Description of Artificial Sequence: Synthetic oligonucleotide
  Sense strand starting at position 3192 of SEQ ID NO: 1882134
cggccaugugcaguaguaa

SEQ ID NO: 2097839 - RNA, 19 nt, Artificial Sequence
  Description of Artificial Sequence: Synthetic oligonucleotide
  Antisense strand to SEQ ID NO: 2097838
uuacuacugcacauggccg

SEQ ID NO: 2097840 - RNA, 19 nt, Artificial Sequence
  Description of Artificial Sequence: Synthetic oligonucleotide
  Sense strand starting at position 3266 of SEQ ID NO: 1882134
gugucacuucuggcuuguu

SEQ ID NO: 2097841 - RNA, 19 nt, Artificial Sequence
  Description of Artificial Sequence: Synthetic oligonucleotide
  Antisense strand to SEQ ID NO: 2097840
aacaagccagaagugacac

SEQ ID NO: 2097842 - RNA, 19 nt, Artificial Sequence
  Description of Artificial Sequence: Synthetic oligonucleotide
  Sense strand starting at position 3350 of SEQ ID NO: 1882134
cugcucugauuauuaaaug

SEQ ID NO: 2097843 - RNA, 19 nt, Artificial Sequence
  Description of Artificial Sequence: Synthetic oligonucleotide
  Antisense strand to SEQ ID NO: 2097842
cauuuaauaaucagagcag

SEQ ID NO: 2097844 - RNA, 19 nt, Artificial Sequence
  Description of Artificial Sequence: Synthetic oligonucleotide
  Sense strand starting at position 3449 of SEQ ID NO: 1882134
gaauuagacucagucacug

SEQ ID NO: 2097845 - RNA, 19 nt, Artificial Sequence
  Description of Artificial Sequence: Synthetic oligonucleotide
  Antisense strand to SEQ ID NO: 2097844
cagugacugagucuaauuc

SEQ ID NO: 2097846 - RNA, 19 nt, Artificial Sequence
  Description of Artificial Sequence: Synthetic oligonucleotide
  Sense strand starting at position 3520 of SEQ ID NO: 1882134
cagugacaugguugcauuu

SEQ ID NO: 2097847 - RNA, 19 nt, Artificial Sequence
  Description of Artificial Sequence: Synthetic oligonucleotide
  Antisense strand to SEQ ID NO: 2097846
aaaugcaaccaugucacug

SEQ ID NO: 2097848 - RNA, 19 nt, Artificial Sequence
  Description of Artificial Sequence: Synthetic oligonucleotide
  Sense strand starting at position 3613 of SEQ ID NO: 1882134
guaguucuuaaaugguaga

SEQ ID NO: 2097849 - RNA, 19 nt, Artificial Sequence
  Description of Artificial Sequence: Synthetic oligonucleotide
  Antisense strand to SEQ ID NO: 2097848
ucuaccauuuaagaacuac

SEQ ID NO: 2097850 - RNA, 19 nt, Artificial Sequence
  Description of Artificial Sequence: Synthetic oligonucleotide
  Sense strand starting at position 3624 of SEQ ID NO: 1882134
augguagacuuucuaaaga

SEQ ID NO: 2097851 - RNA, 19 nt, Artificial Sequence
  Description of Artificial Sequence: Synthetic oligonucleotide
  Antisense strand to SEQ ID NO: 2097850
ucuuuagaaagucuaccau

SEQ ID NO: 2097852 - RNA, 19 nt, Artificial Sequence
  Description of Artificial Sequence: Synthetic oligonucleotide
  Sense strand starting at position 3883 of SEQ ID NO: 1882134
cugauauugccaugacacu

SEQ ID NO: 2097853 - RNA, 19 nt, Artificial Sequence
  Description of Artificial Sequence: Synthetic oligonucleotide
  Antisense strand to SEQ ID NO: 2097852
agugucauggcaauaucag

SEQ ID NO: 2097854 - RNA, 19 nt, Artificial Sequence
  Description of Artificial Sequence: Synthetic oligonucleotide
  Sense strand starting at position 3884 of SEQ ID NO: 1882134
ugauauugccaugacacuu

SEQ ID NO: 2097855 - RNA, 19 nt, Artificial Sequence
  Description of Artificial Sequence: Synthetic oligonucleotide
  Antisense strand to SEQ ID NO: 2097854
aagugucauggcaauauca

SEQ ID NO: 2097856 - RNA, 19 nt, Artificial Sequence
  Description of Artificial Sequence: Synthetic oligonucleotide
  Sense strand starting at position 3971 of SEQ ID NO: 1882134
guggcauaacguuauaaau

SEQ ID NO: 2097857 - RNA, 19 nt, Artificial Sequence
  Description of Artificial Sequence: Synthetic oligonucleotide
  Antisense strand to SEQ ID NO: 2097856
auuuauaacguuaugccac

SEQ ID NO: 2097858 - RNA, 19 nt, Artificial Sequence
  Description of Artificial Sequence: Synthetic oligonucleotide
  Sense strand starting at position 60 of SEQ ID NO: 1882135
gguauuuacuuaucugugu

SEQ ID NO: 2097859 - RNA, 19 nt, Artificial Sequence
  Description of Artificial Sequence: Synthetic oligonucleotide
  Antisense strand to SEQ ID NO: 2097858
acacagauaaguaaauacc

SEQ ID NO: 2097860 - RNA, 19 nt, Artificial Sequence
  Description of Artificial Sequence: Synthetic oligonucleotide
  Sense strand starting at position 65 of SEQ ID NO: 1882135
uuacuuaucugugucauuu

SEQ ID NO: 2097861 - RNA, 19 nt, Artificial Sequence
  Description of Artificial Sequence: Synthetic oligonucleotide
  Antisense strand to SEQ ID NO: 2097860
aaaugacacagauaaguaa

SEQ ID NO: 2097862 - RNA, 19 nt, Artificial Sequence
  Description of Artificial Sequence: Synthetic oligonucleotide
  Sense strand starting at position 77 of SEQ ID NO: 1882135
gucauuuacuaagaaagaa

SEQ ID NO: 2097863 - RNA, 19 nt, Artificial Sequence
  Description of Artificial Sequence: Synthetic oligonucleotide
  Antisense strand to SEQ ID NO: 2097862
uucuuucuuaguaaaugac

SEQ ID NO: 2097864 - RNA, 19 nt, Artificial Sequence
  Description of Artificial Sequence: Synthetic oligonucleotide
  Sense strand starting at position 145 of SEQ ID NO: 1882135
aaggacacucuaugugaau

SEQ ID NO: 2097865 - RNA, 19 nt, Artificial Sequence
  Description of Artificial Sequence: Synthetic oligonucleotide
  Antisense strand to SEQ ID NO: 2097864
auucacauagaguguccuu

SEQ ID NO: 2097866 - RNA, 19 nt, Artificial Sequence
  Description of Artificial Sequence: Synthetic oligonucleotide
  Sense strand starting at position 146 of SEQ ID NO: 1882135
aggacacucuaugugaauu

SEQ ID NO: 2097867 - RNA, 19 nt, Artificial Sequence
  Description of Artificial Sequence: Synthetic oligonucleotide
  Antisense strand to SEQ ID NO: 2097866
aauucacauagaguguccu

SEQ ID NO: 2097868 - RNA, 19 nt, Artificial Sequence
  Description of Artificial Sequence: Synthetic oligonucleotide
  Sense strand starting at position 185 of SEQ ID NO: 1882135
gcacauacucugggaauaa

SEQ ID NO: 2097869 - RNA, 19 nt, Artificial Sequence
  Description of Artificial Sequence: Synthetic oligonucleotide
  Antisense strand to SEQ ID NO: 2097868
uuauucccagaguaugugc

SEQ ID NO: 2097870 - RNA, 19 nt, Artificial Sequence
  Description of Artificial Sequence: Synthetic oligonucleotide
  Sense strand starting at position 454 of SEQ ID NO: 1882135
uucgaauuauuaucucaag

SEQ ID NO: 2097871 - RNA, 19 nt, Artificial Sequence
  Description of Artificial Sequence: Synthetic oligonucleotide
  Antisense strand to SEQ ID NO: 2097870
cuugagauaauaauucgaa

SEQ ID NO: 2097872 - RNA, 19 nt, Artificial Sequence
  Description of Artificial Sequence: Synthetic oligonucleotide
  Sense strand starting at position 455 of SEQ ID NO: 1882135
ucgaauuauuaucucaaga

SEQ ID NO: 2097873 - RNA, 19 nt, Artificial Sequence
  Description of Artificial Sequence: Synthetic oligonucleotide
  Antisense strand to SEQ ID NO: 2097872
ucuugagauaauaauucga

SEQ ID NO: 2097874 - RNA, 19 nt, Artificial Sequence
  Description of Artificial Sequence: Synthetic oligonucleotide
  Sense strand starting at position 558 of SEQ ID NO: 1882135
auuacaucugaauggguaa

SEQ ID NO: 2097875 - RNA, 19 nt, Artificial Sequence
  Description of Artificial Sequence: Synthetic oligonucleotide
  Antisense strand to SEQ ID NO: 2097874
uuacccauucagauguaau

SEQ ID NO: 2097876 - RNA, 19 nt, Artificial Sequence
  Description of Artificial Sequence: Synthetic oligonucleotide
  Sense strand starting at position 848 of SEQ ID NO: 1882135
aggccaaauuaugcuuaaa

SEQ ID NO: 2097877 - RNA, 19 nt, Artificial Sequence
  Description of Artificial Sequence: Synthetic oligonucleotide
  Antisense strand to SEQ ID NO: 2097876
uuuaagcauaauuuggccu

SEQ ID NO: 2097878 - RNA, 19 nt, Artificial Sequence
  Description of Artificial Sequence: Synthetic oligonucleotide
  Sense strand starting at position 962 of SEQ ID NO: 1882135
gagugauuacacggaaagu

SEQ ID NO: 2097879 - RNA, 19 nt, Artificial Sequence
  Description of Artificial Sequence: Synthetic oligonucleotide
  Antisense strand to SEQ ID NO: 2097878
acuuuccguguaaucacuc

SEQ ID NO: 2097880 - RNA, 19 nt, Artificial Sequence
  Description of Artificial Sequence: Synthetic oligonucleotide
  Sense strand starting at position 963 of SEQ ID NO: 1882135
agugauuacacggaaaguc

SEQ ID NO: 2097881 - RNA, 19 nt, Artificial Sequence
  Description of Artificial Sequence: Synthetic oligonucleotide
  Antisense strand to SEQ ID NO: 2097880
gacuuuccguguaaucacu

SEQ ID NO: 2097882 - RNA, 19 nt, Artificial Sequence
  Description of Artificial Sequence: Synthetic oligonucleotide
  Sense strand starting at position 971 of SEQ ID NO: 1882135
cacggaaaguccuuagaau

SEQ ID NO: 2097883 - RNA, 19 nt, Artificial Sequence
  Description of Artificial Sequence: Synthetic oligonucleotide
  Antisense strand to SEQ ID NO: 2097882
auucuaaggacuuuccgug

SEQ ID NO: 2097884 - RNA, 19 nt, Artificial Sequence
  Description of Artificial Sequence: Synthetic oligonucleotide
  Sense strand starting at position 983 of SEQ ID NO: 1882135
uuagaauggugacuuagau

SEQ ID NO: 2097885 - RNA, 19 nt, Artificial Sequence
  Description of Artificial Sequence: Synthetic oligonucleotide
  Antisense strand to SEQ ID NO: 2097884
aucuaagucaccauucuaa

SEQ ID NO: 2097886 - RNA, 19 nt, Artificial Sequence
  Description of Artificial Sequence: Synthetic oligonucleotide
  Sense strand starting at position 1032 of SEQ ID NO: 1882135
augugauaacucuagguau

SEQ ID NO: 2097887 - RNA, 19 nt, Artificial Sequence
  Description of Artificial Sequence: Synthetic oligonucleotide
  Antisense strand to SEQ ID NO: 2097886
auaccuagaguuaucacau

SEQ ID NO: 2097888 - RNA, 19 nt, Artificial Sequence
  Description of Artificial Sequence: Synthetic oligonucleotide
  Sense strand starting at position 1034 of SEQ ID NO: 1882135
gugauaacucuagguauca

SEQ ID NO: 2097889 - RNA, 19 nt, Artificial Sequence
  Description of Artificial Sequence: Synthetic oligonucleotide
  Antisense strand to SEQ ID NO: 2097888
ugauaccuagaguuaucac

SEQ ID NO: 2097890 - RNA, 19 nt, Artificial Sequence
  Description of Artificial Sequence: Synthetic oligonucleotide
  Sense strand starting at position 1035 of SEQ ID NO: 1882135
ugauaacucuagguaucac

SEQ ID NO: 2097891 - RNA, 19 nt, Artificial Sequence
  Description of Artificial Sequence: Synthetic oligonucleotide
  Antisense strand to SEQ ID NO: 2097890
gugauaccuagaguuauca

SEQ ID NO: 2097892 - RNA, 19 nt, Artificial Sequence
  Description of Artificial Sequence: Synthetic oligonucleotide
  Sense strand starting at position 1172 of SEQ ID NO: 1882135
ugggucuaauauucuagaa

SEQ ID NO: 2097893 - RNA, 19 nt, Artificial Sequence
  Description of Artificial Sequence: Synthetic oligonucleotide
  Antisense strand to SEQ ID NO: 2097892
uucuagaauauuagaccca

SEQ ID NO: 2097894 - RNA, 19 nt, Artificial Sequence
  Description of Artificial Sequence: Synthetic oligonucleotide
  Sense strand starting at position 1409 of SEQ ID NO: 1882135
uguaauuacguugcuuagu

SEQ ID NO: 2097895 - RNA, 19 nt, Artificial Sequence
  Description of Artificial Sequence: Synthetic oligonucleotide
  Antisense strand to SEQ ID NO: 2097894
acuaagcaacguaauuaca

SEQ ID NO: 2097896 - RNA, 19 nt, Artificial Sequence
  Description of Artificial Sequence: Synthetic oligonucleotide
  Sense strand starting at position 1425 of SEQ ID NO: 1882135
aguuauuauggcuaaauac

SEQ ID NO: 2097897 - RNA, 19 nt, Artificial Sequence
  Description of Artificial Sequence: Synthetic oligonucleotide
  Antisense strand to SEQ ID NO: 2097896
guauuuagccauaauaacu

SEQ ID NO: 2097898 - RNA, 19 nt, Artificial Sequence
  Description of Artificial Sequence: Synthetic oligonucleotide
  Sense strand starting at position 1466 of SEQ ID NO: 1882135
ugcuaucaggucuaugaaa

SEQ ID NO: 2097899 - RNA, 19 nt, Artificial Sequence
  Description of Artificial Sequence: Synthetic oligonucleotide
  Antisense strand to SEQ ID NO: 2097898
uuucauagaccugauagca

SEQ ID NO: 2097900 - RNA, 19 nt, Artificial Sequence
  Description of Artificial Sequence: Synthetic oligonucleotide
  Sense strand starting at position 1762 of SEQ ID NO: 1882135
acacguauauaaguagaaa

SEQ ID NO: 2097901 - RNA, 19 nt, Artificial Sequence
  Description of Artificial Sequence: Synthetic oligonucleotide
  Antisense strand to SEQ ID NO: 2097900
uuucuacuuauauacgugu

SEQ ID NO: 2097902 - RNA, 19 nt, Artificial Sequence
  Description of Artificial Sequence: Synthetic oligonucleotide
  Sense strand starting at position 1805 of SEQ ID NO: 1882135
aacaguugacuguauuagu

SEQ ID NO: 2097903 - RNA, 19 nt, Artificial Sequence
  Description of Artificial Sequence: Synthetic oligonucleotide
  Antisense strand to SEQ ID NO: 2097902
acuaauacagucaacuguu

SEQ ID NO: 2097904 - RNA, 19 nt, Artificial Sequence
  Description of Artificial Sequence: Synthetic oligonucleotide
  Sense strand starting at position 1920 of SEQ ID NO: 1882135
ugagaacuccuuuguuaau

SEQ ID NO: 2097905 - RNA, 19 nt, Artificial Sequence
  Description of Artificial Sequence: Synthetic oligonucleotide
  Antisense strand to SEQ ID NO: 2097904
auuaacaaaggaguucuca

SEQ ID NO: 2097906 - RNA, 19 nt, Artificial Sequence
  Description of Artificial Sequence: Synthetic oligonucleotide
  Sense strand starting at position 1921 of SEQ ID NO: 1882135
gagaacuccuuuguuaaug

SEQ ID NO: 2097907 - RNA, 19 nt, Artificial Sequence
  Description of Artificial Sequence: Synthetic oligonucleotide
  Antisense strand to SEQ ID NO: 2097906
cauuaacaaaggaguucuc

SEQ ID NO: 2097908 - RNA, 19 nt, Artificial Sequence
  Description of Artificial Sequence: Synthetic oligonucleotide
  Sense strand starting at position 1942 of SEQ ID NO: 1882135
gcauguuaugaacauauuc

SEQ ID NO: 2097909 - RNA, 19 nt, Artificial Sequence
  Description of Artificial Sequence: Synthetic oligonucleotide
  Antisense strand to SEQ ID NO: 2097908
gaauauguucauaacaugc

SEQ ID NO: 2097910 - RNA, 19 nt, Artificial Sequence
  Description of Artificial Sequence: Synthetic oligonucleotide
  Sense strand starting at position 2037 of SEQ ID NO: 1882135
uagggaaaguauucuacua

SEQ ID NO: 2097911 - RNA, 19 nt, Artificial Sequence
  Description of Artificial Sequence: Synthetic oligonucleotide
  Antisense strand to SEQ ID NO: 2097910
uaguagaauacuuucccua

SEQ ID NO: 2097912 - RNA, 19 nt, Artificial Sequence
  Description of Artificial Sequence: Synthetic oligonucleotide
  Sense strand starting at position 2099 of SEQ ID NO: 1882135
gauggacauuaugcauuau

SEQ ID NO: 2097913 - RNA, 19 nt, Artificial Sequence
  Description of Artificial Sequence: Synthetic oligonucleotide
  Antisense strand to SEQ ID NO: 2097912
auaaugcauaauguccauc

SEQ ID NO: 2097914 - RNA, 19 nt, Artificial Sequence
  Description of Artificial Sequence: Synthetic oligonucleotide
  Sense strand starting at position 2144 of SEQ ID NO: 1882135
aggaauaaguguuuacuag

SEQ ID NO: 2097915 - RNA, 19 nt, Artificial Sequence
  Description of Artificial Sequence: Synthetic oligonucleotide
  Antisense strand to SEQ ID NO: 2097914
cuaguaaacacuuauuccu

SEQ ID NO: 2097916 - RNA, 19 nt, Artificial Sequence
  Description of Artificial Sequence: Synthetic oligonucleotide
  Sense strand starting at position 2150 of SEQ ID NO: 1882135
aaguguuuacuagagucua

SEQ ID NO: 2097917 - RNA, 19 nt, Artificial Sequence
  Description of Artificial Sequence: Synthetic oligonucleotide
  Antisense strand to SEQ ID NO: 2097916
uagacucuaguaaacacuu

SEQ ID NO: 2097918 - RNA, 19 nt, Artificial Sequence
  Description of Artificial Sequence: Synthetic oligonucleotide
  Sense strand starting at position 2225 of SEQ ID NO: 1882135
gaaacugucuacuuggaua

SEQ ID NO: 2097919 - RNA, 19 nt, Artificial Sequence
  Description of Artificial Sequence: Synthetic oligonucleotide
  Antisense strand to SEQ ID NO: 2097918
uauccaaguagacaguuuc

SEQ ID NO: 2097920 - RNA, 19 nt, Artificial Sequence
  Description of Artificial Sequence: Synthetic oligonucleotide
  Sense strand starting at position 2227 of SEQ ID NO: 1882135
aacugucuacuuggauaga

SEQ ID NO: 2097921 - RNA, 19 nt, Artificial Sequence
  Description of Artificial Sequence: Synthetic oligonucleotide
  Antisense strand to SEQ ID NO: 2097920
ucuauccaaguagacaguu

SEQ ID NO: 2097922 - RNA, 19 nt, Artificial Sequence
  Description of Artificial Sequence: Synthetic oligonucleotide
  Sense strand starting at position 2618 of SEQ ID NO: 1882135
auugaacauuuguaagaac

SEQ ID NO: 2097923 - RNA, 19 nt, Artificial Sequence
  Description of Artificial Sequence: Synthetic oligonucleotide
  Antisense strand to SEQ ID NO: 2097922
guucuuacaaauguucaau

SEQ ID NO: 2097924 - RNA, 19 nt, Artificial Sequence
  Description of Artificial Sequence: Synthetic oligonucleotide
  Sense strand starting at position 2645 of SEQ ID NO: 1882135
gugauuagacaucauuagu

SEQ ID NO: 2097925 - RNA, 19 nt, Artificial Sequence
  Description of Artificial Sequence: Synthetic oligonucleotide
  Antisense strand to SEQ ID NO: 2097924
acuaaugaugucuaaucac

SEQ ID NO: 2097926 - RNA, 19 nt, Artificial Sequence
  Description of Artificial Sequence: Synthetic oligonucleotide
  Sense strand starting at position 2699 of SEQ ID NO: 1882135
gugccaaggaucgaauaua

SEQ ID NO: 2097927 - RNA, 19 nt, Artificial Sequence
  Description of Artificial Sequence: Synthetic oligonucleotide
  Antisense strand to SEQ ID NO: 2097926
uauauucgauccuuggcac

SEQ ID NO: 2097928 - RNA, 19 nt, Artificial Sequence
  Description of Artificial Sequence: Synthetic oligonucleotide
  Sense strand starting at position 2930 of SEQ ID NO: 1882135
ugaggucuucuacagucuu

SEQ ID NO: 2097929 - RNA, 19 nt, Artificial Sequence
  Description of Artificial Sequence: Synthetic oligonucleotide
  Antisense strand to SEQ ID NO: 2097928
aagacuguagaagaccuca

SEQ ID NO: 2097930 - RNA, 19 nt, Artificial Sequence
  Description of Artificial Sequence: Synthetic oligonucleotide
  Sense strand starting at position 3121 of SEQ ID NO: 1882135
ugacaaauacuaggcuaau

SEQ ID NO: 2097931 - RNA, 19 nt, Artificial Sequence
  Description of Artificial Sequence: Synthetic oligonucleotide
  Antisense strand to SEQ ID NO: 2097930
auuagccuaguauuuguca

SEQ ID NO: 2097932 - RNA, 19 nt, Artificial Sequence
  Description of Artificial Sequence: Synthetic oligonucleotide
  Sense strand starting at position 3317 of SEQ ID NO: 1882135
agagaugcucaacgaguaa

SEQ ID NO: 2097933 - RNA, 19 nt, Artificial Sequence
  Description of Artificial Sequence: Synthetic oligonucleotide
  Antisense strand to SEQ ID NO: 2097932
uuacucguugagcaucucu

SEQ ID NO: 2097934 - RNA, 19 nt, Artificial Sequence
  Description of Artificial Sequence: Synthetic oligonucleotide
  Sense strand starting at position 3699 of SEQ ID NO: 1882135
aaggguagacauuguuauc

SEQ ID NO: 2097935 - RNA, 19 nt, Artificial Sequence
  Description of Artificial Sequence: Synthetic oligonucleotide
  Antisense strand to SEQ ID NO: 2097934
gauaacaaugucuacccuu

SEQ ID NO: 2097936 - RNA, 19 nt, Artificial Sequence
  Description of Artificial Sequence: Synthetic oligonucleotide
  Sense strand starting at position 3712 of SEQ ID NO: 1882135
guuaucagauuaucagacu

SEQ ID NO: 2097937 - RNA, 19 nt, Artificial Sequence
  Description of Artificial Sequence: Synthetic oligonucleotide
  Antisense strand to SEQ ID NO: 2097936
agucugauaaucugauaac

SEQ ID NO: 2097938 - RNA, 19 nt, Artificial Sequence
  Description of Artificial Sequence: Synthetic oligonucleotide
  Sense strand starting at position 209 of SEQ ID NO: 1882136
guaagaaaucaaggcuuug

SEQ ID NO: 2097939 - RNA, 19 nt, Artificial Sequence
  Description of Artificial Sequence: Synthetic oligonucleotide
  Antisense strand to SEQ ID NO: 2097938
caaagccuugauuucuuac

SEQ ID NO: 2097940 - RNA, 19 nt, Artificial Sequence
  Description of Artificial Sequence: Synthetic oligonucleotide
  Sense strand starting at position 285 of SEQ ID NO: 1882136
gcaggacuguuugagucua

SEQ ID NO: 2097941 - RNA, 19 nt, Artificial Sequence
  Description of Artificial Sequence: Synthetic oligonucleotide
  Antisense strand to SEQ ID NO: 2097940
uagacucaaacaguccugc

SEQ ID NO: 2097942 - RNA, 19 nt, Artificial Sequence
  Description of Artificial Sequence: Synthetic oligonucleotide
  Sense strand starting at position 428 of SEQ ID NO: 1882136
gguguugaggacugcuuga

SEQ ID NO: 2097943 - RNA, 19 nt, Artificial Sequence
  Description of Artificial Sequence: Synthetic oligonucleotide
  Antisense strand to SEQ ID NO: 2097942
ucaagcaguccucaacacc

SEQ ID NO: 2097944 - RNA, 19 nt, Artificial Sequence
  Description of Artificial Sequence: Synthetic oligonucleotide
  Sense strand starting at position 455 of SEQ ID NO: 1882136
gguugaggcugcuaugacu

SEQ ID NO: 2097945 - RNA, 19 nt, Artificial Sequence
  Description of Artificial Sequence: Synthetic oligonucleotide
  Antisense strand to SEQ ID NO: 2097944
agucauagcagccucaacc

SEQ ID NO: 2097946 - RNA, 19 nt, Artificial Sequence
  Description of Artificial Sequence: Synthetic oligonucleotide
  Sense strand starting at position 554 of SEQ ID NO: 1882136
uagucuggcuccugaagaa

SEQ ID NO: 2097947 - RNA, 19 nt, Artificial Sequence
  Description of Artificial Sequence: Synthetic oligonucleotide
  Antisense strand to SEQ ID NO: 2097946
uucuucaggagccagacua

SEQ ID NO: 2097948 - RNA, 19 nt, Artificial Sequence
  Description of Artificial Sequence: Synthetic oligonucleotide
  Sense strand starting at position 589 of SEQ ID NO: 1882136
gcaugacucuucgaugcuc

SEQ ID NO: 2097949 - RNA, 19 nt, Artificial Sequence
  Description of Artificial Sequence: Synthetic oligonucleotide
  Antisense strand to SEQ ID NO: 2097948
gagcaucgaagagucaugc

SEQ ID NO: 2097950 - RNA, 19 nt, Artificial Sequence
  Description of Artificial Sequence: Synthetic oligonucleotide
  Sense strand starting at position 611 of SEQ ID NO: 1882136
gcacaugccugaccaaaga

SEQ ID NO: 2097951 - RNA, 19 nt, Artificial Sequence
  Description of Artificial Sequence: Synthetic oligonucleotide
  Antisense strand to SEQ ID NO: 2097950
ucuuuggucaggcaugugc

SEQ ID NO: 2097952 - RNA, 19 nt, Artificial Sequence
  Description of Artificial Sequence: Synthetic oligonucleotide
  Sense strand starting at position 775 of SEQ ID NO: 1882136
gugaaaugucaaggugcuc

SEQ ID NO: 2097953 - RNA, 19 nt, Artificial Sequence
  Description of Artificial Sequence: Synthetic oligonucleotide
  Antisense strand to SEQ ID NO: 2097952
gagcaccuugacauuucac

SEQ ID NO: 2097954 - RNA, 19 nt, Artificial Sequence
  Description of Artificial Sequence: Synthetic oligonucleotide
  Sense strand starting at position 1168 of SEQ ID NO: 1882136
gaccguaucuaagagggaa

SEQ ID NO: 2097955 - RNA, 19 nt, Artificial Sequence
  Description of Artificial Sequence: Synthetic oligonucleotide
  Antisense strand to SEQ ID NO: 2097954
uucccucuuagauacgguc

SEQ ID NO: 2097956 - RNA, 19 nt, Artificial Sequence
  Description of Artificial Sequence: Synthetic oligonucleotide
  Sense strand starting at position 1171 of SEQ ID NO: 1882136
cguaucuaagagggaagua

SEQ ID NO: 2097957 - RNA, 19 nt, Artificial Sequence
  Description of Artificial Sequence: Synthetic oligonucleotide
  Antisense strand to SEQ ID NO: 2097956
uacuucccucuuagauacg

SEQ ID NO: 2097958 - RNA, 19 nt, Artificial Sequence
  Description of Artificial Sequence: Synthetic oligonucleotide
  Sense strand starting at position 1213 of SEQ ID NO: 1882136
gagggaagcuuccgaaggu

SEQ ID NO: 2097959 - RNA, 19 nt, Artificial Sequence
  Description of Artificial Sequence: Synthetic oligonucleotide
  Antisense strand to SEQ ID NO: 2097958
accuucggaagcuucccuc

SEQ ID NO: 2097960 - RNA, 19 nt, Artificial Sequence
  Description of Artificial Sequence: Synthetic oligonucleotide
  Sense strand starting at position 1214 of SEQ ID NO: 1882136
agggaagcuuccgaaggua

SEQ ID NO: 2097961 - RNA, 19 nt, Artificial Sequence
  Description of Artificial Sequence: Synthetic oligonucleotide
  Antisense strand to SEQ ID NO: 2097960
uaccuucggaagcuucccu

SEQ ID NO: 2097962 - RNA, 19 nt, Artificial Sequence
  Description of Artificial Sequence: Synthetic oligonucleotide
  Sense strand starting at position 2168 of SEQ ID NO: 1882136
gguguugggcaccaacauu

SEQ ID NO: 2097963 - RNA, 19 nt, Artificial Sequence
  Description of Artificial Sequence: Synthetic oligonucleotide
  Antisense strand to SEQ ID NO: 2097962
aauguuggugcccaacacc

SEQ ID NO: 2097964 - RNA, 19 nt, Artificial Sequence
  Description of Artificial Sequence: Synthetic oligonucleotide
  Sense strand starting at position 2198 of SEQ ID NO: 1882136
gugggugguucccugggau

SEQ ID NO: 2097965 - RNA, 19 nt, Artificial Sequence
  Description of Artificial Sequence: Synthetic oligonucleotide
  Antisense strand to SEQ ID NO: 2097964
aucccagggaaccacccac

SEQ ID NO: 2097966 - RNA, 19 nt, Artificial Sequence
  Description of Artificial Sequence: Synthetic oligonucleotide
  Sense strand starting at position 2366 of SEQ ID NO: 1882136
gagcgauccucagccgugu

SEQ ID NO: 2097967 - RNA, 19 nt, Artificial Sequence
  Description of Artificial Sequence: Synthetic oligonucleotide
  Antisense strand to SEQ ID NO: 2097966
acacggcugaggaucgcuc

SEQ ID NO: 2097968 - RNA, 19 nt, Artificial Sequence
  Description of Artificial Sequence: Synthetic oligonucleotide
  Sense strand starting at position 2428 of SEQ ID NO: 1882136
ggcgggaucuugcuguguu

SEQ ID NO: 2097969 - RNA, 19 nt, Artificial Sequence
  Description of Artificial Sequence: Synthetic oligonucleotide
  Antisense strand to SEQ ID NO: 2097968
aacacagcaagaucccgcc

SEQ ID NO: 2097970 - RNA, 19 nt, Artificial Sequence
  Description of Artificial Sequence: Synthetic oligonucleotide
  Sense strand starting at position 2429 of SEQ ID NO: 1882136
gcgggaucuugcuguguug

SEQ ID NO: 2097971 - RNA, 19 nt, Artificial Sequence
  Description of Artificial Sequence: Synthetic oligonucleotide
  Antisense strand to SEQ ID NO: 2097970
caacacagcaagaucccgc

SEQ ID NO: 2097972 - RNA, 19 nt, Artificial Sequence
  Description of Artificial Sequence: Synthetic oligonucleotide
  Sense strand starting at position 2549 of SEQ ID NO: 1882136
cuuugaaagcugcguagau

SEQ ID NO: 2097973 - RNA, 19 nt, Artificial Sequence
  Description of Artificial Sequence: Synthetic oligonucleotide
  Antisense strand to SEQ ID NO: 2097972
aucuacgcagcuuucaaag

SEQ ID NO: 2097974 - RNA, 19 nt, Artificial Sequence
  Description of Artificial Sequence: Synthetic oligonucleotide
  Sense strand starting at position 2550 of SEQ ID NO: 1882136
uuugaaagcugcguagauc

SEQ ID NO: 2097975 - RNA, 19 nt, Artificial Sequence
  Description of Artificial Sequence: Synthetic oligonucleotide
  Antisense strand to SEQ ID NO: 2097974
gaucuacgcagcuuucaaa

SEQ ID NO: 2097976 - RNA, 19 nt, Artificial Sequence
  Description of Artificial Sequence: Synthetic oligonucleotide
  Sense strand starting at position 2561 of SEQ ID NO: 1882136
cguagaucccuuuggcuca

SEQ ID NO: 2097977 - RNA, 19 nt, Artificial Sequence
  Description of Artificial Sequence: Synthetic oligonucleotide
  Antisense strand to SEQ ID NO: 2097976
ugagccaaagggaucuacg

SEQ ID NO: 2097978 - RNA, 19 nt, Artificial Sequence
  Description of Artificial Sequence: Synthetic oligonucleotide
  Sense strand starting at position 2703 of SEQ ID NO: 1882136
accaauaaucguuaguaau

SEQ ID NO: 2097979 - RNA, 19 nt, Artificial Sequence
  Description of Artificial Sequence: Synthetic oligonucleotide
  Antisense strand to SEQ ID NO: 2097978
auuacuaacgauuauuggu

SEQ ID NO: 2097980 - RNA, 19 nt, Artificial Sequence
  Description of Artificial Sequence: Synthetic oligonucleotide
  Sense strand starting at position 2709 of SEQ ID NO: 1882136
aaucguuaguaauuacguu

SEQ ID NO: 2097981 - RNA, 19 nt, Artificial Sequence
  Description of Artificial Sequence: Synthetic oligonucleotide
  Antisense strand to SEQ ID NO: 2097980
aacguaauuacuaacgauu

SEQ ID NO: 2097982 - RNA, 19 nt, Artificial Sequence
  Description of Artificial Sequence: Synthetic oligonucleotide
  Sense strand starting at position 2963 of SEQ ID NO: 1882136
cguaauagcuccuagacuu

SEQ ID NO: 2097983 - RNA, 19 nt, Artificial Sequence
  Description of Artificial Sequence: Synthetic oligonucleotide
  Antisense strand to SEQ ID NO: 2097982
aagucuaggagcuauuacg

SEQ ID NO: 2097984 - RNA, 19 nt, Artificial Sequence
  Description of Artificial Sequence: Synthetic oligonucleotide
  Sense strand starting at position 2985 of SEQ ID NO: 1882136
uuugaaaguuaugcaguuu

SEQ ID NO: 2097985 - RNA, 19 nt, Artificial Sequence
  Description of Artificial Sequence: Synthetic oligonucleotide
  Antisense strand to SEQ ID NO: 2097984
aaacugcauaacuuucaaa

SEQ ID NO: 2097986 - RNA, 19 nt, Artificial Sequence
  Description of Artificial Sequence: Synthetic oligonucleotide
  Sense strand starting at position 3009 of SEQ ID NO: 1882136
cuguguuaauuaccuaauu

SEQ ID NO: 2097987 - RNA, 19 nt, Artificial Sequence
  Description of Artificial Sequence: Synthetic oligonucleotide
  Antisense strand to SEQ ID NO: 2097986
aauuagguaauuaacacag

SEQ ID NO: 2097988 - RNA, 19 nt, Artificial Sequence
  Description of Artificial Sequence: Synthetic oligonucleotide
  Sense strand starting at position 3126 of SEQ ID NO: 1882136
aagagauucuccuguggag

SEQ ID NO: 2097989 - RNA, 19 nt, Artificial Sequence
  Description of Artificial Sequence: Synthetic oligonucleotide
  Antisense strand to SEQ ID NO: 2097988
cuccacaggagaaucucuu

SEQ ID NO: 2097990 - RNA, 19 nt, Artificial Sequence
  Description of Artificial Sequence: Synthetic oligonucleotide
  Sense strand starting at position 3128 of SEQ ID NO: 1882136
gagauucuccuguggagcu

SEQ ID NO: 2097991 - RNA, 19 nt, Artificial Sequence
  Description of Artificial Sequence: Synthetic oligonucleotide
  Antisense strand to SEQ ID NO: 2097990
agcuccacaggagaaucuc

SEQ ID NO: 2097992 - RNA, 19 nt, Artificial Sequence
  Description of Artificial Sequence: Synthetic oligonucleotide
  Sense strand starting at position 3648 of SEQ ID NO: 1882136
gcgggaugugucaggguca

SEQ ID NO: 2097993 - RNA, 19 nt, Artificial Sequence
  Description of Artificial Sequence: Synthetic oligonucleotide
  Antisense strand to SEQ ID NO: 2097992
ugacccugacacaucccgc

SEQ ID NO: 2097994 - RNA, 19 nt, Artificial Sequence
  Description of Artificial Sequence: Synthetic oligonucleotide
  Sense strand starting at position 15 of SEQ ID NO: 1882137
ucaguagaaguuuaagguu

SEQ ID NO: 2097995 - RNA, 19 nt, Artificial Sequence
  Description of Artificial Sequence: Synthetic oligonucleotide
  Antisense strand to SEQ ID NO: 2097994
aaccuuaaacuucuacuga

SEQ ID NO: 2097996 - RNA, 19 nt, Artificial Sequence
  Description of Artificial Sequence: Synthetic oligonucleotide
  Sense strand starting at position 34 of SEQ ID NO: 1882137
gcguguugugggcuuggga

SEQ ID NO: 2097997 - RNA, 19 nt, Artificial Sequence
  Description of Artificial Sequence: Synthetic oligonucleotide
  Antisense strand to SEQ ID NO: 2097996
ucccaagcccacaacacgc

SEQ ID NO: 2097998 - RNA, 19 nt, Artificial Sequence
  Description of Artificial Sequence: Synthetic oligonucleotide
  Sense strand starting at position 341 of SEQ ID NO: 1882137
agaucugacaacugugaug

SEQ ID NO: 2097999 - RNA, 19 nt, Artificial Sequence
  Description of Artificial Sequence: Synthetic oligonucleotide
  Antisense strand to SEQ ID NO: 2097998
caucacaguugucagaucu

SEQ ID NO: 2098000 - RNA, 19 nt, Artificial Sequence
  Description of Artificial Sequence: Synthetic oligonucleotide
  Sense strand starting at position 395 of SEQ ID NO: 1882137
uguguuugcauuugauuag

SEQ ID NO: 2098001 - RNA, 19 nt, Artificial Sequence
  Description of Artificial Sequence: Synthetic oligonucleotide
  Antisense strand to SEQ ID NO: 2098000
cuaaucaaaugcaaacaca

SEQ ID NO: 2098002 - RNA, 19 nt, Artificial Sequence
  Description of Artificial Sequence: Synthetic oligonucleotide
  Sense strand starting at position 398 of SEQ ID NO: 1882137
guuugcauuugauuagagu

SEQ ID NO: 2098003 - RNA, 19 nt, Artificial Sequence
  Description of Artificial Sequence: Synthetic oligonucleotide
  Antisense strand to SEQ ID NO: 2098002
acucuaaucaaaugcaaac

SEQ ID NO: 2098004 - RNA, 19 nt, Artificial Sequence
  Description of Artificial Sequence: Synthetic oligonucleotide
  Sense strand starting at position 431 of SEQ ID NO: 1882137
gcugauuaagcaggaauag

SEQ ID NO: 2098005 - RNA, 19 nt, Artificial Sequence
  Description of Artificial Sequence: Synthetic oligonucleotide
  Antisense strand to SEQ ID NO: 2098004
cuauuccugcuuaaucagc

SEQ ID NO: 2098006 - RNA, 19 nt, Artificial Sequence
  Description of Artificial Sequence: Synthetic oligonucleotide
  Sense strand starting at position 474 of SEQ ID NO: 1882137
cugaauccugguuaaugua

SEQ ID NO: 2098007 - RNA, 19 nt, Artificial Sequence
  Description of Artificial Sequence: Synthetic oligonucleotide
  Antisense strand to SEQ ID NO: 2098006
uacauuaaccaggauucag

SEQ ID NO: 2098008 - RNA, 19 nt, Artificial Sequence
  Description of Artificial Sequence: Synthetic oligonucleotide
  Sense strand starting at position 484 of SEQ ID NO: 1882137
guuaauguaguguaagauu

SEQ ID NO: 2098009 - RNA, 19 nt, Artificial Sequence
  Description of Artificial Sequence: Synthetic oligonucleotide
  Antisense strand to SEQ ID NO: 2098008
aaucuuacacuacauuaac

SEQ ID NO: 2098010 - RNA, 19 nt, Artificial Sequence
  Description of Artificial Sequence: Synthetic oligonucleotide
  Sense strand starting at position 497 of SEQ ID NO: 1882137
aagauuacggaugggugua

SEQ ID NO: 2098011 - RNA, 19 nt, Artificial Sequence
  Description of Artificial Sequence: Synthetic oligonucleotide
  Antisense strand to SEQ ID NO: 2098010
uacacccauccguaaucuu

SEQ ID NO: 2098012 - RNA, 19 nt, Artificial Sequence
  Description of Artificial Sequence: Synthetic oligonucleotide
  Sense strand starting at position 541 of SEQ ID NO: 1882137
gagauuagcucugcugaaa

SEQ ID NO: 2098013 - RNA, 19 nt, Artificial Sequence
  Description of Artificial Sequence: Synthetic oligonucleotide
  Antisense strand to SEQ ID NO: 2098012
uuucagcagagcuaaucuc

SEQ ID NO: 2098014 - RNA, 19 nt, Artificial Sequence
  Description of Artificial Sequence: Synthetic oligonucleotide
  Sense strand starting at position 690 of SEQ ID NO: 1882137
ucaggauaguuaccugaaa

SEQ ID NO: 2098015 - RNA, 19 nt, Artificial Sequence
  Description of Artificial Sequence: Synthetic oligonucleotide
  Antisense strand to SEQ ID NO: 2098014
uuucagguaacuauccuga

SEQ ID NO: 2098016 - RNA, 19 nt, Artificial Sequence
  Description of Artificial Sequence: Synthetic oligonucleotide
  Sense strand starting at position 691 of SEQ ID NO: 1882137
caggauaguuaccugaaau

SEQ ID NO: 2098017 - RNA, 19 nt, Artificial Sequence
  Description of Artificial Sequence: Synthetic oligonucleotide
  Antisense strand to SEQ ID NO: 2098016
auuucagguaacuauccug

SEQ ID NO: 2098018 - RNA, 19 nt, Artificial Sequence
  Description of Artificial Sequence: Synthetic oligonucleotide
  Sense strand starting at position 701 of SEQ ID NO: 1882137
accugaaauugaguuugca

SEQ ID NO: 2098019 - RNA, 19 nt, Artificial Sequence
  Description of Artificial Sequence: Synthetic oligonucleotide
  Antisense strand to SEQ ID NO: 2098018
ugcaaacucaauuucaggu

SEQ ID NO: 2098020 - RNA, 19 nt, Artificial Sequence
  Description of Artificial Sequence: Synthetic oligonucleotide
  Sense strand starting at position 771 of SEQ ID NO: 1882137
auuuguagucugugaacuu

SEQ ID NO: 2098021 - RNA, 19 nt, Artificial Sequence
  Description of Artificial Sequence: Synthetic oligonucleotide
  Antisense strand to SEQ ID NO: 2098020
aaguucacagacuacaaau

SEQ ID NO: 2098022 - RNA, 19 nt, Artificial Sequence
  Description of Artificial Sequence: Synthetic oligonucleotide
  Sense strand starting at position 797 of SEQ ID NO: 1882137
auucucucaguguaaauaa

SEQ ID NO: 2098023 - RNA, 19 nt, Artificial Sequence
  Description of Artificial Sequence: Synthetic oligonucleotide
  Antisense strand to SEQ ID NO: 2098022
uuauuuacacugagagaau

SEQ ID NO: 2098024 - RNA, 19 nt, Artificial Sequence
  Description of Artificial Sequence: Synthetic oligonucleotide
  Sense strand starting at position 923 of SEQ ID NO: 1882137
agcccagagugugugauuu

SEQ ID NO: 2098025 - RNA, 19 nt, Artificial Sequence
  Description of Artificial Sequence: Synthetic oligonucleotide
  Antisense strand to SEQ ID NO: 2098024
aaaucacacacucugggcu

SEQ ID NO: 2098026 - RNA, 19 nt, Artificial Sequence
  Description of Artificial Sequence: Synthetic oligonucleotide
  Sense strand starting at position 933 of SEQ ID NO: 1882137
gugugauuuguuugucuaa

SEQ ID NO: 2098027 - RNA, 19 nt, Artificial Sequence
  Description of Artificial Sequence: Synthetic oligonucleotide
  Antisense strand to SEQ ID NO: 2098026
uuagacaaacaaaucacac

SEQ ID NO: 2098028 - RNA, 19 nt, Artificial Sequence
  Description of Artificial Sequence: Synthetic oligonucleotide
  Sense strand starting at position 934 of SEQ ID NO: 1882137
ugugauuuguuugucuaac

SEQ ID NO: 2098029 - RNA, 19 nt, Artificial Sequence
  Description of Artificial Sequence: Synthetic oligonucleotide
  Antisense strand to SEQ ID NO: 2098028
guuagacaaacaaaucaca

SEQ ID NO: 2098030 - RNA, 19 nt, Artificial Sequence
  Description of Artificial Sequence: Synthetic oligonucleotide
  Sense strand starting at position 935 of SEQ ID NO: 1882137
gugauuuguuugucuaaca

SEQ ID NO: 2098031 - RNA, 19 nt, Artificial Sequence
  Description of Artificial Sequence: Synthetic oligonucleotide
  Antisense strand to SEQ ID NO: 2098030
uguuagacaaacaaaucac

SEQ ID NO: 2098032 - RNA, 19 nt, Artificial Sequence
  Description of Artificial Sequence: Synthetic oligonucleotide
  Sense strand starting at position 984 of SEQ ID NO: 1882137
ucaggauaacuugguuauc

SEQ ID NO: 2098033 - RNA, 19 nt, Artificial Sequence
  Description of Artificial Sequence: Synthetic oligonucleotide
  Antisense strand to SEQ ID NO: 2098032
gauaaccaaguuauccuga

SEQ ID NO: 2098034 - RNA, 19 nt, Artificial Sequence
  Description of Artificial Sequence: Synthetic oligonucleotide
  Sense strand starting at position 1074 of SEQ ID NO: 1882137
cccauauucccuggaguga

SEQ ID NO: 2098035 - RNA, 19 nt, Artificial Sequence
  Description of Artificial Sequence: Synthetic oligonucleotide
  Antisense strand to SEQ ID NO: 2098034
ucacuccagggaauauggg

SEQ ID NO: 2098036 - RNA, 19 nt, Artificial Sequence
  Description of Artificial Sequence: Synthetic oligonucleotide
  Sense strand starting at position 1524 of SEQ ID NO: 1882137
aggauuaauugguuaaugu

SEQ ID NO: 2098037 - RNA, 19 nt, Artificial Sequence
  Description of Artificial Sequence: Synthetic oligonucleotide
  Antisense strand to SEQ ID NO: 2098036
acauuaaccaauuaauccu

SEQ ID NO: 2098038 - RNA, 19 nt, Artificial Sequence
  Description of Artificial Sequence: Synthetic oligonucleotide
  Sense strand starting at position 1525 of SEQ ID NO: 1882137
ggauuaauugguuaauguu

SEQ ID NO: 2098039 - RNA, 19 nt, Artificial Sequence
  Description of Artificial Sequence: Synthetic oligonucleotide
  Antisense strand to SEQ ID NO: 2098038
aacauuaaccaauuaaucc

SEQ ID NO: 2098040 - RNA, 19 nt, Artificial Sequence
  Description of Artificial Sequence: Synthetic oligonucleotide
  Sense strand starting at position 1684 of SEQ ID NO: 1882137
gcaggagugauucgggaaa

SEQ ID NO: 2098041 - RNA, 19 nt, Artificial Sequence
  Description of Artificial Sequence: Synthetic oligonucleotide
  Antisense strand to SEQ ID NO: 2098040
uuucccgaaucacuccugc

SEQ ID NO: 2098042 - RNA, 19 nt, Artificial Sequence
  Description of Artificial Sequence: Synthetic oligonucleotide
  Sense strand starting at position 1687 of SEQ ID NO: 1882137
ggagugauucgggaaaguu

SEQ ID NO: 2098043 - RNA, 19 nt, Artificial Sequence
  Description of Artificial Sequence: Synthetic oligonucleotide
  Antisense strand to SEQ ID NO: 2098042
aacuuucccgaaucacucc

SEQ ID NO: 2098044 - RNA, 19 nt, Artificial Sequence
  Description of Artificial Sequence: Synthetic oligonucleotide
  Sense strand starting at position 1695 of SEQ ID NO: 1882137
ucgggaaaguuaccucaaa

SEQ ID NO: 2098045 - RNA, 19 nt, Artificial Sequence
  Description of Artificial Sequence: Synthetic oligonucleotide
  Antisense strand to SEQ ID NO: 2098044
uuugagguaacuuucccga

SEQ ID NO: 2098046 - RNA, 19 nt, Artificial Sequence
  Description of Artificial Sequence: Synthetic oligonucleotide
  Sense strand starting at position 1696 of SEQ ID NO: 1882137
cgggaaaguuaccucaaag

SEQ ID NO: 2098047 - RNA, 19 nt, Artificial Sequence
  Description of Artificial Sequence: Synthetic oligonucleotide
  Antisense strand to SEQ ID NO: 2098046
cuuugagguaacuuucccg

SEQ ID NO: 2098048 - RNA, 19 nt, Artificial Sequence
  Description of Artificial Sequence: Synthetic oligonucleotide
  Sense strand starting at position 2007 of SEQ ID NO: 1882137
ggccaagaugcucauuaaa

SEQ ID NO: 2098049 - RNA, 19 nt, Artificial Sequence
  Description of Artificial Sequence: Synthetic oligonucleotide
  Antisense strand to SEQ ID NO: 2098048
uuuaaugagcaucuuggcc

SEQ ID NO: 2098050 - RNA, 19 nt, Artificial Sequence
  Description of Artificial Sequence: Synthetic oligonucleotide
  Sense strand starting at position 3417 of SEQ ID NO: 1882137
agacuuuaacaauggcaga

SEQ ID NO: 2098051 - RNA, 19 nt, Artificial Sequence
  Description of Artificial Sequence: Synthetic oligonucleotide
  Antisense strand to SEQ ID NO: 2098050
ucugccauuguuaaagucu

SEQ ID NO: 2098052 - RNA, 19 nt, Artificial Sequence
  Description of Artificial Sequence: Synthetic oligonucleotide
  Sense strand starting at position 3422 of SEQ ID NO: 1882137
uuaacaauggcagaaguuu

SEQ ID NO: 2098053 - RNA, 19 nt, Artificial Sequence
  Description of Artificial Sequence: Synthetic oligonucleotide
  Antisense strand to SEQ ID NO: 2098052
aaacuucugccauuguuaa

SEQ ID NO: 2098054 - RNA, 19 nt, Artificial Sequence
  Description of Artificial Sequence: Synthetic oligonucleotide
  Sense strand starting at position 3457 of SEQ ID NO: 1882137
gugaaaugcccgccagugu

SEQ ID NO: 2098055 - RNA, 19 nt, Artificial Sequence
  Description of Artificial Sequence: Synthetic oligonucleotide
  Antisense strand to SEQ ID NO: 2098054
acacuggcgggcauuucac

SEQ ID NO: 2098056 - RNA, 19 nt, Artificial Sequence
  Description of Artificial Sequence: Synthetic oligonucleotide
  Sense strand starting at position 3551 of SEQ ID NO: 1882137
augaaauaacgugaccguu

SEQ ID NO: 2098057 - RNA, 19 nt, Artificial Sequence
  Description of Artificial Sequence: Synthetic oligonucleotide
  Antisense strand to SEQ ID NO: 2098056
aacggucacguuauuucau

SEQ ID NO: 2098058 - RNA, 19 nt, Artificial Sequence
  Description of Artificial Sequence: Synthetic oligonucleotide
  Sense strand starting at position 3655 of SEQ ID NO: 1882137
cagaaagcccauugaaagu

SEQ ID NO: 2098059 - RNA, 19 nt, Artificial Sequence
  Description of Artificial Sequence: Synthetic oligonucleotide
  Antisense strand to SEQ ID NO: 2098058
acuuucaaugggcuuucug

SEQ ID NO: 2098060 - RNA, 19 nt, Artificial Sequence
  Description of Artificial Sequence: Synthetic oligonucleotide
  Sense strand starting at position 3686 of SEQ ID NO: 1882137
cgugaaauccauuaacugg

SEQ ID NO: 2098061 - RNA, 19 nt, Artificial Sequence
  Description of Artificial Sequence: Synthetic oligonucleotide
  Antisense strand to SEQ ID NO: 2098060
ccaguuaauggauuucacg

SEQ ID NO: 2098062 - RNA, 19 nt, Artificial Sequence
  Description of Artificial Sequence: Synthetic oligonucleotide
  Sense strand starting at position 3702 of SEQ ID NO: 1882137
uggaauaauugaguuucuu

SEQ ID NO: 2098063 - RNA, 19 nt, Artificial Sequence
  Description of Artificial Sequence: Synthetic oligonucleotide
  Antisense strand to SEQ ID NO: 2098062
aagaaacucaauuauucca

SEQ ID NO: 2098064 - RNA, 19 nt, Artificial Sequence
  Description of Artificial Sequence: Synthetic oligonucleotide
  Sense strand starting at position 3748 of SEQ ID NO: 1882137
auaaguuggagcuggaauu

SEQ ID NO: 2098065 - RNA, 19 nt, Artificial Sequence
  Description of Artificial Sequence: Synthetic oligonucleotide
  Antisense strand to SEQ ID NO: 2098064
aauuccagcuccaacuuau

SEQ ID NO: 2098066 - RNA, 19 nt, Artificial Sequence
  Description of Artificial Sequence: Synthetic oligonucleotide
  Sense strand starting at position 3859 of SEQ ID NO: 1882137
aggucucuggccuauaaac

SEQ ID NO: 2098067 - RNA, 19 nt, Artificial Sequence
  Description of Artificial Sequence: Synthetic oligonucleotide
  Antisense strand to SEQ ID NO: 2098066
guuuauaggccagagaccu

SEQ ID NO: 2098068 - RNA, 19 nt, Artificial Sequence
  Description of Artificial Sequence: Synthetic oligonucleotide
  Sense strand starting at position 3861 of SEQ ID NO: 1882137
gucucuggccuauaaacau

SEQ ID NO: 2098069 - RNA, 19 nt, Artificial Sequence
  Description of Artificial Sequence: Synthetic oligonucleotide
  Antisense strand to SEQ ID NO: 2098068
auguuuauaggccagagac

SEQ ID NO: 2098070 - RNA, 19 nt, Artificial Sequence
  Description of Artificial Sequence: Synthetic oligonucleotide
  Sense strand starting at position 3896 of SEQ ID NO: 1882137
auguuaaaguccuuccaga

SEQ ID NO: 2098071 - RNA, 19 nt, Artificial Sequence
  Description of Artificial Sequence: Synthetic oligonucleotide
  Antisense strand to SEQ ID NO: 2098070
ucuggaaggacuuuaacau

SEQ ID NO: 2098072 - RNA, 19 nt, Artificial Sequence
  Description of Artificial Sequence: Synthetic oligonucleotide
  Sense strand starting at position 3970 of SEQ ID NO: 1882137
cauugaugccaacaugguu

SEQ ID NO: 2098073 - RNA, 19 nt, Artificial Sequence
  Description of Artificial Sequence: Synthetic oligonucleotide
  Antisense strand to SEQ ID NO: 2098072
aaccauguuggcaucaaug

SEQ ID NO: 2098074 - RNA, 19 nt, Artificial Sequence
  Description of Artificial Sequence: Synthetic oligonucleotide
  Sense strand starting at position 180 of SEQ ID NO: 1882138
aggaaaucacagugugauc

SEQ ID NO: 2098075 - RNA, 19 nt, Artificial Sequence
  Description of Artificial Sequence: Synthetic oligonucleotide
  Antisense strand to SEQ ID NO: 2098074
gaucacacugugauuuccu

SEQ ID NO: 2098076 - RNA, 19 nt, Artificial Sequence
  Description of Artificial Sequence: Synthetic oligonucleotide
  Sense strand starting at position 185 of SEQ ID NO: 1882138
aucacagugugaucaccau

SEQ ID NO: 2098077 - RNA, 19 nt, Artificial Sequence
  Description of Artificial Sequence: Synthetic oligonucleotide
  Antisense strand to SEQ ID NO: 2098076
auggugaucacacugugau

SEQ ID NO: 2098078 - RNA, 19 nt, Artificial Sequence
  Description of Artificial Sequence: Synthetic oligonucleotide
  Sense strand starting at position 448 of SEQ ID NO: 1882138
ccuaaagagcuguaucauu

SEQ ID NO: 2098079 - RNA, 19 nt, Artificial Sequence
  Description of Artificial Sequence: Synthetic oligonucleotide
  Antisense strand to SEQ ID NO: 2098078
aaugauacagcucuuuagg

SEQ ID NO: 2098080 - RNA, 19 nt, Artificial Sequence
  Description of Artificial Sequence: Synthetic oligonucleotide
  Sense strand starting at position 453 of SEQ ID NO: 1882138
agagcuguaucauuacuac

SEQ ID NO: 2098081 - RNA, 19 nt, Artificial Sequence
  Description of Artificial Sequence: Synthetic oligonucleotide
  Antisense strand to SEQ ID NO: 2098080
guaguaaugauacagcucu

SEQ ID NO: 2098082 - RNA, 19 nt, Artificial Sequence
  Description of Artificial Sequence: Synthetic oligonucleotide
  Sense strand starting at position 459 of SEQ ID NO: 1882138
guaucauuacuacguaaua

SEQ ID NO: 2098083 - RNA, 19 nt, Artificial Sequence
  Description of Artificial Sequence: Synthetic oligonucleotide
  Antisense strand to SEQ ID NO: 2098082
uauuacguaguaaugauac

SEQ ID NO: 2098084 - RNA, 19 nt, Artificial Sequence
  Description of Artificial Sequence: Synthetic oligonucleotide
  Sense strand starting at position 485 of SEQ ID NO: 1882138
ucgcaucauauuggagaaa

SEQ ID NO: 2098085 - RNA, 19 nt, Artificial Sequence
  Description of Artificial Sequence: Synthetic oligonucleotide
  Antisense strand to SEQ ID NO: 2098084
uuucuccaauaugaugcga

SEQ ID NO: 2098086 - RNA, 19 nt, Artificial Sequence
  Description of Artificial Sequence: Synthetic oligonucleotide
  Sense strand starting at position 708 of SEQ ID NO: 1882138
ugccaagcacaguauuaga

SEQ ID NO: 2098087 - RNA, 19 nt, Artificial Sequence
  Description of Artificial Sequence: Synthetic oligonucleotide
  Antisense strand to SEQ ID NO: 2098086
ucuaauacugugcuuggca

SEQ ID NO: 2098088 - RNA, 19 nt, Artificial Sequence
  Description of Artificial Sequence: Synthetic oligonucleotide
  Sense strand starting at position 768 of SEQ ID NO: 1882138
gacagauuaucugccagua

SEQ ID NO: 2098089 - RNA, 19 nt, Artificial Sequence
  Description of Artificial Sequence: Synthetic oligonucleotide
  Antisense strand to SEQ ID NO: 2098088
uacuggcagauaaucuguc

SEQ ID NO: 2098090 - RNA, 19 nt, Artificial Sequence
  Description of Artificial Sequence: Synthetic oligonucleotide
  Sense strand starting at position 883 of SEQ ID NO: 1882138
ccaggaugcucccuagagu

SEQ ID NO: 2098091 - RNA, 19 nt, Artificial Sequence
  Description of Artificial Sequence: Synthetic oligonucleotide
  Antisense strand to SEQ ID NO: 2098090
acucuagggagcauccugg

SEQ ID NO: 2098092 - RNA, 19 nt, Artificial Sequence
  Description of Artificial Sequence: Synthetic oligonucleotide
  Sense strand starting at position 938 of SEQ ID NO: 1882138
uaccgaaacgcugauaauc

SEQ ID NO: 2098093 - RNA, 19 nt, Artificial Sequence
  Description of Artificial Sequence: Synthetic oligonucleotide
  Antisense strand to SEQ ID NO: 2098092
gauuaucagcguuucggua

SEQ ID NO: 2098094 - RNA, 19 nt, Artificial Sequence
  Description of Artificial Sequence: Synthetic oligonucleotide
  Sense strand starting at position 947 of SEQ ID NO: 1882138
gcugauaauccacauguaa

SEQ ID NO: 2098095 - RNA, 19 nt, Artificial Sequence
  Description of Artificial Sequence: Synthetic oligonucleotide
  Antisense strand to SEQ ID NO: 2098094
uuacauguggauuaucagc

SEQ ID NO: 2098096 - RNA, 19 nt, Artificial Sequence
  Description of Artificial Sequence: Synthetic oligonucleotide
  Sense strand starting at position 1048 of SEQ ID NO: 1882138
agggcuaagacguacuaau

SEQ ID NO: 2098097 - RNA, 19 nt, Artificial Sequence
  Description of Artificial Sequence: Synthetic oligonucleotide
  Antisense strand to SEQ ID NO: 2098096
auuaguacgucuuagcccu

SEQ ID NO: 2098098 - RNA, 19 nt, Artificial Sequence
  Description of Artificial Sequence: Synthetic oligonucleotide
  Sense strand starting at position 1116 of SEQ ID NO: 1882138
uagguuuaaauaggcgaga

SEQ ID NO: 2098099 - RNA, 19 nt, Artificial Sequence
  Description of Artificial Sequence: Synthetic oligonucleotide
  Antisense strand to SEQ ID NO: 2098098
ucucgccuauuuaaaccua

SEQ ID NO: 2098100 - RNA, 19 nt, Artificial Sequence
  Description of Artificial Sequence: Synthetic oligonucleotide
  Sense strand starting at position 1119 of SEQ ID NO: 1882138
guuuaaauaggcgagaguu

SEQ ID NO: 2098101 - RNA, 19 nt, Artificial Sequence
  Description of Artificial Sequence: Synthetic oligonucleotide
  Antisense strand to SEQ ID NO: 2098100
aacucucgccuauuuaaac

SEQ ID NO: 2098102 - RNA, 19 nt, Artificial Sequence
  Description of Artificial Sequence: Synthetic oligonucleotide
  Sense strand starting at position 1121 of SEQ ID NO: 1882138
uuaaauaggcgagaguuaa

SEQ ID NO: 2098103 - RNA, 19 nt, Artificial Sequence
  Description of Artificial Sequence: Synthetic oligonucleotide
  Antisense strand to SEQ ID NO: 2098102
uuaacucucgccuauuuaa

SEQ ID NO: 2098104 - RNA, 19 nt, Artificial Sequence
  Description of Artificial Sequence: Synthetic oligonucleotide
  Sense strand starting at position 1154 of SEQ ID NO: 1882138
caaguuuauuugcaaagag

SEQ ID NO: 2098105 - RNA, 19 nt, Artificial Sequence
  Description of Artificial Sequence: Synthetic oligonucleotide
  Antisense strand to SEQ ID NO: 2098104
cucuuugcaaauaaacuug

SEQ ID NO: 2098106 - RNA, 19 nt, Artificial Sequence
  Description of Artificial Sequence: Synthetic oligonucleotide
  Sense strand starting at position 1220 of SEQ ID NO: 1882138
ccaggguugggucgggaaa

SEQ ID NO: 2098107 - RNA, 19 nt, Artificial Sequence
  Description of Artificial Sequence: Synthetic oligonucleotide
  Antisense strand to SEQ ID NO: 2098106
uuucccgacccaacccugg

SEQ ID NO: 2098108 - RNA, 19 nt, Artificial Sequence
  Description of Artificial Sequence: Synthetic oligonucleotide
  Sense strand starting at position 1221 of SEQ ID NO: 1882138
caggguugggucgggaaau

SEQ ID NO: 2098109 - RNA, 19 nt, Artificial Sequence
  Description of Artificial Sequence: Synthetic oligonucleotide
  Antisense strand to SEQ ID NO: 2098108
auuucccgacccaacccug

SEQ ID NO: 2098110 - RNA, 19 nt, Artificial Sequence
  Description of Artificial Sequence: Synthetic oligonucleotide
  Sense strand starting at position 1293 of SEQ ID NO: 1882138
gaagucaggcuucgagaca

SEQ ID NO: 2098111 - RNA, 19 nt, Artificial Sequence
  Description of Artificial Sequence: Synthetic oligonucleotide
  Antisense strand to SEQ ID NO: 2098110
ugucucgaagccugacuuc

SEQ ID NO: 2098112 - RNA, 19 nt, Artificial Sequence
  Description of Artificial Sequence: Synthetic oligonucleotide
  Sense strand starting at position 1936 of SEQ ID NO: 1882138
cucacacuugaacgaagau

SEQ ID NO: 2098113 - RNA, 19 nt, Artificial Sequence
  Description of Artificial Sequence: Synthetic oligonucleotide
  Antisense strand to SEQ ID NO: 2098112
aucuucguucaagugugag

SEQ ID NO: 2098114 - RNA, 19 nt, Artificial Sequence
  Description of Artificial Sequence: Synthetic oligonucleotide
  Sense strand starting at position 2270 of SEQ ID NO: 1882138
cgccuucggauccagagaa

SEQ ID NO: 2098115 - RNA, 19 nt, Artificial Sequence
  Description of Artificial Sequence: Synthetic oligonucleotide
  Antisense strand to SEQ ID NO: 2098114
uucucuggauccgaaggcg

SEQ ID NO: 2098116 - RNA, 19 nt, Artificial Sequence
  Description of Artificial Sequence: Synthetic oligonucleotide
  Sense strand starting at position 2411 of SEQ ID NO: 1882138
acgagauccuuguuccuga

SEQ ID NO: 2098117 - RNA, 19 nt, Artificial Sequence
  Description of Artificial Sequence: Synthetic oligonucleotide
  Antisense strand to SEQ ID NO: 2098116
ucaggaacaaggaucucgu

SEQ ID NO: 2098118 - RNA, 19 nt, Artificial Sequence
  Description of Artificial Sequence: Synthetic oligonucleotide
  Sense strand starting at position 2412 of SEQ ID NO: 1882138
cgagauccuuguuccugaa

SEQ ID NO: 2098119 - RNA, 19 nt, Artificial Sequence
  Description of Artificial Sequence: Synthetic oligonucleotide
  Antisense strand to SEQ ID NO: 2098118
uucaggaacaaggaucucg

SEQ ID NO: 2098120 - RNA, 19 nt, Artificial Sequence
  Description of Artificial Sequence: Synthetic oligonucleotide
  Sense strand starting at position 2414 of SEQ ID NO: 1882138
agauccuuguuccugaaau

SEQ ID NO: 2098121 - RNA, 19 nt, Artificial Sequence
  Description of Artificial Sequence: Synthetic oligonucleotide
  Antisense strand to SEQ ID NO: 2098120
auuucaggaacaaggaucu

SEQ ID NO: 2098122 - RNA, 19 nt, Artificial Sequence
  Description of Artificial Sequence: Synthetic oligonucleotide
  Sense strand starting at position 2533 of SEQ ID NO: 1882138
auggcacuuggugagagau

SEQ ID NO: 2098123 - RNA, 19 nt, Artificial Sequence
  Description of Artificial Sequence: Synthetic oligonucleotide
  Antisense strand to SEQ ID NO: 2098122
aucucucaccaagugccau

SEQ ID NO: 2098124 - RNA, 19 nt, Artificial Sequence
  Description of Artificial Sequence: Synthetic oligonucleotide
  Sense strand starting at position 2571 of SEQ ID NO: 1882138
ugccuuccugaauauugau

SEQ ID NO: 2098125 - RNA, 19 nt, Artificial Sequence
  Description of Artificial Sequence: Synthetic oligonucleotide
  Antisense strand to SEQ ID NO: 2098124
aucaauauucaggaaggca

SEQ ID NO: 2098126 - RNA, 19 nt, Artificial Sequence
  Description of Artificial Sequence: Synthetic oligonucleotide
  Sense strand starting at position 2674 of SEQ ID NO: 1882138
uugcuuguuccauacagaa

SEQ ID NO: 2098127 - RNA, 19 nt, Artificial Sequence
  Description of Artificial Sequence: Synthetic oligonucleotide
  Antisense strand to SEQ ID NO: 2098126
uucuguauggaacaagcaa

SEQ ID NO: 2098128 - RNA, 19 nt, Artificial Sequence
  Description of Artificial Sequence: Synthetic oligonucleotide
  Sense strand starting at position 3061 of SEQ ID NO: 1882138
auauuucuguuagugcgau

SEQ ID NO: 2098129 - RNA, 19 nt, Artificial Sequence
  Description of Artificial Sequence: Synthetic oligonucleotide
  Antisense strand to SEQ ID NO: 2098128
aucgcacuaacagaaauau

SEQ ID NO: 2098130 - RNA, 19 nt, Artificial Sequence
  Description of Artificial Sequence: Synthetic oligonucleotide
  Sense strand starting at position 3104 of SEQ ID NO: 1882138
ucaaauaagcauuaccgua

SEQ ID NO: 2098131 - RNA, 19 nt, Artificial Sequence
  Description of Artificial Sequence: Synthetic oligonucleotide
  Antisense strand to SEQ ID NO: 2098130
uacgguaaugcuuauuuga

SEQ ID NO: 2098132 - RNA, 19 nt, Artificial Sequence
  Description of Artificial Sequence: Synthetic oligonucleotide
  Sense strand starting at position 3212 of SEQ ID NO: 1882138
cuggaauccacucgucuga

SEQ ID NO: 2098133 - RNA, 19 nt, Artificial Sequence
  Description of Artificial Sequence: Synthetic oligonucleotide
  Antisense strand to SEQ ID NO: 2098132
ucagacgaguggauuccag

SEQ ID NO: 2098134 - RNA, 19 nt, Artificial Sequence
  Description of Artificial Sequence: Synthetic oligonucleotide
  Sense strand starting at position 3214 of SEQ ID NO: 1882138
ggaauccacucgucugauc

SEQ ID NO: 2098135 - RNA, 19 nt, Artificial Sequence
  Description of Artificial Sequence: Synthetic oligonucleotide
  Antisense strand to SEQ ID NO: 2098134
gaucagacgaguggauucc

SEQ ID NO: 2098136 - RNA, 19 nt, Artificial Sequence
  Description of Artificial Sequence: Synthetic oligonucleotide
  Sense strand starting at position 3264 of SEQ ID NO: 1882138
agggacucguuuccagaca

SEQ ID NO: 2098137 - RNA, 19 nt, Artificial Sequence
  Description of Artificial Sequence: Synthetic oligonucleotide
  Antisense strand to SEQ ID NO: 2098136
ugucuggaaacgagucccu

SEQ ID NO: 2098138 - RNA, 19 nt, Artificial Sequence
  Description of Artificial Sequence: Synthetic oligonucleotide
  Sense strand starting at position 3277 of SEQ ID NO: 1882138
cagacagagcucuggcaaa

SEQ ID NO: 2098139 - RNA, 19 nt, Artificial Sequence
  Description of Artificial Sequence: Synthetic oligonucleotide
  Antisense strand to SEQ ID NO: 2098138
uuugccagagcucugucug

SEQ ID NO: 2098140 - RNA, 19 nt, Artificial Sequence
  Description of Artificial Sequence: Synthetic oligonucleotide
  Sense strand starting at position 3308 of SEQ ID NO: 1882138
gcagcuuaggaguagaaga

SEQ ID NO: 2098141 - RNA, 19 nt, Artificial Sequence
  Description of Artificial Sequence: Synthetic oligonucleotide
  Antisense strand to SEQ ID NO: 2098140
ucuucuacuccuaagcugc

SEQ ID NO: 2098142 - RNA, 19 nt, Artificial Sequence
  Description of Artificial Sequence: Synthetic oligonucleotide
  Sense strand starting at position 3388 of SEQ ID NO: 1882138
gaugcaggcguuuagagaa

SEQ ID NO: 2098143 - RNA, 19 nt, Artificial Sequence
  Description of Artificial Sequence: Synthetic oligonucleotide
  Antisense strand to SEQ ID NO: 2098142
uucucuaaacgccugcauc

SEQ ID NO: 2098144 - RNA, 19 nt, Artificial Sequence
  Description of Artificial Sequence: Synthetic oligonucleotide
  Sense strand starting at position 3528 of SEQ ID NO: 1882138
aucugugacucaucagaag

SEQ ID NO: 2098145 - RNA, 19 nt, Artificial Sequence
  Description of Artificial Sequence: Synthetic oligonucleotide
  Antisense strand to SEQ ID NO: 2098144
cuucugaugagucacagau

SEQ ID NO: 2098146 - RNA, 19 nt, Artificial Sequence
  Description of Artificial Sequence: Synthetic oligonucleotide
  Sense strand starting at position 3702 of SEQ ID NO: 1882138
aggcgcgaaaucuacaaau

SEQ ID NO: 2098147 - RNA, 19 nt, Artificial Sequence
  Description of Artificial Sequence: Synthetic oligonucleotide
  Antisense strand to SEQ ID NO: 2098146
auuuguagauuucgcgccu

SEQ ID NO: 2098148 - RNA, 19 nt, Artificial Sequence
  Description of Artificial Sequence: Synthetic oligonucleotide
  Sense strand starting at position 3759 of SEQ ID NO: 1882138
uagggaaauugacucgacu

SEQ ID NO: 2098149 - RNA, 19 nt, Artificial Sequence
  Description of Artificial Sequence: Synthetic oligonucleotide
  Antisense strand to SEQ ID NO: 2098148
agucgagucaauuucccua

SEQ ID NO: 2098150 - RNA, 19 nt, Artificial Sequence
  Description of Artificial Sequence: Synthetic oligonucleotide
  Sense strand starting at position 3899 of SEQ ID NO: 1882138
cccaaauuaugacuguaga

SEQ ID NO: 2098151 - RNA, 19 nt, Artificial Sequence
  Description of Artificial Sequence: Synthetic oligonucleotide
  Antisense strand to SEQ ID NO: 2098150
ucuacagucauaauuuggg

SEQ ID NO: 2098152 - RNA, 19 nt, Artificial Sequence
  Description of Artificial Sequence: Synthetic oligonucleotide
  Sense strand starting at position 3962 of SEQ ID NO: 1882138
caagcugguuauucugaga

SEQ ID NO: 2098153 - RNA, 19 nt, Artificial Sequence
  Description of Artificial Sequence: Synthetic oligonucleotide
  Antisense strand to SEQ ID NO: 2098152
ucucagaauaaccagcuug

SEQ ID NO: 2098154 - RNA, 19 nt, Artificial Sequence
  Description of Artificial Sequence: Synthetic oligonucleotide
  Sense strand starting at position 6 of SEQ ID NO: 1882139
guaugaaaucacuguauga

SEQ ID NO: 2098155 - RNA, 19 nt, Artificial Sequence
  Description of Artificial Sequence: Synthetic oligonucleotide
  Antisense strand to SEQ ID NO: 2098154
ucauacagugauuucauac

SEQ ID NO: 2098156 - RNA, 19 nt, Artificial Sequence
  Description of Artificial Sequence: Synthetic oligonucleotide
  Sense strand starting at position 10 of SEQ ID NO: 1882139
gaaaucacuguaugagauc

SEQ ID NO: 2098157 - RNA, 19 nt, Artificial Sequence
  Description of Artificial Sequence: Synthetic oligonucleotide
  Antisense strand to SEQ ID NO: 2098156
gaucucauacagugauuuc

SEQ ID NO: 2098158 - RNA, 19 nt, Artificial Sequence
  Description of Artificial Sequence: Synthetic oligonucleotide
  Sense strand starting at position 70 of SEQ ID NO: 1882139
uuguccaaacugugaucau

SEQ ID NO: 2098159 - RNA, 19 nt, Artificial Sequence
  Description of Artificial Sequence: Synthetic oligonucleotide
  Antisense strand to SEQ ID NO: 2098158
augaucacaguuuggacaa

SEQ ID NO: 2098160 - RNA, 19 nt, Artificial Sequence
  Description of Artificial Sequence: Synthetic oligonucleotide
  Sense strand starting at position 128 of SEQ ID NO: 1882139
ccaucaauguagucauuac

SEQ ID NO: 2098161 - RNA, 19 nt, Artificial Sequence
  Description of Artificial Sequence: Synthetic oligonucleotide
  Antisense strand to SEQ ID NO: 2098160
guaaugacuacauugaugg

SEQ ID NO: 2098162 - RNA, 19 nt, Artificial Sequence
  Description of Artificial Sequence: Synthetic oligonucleotide
  Sense strand starting at position 166 of SEQ ID NO: 1882139
ucaaguaaucccggcucau

SEQ ID NO: 2098163 - RNA, 19 nt, Artificial Sequence
  Description of Artificial Sequence: Synthetic oligonucleotide
  Antisense strand to SEQ ID NO: 2098162
augagccgggauuacuuga

SEQ ID NO: 2098164 - RNA, 19 nt, Artificial Sequence
  Description of Artificial Sequence: Synthetic oligonucleotide
  Sense strand starting at position 240 of SEQ ID NO: 1882139
gacauugaacgcugaagaa

SEQ ID NO: 2098165 - RNA, 19 nt, Artificial Sequence
  Description of Artificial Sequence: Synthetic oligonucleotide
  Antisense strand to SEQ ID NO: 2098164
uucuucagcguucaauguc

SEQ ID NO: 2098166 - RNA, 19 nt, Artificial Sequence
  Description of Artificial Sequence: Synthetic oligonucleotide
  Sense strand starting at position 262 of SEQ ID NO: 1882139
agucuuaugugaccauaaa

SEQ ID NO: 2098167 - RNA, 19 nt, Artificial Sequence
  Description of Artificial Sequence: Synthetic oligonucleotide
  Antisense strand to SEQ ID NO: 2098166
uuuauggucacauaagacu

SEQ ID NO: 2098168 - RNA, 19 nt, Artificial Sequence
  Description of Artificial Sequence: Synthetic oligonucleotide
  Sense strand starting at position 331 of SEQ ID NO: 1882139
aguguaacugcuuauggca

SEQ ID NO: 2098169 - RNA, 19 nt, Artificial Sequence
  Description of Artificial Sequence: Synthetic oligonucleotide
  Antisense strand to SEQ ID NO: 2098168
ugccauaagcaguuacacu

SEQ ID NO: 2098170 - RNA, 19 nt, Artificial Sequence
  Description of Artificial Sequence: Synthetic oligonucleotide
  Sense strand starting at position 368 of SEQ ID NO: 1882139
cuggucauccucuacagaa

SEQ ID NO: 2098171 - RNA, 19 nt, Artificial Sequence
  Description of Artificial Sequence: Synthetic oligonucleotide
  Antisense strand to SEQ ID NO: 2098170
uucuguagaggaugaccag

SEQ ID NO: 2098172 - RNA, 19 nt, Artificial Sequence
  Description of Artificial Sequence: Synthetic oligonucleotide
  Sense strand starting at position 488 of SEQ ID NO: 1882139
gaguuaugccauuauuagg

SEQ ID NO: 2098173 - RNA, 19 nt, Artificial Sequence
  Description of Artificial Sequence: Synthetic oligonucleotide
  Antisense strand to SEQ ID NO: 2098172
ccuaauaauggcauaacuc

SEQ ID NO: 2098174 - RNA, 19 nt, Artificial Sequence
  Description of Artificial Sequence: Synthetic oligonucleotide
  Sense strand starting at position 529 of SEQ ID NO: 1882139
ucucuaugauccuuuguau

SEQ ID NO: 2098175 - RNA, 19 nt, Artificial Sequence
  Description of Artificial Sequence: Synthetic oligonucleotide
  Antisense strand to SEQ ID NO: 2098174
auacaaaggaucauagaga

SEQ ID NO: 2098176 - RNA, 19 nt, Artificial Sequence
  Description of Artificial Sequence: Synthetic oligonucleotide
  Sense strand starting at position 532 of SEQ ID NO: 1882139
cuaugauccuuuguauauu

SEQ ID NO: 2098177 - RNA, 19 nt, Artificial Sequence
  Description of Artificial Sequence: Synthetic oligonucleotide
  Antisense strand to SEQ ID NO: 2098176
aauauacaaaggaucauag

SEQ ID NO: 2098178 - RNA, 19 nt, Artificial Sequence
  Description of Artificial Sequence: Synthetic oligonucleotide
  Sense strand starting at position 645 of SEQ ID NO: 1882139
cccuaauaggcguacauaa

SEQ ID NO: 2098179 - RNA, 19 nt, Artificial Sequence
  Description of Artificial Sequence: Synthetic oligonucleotide
  Antisense strand to SEQ ID NO: 2098178
uuauguacgccuauuaggg

SEQ ID NO: 2098180 - RNA, 19 nt, Artificial Sequence
  Description of Artificial Sequence: Synthetic oligonucleotide
  Sense strand starting at position 695 of SEQ ID NO: 1882139
gaugguaggugcucuccaa

SEQ ID NO: 2098181 - RNA, 19 nt, Artificial Sequence
  Description of Artificial Sequence: Synthetic oligonucleotide
  Antisense strand to SEQ ID NO: 2098180
uuggagagcaccuaccauc

SEQ ID NO: 2098182 - RNA, 19 nt, Artificial Sequence
  Description of Artificial Sequence: Synthetic oligonucleotide
  Sense strand starting at position 710 of SEQ ID NO: 1882139
ccaaccucucucgagagau

SEQ ID NO: 2098183 - RNA, 19 nt, Artificial Sequence
  Description of Artificial Sequence: Synthetic oligonucleotide
  Antisense strand to SEQ ID NO: 2098182
aucucucgagagagguugg

SEQ ID NO: 2098184 - RNA, 19 nt, Artificial Sequence
  Description of Artificial Sequence: Synthetic oligonucleotide
  Sense strand starting at position 720 of SEQ ID NO: 1882139
ucgagagauccucacugca

SEQ ID NO: 2098185 - RNA, 19 nt, Artificial Sequence
  Description of Artificial Sequence: Synthetic oligonucleotide
  Antisense strand to SEQ ID NO: 2098184
ugcagugaggaucucucga

SEQ ID NO: 2098186 - RNA, 19 nt, Artificial Sequence
  Description of Artificial Sequence: Synthetic oligonucleotide
  Sense strand starting at position 722 of SEQ ID NO: 1882139
gagagauccucacugcaca

SEQ ID NO: 2098187 - RNA, 19 nt, Artificial Sequence
  Description of Artificial Sequence: Synthetic oligonucleotide
  Antisense strand to SEQ ID NO: 2098186
ugugcagugaggaucucuc

SEQ ID NO: 2098188 - RNA, 19 nt, Artificial Sequence
  Description of Artificial Sequence: Synthetic oligonucleotide
  Sense strand starting at position 723 of SEQ ID NO: 1882139
agagauccucacugcacau

SEQ ID NO: 2098189 - RNA, 19 nt, Artificial Sequence
  Description of Artificial Sequence: Synthetic oligonucleotide
  Antisense strand to SEQ ID NO: 2098188
augugcagugaggaucucu

SEQ ID NO: 2098190 - RNA, 19 nt, Artificial Sequence
  Description of Artificial Sequence: Synthetic oligonucleotide
  Sense strand starting at position 779 of SEQ ID NO: 1882139
gagggauggugacuguuga

SEQ ID NO: 2098191 - RNA, 19 nt, Artificial Sequence
  Description of Artificial Sequence: Synthetic oligonucleotide
  Antisense strand to SEQ ID NO: 2098190
ucaacagucaccaucccuc

SEQ ID NO: 2098192 - RNA, 19 nt, Artificial Sequence
  Description of Artificial Sequence: Synthetic oligonucleotide
  Sense strand starting at position 865 of SEQ ID NO: 1882139
uccgguaucacguaacuag

SEQ ID NO: 2098193 - RNA, 19 nt, Artificial Sequence
  Description of Artificial Sequence: Synthetic oligonucleotide
  Antisense strand to SEQ ID NO: 2098192
cuaguuacgugauaccgga

SEQ ID NO: 2098194 - RNA, 19 nt, Artificial Sequence
  Description of Artificial Sequence: Synthetic oligonucleotide
  Sense strand starting at position 914 of SEQ ID NO: 1882139
aguuaacauuccucggcaa

SEQ ID NO: 2098195 - RNA, 19 nt, Artificial Sequence
  Description of Artificial Sequence: Synthetic oligonucleotide
  Antisense strand to SEQ ID NO: 2098194
uugccgaggaauguuaacu

SEQ ID NO: 2098196 - RNA, 19 nt, Artificial Sequence
  Description of Artificial Sequence: Synthetic oligonucleotide
  Sense strand starting at position 915 of SEQ ID NO: 1882139
guuaacauuccucggcaau

SEQ ID NO: 2098197 - RNA, 19 nt, Artificial Sequence
  Description of Artificial Sequence: Synthetic oligonucleotide
  Antisense strand to SEQ ID NO: 2098196
auugccgaggaauguuaac

SEQ ID NO: 2098198 - RNA, 19 nt, Artificial Sequence
  Description of Artificial Sequence: Synthetic oligonucleotide
  Sense strand starting at position 916 of SEQ ID NO: 1882139
uuaacauuccucggcaauu

SEQ ID NO: 2098199 - RNA, 19 nt, Artificial Sequence
  Description of Artificial Sequence: Synthetic oligonucleotide
  Antisense strand to SEQ ID NO: 2098198
aauugccgaggaauguuaa

SEQ ID NO: 2098200 - RNA, 19 nt, Artificial Sequence
  Description of Artificial Sequence: Synthetic oligonucleotide
  Sense strand starting at position 947 of SEQ ID NO: 1882139
gcugaauccagagaugcca

SEQ ID NO: 2098201 - RNA, 19 nt, Artificial Sequence
  Description of Artificial Sequence: Synthetic oligonucleotide
  Antisense strand to SEQ ID NO: 2098200
uggcaucucuggauucagc

SEQ ID NO: 2098202 - RNA, 19 nt, Artificial Sequence
  Description of Artificial Sequence: Synthetic oligonucleotide
  Sense strand starting at position 2866 of SEQ ID NO: 1882139
cgcgaaucuccgcucguaa

SEQ ID NO: 2098203 - RNA, 19 nt, Artificial Sequence
  Description of Artificial Sequence: Synthetic oligonucleotide
  Antisense strand to SEQ ID NO: 2098202
uuacgagcggagauucgcg

SEQ ID NO: 2098204 - RNA, 19 nt, Artificial Sequence
  Description of Artificial Sequence: Synthetic oligonucleotide
  Sense strand starting at position 2867 of SEQ ID NO: 1882139
gcgaaucuccgcucguaac

SEQ ID NO: 2098205 - RNA, 19 nt, Artificial Sequence
  Description of Artificial Sequence: Synthetic oligonucleotide
  Antisense strand to SEQ ID NO: 2098204
guuacgagcggagauucgc

SEQ ID NO: 2098206 - RNA, 19 nt, Artificial Sequence
  Description of Artificial Sequence: Synthetic oligonucleotide
  Sense strand starting at position 2982 of SEQ ID NO: 1882139
aucaguuccaguugugaug

SEQ ID NO: 2098207 - RNA, 19 nt, Artificial Sequence
  Description of Artificial Sequence: Synthetic oligonucleotide
  Antisense strand to SEQ ID NO: 2098206
caucacaacuggaacugau

SEQ ID NO: 2098208 - RNA, 19 nt, Artificial Sequence
  Description of Artificial Sequence: Synthetic oligonucleotide
  Sense strand starting at position 3063 of SEQ ID NO: 1882139
aagggagcuucuuugagac

SEQ ID NO: 2098209 - RNA, 19 nt, Artificial Sequence
  Description of Artificial Sequence: Synthetic oligonucleotide
  Antisense strand to SEQ ID NO: 2098208
gucucaaagaagcucccuu

SEQ ID NO: 2098210 - RNA, 19 nt, Artificial Sequence
  Description of Artificial Sequence: Synthetic oligonucleotide
  Sense strand starting at position 3133 of SEQ ID NO: 1882139
ugcagcucaucucucagaa

SEQ ID NO: 2098211 - RNA, 19 nt, Artificial Sequence
  Description of Artificial Sequence: Synthetic oligonucleotide
  Antisense strand to SEQ ID NO: 2098210
uucugagagaugagcugca

SEQ ID NO: 2098212 - RNA, 19 nt, Artificial Sequence
  Description of Artificial Sequence: Synthetic oligonucleotide
  Sense strand starting at position 3149 of SEQ ID NO: 1882139
gaauacaaugccggcaaua

SEQ ID NO: 2098213 - RNA, 19 nt, Artificial Sequence
  Description of Artificial Sequence: Synthetic oligonucleotide
  Antisense strand to SEQ ID NO: 2098212
uauugccggcauuguauuc

SEQ ID NO: 2098214 - RNA, 19 nt, Artificial Sequence
  Description of Artificial Sequence: Synthetic oligonucleotide
  Sense strand starting at position 3178 of SEQ ID NO: 1882139
gaguccuuaccaggagguu

SEQ ID NO: 2098215 - RNA, 19 nt, Artificial Sequence
  Description of Artificial Sequence: Synthetic oligonucleotide
  Antisense strand to SEQ ID NO: 2098214
aaccuccugguaaggacuc

SEQ ID NO: 2098216 - RNA, 19 nt, Artificial Sequence
  Description of Artificial Sequence: Synthetic oligonucleotide
  Sense strand starting at position 3190 of SEQ ID NO: 1882139
ggagguuucugcgugauuu

SEQ ID NO: 2098217 - RNA, 19 nt, Artificial Sequence
  Description of Artificial Sequence: Synthetic oligonucleotide
  Antisense strand to SEQ ID NO: 2098216
aaaucacgcagaaaccucc

SEQ ID NO: 2098218 - RNA, 19 nt, Artificial Sequence
  Description of Artificial Sequence: Synthetic oligonucleotide
  Sense strand starting at position 3191 of SEQ ID NO: 1882139
gagguuucugcgugauuug

SEQ ID NO: 2098219 - RNA, 19 nt, Artificial Sequence
  Description of Artificial Sequence: Synthetic oligonucleotide
  Antisense strand to SEQ ID NO: 2098218
caaaucacgcagaaaccuc

SEQ ID NO: 2098220 - RNA, 19 nt, Artificial Sequence
  Description of Artificial Sequence: Synthetic oligonucleotide
  Sense strand starting at position 3216 of SEQ ID NO: 1882139
gcagaauuccucugcuuau

SEQ ID NO: 2098221 - RNA, 19 nt, Artificial Sequence
  Description of Artificial Sequence: Synthetic oligonucleotide
  Antisense strand to SEQ ID NO: 2098220
auaagcagaggaauucugc

SEQ ID NO: 2098222 - RNA, 19 nt, Artificial Sequence
  Description of Artificial Sequence: Synthetic oligonucleotide
  Sense strand starting at position 3265 of SEQ ID NO: 1882139
cuaguuucucuucgguaaa

SEQ ID NO: 2098223 - RNA, 19 nt, Artificial Sequence
  Description of Artificial Sequence: Synthetic oligonucleotide
  Antisense strand to SEQ ID NO: 2098222
uuuaccgaagagaaacuag

SEQ ID NO: 2098224 - RNA, 19 nt, Artificial Sequence
  Description of Artificial Sequence: Synthetic oligonucleotide
  Sense strand starting at position 3288 of SEQ ID NO: 1882139
aagggaauauaacuguguu

SEQ ID NO: 2098225 - RNA, 19 nt, Artificial Sequence
  Description of Artificial Sequence: Synthetic oligonucleotide
  Antisense strand to SEQ ID NO: 2098224
aacacaguuauauucccuu

SEQ ID NO: 2098226 - RNA, 19 nt, Artificial Sequence
  Description of Artificial Sequence: Synthetic oligonucleotide
  Sense strand starting at position 3289 of SEQ ID NO: 1882139
agggaauauaacuguguuc

SEQ ID NO: 2098227 - RNA, 19 nt, Artificial Sequence
  Description of Artificial Sequence: Synthetic oligonucleotide
  Antisense strand to SEQ ID NO: 2098226
gaacacaguuauauucccu

SEQ ID NO: 2098228 - RNA, 19 nt, Artificial Sequence
  Description of Artificial Sequence: Synthetic oligonucleotide
  Sense strand starting at position 3311 of SEQ ID NO: 1882139
cuuucuuagcagcagaaau

SEQ ID NO: 2098229 - RNA, 19 nt, Artificial Sequence
  Description of Artificial Sequence: Synthetic oligonucleotide
  Antisense strand to SEQ ID NO: 2098228
auuucugcugcuaagaaag

SEQ ID NO: 2098230 - RNA, 19 nt, Artificial Sequence
  Description of Artificial Sequence: Synthetic oligonucleotide
  Sense strand starting at position 3340 of SEQ ID NO: 1882139
auagauuaugcccaaaguc

SEQ ID NO: 2098231 - RNA, 19 nt, Artificial Sequence
  Description of Artificial Sequence: Synthetic oligonucleotide
  Antisense strand to SEQ ID NO: 2098230
gacuuugggcauaaucuau

SEQ ID NO: 2098232 - RNA, 19 nt, Artificial Sequence
  Description of Artificial Sequence: Synthetic oligonucleotide
  Sense strand starting at position 3768 of SEQ ID NO: 1882139
cuugaaacaugaugaaaga

SEQ ID NO: 2098233 - RNA, 19 nt, Artificial Sequence
  Description of Artificial Sequence: Synthetic oligonucleotide
  Antisense strand to SEQ ID NO: 2098232
ucuuucaucauguuucaag

SEQ ID NO: 2098234 - RNA, 19 nt, Artificial Sequence
  Description of Artificial Sequence: Synthetic oligonucleotide
  Sense strand starting at position 64 of SEQ ID NO: 1882140
ggcuuaucagagcaccuga

SEQ ID NO: 2098235 - RNA, 19 nt, Artificial Sequence
  Description of Artificial Sequence: Synthetic oligonucleotide
  Antisense strand to SEQ ID NO: 2098234
ucaggugcucugauaagcc

SEQ ID NO: 2098236 - RNA, 19 nt, Artificial Sequence
  Description of Artificial Sequence: Synthetic oligonucleotide
  Sense strand starting at position 78 of SEQ ID NO: 1882140
ccugaaauguucucaguua

SEQ ID NO: 2098237 - RNA, 19 nt, Artificial Sequence
  Description of Artificial Sequence: Synthetic oligonucleotide
  Antisense strand to SEQ ID NO: 2098236
uaacugagaacauuucagg

SEQ ID NO: 2098238 - RNA, 19 nt, Artificial Sequence
  Description of Artificial Sequence: Synthetic oligonucleotide
  Sense strand starting at position 135 of SEQ ID NO: 1882140
ccggauucuccauguuaaa

SEQ ID NO: 2098239 - RNA, 19 nt, Artificial Sequence
  Description of Artificial Sequence: Synthetic oligonucleotide
  Antisense strand to SEQ ID NO: 2098238
uuuaacauggagaauccgg

SEQ ID NO: 2098240 - RNA, 19 nt, Artificial Sequence
  Description of Artificial Sequence: Synthetic oligonucleotide
  Sense strand starting at position 155 of SEQ ID NO: 1882140
ugcaaauagccauggaaau

SEQ ID NO: 2098241 - RNA, 19 nt, Artificial Sequence
  Description of Artificial Sequence: Synthetic oligonucleotide
  Antisense strand to SEQ ID NO: 2098240
auuuccauggcuauuugca

SEQ ID NO: 2098242 - RNA, 19 nt, Artificial Sequence
  Description of Artificial Sequence: Synthetic oligonucleotide
  Sense strand starting at position 156 of SEQ ID NO: 1882140
gcaaauagccauggaaaug

SEQ ID NO: 2098243 - RNA, 19 nt, Artificial Sequence
  Description of Artificial Sequence: Synthetic oligonucleotide
  Antisense strand to SEQ ID NO: 2098242
cauuuccauggcuauuugc

SEQ ID NO: 2098244 - RNA, 19 nt, Artificial Sequence
  Description of Artificial Sequence: Synthetic oligonucleotide
  Sense strand starting at position 179 of SEQ ID NO: 1882140
agacuaagucucugacaua

SEQ ID NO: 2098245 - RNA, 19 nt, Artificial Sequence
  Description of Artificial Sequence: Synthetic oligonucleotide
  Antisense strand to SEQ ID NO: 2098244
uaugucagagacuuagucu

SEQ ID NO: 2098246 - RNA, 19 nt, Artificial Sequence
  Description of Artificial Sequence: Synthetic oligonucleotide
  Sense strand starting at position 317 of SEQ ID NO: 1882140
gguuaagucugagugaauu

SEQ ID NO: 2098247 - RNA, 19 nt, Artificial Sequence
  Description of Artificial Sequence: Synthetic oligonucleotide
  Antisense strand to SEQ ID NO: 2098246
aauucacucagacuuaacc

SEQ ID NO: 2098248 - RNA, 19 nt, Artificial Sequence
  Description of Artificial Sequence: Synthetic oligonucleotide
  Sense strand starting at position 342 of SEQ ID NO: 1882140
cuggguaauacugggcaua

SEQ ID NO: 2098249 - RNA, 19 nt, Artificial Sequence
  Description of Artificial Sequence: Synthetic oligonucleotide
  Antisense strand to SEQ ID NO: 2098248
uaugcccaguauuacccag

SEQ ID NO: 2098250 - RNA, 19 nt, Artificial Sequence
  Description of Artificial Sequence: Synthetic oligonucleotide
  Sense strand starting at position 344 of SEQ ID NO: 1882140
ggguaauacugggcauaca

SEQ ID NO: 2098251 - RNA, 19 nt, Artificial Sequence
  Description of Artificial Sequence: Synthetic oligonucleotide
  Antisense strand to SEQ ID NO: 2098250
uguaugcccaguauuaccc

SEQ ID NO: 2098252 - RNA, 19 nt, Artificial Sequence
  Description of Artificial Sequence: Synthetic oligonucleotide
  Sense strand starting at position 507 of SEQ ID NO: 1882140
cagggcauaguccgagaau

SEQ ID NO: 2098253 - RNA, 19 nt, Artificial Sequence
  Description of Artificial Sequence: Synthetic oligonucleotide
  Antisense strand to SEQ ID NO: 2098252
auucucggacuaugcccug

SEQ ID NO: 2098254 - RNA, 19 nt, Artificial Sequence
  Description of Artificial Sequence: Synthetic oligonucleotide
  Sense strand starting at position 510 of SEQ ID NO: 1882140
ggcauaguccgagaauagc

SEQ ID NO: 2098255 - RNA, 19 nt, Artificial Sequence
  Description of Artificial Sequence: Synthetic oligonucleotide
  Antisense strand to SEQ ID NO: 2098254
gcuauucucggacuaugcc

SEQ ID NO: 2098256 - RNA, 19 nt, Artificial Sequence
  Description of Artificial Sequence: Synthetic oligonucleotide
  Sense strand starting at position 526 of SEQ ID NO: 1882140
agcagcaauccugaauaug

SEQ ID NO: 2098257 - RNA, 19 nt, Artificial Sequence
  Description of Artificial Sequence: Synthetic oligonucleotide
  Antisense strand to SEQ ID NO: 2098256
cauauucaggauugcugcu

SEQ ID NO: 2098258 - RNA, 19 nt, Artificial Sequence
  Description of Artificial Sequence: Synthetic oligonucleotide
  Sense strand starting at position 576 of SEQ ID NO: 1882140
ucuaucuuuggcuaccaga

SEQ ID NO: 2098259 - RNA, 19 nt, Artificial Sequence
  Description of Artificial Sequence: Synthetic oligonucleotide
  Antisense strand to SEQ ID NO: 2098258
ucugguagccaaagauaga

SEQ ID NO: 2098260 - RNA, 19 nt, Artificial Sequence
  Description of Artificial Sequence: Synthetic oligonucleotide
  Sense strand starting at position 643 of SEQ ID NO: 1882140
uggaauguagcacauauau

SEQ ID NO: 2098261 - RNA, 19 nt, Artificial Sequence
  Description of Artificial Sequence: Synthetic oligonucleotide
  Antisense strand to SEQ ID NO: 2098260
auauaugugcuacauucca

SEQ ID NO: 2098262 - RNA, 19 nt, Artificial Sequence
  Description of Artificial Sequence: Synthetic oligonucleotide
  Sense strand starting at position 1029 of SEQ ID NO: 1882140
aguuucucaaaguauggua

SEQ ID NO: 2098263 - RNA, 19 nt, Artificial Sequence
  Description of Artificial Sequence: Synthetic oligonucleotide
  Antisense strand to SEQ ID NO: 2098262
uaccauacuuugagaaacu

SEQ ID NO: 2098264 - RNA, 19 nt, Artificial Sequence
  Description of Artificial Sequence: Synthetic oligonucleotide
  Sense strand starting at position 1031 of SEQ ID NO: 1882140
uuucucaaaguaugguaau

SEQ ID NO: 2098265 - RNA, 19 nt, Artificial Sequence
  Description of Artificial Sequence: Synthetic oligonucleotide
  Antisense strand to SEQ ID NO: 2098264
auuaccauacuuugagaaa

SEQ ID NO: 2098266 - RNA, 19 nt, Artificial Sequence
  Description of Artificial Sequence: Synthetic oligonucleotide
  Sense strand starting at position 1049 of SEQ ID NO: 1882140
uauguaagaugauuguaag

SEQ ID NO: 2098267 - RNA, 19 nt, Artificial Sequence
  Description of Artificial Sequence: Synthetic oligonucleotide
  Antisense strand to SEQ ID NO: 2098266
cuuacaaucaucuuacaua

SEQ ID NO: 2098268 - RNA, 19 nt, Artificial Sequence
  Description of Artificial Sequence: Synthetic oligonucleotide
  Sense strand starting at position 1050 of SEQ ID NO: 1882140
auguaagaugauuguaagu

SEQ ID NO: 2098269 - RNA, 19 nt, Artificial Sequence
  Description of Artificial Sequence: Synthetic oligonucleotide
  Antisense strand to SEQ ID NO: 2098268
acuuacaaucaucuuacau

SEQ ID NO: 2098270 - RNA, 19 nt, Artificial Sequence
  Description of Artificial Sequence: Synthetic oligonucleotide
  Sense strand starting at position 1061 of SEQ ID NO: 1882140
uuguaaguagcacaagaau

SEQ ID NO: 2098271 - RNA, 19 nt, Artificial Sequence
  Description of Artificial Sequence: Synthetic oligonucleotide
  Antisense strand to SEQ ID NO: 2098270
auucuugugcuacuuacaa

SEQ ID NO: 2098272 - RNA, 19 nt, Artificial Sequence
  Description of Artificial Sequence: Synthetic oligonucleotide
  Sense strand starting at position 1102 of SEQ ID NO: 1882140
uauuuaaugcaaugcguau

SEQ ID NO: 2098273 - RNA, 19 nt, Artificial Sequence
  Description of Artificial Sequence: Synthetic oligonucleotide
  Antisense strand to SEQ ID NO: 2098272
auacgcauugcauuaaaua

SEQ ID NO: 2098274 - RNA, 19 nt, Artificial Sequence
  Description of Artificial Sequence: Synthetic oligonucleotide
  Sense strand starting at position 1167 of SEQ ID NO: 1882140
cuggguugaggcuaaauua

SEQ ID NO: 2098275 - RNA, 19 nt, Artificial Sequence
  Description of Artificial Sequence: Synthetic oligonucleotide
  Antisense strand to SEQ ID NO: 2098274
uaauuuagccucaacccag

SEQ ID NO: 2098276 - RNA, 19 nt, Artificial Sequence
  Description of Artificial Sequence: Synthetic oligonucleotide
  Sense strand starting at position 1266 of SEQ ID NO: 1882140
gucauaagguaacucuaaa

SEQ ID NO: 2098277 - RNA, 19 nt, Artificial Sequence
  Description of Artificial Sequence: Synthetic oligonucleotide
  Antisense strand to SEQ ID NO: 2098276
uuuagaguuaccuuaugac

SEQ ID NO: 2098278 - RNA, 19 nt, Artificial Sequence
  Description of Artificial Sequence: Synthetic oligonucleotide
  Sense strand starting at position 1298 of SEQ ID NO: 1882140
uggaaauaguuguccuaau

SEQ ID NO: 2098279 - RNA, 19 nt, Artificial Sequence
  Description of Artificial Sequence: Synthetic oligonucleotide
  Antisense strand to SEQ ID NO: 2098278
auuaggacaacuauuucca

SEQ ID NO: 2098280 - RNA, 19 nt, Artificial Sequence
  Description of Artificial Sequence: Synthetic oligonucleotide
  Sense strand starting at position 1299 of SEQ ID NO: 1882140
ggaaauaguuguccuaauc

SEQ ID NO: 2098281 - RNA, 19 nt, Artificial Sequence
  Description of Artificial Sequence: Synthetic oligonucleotide
  Antisense strand to SEQ ID NO: 2098280
gauuaggacaacuauuucc

SEQ ID NO: 2098282 - RNA, 19 nt, Artificial Sequence
  Description of Artificial Sequence: Synthetic oligonucleotide
  Sense strand starting at position 1414 of SEQ ID NO: 1882140
guuugaagguacuuacauu

SEQ ID NO: 2098283 - RNA, 19 nt, Artificial Sequence
  Description of Artificial Sequence: Synthetic oligonucleotide
  Antisense strand to SEQ ID NO: 2098282
aauguaaguaccuucaaac

SEQ ID NO: 2098284 - RNA, 19 nt, Artificial Sequence
  Description of Artificial Sequence: Synthetic oligonucleotide
  Sense strand starting at position 1542 of SEQ ID NO: 1882140
uaguuaugccaugauugua

SEQ ID NO: 2098285 - RNA, 19 nt, Artificial Sequence
  Description of Artificial Sequence: Synthetic oligonucleotide
  Antisense strand to SEQ ID NO: 2098284
uacaaucauggcauaacua

SEQ ID NO: 2098286 - RNA, 19 nt, Artificial Sequence
  Description of Artificial Sequence: Synthetic oligonucleotide
  Sense strand starting at position 1612 of SEQ ID NO: 1882140
ccauuuaaucuacgcaguu

SEQ ID NO: 2098287 - RNA, 19 nt, Artificial Sequence
  Description of Artificial Sequence: Synthetic oligonucleotide
  Antisense strand to SEQ ID NO: 2098286
aacugcguagauuaaaugg

SEQ ID NO: 2098288 - RNA, 19 nt, Artificial Sequence
  Description of Artificial Sequence: Synthetic oligonucleotide
  Sense strand starting at position 1642 of SEQ ID NO: 1882140
cagagaacuguuugaacuc

SEQ ID NO: 2098289 - RNA, 19 nt, Artificial Sequence
  Description of Artificial Sequence: Synthetic oligonucleotide
  Antisense strand to SEQ ID NO: 2098288
gaguucaaacaguucucug

SEQ ID NO: 2098290 - RNA, 19 nt, Artificial Sequence
  Description of Artificial Sequence: Synthetic oligonucleotide
  Sense strand starting at position 1663 of SEQ ID NO: 1882140
gccaacuuacuguaaugga

SEQ ID NO: 2098291 - RNA, 19 nt, Artificial Sequence
  Description of Artificial Sequence: Synthetic oligonucleotide
  Antisense strand to SEQ ID NO: 2098290
uccauuacaguaaguuggc

SEQ ID NO: 2098292 - RNA, 19 nt, Artificial Sequence
  Description of Artificial Sequence: Synthetic oligonucleotide
  Sense strand starting at position 1708 of SEQ ID NO: 1882140
ugucacaguggucaauuau

SEQ ID NO: 2098293 - RNA, 19 nt, Artificial Sequence
  Description of Artificial Sequence: Synthetic oligonucleotide
  Antisense strand to SEQ ID NO: 2098292
auaauugaccacugugaca

SEQ ID NO: 2098294 - RNA, 19 nt, Artificial Sequence
  Description of Artificial Sequence: Synthetic oligonucleotide
  Sense strand starting at position 1849 of SEQ ID NO: 1882140
ucugauggccacuauaaau

SEQ ID NO: 2098295 - RNA, 19 nt, Artificial Sequence
  Description of Artificial Sequence: Synthetic oligonucleotide
  Antisense strand to SEQ ID NO: 2098294
auuuauaguggccaucaga

SEQ ID NO: 2098296 - RNA, 19 nt, Artificial Sequence
  Description of Artificial Sequence: Synthetic oligonucleotide
  Sense strand starting at position 2059 of SEQ ID NO: 1882140
uaggguugcugauuaauug

SEQ ID NO: 2098297 - RNA, 19 nt, Artificial Sequence
  Description of Artificial Sequence: Synthetic oligonucleotide
  Antisense strand to SEQ ID NO: 2098296
caauuaaucagcaacccua

SEQ ID NO: 2098298 - RNA, 19 nt, Artificial Sequence
  Description of Artificial Sequence: Synthetic oligonucleotide
  Sense strand starting at position 2276 of SEQ ID NO: 1882140
guugaagacuuguuccauu

SEQ ID NO: 2098299 - RNA, 19 nt, Artificial Sequence
  Description of Artificial Sequence: Synthetic oligonucleotide
  Antisense strand to SEQ ID NO: 2098298
aauggaacaagucuucaac

SEQ ID NO: 2098300 - RNA, 19 nt, Artificial Sequence
  Description of Artificial Sequence: Synthetic oligonucleotide
  Sense strand starting at position 2464 of SEQ ID NO: 1882140
gugaauuaaugcuuagaag

SEQ ID NO: 2098301 - RNA, 19 nt, Artificial Sequence
  Description of Artificial Sequence: Synthetic oligonucleotide
  Antisense strand to SEQ ID NO: 2098300
cuucuaagcauuaauucac

SEQ ID NO: 2098302 - RNA, 19 nt, Artificial Sequence
  Description of Artificial Sequence: Synthetic oligonucleotide
  Sense strand starting at position 2465 of SEQ ID NO: 1882140
ugaauuaaugcuuagaagu

SEQ ID NO: 2098303 - RNA, 19 nt, Artificial Sequence
  Description of Artificial Sequence: Synthetic oligonucleotide
  Antisense strand to SEQ ID NO: 2098302
acuucuaagcauuaauuca

SEQ ID NO: 2098304 - RNA, 19 nt, Artificial Sequence
  Description of Artificial Sequence: Synthetic oligonucleotide
  Sense strand starting at position 2586 of SEQ ID NO: 1882140
gagucuucccaaugagagc

SEQ ID NO: 2098305 - RNA, 19 nt, Artificial Sequence
  Description of Artificial Sequence: Synthetic oligonucleotide
  Antisense strand to SEQ ID NO: 2098304
gcucucauugggaagacuc

SEQ ID NO: 2098306 - RNA, 19 nt, Artificial Sequence
  Description of Artificial Sequence: Synthetic oligonucleotide
  Sense strand starting at position 3195 of SEQ ID NO: 1882140
gauaguaguuauuccugau

SEQ ID NO: 2098307 - RNA, 19 nt, Artificial Sequence
  Description of Artificial Sequence: Synthetic oligonucleotide
  Antisense strand to SEQ ID NO: 2098306
aucaggaauaacuacuauc

SEQ ID NO: 2098308 - RNA, 19 nt, Artificial Sequence
  Description of Artificial Sequence: Synthetic oligonucleotide
  Sense strand starting at position 3199 of SEQ ID NO: 1882140
guaguuauuccugauggca

SEQ ID NO: 2098309 - RNA, 19 nt, Artificial Sequence
  Description of Artificial Sequence: Synthetic oligonucleotide
  Antisense strand to SEQ ID NO: 2098308
ugccaucaggaauaacuac

SEQ ID NO: 2098310 - RNA, 19 nt, Artificial Sequence
  Description of Artificial Sequence: Synthetic oligonucleotide
  Sense strand starting at position 3360 of SEQ ID NO: 1882140
gugucagugaccuggaaga

SEQ ID NO: 2098311 - RNA, 19 nt, Artificial Sequence
  Description of Artificial Sequence: Synthetic oligonucleotide
  Antisense strand to SEQ ID NO: 2098310
ucuuccaggucacugacac

SEQ ID NO: 2098312 - RNA, 19 nt, Artificial Sequence
  Description of Artificial Sequence: Synthetic oligonucleotide
  Sense strand starting at position 3603 of SEQ ID NO: 1882140
acauaaguccaagaguucu

SEQ ID NO: 2098313 - RNA, 19 nt, Artificial Sequence
  Description of Artificial Sequence: Synthetic oligonucleotide
  Antisense strand to SEQ ID NO: 2098312
agaacucuuggacuuaugu

SEQ ID NO: 2098314 - RNA, 19 nt, Artificial Sequence
  Description of Artificial Sequence: Synthetic oligonucleotide
  Sense strand starting at position 1194 of SEQ ID NO: 1882141
uaugcacugugucuggaaa

SEQ ID NO: 2098315 - RNA, 19 nt, Artificial Sequence
  Description of Artificial Sequence: Synthetic oligonucleotide
  Antisense strand to SEQ ID NO: 2098314
uuuccagacacagugcaua

SEQ ID NO: 2098316 - RNA, 19 nt, Artificial Sequence
  Description of Artificial Sequence: Synthetic oligonucleotide
  Sense strand starting at position 412 of SEQ ID NO: 1882145
agcgguuugcuuuccuaac

SEQ ID NO: 2098317 - RNA, 19 nt, Artificial Sequence
  Description of Artificial Sequence: Synthetic oligonucleotide
  Antisense strand to SEQ ID NO: 2098316
guuaggaaagcaaaccgcu

SEQ ID NO: 2098318 - RNA, 19 nt, Artificial Sequence
  Description of Artificial Sequence: Synthetic oligonucleotide
  Sense strand starting at position 516 of SEQ ID NO: 1882145
guccaauggcuugaugaau

SEQ ID NO: 2098319 - RNA, 19 nt, Artificial Sequence
  Description of Artificial Sequence: Synthetic oligonucleotide
  Antisense strand to SEQ ID NO: 2098318
auucaucaagccauuggac

SEQ ID NO: 2098320 - RNA, 19 nt, Artificial Sequence
  Description of Artificial Sequence: Synthetic oligonucleotide
  Sense strand starting at position 1029 of SEQ ID NO: 1882145
uggugauggcauuggagaa

SEQ ID NO: 2098321 - RNA, 19 nt, Artificial Sequence
  Description of Artificial Sequence: Synthetic oligonucleotide
  Antisense strand to SEQ ID NO: 2098320
uucuccaaugccaucacca

SEQ ID NO: 2098322 - RNA, 19 nt, Artificial Sequence
  Description of Artificial Sequence: Synthetic oligonucleotide
  Sense strand starting at position 1030 of SEQ ID NO: 1882145
ggugauggcauuggagaau

SEQ ID NO: 2098323 - RNA, 19 nt, Artificial Sequence
  Description of Artificial Sequence: Synthetic oligonucleotide
  Antisense strand to SEQ ID NO: 2098322
auucuccaaugccaucacc

SEQ ID NO: 2098324 - RNA, 19 nt, Artificial Sequence
  Description of Artificial Sequence: Synthetic oligonucleotide
  Sense strand starting at position 1060 of SEQ ID NO: 1882145
aagccuguaggugaggaau

SEQ ID NO: 2098325 - RNA, 19 nt, Artificial Sequence
  Description of Artificial Sequence: Synthetic oligonucleotide
  Antisense strand to SEQ ID NO: 2098324
auuccucaccuacaggcuu

SEQ ID NO: 2098326 - RNA, 19 nt, Artificial Sequence
  Description of Artificial Sequence: Synthetic oligonucleotide
  Sense strand starting at position 1092 of SEQ ID NO: 1882145
gagccagauguuuaucuug

SEQ ID NO: 2098327 - RNA, 19 nt, Artificial Sequence
  Description of Artificial Sequence: Synthetic oligonucleotide
  Antisense strand to SEQ ID NO: 2098326
caagauaaacaucuggcuc

SEQ ID NO: 2098328 - RNA, 19 nt, Artificial Sequence
  Description of Artificial Sequence: Synthetic oligonucleotide
  Sense strand starting at position 1098 of SEQ ID NO: 1882145
gauguuuaucuugauugua

SEQ ID NO: 2098329 - RNA, 19 nt, Artificial Sequence
  Description of Artificial Sequence: Synthetic oligonucleotide
  Antisense strand to SEQ ID NO: 2098328
uacaaucaagauaaacauc

SEQ ID NO: 2098330 - RNA, 19 nt, Artificial Sequence
  Description of Artificial Sequence: Synthetic oligonucleotide
  Sense strand starting at position 1118 of SEQ ID NO: 1882145
agacaauguuuccugacca

SEQ ID NO: 2098331 - RNA, 19 nt, Artificial Sequence
  Description of Artificial Sequence: Synthetic oligonucleotide
  Antisense strand to SEQ ID NO: 2098330
uggucaggaaacauugucu

SEQ ID NO: 2098332 - RNA, 19 nt, Artificial Sequence
  Description of Artificial Sequence: Synthetic oligonucleotide
  Sense strand starting at position 1207 of SEQ ID NO: 1882145
auggguguggcgcuaagua

SEQ ID NO: 2098333 - RNA, 19 nt, Artificial Sequence
  Description of Artificial Sequence: Synthetic oligonucleotide
  Antisense strand to SEQ ID NO: 2098332
uacuuagcgccacacccau

SEQ ID NO: 2098334 - RNA, 19 nt, Artificial Sequence
  Description of Artificial Sequence: Synthetic oligonucleotide
  Sense strand starting at position 1209 of SEQ ID NO: 1882145
ggguguggcgcuaaguaua

SEQ ID NO: 2098335 - RNA, 19 nt, Artificial Sequence
  Description of Artificial Sequence: Synthetic oligonucleotide
  Antisense strand to SEQ ID NO: 2098334
uauacuuagcgccacaccc

SEQ ID NO: 2098336 - RNA, 19 nt, Artificial Sequence
  Description of Artificial Sequence: Synthetic oligonucleotide
  Sense strand starting at position 1216 of SEQ ID NO: 1882145
gcgcuaaguauaucuuguu

SEQ ID NO: 2098337 - RNA, 19 nt, Artificial Sequence
  Description of Artificial Sequence: Synthetic oligonucleotide
  Antisense strand to SEQ ID NO: 2098336
aacaagauauacuuagcgc

SEQ ID NO: 2098338 - RNA, 19 nt, Artificial Sequence
  Description of Artificial Sequence: Synthetic oligonucleotide
  Sense strand starting at position 1435 of SEQ ID NO: 1882145
uccuuagaguaccugaauu

SEQ ID NO: 2098339 - RNA, 19 nt, Artificial Sequence
  Description of Artificial Sequence: Synthetic oligonucleotide
  Antisense strand to SEQ ID NO: 2098338
aauucagguacucuaagga

SEQ ID NO: 2098340 - RNA, 19 nt, Artificial Sequence
  Description of Artificial Sequence: Synthetic oligonucleotide
  Sense strand starting at position 1447 of SEQ ID NO: 1882145
cugaauugcccagagugaa

SEQ ID NO: 2098341 - RNA, 19 nt, Artificial Sequence
  Description of Artificial Sequence: Synthetic oligonucleotide
  Antisense strand to SEQ ID NO: 2098340
uucacucugggcaauucag

SEQ ID NO: 2098342 - RNA, 19 nt, Artificial Sequence
  Description of Artificial Sequence: Synthetic oligonucleotide
  Sense strand starting at position 1450 of SEQ ID NO: 1882145
aauugcccagagugaauua

SEQ ID NO: 2098343 - RNA, 19 nt, Artificial Sequence
  Description of Artificial Sequence: Synthetic oligonucleotide
  Antisense strand to SEQ ID NO: 2098342
uaauucacucugggcaauu

SEQ ID NO: 2098344 - RNA, 19 nt, Artificial Sequence
  Description of Artificial Sequence: Synthetic oligonucleotide
  Sense strand starting at position 1645 of SEQ ID NO: 1882145
ugaaauuaguguuccaaau

SEQ ID NO: 2098345 - RNA, 19 nt, Artificial Sequence
  Description of Artificial Sequence: Synthetic oligonucleotide
  Antisense strand to SEQ ID NO: 2098344
auuuggaacacuaauuuca

SEQ ID NO: 2098346 - RNA, 19 nt, Artificial Sequence
  Description of Artificial Sequence: Synthetic oligonucleotide
  Sense strand starting at position 1675 of SEQ ID NO: 1882145
uuugcagauguauaacaaa

SEQ ID NO: 2098347 - RNA, 19 nt, Artificial Sequence
  Description of Artificial Sequence: Synthetic oligonucleotide
  Antisense strand to SEQ ID NO: 2098346
uuuguuauacaucugcaaa

SEQ ID NO: 2098348 - RNA, 19 nt, Artificial Sequence
  Description of Artificial Sequence: Synthetic oligonucleotide
  Sense strand starting at position 1844 of SEQ ID NO: 1882145
ugauuauuugugugauugu

SEQ ID NO: 2098349 - RNA, 19 nt, Artificial Sequence
  Description of Artificial Sequence: Synthetic oligonucleotide
  Antisense strand to SEQ ID NO: 2098348
acaaucacacaaauaauca

SEQ ID NO: 2098350 - RNA, 19 nt, Artificial Sequence
  Description of Artificial Sequence: Synthetic oligonucleotide
  Sense strand starting at position 2073 of SEQ ID NO: 1882145
caugauauggucuaguuaa

SEQ ID NO: 2098351 - RNA, 19 nt, Artificial Sequence
  Description of Artificial Sequence: Synthetic oligonucleotide
  Antisense strand to SEQ ID NO: 2098350
uuaacuagaccauaucaug

SEQ ID NO: 2098352 - RNA, 19 nt, Artificial Sequence
  Description of Artificial Sequence: Synthetic oligonucleotide
  Sense strand starting at position 2212 of SEQ ID NO: 1882145
gauugauaauguguuggau

SEQ ID NO: 2098353 - RNA, 19 nt, Artificial Sequence
  Description of Artificial Sequence: Synthetic oligonucleotide
  Antisense strand to SEQ ID NO: 2098352
auccaacacauuaucaauc

SEQ ID NO: 2098354 - RNA, 19 nt, Artificial Sequence
  Description of Artificial Sequence: Synthetic oligonucleotide
  Sense strand starting at position 2271 of SEQ ID NO: 1882145
gagacaguggcagaauguu

SEQ ID NO: 2098355 - RNA, 19 nt, Artificial Sequence
  Description of Artificial Sequence: Synthetic oligonucleotide
  Antisense strand to SEQ ID NO: 2098354
aacauucugccacugucuc

SEQ ID NO: 2098356 - RNA, 19 nt, Artificial Sequence
  Description of Artificial Sequence: Synthetic oligonucleotide
  Sense strand starting at position 2293 of SEQ ID NO: 1882145
acuaaugagguuugaauca

SEQ ID NO: 2098357 - RNA, 19 nt, Artificial Sequence
  Description of Artificial Sequence: Synthetic oligonucleotide
  Antisense strand to SEQ ID NO: 2098356
ugauucaaaccucauuagu

SEQ ID NO: 2098358 - RNA, 19 nt, Artificial Sequence
  Description of Artificial Sequence: Synthetic oligonucleotide
  Sense strand starting at position 2597 of SEQ ID NO: 1882145
uuguaacuuggucaaauua

SEQ ID NO: 2098359 - RNA, 19 nt, Artificial Sequence
  Description of Artificial Sequence: Synthetic oligonucleotide
  Antisense strand to SEQ ID NO: 2098358
uaauuugaccaaguuacaa

SEQ ID NO: 2098360 - RNA, 19 nt, Artificial Sequence
  Description of Artificial Sequence: Synthetic oligonucleotide
  Sense strand starting at position 2672 of SEQ ID NO: 1882145
acaguuacuuaaguugaaa

SEQ ID NO: 2098361 - RNA, 19 nt, Artificial Sequence
  Description of Artificial Sequence: Synthetic oligonucleotide
  Antisense strand to SEQ ID NO: 2098360
uuucaacuuaaguaacugu

SEQ ID NO: 2098362 - RNA, 19 nt, Artificial Sequence
  Description of Artificial Sequence: Synthetic oligonucleotide
  Sense strand starting at position 2752 of SEQ ID NO: 1882145
uaguacuuuguagaguuaa

SEQ ID NO: 2098363 - RNA, 19 nt, Artificial Sequence
  Description of Artificial Sequence: Synthetic oligonucleotide
  Antisense strand to SEQ ID NO: 2098362
uuaacucuacaaaguacua

SEQ ID NO: 2098364 - RNA, 19 nt, Artificial Sequence
  Description of Artificial Sequence: Synthetic oligonucleotide
  Sense strand starting at position 2800 of SEQ ID NO: 1882145
uguuuauuauuaccagaug

SEQ ID NO: 2098365 - RNA, 19 nt, Artificial Sequence
  Description of Artificial Sequence: Synthetic oligonucleotide
  Antisense strand to SEQ ID NO: 2098364
caucugguaauaauaaaca

SEQ ID NO: 2098366 - RNA, 19 nt, Artificial Sequence
  Description of Artificial Sequence: Synthetic oligonucleotide
  Sense strand starting at position 2842 of SEQ ID NO: 1882145
ccacacaucugggugaauu

SEQ ID NO: 2098367 - RNA, 19 nt, Artificial Sequence
  Description of Artificial Sequence: Synthetic oligonucleotide
  Antisense strand to SEQ ID NO: 2098366
aauucacccagaugugugg

SEQ ID NO: 2098368 - RNA, 19 nt, Artificial Sequence
  Description of Artificial Sequence: Synthetic oligonucleotide
  Sense strand starting at position 2872 of SEQ ID NO: 1882145
uugaguacgcuugaggaua

SEQ ID NO: 2098369 - RNA, 19 nt, Artificial Sequence
  Description of Artificial Sequence: Synthetic oligonucleotide
  Antisense strand to SEQ ID NO: 2098368
uauccucaagcguacucaa

SEQ ID NO: 2098370 - RNA, 19 nt, Artificial Sequence
  Description of Artificial Sequence: Synthetic oligonucleotide
  Sense strand starting at position 2883 of SEQ ID NO: 1882145
ugaggauauaggugucuau

SEQ ID NO: 2098371 - RNA, 19 nt, Artificial Sequence
  Description of Artificial Sequence: Synthetic oligonucleotide
  Antisense strand to SEQ ID NO: 2098370
auagacaccuauauccuca

SEQ ID NO: 2098372 - RNA, 19 nt, Artificial Sequence
  Description of Artificial Sequence: Synthetic oligonucleotide
  Sense strand starting at position 2887 of SEQ ID NO: 1882145
gauauaggugucuauucuc

SEQ ID NO: 2098373 - RNA, 19 nt, Artificial Sequence
  Description of Artificial Sequence: Synthetic oligonucleotide
  Antisense strand to SEQ ID NO: 2098372
gagaauagacaccuauauc

SEQ ID NO: 2098374 - RNA, 19 nt, Artificial Sequence
  Description of Artificial Sequence: Synthetic oligonucleotide
  Sense strand starting at position 2930 of SEQ ID NO: 1882145
uuacuucuagacgaucuau

SEQ ID NO: 2098375 - RNA, 19 nt, Artificial Sequence
  Description of Artificial Sequence: Synthetic oligonucleotide
  Antisense strand to SEQ ID NO: 2098374
auagaucgucuagaaguaa

SEQ ID NO: 2098376 - RNA, 19 nt, Artificial Sequence
  Description of Artificial Sequence: Synthetic oligonucleotide
  Sense strand starting at position 3039 of SEQ ID NO: 1882145
gcuuauagccuaugauuug

SEQ ID NO: 2098377 - RNA, 19 nt, Artificial Sequence
  Description of Artificial Sequence: Synthetic oligonucleotide
  Antisense strand to SEQ ID NO: 2098376
caaaucauaggcuauaagc

SEQ ID NO: 2098378 - RNA, 19 nt, Artificial Sequence
  Description of Artificial Sequence: Synthetic oligonucleotide
  Sense strand starting at position 3073 of SEQ ID NO: 1882145
ggucaaagacauugaguaa

SEQ ID NO: 2098379 - RNA, 19 nt, Artificial Sequence
  Description of Artificial Sequence: Synthetic oligonucleotide
  Antisense strand to SEQ ID NO: 2098378
uuacucaaugucuuugacc

SEQ ID NO: 2098380 - RNA, 19 nt, Artificial Sequence
  Description of Artificial Sequence: Synthetic oligonucleotide
  Sense strand starting at position 3110 of SEQ ID NO: 1882145
auacuaguagccugaggaa

SEQ ID NO: 2098381 - RNA, 19 nt, Artificial Sequence
  Description of Artificial Sequence: Synthetic oligonucleotide
  Antisense strand to SEQ ID NO: 2098380
uuccucaggcuacuaguau

SEQ ID NO: 2098382 - RNA, 19 nt, Artificial Sequence
  Description of Artificial Sequence: Synthetic oligonucleotide
  Sense strand starting at position 3123 of SEQ ID NO: 1882145
gaggaaugauucuugucuc

SEQ ID NO: 2098383 - RNA, 19 nt, Artificial Sequence
  Description of Artificial Sequence: Synthetic oligonucleotide
  Antisense strand to SEQ ID NO: 2098382
gagacaagaaucauuccuc

SEQ ID NO: 2098384 - RNA, 19 nt, Artificial Sequence
  Description of Artificial Sequence: Synthetic oligonucleotide
  Sense strand starting at position 3624 of SEQ ID NO: 1882145
ugagaaguuuguuuacuaa

SEQ ID NO: 2098385 - RNA, 19 nt, Artificial Sequence
  Description of Artificial Sequence: Synthetic oligonucleotide
  Antisense strand to SEQ ID NO: 2098384
uuaguaaacaaacuucuca

SEQ ID NO: 2098386 - RNA, 19 nt, Artificial Sequence
  Description of Artificial Sequence: Synthetic oligonucleotide
  Sense strand starting at position 3627 of SEQ ID NO: 1882145
gaaguuuguuuacuaaaug

SEQ ID NO: 2098387 - RNA, 19 nt, Artificial Sequence
  Description of Artificial Sequence: Synthetic oligonucleotide
  Antisense strand to SEQ ID NO: 2098386
cauuuaguaaacaaacuuc

SEQ ID NO: 2098388 - RNA, 19 nt, Artificial Sequence
  Description of Artificial Sequence: Synthetic oligonucleotide
  Sense strand starting at position 3634 of SEQ ID NO: 1882145
guuuacuaaaugggaggua

SEQ ID NO: 2098389 - RNA, 19 nt, Artificial Sequence
  Description of Artificial Sequence: Synthetic oligonucleotide
  Antisense strand to SEQ ID NO: 2098388
uaccucccauuuaguaaac

SEQ ID NO: 2098390 - RNA, 19 nt, Artificial Sequence
  Description of Artificial Sequence: Synthetic oligonucleotide
  Sense strand starting at position 3649 of SEQ ID NO: 1882145
gguaaagauuuagaacucu

SEQ ID NO: 2098391 - RNA, 19 nt, Artificial Sequence
  Description of Artificial Sequence: Synthetic oligonucleotide
  Antisense strand to SEQ ID NO: 2098390
agaguucuaaaucuuuacc

SEQ ID NO: 2098392 - RNA, 19 nt, Artificial Sequence
  Description of Artificial Sequence: Synthetic oligonucleotide
  Sense strand starting at position 3815 of SEQ ID NO: 1882145
ggcuauuuauuugagagug

SEQ ID NO: 2098393 - RNA, 19 nt, Artificial Sequence
  Description of Artificial Sequence: Synthetic oligonucleotide
  Antisense strand to SEQ ID NO: 2098392
cacucucaaauaaauagcc

SEQ ID NO: 2098394 - RNA, 19 nt, Artificial Sequence
  Description of Artificial Sequence: Synthetic oligonucleotide
  Sense strand starting at position 3817 of SEQ ID NO: 1882145
cuauuuauuugagaguguc

SEQ ID NO: 2098395 - RNA, 19 nt, Artificial Sequence
  Description of Artificial Sequence: Synthetic oligonucleotide
  Antisense strand to SEQ ID NO: 2098394
gacacucucaaauaaauag

SEQ ID NO: 2098396 - RNA, 19 nt, Artificial Sequence
  Description of Artificial Sequence: Synthetic oligonucleotide
  Sense strand starting at position 40 of SEQ ID NO: 1882146
gaccuauugggucaugguu

SEQ ID NO: 2098397 - RNA, 19 nt, Artificial Sequence
  Description of Artificial Sequence: Synthetic oligonucleotide
  Antisense strand to SEQ ID NO: 2098396
aaccaugacccaauagguc

SEQ ID NO: 2098398 - RNA, 19 nt, Artificial Sequence
  Description of Artificial Sequence: Synthetic oligonucleotide
  Sense strand starting at position 130 of SEQ ID NO: 1882146
aaguauuaacggcaauguu

SEQ ID NO: 2098399 - RNA, 19 nt, Artificial Sequence
  Description of Artificial Sequence: Synthetic oligonucleotide
  Antisense strand to SEQ ID NO: 2098398
aacauugccguuaauacuu

SEQ ID NO: 2098400 - RNA, 19 nt, Artificial Sequence
  Description of Artificial Sequence: Synthetic oligonucleotide
  Sense strand starting at position 171 of SEQ ID NO: 1882146
ugaauacauuggguucuaa

SEQ ID NO: 2098401 - RNA, 19 nt, Artificial Sequence
  Description of Artificial Sequence: Synthetic oligonucleotide
  Antisense strand to SEQ ID NO: 2098400
uuagaacccaauguauuca

SEQ ID NO: 2098402 - RNA, 19 nt, Artificial Sequence
  Description of Artificial Sequence: Synthetic oligonucleotide
  Sense strand starting at position 356 of SEQ ID NO: 1882146
uaggcaagauaaucggaau

SEQ ID NO: 2098403 - RNA, 19 nt, Artificial Sequence
  Description of Artificial Sequence: Synthetic oligonucleotide
  Antisense strand to SEQ ID NO: 2098402
auuccgauuaucuugccua

SEQ ID NO: 2098404 - RNA, 19 nt, Artificial Sequence
  Description of Artificial Sequence: Synthetic oligonucleotide
  Sense strand starting at position 383 of SEQ ID NO: 1882146
uggaacuagugcucuaagu

SEQ ID NO: 2098405 - RNA, 19 nt, Artificial Sequence
  Description of Artificial Sequence: Synthetic oligonucleotide
  Antisense strand to SEQ ID NO: 2098404
acuuagagcacuaguucca

SEQ ID NO: 2098406 - RNA, 19 nt, Artificial Sequence
  Description of Artificial Sequence: Synthetic oligonucleotide
  Sense strand starting at position 501 of SEQ ID NO: 1882146
gaggaaugcuugccaagaa

SEQ ID NO: 2098407 - RNA, 19 nt, Artificial Sequence
  Description of Artificial Sequence: Synthetic oligonucleotide
  Antisense strand to SEQ ID NO: 2098406
uucuuggcaagcauuccuc

SEQ ID NO: 2098408 - RNA, 19 nt, Artificial Sequence
  Description of Artificial Sequence: Synthetic oligonucleotide
  Sense strand starting at position 595 of SEQ ID NO: 1882146
ccagaucacccgugccaga

SEQ ID NO: 2098409 - RNA, 19 nt, Artificial Sequence
  Description of Artificial Sequence: Synthetic oligonucleotide
  Antisense strand to SEQ ID NO: 2098408
ucuggcacgggugaucugg

SEQ ID NO: 2098410 - RNA, 19 nt, Artificial Sequence
  Description of Artificial Sequence: Synthetic oligonucleotide
  Sense strand starting at position 759 of SEQ ID NO: 1882146
gcuacugugcgagcuauga

SEQ ID NO: 2098411 - RNA, 19 nt, Artificial Sequence
  Description of Artificial Sequence: Synthetic oligonucleotide
  Antisense strand to SEQ ID NO: 2098410
ucauagcucgcacaguagc

SEQ ID NO: 2098412 - RNA, 19 nt, Artificial Sequence
  Description of Artificial Sequence: Synthetic oligonucleotide
  Sense strand starting at position 790 of SEQ ID NO: 1882146
ugcaauagcuucuuuguuu

SEQ ID NO: 2098413 - RNA, 19 nt, Artificial Sequence
  Description of Artificial Sequence: Synthetic oligonucleotide
  Antisense strand to SEQ ID NO: 2098412
aaacaaagaagcuauugca

SEQ ID NO: 2098414 - RNA, 19 nt, Artificial Sequence
  Description of Artificial Sequence: Synthetic oligonucleotide
  Sense strand starting at position 1201 of SEQ ID NO: 1882146
gcaacaaaguguccaauua

SEQ ID NO: 2098415 - RNA, 19 nt, Artificial Sequence
  Description of Artificial Sequence: Synthetic oligonucleotide
  Antisense strand to SEQ ID NO: 2098414
uaauuggacacuuuguugc

SEQ ID NO: 2098416 - RNA, 19 nt, Artificial Sequence
  Description of Artificial Sequence: Synthetic oligonucleotide
  Sense strand starting at position 1266 of SEQ ID NO: 1882146
ucaccugaguacuuaguaa

SEQ ID NO: 2098417 - RNA, 19 nt, Artificial Sequence
  Description of Artificial Sequence: Synthetic oligonucleotide
  Antisense strand to SEQ ID NO: 2098416
uuacuaaguacucagguga

SEQ ID NO: 2098418 - RNA, 19 nt, Artificial Sequence
  Description of Artificial Sequence: Synthetic oligonucleotide
  Sense strand starting at position 1277 of SEQ ID NO: 1882146
cuuaguaaggcccaaggau

SEQ ID NO: 2098419 - RNA, 19 nt, Artificial Sequence
  Description of Artificial Sequence: Synthetic oligonucleotide
  Antisense strand to SEQ ID NO: 2098418
auccuugggccuuacuaag

SEQ ID NO: 2098420 - RNA, 19 nt, Artificial Sequence
  Description of Artificial Sequence: Synthetic oligonucleotide
  Sense strand starting at position 1313 of SEQ ID NO: 1882146
aggaauaauugacacagaa

SEQ ID NO: 2098421 - RNA, 19 nt, Artificial Sequence
  Description of Artificial Sequence: Synthetic oligonucleotide
  Antisense strand to SEQ ID NO: 2098420
uucugugucaauuauuccu

SEQ ID NO: 2098422 - RNA, 19 nt, Artificial Sequence
  Description of Artificial Sequence: Synthetic oligonucleotide
  Sense strand starting at position 1323 of SEQ ID NO: 1882146
gacacagaauuggacgaau

SEQ ID NO: 2098423 - RNA, 19 nt, Artificial Sequence
  Description of Artificial Sequence: Synthetic oligonucleotide
  Antisense strand to SEQ ID NO: 2098422
auucguccaauucuguguc

SEQ ID NO: 2098424 - RNA, 19 nt, Artificial Sequence
  Description of Artificial Sequence: Synthetic oligonucleotide
  Sense strand starting at position 1335 of SEQ ID NO: 1882146
gacgaaugacuuugaccau

SEQ ID NO: 2098425 - RNA, 19 nt, Artificial Sequence
  Description of Artificial Sequence: Synthetic oligonucleotide
  Antisense strand to SEQ ID NO: 2098424
auggucaaagucauucguc

SEQ ID NO: 2098426 - RNA, 19 nt, Artificial Sequence
  Description of Artificial Sequence: Synthetic oligonucleotide
  Sense strand starting at position 1336 of SEQ ID NO: 1882146
acgaaugacuuugaccaua

SEQ ID NO: 2098427 - RNA, 19 nt, Artificial Sequence
  Description of Artificial Sequence: Synthetic oligonucleotide
  Antisense strand to SEQ ID NO: 2098426
uauggucaaagucauucgu

SEQ ID NO: 2098428 - RNA, 19 nt, Artificial Sequence
  Description of Artificial Sequence: Synthetic oligonucleotide
  Sense strand starting at position 1407 of SEQ ID NO: 1882146
ccucccugauucgucagau

SEQ ID NO: 2098429 - RNA, 19 nt, Artificial Sequence
  Description of Artificial Sequence: Synthetic oligonucleotide
  Antisense strand to SEQ ID NO: 2098428
aucugacgaaucagggagg

SEQ ID NO: 2098430 - RNA, 19 nt, Artificial Sequence
  Description of Artificial Sequence: Synthetic oligonucleotide
  Sense strand starting at position 1408 of SEQ ID NO: 1882146
cucccugauucgucagauu

SEQ ID NO: 2098431 - RNA, 19 nt, Artificial Sequence
  Description of Artificial Sequence: Synthetic oligonucleotide
  Antisense strand to SEQ ID NO: 2098430
aaucugacgaaucagggag

SEQ ID NO: 2098432 - RNA, 19 nt, Artificial Sequence
  Description of Artificial Sequence: Synthetic oligonucleotide
  Sense strand starting at position 1411 of SEQ ID NO: 1882146
ccugauucgucagauuugu

SEQ ID NO: 2098433 - RNA, 19 nt, Artificial Sequence
  Description of Artificial Sequence: Synthetic oligonucleotide
  Antisense strand to SEQ ID NO: 2098432
acaaaucugacgaaucagg

SEQ ID NO: 2098434 - RNA, 19 nt, Artificial Sequence
  Description of Artificial Sequence: Synthetic oligonucleotide
  Sense strand starting at position 1441 of SEQ ID NO: 1882146
acuuaaucccgcugaaauc

SEQ ID NO: 2098435 - RNA, 19 nt, Artificial Sequence
  Description of Artificial Sequence: Synthetic oligonucleotide
  Antisense strand to SEQ ID NO: 2098434
gauuucagcgggauuaagu

SEQ ID NO: 2098436 - RNA, 19 nt, Artificial Sequence
  Description of Artificial Sequence: Synthetic oligonucleotide
  Sense strand starting at position 1538 of SEQ ID NO: 1882146
aggaguuucucccucagaa

SEQ ID NO: 2098437 - RNA, 19 nt, Artificial Sequence
  Description of Artificial Sequence: Synthetic oligonucleotide
  Antisense strand to SEQ ID NO: 2098436
uucugagggagaaacuccu

SEQ ID NO: 2098438 - RNA, 19 nt, Artificial Sequence
  Description of Artificial Sequence: Synthetic oligonucleotide
  Sense strand starting at position 3318 of SEQ ID NO: 1882146
agggaaugguuucucccaa

SEQ ID NO: 2098439 - RNA, 19 nt, Artificial Sequence
  Description of Artificial Sequence: Synthetic oligonucleotide
  Antisense strand to SEQ ID NO: 2098438
uugggagaaaccauucccu

SEQ ID NO: 2098440 - RNA, 19 nt, Artificial Sequence
  Description of Artificial Sequence: Synthetic oligonucleotide
  Sense strand starting at position 3319 of SEQ ID NO: 1882146
gggaaugguuucucccaag

SEQ ID NO: 2098441 - RNA, 19 nt, Artificial Sequence
  Description of Artificial Sequence: Synthetic oligonucleotide
  Antisense strand to SEQ ID NO: 2098440
cuugggagaaaccauuccc

SEQ ID NO: 2098442 - RNA, 19 nt, Artificial Sequence
  Description of Artificial Sequence: Synthetic oligonucleotide
  Sense strand starting at position 3322 of SEQ ID NO: 1882146
aaugguuucucccaagaug

SEQ ID NO: 2098443 - RNA, 19 nt, Artificial Sequence
  Description of Artificial Sequence: Synthetic oligonucleotide
  Antisense strand to SEQ ID NO: 2098442
caucuugggagaaaccauu

SEQ ID NO: 2098444 - RNA, 19 nt, Artificial Sequence
  Description of Artificial Sequence: Synthetic oligonucleotide
  Sense strand starting at position 3333 of SEQ ID NO: 1882146
ccaagaugugcgugggaac

SEQ ID NO: 2098445 - RNA, 19 nt, Artificial Sequence
  Description of Artificial Sequence: Synthetic oligonucleotide
  Antisense strand to SEQ ID NO: 2098444
guucccacgcacaucuugg

SEQ ID NO: 2098446 - RNA, 19 nt, Artificial Sequence
  Description of Artificial Sequence: Synthetic oligonucleotide
  Sense strand starting at position 3695 of SEQ ID NO: 1882146
agcugaucugguggcuaua

SEQ ID NO: 2098447 - RNA, 19 nt, Artificial Sequence
  Description of Artificial Sequence: Synthetic oligonucleotide
  Antisense strand to SEQ ID NO: 2098446
uauagccaccagaucagcu

SEQ ID NO: 2098448 - RNA, 19 nt, Artificial Sequence
  Description of Artificial Sequence: Synthetic oligonucleotide
  Sense strand starting at position 3697 of SEQ ID NO: 1882146
cugaucugguggcuauaga

SEQ ID NO: 2098449 - RNA, 19 nt, Artificial Sequence
  Description of Artificial Sequence: Synthetic oligonucleotide
  Antisense strand to SEQ ID NO: 2098448
ucuauagccaccagaucag

SEQ ID NO: 2098450 - RNA, 19 nt, Artificial Sequence
  Description of Artificial Sequence: Synthetic oligonucleotide
  Sense strand starting at position 3778 of SEQ ID NO: 1882146
cuagaaaggucucuuccag

SEQ ID NO: 2098451 - RNA, 19 nt, Artificial Sequence
  Description of Artificial Sequence: Synthetic oligonucleotide
  Antisense strand to SEQ ID NO: 2098450
cuggaagagaccuuucuag

SEQ ID NO: 2098452 - RNA, 19 nt, Artificial Sequence
  Description of Artificial Sequence: Synthetic oligonucleotide
  Sense strand starting at position 3782 of SEQ ID NO: 1882146
aaaggucucuuccagagaa

SEQ ID NO: 2098453 - RNA, 19 nt, Artificial Sequence
  Description of Artificial Sequence: Synthetic oligonucleotide
  Antisense strand to SEQ ID NO: 2098452
uucucuggaagagaccuuu

SEQ ID NO: 2098454 - RNA, 19 nt, Artificial Sequence
  Description of Artificial Sequence: Synthetic oligonucleotide
  Sense strand starting at position 3808 of SEQ ID NO: 1882146
gcuguaaagucuuccuugu

SEQ ID NO: 2098455 - RNA, 19 nt, Artificial Sequence
  Description of Artificial Sequence: Synthetic oligonucleotide
  Antisense strand to SEQ ID NO: 2098454
acaaggaagacuuuacagc

SEQ ID NO: 2098456 - RNA, 19 nt, Artificial Sequence
  Description of Artificial Sequence: Synthetic oligonucleotide
  Sense strand starting at position 3810 of SEQ ID NO: 1882146
uguaaagucuuccuugucu

SEQ ID NO: 2098457 - RNA, 19 nt, Artificial Sequence
  Description of Artificial Sequence: Synthetic oligonucleotide
  Antisense strand to SEQ ID NO: 2098456
agacaaggaagacuuuaca

SEQ ID NO: 2098458 - RNA, 19 nt, Artificial Sequence
  Description of Artificial Sequence: Synthetic oligonucleotide
  Sense strand starting at position 3839 of SEQ ID NO: 1882146
cuuccuugugacuguuaca

SEQ ID NO: 2098459 - RNA, 19 nt, Artificial Sequence
  Description of Artificial Sequence: Synthetic oligonucleotide
  Antisense strand to SEQ ID NO: 2098458
uguaacagucacaaggaag

SEQ ID NO: 2098460 - RNA, 19 nt, Artificial Sequence
  Description of Artificial Sequence: Synthetic oligonucleotide
  Sense strand starting at position 3842 of SEQ ID NO: 1882146
ccuugugacuguuacauuu

SEQ ID NO: 2098461 - RNA, 19 nt, Artificial Sequence
  Description of Artificial Sequence: Synthetic oligonucleotide
  Antisense strand to SEQ ID NO: 2098460
aaauguaacagucacaagg

SEQ ID NO: 2098462 - RNA, 19 nt, Artificial Sequence
  Description of Artificial Sequence: Synthetic oligonucleotide
  Sense strand starting at position 3872 of SEQ ID NO: 1882146
aaucgaaauugagggaaga

SEQ ID NO: 2098463 - RNA, 19 nt, Artificial Sequence
  Description of Artificial Sequence: Synthetic oligonucleotide
  Antisense strand to SEQ ID NO: 2098462
ucuucccucaauuucgauu

SEQ ID NO: 2098464 - RNA, 19 nt, Artificial Sequence
  Description of Artificial Sequence: Synthetic oligonucleotide
  Sense strand starting at position 3885 of SEQ ID NO: 1882146
ggaagauaacgugagcuuu

SEQ ID NO: 2098465 - RNA, 19 nt, Artificial Sequence
  Description of Artificial Sequence: Synthetic oligonucleotide
  Antisense strand to SEQ ID NO: 2098464
aaagcucacguuaucuucc

SEQ ID NO: 2098466 - RNA, 19 nt, Artificial Sequence
  Description of Artificial Sequence: Synthetic oligonucleotide
  Sense strand starting at position 3887 of SEQ ID NO: 1882146
aagauaacgugagcuuugu

SEQ ID NO: 2098467 - RNA, 19 nt, Artificial Sequence
  Description of Artificial Sequence: Synthetic oligonucleotide
  Antisense strand to SEQ ID NO: 2098466
acaaagcucacguuaucuu

SEQ ID NO: 2098468 - RNA, 19 nt, Artificial Sequence
  Description of Artificial Sequence: Synthetic oligonucleotide
  Sense strand starting at position 3891 of SEQ ID NO: 1882146
uaacgugagcuuuguuuaa

SEQ ID NO: 2098469 - RNA, 19 nt, Artificial Sequence
  Description of Artificial Sequence: Synthetic oligonucleotide
  Antisense strand to SEQ ID NO: 2098468
uuaaacaaagcucacguua

SEQ ID NO: 2098470 - RNA, 19 nt, Artificial Sequence
  Description of Artificial Sequence: Synthetic oligonucleotide
  Sense strand starting at position 3893 of SEQ ID NO: 1882146
acgugagcuuuguuuaaua

SEQ ID NO: 2098471 - RNA, 19 nt, Artificial Sequence
  Description of Artificial Sequence: Synthetic oligonucleotide
  Antisense strand to SEQ ID NO: 2098470
uauuaaacaaagcucacgu

SEQ ID NO: 2098472 - RNA, 19 nt, Artificial Sequence
  Description of Artificial Sequence: Synthetic oligonucleotide
  Sense strand starting at position 3949 of SEQ ID NO: 1882146
aggagucacaaaugauugu

SEQ ID NO: 2098473 - RNA, 19 nt, Artificial Sequence
  Description of Artificial Sequence: Synthetic oligonucleotide
  Antisense strand to SEQ ID NO: 2098472
acaaucauuugugacuccu

SEQ ID NO: 2098474 - RNA, 19 nt, Artificial Sequence
  Description of Artificial Sequence: Synthetic oligonucleotide
  Sense strand starting at position 3956 of SEQ ID NO: 1882146
acaaaugauuguucugguu

SEQ ID NO: 2098475 - RNA, 19 nt, Artificial Sequence
  Description of Artificial Sequence: Synthetic oligonucleotide
  Antisense strand to SEQ ID NO: 2098474
aaccagaacaaucauuugu

SEQ ID NO: 2098476 - RNA, 19 nt, Artificial Sequence
  Description of Artificial Sequence: Synthetic oligonucleotide
  Sense strand starting at position 109 of SEQ ID NO: 1882147
cuaauaguccucuguaaau

SEQ ID NO: 2098477 - RNA, 19 nt, Artificial Sequence
  Description of Artificial Sequence: Synthetic oligonucleotide
  Antisense strand to SEQ ID NO: 2098476
auuuacagaggacuauuag

SEQ ID NO: 2098478 - RNA, 19 nt, Artificial Sequence
  Description of Artificial Sequence: Synthetic oligonucleotide
  Sense strand starting at position 133 of SEQ ID NO: 1882147
gguugggaggcuuaaguga

SEQ ID NO: 2098479 - RNA, 19 nt, Artificial Sequence
  Description of Artificial Sequence: Synthetic oligonucleotide
  Antisense strand to SEQ ID NO: 2098478
ucacuuaagccucccaacc

SEQ ID NO: 2098480 - RNA, 19 nt, Artificial Sequence
  Description of Artificial Sequence: Synthetic oligonucleotide
  Sense strand starting at position 147 of SEQ ID NO: 1882147
agugaaauauaagcuaauc

SEQ ID NO: 2098481 - RNA, 19 nt, Artificial Sequence
  Description of Artificial Sequence: Synthetic oligonucleotide
  Antisense strand to SEQ ID NO: 2098480
gauuagcuuauauuucacu

SEQ ID NO: 2098482 - RNA, 19 nt, Artificial Sequence
  Description of Artificial Sequence: Synthetic oligonucleotide
  Sense strand starting at position 155 of SEQ ID NO: 1882147
auaagcuaauccucaggau

SEQ ID NO: 2098483 - RNA, 19 nt, Artificial Sequence
  Description of Artificial Sequence: Synthetic oligonucleotide
  Antisense strand to SEQ ID NO: 2098482
auccugaggauuagcuuau

SEQ ID NO: 2098484 - RNA, 19 nt, Artificial Sequence
  Description of Artificial Sequence: Synthetic oligonucleotide
  Sense strand starting at position 167 of SEQ ID NO: 1882147
ucaggauaaugucugguau

SEQ ID NO: 2098485 - RNA, 19 nt, Artificial Sequence
  Description of Artificial Sequence: Synthetic oligonucleotide
  Antisense strand to SEQ ID NO: 2098484
auaccagacauuauccuga

SEQ ID NO: 2098486 - RNA, 19 nt, Artificial Sequence
  Description of Artificial Sequence: Synthetic oligonucleotide
  Sense strand starting at position 168 of SEQ ID NO: 1882147
caggauaaugucugguaua

SEQ ID NO: 2098487 - RNA, 19 nt, Artificial Sequence
  Description of Artificial Sequence: Synthetic oligonucleotide
  Antisense strand to SEQ ID NO: 2098486
uauaccagacauuauccug

SEQ ID NO: 2098488 - RNA, 19 nt, Artificial Sequence
  Description of Artificial Sequence: Synthetic oligonucleotide
  Sense strand starting at position 228 of SEQ ID NO: 1882147
aaaggcuuagauggugaau

SEQ ID NO: 2098489 - RNA, 19 nt, Artificial Sequence
  Description of Artificial Sequence: Synthetic oligonucleotide
  Antisense strand to SEQ ID NO: 2098488
auucaccaucuaagccuuu

SEQ ID NO: 2098490 - RNA, 19 nt, Artificial Sequence
  Description of Artificial Sequence: Synthetic oligonucleotide
  Sense strand starting at position 231 of SEQ ID NO: 1882147
ggcuuagauggugaauaug

SEQ ID NO: 2098491 - RNA, 19 nt, Artificial Sequence
  Description of Artificial Sequence: Synthetic oligonucleotide
  Antisense strand to SEQ ID NO: 2098490
cauauucaccaucuaagcc

SEQ ID NO: 2098492 - RNA, 19 nt, Artificial Sequence
  Description of Artificial Sequence: Synthetic oligonucleotide
  Sense strand starting at position 239 of SEQ ID NO: 1882147
uggugaauaugagugagua

SEQ ID NO: 2098493 - RNA, 19 nt, Artificial Sequence
  Description of Artificial Sequence: Synthetic oligonucleotide
  Antisense strand to SEQ ID NO: 2098492
uacucacucauauucacca

SEQ ID NO: 2098494 - RNA, 19 nt, Artificial Sequence
  Description of Artificial Sequence: Synthetic oligonucleotide
  Sense strand starting at position 240 of SEQ ID NO: 1882147
ggugaauaugagugaguaa

SEQ ID NO: 2098495 - RNA, 19 nt, Artificial Sequence
  Description of Artificial Sequence: Synthetic oligonucleotide
  Antisense strand to SEQ ID NO: 2098494
uuacucacucauauucacc

SEQ ID NO: 2098496 - RNA, 19 nt, Artificial Sequence
  Description of Artificial Sequence: Synthetic oligonucleotide
  Sense strand starting at position 266 of SEQ ID NO: 1882147
aaaguuauccagugagaga

SEQ ID NO: 2098497 - RNA, 19 nt, Artificial Sequence
  Description of Artificial Sequence: Synthetic oligonucleotide
  Antisense strand to SEQ ID NO: 2098496
ucucucacuggauaacuuu

SEQ ID NO: 2098498 - RNA, 19 nt, Artificial Sequence
  Description of Artificial Sequence: Synthetic oligonucleotide
  Sense strand starting at position 391 of SEQ ID NO: 1882147
gggaauuggaggcaguagu

SEQ ID NO: 2098499 - RNA, 19 nt, Artificial Sequence
  Description of Artificial Sequence: Synthetic oligonucleotide
  Antisense strand to SEQ ID NO: 2098498
acuacugccuccaauuccc

SEQ ID NO: 2098500 - RNA, 19 nt, Artificial Sequence
  Description of Artificial Sequence: Synthetic oligonucleotide
  Sense strand starting at position 402 of SEQ ID NO: 1882147
gcaguagucgugccaagac

SEQ ID NO: 2098501 - RNA, 19 nt, Artificial Sequence
  Description of Artificial Sequence: Synthetic oligonucleotide
  Antisense strand to SEQ ID NO: 2098500
gucuuggcacgacuacugc

SEQ ID NO: 2098502 - RNA, 19 nt, Artificial Sequence
  Description of Artificial Sequence: Synthetic oligonucleotide
  Sense strand starting at position 1095 of SEQ ID NO: 1882147
gccucacagucaccauuau

SEQ ID NO: 2098503 - RNA, 19 nt, Artificial Sequence
  Description of Artificial Sequence: Synthetic oligonucleotide
  Antisense strand to SEQ ID NO: 2098502
auaauggugacugugaggc

SEQ ID NO: 2098504 - RNA, 19 nt, Artificial Sequence
  Description of Artificial Sequence: Synthetic oligonucleotide
  Sense strand starting at position 2064 of SEQ ID NO: 1882147
cugucauucggcuaaugga

SEQ ID NO: 2098505 - RNA, 19 nt, Artificial Sequence
  Description of Artificial Sequence: Synthetic oligonucleotide
  Antisense strand to SEQ ID NO: 2098504
uccauuagccgaaugacag

SEQ ID NO: 2098506 - RNA, 19 nt, Artificial Sequence
  Description of Artificial Sequence: Synthetic oligonucleotide
  Sense strand starting at position 2111 of SEQ ID NO: 1882147
cacggucuucgggaucuuu

SEQ ID NO: 2098507 - RNA, 19 nt, Artificial Sequence
  Description of Artificial Sequence: Synthetic oligonucleotide
  Antisense strand to SEQ ID NO: 2098506
aaagaucccgaagaccgug

SEQ ID NO: 2098508 - RNA, 19 nt, Artificial Sequence
  Description of Artificial Sequence: Synthetic oligonucleotide
  Sense strand starting at position 2121 of SEQ ID NO: 1882147
gggaucuuuccaggagguu

SEQ ID NO: 2098509 - RNA, 19 nt, Artificial Sequence
  Description of Artificial Sequence: Synthetic oligonucleotide
  Antisense strand to SEQ ID NO: 2098508
aaccuccuggaaagauccc

SEQ ID NO: 2098510 - RNA, 19 nt, Artificial Sequence
  Description of Artificial Sequence: Synthetic oligonucleotide
  Sense strand starting at position 2122 of SEQ ID NO: 1882147
ggaucuuuccaggagguuu

SEQ ID NO: 2098511 - RNA, 19 nt, Artificial Sequence
  Description of Artificial Sequence: Synthetic oligonucleotide
  Antisense strand to SEQ ID NO: 2098510
aaaccuccuggaaagaucc

SEQ ID NO: 2098512 - RNA, 19 nt, Artificial Sequence
  Description of Artificial Sequence: Synthetic oligonucleotide
  Sense strand starting at position 2139 of SEQ ID NO: 1882147
uuucgaauagauuaagcca

SEQ ID NO: 2098513 - RNA, 19 nt, Artificial Sequence
  Description of Artificial Sequence: Synthetic oligonucleotide
  Antisense strand to SEQ ID NO: 2098512
uggcuuaaucuauucgaaa

SEQ ID NO: 2098514 - RNA, 19 nt, Artificial Sequence
  Description of Artificial Sequence: Synthetic oligonucleotide
  Sense strand starting at position 2329 of SEQ ID NO: 1882147
aggauuucuuuggaacacu

SEQ ID NO: 2098515 - RNA, 19 nt, Artificial Sequence
  Description of Artificial Sequence: Synthetic oligonucleotide
  Antisense strand to SEQ ID NO: 2098514
aguguuccaaagaaauccu

SEQ ID NO: 2098516 - RNA, 19 nt, Artificial Sequence
  Description of Artificial Sequence: Synthetic oligonucleotide
  Sense strand starting at position 2365 of SEQ ID NO: 1882147
guggcuagaguccauauga

SEQ ID NO: 2098517 - RNA, 19 nt, Artificial Sequence
  Description of Artificial Sequence: Synthetic oligonucleotide
  Antisense strand to SEQ ID NO: 2098516
ucauauggacucuagccac

SEQ ID NO: 2098518 - RNA, 19 nt, Artificial Sequence
  Description of Artificial Sequence: Synthetic oligonucleotide
  Sense strand starting at position 2522 of SEQ ID NO: 1882147
gcaccauugccaggugaac

SEQ ID NO: 2098519 - RNA, 19 nt, Artificial Sequence
  Description of Artificial Sequence: Synthetic oligonucleotide
  Antisense strand to SEQ ID NO: 2098518
guucaccuggcaauggugc

SEQ ID NO: 2098520 - RNA, 19 nt, Artificial Sequence
  Description of Artificial Sequence: Synthetic oligonucleotide
  Sense strand starting at position 2588 of SEQ ID NO: 1882147
ugucuauuuccucagcucu

SEQ ID NO: 2098521 - RNA, 19 nt, Artificial Sequence
  Description of Artificial Sequence: Synthetic oligonucleotide
  Antisense strand to SEQ ID NO: 2098520
agagcugaggaaauagaca

SEQ ID NO: 2098522 - RNA, 19 nt, Artificial Sequence
  Description of Artificial Sequence: Synthetic oligonucleotide
  Sense strand starting at position 2681 of SEQ ID NO: 1882147
guuugauuccagcaagaga

SEQ ID NO: 2098523 - RNA, 19 nt, Artificial Sequence
  Description of Artificial Sequence: Synthetic oligonucleotide
  Antisense strand to SEQ ID NO: 2098522
ucucuugcuggaaucaaac

SEQ ID NO: 2098524 - RNA, 19 nt, Artificial Sequence
  Description of Artificial Sequence: Synthetic oligonucleotide
  Sense strand starting at position 2778 of SEQ ID NO: 1882147
auaggcucugguugggaaa

SEQ ID NO: 2098525 - RNA, 19 nt, Artificial Sequence
  Description of Artificial Sequence: Synthetic oligonucleotide
  Antisense strand to SEQ ID NO: 2098524
uuucccaaccagagccuau

SEQ ID NO: 2098526 - RNA, 19 nt, Artificial Sequence
  Description of Artificial Sequence: Synthetic oligonucleotide
  Sense strand starting at position 2877 of SEQ ID NO: 1882147
auaggaauguggcugaaga

SEQ ID NO: 2098527 - RNA, 19 nt, Artificial Sequence
  Description of Artificial Sequence: Synthetic oligonucleotide
  Antisense strand to SEQ ID NO: 2098526
ucuucagccacauuccuau

SEQ ID NO: 2098528 - RNA, 19 nt, Artificial Sequence
  Description of Artificial Sequence: Synthetic oligonucleotide
  Sense strand starting at position 2925 of SEQ ID NO: 1882147
cugucacagcguguucaua

SEQ ID NO: 2098529 - RNA, 19 nt, Artificial Sequence
  Description of Artificial Sequence: Synthetic oligonucleotide
  Antisense strand to SEQ ID NO: 2098528
uaugaacacgcugugacag

SEQ ID NO: 2098530 - RNA, 19 nt, Artificial Sequence
  Description of Artificial Sequence: Synthetic oligonucleotide
  Sense strand starting at position 2971 of SEQ ID NO: 1882147
aggcagauuggguggguaa

SEQ ID NO: 2098531 - RNA, 19 nt, Artificial Sequence
  Description of Artificial Sequence: Synthetic oligonucleotide
  Antisense strand to SEQ ID NO: 2098530
uuacccacccaaucugccu

SEQ ID NO: 2098532 - RNA, 19 nt, Artificial Sequence
  Description of Artificial Sequence: Synthetic oligonucleotide
  Sense strand starting at position 2972 of SEQ ID NO: 1882147
ggcagauuggguggguaau

SEQ ID NO: 2098533 - RNA, 19 nt, Artificial Sequence
  Description of Artificial Sequence: Synthetic oligonucleotide
  Antisense strand to SEQ ID NO: 2098532
auuacccacccaaucugcc

SEQ ID NO: 2098534 - RNA, 19 nt, Artificial Sequence
  Description of Artificial Sequence: Synthetic oligonucleotide
  Sense strand starting at position 2973 of SEQ ID NO: 1882147
gcagauuggguggguaauu

SEQ ID NO: 2098535 - RNA, 19 nt, Artificial Sequence
  Description of Artificial Sequence: Synthetic oligonucleotide
  Antisense strand to SEQ ID NO: 2098534
aauuacccacccaaucugc

SEQ ID NO: 2098536 - RNA, 19 nt, Artificial Sequence
  Description of Artificial Sequence: Synthetic oligonucleotide
  Sense strand starting at position 3014 of SEQ ID NO: 1882147
gagaaauugcauuggcauc

SEQ ID NO: 2098537 - RNA, 19 nt, Artificial Sequence
  Description of Artificial Sequence: Synthetic oligonucleotide
  Antisense strand to SEQ ID NO: 2098536
gaugccaaugcaauuucuc

SEQ ID NO: 2098538 - RNA, 19 nt, Artificial Sequence
  Description of Artificial Sequence: Synthetic oligonucleotide
  Sense strand starting at position 3209 of SEQ ID NO: 1882147
gggagcuaugcagaccuuu

SEQ ID NO: 2098539 - RNA, 19 nt, Artificial Sequence
  Description of Artificial Sequence: Synthetic oligonucleotide
  Antisense strand to SEQ ID NO: 2098538
aaaggucugcauagcuccc

SEQ ID NO: 2098540 - RNA, 19 nt, Artificial Sequence
  Description of Artificial Sequence: Synthetic oligonucleotide
  Sense strand starting at position 3238 of SEQ ID NO: 1882147
ggaccaauaaucuggugau

SEQ ID NO: 2098541 - RNA, 19 nt, Artificial Sequence
  Description of Artificial Sequence: Synthetic oligonucleotide
  Antisense strand to SEQ ID NO: 2098540
aucaccagauuauuggucc

SEQ ID NO: 2098542 - RNA, 19 nt, Artificial Sequence
  Description of Artificial Sequence: Synthetic oligonucleotide
  Sense strand starting at position 3266 of SEQ ID NO: 1882147
cagauuaguccagguagaa

SEQ ID NO: 2098543 - RNA, 19 nt, Artificial Sequence
  Description of Artificial Sequence: Synthetic oligonucleotide
  Antisense strand to SEQ ID NO: 2098542
uucuaccuggacuaaucug

SEQ ID NO: 2098544 - RNA, 19 nt, Artificial Sequence
  Description of Artificial Sequence: Synthetic oligonucleotide
  Sense strand starting at position 3315 of SEQ ID NO: 1882147
uaaauaaggcugugaggua

SEQ ID NO: 2098545 - RNA, 19 nt, Artificial Sequence
  Description of Artificial Sequence: Synthetic oligonucleotide
  Antisense strand to SEQ ID NO: 2098544
uaccucacagccuuauuua

SEQ ID NO: 2098546 - RNA, 19 nt, Artificial Sequence
  Description of Artificial Sequence: Synthetic oligonucleotide
  Sense strand starting at position 3354 of SEQ ID NO: 1882147
uugaacaaguggucaacuu

SEQ ID NO: 2098547 - RNA, 19 nt, Artificial Sequence
  Description of Artificial Sequence: Synthetic oligonucleotide
  Antisense strand to SEQ ID NO: 2098546
aaguugaccacuuguucaa

SEQ ID NO: 2098548 - RNA, 19 nt, Artificial Sequence
  Description of Artificial Sequence: Synthetic oligonucleotide
  Sense strand starting at position 3355 of SEQ ID NO: 1882147
ugaacaaguggucaacuuu

SEQ ID NO: 2098549 - RNA, 19 nt, Artificial Sequence
  Description of Artificial Sequence: Synthetic oligonucleotide
  Antisense strand to SEQ ID NO: 2098548
aaaguugaccacuuguuca

SEQ ID NO: 2098550 - RNA, 19 nt, Artificial Sequence
  Description of Artificial Sequence: Synthetic oligonucleotide
  Sense strand starting at position 3668 of SEQ ID NO: 1882147
cucugaguuugaccucaua

SEQ ID NO: 2098551 - RNA, 19 nt, Artificial Sequence
  Description of Artificial Sequence: Synthetic oligonucleotide
  Antisense strand to SEQ ID NO: 2098550
uaugaggucaaacucagag

SEQ ID NO: 2098552 - RNA, 19 nt, Artificial Sequence
  Description of Artificial Sequence: Synthetic oligonucleotide
  Sense strand starting at position 3671 of SEQ ID NO: 1882147
ugaguuugaccucauaacu

SEQ ID NO: 2098553 - RNA, 19 nt, Artificial Sequence
  Description of Artificial Sequence: Synthetic oligonucleotide
  Antisense strand to SEQ ID NO: 2098552
aguuaugaggucaaacuca

SEQ ID NO: 2098554 - RNA, 19 nt, Artificial Sequence
  Description of Artificial Sequence: Synthetic oligonucleotide
  Sense strand starting at position 3786 of SEQ ID NO: 1882147
gcuuucugccucuaagacu

SEQ ID NO: 2098555 - RNA, 19 nt, Artificial Sequence
  Description of Artificial Sequence: Synthetic oligonucleotide
  Antisense strand to SEQ ID NO: 2098554
agucuuagaggcagaaagc

SEQ ID NO: 2098556 - RNA, 19 nt, Artificial Sequence
  Description of Artificial Sequence: Synthetic oligonucleotide
  Sense strand starting at position 81 of SEQ ID NO: 1882148
uaagguuuauuucuguagu

SEQ ID NO: 2098557 - RNA, 19 nt, Artificial Sequence
  Description of Artificial Sequence: Synthetic oligonucleotide
  Antisense strand to SEQ ID NO: 2098556
acuacagaaauaaaccuua

SEQ ID NO: 2098558 - RNA, 19 nt, Artificial Sequence
  Description of Artificial Sequence: Synthetic oligonucleotide
  Sense strand starting at position 83 of SEQ ID NO: 1882148
agguuuauuucuguaguuu

SEQ ID NO: 2098559 - RNA, 19 nt, Artificial Sequence
  Description of Artificial Sequence: Synthetic oligonucleotide
  Antisense strand to SEQ ID NO: 2098558
aaacuacagaaauaaaccu

SEQ ID NO: 2098560 - RNA, 19 nt, Artificial Sequence
  Description of Artificial Sequence: Synthetic oligonucleotide
  Sense strand starting at position 100 of SEQ ID NO: 1882148
uuagacuacugaguaaugu

SEQ ID NO: 2098561 - RNA, 19 nt, Artificial Sequence
  Description of Artificial Sequence: Synthetic oligonucleotide
  Antisense strand to SEQ ID NO: 2098560
acauuacucaguagucuaa

SEQ ID NO: 2098562 - RNA, 19 nt, Artificial Sequence
  Description of Artificial Sequence: Synthetic oligonucleotide
  Sense strand starting at position 140 of SEQ ID NO: 1882148
ggguuucucaaagguaauu

SEQ ID NO: 2098563 - RNA, 19 nt, Artificial Sequence
  Description of Artificial Sequence: Synthetic oligonucleotide
  Antisense strand to SEQ ID NO: 2098562
aauuaccuuugagaaaccc

SEQ ID NO: 2098564 - RNA, 19 nt, Artificial Sequence
  Description of Artificial Sequence: Synthetic oligonucleotide
  Sense strand starting at position 201 of SEQ ID NO: 1882148
gggucauuaugcucaucag

SEQ ID NO: 2098565 - RNA, 19 nt, Artificial Sequence
  Description of Artificial Sequence: Synthetic oligonucleotide
  Antisense strand to SEQ ID NO: 2098564
cugaugagcauaaugaccc

SEQ ID NO: 2098566 - RNA, 19 nt, Artificial Sequence
  Description of Artificial Sequence: Synthetic oligonucleotide
  Sense strand starting at position 202 of SEQ ID NO: 1882148
ggucauuaugcucaucagu

SEQ ID NO: 2098567 - RNA, 19 nt, Artificial Sequence
  Description of Artificial Sequence: Synthetic oligonucleotide
  Antisense strand to SEQ ID NO: 2098566
acugaugagcauaaugacc

SEQ ID NO: 2098568 - RNA, 19 nt, Artificial Sequence
  Description of Artificial Sequence: Synthetic oligonucleotide
  Sense strand starting at position 204 of SEQ ID NO: 1882148
ucauuaugcucaucagugu

SEQ ID NO: 2098569 - RNA, 19 nt, Artificial Sequence
  Description of Artificial Sequence: Synthetic oligonucleotide
  Antisense strand to SEQ ID NO: 2098568
acacugaugagcauaauga

SEQ ID NO: 2098570 - RNA, 19 nt, Artificial Sequence
  Description of Artificial Sequence: Synthetic oligonucleotide
  Sense strand starting at position 267 of SEQ ID NO: 1882148
cgucuaguuggcucuguca

SEQ ID NO: 2098571 - RNA, 19 nt, Artificial Sequence
  Description of Artificial Sequence: Synthetic oligonucleotide
  Antisense strand to SEQ ID NO: 2098570
ugacagagccaacuagacg

SEQ ID NO: 2098572 - RNA, 19 nt, Artificial Sequence
  Description of Artificial Sequence: Synthetic oligonucleotide
  Sense strand starting at position 330 of SEQ ID NO: 1882148
cuggucucuugucuagaca

SEQ ID NO: 2098573 - RNA, 19 nt, Artificial Sequence
  Description of Artificial Sequence: Synthetic oligonucleotide
  Antisense strand to SEQ ID NO: 2098572
ugucuagacaagagaccag

SEQ ID NO: 2098574 - RNA, 19 nt, Artificial Sequence
  Description of Artificial Sequence: Synthetic oligonucleotide
  Sense strand starting at position 331 of SEQ ID NO: 1882148
uggucucuugucuagacaa

SEQ ID NO: 2098575 - RNA, 19 nt, Artificial Sequence
  Description of Artificial Sequence: Synthetic oligonucleotide
  Antisense strand to SEQ ID NO: 2098574
uugucuagacaagagacca

SEQ ID NO: 2098576 - RNA, 19 nt, Artificial Sequence
  Description of Artificial Sequence: Synthetic oligonucleotide
  Sense strand starting at position 333 of SEQ ID NO: 1882148
gucucuugucuagacaaca

SEQ ID NO: 2098577 - RNA, 19 nt, Artificial Sequence
  Description of Artificial Sequence: Synthetic oligonucleotide
  Antisense strand to SEQ ID NO: 2098576
uguugucuagacaagagac

SEQ ID NO: 2098578 - RNA, 19 nt, Artificial Sequence
  Description of Artificial Sequence: Synthetic oligonucleotide
  Sense strand starting at position 588 of SEQ ID NO: 1882148
guggacuaacgguaucuuu

SEQ ID NO: 2098579 - RNA, 19 nt, Artificial Sequence
  Description of Artificial Sequence: Synthetic oligonucleotide
  Antisense strand to SEQ ID NO: 2098578
aaagauaccguuaguccac

SEQ ID NO: 2098580 - RNA, 19 nt, Artificial Sequence
  Description of Artificial Sequence: Synthetic oligonucleotide
  Sense strand starting at position 689 of SEQ ID NO: 1882148
uucucagguuucccuaaga

SEQ ID NO: 2098581 - RNA, 19 nt, Artificial Sequence
  Description of Artificial Sequence: Synthetic oligonucleotide
  Antisense strand to SEQ ID NO: 2098580
ucuuagggaaaccugagaa

SEQ ID NO: 2098582 - RNA, 19 nt, Artificial Sequence
  Description of Artificial Sequence: Synthetic oligonucleotide
  Sense strand starting at position 743 of SEQ ID NO: 1882148
uuacauuugugaugacauu

SEQ ID NO: 2098583 - RNA, 19 nt, Artificial Sequence
  Description of Artificial Sequence: Synthetic oligonucleotide
  Antisense strand to SEQ ID NO: 2098582
aaugucaucacaaauguaa

SEQ ID NO: 2098584 - RNA, 19 nt, Artificial Sequence
  Description of Artificial Sequence: Synthetic oligonucleotide
  Sense strand starting at position 872 of SEQ ID NO: 1882148
auuugucguuuccugcaaa

SEQ ID NO: 2098585 - RNA, 19 nt, Artificial Sequence
  Description of Artificial Sequence: Synthetic oligonucleotide
  Antisense strand to SEQ ID NO: 2098584
uuugcaggaaacgacaaau

SEQ ID NO: 2098586 - RNA, 19 nt, Artificial Sequence
  Description of Artificial Sequence: Synthetic oligonucleotide
  Sense strand starting at position 923 of SEQ ID NO: 1882148
acaauuuaguuggaggaaa

SEQ ID NO: 2098587 - RNA, 19 nt, Artificial Sequence
  Description of Artificial Sequence: Synthetic oligonucleotide
  Antisense strand to SEQ ID NO: 2098586
uuuccuccaacuaaauugu

SEQ ID NO: 2098588 - RNA, 19 nt, Artificial Sequence
  Description of Artificial Sequence: Synthetic oligonucleotide
  Sense strand starting at position 945 of SEQ ID NO: 1882148
acgcauugagugcaguaaa

SEQ ID NO: 2098589 - RNA, 19 nt, Artificial Sequence
  Description of Artificial Sequence: Synthetic oligonucleotide
  Antisense strand to SEQ ID NO: 2098588
uuuacugcacucaaugcgu

SEQ ID NO: 2098590 - RNA, 19 nt, Artificial Sequence
  Description of Artificial Sequence: Synthetic oligonucleotide
  Sense strand starting at position 948 of SEQ ID NO: 1882148
cauugagugcaguaaagca

SEQ ID NO: 2098591 - RNA, 19 nt, Artificial Sequence
  Description of Artificial Sequence: Synthetic oligonucleotide
  Antisense strand to SEQ ID NO: 2098590
ugcuuuacugcacucaaug

SEQ ID NO: 2098592 - RNA, 19 nt, Artificial Sequence
  Description of Artificial Sequence: Synthetic oligonucleotide
  Sense strand starting at position 964 of SEQ ID NO: 1882148
gcacaccugucacuagaaa

SEQ ID NO: 2098593 - RNA, 19 nt, Artificial Sequence
  Description of Artificial Sequence: Synthetic oligonucleotide
  Antisense strand to SEQ ID NO: 2098592
uuucuagugacaggugugc

SEQ ID NO: 2098594 - RNA, 19 nt, Artificial Sequence
  Description of Artificial Sequence: Synthetic oligonucleotide
  Sense strand starting at position 1357 of SEQ ID NO: 1882148
ucaauucgacagcaaauau

SEQ ID NO: 2098595 - RNA, 19 nt, Artificial Sequence
  Description of Artificial Sequence: Synthetic oligonucleotide
  Antisense strand to SEQ ID NO: 2098594
auauuugcugucgaauuga

SEQ ID NO: 2098596 - RNA, 19 nt, Artificial Sequence
  Description of Artificial Sequence: Synthetic oligonucleotide
  Sense strand starting at position 1405 of SEQ ID NO: 1882148
guaauaugccugcgauuuc

SEQ ID NO: 2098597 - RNA, 19 nt, Artificial Sequence
  Description of Artificial Sequence: Synthetic oligonucleotide
  Antisense strand to SEQ ID NO: 2098596
gaaaucgcaggcauauuac

SEQ ID NO: 2098598 - RNA, 19 nt, Artificial Sequence
  Description of Artificial Sequence: Synthetic oligonucleotide
  Sense strand starting at position 1477 of SEQ ID NO: 1882148
gcagaaugccaguacuaug

SEQ ID NO: 2098599 - RNA, 19 nt, Artificial Sequence
  Description of Artificial Sequence: Synthetic oligonucleotide
  Antisense strand to SEQ ID NO: 2098598
cauaguacuggcauucugc

SEQ ID NO: 2098600 - RNA, 19 nt, Artificial Sequence
  Description of Artificial Sequence: Synthetic oligonucleotide
  Sense strand starting at position 1484 of SEQ ID NO: 1882148
gccaguacuaugcguauuu

SEQ ID NO: 2098601 - RNA, 19 nt, Artificial Sequence
  Description of Artificial Sequence: Synthetic oligonucleotide
  Antisense strand to SEQ ID NO: 2098600
aaauacgcauaguacuggc

SEQ ID NO: 2098602 - RNA, 19 nt, Artificial Sequence
  Description of Artificial Sequence: Synthetic oligonucleotide
  Sense strand starting at position 1485 of SEQ ID NO: 1882148
ccaguacuaugcguauuua

SEQ ID NO: 2098603 - RNA, 19 nt, Artificial Sequence
  Description of Artificial Sequence: Synthetic oligonucleotide
  Antisense strand to SEQ ID NO: 2098602
uaaauacgcauaguacugg

SEQ ID NO: 2098604 - RNA, 19 nt, Artificial Sequence
  Description of Artificial Sequence: Synthetic oligonucleotide
  Sense strand starting at position 1486 of SEQ ID NO: 1882148
caguacuaugcguauuuau

SEQ ID NO: 2098605 - RNA, 19 nt, Artificial Sequence
  Description of Artificial Sequence: Synthetic oligonucleotide
  Antisense strand to SEQ ID NO: 2098604
auaaauacgcauaguacug

SEQ ID NO: 2098606 - RNA, 19 nt, Artificial Sequence
  Description of Artificial Sequence: Synthetic oligonucleotide
  Sense strand starting at position 1510 of SEQ ID NO: 1882148
ugggcuucucaggaaguau

SEQ ID NO: 2098607 - RNA, 19 nt, Artificial Sequence
  Description of Artificial Sequence: Synthetic oligonucleotide
  Antisense strand to SEQ ID NO: 2098606
auacuuccugagaagccca

SEQ ID NO: 2098608 - RNA, 19 nt, Artificial Sequence
  Description of Artificial Sequence: Synthetic oligonucleotide
  Sense strand starting at position 1839 of SEQ ID NO: 1882148
caagaucacgcguggaaac

SEQ ID NO: 2098609 - RNA, 19 nt, Artificial Sequence
  Description of Artificial Sequence: Synthetic oligonucleotide
  Antisense strand to SEQ ID NO: 2098608
guuuccacgcgugaucuug

SEQ ID NO: 2098610 - RNA, 19 nt, Artificial Sequence
  Description of Artificial Sequence: Synthetic oligonucleotide
  Sense strand starting at position 2011 of SEQ ID NO: 1882148
ugagguaggcuuuauggca

SEQ ID NO: 2098611 - RNA, 19 nt, Artificial Sequence
  Description of Artificial Sequence: Synthetic oligonucleotide
  Antisense strand to SEQ ID NO: 2098610
ugccauaaagccuaccuca

SEQ ID NO: 2098612 - RNA, 19 nt, Artificial Sequence
  Description of Artificial Sequence: Synthetic oligonucleotide
  Sense strand starting at position 2018 of SEQ ID NO: 1882148
ggcuuuauggcauaagguu

SEQ ID NO: 2098613 - RNA, 19 nt, Artificial Sequence
  Description of Artificial Sequence: Synthetic oligonucleotide
  Antisense strand to SEQ ID NO: 2098612
aaccuuaugccauaaagcc

SEQ ID NO: 2098614 - RNA, 19 nt, Artificial Sequence
  Description of Artificial Sequence: Synthetic oligonucleotide
  Sense strand starting at position 2048 of SEQ ID NO: 1882148
gacaguaaugccgauuaca

SEQ ID NO: 2098615 - RNA, 19 nt, Artificial Sequence
  Description of Artificial Sequence: Synthetic oligonucleotide
  Antisense strand to SEQ ID NO: 2098614
uguaaucggcauuacuguc

SEQ ID NO: 2098616 - RNA, 19 nt, Artificial Sequence
  Description of Artificial Sequence: Synthetic oligonucleotide
  Sense strand starting at position 3043 of SEQ ID NO: 1882148
gccugagugccugggaauc

SEQ ID NO: 2098617 - RNA, 19 nt, Artificial Sequence
  Description of Artificial Sequence: Synthetic oligonucleotide
  Antisense strand to SEQ ID NO: 2098616
gauucccaggcacucaggc

SEQ ID NO: 2098618 - RNA, 19 nt, Artificial Sequence
  Description of Artificial Sequence: Synthetic oligonucleotide
  Sense strand starting at position 3093 of SEQ ID NO: 1882148
guacauucugcuuggguga

SEQ ID NO: 2098619 - RNA, 19 nt, Artificial Sequence
  Description of Artificial Sequence: Synthetic oligonucleotide
  Antisense strand to SEQ ID NO: 2098618
ucacccaagcagaauguac

SEQ ID NO: 2098620 - RNA, 19 nt, Artificial Sequence
  Description of Artificial Sequence: Synthetic oligonucleotide
  Sense strand starting at position 3096 of SEQ ID NO: 1882148
cauucugcuugggugagua

SEQ ID NO: 2098621 - RNA, 19 nt, Artificial Sequence
  Description of Artificial Sequence: Synthetic oligonucleotide
  Antisense strand to SEQ ID NO: 2098620
uacucacccaagcagaaug

SEQ ID NO: 2098622 - RNA, 19 nt, Artificial Sequence
  Description of Artificial Sequence: Synthetic oligonucleotide
  Sense strand starting at position 3140 of SEQ ID NO: 1882148
gcugaaauucuacaaugua

SEQ ID NO: 2098623 - RNA, 19 nt, Artificial Sequence
  Description of Artificial Sequence: Synthetic oligonucleotide
  Antisense strand to SEQ ID NO: 2098622
uacauuguagaauuucagc

SEQ ID NO: 2098624 - RNA, 19 nt, Artificial Sequence
  Description of Artificial Sequence: Synthetic oligonucleotide
  Sense strand starting at position 3181 of SEQ ID NO: 1882148
agggucaugccauagggua

SEQ ID NO: 2098625 - RNA, 19 nt, Artificial Sequence
  Description of Artificial Sequence: Synthetic oligonucleotide
  Antisense strand to SEQ ID NO: 2098624
uacccuauggcaugacccu

SEQ ID NO: 2098626 - RNA, 19 nt, Artificial Sequence
  Description of Artificial Sequence: Synthetic oligonucleotide
  Sense strand starting at position 3215 of SEQ ID NO: 1882148
aacagugugagccaugagu

SEQ ID NO: 2098627 - RNA, 19 nt, Artificial Sequence
  Description of Artificial Sequence: Synthetic oligonucleotide
  Antisense strand to SEQ ID NO: 2098626
acucauggcucacacuguu

SEQ ID NO: 2098628 - RNA, 19 nt, Artificial Sequence
  Description of Artificial Sequence: Synthetic oligonucleotide
  Sense strand starting at position 3221 of SEQ ID NO: 1882148
gugagccaugaguguaauu

SEQ ID NO: 2098629 - RNA, 19 nt, Artificial Sequence
  Description of Artificial Sequence: Synthetic oligonucleotide
  Antisense strand to SEQ ID NO: 2098628
aauuacacucauggcucac

SEQ ID NO: 2098630 - RNA, 19 nt, Artificial Sequence
  Description of Artificial Sequence: Synthetic oligonucleotide
  Sense strand starting at position 3820 of SEQ ID NO: 1882148
gugugaaggcgguuaugca

SEQ ID NO: 2098631 - RNA, 19 nt, Artificial Sequence
  Description of Artificial Sequence: Synthetic oligonucleotide
  Antisense strand to SEQ ID NO: 2098630
ugcauaaccgccuucacac

SEQ ID NO: 2098632 - RNA, 19 nt, Artificial Sequence
  Description of Artificial Sequence: Synthetic oligonucleotide
  Sense strand starting at position 3821 of SEQ ID NO: 1882148
ugugaaggcgguuaugcaa

SEQ ID NO: 2098633 - RNA, 19 nt, Artificial Sequence
  Description of Artificial Sequence: Synthetic oligonucleotide
  Antisense strand to SEQ ID NO: 2098632
uugcauaaccgccuucaca

SEQ ID NO: 2098634 - RNA, 19 nt, Artificial Sequence
  Description of Artificial Sequence: Synthetic oligonucleotide
  Sense strand starting at position 3827 of SEQ ID NO: 1882148
ggcgguuaugcaagaucug

SEQ ID NO: 2098635 - RNA, 19 nt, Artificial Sequence
  Description of Artificial Sequence: Synthetic oligonucleotide
  Antisense strand to SEQ ID NO: 2098634
cagaucuugcauaaccgcc

SEQ ID NO: 2098636 - RNA, 19 nt, Artificial Sequence
  Description of Artificial Sequence: Synthetic oligonucleotide
  Sense strand starting at position 26 of SEQ ID NO: 1882149
uaaauuagacaguggguaa

SEQ ID NO: 2098637 - RNA, 19 nt, Artificial Sequence
  Description of Artificial Sequence: Synthetic oligonucleotide
  Antisense strand to SEQ ID NO: 2098636
uuacccacugucuaauuua

SEQ ID NO: 2098638 - RNA, 19 nt, Artificial Sequence
  Description of Artificial Sequence: Synthetic oligonucleotide
  Sense strand starting at position 38 of SEQ ID NO: 1882149
uggguaauuucccaaggau

SEQ ID NO: 2098639 - RNA, 19 nt, Artificial Sequence
  Description of Artificial Sequence: Synthetic oligonucleotide
  Antisense strand to SEQ ID NO: 2098638
auccuugggaaauuaccca

SEQ ID NO: 2098640 - RNA, 19 nt, Artificial Sequence
  Description of Artificial Sequence: Synthetic oligonucleotide
  Sense strand starting at position 123 of SEQ ID NO: 1882149
cacgauuccugaguucuga

SEQ ID NO: 2098641 - RNA, 19 nt, Artificial Sequence
  Description of Artificial Sequence: Synthetic oligonucleotide
  Antisense strand to SEQ ID NO: 2098640
ucagaacucaggaaucgug

SEQ ID NO: 2098642 - RNA, 19 nt, Artificial Sequence
  Description of Artificial Sequence: Synthetic oligonucleotide
  Sense strand starting at position 161 of SEQ ID NO: 1882149
ggaguaaauucagaggaca

SEQ ID NO: 2098643 - RNA, 19 nt, Artificial Sequence
  Description of Artificial Sequence: Synthetic oligonucleotide
  Antisense strand to SEQ ID NO: 2098642
uguccucugaauuuacucc

SEQ ID NO: 2098644 - RNA, 19 nt, Artificial Sequence
  Description of Artificial Sequence: Synthetic oligonucleotide
  Sense strand starting at position 544 of SEQ ID NO: 1882149
aaaggugaaguuuauuagu

SEQ ID NO: 2098645 - RNA, 19 nt, Artificial Sequence
  Description of Artificial Sequence: Synthetic oligonucleotide
  Antisense strand to SEQ ID NO: 2098644
acuaauaaacuucaccuuu

SEQ ID NO: 2098646 - RNA, 19 nt, Artificial Sequence
  Description of Artificial Sequence: Synthetic oligonucleotide
  Sense strand starting at position 546 of SEQ ID NO: 1882149
aggugaaguuuauuaguua

SEQ ID NO: 2098647 - RNA, 19 nt, Artificial Sequence
  Description of Artificial Sequence: Synthetic oligonucleotide
  Antisense strand to SEQ ID NO: 2098646
uaacuaauaaacuucaccu

SEQ ID NO: 2098648 - RNA, 19 nt, Artificial Sequence
  Description of Artificial Sequence: Synthetic oligonucleotide
  Sense strand starting at position 549 of SEQ ID NO: 1882149
ugaaguuuauuaguuagga

SEQ ID NO: 2098649 - RNA, 19 nt, Artificial Sequence
  Description of Artificial Sequence: Synthetic oligonucleotide
  Antisense strand to SEQ ID NO: 2098648
uccuaacuaauaaacuuca

SEQ ID NO: 2098650 - RNA, 19 nt, Artificial Sequence
  Description of Artificial Sequence: Synthetic oligonucleotide
  Sense strand starting at position 550 of SEQ ID NO: 1882149
gaaguuuauuaguuaggaa

SEQ ID NO: 2098651 - RNA, 19 nt, Artificial Sequence
  Description of Artificial Sequence: Synthetic oligonucleotide
  Antisense strand to SEQ ID NO: 2098650
uuccuaacuaauaaacuuc

SEQ ID NO: 2098652 - RNA, 19 nt, Artificial Sequence
  Description of Artificial Sequence: Synthetic oligonucleotide
  Sense strand starting at position 582 of SEQ ID NO: 1882149
ggaccaaaugugugauucu

SEQ ID NO: 2098653 - RNA, 19 nt, Artificial Sequence
  Description of Artificial Sequence: Synthetic oligonucleotide
  Antisense strand to SEQ ID NO: 2098652
agaaucacacauuuggucc

SEQ ID NO: 2098654 - RNA, 19 nt, Artificial Sequence
  Description of Artificial Sequence: Synthetic oligonucleotide
  Sense strand starting at position 585 of SEQ ID NO: 1882149
ccaaaugugugauucuaga

SEQ ID NO: 2098655 - RNA, 19 nt, Artificial Sequence
  Description of Artificial Sequence: Synthetic oligonucleotide
  Antisense strand to SEQ ID NO: 2098654
ucuagaaucacacauuugg

SEQ ID NO: 2098656 - RNA, 19 nt, Artificial Sequence
  Description of Artificial Sequence: Synthetic oligonucleotide
  Sense strand starting at position 648 of SEQ ID NO: 1882149
gacagacuucuugagcucu

SEQ ID NO: 2098657 - RNA, 19 nt, Artificial Sequence
  Description of Artificial Sequence: Synthetic oligonucleotide
  Antisense strand to SEQ ID NO: 2098656
agagcucaagaagucuguc

SEQ ID NO: 2098658 - RNA, 19 nt, Artificial Sequence
  Description of Artificial Sequence: Synthetic oligonucleotide
  Sense strand starting at position 963 of SEQ ID NO: 1882149
ccggaucagguaugacauu

SEQ ID NO: 2098659 - RNA, 19 nt, Artificial Sequence
  Description of Artificial Sequence: Synthetic oligonucleotide
  Antisense strand to SEQ ID NO: 2098658
aaugucauaccugauccgg

SEQ ID NO: 2098660 - RNA, 19 nt, Artificial Sequence
  Description of Artificial Sequence: Synthetic oligonucleotide
  Sense strand starting at position 1182 of SEQ ID NO: 1882149
uguauuacauugcuaaagu

SEQ ID NO: 2098661 - RNA, 19 nt, Artificial Sequence
  Description of Artificial Sequence: Synthetic oligonucleotide
  Antisense strand to SEQ ID NO: 2098660
acuuuagcaauguaauaca

SEQ ID NO: 2098662 - RNA, 19 nt, Artificial Sequence
  Description of Artificial Sequence: Synthetic oligonucleotide
  Sense strand starting at position 1285 of SEQ ID NO: 1882149
auaacauuaugguugcuaa

SEQ ID NO: 2098663 - RNA, 19 nt, Artificial Sequence
  Description of Artificial Sequence: Synthetic oligonucleotide
  Antisense strand to SEQ ID NO: 2098662
uuagcaaccauaauguuau

SEQ ID NO: 2098664 - RNA, 19 nt, Artificial Sequence
  Description of Artificial Sequence: Synthetic oligonucleotide
  Sense strand starting at position 1288 of SEQ ID NO: 1882149
acauuaugguugcuaaaca

SEQ ID NO: 2098665 - RNA, 19 nt, Artificial Sequence
  Description of Artificial Sequence: Synthetic oligonucleotide
  Antisense strand to SEQ ID NO: 2098664
uguuuagcaaccauaaugu

SEQ ID NO: 2098666 - RNA, 19 nt, Artificial Sequence
  Description of Artificial Sequence: Synthetic oligonucleotide
  Sense strand starting at position 1407 of SEQ ID NO: 1882149
ugaaucugaucuuuccuga

SEQ ID NO: 2098667 - RNA, 19 nt, Artificial Sequence
  Description of Artificial Sequence: Synthetic oligonucleotide
  Antisense strand to SEQ ID NO: 2098666
ucaggaaagaucagauuca

SEQ ID NO: 2098668 - RNA, 19 nt, Artificial Sequence
  Description of Artificial Sequence: Synthetic oligonucleotide
  Sense strand starting at position 1410 of SEQ ID NO: 1882149
aucugaucuuuccugaggu

SEQ ID NO: 2098669 - RNA, 19 nt, Artificial Sequence
  Description of Artificial Sequence: Synthetic oligonucleotide
  Antisense strand to SEQ ID NO: 2098668
accucaggaaagaucagau

SEQ ID NO: 2098670 - RNA, 19 nt, Artificial Sequence
  Description of Artificial Sequence: Synthetic oligonucleotide
  Sense strand starting at position 1514 of SEQ ID NO: 1882149
auguaaacguuuccuauaa

SEQ ID NO: 2098671 - RNA, 19 nt, Artificial Sequence
  Description of Artificial Sequence: Synthetic oligonucleotide
  Antisense strand to SEQ ID NO: 2098670
uuauaggaaacguuuacau

SEQ ID NO: 2098672 - RNA, 19 nt, Artificial Sequence
  Description of Artificial Sequence: Synthetic oligonucleotide
  Sense strand starting at position 1515 of SEQ ID NO: 1882149
uguaaacguuuccuauaac

SEQ ID NO: 2098673 - RNA, 19 nt, Artificial Sequence
  Description of Artificial Sequence: Synthetic oligonucleotide
  Antisense strand to SEQ ID NO: 2098672
guuauaggaaacguuuaca

SEQ ID NO: 2098674 - RNA, 19 nt, Artificial Sequence
  Description of Artificial Sequence: Synthetic oligonucleotide
  Sense strand starting at position 1559 of SEQ ID NO: 1882149
auaugcuuucuugagccaa

SEQ ID NO: 2098675 - RNA, 19 nt, Artificial Sequence
  Description of Artificial Sequence: Synthetic oligonucleotide
  Antisense strand to SEQ ID NO: 2098674
uuggcucaagaaagcauau

SEQ ID NO: 2098676 - RNA, 19 nt, Artificial Sequence
  Description of Artificial Sequence: Synthetic oligonucleotide
  Sense strand starting at position 1561 of SEQ ID NO: 1882149
augcuuucuugagccaaag

SEQ ID NO: 2098677 - RNA, 19 nt, Artificial Sequence
  Description of Artificial Sequence: Synthetic oligonucleotide
  Antisense strand to SEQ ID NO: 2098676
cuuuggcucaagaaagcau

SEQ ID NO: 2098678 - RNA, 19 nt, Artificial Sequence
  Description of Artificial Sequence: Synthetic oligonucleotide
  Sense strand starting at position 1571 of SEQ ID NO: 1882149
gagccaaagcuuggaaacu

SEQ ID NO: 2098679 - RNA, 19 nt, Artificial Sequence
  Description of Artificial Sequence: Synthetic oligonucleotide
  Antisense strand to SEQ ID NO: 2098678
aguuuccaagcuuuggcuc

SEQ ID NO: 2098680 - RNA, 19 nt, Artificial Sequence
  Description of Artificial Sequence: Synthetic oligonucleotide
  Sense strand starting at position 1626 of SEQ ID NO: 1882149
gucugagagucauccuuac

SEQ ID NO: 2098681 - RNA, 19 nt, Artificial Sequence
  Description of Artificial Sequence: Synthetic oligonucleotide
  Antisense strand to SEQ ID NO: 2098680
guaaggaugacucucagac

SEQ ID NO: 2098682 - RNA, 19 nt, Artificial Sequence
  Description of Artificial Sequence: Synthetic oligonucleotide
  Sense strand starting at position 1632 of SEQ ID NO: 1882149
gagucauccuuacugaugu

SEQ ID NO: 2098683 - RNA, 19 nt, Artificial Sequence
  Description of Artificial Sequence: Synthetic oligonucleotide
  Antisense strand to SEQ ID NO: 2098682
acaucaguaaggaugacuc

SEQ ID NO: 2098684 - RNA, 19 nt, Artificial Sequence
  Description of Artificial Sequence: Synthetic oligonucleotide
  Sense strand starting at position 1655 of SEQ ID NO: 1882149
cugauagugccagagguga

SEQ ID NO: 2098685 - RNA, 19 nt, Artificial Sequence
  Description of Artificial Sequence: Synthetic oligonucleotide
  Antisense strand to SEQ ID NO: 2098684
ucaccucuggcacuaucag

SEQ ID NO: 2098686 - RNA, 19 nt, Artificial Sequence
  Description of Artificial Sequence: Synthetic oligonucleotide
  Sense strand starting at position 1697 of SEQ ID NO: 1882149
cucucuggguuuccuuaaa

SEQ ID NO: 2098687 - RNA, 19 nt, Artificial Sequence
  Description of Artificial Sequence: Synthetic oligonucleotide
  Antisense strand to SEQ ID NO: 2098686
uuuaaggaaacccagagag

SEQ ID NO: 2098688 - RNA, 19 nt, Artificial Sequence
  Description of Artificial Sequence: Synthetic oligonucleotide
  Sense strand starting at position 1757 of SEQ ID NO: 1882149
ucuguuaggaguuaaagug

SEQ ID NO: 2098689 - RNA, 19 nt, Artificial Sequence
  Description of Artificial Sequence: Synthetic oligonucleotide
  Antisense strand to SEQ ID NO: 2098688
cacuuuaacuccuaacaga

SEQ ID NO: 2098690 - RNA, 19 nt, Artificial Sequence
  Description of Artificial Sequence: Synthetic oligonucleotide
  Sense strand starting at position 1764 of SEQ ID NO: 1882149
ggaguuaaagugggcacaa

SEQ ID NO: 2098691 - RNA, 19 nt, Artificial Sequence
  Description of Artificial Sequence: Synthetic oligonucleotide
  Antisense strand to SEQ ID NO: 2098690
uugugcccacuuuaacucc

SEQ ID NO: 2098692 - RNA, 19 nt, Artificial Sequence
  Description of Artificial Sequence: Synthetic oligonucleotide
  Sense strand starting at position 1793 of SEQ ID NO: 1882149
cacugacuucgaugucuua

SEQ ID NO: 2098693 - RNA, 19 nt, Artificial Sequence
  Description of Artificial Sequence: Synthetic oligonucleotide
  Antisense strand to SEQ ID NO: 2098692
uaagacaucgaagucagug

SEQ ID NO: 2098694 - RNA, 19 nt, Artificial Sequence
  Description of Artificial Sequence: Synthetic oligonucleotide
  Sense strand starting at position 1796 of SEQ ID NO: 1882149
ugacuucgaugucuuaauc

SEQ ID NO: 2098695 - RNA, 19 nt, Artificial Sequence
  Description of Artificial Sequence: Synthetic oligonucleotide
  Antisense strand to SEQ ID NO: 2098694
gauuaagacaucgaaguca

SEQ ID NO: 2098696 - RNA, 19 nt, Artificial Sequence
  Description of Artificial Sequence: Synthetic oligonucleotide
  Sense strand starting at position 1941 of SEQ ID NO: 1882149
gaggucuuaaccgguggaa

SEQ ID NO: 2098697 - RNA, 19 nt, Artificial Sequence
  Description of Artificial Sequence: Synthetic oligonucleotide
  Antisense strand to SEQ ID NO: 2098696
uuccaccgguuaagaccuc

SEQ ID NO: 2098698 - RNA, 19 nt, Artificial Sequence
  Description of Artificial Sequence: Synthetic oligonucleotide
  Sense strand starting at position 2051 of SEQ ID NO: 1882149
cugagugaccagcagucua

SEQ ID NO: 2098699 - RNA, 19 nt, Artificial Sequence
  Description of Artificial Sequence: Synthetic oligonucleotide
  Antisense strand to SEQ ID NO: 2098698
uagacugcuggucacucag

SEQ ID NO: 2098700 - RNA, 19 nt, Artificial Sequence
  Description of Artificial Sequence: Synthetic oligonucleotide
  Sense strand starting at position 2091 of SEQ ID NO: 1882149
ugguuagcugagcaaacua

SEQ ID NO: 2098701 - RNA, 19 nt, Artificial Sequence
  Description of Artificial Sequence: Synthetic oligonucleotide
  Antisense strand to SEQ ID NO: 2098700
uaguuugcucagcuaacca

SEQ ID NO: 2098702 - RNA, 19 nt, Artificial Sequence
  Description of Artificial Sequence: Synthetic oligonucleotide
  Sense strand starting at position 2508 of SEQ ID NO: 1882149
cgagaaauaugaguaggca

SEQ ID NO: 2098703 - RNA, 19 nt, Artificial Sequence
  Description of Artificial Sequence: Synthetic oligonucleotide
  Antisense strand to SEQ ID NO: 2098702
ugccuacucauauuucucg

SEQ ID NO: 2098704 - RNA, 19 nt, Artificial Sequence
  Description of Artificial Sequence: Synthetic oligonucleotide
  Sense strand starting at position 2540 of SEQ ID NO: 1882149
cuccacuggccaggaaauu

SEQ ID NO: 2098705 - RNA, 19 nt, Artificial Sequence
  Description of Artificial Sequence: Synthetic oligonucleotide
  Antisense strand to SEQ ID NO: 2098704
aauuuccuggccaguggag

SEQ ID NO: 2098706 - RNA, 19 nt, Artificial Sequence
  Description of Artificial Sequence: Synthetic oligonucleotide
  Sense strand starting at position 2607 of SEQ ID NO: 1882149
guagcaauaagguaucguu

SEQ ID NO: 2098707 - RNA, 19 nt, Artificial Sequence
  Description of Artificial Sequence: Synthetic oligonucleotide
  Antisense strand to SEQ ID NO: 2098706
aacgauaccuuauugcuac

SEQ ID NO: 2098708 - RNA, 19 nt, Artificial Sequence
  Description of Artificial Sequence: Synthetic oligonucleotide
  Sense strand starting at position 3049 of SEQ ID NO: 1882149
gauuacagucgugagcaua

SEQ ID NO: 2098709 - RNA, 19 nt, Artificial Sequence
  Description of Artificial Sequence: Synthetic oligonucleotide
  Antisense strand to SEQ ID NO: 2098708
uaugcucacgacuguaauc

SEQ ID NO: 2098710 - RNA, 19 nt, Artificial Sequence
  Description of Artificial Sequence: Synthetic oligonucleotide
  Sense strand starting at position 3178 of SEQ ID NO: 1882149
gccaaugaauuugaguauu

SEQ ID NO: 2098711 - RNA, 19 nt, Artificial Sequence
  Description of Artificial Sequence: Synthetic oligonucleotide
  Antisense strand to SEQ ID NO: 2098710
aauacucaaauucauuggc

SEQ ID NO: 2098712 - RNA, 19 nt, Artificial Sequence
  Description of Artificial Sequence: Synthetic oligonucleotide
  Sense strand starting at position 3360 of SEQ ID NO: 1882149
ucugauaccugugugauag

SEQ ID NO: 2098713 - RNA, 19 nt, Artificial Sequence
  Description of Artificial Sequence: Synthetic oligonucleotide
  Antisense strand to SEQ ID NO: 2098712
cuaucacacagguaucaga

SEQ ID NO: 2098714 - RNA, 19 nt, Artificial Sequence
  Description of Artificial Sequence: Synthetic oligonucleotide
  Sense strand starting at position 3681 of SEQ ID NO: 1882149
agcgaaaugcuguauugaa

SEQ ID NO: 2098715 - RNA, 19 nt, Artificial Sequence
  Description of Artificial Sequence: Synthetic oligonucleotide
  Antisense strand to SEQ ID NO: 2098714
uucaauacagcauuucgcu

SEQ ID NO: 2098716 - RNA, 19 nt, Artificial Sequence
  Description of Artificial Sequence: Synthetic oligonucleotide
  Sense strand starting at position 10 of SEQ ID NO: 1882150
gaagacaaccuguaugcuu

SEQ ID NO: 2098717 - RNA, 19 nt, Artificial Sequence
  Description of Artificial Sequence: Synthetic oligonucleotide
  Antisense strand to SEQ ID NO: 2098716
aagcauacagguugucuuc

SEQ ID NO: 2098718 - RNA, 19 nt, Artificial Sequence
  Description of Artificial Sequence: Synthetic oligonucleotide
  Sense strand starting at position 47 of SEQ ID NO: 1882150
uuuaaaguacugugacuau

SEQ ID NO: 2098719 - RNA, 19 nt, Artificial Sequence
  Description of Artificial Sequence: Synthetic oligonucleotide
  Antisense strand to SEQ ID NO: 2098718
auagucacaguacuuuaaa

SEQ ID NO: 2098720 - RNA, 19 nt, Artificial Sequence
  Description of Artificial Sequence: Synthetic oligonucleotide
  Sense strand starting at position 136 of SEQ ID NO: 1882150
ugaguuugauaagugcaga

SEQ ID NO: 2098721 - RNA, 19 nt, Artificial Sequence
  Description of Artificial Sequence: Synthetic oligonucleotide
  Antisense strand to SEQ ID NO: 2098720
ucugcacuuaucaaacuca

SEQ ID NO: 2098722 - RNA, 19 nt, Artificial Sequence
  Description of Artificial Sequence: Synthetic oligonucleotide
  Sense strand starting at position 179 of SEQ ID NO: 1882150
cccuuuggagcacauuaaa

SEQ ID NO: 2098723 - RNA, 19 nt, Artificial Sequence
  Description of Artificial Sequence: Synthetic oligonucleotide
  Antisense strand to SEQ ID NO: 2098722
uuuaaugugcuccaaaggg

SEQ ID NO: 2098724 - RNA, 19 nt, Artificial Sequence
  Description of Artificial Sequence: Synthetic oligonucleotide
  Sense strand starting at position 203 of SEQ ID NO: 1882150
agagaacugcuguaaguaa

SEQ ID NO: 2098725 - RNA, 19 nt, Artificial Sequence
  Description of Artificial Sequence: Synthetic oligonucleotide
  Antisense strand to SEQ ID NO: 2098724
uuacuuacagcaguucucu

SEQ ID NO: 2098726 - RNA, 19 nt, Artificial Sequence
  Description of Artificial Sequence: Synthetic oligonucleotide
  Sense strand starting at position 282 of SEQ ID NO: 1882150
cugguuaauuucuugcagu

SEQ ID NO: 2098727 - RNA, 19 nt, Artificial Sequence
  Description of Artificial Sequence: Synthetic oligonucleotide
  Antisense strand to SEQ ID NO: 2098726
acugcaagaaauuaaccag

SEQ ID NO: 2098728 - RNA, 19 nt, Artificial Sequence
  Description of Artificial Sequence: Synthetic oligonucleotide
  Sense strand starting at position 318 of SEQ ID NO: 1882150
agaugaagaguaugaugcu

SEQ ID NO: 2098729 - RNA, 19 nt, Artificial Sequence
  Description of Artificial Sequence: Synthetic oligonucleotide
  Antisense strand to SEQ ID NO: 2098728
agcaucauacucuucaucu

SEQ ID NO: 2098730 - RNA, 19 nt, Artificial Sequence
  Description of Artificial Sequence: Synthetic oligonucleotide
  Sense strand starting at position 635 of SEQ ID NO: 1882150
guugauauugucuaaggcu

SEQ ID NO: 2098731 - RNA, 19 nt, Artificial Sequence
  Description of Artificial Sequence: Synthetic oligonucleotide
  Antisense strand to SEQ ID NO: 2098730
agccuuagacaauaucaac

SEQ ID NO: 2098732 - RNA, 19 nt, Artificial Sequence
  Description of Artificial Sequence: Synthetic oligonucleotide
  Sense strand starting at position 697 of SEQ ID NO: 1882150
gcugaacaagcauaauauu

SEQ ID NO: 2098733 - RNA, 19 nt, Artificial Sequence
  Description of Artificial Sequence: Synthetic oligonucleotide
  Antisense strand to SEQ ID NO: 2098732
aauauuaugcuuguucagc

SEQ ID NO: 2098734 - RNA, 19 nt, Artificial Sequence
  Description of Artificial Sequence: Synthetic oligonucleotide
  Sense strand starting at position 779 of SEQ ID NO: 1882150
acuuucugaauugguggaa

SEQ ID NO: 2098735 - RNA, 19 nt, Artificial Sequence
  Description of Artificial Sequence: Synthetic oligonucleotide
  Antisense strand to SEQ ID NO: 2098734
uuccaccaauucagaaagu

SEQ ID NO: 2098736 - RNA, 19 nt, Artificial Sequence
  Description of Artificial Sequence: Synthetic oligonucleotide
  Sense strand starting at position 780 of SEQ ID NO: 1882150
cuuucugaauugguggaaa

SEQ ID NO: 2098737 - RNA, 19 nt, Artificial Sequence
  Description of Artificial Sequence: Synthetic oligonucleotide
  Antisense strand to SEQ ID NO: 2098736
uuuccaccaauucagaaag

SEQ ID NO: 2098738 - RNA, 19 nt, Artificial Sequence
  Description of Artificial Sequence: Synthetic oligonucleotide
  Sense strand starting at position 782 of SEQ ID NO: 1882150
uucugaauugguggaaaug

SEQ ID NO: 2098739 - RNA, 19 nt, Artificial Sequence
  Description of Artificial Sequence: Synthetic oligonucleotide
  Antisense strand to SEQ ID NO: 2098738
cauuuccaccaauucagaa

SEQ ID NO: 2098740 - RNA, 19 nt, Artificial Sequence
  Description of Artificial Sequence: Synthetic oligonucleotide
  Sense strand starting at position 783 of SEQ ID NO: 1882150
ucugaauugguggaaaugu

SEQ ID NO: 2098741 - RNA, 19 nt, Artificial Sequence
  Description of Artificial Sequence: Synthetic oligonucleotide
  Antisense strand to SEQ ID NO: 2098740
acauuuccaccaauucaga

SEQ ID NO: 2098742 - RNA, 19 nt, Artificial Sequence
  Description of Artificial Sequence: Synthetic oligonucleotide
  Sense strand starting at position 813 of SEQ ID NO: 1882150
ggaguuguccaauagggua

SEQ ID NO: 2098743 - RNA, 19 nt, Artificial Sequence
  Description of Artificial Sequence: Synthetic oligonucleotide
  Antisense strand to SEQ ID NO: 2098742
uacccuauuggacaacucc

SEQ ID NO: 2098744 - RNA, 19 nt, Artificial Sequence
  Description of Artificial Sequence: Synthetic oligonucleotide
  Sense strand starting at position 1720 of SEQ ID NO: 1882150
ggugaaggcaucuaggauu

SEQ ID NO: 2098745 - RNA, 19 nt, Artificial Sequence
  Description of Artificial Sequence: Synthetic oligonucleotide
  Antisense strand to SEQ ID NO: 2098744
aauccuagaugccuucacc

SEQ ID NO: 2098746 - RNA, 19 nt, Artificial Sequence
  Description of Artificial Sequence: Synthetic oligonucleotide
  Sense strand starting at position 1756 of SEQ ID NO: 1882150
acaggcugucccuaagaca

SEQ ID NO: 2098747 - RNA, 19 nt, Artificial Sequence
  Description of Artificial Sequence: Synthetic oligonucleotide
  Antisense strand to SEQ ID NO: 2098746
ugucuuagggacagccugu

SEQ ID NO: 2098748 - RNA, 19 nt, Artificial Sequence
  Description of Artificial Sequence: Synthetic oligonucleotide
  Sense strand starting at position 1987 of SEQ ID NO: 1882150
ugacaaccgcuggaugauu

SEQ ID NO: 2098749 - RNA, 19 nt, Artificial Sequence
  Description of Artificial Sequence: Synthetic oligonucleotide
  Antisense strand to SEQ ID NO: 2098748
aaucauccagcgguuguca

SEQ ID NO: 2098750 - RNA, 19 nt, Artificial Sequence
  Description of Artificial Sequence: Synthetic oligonucleotide
  Sense strand starting at position 1995 of SEQ ID NO: 1882150
gcuggaugauuccugaaac

SEQ ID NO: 2098751 - RNA, 19 nt, Artificial Sequence
  Description of Artificial Sequence: Synthetic oligonucleotide
  Antisense strand to SEQ ID NO: 2098750
guuucaggaaucauccagc

SEQ ID NO: 2098752 - RNA, 19 nt, Artificial Sequence
  Description of Artificial Sequence: Synthetic oligonucleotide
  Sense strand starting at position 2015 of SEQ ID NO: 1882150
gcuuucucauuauuuguuu

SEQ ID NO: 2098753 - RNA, 19 nt, Artificial Sequence
  Description of Artificial Sequence: Synthetic oligonucleotide
  Antisense strand to SEQ ID NO: 2098752
aaacaaauaaugagaaagc

SEQ ID NO: 2098754 - RNA, 19 nt, Artificial Sequence
  Description of Artificial Sequence: Synthetic oligonucleotide
  Sense strand starting at position 2057 of SEQ ID NO: 1882150
gaagacguaucaguugaau

SEQ ID NO: 2098755 - RNA, 19 nt, Artificial Sequence
  Description of Artificial Sequence: Synthetic oligonucleotide
  Antisense strand to SEQ ID NO: 2098754
auucaacugauacgucuuc

SEQ ID NO: 2098756 - RNA, 19 nt, Artificial Sequence
  Description of Artificial Sequence: Synthetic oligonucleotide
  Sense strand starting at position 2059 of SEQ ID NO: 1882150
agacguaucaguugaauau

SEQ ID NO: 2098757 - RNA, 19 nt, Artificial Sequence
  Description of Artificial Sequence: Synthetic oligonucleotide
  Antisense strand to SEQ ID NO: 2098756
auauucaacugauacgucu

SEQ ID NO: 2098758 - RNA, 19 nt, Artificial Sequence
  Description of Artificial Sequence: Synthetic oligonucleotide
  Sense strand starting at position 2060 of SEQ ID NO: 1882150
gacguaucaguugaauauu

SEQ ID NO: 2098759 - RNA, 19 nt, Artificial Sequence
  Description of Artificial Sequence: Synthetic oligonucleotide
  Antisense strand to SEQ ID NO: 2098758
aauauucaacugauacguc

SEQ ID NO: 2098760 - RNA, 19 nt, Artificial Sequence
  Description of Artificial Sequence: Synthetic oligonucleotide
  Sense strand starting at position 2063 of SEQ ID NO: 1882150
guaucaguugaauauugac

SEQ ID NO: 2098761 - RNA, 19 nt, Artificial Sequence
  Description of Artificial Sequence: Synthetic oligonucleotide
  Antisense strand to SEQ ID NO: 2098760
gucaauauucaacugauac

SEQ ID NO: 2098762 - RNA, 19 nt, Artificial Sequence
  Description of Artificial Sequence: Synthetic oligonucleotide
  Sense strand starting at position 2069 of SEQ ID NO: 1882150
guugaauauugacugcaaa

SEQ ID NO: 2098763 - RNA, 19 nt, Artificial Sequence
  Description of Artificial Sequence: Synthetic oligonucleotide
  Antisense strand to SEQ ID NO: 2098762
uuugcagucaauauucaac

SEQ ID NO: 2098764 - RNA, 19 nt, Artificial Sequence
  Description of Artificial Sequence: Synthetic oligonucleotide
  Sense strand starting at position 2212 of SEQ ID NO: 1882150
gggaucuagcagugaauaa

SEQ ID NO: 2098765 - RNA, 19 nt, Artificial Sequence
  Description of Artificial Sequence: Synthetic oligonucleotide
  Antisense strand to SEQ ID NO: 2098764
uuauucacugcuagauccc

SEQ ID NO: 2098766 - RNA, 19 nt, Artificial Sequence
  Description of Artificial Sequence: Synthetic oligonucleotide
  Sense strand starting at position 2333 of SEQ ID NO: 1882150
agaggagguagucaauguu

SEQ ID NO: 2098767 - RNA, 19 nt, Artificial Sequence
  Description of Artificial Sequence: Synthetic oligonucleotide
  Antisense strand to SEQ ID NO: 2098766
aacauugacuaccuccucu

SEQ ID NO: 2098768 - RNA, 19 nt, Artificial Sequence
  Description of Artificial Sequence: Synthetic oligonucleotide
  Sense strand starting at position 2336 of SEQ ID NO: 1882150
ggagguagucaauguugga

SEQ ID NO: 2098769 - RNA, 19 nt, Artificial Sequence
  Description of Artificial Sequence: Synthetic oligonucleotide
  Antisense strand to SEQ ID NO: 2098768
uccaacauugacuaccucc

SEQ ID NO: 2098770 - RNA, 19 nt, Artificial Sequence
  Description of Artificial Sequence: Synthetic oligonucleotide
  Sense strand starting at position 2340 of SEQ ID NO: 1882150
guagucaauguuggaauga

SEQ ID NO: 2098771 - RNA, 19 nt, Artificial Sequence
  Description of Artificial Sequence: Synthetic oligonucleotide
  Antisense strand to SEQ ID NO: 2098770
ucauuccaacauugacuac

SEQ ID NO: 2098772 - RNA, 19 nt, Artificial Sequence
  Description of Artificial Sequence: Synthetic oligonucleotide
  Sense strand starting at position 2613 of SEQ ID NO: 1882150
ucucaaucuccugggucaa

SEQ ID NO: 2098773 - RNA, 19 nt, Artificial Sequence
  Description of Artificial Sequence: Synthetic oligonucleotide
  Antisense strand to SEQ ID NO: 2098772
uugacccaggagauugaga

SEQ ID NO: 2098774 - RNA, 19 nt, Artificial Sequence
  Description of Artificial Sequence: Synthetic oligonucleotide
  Sense strand starting at position 2824 of SEQ ID NO: 1882150
gugccuggccuguauauuu

SEQ ID NO: 2098775 - RNA, 19 nt, Artificial Sequence
  Description of Artificial Sequence: Synthetic oligonucleotide
  Antisense strand to SEQ ID NO: 2098774
aaauauacaggccaggcac

SEQ ID NO: 2098776 - RNA, 19 nt, Artificial Sequence
  Description of Artificial Sequence: Synthetic oligonucleotide
  Sense strand starting at position 2904 of SEQ ID NO: 1882150
agauguguuaacuagcaug

SEQ ID NO: 2098777 - RNA, 19 nt, Artificial Sequence
  Description of Artificial Sequence: Synthetic oligonucleotide
  Antisense strand to SEQ ID NO: 2098776
caugcuaguuaacacaucu

SEQ ID NO: 2098778 - RNA, 19 nt, Artificial Sequence
  Description of Artificial Sequence: Synthetic oligonucleotide
  Sense strand starting at position 3143 of SEQ ID NO: 1882150
uuucuauagccucaggaau

SEQ ID NO: 2098779 - RNA, 19 nt, Artificial Sequence
  Description of Artificial Sequence: Synthetic oligonucleotide
  Antisense strand to SEQ ID NO: 2098778
auuccugaggcuauagaaa

SEQ ID NO: 2098780 - RNA, 19 nt, Artificial Sequence
  Description of Artificial Sequence: Synthetic oligonucleotide
  Sense strand starting at position 3233 of SEQ ID NO: 1882150
agauaucacuagccuuaag

SEQ ID NO: 2098781 - RNA, 19 nt, Artificial Sequence
  Description of Artificial Sequence: Synthetic oligonucleotide
  Antisense strand to SEQ ID NO: 2098780
cuuaaggcuagugauaucu

SEQ ID NO: 2098782 - RNA, 19 nt, Artificial Sequence
  Description of Artificial Sequence: Synthetic oligonucleotide
  Sense strand starting at position 3303 of SEQ ID NO: 1882150
acauuuaguugagagaauc

SEQ ID NO: 2098783 - RNA, 19 nt, Artificial Sequence
  Description of Artificial Sequence: Synthetic oligonucleotide
  Antisense strand to SEQ ID NO: 2098782
gauucucucaacuaaaugu

SEQ ID NO: 2098784 - RNA, 19 nt, Artificial Sequence
  Description of Artificial Sequence: Synthetic oligonucleotide
  Sense strand starting at position 3408 of SEQ ID NO: 1882150
uggaaacuaguaugucacu

SEQ ID NO: 2098785 - RNA, 19 nt, Artificial Sequence
  Description of Artificial Sequence: Synthetic oligonucleotide
  Antisense strand to SEQ ID NO: 2098784
agugacauacuaguuucca

SEQ ID NO: 2098786 - RNA, 19 nt, Artificial Sequence
  Description of Artificial Sequence: Synthetic oligonucleotide
  Sense strand starting at position 3409 of SEQ ID NO: 1882150
ggaaacuaguaugucacuu

SEQ ID NO: 2098787 - RNA, 19 nt, Artificial Sequence
  Description of Artificial Sequence: Synthetic oligonucleotide
  Antisense strand to SEQ ID NO: 2098786
aagugacauacuaguuucc

SEQ ID NO: 2098788 - RNA, 19 nt, Artificial Sequence
  Description of Artificial Sequence: Synthetic oligonucleotide
  Sense strand starting at position 3441 of SEQ ID NO: 1882150
agggucaucucuucucaaa

SEQ ID NO: 2098789 - RNA, 19 nt, Artificial Sequence
  Description of Artificial Sequence: Synthetic oligonucleotide
  Antisense strand to SEQ ID NO: 2098788
uuugagaagagaugacccu

SEQ ID NO: 2098790 - RNA, 19 nt, Artificial Sequence
  Description of Artificial Sequence: Synthetic oligonucleotide
  Sense strand starting at position 3886 of SEQ ID NO: 1882150
gcuagagaaugcccauaau

SEQ ID NO: 2098791 - RNA, 19 nt, Artificial Sequence
  Description of Artificial Sequence: Synthetic oligonucleotide
  Antisense strand to SEQ ID NO: 2098790
auuaugggcauucucuagc

SEQ ID NO: 2098792 - RNA, 19 nt, Artificial Sequence
  Description of Artificial Sequence: Synthetic oligonucleotide
  Sense strand starting at position 3911 of SEQ ID NO: 1882150
gugaauuaccaucaauguu

SEQ ID NO: 2098793 - RNA, 19 nt, Artificial Sequence
  Description of Artificial Sequence: Synthetic oligonucleotide
  Antisense strand to SEQ ID NO: 2098792
aacauugaugguaauucac

SEQ ID NO: 2098794 - RNA, 19 nt, Artificial Sequence
  Description of Artificial Sequence: Synthetic oligonucleotide
  Sense strand starting at position 3939 of SEQ ID NO: 1882150
gggaauccaucccucuaca

SEQ ID NO: 2098795 - RNA, 19 nt, Artificial Sequence
  Description of Artificial Sequence: Synthetic oligonucleotide
  Antisense strand to SEQ ID NO: 2098794
uguagagggauggauuccc

SEQ ID NO: 2098796 - RNA, 19 nt, Artificial Sequence
  Description of Artificial Sequence: Synthetic oligonucleotide
  Sense strand starting at position 166 of SEQ ID NO: 1882151
acugcaguuagccgugauu

SEQ ID NO: 2098797 - RNA, 19 nt, Artificial Sequence
  Description of Artificial Sequence: Synthetic oligonucleotide
  Antisense strand to SEQ ID NO: 2098796
aaucacggcuaacugcagu

SEQ ID NO: 2098798 - RNA, 19 nt, Artificial Sequence
  Description of Artificial Sequence: Synthetic oligonucleotide
  Sense strand starting at position 216 of SEQ ID NO: 1882151
augagauucugucucaauu

SEQ ID NO: 2098799 - RNA, 19 nt, Artificial Sequence
  Description of Artificial Sequence: Synthetic oligonucleotide
  Antisense strand to SEQ ID NO: 2098798
aauugagacagaaucucau

SEQ ID NO: 2098800 - RNA, 19 nt, Artificial Sequence
  Description of Artificial Sequence: Synthetic oligonucleotide
  Sense strand starting at position 308 of SEQ ID NO: 1882151
ucaggcuaugaucaucaau

SEQ ID NO: 2098801 - RNA, 19 nt, Artificial Sequence
  Description of Artificial Sequence: Synthetic oligonucleotide
  Antisense strand to SEQ ID NO: 2098800
auugaugaucauagccuga

SEQ ID NO: 2098802 - RNA, 19 nt, Artificial Sequence
  Description of Artificial Sequence: Synthetic oligonucleotide
  Sense strand starting at position 440 of SEQ ID NO: 1882151
ccuguuucuccagauggga

SEQ ID NO: 2098803 - RNA, 19 nt, Artificial Sequence
  Description of Artificial Sequence: Synthetic oligonucleotide
  Antisense strand to SEQ ID NO: 2098802
ucccaucuggagaaacagg

SEQ ID NO: 2098804 - RNA, 19 nt, Artificial Sequence
  Description of Artificial Sequence: Synthetic oligonucleotide
  Sense strand starting at position 568 of SEQ ID NO: 1882151
cagauuaaauaagagguuu

SEQ ID NO: 2098805 - RNA, 19 nt, Artificial Sequence
  Description of Artificial Sequence: Synthetic oligonucleotide
  Antisense strand to SEQ ID NO: 2098804
aaaccucuuauuuaaucug

SEQ ID NO: 2098806 - RNA, 19 nt, Artificial Sequence
  Description of Artificial Sequence: Synthetic oligonucleotide
  Sense strand starting at position 591 of SEQ ID NO: 1882151
acucucggccagugaauaa

SEQ ID NO: 2098807 - RNA, 19 nt, Artificial Sequence
  Description of Artificial Sequence: Synthetic oligonucleotide
  Antisense strand to SEQ ID NO: 2098806
uuauucacuggccgagagu

SEQ ID NO: 2098808 - RNA, 19 nt, Artificial Sequence
  Description of Artificial Sequence: Synthetic oligonucleotide
  Sense strand starting at position 982 of SEQ ID NO: 1882151
acugauauggcuuggauua

SEQ ID NO: 2098809 - RNA, 19 nt, Artificial Sequence
  Description of Artificial Sequence: Synthetic oligonucleotide
  Antisense strand to SEQ ID NO: 2098808
uaauccaagccauaucagu

SEQ ID NO: 2098810 - RNA, 19 nt, Artificial Sequence
  Description of Artificial Sequence: Synthetic oligonucleotide
  Sense strand starting at position 983 of SEQ ID NO: 1882151
cugauauggcuuggauuau

SEQ ID NO: 2098811 - RNA, 19 nt, Artificial Sequence
  Description of Artificial Sequence: Synthetic oligonucleotide
  Antisense strand to SEQ ID NO: 2098810
auaauccaagccauaucag

SEQ ID NO: 2098812 - RNA, 19 nt, Artificial Sequence
  Description of Artificial Sequence: Synthetic oligonucleotide
  Sense strand starting at position 984 of SEQ ID NO: 1882151
ugauauggcuuggauuaua

SEQ ID NO: 2098813 - RNA, 19 nt, Artificial Sequence
  Description of Artificial Sequence: Synthetic oligonucleotide
  Antisense strand to SEQ ID NO: 2098812
uauaauccaagccauauca

SEQ ID NO: 2098814 - RNA, 19 nt, Artificial Sequence
  Description of Artificial Sequence: Synthetic oligonucleotide
  Sense strand starting at position 1481 of SEQ ID NO: 1882151
cauaguaacgagugaagua

SEQ ID NO: 2098815 - RNA, 19 nt, Artificial Sequence
  Description of Artificial Sequence: Synthetic oligonucleotide
  Antisense strand to SEQ ID NO: 2098814
uacuucacucguuacuaug

SEQ ID NO: 2098816 - RNA, 19 nt, Artificial Sequence
  Description of Artificial Sequence: Synthetic oligonucleotide
  Sense strand starting at position 1490 of SEQ ID NO: 1882151
gagugaaguaguuguuagu

SEQ ID NO: 2098817 - RNA, 19 nt, Artificial Sequence
  Description of Artificial Sequence: Synthetic oligonucleotide
  Antisense strand to SEQ ID NO: 2098816
acuaacaacuacuucacuc

SEQ ID NO: 2098818 - RNA, 19 nt, Artificial Sequence
  Description of Artificial Sequence: Synthetic oligonucleotide
  Sense strand starting at position 1500 of SEQ ID NO: 1882151
guuguuagugcacacaaga

SEQ ID NO: 2098819 - RNA, 19 nt, Artificial Sequence
  Description of Artificial Sequence: Synthetic oligonucleotide
  Antisense strand to SEQ ID NO: 2098818
ucuugugugcacuaacaac

SEQ ID NO: 2098820 - RNA, 19 nt, Artificial Sequence
  Description of Artificial Sequence: Synthetic oligonucleotide
  Sense strand starting at position 1566 of SEQ ID NO: 1882151
ccucucuggccauaugaca

SEQ ID NO: 2098821 - RNA, 19 nt, Artificial Sequence
  Description of Artificial Sequence: Synthetic oligonucleotide
  Antisense strand to SEQ ID NO: 2098820
ugucauauggccagagagg

SEQ ID NO: 2098822 - RNA, 19 nt, Artificial Sequence
  Description of Artificial Sequence: Synthetic oligonucleotide
  Sense strand starting at position 1647 of SEQ ID NO: 1882151
aacagauacgggugucaug

SEQ ID NO: 2098823 - RNA, 19 nt, Artificial Sequence
  Description of Artificial Sequence: Synthetic oligonucleotide
  Antisense strand to SEQ ID NO: 2098822
caugacacccguaucuguu

SEQ ID NO: 2098824 - RNA, 19 nt, Artificial Sequence
  Description of Artificial Sequence: Synthetic oligonucleotide
  Sense strand starting at position 1656 of SEQ ID NO: 1882151
gggugucauguuuauacag

SEQ ID NO: 2098825 - RNA, 19 nt, Artificial Sequence
  Description of Artificial Sequence: Synthetic oligonucleotide
  Antisense strand to SEQ ID NO: 2098824
cuguauaaacaugacaccc

SEQ ID NO: 2098826 - RNA, 19 nt, Artificial Sequence
  Description of Artificial Sequence: Synthetic oligonucleotide
  Sense strand starting at position 1985 of SEQ ID NO: 1882151
cugacuacugcuggaaaga

SEQ ID NO: 2098827 - RNA, 19 nt, Artificial Sequence
  Description of Artificial Sequence: Synthetic oligonucleotide
  Antisense strand to SEQ ID NO: 2098826
ucuuuccagcaguagucag

SEQ ID NO: 2098828 - RNA, 19 nt, Artificial Sequence
  Description of Artificial Sequence: Synthetic oligonucleotide
  Sense strand starting at position 2083 of SEQ ID NO: 1882151
uugaucugcgucugaaaga

SEQ ID NO: 2098829 - RNA, 19 nt, Artificial Sequence
  Description of Artificial Sequence: Synthetic oligonucleotide
  Antisense strand to SEQ ID NO: 2098828
ucuuucagacgcagaucaa

SEQ ID NO: 2098830 - RNA, 19 nt, Artificial Sequence
  Description of Artificial Sequence: Synthetic oligonucleotide
  Sense strand starting at position 2258 of SEQ ID NO: 1882151
ugcccuugccacguguuaa

SEQ ID NO: 2098831 - RNA, 19 nt, Artificial Sequence
  Description of Artificial Sequence: Synthetic oligonucleotide
  Antisense strand to SEQ ID NO: 2098830
uuaacacguggcaagggca

SEQ ID NO: 2098832 - RNA, 19 nt, Artificial Sequence
  Description of Artificial Sequence: Synthetic oligonucleotide
  Sense strand starting at position 2259 of SEQ ID NO: 1882151
gcccuugccacguguuaaa

SEQ ID NO: 2098833 - RNA, 19 nt, Artificial Sequence
  Description of Artificial Sequence: Synthetic oligonucleotide
  Antisense strand to SEQ ID NO: 2098832
uuuaacacguggcaagggc

SEQ ID NO: 2098834 - RNA, 19 nt, Artificial Sequence
  Description of Artificial Sequence: Synthetic oligonucleotide
  Sense strand starting at position 2323 of SEQ ID NO: 1882151
ugaccauacugauaagaaa

SEQ ID NO: 2098835 - RNA, 19 nt, Artificial Sequence
  Description of Artificial Sequence: Synthetic oligonucleotide
  Antisense strand to SEQ ID NO: 2098834
uuucuuaucaguaugguca

SEQ ID NO: 2098836 - RNA, 19 nt, Artificial Sequence
  Description of Artificial Sequence: Synthetic oligonucleotide
  Sense strand starting at position 2513 of SEQ ID NO: 1882151
caacgaagcggugaaauca

SEQ ID NO: 2098837 - RNA, 19 nt, Artificial Sequence
  Description of Artificial Sequence: Synthetic oligonucleotide
  Antisense strand to SEQ ID NO: 2098836
ugauuucaccgcuucguug

SEQ ID NO: 2098838 - RNA, 19 nt, Artificial Sequence
  Description of Artificial Sequence: Synthetic oligonucleotide
  Sense strand starting at position 2524 of SEQ ID NO: 1882151
ugaaaucauguuggaacau

SEQ ID NO: 2098839 - RNA, 19 nt, Artificial Sequence
  Description of Artificial Sequence: Synthetic oligonucleotide
  Antisense strand to SEQ ID NO: 2098838
auguuccaacaugauuuca

SEQ ID NO: 2098840 - RNA, 19 nt, Artificial Sequence
  Description of Artificial Sequence: Synthetic oligonucleotide
  Sense strand starting at position 2611 of SEQ ID NO: 1882151
uuccauauacauuguguua

SEQ ID NO: 2098841 - RNA, 19 nt, Artificial Sequence
  Description of Artificial Sequence: Synthetic oligonucleotide
  Antisense strand to SEQ ID NO: 2098840
uaacacaauguauauggaa

SEQ ID NO: 2098842 - RNA, 19 nt, Artificial Sequence
  Description of Artificial Sequence: Synthetic oligonucleotide
  Sense strand starting at position 2630 of SEQ ID NO: 1882151
acagcagcaugucugauaa

SEQ ID NO: 2098843 - RNA, 19 nt, Artificial Sequence
  Description of Artificial Sequence: Synthetic oligonucleotide
  Antisense strand to SEQ ID NO: 2098842
uuaucagacaugcugcugu

SEQ ID NO: 2098844 - RNA, 19 nt, Artificial Sequence
  Description of Artificial Sequence: Synthetic oligonucleotide
  Sense strand starting at position 2651 of SEQ ID NO: 1882151
aaauguuucccaggacgua

SEQ ID NO: 2098845 - RNA, 19 nt, Artificial Sequence
  Description of Artificial Sequence: Synthetic oligonucleotide
  Antisense strand to SEQ ID NO: 2098844
uacguccugggaaacauuu

SEQ ID NO: 2098846 - RNA, 19 nt, Artificial Sequence
  Description of Artificial Sequence: Synthetic oligonucleotide
  Sense strand starting at position 2684 of SEQ ID NO: 1882151
ugagacauaucacaaagca

SEQ ID NO: 2098847 - RNA, 19 nt, Artificial Sequence
  Description of Artificial Sequence: Synthetic oligonucleotide
  Antisense strand to SEQ ID NO: 2098846
ugcuuugugauaugucuca

SEQ ID NO: 2098848 - RNA, 19 nt, Artificial Sequence
  Description of Artificial Sequence: Synthetic oligonucleotide
  Sense strand starting at position 2716 of SEQ ID NO: 1882151
acaguaagucucugacuuu

SEQ ID NO: 2098849 - RNA, 19 nt, Artificial Sequence
  Description of Artificial Sequence: Synthetic oligonucleotide
  Antisense strand to SEQ ID NO: 2098848
aaagucagagacuuacugu

SEQ ID NO: 2098850 - RNA, 19 nt, Artificial Sequence
  Description of Artificial Sequence: Synthetic oligonucleotide
  Sense strand starting at position 2937 of SEQ ID NO: 1882151
guuugauuguagcuuauca

SEQ ID NO: 2098851 - RNA, 19 nt, Artificial Sequence
  Description of Artificial Sequence: Synthetic oligonucleotide
  Antisense strand to SEQ ID NO: 2098850
ugauaagcuacaaucaaac

SEQ ID NO: 2098852 - RNA, 19 nt, Artificial Sequence
  Description of Artificial Sequence: Synthetic oligonucleotide
  Sense strand starting at position 3093 of SEQ ID NO: 1882151
gagguauuccucuguauua

SEQ ID NO: 2098853 - RNA, 19 nt, Artificial Sequence
  Description of Artificial Sequence: Synthetic oligonucleotide
  Antisense strand to SEQ ID NO: 2098852
uaauacagaggaauaccuc

SEQ ID NO: 2098854 - RNA, 19 nt, Artificial Sequence
  Description of Artificial Sequence: Synthetic oligonucleotide
  Sense strand starting at position 3094 of SEQ ID NO: 1882151
agguauuccucuguauuac

SEQ ID NO: 2098855 - RNA, 19 nt, Artificial Sequence
  Description of Artificial Sequence: Synthetic oligonucleotide
  Antisense strand to SEQ ID NO: 2098854
guaauacagaggaauaccu

SEQ ID NO: 2098856 - RNA, 19 nt, Artificial Sequence
  Description of Artificial Sequence: Synthetic oligonucleotide
  Sense strand starting at position 3095 of SEQ ID NO: 1882151
gguauuccucuguauuaca

SEQ ID NO: 2098857 - RNA, 19 nt, Artificial Sequence
  Description of Artificial Sequence: Synthetic oligonucleotide
  Antisense strand to SEQ ID NO: 2098856
uguaauacagaggaauacc

SEQ ID NO: 2098858 - RNA, 19 nt, Artificial Sequence
  Description of Artificial Sequence: Synthetic oligonucleotide
  Sense strand starting at position 3100 of SEQ ID NO: 1882151
uccucuguauuacagacua

SEQ ID NO: 2098859 - RNA, 19 nt, Artificial Sequence
  Description of Artificial Sequence: Synthetic oligonucleotide
  Antisense strand to SEQ ID NO: 2098858
uagucuguaauacagagga

SEQ ID NO: 2098860 - RNA, 19 nt, Artificial Sequence
  Description of Artificial Sequence: Synthetic oligonucleotide
  Sense strand starting at position 3450 of SEQ ID NO: 1882151
agccgacuucaggguuaaa

SEQ ID NO: 2098861 - RNA, 19 nt, Artificial Sequence
  Description of Artificial Sequence: Synthetic oligonucleotide
  Antisense strand to SEQ ID NO: 2098860
uuuaacccugaagucggcu

SEQ ID NO: 2098862 - RNA, 19 nt, Artificial Sequence
  Description of Artificial Sequence: Synthetic oligonucleotide
  Sense strand starting at position 3575 of SEQ ID NO: 1882151
gagaacccgucucuauaaa

SEQ ID NO: 2098863 - RNA, 19 nt, Artificial Sequence
  Description of Artificial Sequence: Synthetic oligonucleotide
  Antisense strand to SEQ ID NO: 2098862
uuuauagagacggguucuc

SEQ ID NO: 2098864 - RNA, 19 nt, Artificial Sequence
  Description of Artificial Sequence: Synthetic oligonucleotide
  Sense strand starting at position 3692 of SEQ ID NO: 1882151
gcugcagugcuauaguuac

SEQ ID NO: 2098865 - RNA, 19 nt, Artificial Sequence
  Description of Artificial Sequence: Synthetic oligonucleotide
  Antisense strand to SEQ ID NO: 2098864
guaacuauagcacugcagc

SEQ ID NO: 2098866 - RNA, 19 nt, Artificial Sequence
  Description of Artificial Sequence: Synthetic oligonucleotide
  Sense strand starting at position 3809 of SEQ ID NO: 1882151
ucacaaaguucuguauaaa

SEQ ID NO: 2098867 - RNA, 19 nt, Artificial Sequence
  Description of Artificial Sequence: Synthetic oligonucleotide
  Antisense strand to SEQ ID NO: 2098866
uuuauacagaacuuuguga

SEQ ID NO: 2098868 - RNA, 19 nt, Artificial Sequence
  Description of Artificial Sequence: Synthetic oligonucleotide
  Sense strand starting at position 3831 of SEQ ID NO: 1882151
ucuuauauaugauacggua

SEQ ID NO: 2098869 - RNA, 19 nt, Artificial Sequence
  Description of Artificial Sequence: Synthetic oligonucleotide
  Antisense strand to SEQ ID NO: 2098868
uaccguaucauauauaaga

SEQ ID NO: 2098870 - RNA, 19 nt, Artificial Sequence
  Description of Artificial Sequence: Synthetic oligonucleotide
  Sense strand starting at position 3912 of SEQ ID NO: 1882151
auaugcaaaugucugagua

SEQ ID NO: 2098871 - RNA, 19 nt, Artificial Sequence
  Description of Artificial Sequence: Synthetic oligonucleotide
  Antisense strand to SEQ ID NO: 2098870
uacucagacauuugcauau

SEQ ID NO: 2098872 - RNA, 19 nt, Artificial Sequence
  Description of Artificial Sequence: Synthetic oligonucleotide
  Sense strand starting at position 3913 of SEQ ID NO: 1882151
uaugcaaaugucugaguau

SEQ ID NO: 2098873 - RNA, 19 nt, Artificial Sequence
  Description of Artificial Sequence: Synthetic oligonucleotide
  Antisense strand to SEQ ID NO: 2098872
auacucagacauuugcaua

SEQ ID NO: 2098874 - RNA, 19 nt, Artificial Sequence
  Description of Artificial Sequence: Synthetic oligonucleotide
  Sense strand starting at position 3980 of SEQ ID NO: 1882151
aguucuaggccucagaaau

SEQ ID NO: 2098875 - RNA, 19 nt, Artificial Sequence
  Description of Artificial Sequence: Synthetic oligonucleotide
  Antisense strand to SEQ ID NO: 2098874
auuucugaggccuagaacu

SEQ ID NO: 2098876 - RNA, 19 nt, Artificial Sequence
  Description of Artificial Sequence: Synthetic oligonucleotide
  Sense strand starting at position 54 of SEQ ID NO: 1882152
uugaguuaaucucucuggu

SEQ ID NO: 2098877 - RNA, 19 nt, Artificial Sequence
  Description of Artificial Sequence: Synthetic oligonucleotide
  Antisense strand to SEQ ID NO: 2098876
accagagagauuaacucaa

SEQ ID NO: 2098878 - RNA, 19 nt, Artificial Sequence
  Description of Artificial Sequence: Synthetic oligonucleotide
  Sense strand starting at position 56 of SEQ ID NO: 1882152
gaguuaaucucucugguaa

SEQ ID NO: 2098879 - RNA, 19 nt, Artificial Sequence
  Description of Artificial Sequence: Synthetic oligonucleotide
  Antisense strand to SEQ ID NO: 2098878
uuaccagagagauuaacuc

SEQ ID NO: 2098880 - RNA, 19 nt, Artificial Sequence
  Description of Artificial Sequence: Synthetic oligonucleotide
  Sense strand starting at position 57 of SEQ ID NO: 1882152
aguuaaucucucugguaaa

SEQ ID NO: 2098881 - RNA, 19 nt, Artificial Sequence
  Description of Artificial Sequence: Synthetic oligonucleotide
  Antisense strand to SEQ ID NO: 2098880
uuuaccagagagauuaacu

SEQ ID NO: 2098882 - RNA, 19 nt, Artificial Sequence
  Description of Artificial Sequence: Synthetic oligonucleotide
  Sense strand starting at position 92 of SEQ ID NO: 1882152
ggcagaguaaucugugcuu

SEQ ID NO: 2098883 - RNA, 19 nt, Artificial Sequence
  Description of Artificial Sequence: Synthetic oligonucleotide
  Antisense strand to SEQ ID NO: 2098882
aagcacagauuacucugcc

SEQ ID NO: 2098884 - RNA, 19 nt, Artificial Sequence
  Description of Artificial Sequence: Synthetic oligonucleotide
  Sense strand starting at position 94 of SEQ ID NO: 1882152
cagaguaaucugugcuucu

SEQ ID NO: 2098885 - RNA, 19 nt, Artificial Sequence
  Description of Artificial Sequence: Synthetic oligonucleotide
  Antisense strand to SEQ ID NO: 2098884
agaagcacagauuacucug

SEQ ID NO: 2098886 - RNA, 19 nt, Artificial Sequence
  Description of Artificial Sequence: Synthetic oligonucleotide
  Sense strand starting at position 97 of SEQ ID NO: 1882152
aguaaucugugcuucuaaa

SEQ ID NO: 2098887 - RNA, 19 nt, Artificial Sequence
  Description of Artificial Sequence: Synthetic oligonucleotide
  Antisense strand to SEQ ID NO: 2098886
uuuagaagcacagauuacu

SEQ ID NO: 2098888 - RNA, 19 nt, Artificial Sequence
  Description of Artificial Sequence: Synthetic oligonucleotide
  Sense strand starting at position 109 of SEQ ID NO: 1882152
uucuaaaucuaagcaggau

SEQ ID NO: 2098889 - RNA, 19 nt, Artificial Sequence
  Description of Artificial Sequence: Synthetic oligonucleotide
  Antisense strand to SEQ ID NO: 2098888
auccugcuuagauuuagaa

SEQ ID NO: 2098890 - RNA, 19 nt, Artificial Sequence
  Description of Artificial Sequence: Synthetic oligonucleotide
  Sense strand starting at position 115 of SEQ ID NO: 1882152
aucuaagcaggaugaauau

SEQ ID NO: 2098891 - RNA, 19 nt, Artificial Sequence
  Description of Artificial Sequence: Synthetic oligonucleotide
  Antisense strand to SEQ ID NO: 2098890
auauucauccugcuuagau

SEQ ID NO: 2098892 - RNA, 19 nt, Artificial Sequence
  Description of Artificial Sequence: Synthetic oligonucleotide
  Sense strand starting at position 255 of SEQ ID NO: 1882152
gccauucuuugcuuauaga

SEQ ID NO: 2098893 - RNA, 19 nt, Artificial Sequence
  Description of Artificial Sequence: Synthetic oligonucleotide
  Antisense strand to SEQ ID NO: 2098892
ucuauaagcaaagaauggc

SEQ ID NO: 2098894 - RNA, 19 nt, Artificial Sequence
  Description of Artificial Sequence: Synthetic oligonucleotide
  Sense strand starting at position 469 of SEQ ID NO: 1882152
agcaaauugaguugcuaga

SEQ ID NO: 2098895 - RNA, 19 nt, Artificial Sequence
  Description of Artificial Sequence: Synthetic oligonucleotide
  Antisense strand to SEQ ID NO: 2098894
ucuagcaacucaauuugcu

SEQ ID NO: 2098896 - RNA, 19 nt, Artificial Sequence
  Description of Artificial Sequence: Synthetic oligonucleotide
  Sense strand starting at position 471 of SEQ ID NO: 1882152
caaauugaguugcuagaca

SEQ ID NO: 2098897 - RNA, 19 nt, Artificial Sequence
  Description of Artificial Sequence: Synthetic oligonucleotide
  Antisense strand to SEQ ID NO: 2098896
ugucuagcaacucaauuug

SEQ ID NO: 2098898 - RNA, 19 nt, Artificial Sequence
  Description of Artificial Sequence: Synthetic oligonucleotide
  Sense strand starting at position 1511 of SEQ ID NO: 1882152
uuuaaaugucauggaucua

SEQ ID NO: 2098899 - RNA, 19 nt, Artificial Sequence
  Description of Artificial Sequence: Synthetic oligonucleotide
  Antisense strand to SEQ ID NO: 2098898
uagauccaugacauuuaaa

SEQ ID NO: 2098900 - RNA, 19 nt, Artificial Sequence
  Description of Artificial Sequence: Synthetic oligonucleotide
  Sense strand starting at position 1581 of SEQ ID NO: 1882152
ugcaucucauugguaggaa

SEQ ID NO: 2098901 - RNA, 19 nt, Artificial Sequence
  Description of Artificial Sequence: Synthetic oligonucleotide
  Antisense strand to SEQ ID NO: 2098900
uuccuaccaaugagaugca

SEQ ID NO: 2098902 - RNA, 19 nt, Artificial Sequence
  Description of Artificial Sequence: Synthetic oligonucleotide
  Sense strand starting at position 1603 of SEQ ID NO: 1882152
gcaguuaagauguaaaugu

SEQ ID NO: 2098903 - RNA, 19 nt, Artificial Sequence
  Description of Artificial Sequence: Synthetic oligonucleotide
  Antisense strand to SEQ ID NO: 2098902
acauuuacaucuuaacugc

SEQ ID NO: 2098904 - RNA, 19 nt, Artificial Sequence
  Description of Artificial Sequence: Synthetic oligonucleotide
  Sense strand starting at position 1870 of SEQ ID NO: 1882152
ggucaauuagugcagaaac

SEQ ID NO: 2098905 - RNA, 19 nt, Artificial Sequence
  Description of Artificial Sequence: Synthetic oligonucleotide
  Antisense strand to SEQ ID NO: 2098904
guuucugcacuaauugacc

SEQ ID NO: 2098906 - RNA, 19 nt, Artificial Sequence
  Description of Artificial Sequence: Synthetic oligonucleotide
  Sense strand starting at position 1872 of SEQ ID NO: 1882152
ucaauuagugcagaaacau

SEQ ID NO: 2098907 - RNA, 19 nt, Artificial Sequence
  Description of Artificial Sequence: Synthetic oligonucleotide
  Antisense strand to SEQ ID NO: 2098906
auguuucugcacuaauuga

SEQ ID NO: 2098908 - RNA, 19 nt, Artificial Sequence
  Description of Artificial Sequence: Synthetic oligonucleotide
  Sense strand starting at position 1902 of SEQ ID NO: 1882152
cauaguuccgaacagaauu

SEQ ID NO: 2098909 - RNA, 19 nt, Artificial Sequence
  Description of Artificial Sequence: Synthetic oligonucleotide
  Antisense strand to SEQ ID NO: 2098908
aauucuguucggaacuaug

SEQ ID NO: 2098910 - RNA, 19 nt, Artificial Sequence
  Description of Artificial Sequence: Synthetic oligonucleotide
  Sense strand starting at position 2153 of SEQ ID NO: 1882152
gcagauagcuuucuagcaa

SEQ ID NO: 2098911 - RNA, 19 nt, Artificial Sequence
  Description of Artificial Sequence: Synthetic oligonucleotide
  Antisense strand to SEQ ID NO: 2098910
uugcuagaaagcuaucugc

SEQ ID NO: 2098912 - RNA, 19 nt, Artificial Sequence
  Description of Artificial Sequence: Synthetic oligonucleotide
  Sense strand starting at position 2258 of SEQ ID NO: 1882152
uuaugaagagccugcuuau

SEQ ID NO: 2098913 - RNA, 19 nt, Artificial Sequence
  Description of Artificial Sequence: Synthetic oligonucleotide
  Antisense strand to SEQ ID NO: 2098912
auaagcaggcucuucauaa

SEQ ID NO: 2098914 - RNA, 19 nt, Artificial Sequence
  Description of Artificial Sequence: Synthetic oligonucleotide
  Sense strand starting at position 2261 of SEQ ID NO: 1882152
ugaagagccugcuuauaug

SEQ ID NO: 2098915 - RNA, 19 nt, Artificial Sequence
  Description of Artificial Sequence: Synthetic oligonucleotide
  Antisense strand to SEQ ID NO: 2098914
cauauaagcaggcucuuca

SEQ ID NO: 2098916 - RNA, 19 nt, Artificial Sequence
  Description of Artificial Sequence: Synthetic oligonucleotide
  Sense strand starting at position 2281 of SEQ ID NO: 1882152
ugggugcucggugaguauu

SEQ ID NO: 2098917 - RNA, 19 nt, Artificial Sequence
  Description of Artificial Sequence: Synthetic oligonucleotide
  Antisense strand to SEQ ID NO: 2098916
aauacucaccgagcaccca

SEQ ID NO: 2098918 - RNA, 19 nt, Artificial Sequence
  Description of Artificial Sequence: Synthetic oligonucleotide
  Sense strand starting at position 2284 of SEQ ID NO: 1882152
gugcucggugaguauuuca

SEQ ID NO: 2098919 - RNA, 19 nt, Artificial Sequence
  Description of Artificial Sequence: Synthetic oligonucleotide
  Antisense strand to SEQ ID NO: 2098918
ugaaauacucaccgagcac

SEQ ID NO: 2098920 - RNA, 19 nt, Artificial Sequence
  Description of Artificial Sequence: Synthetic oligonucleotide
  Sense strand starting at position 2362 of SEQ ID NO: 1882152
gugucuaagcuccagguga

SEQ ID NO: 2098921 - RNA, 19 nt, Artificial Sequence
  Description of Artificial Sequence: Synthetic oligonucleotide
  Antisense strand to SEQ ID NO: 2098920
ucaccuggagcuuagacac

SEQ ID NO: 2098922 - RNA, 19 nt, Artificial Sequence
  Description of Artificial Sequence: Synthetic oligonucleotide
  Sense strand starting at position 2494 of SEQ ID NO: 1882152
ugguuuauuuaccugcuua

SEQ ID NO: 2098923 - RNA, 19 nt, Artificial Sequence
  Description of Artificial Sequence: Synthetic oligonucleotide
  Antisense strand to SEQ ID NO: 2098922
uaagcagguaaauaaacca

SEQ ID NO: 2098924 - RNA, 19 nt, Artificial Sequence
  Description of Artificial Sequence: Synthetic oligonucleotide
  Sense strand starting at position 2667 of SEQ ID NO: 1882152
gaccuauugggucaugguu

SEQ ID NO: 2098925 - RNA, 19 nt, Artificial Sequence
  Description of Artificial Sequence: Synthetic oligonucleotide
  Antisense strand to SEQ ID NO: 2098924
aaccaugacccaauagguc

SEQ ID NO: 2098926 - RNA, 19 nt, Artificial Sequence
  Description of Artificial Sequence: Synthetic oligonucleotide
  Sense strand starting at position 2757 of SEQ ID NO: 1882152
aaguauuaacggcaauguu

SEQ ID NO: 2098927 - RNA, 19 nt, Artificial Sequence
  Description of Artificial Sequence: Synthetic oligonucleotide
  Antisense strand to SEQ ID NO: 2098926
aacauugccguuaauacuu

SEQ ID NO: 2098928 - RNA, 19 nt, Artificial Sequence
  Description of Artificial Sequence: Synthetic oligonucleotide
  Sense strand starting at position 2798 of SEQ ID NO: 1882152
ugaauacauuggguucuaa

SEQ ID NO: 2098929 - RNA, 19 nt, Artificial Sequence
  Description of Artificial Sequence: Synthetic oligonucleotide
  Antisense strand to SEQ ID NO: 2098928
uuagaacccaauguauuca

SEQ ID NO: 2098930 - RNA, 19 nt, Artificial Sequence
  Description of Artificial Sequence: Synthetic oligonucleotide
  Sense strand starting at position 2983 of SEQ ID NO: 1882152
uaggcaagauaaucggaau

SEQ ID NO: 2098931 - RNA, 19 nt, Artificial Sequence
  Description of Artificial Sequence: Synthetic oligonucleotide
  Antisense strand to SEQ ID NO: 2098930
auuccgauuaucuugccua

SEQ ID NO: 2098932 - RNA, 19 nt, Artificial Sequence
  Description of Artificial Sequence: Synthetic oligonucleotide
  Sense strand starting at position 3010 of SEQ ID NO: 1882152
uggaacuagugcucuaagu

SEQ ID NO: 2098933 - RNA, 19 nt, Artificial Sequence
  Description of Artificial Sequence: Synthetic oligonucleotide
  Antisense strand to SEQ ID NO: 2098932
acuuagagcacuaguucca

SEQ ID NO: 2098934 - RNA, 19 nt, Artificial Sequence
  Description of Artificial Sequence: Synthetic oligonucleotide
  Sense strand starting at position 3128 of SEQ ID NO: 1882152
gaggaaugcuugccaagaa

SEQ ID NO: 2098935 - RNA, 19 nt, Artificial Sequence
  Description of Artificial Sequence: Synthetic oligonucleotide
  Antisense strand to SEQ ID NO: 2098934
uucuuggcaagcauuccuc

SEQ ID NO: 2098936 - RNA, 19 nt, Artificial Sequence
  Description of Artificial Sequence: Synthetic oligonucleotide
  Sense strand starting at position 3222 of SEQ ID NO: 1882152
ccagaucacccgugccaga

SEQ ID NO: 2098937 - RNA, 19 nt, Artificial Sequence
  Description of Artificial Sequence: Synthetic oligonucleotide
  Antisense strand to SEQ ID NO: 2098936
ucuggcacgggugaucugg

SEQ ID NO: 2098938 - RNA, 19 nt, Artificial Sequence
  Description of Artificial Sequence: Synthetic oligonucleotide
  Sense strand starting at position 3386 of SEQ ID NO: 1882152
gcuacugugcgagcuauga

SEQ ID NO: 2098939 - RNA, 19 nt, Artificial Sequence
  Description of Artificial Sequence: Synthetic oligonucleotide
  Antisense strand to SEQ ID NO: 2098938
ucauagcucgcacaguagc

SEQ ID NO: 2098940 - RNA, 19 nt, Artificial Sequence
  Description of Artificial Sequence: Synthetic oligonucleotide
  Sense strand starting at position 3417 of SEQ ID NO: 1882152
ugcaauagcuucuuuguuu

SEQ ID NO: 2098941 - RNA, 19 nt, Artificial Sequence
  Description of Artificial Sequence: Synthetic oligonucleotide
  Antisense strand to SEQ ID NO: 2098940
aaacaaagaagcuauugca

SEQ ID NO: 2098942 - RNA, 19 nt, Artificial Sequence
  Description of Artificial Sequence: Synthetic oligonucleotide
  Sense strand starting at position 3828 of SEQ ID NO: 1882152
gcaacaaaguguccaauua

SEQ ID NO: 2098943 - RNA, 19 nt, Artificial Sequence
  Description of Artificial Sequence: Synthetic oligonucleotide
  Antisense strand to SEQ ID NO: 2098942
uaauuggacacuuuguugc

SEQ ID NO: 2098944 - RNA, 19 nt, Artificial Sequence
  Description of Artificial Sequence: Synthetic oligonucleotide
  Sense strand starting at position 3893 of SEQ ID NO: 1882152
ucaccugaguacuuaguaa

SEQ ID NO: 2098945 - RNA, 19 nt, Artificial Sequence
  Description of Artificial Sequence: Synthetic oligonucleotide
  Antisense strand to SEQ ID NO: 2098944
uuacuaaguacucagguga

SEQ ID NO: 2098946 - RNA, 19 nt, Artificial Sequence
  Description of Artificial Sequence: Synthetic oligonucleotide
  Sense strand starting at position 3904 of SEQ ID NO: 1882152
cuuaguaaggcccaaggau

SEQ ID NO: 2098947 - RNA, 19 nt, Artificial Sequence
  Description of Artificial Sequence: Synthetic oligonucleotide
  Antisense strand to SEQ ID NO: 2098946
auccuugggccuuacuaag

SEQ ID NO: 2098948 - RNA, 19 nt, Artificial Sequence
  Description of Artificial Sequence: Synthetic oligonucleotide
  Sense strand starting at position 3940 of SEQ ID NO: 1882152
aggaauaauugacacagaa

SEQ ID NO: 2098949 - RNA, 19 nt, Artificial Sequence
  Description of Artificial Sequence: Synthetic oligonucleotide
  Antisense strand to SEQ ID NO: 2098948
uucugugucaauuauuccu

SEQ ID NO: 2098950 - RNA, 19 nt, Artificial Sequence
  Description of Artificial Sequence: Synthetic oligonucleotide
  Sense strand starting at position 3950 of SEQ ID NO: 1882152
gacacagaauuggacgaau

SEQ ID NO: 2098951 - RNA, 19 nt, Artificial Sequence
  Description of Artificial Sequence: Synthetic oligonucleotide
  Antisense strand to SEQ ID NO: 2098950
auucguccaauucuguguc

SEQ ID NO: 2098952 - RNA, 19 nt, Artificial Sequence
  Description of Artificial Sequence: Synthetic oligonucleotide
  Sense strand starting at position 3962 of SEQ ID NO: 1882152
gacgaaugacuuugaccau

SEQ ID NO: 2098953 - RNA, 19 nt, Artificial Sequence
  Description of Artificial Sequence: Synthetic oligonucleotide
  Antisense strand to SEQ ID NO: 2098952
auggucaaagucauucguc

SEQ ID NO: 2098954 - RNA, 19 nt, Artificial Sequence
  Description of Artificial Sequence: Synthetic oligonucleotide
  Sense strand starting at position 3963 of SEQ ID NO: 1882152
acgaaugacuuugaccaua

SEQ ID NO: 2098955 - RNA, 19 nt, Artificial Sequence
  Description of Artificial Sequence: Synthetic oligonucleotide
  Antisense strand to SEQ ID NO: 2098954
uauggucaaagucauucgu

SEQ ID NO: 2098956 - RNA, 19 nt, Artificial Sequence
  Description of Artificial Sequence: Synthetic oligonucleotide
  Sense strand starting at position 400 of SEQ ID NO: 1882153
cuaagucugguccagacua

SEQ ID NO: 2098957 - RNA, 19 nt, Artificial Sequence
  Description of Artificial Sequence: Synthetic oligonucleotide
  Antisense strand to SEQ ID NO: 2098956
uagucuggaccagacuuag

SEQ ID NO: 2098958 - RNA, 19 nt, Artificial Sequence
  Description of Artificial Sequence: Synthetic oligonucleotide
  Sense strand starting at position 461 of SEQ ID NO: 1882153
agucucaaaugacugagau

SEQ ID NO: 2098959 - RNA, 19 nt, Artificial Sequence
  Description of Artificial Sequence: Synthetic oligonucleotide
  Antisense strand to SEQ ID NO: 2098958
aucucagucauuugagacu

SEQ ID NO: 2098960 - RNA, 19 nt, Artificial Sequence
  Description of Artificial Sequence: Synthetic oligonucleotide
  Sense strand starting at position 462 of SEQ ID NO: 1882153
gucucaaaugacugagauc

SEQ ID NO: 2098961 - RNA, 19 nt, Artificial Sequence
  Description of Artificial Sequence: Synthetic oligonucleotide
  Antisense strand to SEQ ID NO: 2098960
gaucucagucauuugagac

SEQ ID NO: 2098962 - RNA, 19 nt, Artificial Sequence
  Description of Artificial Sequence: Synthetic oligonucleotide
  Sense strand starting at position 495 of SEQ ID NO: 1882153
auguuaauccuguggagga

SEQ ID NO: 2098963 - RNA, 19 nt, Artificial Sequence
  Description of Artificial Sequence: Synthetic oligonucleotide
  Antisense strand to SEQ ID NO: 2098962
uccuccacaggauuaacau

SEQ ID NO: 2098964 - RNA, 19 nt, Artificial Sequence
  Description of Artificial Sequence: Synthetic oligonucleotide
  Sense strand starting at position 678 of SEQ ID NO: 1882153
ucaugaaaguggcugcaau

SEQ ID NO: 2098965 - RNA, 19 nt, Artificial Sequence
  Description of Artificial Sequence: Synthetic oligonucleotide
  Antisense strand to SEQ ID NO: 2098964
auugcagccacuuucauga

SEQ ID NO: 2098966 - RNA, 19 nt, Artificial Sequence
  Description of Artificial Sequence: Synthetic oligonucleotide
  Sense strand starting at position 679 of SEQ ID NO: 1882153
caugaaaguggcugcaauu

SEQ ID NO: 2098967 - RNA, 19 nt, Artificial Sequence
  Description of Artificial Sequence: Synthetic oligonucleotide
  Antisense strand to SEQ ID NO: 2098966
aauugcagccacuuucaug

SEQ ID NO: 2098968 - RNA, 19 nt, Artificial Sequence
  Description of Artificial Sequence: Synthetic oligonucleotide
  Sense strand starting at position 692 of SEQ ID NO: 1882153
gcaauuacauccgucauag

SEQ ID NO: 2098969 - RNA, 19 nt, Artificial Sequence
  Description of Artificial Sequence: Synthetic oligonucleotide
  Antisense strand to SEQ ID NO: 2098968
cuaugacggauguaauugc

SEQ ID NO: 2098970 - RNA, 19 nt, Artificial Sequence
  Description of Artificial Sequence: Synthetic oligonucleotide
  Sense strand starting at position 733 of SEQ ID NO: 1882153
guaggaagugauggcucuu

SEQ ID NO: 2098971 - RNA, 19 nt, Artificial Sequence
  Description of Artificial Sequence: Synthetic oligonucleotide
  Antisense strand to SEQ ID NO: 2098970
aagagccaucacuuccuac

SEQ ID NO: 2098972 - RNA, 19 nt, Artificial Sequence
  Description of Artificial Sequence: Synthetic oligonucleotide
  Sense strand starting at position 757 of SEQ ID NO: 1882153
gcucuucuugguuggaaua

SEQ ID NO: 2098973 - RNA, 19 nt, Artificial Sequence
  Description of Artificial Sequence: Synthetic oligonucleotide
  Antisense strand to SEQ ID NO: 2098972
uauuccaaccaagaagagc

SEQ ID NO: 2098974 - RNA, 19 nt, Artificial Sequence
  Description of Artificial Sequence: Synthetic oligonucleotide
  Sense strand starting at position 1300 of SEQ ID NO: 1882153
aguccacauucucuuguau

SEQ ID NO: 2098975 - RNA, 19 nt, Artificial Sequence
  Description of Artificial Sequence: Synthetic oligonucleotide
  Antisense strand to SEQ ID NO: 2098974
auacaagagaauguggacu

SEQ ID NO: 2098976 - RNA, 19 nt, Artificial Sequence
  Description of Artificial Sequence: Synthetic oligonucleotide
  Sense strand starting at position 1398 of SEQ ID NO: 1882153
guguuuauuagugauaaag

SEQ ID NO: 2098977 - RNA, 19 nt, Artificial Sequence
  Description of Artificial Sequence: Synthetic oligonucleotide
  Antisense strand to SEQ ID NO: 2098976
cuuuaucacuaauaaacac

SEQ ID NO: 2098978 - RNA, 19 nt, Artificial Sequence
  Description of Artificial Sequence: Synthetic oligonucleotide
  Sense strand starting at position 1408 of SEQ ID NO: 1882153
gugauaaaguuccauuuga

SEQ ID NO: 2098979 - RNA, 19 nt, Artificial Sequence
  Description of Artificial Sequence: Synthetic oligonucleotide
  Antisense strand to SEQ ID NO: 2098978
ucaaauggaacuuuaucac

SEQ ID NO: 2098980 - RNA, 19 nt, Artificial Sequence
  Description of Artificial Sequence: Synthetic oligonucleotide
  Sense strand starting at position 1741 of SEQ ID NO: 1882153
gggauuucuuaauauauga

SEQ ID NO: 2098981 - RNA, 19 nt, Artificial Sequence
  Description of Artificial Sequence: Synthetic oligonucleotide
  Antisense strand to SEQ ID NO: 2098980
ucauauauuaagaaauccc

SEQ ID NO: 2098982 - RNA, 19 nt, Artificial Sequence
  Description of Artificial Sequence: Synthetic oligonucleotide
  Sense strand starting at position 1820 of SEQ ID NO: 1882153
uccuuaaggccauguauuu

SEQ ID NO: 2098983 - RNA, 19 nt, Artificial Sequence
  Description of Artificial Sequence: Synthetic oligonucleotide
  Antisense strand to SEQ ID NO: 2098982
aaauacauggccuuaagga

SEQ ID NO: 2098984 - RNA, 19 nt, Artificial Sequence
  Description of Artificial Sequence: Synthetic oligonucleotide
  Sense strand starting at position 1879 of SEQ ID NO: 1882153
gguccaagauaauccuauu

SEQ ID NO: 2098985 - RNA, 19 nt, Artificial Sequence
  Description of Artificial Sequence: Synthetic oligonucleotide
  Antisense strand to SEQ ID NO: 2098984
aauaggauuaucuuggacc

SEQ ID NO: 2098986 - RNA, 19 nt, Artificial Sequence
  Description of Artificial Sequence: Synthetic oligonucleotide
  Sense strand starting at position 1965 of SEQ ID NO: 1882153
ucagaaugauguguugaau

SEQ ID NO: 2098987 - RNA, 19 nt, Artificial Sequence
  Description of Artificial Sequence: Synthetic oligonucleotide
  Antisense strand to SEQ ID NO: 2098986
auucaacacaucauucuga

SEQ ID NO: 2098988 - RNA, 19 nt, Artificial Sequence
  Description of Artificial Sequence: Synthetic oligonucleotide
  Sense strand starting at position 1997 of SEQ ID NO: 1882153
gcacaaaucuuugucaaag

SEQ ID NO: 2098989 - RNA, 19 nt, Artificial Sequence
  Description of Artificial Sequence: Synthetic oligonucleotide
  Antisense strand to SEQ ID NO: 2098988
cuuugacaaagauuugugc

SEQ ID NO: 2098990 - RNA, 19 nt, Artificial Sequence
  Description of Artificial Sequence: Synthetic oligonucleotide
  Sense strand starting at position 2329 of SEQ ID NO: 1882153
aagaauucuuuagugagua

SEQ ID NO: 2098991 - RNA, 19 nt, Artificial Sequence
  Description of Artificial Sequence: Synthetic oligonucleotide
  Antisense strand to SEQ ID NO: 2098990
uacucacuaaagaauucuu

SEQ ID NO: 2098992 - RNA, 19 nt, Artificial Sequence
  Description of Artificial Sequence: Synthetic oligonucleotide
  Sense strand starting at position 2341 of SEQ ID NO: 1882153
gugaguauauaaucucauc

SEQ ID NO: 2098993 - RNA, 19 nt, Artificial Sequence
  Description of Artificial Sequence: Synthetic oligonucleotide
  Antisense strand to SEQ ID NO: 2098992
gaugagauuauauacucac

SEQ ID NO: 2098994 - RNA, 19 nt, Artificial Sequence
  Description of Artificial Sequence: Synthetic oligonucleotide
  Sense strand starting at position 2378 of SEQ ID NO: 1882153
agcagaaugggccauauau

SEQ ID NO: 2098995 - RNA, 19 nt, Artificial Sequence
  Description of Artificial Sequence: Synthetic oligonucleotide
  Antisense strand to SEQ ID NO: 2098994
auauauggcccauucugcu

SEQ ID NO: 2098996 - RNA, 19 nt, Artificial Sequence
  Description of Artificial Sequence: Synthetic oligonucleotide
  Sense strand starting at position 2386 of SEQ ID NO: 1882153
gggccauauauuugugcca

SEQ ID NO: 2098997 - RNA, 19 nt, Artificial Sequence
  Description of Artificial Sequence: Synthetic oligonucleotide
  Antisense strand to SEQ ID NO: 2098996
uggcacaaauauauggccc

SEQ ID NO: 2098998 - RNA, 19 nt, Artificial Sequence
  Description of Artificial Sequence: Synthetic oligonucleotide
  Sense strand starting at position 2437 of SEQ ID NO: 1882153
cucucuccacgacagaauu

SEQ ID NO: 2098999 - RNA, 19 nt, Artificial Sequence
  Description of Artificial Sequence: Synthetic oligonucleotide
  Antisense strand to SEQ ID NO: 2098998
aauucugucguggagagag

SEQ ID NO: 2099000 - RNA, 19 nt, Artificial Sequence
  Description of Artificial Sequence: Synthetic oligonucleotide
  Sense strand starting at position 2448 of SEQ ID NO: 1882153
acagaauuccacuggucca

SEQ ID NO: 2099001 - RNA, 19 nt, Artificial Sequence
  Description of Artificial Sequence: Synthetic oligonucleotide
  Antisense strand to SEQ ID NO: 2099000
uggaccaguggaauucugu

SEQ ID NO: 2099002 - RNA, 19 nt, Artificial Sequence
  Description of Artificial Sequence: Synthetic oligonucleotide
  Sense strand starting at position 2566 of SEQ ID NO: 1882153
aguccuucugauuagauca

SEQ ID NO: 2099003 - RNA, 19 nt, Artificial Sequence
  Description of Artificial Sequence: Synthetic oligonucleotide
  Antisense strand to SEQ ID NO: 2099002
ugaucuaaucagaaggacu

SEQ ID NO: 2099004 - RNA, 19 nt, Artificial Sequence
  Description of Artificial Sequence: Synthetic oligonucleotide
  Sense strand starting at position 2573 of SEQ ID NO: 1882153
cugauuagaucagugacaa

SEQ ID NO: 2099005 - RNA, 19 nt, Artificial Sequence
  Description of Artificial Sequence: Synthetic oligonucleotide
  Antisense strand to SEQ ID NO: 2099004
uugucacugaucuaaucag

SEQ ID NO: 2099006 - RNA, 19 nt, Artificial Sequence
  Description of Artificial Sequence: Synthetic oligonucleotide
  Sense strand starting at position 2574 of SEQ ID NO: 1882153
ugauuagaucagugacaau

SEQ ID NO: 2099007 - RNA, 19 nt, Artificial Sequence
  Description of Artificial Sequence: Synthetic oligonucleotide
  Antisense strand to SEQ ID NO: 2099006
auugucacugaucuaauca

SEQ ID NO: 2099008 - RNA, 19 nt, Artificial Sequence
  Description of Artificial Sequence: Synthetic oligonucleotide
  Sense strand starting at position 2671 of SEQ ID NO: 1882153
gaugucagucugcaaagga

SEQ ID NO: 2099009 - RNA, 19 nt, Artificial Sequence
  Description of Artificial Sequence: Synthetic oligonucleotide
  Antisense strand to SEQ ID NO: 2099008
uccuuugcagacugacauc

SEQ ID NO: 2099010 - RNA, 19 nt, Artificial Sequence
  Description of Artificial Sequence: Synthetic oligonucleotide
  Sense strand starting at position 2687 of SEQ ID NO: 1882153
ggaaauguuuaauugcaug

SEQ ID NO: 2099011 - RNA, 19 nt, Artificial Sequence
  Description of Artificial Sequence: Synthetic oligonucleotide
  Antisense strand to SEQ ID NO: 2099010
caugcaauuaaacauuucc

SEQ ID NO: 2099012 - RNA, 19 nt, Artificial Sequence
  Description of Artificial Sequence: Synthetic oligonucleotide
  Sense strand starting at position 2720 of SEQ ID NO: 1882153
aaaugacgguuacauuuau

SEQ ID NO: 2099013 - RNA, 19 nt, Artificial Sequence
  Description of Artificial Sequence: Synthetic oligonucleotide
  Antisense strand to SEQ ID NO: 2099012
auaaauguaaccgucauuu

SEQ ID NO: 2099014 - RNA, 19 nt, Artificial Sequence
  Description of Artificial Sequence: Synthetic oligonucleotide
  Sense strand starting at position 3661 of SEQ ID NO: 1882153
ugucaaaguuauguucuga

SEQ ID NO: 2099015 - RNA, 19 nt, Artificial Sequence
  Description of Artificial Sequence: Synthetic oligonucleotide
  Antisense strand to SEQ ID NO: 2099014
ucagaacauaacuuugaca

SEQ ID NO: 2099016 - RNA, 19 nt, Artificial Sequence
  Description of Artificial Sequence: Synthetic oligonucleotide
  Sense strand starting at position 3723 of SEQ ID NO: 1882153
acguuuacaagugauacga

SEQ ID NO: 2099017 - RNA, 19 nt, Artificial Sequence
  Description of Artificial Sequence: Synthetic oligonucleotide
  Antisense strand to SEQ ID NO: 2099016
ucguaucacuuguaaacgu

SEQ ID NO: 2099018 - RNA, 19 nt, Artificial Sequence
  Description of Artificial Sequence: Synthetic oligonucleotide
  Sense strand starting at position 3758 of SEQ ID NO: 1882153
cucauuaauguaugaggac

SEQ ID NO: 2099019 - RNA, 19 nt, Artificial Sequence
  Description of Artificial Sequence: Synthetic oligonucleotide
  Antisense strand to SEQ ID NO: 2099018
guccucauacauuaaugag

SEQ ID NO: 2099020 - RNA, 19 nt, Artificial Sequence
  Description of Artificial Sequence: Synthetic oligonucleotide
  Sense strand starting at position 3774 of SEQ ID NO: 1882153
gacugacuuguauggccau

SEQ ID NO: 2099021 - RNA, 19 nt, Artificial Sequence
  Description of Artificial Sequence: Synthetic oligonucleotide
  Antisense strand to SEQ ID NO: 2099020
auggccauacaagucaguc

SEQ ID NO: 2099022 - RNA, 19 nt, Artificial Sequence
  Description of Artificial Sequence: Synthetic oligonucleotide
  Sense strand starting at position 3814 of SEQ ID NO: 1882153
acagucacaccauguaaua

SEQ ID NO: 2099023 - RNA, 19 nt, Artificial Sequence
  Description of Artificial Sequence: Synthetic oligonucleotide
  Antisense strand to SEQ ID NO: 2099022
uauuacauggugugacugu

SEQ ID NO: 2099024 - RNA, 19 nt, Artificial Sequence
  Description of Artificial Sequence: Synthetic oligonucleotide
  Sense strand starting at position 3870 of SEQ ID NO: 1882153
gggaucuuacaguguguaa

SEQ ID NO: 2099025 - RNA, 19 nt, Artificial Sequence
  Description of Artificial Sequence: Synthetic oligonucleotide
  Antisense strand to SEQ ID NO: 2099024
uuacacacuguaagauccc

SEQ ID NO: 2099026 - RNA, 19 nt, Artificial Sequence
  Description of Artificial Sequence: Synthetic oligonucleotide
  Sense strand starting at position 3872 of SEQ ID NO: 1882153
gaucuuacaguguguaacu

SEQ ID NO: 2099027 - RNA, 19 nt, Artificial Sequence
  Description of Artificial Sequence: Synthetic oligonucleotide
  Antisense strand to SEQ ID NO: 2099026
aguuacacacuguaagauc

SEQ ID NO: 2099028 - RNA, 19 nt, Artificial Sequence
  Description of Artificial Sequence: Synthetic oligonucleotide
  Sense strand starting at position 3887 of SEQ ID NO: 1882153
aacugagagugaguccuua

SEQ ID NO: 2099029 - RNA, 19 nt, Artificial Sequence
  Description of Artificial Sequence: Synthetic oligonucleotide
  Antisense strand to SEQ ID NO: 2099028
uaaggacucacucucaguu

SEQ ID NO: 2099030 - RNA, 19 nt, Artificial Sequence
  Description of Artificial Sequence: Synthetic oligonucleotide
  Sense strand starting at position 3891 of SEQ ID NO: 1882153
gagagugaguccuuaacca

SEQ ID NO: 2099031 - RNA, 19 nt, Artificial Sequence
  Description of Artificial Sequence: Synthetic oligonucleotide
  Antisense strand to SEQ ID NO: 2099030
ugguuaaggacucacucuc

SEQ ID NO: 2099032 - RNA, 19 nt, Artificial Sequence
  Description of Artificial Sequence: Synthetic oligonucleotide
  Sense strand starting at position 3965 of SEQ ID NO: 1882153
acaccaucuguagaauagu

SEQ ID NO: 2099033 - RNA, 19 nt, Artificial Sequence
  Description of Artificial Sequence: Synthetic oligonucleotide
  Antisense strand to SEQ ID NO: 2099032
acuauucuacagauggugu

SEQ ID NO: 2099034 - RNA, 19 nt, Artificial Sequence
  Description of Artificial Sequence: Synthetic oligonucleotide
  Sense strand starting at position 3968 of SEQ ID NO: 1882153
ccaucuguagaauagugau

SEQ ID NO: 2099035 - RNA, 19 nt, Artificial Sequence
  Description of Artificial Sequence: Synthetic oligonucleotide
  Antisense strand to SEQ ID NO: 2099034
aucacuauucuacagaugg

SEQ ID NO: 2099036 - RNA, 19 nt, Artificial Sequence
  Description of Artificial Sequence: Synthetic oligonucleotide
  Sense strand starting at position 57 of SEQ ID NO: 1882154
ccucaaggguuguuuauau

SEQ ID NO: 2099037 - RNA, 19 nt, Artificial Sequence
  Description of Artificial Sequence: Synthetic oligonucleotide
  Antisense strand to SEQ ID NO: 2099036
auauaaacaacccuugagg

SEQ ID NO: 2099038 - RNA, 19 nt, Artificial Sequence
  Description of Artificial Sequence: Synthetic oligonucleotide
  Sense strand starting at position 358 of SEQ ID NO: 1882154
gaauuagucgagugaaucu

SEQ ID NO: 2099039 - RNA, 19 nt, Artificial Sequence
  Description of Artificial Sequence: Synthetic oligonucleotide
  Antisense strand to SEQ ID NO: 2099038
agauucacucgacuaauuc

SEQ ID NO: 2099040 - RNA, 19 nt, Artificial Sequence
  Description of Artificial Sequence: Synthetic oligonucleotide
  Sense strand starting at position 546 of SEQ ID NO: 1882154
gcaauuggacucuaaccau

SEQ ID NO: 2099041 - RNA, 19 nt, Artificial Sequence
  Description of Artificial Sequence: Synthetic oligonucleotide
  Antisense strand to SEQ ID NO: 2099040
augguuagaguccaauugc

SEQ ID NO: 2099042 - RNA, 19 nt, Artificial Sequence
  Description of Artificial Sequence: Synthetic oligonucleotide
  Sense strand starting at position 618 of SEQ ID NO: 1882154
ucagcaggguuucuuuaua

SEQ ID NO: 2099043 - RNA, 19 nt, Artificial Sequence
  Description of Artificial Sequence: Synthetic oligonucleotide
  Antisense strand to SEQ ID NO: 2099042
uauaaagaaacccugcuga

SEQ ID NO: 2099044 - RNA, 19 nt, Artificial Sequence
  Description of Artificial Sequence: Synthetic oligonucleotide
  Sense strand starting at position 626 of SEQ ID NO: 1882154
guuucuuuauaagugaaug

SEQ ID NO: 2099045 - RNA, 19 nt, Artificial Sequence
  Description of Artificial Sequence: Synthetic oligonucleotide
  Antisense strand to SEQ ID NO: 2099044
cauucacuuauaaagaaac

SEQ ID NO: 2099046 - RNA, 19 nt, Artificial Sequence
  Description of Artificial Sequence: Synthetic oligonucleotide
  Sense strand starting at position 634 of SEQ ID NO: 1882154
auaagugaauguucugaag

SEQ ID NO: 2099047 - RNA, 19 nt, Artificial Sequence
  Description of Artificial Sequence: Synthetic oligonucleotide
  Antisense strand to SEQ ID NO: 2099046
cuucagaacauucacuuau

SEQ ID NO: 2099048 - RNA, 19 nt, Artificial Sequence
  Description of Artificial Sequence: Synthetic oligonucleotide
  Sense strand starting at position 818 of SEQ ID NO: 1882154
uagcaugacuuggcuacau

SEQ ID NO: 2099049 - RNA, 19 nt, Artificial Sequence
  Description of Artificial Sequence: Synthetic oligonucleotide
  Antisense strand to SEQ ID NO: 2099048
auguagccaagucaugcua

SEQ ID NO: 2099050 - RNA, 19 nt, Artificial Sequence
  Description of Artificial Sequence: Synthetic oligonucleotide
  Sense strand starting at position 820 of SEQ ID NO: 1882154
gcaugacuuggcuacauca

SEQ ID NO: 2099051 - RNA, 19 nt, Artificial Sequence
  Description of Artificial Sequence: Synthetic oligonucleotide
  Antisense strand to SEQ ID NO: 2099050
ugauguagccaagucaugc

SEQ ID NO: 2099052 - RNA, 19 nt, Artificial Sequence
  Description of Artificial Sequence: Synthetic oligonucleotide
  Sense strand starting at position 1253 of SEQ ID NO: 1882154
gugccaagugagcauuaca

SEQ ID NO: 2099053 - RNA, 19 nt, Artificial Sequence
  Description of Artificial Sequence: Synthetic oligonucleotide
  Antisense strand to SEQ ID NO: 2099052
uguaaugcucacuuggcac

SEQ ID NO: 2099054 - RNA, 19 nt, Artificial Sequence
  Description of Artificial Sequence: Synthetic oligonucleotide
  Sense strand starting at position 1256 of SEQ ID NO: 1882154
ccaagugagcauuacagau

SEQ ID NO: 2099055 - RNA, 19 nt, Artificial Sequence
  Description of Artificial Sequence: Synthetic oligonucleotide
  Antisense strand to SEQ ID NO: 2099054
aucuguaaugcucacuugg

SEQ ID NO: 2099056 - RNA, 19 nt, Artificial Sequence
  Description of Artificial Sequence: Synthetic oligonucleotide
  Sense strand starting at position 1349 of SEQ ID NO: 1882154
agcucuaugugacuaauaa

SEQ ID NO: 2099057 - RNA, 19 nt, Artificial Sequence
  Description of Artificial Sequence: Synthetic oligonucleotide
  Antisense strand to SEQ ID NO: 2099056
uuauuagucacauagagcu

SEQ ID NO: 2099058 - RNA, 19 nt, Artificial Sequence
  Description of Artificial Sequence: Synthetic oligonucleotide
  Sense strand starting at position 1350 of SEQ ID NO: 1882154
gcucuaugugacuaauaau

SEQ ID NO: 2099059 - RNA, 19 nt, Artificial Sequence
  Description of Artificial Sequence: Synthetic oligonucleotide
  Antisense strand to SEQ ID NO: 2099058
auuauuagucacauagagc

SEQ ID NO: 2099060 - RNA, 19 nt, Artificial Sequence
  Description of Artificial Sequence: Synthetic oligonucleotide
  Sense strand starting at position 1748 of SEQ ID NO: 1882154
caugacuaaucguugacau

SEQ ID NO: 2099061 - RNA, 19 nt, Artificial Sequence
  Description of Artificial Sequence: Synthetic oligonucleotide
  Antisense strand to SEQ ID NO: 2099060
augucaacgauuagucaug

SEQ ID NO: 2099062 - RNA, 19 nt, Artificial Sequence
  Description of Artificial Sequence: Synthetic oligonucleotide
  Sense strand starting at position 1749 of SEQ ID NO: 1882154
augacuaaucguugacauu

SEQ ID NO: 2099063 - RNA, 19 nt, Artificial Sequence
  Description of Artificial Sequence: Synthetic oligonucleotide
  Antisense strand to SEQ ID NO: 2099062
aaugucaacgauuagucau

SEQ ID NO: 2099064 - RNA, 19 nt, Artificial Sequence
  Description of Artificial Sequence: Synthetic oligonucleotide
  Sense strand starting at position 1750 of SEQ ID NO: 1882154
ugacuaaucguugacauuc

SEQ ID NO: 2099065 - RNA, 19 nt, Artificial Sequence
  Description of Artificial Sequence: Synthetic oligonucleotide
  Antisense strand to SEQ ID NO: 2099064
gaaugucaacgauuaguca

SEQ ID NO: 2099066 - RNA, 19 nt, Artificial Sequence
  Description of Artificial Sequence: Synthetic oligonucleotide
  Sense strand starting at position 1938 of SEQ ID NO: 1882154
ugcugaaaucaauacugca

SEQ ID NO: 2099067 - RNA, 19 nt, Artificial Sequence
  Description of Artificial Sequence: Synthetic oligonucleotide
  Antisense strand to SEQ ID NO: 2099066
ugcaguauugauuucagca

SEQ ID NO: 2099068 - RNA, 19 nt, Artificial Sequence
  Description of Artificial Sequence: Synthetic oligonucleotide
  Sense strand starting at position 2087 of SEQ ID NO: 1882154
acuagucauugggccagua

SEQ ID NO: 2099069 - RNA, 19 nt, Artificial Sequence
  Description of Artificial Sequence: Synthetic oligonucleotide
  Antisense strand to SEQ ID NO: 2099068
uacuggcccaaugacuagu

SEQ ID NO: 2099070 - RNA, 19 nt, Artificial Sequence
  Description of Artificial Sequence: Synthetic oligonucleotide
  Sense strand starting at position 2089 of SEQ ID NO: 1882154
uagucauugggccaguaug

SEQ ID NO: 2099071 - RNA, 19 nt, Artificial Sequence
  Description of Artificial Sequence: Synthetic oligonucleotide
  Antisense strand to SEQ ID NO: 2099070
cauacuggcccaaugacua

SEQ ID NO: 2099072 - RNA, 19 nt, Artificial Sequence
  Description of Artificial Sequence: Synthetic oligonucleotide
  Sense strand starting at position 2445 of SEQ ID NO: 1882154
accuaugggugucuacaaa

SEQ ID NO: 2099073 - RNA, 19 nt, Artificial Sequence
  Description of Artificial Sequence: Synthetic oligonucleotide
  Antisense strand to SEQ ID NO: 2099072
uuuguagacacccauaggu

SEQ ID NO: 2099074 - RNA, 19 nt, Artificial Sequence
  Description of Artificial Sequence: Synthetic oligonucleotide
  Sense strand starting at position 2591 of SEQ ID NO: 1882154
guaucaauagcugagaauu

SEQ ID NO: 2099075 - RNA, 19 nt, Artificial Sequence
  Description of Artificial Sequence: Synthetic oligonucleotide
  Antisense strand to SEQ ID NO: 2099074
aauucucagcuauugauac

SEQ ID NO: 2099076 - RNA, 19 nt, Artificial Sequence
  Description of Artificial Sequence: Synthetic oligonucleotide
  Sense strand starting at position 2636 of SEQ ID NO: 1882154
gagcaccagcuuuauaguu

SEQ ID NO: 2099077 - RNA, 19 nt, Artificial Sequence
  Description of Artificial Sequence: Synthetic oligonucleotide
  Antisense strand to SEQ ID NO: 2099076
aacuauaaagcuggugcuc

SEQ ID NO: 2099078 - RNA, 19 nt, Artificial Sequence
  Description of Artificial Sequence: Synthetic oligonucleotide
  Sense strand starting at position 2667 of SEQ ID NO: 1882154
uucugaaucuuagcugaga

SEQ ID NO: 2099079 - RNA, 19 nt, Artificial Sequence
  Description of Artificial Sequence: Synthetic oligonucleotide
  Antisense strand to SEQ ID NO: 2099078
ucucagcuaagauucagaa

SEQ ID NO: 2099080 - RNA, 19 nt, Artificial Sequence
  Description of Artificial Sequence: Synthetic oligonucleotide
  Sense strand starting at position 2670 of SEQ ID NO: 1882154
ugaaucuuagcugagaucu

SEQ ID NO: 2099081 - RNA, 19 nt, Artificial Sequence
  Description of Artificial Sequence: Synthetic oligonucleotide
  Antisense strand to SEQ ID NO: 2099080
agaucucagcuaagauuca

SEQ ID NO: 2099082 - RNA, 19 nt, Artificial Sequence
  Description of Artificial Sequence: Synthetic oligonucleotide
  Sense strand starting at position 2681 of SEQ ID NO: 1882154
ugagaucuuagauggguua

SEQ ID NO: 2099083 - RNA, 19 nt, Artificial Sequence
  Description of Artificial Sequence: Synthetic oligonucleotide
  Antisense strand to SEQ ID NO: 2099082
uaacccaucuaagaucuca

SEQ ID NO: 2099084 - RNA, 19 nt, Artificial Sequence
  Description of Artificial Sequence: Synthetic oligonucleotide
  Sense strand starting at position 2683 of SEQ ID NO: 1882154
agaucuuagauggguuaau

SEQ ID NO: 2099085 - RNA, 19 nt, Artificial Sequence
  Description of Artificial Sequence: Synthetic oligonucleotide
  Antisense strand to SEQ ID NO: 2099084
auuaacccaucuaagaucu

SEQ ID NO: 2099086 - RNA, 19 nt, Artificial Sequence
  Description of Artificial Sequence: Synthetic oligonucleotide
  Sense strand starting at position 2684 of SEQ ID NO: 1882154
gaucuuagauggguuaauc

SEQ ID NO: 2099087 - RNA, 19 nt, Artificial Sequence
  Description of Artificial Sequence: Synthetic oligonucleotide
  Antisense strand to SEQ ID NO: 2099086
gauuaacccaucuaagauc

SEQ ID NO: 2099088 - RNA, 19 nt, Artificial Sequence
  Description of Artificial Sequence: Synthetic oligonucleotide
  Sense strand starting at position 2692 of SEQ ID NO: 1882154
auggguuaaucucuuagaa

SEQ ID NO: 2099089 - RNA, 19 nt, Artificial Sequence
  Description of Artificial Sequence: Synthetic oligonucleotide
  Antisense strand to SEQ ID NO: 2099088
uucuaagagauuaacccau

SEQ ID NO: 2099090 - RNA, 19 nt, Artificial Sequence
  Description of Artificial Sequence: Synthetic oligonucleotide
  Sense strand starting at position 2995 of SEQ ID NO: 1882154
uuauacuacuguuuaguga

SEQ ID NO: 2099091 - RNA, 19 nt, Artificial Sequence
  Description of Artificial Sequence: Synthetic oligonucleotide
  Antisense strand to SEQ ID NO: 2099090
ucacuaaacaguaguauaa

SEQ ID NO: 2099092 - RNA, 19 nt, Artificial Sequence
  Description of Artificial Sequence: Synthetic oligonucleotide
  Sense strand starting at position 3039 of SEQ ID NO: 1882154
aacugaugucaagguuaca

SEQ ID NO: 2099093 - RNA, 19 nt, Artificial Sequence
  Description of Artificial Sequence: Synthetic oligonucleotide
  Antisense strand to SEQ ID NO: 2099092
uguaaccuugacaucaguu

SEQ ID NO: 2099094 - RNA, 19 nt, Artificial Sequence
  Description of Artificial Sequence: Synthetic oligonucleotide
  Sense strand starting at position 3106 of SEQ ID NO: 1882154
cgagauuauccuggguaac

SEQ ID NO: 2099095 - RNA, 19 nt, Artificial Sequence
  Description of Artificial Sequence: Synthetic oligonucleotide
  Antisense strand to SEQ ID NO: 2099094
guuacccaggauaaucucg

SEQ ID NO: 2099096 - RNA, 19 nt, Artificial Sequence
  Description of Artificial Sequence: Synthetic oligonucleotide
  Sense strand starting at position 3348 of SEQ ID NO: 1882154
cccaguaaccaucagggua

SEQ ID NO: 2099097 - RNA, 19 nt, Artificial Sequence
  Description of Artificial Sequence: Synthetic oligonucleotide
  Antisense strand to SEQ ID NO: 2099096
uacccugaugguuacuggg

SEQ ID NO: 2099098 - RNA, 19 nt, Artificial Sequence
  Description of Artificial Sequence: Synthetic oligonucleotide
  Sense strand starting at position 3416 of SEQ ID NO: 1882154
accaauuaugaucgaacau

SEQ ID NO: 2099099 - RNA, 19 nt, Artificial Sequence
  Description of Artificial Sequence: Synthetic oligonucleotide
  Antisense strand to SEQ ID NO: 2099098
auguucgaucauaauuggu

SEQ ID NO: 2099100 - RNA, 19 nt, Artificial Sequence
  Description of Artificial Sequence: Synthetic oligonucleotide
  Sense strand starting at position 3448 of SEQ ID NO: 1882154
gaaucugcgguauacaauu

SEQ ID NO: 2099101 - RNA, 19 nt, Artificial Sequence
  Description of Artificial Sequence: Synthetic oligonucleotide
  Antisense strand to SEQ ID NO: 2099100
aauuguauaccgcagauuc

SEQ ID NO: 2099102 - RNA, 19 nt, Artificial Sequence
  Description of Artificial Sequence: Synthetic oligonucleotide
  Sense strand starting at position 3484 of SEQ ID NO: 1882154
accaguuccggugguauuu

SEQ ID NO: 2099103 - RNA, 19 nt, Artificial Sequence
  Description of Artificial Sequence: Synthetic oligonucleotide
  Antisense strand to SEQ ID NO: 2099102
aaauaccaccggaacuggu

SEQ ID NO: 2099104 - RNA, 19 nt, Artificial Sequence
  Description of Artificial Sequence: Synthetic oligonucleotide
  Sense strand starting at position 3613 of SEQ ID NO: 1882154
accucaucggcauacagau

SEQ ID NO: 2099105 - RNA, 19 nt, Artificial Sequence
  Description of Artificial Sequence: Synthetic oligonucleotide
  Antisense strand to SEQ ID NO: 2099104
aucuguaugccgaugaggu

SEQ ID NO: 2099106 - RNA, 19 nt, Artificial Sequence
  Description of Artificial Sequence: Synthetic oligonucleotide
  Sense strand starting at position 3623 of SEQ ID NO: 1882154
cauacagauguacgaguuu

SEQ ID NO: 2099107 - RNA, 19 nt, Artificial Sequence
  Description of Artificial Sequence: Synthetic oligonucleotide
  Antisense strand to SEQ ID NO: 2099106
aaacucguacaucuguaug

SEQ ID NO: 2099108 - RNA, 19 nt, Artificial Sequence
  Description of Artificial Sequence: Synthetic oligonucleotide
  Sense strand starting at position 3922 of SEQ ID NO: 1882154
acucgaguucuccgggaaa

SEQ ID NO: 2099109 - RNA, 19 nt, Artificial Sequence
  Description of Artificial Sequence: Synthetic oligonucleotide
  Antisense strand to SEQ ID NO: 2099108
uuucccggagaacucgagu

SEQ ID NO: 2099110 - RNA, 19 nt, Artificial Sequence
  Description of Artificial Sequence: Synthetic oligonucleotide
  Sense strand starting at position 3925 of SEQ ID NO: 1882154
cgaguucuccgggaaacca

SEQ ID NO: 2099111 - RNA, 19 nt, Artificial Sequence
  Description of Artificial Sequence: Synthetic oligonucleotide
  Antisense strand to SEQ ID NO: 2099110
ugguuucccggagaacucg

SEQ ID NO: 2099112 - RNA, 19 nt, Artificial Sequence
  Description of Artificial Sequence: Synthetic oligonucleotide
  Sense strand starting at position 3963 of SEQ ID NO: 1882154
ggcaaucguaaagaucgaa

SEQ ID NO: 2099113 - RNA, 19 nt, Artificial Sequence
  Description of Artificial Sequence: Synthetic oligonucleotide
  Antisense strand to SEQ ID NO: 2099112
uucgaucuuuacgauugcc

SEQ ID NO: 2099114 - RNA, 19 nt, Artificial Sequence
  Description of Artificial Sequence: Synthetic oligonucleotide
  Sense strand starting at position 3966 of SEQ ID NO: 1882154
aaucguaaagaucgaaacu

SEQ ID NO: 2099115 - RNA, 19 nt, Artificial Sequence
  Description of Artificial Sequence: Synthetic oligonucleotide
  Antisense strand to SEQ ID NO: 2099114
aguuucgaucuuuacgauu

SEQ ID NO: 2099116 - RNA, 19 nt, Artificial Sequence
  Description of Artificial Sequence: Synthetic oligonucleotide
  Sense strand starting at position 191 of SEQ ID NO: 1882155
ccgguugucagaggagaag

SEQ ID NO: 2099117 - RNA, 19 nt, Artificial Sequence
  Description of Artificial Sequence: Synthetic oligonucleotide
  Antisense strand to SEQ ID NO: 2099116
cuucuccucugacaaccgg

SEQ ID NO: 2099118 - RNA, 19 nt, Artificial Sequence
  Description of Artificial Sequence: Synthetic oligonucleotide
  Sense strand starting at position 227 of SEQ ID NO: 1882155
cuugguauggcccacaaau

SEQ ID NO: 2099119 - RNA, 19 nt, Artificial Sequence
  Description of Artificial Sequence: Synthetic oligonucleotide
  Antisense strand to SEQ ID NO: 2099118
auuugugggccauaccaag

SEQ ID NO: 2099120 - RNA, 19 nt, Artificial Sequence
  Description of Artificial Sequence: Synthetic oligonucleotide
  Sense strand starting at position 268 of SEQ ID NO: 1882155
gagggaggaguuugucauu

SEQ ID NO: 2099121 - RNA, 19 nt, Artificial Sequence
  Description of Artificial Sequence: Synthetic oligonucleotide
  Antisense strand to SEQ ID NO: 2099120
aaugacaaacuccucccuc

SEQ ID NO: 2099122 - RNA, 19 nt, Artificial Sequence
  Description of Artificial Sequence: Synthetic oligonucleotide
  Sense strand starting at position 273 of SEQ ID NO: 1882155
aggaguuugucauucucag

SEQ ID NO: 2099123 - RNA, 19 nt, Artificial Sequence
  Description of Artificial Sequence: Synthetic oligonucleotide
  Antisense strand to SEQ ID NO: 2099122
cugagaaugacaaacuccu

SEQ ID NO: 2099124 - RNA, 19 nt, Artificial Sequence
  Description of Artificial Sequence: Synthetic oligonucleotide
  Sense strand starting at position 346 of SEQ ID NO: 1882155
gucucauugcaucacucau

SEQ ID NO: 2099125 - RNA, 19 nt, Artificial Sequence
  Description of Artificial Sequence: Synthetic oligonucleotide
  Antisense strand to SEQ ID NO: 2099124
augagugaugcaaugagac

SEQ ID NO: 2099126 - RNA, 19 nt, Artificial Sequence
  Description of Artificial Sequence: Synthetic oligonucleotide
  Sense strand starting at position 391 of SEQ ID NO: 1882155
agagucaagugacugagua

SEQ ID NO: 2099127 - RNA, 19 nt, Artificial Sequence
  Description of Artificial Sequence: Synthetic oligonucleotide
  Antisense strand to SEQ ID NO: 2099126
uacucagucacuugacucu

SEQ ID NO: 2099128 - RNA, 19 nt, Artificial Sequence
  Description of Artificial Sequence: Synthetic oligonucleotide
  Sense strand starting at position 392 of SEQ ID NO: 1882155
gagucaagugacugaguau

SEQ ID NO: 2099129 - RNA, 19 nt, Artificial Sequence
  Description of Artificial Sequence: Synthetic oligonucleotide
  Antisense strand to SEQ ID NO: 2099128
auacucagucacuugacuc

SEQ ID NO: 2099130 - RNA, 19 nt, Artificial Sequence
  Description of Artificial Sequence: Synthetic oligonucleotide
  Sense strand starting at position 393 of SEQ ID NO: 1882155
agucaagugacugaguaua

SEQ ID NO: 2099131 - RNA, 19 nt, Artificial Sequence
  Description of Artificial Sequence: Synthetic oligonucleotide
  Antisense strand to SEQ ID NO: 2099130
uauacucagucacuugacu

SEQ ID NO: 2099132 - RNA, 19 nt, Artificial Sequence
  Description of Artificial Sequence: Synthetic oligonucleotide
  Sense strand starting at position 395 of SEQ ID NO: 1882155
ucaagugacugaguauaug

SEQ ID NO: 2099133 - RNA, 19 nt, Artificial Sequence
  Description of Artificial Sequence: Synthetic oligonucleotide
  Antisense strand to SEQ ID NO: 2099132
cauauacucagucacuuga

SEQ ID NO: 2099134 - RNA, 19 nt, Artificial Sequence
  Description of Artificial Sequence: Synthetic oligonucleotide
  Sense strand starting at position 445 of SEQ ID NO: 1882155
ucagaauugcaggacaugu

SEQ ID NO: 2099135 - RNA, 19 nt, Artificial Sequence
  Description of Artificial Sequence: Synthetic oligonucleotide
  Antisense strand to SEQ ID NO: 2099134
acauguccugcaauucuga

SEQ ID NO: 2099136 - RNA, 19 nt, Artificial Sequence
  Description of Artificial Sequence: Synthetic oligonucleotide
  Sense strand starting at position 530 of SEQ ID NO: 1882155
ugccaauuaccugagcuuu

SEQ ID NO: 2099137 - RNA, 19 nt, Artificial Sequence
  Description of Artificial Sequence: Synthetic oligonucleotide
  Antisense strand to SEQ ID NO: 2099136
aaagcucagguaauuggca

SEQ ID NO: 2099138 - RNA, 19 nt, Artificial Sequence
  Description of Artificial Sequence: Synthetic oligonucleotide
  Sense strand starting at position 623 of SEQ ID NO: 1882155
agcaaugcugaguaacuua

SEQ ID NO: 2099139 - RNA, 19 nt, Artificial Sequence
  Description of Artificial Sequence: Synthetic oligonucleotide
  Antisense strand to SEQ ID NO: 2099138
uaaguuacucagcauugcu

SEQ ID NO: 2099140 - RNA, 19 nt, Artificial Sequence
  Description of Artificial Sequence: Synthetic oligonucleotide
  Sense strand starting at position 656 of SEQ ID NO: 1882155
ggccaaacaucuucuguag

SEQ ID NO: 2099141 - RNA, 19 nt, Artificial Sequence
  Description of Artificial Sequence: Synthetic oligonucleotide
  Antisense strand to SEQ ID NO: 2099140
cuacagaagauguuuggcc

SEQ ID NO: 2099142 - RNA, 19 nt, Artificial Sequence
  Description of Artificial Sequence: Synthetic oligonucleotide
  Sense strand starting at position 789 of SEQ ID NO: 1882155
gcuacuugcguugugagau

SEQ ID NO: 2099143 - RNA, 19 nt, Artificial Sequence
  Description of Artificial Sequence: Synthetic oligonucleotide
  Antisense strand to SEQ ID NO: 2099142
aucucacaacgcaaguagc

SEQ ID NO: 2099144 - RNA, 19 nt, Artificial Sequence
  Description of Artificial Sequence: Synthetic oligonucleotide
  Sense strand starting at position 950 of SEQ ID NO: 1882155
ccacaugaugauggucuua

SEQ ID NO: 2099145 - RNA, 19 nt, Artificial Sequence
  Description of Artificial Sequence: Synthetic oligonucleotide
  Antisense strand to SEQ ID NO: 2099144
uaagaccaucaucaugugg

SEQ ID NO: 2099146 - RNA, 19 nt, Artificial Sequence
  Description of Artificial Sequence: Synthetic oligonucleotide
  Sense strand starting at position 952 of SEQ ID NO: 1882155
acaugaugauggucuuauc

SEQ ID NO: 2099147 - RNA, 19 nt, Artificial Sequence
  Description of Artificial Sequence: Synthetic oligonucleotide
  Antisense strand to SEQ ID NO: 2099146
gauaagaccaucaucaugu

SEQ ID NO: 2099148 - RNA, 19 nt, Artificial Sequence
  Description of Artificial Sequence: Synthetic oligonucleotide
  Sense strand starting at position 963 of SEQ ID NO: 1882155
gucuuaucuaaaggaggua

SEQ ID NO: 2099149 - RNA, 19 nt, Artificial Sequence
  Description of Artificial Sequence: Synthetic oligonucleotide
  Antisense strand to SEQ ID NO: 2099148
uaccuccuuuagauaagac

SEQ ID NO: 2099150 - RNA, 19 nt, Artificial Sequence
  Description of Artificial Sequence: Synthetic oligonucleotide
  Sense strand starting at position 1016 of SEQ ID NO: 1882155
cguuuaacacacuggauaa

SEQ ID NO: 2099151 - RNA, 19 nt, Artificial Sequence
  Description of Artificial Sequence: Synthetic oligonucleotide
  Antisense strand to SEQ ID NO: 2099150
uuauccaguguguuaaacg

SEQ ID NO: 2099152 - RNA, 19 nt, Artificial Sequence
  Description of Artificial Sequence: Synthetic oligonucleotide
  Sense strand starting at position 1047 of SEQ ID NO: 1882155
caaggucaugaguggguua

SEQ ID NO: 2099153 - RNA, 19 nt, Artificial Sequence
  Description of Artificial Sequence: Synthetic oligonucleotide
  Antisense strand to SEQ ID NO: 2099152
uaacccacucaugaccuug

SEQ ID NO: 2099154 - RNA, 19 nt, Artificial Sequence
  Description of Artificial Sequence: Synthetic oligonucleotide
  Sense strand starting at position 1048 of SEQ ID NO: 1882155
aaggucaugaguggguuaa

SEQ ID NO: 2099155 - RNA, 19 nt, Artificial Sequence
  Description of Artificial Sequence: Synthetic oligonucleotide
  Antisense strand to SEQ ID NO: 2099154
uuaacccacucaugaccuu

SEQ ID NO: 2099156 - RNA, 19 nt, Artificial Sequence
  Description of Artificial Sequence: Synthetic oligonucleotide
  Sense strand starting at position 1050 of SEQ ID NO: 1882155
ggucaugaguggguuaaca

SEQ ID NO: 2099157 - RNA, 19 nt, Artificial Sequence
  Description of Artificial Sequence: Synthetic oligonucleotide
  Antisense strand to SEQ ID NO: 2099156
uguuaacccacucaugacc

SEQ ID NO: 2099158 - RNA, 19 nt, Artificial Sequence
  Description of Artificial Sequence: Synthetic oligonucleotide
  Sense strand starting at position 1125 of SEQ ID NO: 1882155
aggacugaguggcucuauu

SEQ ID NO: 2099159 - RNA, 19 nt, Artificial Sequence
  Description of Artificial Sequence: Synthetic oligonucleotide
  Antisense strand to SEQ ID NO: 2099158
aauagagccacucaguccu

SEQ ID NO: 2099160 - RNA, 19 nt, Artificial Sequence
  Description of Artificial Sequence: Synthetic oligonucleotide
  Sense strand starting at position 1135 of SEQ ID NO: 1882155
ggcucuauuccagacuaaa

SEQ ID NO: 2099161 - RNA, 19 nt, Artificial Sequence
  Description of Artificial Sequence: Synthetic oligonucleotide
  Antisense strand to SEQ ID NO: 2099160
uuuagucuggaauagagcc

SEQ ID NO: 2099162 - RNA, 19 nt, Artificial Sequence
  Description of Artificial Sequence: Synthetic oligonucleotide
  Sense strand starting at position 1166 of SEQ ID NO: 1882155
gguaaacuguacccugaua

SEQ ID NO: 2099163 - RNA, 19 nt, Artificial Sequence
  Description of Artificial Sequence: Synthetic oligonucleotide
  Antisense strand to SEQ ID NO: 2099162
uaucaggguacaguuuacc

SEQ ID NO: 2099164 - RNA, 19 nt, Artificial Sequence
  Description of Artificial Sequence: Synthetic oligonucleotide
  Sense strand starting at position 1498 of SEQ ID NO: 1882155
uaauuuaggugccagaaau

SEQ ID NO: 2099165 - RNA, 19 nt, Artificial Sequence
  Description of Artificial Sequence: Synthetic oligonucleotide
  Antisense strand to SEQ ID NO: 2099164
auuucuggcaccuaaauua

SEQ ID NO: 2099166 - RNA, 19 nt, Artificial Sequence
  Description of Artificial Sequence: Synthetic oligonucleotide
  Sense strand starting at position 1637 of SEQ ID NO: 1882155
ggccgacagaaauguagua

SEQ ID NO: 2099167 - RNA, 19 nt, Artificial Sequence
  Description of Artificial Sequence: Synthetic oligonucleotide
  Antisense strand to SEQ ID NO: 2099166
uacuacauuucugucggcc

SEQ ID NO: 2099168 - RNA, 19 nt, Artificial Sequence
  Description of Artificial Sequence: Synthetic oligonucleotide
  Sense strand starting at position 1639 of SEQ ID NO: 1882155
ccgacagaaauguaguaau

SEQ ID NO: 2099169 - RNA, 19 nt, Artificial Sequence
  Description of Artificial Sequence: Synthetic oligonucleotide
  Antisense strand to SEQ ID NO: 2099168
auuacuacauuucugucgg

SEQ ID NO: 2099170 - RNA, 19 nt, Artificial Sequence
  Description of Artificial Sequence: Synthetic oligonucleotide
  Sense strand starting at position 1649 of SEQ ID NO: 1882155
uguaguaaugaaugcugga

SEQ ID NO: 2099171 - RNA, 19 nt, Artificial Sequence
  Description of Artificial Sequence: Synthetic oligonucleotide
  Antisense strand to SEQ ID NO: 2099170
uccagcauucauuacuaca

SEQ ID NO: 2099172 - RNA, 19 nt, Artificial Sequence
  Description of Artificial Sequence: Synthetic oligonucleotide
  Sense strand starting at position 1761 of SEQ ID NO: 1882155
gucagacaauucuuaacag

SEQ ID NO: 2099173 - RNA, 19 nt, Artificial Sequence
  Description of Artificial Sequence: Synthetic oligonucleotide
  Antisense strand to SEQ ID NO: 2099172
cuguuaagaauugucugac

SEQ ID NO: 2099174 - RNA, 19 nt, Artificial Sequence
  Description of Artificial Sequence: Synthetic oligonucleotide
  Sense strand starting at position 2242 of SEQ ID NO: 1882155
cggaauucccuacacgaca

SEQ ID NO: 2099175 - RNA, 19 nt, Artificial Sequence
  Description of Artificial Sequence: Synthetic oligonucleotide
  Antisense strand to SEQ ID NO: 2099174
ugucguguagggaauuccg

SEQ ID NO: 2099176 - RNA, 19 nt, Artificial Sequence
  Description of Artificial Sequence: Synthetic oligonucleotide
  Sense strand starting at position 2328 of SEQ ID NO: 1882155
agaggaucauguccgggaa

SEQ ID NO: 2099177 - RNA, 19 nt, Artificial Sequence
  Description of Artificial Sequence: Synthetic oligonucleotide
  Antisense strand to SEQ ID NO: 2099176
uucccggacaugauccucu

SEQ ID NO: 2099178 - RNA, 19 nt, Artificial Sequence
  Description of Artificial Sequence: Synthetic oligonucleotide
  Sense strand starting at position 2331 of SEQ ID NO: 1882155
ggaucauguccgggaacug

SEQ ID NO: 2099179 - RNA, 19 nt, Artificial Sequence
  Description of Artificial Sequence: Synthetic oligonucleotide
  Antisense strand to SEQ ID NO: 2099178
caguucccggacaugaucc

SEQ ID NO: 2099180 - RNA, 19 nt, Artificial Sequence
  Description of Artificial Sequence: Synthetic oligonucleotide
  Sense strand starting at position 2642 of SEQ ID NO: 1882155
gggaaauugcaaggcauca

SEQ ID NO: 2099181 - RNA, 19 nt, Artificial Sequence
  Description of Artificial Sequence: Synthetic oligonucleotide
  Antisense strand to SEQ ID NO: 2099180
ugaugccuugcaauuuccc

SEQ ID NO: 2099182 - RNA, 19 nt, Artificial Sequence
  Description of Artificial Sequence: Synthetic oligonucleotide
  Sense strand starting at position 2739 of SEQ ID NO: 1882155
aaggcuucucagggaugau

SEQ ID NO: 2099183 - RNA, 19 nt, Artificial Sequence
  Description of Artificial Sequence: Synthetic oligonucleotide
  Antisense strand to SEQ ID NO: 2099182
aucaucccugagaagccuu

SEQ ID NO: 2099184 - RNA, 19 nt, Artificial Sequence
  Description of Artificial Sequence: Synthetic oligonucleotide
  Sense strand starting at position 2742 of SEQ ID NO: 1882155
gcuucucagggaugaugua

SEQ ID NO: 2099185 - RNA, 19 nt, Artificial Sequence
  Description of Artificial Sequence: Synthetic oligonucleotide
  Antisense strand to SEQ ID NO: 2099184
uacaucaucccugagaagc

SEQ ID NO: 2099186 - RNA, 19 nt, Artificial Sequence
  Description of Artificial Sequence: Synthetic oligonucleotide
  Sense strand starting at position 2790 of SEQ ID NO: 1882155
ggcacauucccaugaggac

SEQ ID NO: 2099187 - RNA, 19 nt, Artificial Sequence
  Description of Artificial Sequence: Synthetic oligonucleotide
  Antisense strand to SEQ ID NO: 2099186
guccucaugggaaugugcc

SEQ ID NO: 2099188 - RNA, 19 nt, Artificial Sequence
  Description of Artificial Sequence: Synthetic oligonucleotide
  Sense strand starting at position 2916 of SEQ ID NO: 1882155
cacuaucguggguaacgau

SEQ ID NO: 2099189 - RNA, 19 nt, Artificial Sequence
  Description of Artificial Sequence: Synthetic oligonucleotide
  Antisense strand to SEQ ID NO: 2099188
aucguuacccacgauagug

SEQ ID NO: 2099190 - RNA, 19 nt, Artificial Sequence
  Description of Artificial Sequence: Synthetic oligonucleotide
  Sense strand starting at position 3048 of SEQ ID NO: 1882155
ggacuuaguccaggcugga

SEQ ID NO: 2099191 - RNA, 19 nt, Artificial Sequence
  Description of Artificial Sequence: Synthetic oligonucleotide
  Antisense strand to SEQ ID NO: 2099190
uccagccuggacuaagucc

SEQ ID NO: 2099192 - RNA, 19 nt, Artificial Sequence
  Description of Artificial Sequence: Synthetic oligonucleotide
  Sense strand starting at position 3081 of SEQ ID NO: 1882155
gguuacucuggaugaacua

SEQ ID NO: 2099193 - RNA, 19 nt, Artificial Sequence
  Description of Artificial Sequence: Synthetic oligonucleotide
  Antisense strand to SEQ ID NO: 2099192
uaguucauccagaguaacc

SEQ ID NO: 2099194 - RNA, 19 nt, Artificial Sequence
  Description of Artificial Sequence: Synthetic oligonucleotide
  Sense strand starting at position 3627 of SEQ ID NO: 1882155
ccaacugugcccugaagga

SEQ ID NO: 2099195 - RNA, 19 nt, Artificial Sequence
  Description of Artificial Sequence: Synthetic oligonucleotide
  Antisense strand to SEQ ID NO: 2099194
uccuucagggcacaguugg

SEQ ID NO: 2099196 - RNA, 19 nt, Artificial Sequence
  Description of Artificial Sequence: Synthetic oligonucleotide
  Sense strand starting at position 1219 of SEQ ID NO: 1882156
gcgaaacugucuccgagaa

SEQ ID NO: 2099197 - RNA, 19 nt, Artificial Sequence
  Description of Artificial Sequence: Synthetic oligonucleotide
  Antisense strand to SEQ ID NO: 2099196
uucucggagacaguuucgc

SEQ ID NO: 2099198 - RNA, 19 nt, Artificial Sequence
  Description of Artificial Sequence: Synthetic oligonucleotide
  Sense strand starting at position 1220 of SEQ ID NO: 1882156
cgaaacugucuccgagaaa

SEQ ID NO: 2099199 - RNA, 19 nt, Artificial Sequence
  Description of Artificial Sequence: Synthetic oligonucleotide
  Antisense strand to SEQ ID NO: 2099198
uuucucggagacaguuucg

SEQ ID NO: 2099200 - RNA, 19 nt, Artificial Sequence
  Description of Artificial Sequence: Synthetic oligonucleotide
  Sense strand starting at position 1678 of SEQ ID NO: 1882156
ccgguugucagaggagaag

SEQ ID NO: 2099201 - RNA, 19 nt, Artificial Sequence
  Description of Artificial Sequence: Synthetic oligonucleotide
  Antisense strand to SEQ ID NO: 2099200
cuucuccucugacaaccgg

SEQ ID NO: 2099202 - RNA, 19 nt, Artificial Sequence
  Description of Artificial Sequence: Synthetic oligonucleotide
  Sense strand starting at position 1714 of SEQ ID NO: 1882156
cuugguauggcccacaaau

SEQ ID NO: 2099203 - RNA, 19 nt, Artificial Sequence
  Description of Artificial Sequence: Synthetic oligonucleotide
  Antisense strand to SEQ ID NO: 2099202
auuugugggccauaccaag

SEQ ID NO: 2099204 - RNA, 19 nt, Artificial Sequence
  Description of Artificial Sequence: Synthetic oligonucleotide
  Sense strand starting at position 1755 of SEQ ID NO: 1882156
gagggaggaguuugucauu

SEQ ID NO: 2099205 - RNA, 19 nt, Artificial Sequence
  Description of Artificial Sequence: Synthetic oligonucleotide
  Antisense strand to SEQ ID NO: 2099204
aaugacaaacuccucccuc

SEQ ID NO: 2099206 - RNA, 19 nt, Artificial Sequence
  Description of Artificial Sequence: Synthetic oligonucleotide
  Sense strand starting at position 1760 of SEQ ID NO: 1882156
aggaguuugucauucucag

SEQ ID NO: 2099207 - RNA, 19 nt, Artificial Sequence
  Description of Artificial Sequence: Synthetic oligonucleotide
  Antisense strand to SEQ ID NO: 2099206
cugagaaugacaaacuccu

SEQ ID NO: 2099208 - RNA, 19 nt, Artificial Sequence
  Description of Artificial Sequence: Synthetic oligonucleotide
  Sense strand starting at position 1833 of SEQ ID NO: 1882156
gucucauugcaucacucau

SEQ ID NO: 2099209 - RNA, 19 nt, Artificial Sequence
  Description of Artificial Sequence: Synthetic oligonucleotide
  Antisense strand to SEQ ID NO: 2099208
augagugaugcaaugagac

SEQ ID NO: 2099210 - RNA, 19 nt, Artificial Sequence
  Description of Artificial Sequence: Synthetic oligonucleotide
  Sense strand starting at position 1860 of SEQ ID NO: 1882156
ggauuuggcucugaucaca

SEQ ID NO: 2099211 - RNA, 19 nt, Artificial Sequence
  Description of Artificial Sequence: Synthetic oligonucleotide
  Antisense strand to SEQ ID NO: 2099210
ugugaucagagccaaaucc

SEQ ID NO: 2099212 - RNA, 19 nt, Artificial Sequence
  Description of Artificial Sequence: Synthetic oligonucleotide
  Sense strand starting at position 1878 of SEQ ID NO: 1882156
agagucaagugacugagua

SEQ ID NO: 2099213 - RNA, 19 nt, Artificial Sequence
  Description of Artificial Sequence: Synthetic oligonucleotide
  Antisense strand to SEQ ID NO: 2099212
uacucagucacuugacucu

SEQ ID NO: 2099214 - RNA, 19 nt, Artificial Sequence
  Description of Artificial Sequence: Synthetic oligonucleotide
  Sense strand starting at position 1879 of SEQ ID NO: 1882156
gagucaagugacugaguau

SEQ ID NO: 2099215 - RNA, 19 nt, Artificial Sequence
  Description of Artificial Sequence: Synthetic oligonucleotide
  Antisense strand to SEQ ID NO: 2099214
auacucagucacuugacuc

SEQ ID NO: 2099216 - RNA, 19 nt, Artificial Sequence
  Description of Artificial Sequence: Synthetic oligonucleotide
  Sense strand starting at position 1880 of SEQ ID NO: 1882156
agucaagugacugaguaua

SEQ ID NO: 2099217 - RNA, 19 nt, Artificial Sequence
  Description of Artificial Sequence: Synthetic oligonucleotide
  Antisense strand to SEQ ID NO: 2099216
uauacucagucacuugacu

SEQ ID NO: 2099218 - RNA, 19 nt, Artificial Sequence
  Description of Artificial Sequence: Synthetic oligonucleotide
  Sense strand starting at position 1882 of SEQ ID NO: 1882156
ucaagugacugaguauaug

SEQ ID NO: 2099219 - RNA, 19 nt, Artificial Sequence
  Description of Artificial Sequence: Synthetic oligonucleotide
  Antisense strand to SEQ ID NO: 2099218
cauauacucagucacuuga

SEQ ID NO: 2099220 - RNA, 19 nt, Artificial Sequence
  Description of Artificial Sequence: Synthetic oligonucleotide
  Sense strand starting at position 1932 of SEQ ID NO: 1882156
ucagaauugcaggacaugu

SEQ ID NO: 2099221 - RNA, 19 nt, Artificial Sequence
  Description of Artificial Sequence: Synthetic oligonucleotide
  Antisense strand to SEQ ID NO: 2099220
acauguccugcaauucuga

SEQ ID NO: 2099222 - RNA, 19 nt, Artificial Sequence
  Description of Artificial Sequence: Synthetic oligonucleotide
  Sense strand starting at position 2017 of SEQ ID NO: 1882156
ugccaauuaccugagcuuu

SEQ ID NO: 2099223 - RNA, 19 nt, Artificial Sequence
  Description of Artificial Sequence: Synthetic oligonucleotide
  Antisense strand to SEQ ID NO: 2099222
aaagcucagguaauuggca

SEQ ID NO: 2099224 - RNA, 19 nt, Artificial Sequence
  Description of Artificial Sequence: Synthetic oligonucleotide
  Sense strand starting at position 2109 of SEQ ID NO: 1882156
cagcaaugcugaguaacuu

SEQ ID NO: 2099225 - RNA, 19 nt, Artificial Sequence
  Description of Artificial Sequence: Synthetic oligonucleotide
  Antisense strand to SEQ ID NO: 2099224
aaguuacucagcauugcug

SEQ ID NO: 2099226 - RNA, 19 nt, Artificial Sequence
  Description of Artificial Sequence: Synthetic oligonucleotide
  Sense strand starting at position 2110 of SEQ ID NO: 1882156
agcaaugcugaguaacuua

SEQ ID NO: 2099227 - RNA, 19 nt, Artificial Sequence
  Description of Artificial Sequence: Synthetic oligonucleotide
  Antisense strand to SEQ ID NO: 2099226
uaaguuacucagcauugcu

SEQ ID NO: 2099228 - RNA, 19 nt, Artificial Sequence
  Description of Artificial Sequence: Synthetic oligonucleotide
  Sense strand starting at position 2143 of SEQ ID NO: 1882156
ggccaaacaucuucuguag

SEQ ID NO: 2099229 - RNA, 19 nt, Artificial Sequence
  Description of Artificial Sequence: Synthetic oligonucleotide
  Antisense strand to SEQ ID NO: 2099228
cuacagaagauguuuggcc

SEQ ID NO: 2099230 - RNA, 19 nt, Artificial Sequence
  Description of Artificial Sequence: Synthetic oligonucleotide
  Sense strand starting at position 2276 of SEQ ID NO: 1882156
gcuacuugcguugugagau

SEQ ID NO: 2099231 - RNA, 19 nt, Artificial Sequence
  Description of Artificial Sequence: Synthetic oligonucleotide
  Antisense strand to SEQ ID NO: 2099230
aucucacaacgcaaguagc

SEQ ID NO: 2099232 - RNA, 19 nt, Artificial Sequence
  Description of Artificial Sequence: Synthetic oligonucleotide
  Sense strand starting at position 2437 of SEQ ID NO: 1882156
ccacaugaugauggucuua

SEQ ID NO: 2099233 - RNA, 19 nt, Artificial Sequence
  Description of Artificial Sequence: Synthetic oligonucleotide
  Antisense strand to SEQ ID NO: 2099232
uaagaccaucaucaugugg

SEQ ID NO: 2099234 - RNA, 19 nt, Artificial Sequence
  Description of Artificial Sequence: Synthetic oligonucleotide
  Sense strand starting at position 2439 of SEQ ID NO: 1882156
acaugaugauggucuuauc

SEQ ID NO: 2099235 - RNA, 19 nt, Artificial Sequence
  Description of Artificial Sequence: Synthetic oligonucleotide
  Antisense strand to SEQ ID NO: 2099234
gauaagaccaucaucaugu

SEQ ID NO: 2099236 - RNA, 19 nt, Artificial Sequence
  Description of Artificial Sequence: Synthetic oligonucleotide
  Sense strand starting at position 2450 of SEQ ID NO: 1882156
gucuuaucuaaaggaggua

SEQ ID NO: 2099237 - RNA, 19 nt, Artificial Sequence
  Description of Artificial Sequence: Synthetic oligonucleotide
  Antisense strand to SEQ ID NO: 2099236
uaccuccuuuagauaagac

SEQ ID NO: 2099238 - RNA, 19 nt, Artificial Sequence
  Description of Artificial Sequence: Synthetic oligonucleotide
  Sense strand starting at position 2503 of SEQ ID NO: 1882156
cguuuaacacacuggauaa

SEQ ID NO: 2099239 - RNA, 19 nt, Artificial Sequence
  Description of Artificial Sequence: Synthetic oligonucleotide
  Antisense strand to SEQ ID NO: 2099238
uuauccaguguguuaaacg

SEQ ID NO: 2099240 - RNA, 19 nt, Artificial Sequence
  Description of Artificial Sequence: Synthetic oligonucleotide
  Sense strand starting at position 2534 of SEQ ID NO: 1882156
caaggucaugaguggguua

SEQ ID NO: 2099241 - RNA, 19 nt, Artificial Sequence
  Description of Artificial Sequence: Synthetic oligonucleotide
  Antisense strand to SEQ ID NO: 2099240
uaacccacucaugaccuug

SEQ ID NO: 2099242 - RNA, 19 nt, Artificial Sequence
  Description of Artificial Sequence: Synthetic oligonucleotide
  Sense strand starting at position 2535 of SEQ ID NO: 1882156
aaggucaugaguggguuaa

SEQ ID NO: 2099243 - RNA, 19 nt, Artificial Sequence
  Description of Artificial Sequence: Synthetic oligonucleotide
  Antisense strand to SEQ ID NO: 2099242
uuaacccacucaugaccuu

SEQ ID NO: 2099244 - RNA, 19 nt, Artificial Sequence
  Description of Artificial Sequence: Synthetic oligonucleotide
  Sense strand starting at position 2537 of SEQ ID NO: 1882156
ggucaugaguggguuaaca

SEQ ID NO: 2099245 - RNA, 19 nt, Artificial Sequence
  Description of Artificial Sequence: Synthetic oligonucleotide
  Antisense strand to SEQ ID NO: 2099244
uguuaacccacucaugacc

SEQ ID NO: 2099246 - RNA, 19 nt, Artificial Sequence
  Description of Artificial Sequence: Synthetic oligonucleotide
  Sense strand starting at position 2612 of SEQ ID NO: 1882156
aggacugaguggcucuauu

SEQ ID NO: 2099247 - RNA, 19 nt, Artificial Sequence
  Description of Artificial Sequence: Synthetic oligonucleotide
  Antisense strand to SEQ ID NO: 2099246
aauagagccacucaguccu

SEQ ID NO: 2099248 - RNA, 19 nt, Artificial Sequence
  Description of Artificial Sequence: Synthetic oligonucleotide
  Sense strand starting at position 2622 of SEQ ID NO: 1882156
ggcucuauuccagacuaaa

SEQ ID NO: 2099249 - RNA, 19 nt, Artificial Sequence
  Description of Artificial Sequence: Synthetic oligonucleotide
  Antisense strand to SEQ ID NO: 2099248
uuuagucuggaauagagcc

SEQ ID NO: 2099250 - RNA, 19 nt, Artificial Sequence
  Description of Artificial Sequence: Synthetic oligonucleotide
  Sense strand starting at position 2653 of SEQ ID NO: 1882156
gguaaacuguacccugaua

SEQ ID NO: 2099251 - RNA, 19 nt, Artificial Sequence
  Description of Artificial Sequence: Synthetic oligonucleotide
  Antisense strand to SEQ ID NO: 2099250
uaucaggguacaguuuacc

SEQ ID NO: 2099252 - RNA, 19 nt, Artificial Sequence
  Description of Artificial Sequence: Synthetic oligonucleotide
  Sense strand starting at position 2985 of SEQ ID NO: 1882156
uaauuuaggugccagaaau

SEQ ID NO: 2099253 - RNA, 19 nt, Artificial Sequence
  Description of Artificial Sequence: Synthetic oligonucleotide
  Antisense strand to SEQ ID NO: 2099252
auuucuggcaccuaaauua

SEQ ID NO: 2099254 - RNA, 19 nt, Artificial Sequence
  Description of Artificial Sequence: Synthetic oligonucleotide
  Sense strand starting at position 3049 of SEQ ID NO: 1882156
gugucuucucugcaaccaa

SEQ ID NO: 2099255 - RNA, 19 nt, Artificial Sequence
  Description of Artificial Sequence: Synthetic oligonucleotide
  Antisense strand to SEQ ID NO: 2099254
uugguugcagagaagacac

SEQ ID NO: 2099256 - RNA, 19 nt, Artificial Sequence
  Description of Artificial Sequence: Synthetic oligonucleotide
  Sense strand starting at position 3124 of SEQ ID NO: 1882156
ggccgacagaaauguagua

SEQ ID NO: 2099257 - RNA, 19 nt, Artificial Sequence
  Description of Artificial Sequence: Synthetic oligonucleotide
  Antisense strand to SEQ ID NO: 2099256
uacuacauuucugucggcc

SEQ ID NO: 2099258 - RNA, 19 nt, Artificial Sequence
  Description of Artificial Sequence: Synthetic oligonucleotide
  Sense strand starting at position 3126 of SEQ ID NO: 1882156
ccgacagaaauguaguaau

SEQ ID NO: 2099259 - RNA, 19 nt, Artificial Sequence
  Description of Artificial Sequence: Synthetic oligonucleotide
  Antisense strand to SEQ ID NO: 2099258
auuacuacauuucugucgg

SEQ ID NO: 2099260 - RNA, 19 nt, Artificial Sequence
  Description of Artificial Sequence: Synthetic oligonucleotide
  Sense strand starting at position 3136 of SEQ ID NO: 1882156
uguaguaaugaaugcugga

SEQ ID NO: 2099261 - RNA, 19 nt, Artificial Sequence
  Description of Artificial Sequence: Synthetic oligonucleotide
  Antisense strand to SEQ ID NO: 2099260
uccagcauucauuacuaca

SEQ ID NO: 2099262 - RNA, 19 nt, Artificial Sequence
  Description of Artificial Sequence: Synthetic oligonucleotide
  Sense strand starting at position 3248 of SEQ ID NO: 1882156
gucagacaauucuuaacag

SEQ ID NO: 2099263 - RNA, 19 nt, Artificial Sequence
  Description of Artificial Sequence: Synthetic oligonucleotide
  Antisense strand to SEQ ID NO: 2099262
cuguuaagaauugucugac

SEQ ID NO: 2099264 - RNA, 19 nt, Artificial Sequence
  Description of Artificial Sequence: Synthetic oligonucleotide
  Sense strand starting at position 3670 of SEQ ID NO: 1882156
ggcagagaagucugucagu

SEQ ID NO: 2099265 - RNA, 19 nt, Artificial Sequence
  Description of Artificial Sequence: Synthetic oligonucleotide
  Antisense strand to SEQ ID NO: 2099264
acugacagacuucucugcc

SEQ ID NO: 2099266 - RNA, 19 nt, Artificial Sequence
  Description of Artificial Sequence: Synthetic oligonucleotide
  Sense strand starting at position 3727 of SEQ ID NO: 1882156
cgcggaauucccuacacga

SEQ ID NO: 2099267 - RNA, 19 nt, Artificial Sequence
  Description of Artificial Sequence: Synthetic oligonucleotide
  Antisense strand to SEQ ID NO: 2099266
ucguguagggaauuccgcg

SEQ ID NO: 2099268 - RNA, 19 nt, Artificial Sequence
  Description of Artificial Sequence: Synthetic oligonucleotide
  Sense strand starting at position 3729 of SEQ ID NO: 1882156
cggaauucccuacacgaca

SEQ ID NO: 2099269 - RNA, 19 nt, Artificial Sequence
  Description of Artificial Sequence: Synthetic oligonucleotide
  Antisense strand to SEQ ID NO: 2099268
ugucguguagggaauuccg

SEQ ID NO: 2099270 - RNA, 19 nt, Artificial Sequence
  Description of Artificial Sequence: Synthetic oligonucleotide
  Sense strand starting at position 3815 of SEQ ID NO: 1882156
agaggaucauguccgggaa

SEQ ID NO: 2099271 - RNA, 19 nt, Artificial Sequence
  Description of Artificial Sequence: Synthetic oligonucleotide
  Antisense strand to SEQ ID NO: 2099270
uucccggacaugauccucu

SEQ ID NO: 2099272 - RNA, 19 nt, Artificial Sequence
  Description of Artificial Sequence: Synthetic oligonucleotide
  Sense strand starting at position 3818 of SEQ ID NO: 1882156
ggaucauguccgggaacug

SEQ ID NO: 2099273 - RNA, 19 nt, Artificial Sequence
  Description of Artificial Sequence: Synthetic oligonucleotide
  Antisense strand to SEQ ID NO: 2099272
caguucccggacaugaucc

SEQ ID NO: 2099274 - RNA, 19 nt, Artificial Sequence
  Description of Artificial Sequence: Synthetic oligonucleotide
  Sense strand starting at position 3893 of SEQ ID NO: 1882156
gggucaucugcucagucau

SEQ ID NO: 2099275 - RNA, 19 nt, Artificial Sequence
  Description of Artificial Sequence: Synthetic oligonucleotide
  Antisense strand to SEQ ID NO: 2099274
augacugagcagaugaccc

SEQ ID NO: 2099276 - RNA, 19 nt, Artificial Sequence
  Description of Artificial Sequence: Synthetic oligonucleotide
  Sense strand starting at position 80 of SEQ ID NO: 1882157
uucggaucucauuaccacu

SEQ ID NO: 2099277 - RNA, 19 nt, Artificial Sequence
  Description of Artificial Sequence: Synthetic oligonucleotide
  Antisense strand to SEQ ID NO: 2099276
agugguaaugagauccgaa

SEQ ID NO: 2099278 - RNA, 19 nt, Artificial Sequence
  Description of Artificial Sequence: Synthetic oligonucleotide
  Sense strand starting at position 82 of SEQ ID NO: 1882157
cggaucucauuaccacuaa

SEQ ID NO: 2099279 - RNA, 19 nt, Artificial Sequence
  Description of Artificial Sequence: Synthetic oligonucleotide
  Antisense strand to SEQ ID NO: 2099278
uuagugguaaugagauccg

SEQ ID NO: 2099280 - RNA, 19 nt, Artificial Sequence
  Description of Artificial Sequence: Synthetic oligonucleotide
  Sense strand starting at position 166 of SEQ ID NO: 1882157
cuguguuaccuauaaggga

SEQ ID NO: 2099281 - RNA, 19 nt, Artificial Sequence
  Description of Artificial Sequence: Synthetic oligonucleotide
  Antisense strand to SEQ ID NO: 2099280
ucccuuauagguaacacag

SEQ ID NO: 2099282 - RNA, 19 nt, Artificial Sequence
  Description of Artificial Sequence: Synthetic oligonucleotide
  Sense strand starting at position 170 of SEQ ID NO: 1882157
guuaccuauaagggaaagu

SEQ ID NO: 2099283 - RNA, 19 nt, Artificial Sequence
  Description of Artificial Sequence: Synthetic oligonucleotide
  Antisense strand to SEQ ID NO: 2099282
acuuucccuuauagguaac

SEQ ID NO: 2099284 - RNA, 19 nt, Artificial Sequence
  Description of Artificial Sequence: Synthetic oligonucleotide
  Sense strand starting at position 564 of SEQ ID NO: 1882157
gauuaagcucauuagcgga

SEQ ID NO: 2099285 - RNA, 19 nt, Artificial Sequence
  Description of Artificial Sequence: Synthetic oligonucleotide
  Antisense strand to SEQ ID NO: 2099284
uccgcuaaugagcuuaauc

SEQ ID NO: 2099286 - RNA, 19 nt, Artificial Sequence
  Description of Artificial Sequence: Synthetic oligonucleotide
  Sense strand starting at position 586 of SEQ ID NO: 1882157
gaucacgucguguuuaucu

SEQ ID NO: 2099287 - RNA, 19 nt, Artificial Sequence
  Description of Artificial Sequence: Synthetic oligonucleotide
  Antisense strand to SEQ ID NO: 2099286
agauaaacacgacgugauc

SEQ ID NO: 2099288 - RNA, 19 nt, Artificial Sequence
  Description of Artificial Sequence: Synthetic oligonucleotide
  Sense strand starting at position 595 of SEQ ID NO: 1882157
guguuuaucucuguauuuc

SEQ ID NO: 2099289 - RNA, 19 nt, Artificial Sequence
  Description of Artificial Sequence: Synthetic oligonucleotide
  Antisense strand to SEQ ID NO: 2099288
gaaauacagagauaaacac

SEQ ID NO: 2099290 - RNA, 19 nt, Artificial Sequence
  Description of Artificial Sequence: Synthetic oligonucleotide
  Sense strand starting at position 606 of SEQ ID NO: 1882157
uguauuuccucucuccagu

SEQ ID NO: 2099291 - RNA, 19 nt, Artificial Sequence
  Description of Artificial Sequence: Synthetic oligonucleotide
  Antisense strand to SEQ ID NO: 2099290
acuggagagaggaaauaca

SEQ ID NO: 2099292 - RNA, 19 nt, Artificial Sequence
  Description of Artificial Sequence: Synthetic oligonucleotide
  Sense strand starting at position 634 of SEQ ID NO: 1882157
uagugagguguuuacuaaa

SEQ ID NO: 2099293 - RNA, 19 nt, Artificial Sequence
  Description of Artificial Sequence: Synthetic oligonucleotide
  Antisense strand to SEQ ID NO: 2099292
uuuaguaaacaccucacua

SEQ ID NO: 2099294 - RNA, 19 nt, Artificial Sequence
  Description of Artificial Sequence: Synthetic oligonucleotide
  Sense strand starting at position 673 of SEQ ID NO: 1882157
gcaggcgugguuaaaguua

SEQ ID NO: 2099295 - RNA, 19 nt, Artificial Sequence
  Description of Artificial Sequence: Synthetic oligonucleotide
  Antisense strand to SEQ ID NO: 2099294
uaacuuuaaccacgccugc

SEQ ID NO: 2099296 - RNA, 19 nt, Artificial Sequence
  Description of Artificial Sequence: Synthetic oligonucleotide
  Sense strand starting at position 703 of SEQ ID NO: 1882157
ccuccuuuggaaugaaaua

SEQ ID NO: 2099297 - RNA, 19 nt, Artificial Sequence
  Description of Artificial Sequence: Synthetic oligonucleotide
  Antisense strand to SEQ ID NO: 2099296
uauuucauuccaaaggagg

SEQ ID NO: 2099298 - RNA, 19 nt, Artificial Sequence
  Description of Artificial Sequence: Synthetic oligonucleotide
  Sense strand starting at position 779 of SEQ ID NO: 1882157
gguuauauaccucauguuu

SEQ ID NO: 2099299 - RNA, 19 nt, Artificial Sequence
  Description of Artificial Sequence: Synthetic oligonucleotide
  Antisense strand to SEQ ID NO: 2099298
aaacaugagguauauaacc

SEQ ID NO: 2099300 - RNA, 19 nt, Artificial Sequence
  Description of Artificial Sequence: Synthetic oligonucleotide
  Sense strand starting at position 785 of SEQ ID NO: 1882157
auaccucauguuugacauu

SEQ ID NO: 2099301 - RNA, 19 nt, Artificial Sequence
  Description of Artificial Sequence: Synthetic oligonucleotide
  Antisense strand to SEQ ID NO: 2099300
aaugucaaacaugagguau

SEQ ID NO: 2099302 - RNA, 19 nt, Artificial Sequence
  Description of Artificial Sequence: Synthetic oligonucleotide
  Sense strand starting at position 811 of SEQ ID NO: 1882157
gucugacuucuggauaagu

SEQ ID NO: 2099303 - RNA, 19 nt, Artificial Sequence
  Description of Artificial Sequence: Synthetic oligonucleotide
  Antisense strand to SEQ ID NO: 2099302
acuuauccagaagucagac

SEQ ID NO: 2099304 - RNA, 19 nt, Artificial Sequence
  Description of Artificial Sequence: Synthetic oligonucleotide
  Sense strand starting at position 822 of SEQ ID NO: 1882157
ggauaaguggauuguuccu

SEQ ID NO: 2099305 - RNA, 19 nt, Artificial Sequence
  Description of Artificial Sequence: Synthetic oligonucleotide
  Antisense strand to SEQ ID NO: 2099304
aggaacaauccacuuaucc

SEQ ID NO: 2099306 - RNA, 19 nt, Artificial Sequence
  Description of Artificial Sequence: Synthetic oligonucleotide
  Sense strand starting at position 928 of SEQ ID NO: 1882157
aguaaauuagguuacaugu

SEQ ID NO: 2099307 - RNA, 19 nt, Artificial Sequence
  Description of Artificial Sequence: Synthetic oligonucleotide
  Antisense strand to SEQ ID NO: 2099306
acauguaaccuaauuuacu

SEQ ID NO: 2099308 - RNA, 19 nt, Artificial Sequence
  Description of Artificial Sequence: Synthetic oligonucleotide
  Sense strand starting at position 941 of SEQ ID NO: 1882157
acauguguucccuaaacaa

SEQ ID NO: 2099309 - RNA, 19 nt, Artificial Sequence
  Description of Artificial Sequence: Synthetic oligonucleotide
  Antisense strand to SEQ ID NO: 2099308
uuguuuagggaacacaugu

SEQ ID NO: 2099310 - RNA, 19 nt, Artificial Sequence
  Description of Artificial Sequence: Synthetic oligonucleotide
  Sense strand starting at position 1133 of SEQ ID NO: 1882157
uguuguauuuaucuuucca

SEQ ID NO: 2099311 - RNA, 19 nt, Artificial Sequence
  Description of Artificial Sequence: Synthetic oligonucleotide
  Antisense strand to SEQ ID NO: 2099310
uggaaagauaaauacaaca

SEQ ID NO: 2099312 - RNA, 19 nt, Artificial Sequence
  Description of Artificial Sequence: Synthetic oligonucleotide
  Sense strand starting at position 1262 of SEQ ID NO: 1882157
agguguuuacccuaaugac

SEQ ID NO: 2099313 - RNA, 19 nt, Artificial Sequence
  Description of Artificial Sequence: Synthetic oligonucleotide
  Antisense strand to SEQ ID NO: 2099312
gucauuaggguaaacaccu

SEQ ID NO: 2099314 - RNA, 19 nt, Artificial Sequence
  Description of Artificial Sequence: Synthetic oligonucleotide
  Sense strand starting at position 1516 of SEQ ID NO: 1882157
accugauuagacugugaua

SEQ ID NO: 2099315 - RNA, 19 nt, Artificial Sequence
  Description of Artificial Sequence: Synthetic oligonucleotide
  Antisense strand to SEQ ID NO: 2099314
uaucacagucuaaucaggu

SEQ ID NO: 2099316 - RNA, 19 nt, Artificial Sequence
  Description of Artificial Sequence: Synthetic oligonucleotide
  Sense strand starting at position 1518 of SEQ ID NO: 1882157
cugauuagacugugauaau

SEQ ID NO: 2099317 - RNA, 19 nt, Artificial Sequence
  Description of Artificial Sequence: Synthetic oligonucleotide
  Antisense strand to SEQ ID NO: 2099316
auuaucacagucuaaucag

SEQ ID NO: 2099318 - RNA, 19 nt, Artificial Sequence
  Description of Artificial Sequence: Synthetic oligonucleotide
  Sense strand starting at position 1692 of SEQ ID NO: 1882157
ccuagaugacucggaaagu

SEQ ID NO: 2099319 - RNA, 19 nt, Artificial Sequence
  Description of Artificial Sequence: Synthetic oligonucleotide
  Antisense strand to SEQ ID NO: 2099318
acuuuccgagucaucuagg

SEQ ID NO: 2099320 - RNA, 19 nt, Artificial Sequence
  Description of Artificial Sequence: Synthetic oligonucleotide
  Sense strand starting at position 1757 of SEQ ID NO: 1882157
cgcccuuuacaacaagauu

SEQ ID NO: 2099321 - RNA, 19 nt, Artificial Sequence
  Description of Artificial Sequence: Synthetic oligonucleotide
  Antisense strand to SEQ ID NO: 2099320
aaucuuguuguaaagggcg

SEQ ID NO: 2099322 - RNA, 19 nt, Artificial Sequence
  Description of Artificial Sequence: Synthetic oligonucleotide
  Sense strand starting at position 1862 of SEQ ID NO: 1882157
guuccuaguccuuaacaag

SEQ ID NO: 2099323 - RNA, 19 nt, Artificial Sequence
  Description of Artificial Sequence: Synthetic oligonucleotide
  Antisense strand to SEQ ID NO: 2099322
cuuguuaaggacuaggaac

SEQ ID NO: 2099324 - RNA, 19 nt, Artificial Sequence
  Description of Artificial Sequence: Synthetic oligonucleotide
  Sense strand starting at position 2024 of SEQ ID NO: 1882157
gcuacagaaucuucugaca

SEQ ID NO: 2099325 - RNA, 19 nt, Artificial Sequence
  Description of Artificial Sequence: Synthetic oligonucleotide
  Antisense strand to SEQ ID NO: 2099324
ugucagaagauucuguagc

SEQ ID NO: 2099326 - RNA, 19 nt, Artificial Sequence
  Description of Artificial Sequence: Synthetic oligonucleotide
  Sense strand starting at position 2058 of SEQ ID NO: 1882157
gaggaagaggaguguguuu

SEQ ID NO: 2099327 - RNA, 19 nt, Artificial Sequence
  Description of Artificial Sequence: Synthetic oligonucleotide
  Antisense strand to SEQ ID NO: 2099326
aaacacacuccucuuccuc

SEQ ID NO: 2099328 - RNA, 19 nt, Artificial Sequence
  Description of Artificial Sequence: Synthetic oligonucleotide
  Sense strand starting at position 2122 of SEQ ID NO: 1882157
uaaggaguucuaugauaua

SEQ ID NO: 2099329 - RNA, 19 nt, Artificial Sequence
  Description of Artificial Sequence: Synthetic oligonucleotide
  Antisense strand to SEQ ID NO: 2099328
uauaucauagaacuccuua

SEQ ID NO: 2099330 - RNA, 19 nt, Artificial Sequence
  Description of Artificial Sequence: Synthetic oligonucleotide
  Sense strand starting at position 2153 of SEQ ID NO: 1882157
ucccaaauucugcagugau

SEQ ID NO: 2099331 - RNA, 19 nt, Artificial Sequence
  Description of Artificial Sequence: Synthetic oligonucleotide
  Antisense strand to SEQ ID NO: 2099330
aucacugcagaauuuggga

SEQ ID NO: 2099332 - RNA, 19 nt, Artificial Sequence
  Description of Artificial Sequence: Synthetic oligonucleotide
  Sense strand starting at position 2432 of SEQ ID NO: 1882157
augucagaugaccauuagu

SEQ ID NO: 2099333 - RNA, 19 nt, Artificial Sequence
  Description of Artificial Sequence: Synthetic oligonucleotide
  Antisense strand to SEQ ID NO: 2099332
acuaauggucaucugacau

SEQ ID NO: 2099334 - RNA, 19 nt, Artificial Sequence
  Description of Artificial Sequence: Synthetic oligonucleotide
  Sense strand starting at position 2488 of SEQ ID NO: 1882157
agacuugauugacugccua

SEQ ID NO: 2099335 - RNA, 19 nt, Artificial Sequence
  Description of Artificial Sequence: Synthetic oligonucleotide
  Antisense strand to SEQ ID NO: 2099334
uaggcagucaaucaagucu

SEQ ID NO: 2099336 - RNA, 19 nt, Artificial Sequence
  Description of Artificial Sequence: Synthetic oligonucleotide
  Sense strand starting at position 2852 of SEQ ID NO: 1882157
aaugaaauaguugguuaac

SEQ ID NO: 2099337 - RNA, 19 nt, Artificial Sequence
  Description of Artificial Sequence: Synthetic oligonucleotide
  Antisense strand to SEQ ID NO: 2099336
guuaaccaacuauuucauu

SEQ ID NO: 2099338 - RNA, 19 nt, Artificial Sequence
  Description of Artificial Sequence: Synthetic oligonucleotide
  Sense strand starting at position 2854 of SEQ ID NO: 1882157
ugaaauaguugguuaaccu

SEQ ID NO: 2099339 - RNA, 19 nt, Artificial Sequence
  Description of Artificial Sequence: Synthetic oligonucleotide
  Antisense strand to SEQ ID NO: 2099338
agguuaaccaacuauuuca

SEQ ID NO: 2099340 - RNA, 19 nt, Artificial Sequence
  Description of Artificial Sequence: Synthetic oligonucleotide
  Sense strand starting at position 2858 of SEQ ID NO: 1882157
auaguugguuaaccugaau

SEQ ID NO: 2099341 - RNA, 19 nt, Artificial Sequence
  Description of Artificial Sequence: Synthetic oligonucleotide
  Antisense strand to SEQ ID NO: 2099340
auucagguuaaccaacuau

SEQ ID NO: 2099342 - RNA, 19 nt, Artificial Sequence
  Description of Artificial Sequence: Synthetic oligonucleotide
  Sense strand starting at position 2998 of SEQ ID NO: 1882157
ccaggauuccucuagcaug

SEQ ID NO: 2099343 - RNA, 19 nt, Artificial Sequence
  Description of Artificial Sequence: Synthetic oligonucleotide
  Antisense strand to SEQ ID NO: 2099342
caugcuagaggaauccugg

SEQ ID NO: 2099344 - RNA, 19 nt, Artificial Sequence
  Description of Artificial Sequence: Synthetic oligonucleotide
  Sense strand starting at position 3133 of SEQ ID NO: 1882157
ugacucucaugguuaagau

SEQ ID NO: 2099345 - RNA, 19 nt, Artificial Sequence
  Description of Artificial Sequence: Synthetic oligonucleotide
  Antisense strand to SEQ ID NO: 2099344
aucuuaaccaugagaguca

SEQ ID NO: 2099346 - RNA, 19 nt, Artificial Sequence
  Description of Artificial Sequence: Synthetic oligonucleotide
  Sense strand starting at position 3270 of SEQ ID NO: 1882157
caagauaguuggucaucag

SEQ ID NO: 2099347 - RNA, 19 nt, Artificial Sequence
  Description of Artificial Sequence: Synthetic oligonucleotide
  Antisense strand to SEQ ID NO: 2099346
cugaugaccaacuaucuug

SEQ ID NO: 2099348 - RNA, 19 nt, Artificial Sequence
  Description of Artificial Sequence: Synthetic oligonucleotide
  Sense strand starting at position 3519 of SEQ ID NO: 1882157
gcacuuaaagcauaagcaa

SEQ ID NO: 2099349 - RNA, 19 nt, Artificial Sequence
  Description of Artificial Sequence: Synthetic oligonucleotide
  Antisense strand to SEQ ID NO: 2099348
uugcuuaugcuuuaagugc

SEQ ID NO: 2099350 - RNA, 19 nt, Artificial Sequence
  Description of Artificial Sequence: Synthetic oligonucleotide
  Sense strand starting at position 3595 of SEQ ID NO: 1882157
ccagaaguagaguggugaa

SEQ ID NO: 2099351 - RNA, 19 nt, Artificial Sequence
  Description of Artificial Sequence: Synthetic oligonucleotide
  Antisense strand to SEQ ID NO: 2099350
uucaccacucuacuucugg

SEQ ID NO: 2099352 - RNA, 19 nt, Artificial Sequence
  Description of Artificial Sequence: Synthetic oligonucleotide
  Sense strand starting at position 3885 of SEQ ID NO: 1882157
uuaugacagcuguacagau

SEQ ID NO: 2099353 - RNA, 19 nt, Artificial Sequence
  Description of Artificial Sequence: Synthetic oligonucleotide
  Antisense strand to SEQ ID NO: 2099352
aucuguacagcugucauaa

SEQ ID NO: 2099354 - RNA, 19 nt, Artificial Sequence
  Description of Artificial Sequence: Synthetic oligonucleotide
  Sense strand starting at position 3952 of SEQ ID NO: 1882157
ugcacacagcuuugaagaa

SEQ ID NO: 2099355 - RNA, 19 nt, Artificial Sequence
  Description of Artificial Sequence: Synthetic oligonucleotide
  Antisense strand to SEQ ID NO: 2099354
uucuucaaagcugugugca

SEQ ID NO: 2099356 - RNA, 19 nt, Artificial Sequence
  Description of Artificial Sequence: Synthetic oligonucleotide
  Sense strand starting at position 7 of SEQ ID NO: 1882159
uuggguagaagucagaguu

SEQ ID NO: 2099357 - RNA, 19 nt, Artificial Sequence
  Description of Artificial Sequence: Synthetic oligonucleotide
  Antisense strand to SEQ ID NO: 2099356
aacucugacuucuacccaa

SEQ ID NO: 2099358 - RNA, 19 nt, Artificial Sequence
  Description of Artificial Sequence: Synthetic oligonucleotide
  Sense strand starting at position 13 of SEQ ID NO: 1882159
agaagucagaguugcugau

SEQ ID NO: 2099359 - RNA, 19 nt, Artificial Sequence
  Description of Artificial Sequence: Synthetic oligonucleotide
  Antisense strand to SEQ ID NO: 2099358
aucagcaacucugacuucu

SEQ ID NO: 2099360 - RNA, 19 nt, Artificial Sequence
  Description of Artificial Sequence: Synthetic oligonucleotide
  Sense strand starting at position 17 of SEQ ID NO: 1882159
gucagaguugcugauuaac

SEQ ID NO: 2099361 - RNA, 19 nt, Artificial Sequence
  Description of Artificial Sequence: Synthetic oligonucleotide
  Antisense strand to SEQ ID NO: 2099360
guuaaucagcaacucugac

SEQ ID NO: 2099362 - RNA, 19 nt, Artificial Sequence
  Description of Artificial Sequence: Synthetic oligonucleotide
  Sense strand starting at position 19 of SEQ ID NO: 1882159
cagaguugcugauuaacau

SEQ ID NO: 2099363 - RNA, 19 nt, Artificial Sequence
  Description of Artificial Sequence: Synthetic oligonucleotide
  Antisense strand to SEQ ID NO: 2099362
auguuaaucagcaacucug

SEQ ID NO: 2099364 - RNA, 19 nt, Artificial Sequence
  Description of Artificial Sequence: Synthetic oligonucleotide
  Sense strand starting at position 20 of SEQ ID NO: 1882159
agaguugcugauuaacaua

SEQ ID NO: 2099365 - RNA, 19 nt, Artificial Sequence
  Description of Artificial Sequence: Synthetic oligonucleotide
  Antisense strand to SEQ ID NO: 2099364
uauguuaaucagcaacucu

SEQ ID NO: 2099366 - RNA, 19 nt, Artificial Sequence
  Description of Artificial Sequence: Synthetic oligonucleotide
  Sense strand starting at position 62 of SEQ ID NO: 1882159
agaauuaucuggccacaac

SEQ ID NO: 2099367 - RNA, 19 nt, Artificial Sequence
  Description of Artificial Sequence: Synthetic oligonucleotide
  Antisense strand to SEQ ID NO: 2099366
guuguggccagauaauucu

SEQ ID NO: 2099368 - RNA, 19 nt, Artificial Sequence
  Description of Artificial Sequence: Synthetic oligonucleotide
  Sense strand starting at position 83 of SEQ ID NO: 1882159
aucaauacugcugaguuua

SEQ ID NO: 2099369 - RNA, 19 nt, Artificial Sequence
  Description of Artificial Sequence: Synthetic oligonucleotide
  Antisense strand to SEQ ID NO: 2099368
uaaacucagcaguauugau

SEQ ID NO: 2099370 - RNA, 19 nt, Artificial Sequence
  Description of Artificial Sequence: Synthetic oligonucleotide
  Sense strand starting at position 85 of SEQ ID NO: 1882159
caauacugcugaguuuaag

SEQ ID NO: 2099371 - RNA, 19 nt, Artificial Sequence
  Description of Artificial Sequence: Synthetic oligonucleotide
  Antisense strand to SEQ ID NO: 2099370
cuuaaacucagcaguauug

SEQ ID NO: 2099372 - RNA, 19 nt, Artificial Sequence
  Description of Artificial Sequence: Synthetic oligonucleotide
  Sense strand starting at position 88 of SEQ ID NO: 1882159
uacugcugaguuuaagaaa

SEQ ID NO: 2099373 - RNA, 19 nt, Artificial Sequence
  Description of Artificial Sequence: Synthetic oligonucleotide
  Antisense strand to SEQ ID NO: 2099372
uuucuuaaacucagcagua

SEQ ID NO: 2099374 - RNA, 19 nt, Artificial Sequence
  Description of Artificial Sequence: Synthetic oligonucleotide
  Sense strand starting at position 365 of SEQ ID NO: 1882159
cucugaauuggccaaacuu

SEQ ID NO: 2099375 - RNA, 19 nt, Artificial Sequence
  Description of Artificial Sequence: Synthetic oligonucleotide
  Antisense strand to SEQ ID NO: 2099374
aaguuuggccaauucagag

SEQ ID NO: 2099376 - RNA, 19 nt, Artificial Sequence
  Description of Artificial Sequence: Synthetic oligonucleotide
  Sense strand starting at position 554 of SEQ ID NO: 1882159
cguggacuuccugaaagca

SEQ ID NO: 2099377 - RNA, 19 nt, Artificial Sequence
  Description of Artificial Sequence: Synthetic oligonucleotide
  Antisense strand to SEQ ID NO: 2099376
ugcuuucaggaaguccacg

SEQ ID NO: 2099378 - RNA, 19 nt, Artificial Sequence
  Description of Artificial Sequence: Synthetic oligonucleotide
  Sense strand starting at position 615 of SEQ ID NO: 1882159
ucaaacagugccugacuua

SEQ ID NO: 2099379 - RNA, 19 nt, Artificial Sequence
  Description of Artificial Sequence: Synthetic oligonucleotide
  Antisense strand to SEQ ID NO: 2099378
uaagucaggcacuguuuga

SEQ ID NO: 2099380 - RNA, 19 nt, Artificial Sequence
  Description of Artificial Sequence: Synthetic oligonucleotide
  Sense strand starting at position 632 of SEQ ID NO: 1882159
uauagaagugcucaguaaa

SEQ ID NO: 2099381 - RNA, 19 nt, Artificial Sequence
  Description of Artificial Sequence: Synthetic oligonucleotide
  Antisense strand to SEQ ID NO: 2099380
uuuacugagcacuucuaua

SEQ ID NO: 2099382 - RNA, 19 nt, Artificial Sequence
  Description of Artificial Sequence: Synthetic oligonucleotide
  Sense strand starting at position 635 of SEQ ID NO: 1882159
agaagugcucaguaaauaa

SEQ ID NO: 2099383 - RNA, 19 nt, Artificial Sequence
  Description of Artificial Sequence: Synthetic oligonucleotide
  Antisense strand to SEQ ID NO: 2099382
uuauuuacugagcacuucu

SEQ ID NO: 2099384 - RNA, 19 nt, Artificial Sequence
  Description of Artificial Sequence: Synthetic oligonucleotide
  Sense strand starting at position 674 of SEQ ID NO: 1882159
aacugugaagucugacgau

SEQ ID NO: 2099385 - RNA, 19 nt, Artificial Sequence
  Description of Artificial Sequence: Synthetic oligonucleotide
  Antisense strand to SEQ ID NO: 2099384
aucgucagacuucacaguu

SEQ ID NO: 2099386 - RNA, 19 nt, Artificial Sequence
  Description of Artificial Sequence: Synthetic oligonucleotide
  Sense strand starting at position 681 of SEQ ID NO: 1882159
aagucugacgauuaucaua

SEQ ID NO: 2099387 - RNA, 19 nt, Artificial Sequence
  Description of Artificial Sequence: Synthetic oligonucleotide
  Antisense strand to SEQ ID NO: 2099386
uaugauaaucgucagacuu

SEQ ID NO: 2099388 - RNA, 19 nt, Artificial Sequence
  Description of Artificial Sequence: Synthetic oligonucleotide
  Sense strand starting at position 683 of SEQ ID NO: 1882159
gucugacgauuaucauaua

SEQ ID NO: 2099389 - RNA, 19 nt, Artificial Sequence
  Description of Artificial Sequence: Synthetic oligonucleotide
  Antisense strand to SEQ ID NO: 2099388
uauaugauaaucgucagac

SEQ ID NO: 2099390 - RNA, 19 nt, Artificial Sequence
  Description of Artificial Sequence: Synthetic oligonucleotide
  Sense strand starting at position 749 of SEQ ID NO: 1882159
uggcaagagguauagguua

SEQ ID NO: 2099391 - RNA, 19 nt, Artificial Sequence
  Description of Artificial Sequence: Synthetic oligonucleotide
  Antisense strand to SEQ ID NO: 2099390
uaaccuauaccucuugcca

SEQ ID NO: 2099392 - RNA, 19 nt, Artificial Sequence
  Description of Artificial Sequence: Synthetic oligonucleotide
  Sense strand starting at position 751 of SEQ ID NO: 1882159
gcaagagguauagguuaac

SEQ ID NO: 2099393 - RNA, 19 nt, Artificial Sequence
  Description of Artificial Sequence: Synthetic oligonucleotide
  Antisense strand to SEQ ID NO: 2099392
guuaaccuauaccucuugc

SEQ ID NO: 2099394 - RNA, 19 nt, Artificial Sequence
  Description of Artificial Sequence: Synthetic oligonucleotide
  Sense strand starting at position 805 of SEQ ID NO: 1882159
aagccacaggucuggauaa

SEQ ID NO: 2099395 - RNA, 19 nt, Artificial Sequence
  Description of Artificial Sequence: Synthetic oligonucleotide
  Antisense strand to SEQ ID NO: 2099394
uuauccagaccuguggcuu

SEQ ID NO: 2099396 - RNA, 19 nt, Artificial Sequence
  Description of Artificial Sequence: Synthetic oligonucleotide
  Sense strand starting at position 1529 of SEQ ID NO: 1882159
acucgaaggcuccaucuaa

SEQ ID NO: 2099397 - RNA, 19 nt, Artificial Sequence
  Description of Artificial Sequence: Synthetic oligonucleotide
  Antisense strand to SEQ ID NO: 2099396
uuagauggagccuucgagu

SEQ ID NO: 2099398 - RNA, 19 nt, Artificial Sequence
  Description of Artificial Sequence: Synthetic oligonucleotide
  Sense strand starting at position 1868 of SEQ ID NO: 1882159
cucugagauuucguaggug

SEQ ID NO: 2099399 - RNA, 19 nt, Artificial Sequence
  Description of Artificial Sequence: Synthetic oligonucleotide
  Antisense strand to SEQ ID NO: 2099398
caccuacgaaaucucagag

SEQ ID NO: 2099400 - RNA, 19 nt, Artificial Sequence
  Description of Artificial Sequence: Synthetic oligonucleotide
  Sense strand starting at position 1871 of SEQ ID NO: 1882159
ugagauuucguagguguau

SEQ ID NO: 2099401 - RNA, 19 nt, Artificial Sequence
  Description of Artificial Sequence: Synthetic oligonucleotide
  Antisense strand to SEQ ID NO: 2099400
auacaccuacgaaaucuca

SEQ ID NO: 2099402 - RNA, 19 nt, Artificial Sequence
  Description of Artificial Sequence: Synthetic oligonucleotide
  Sense strand starting at position 1872 of SEQ ID NO: 1882159
gagauuucguagguguauu

SEQ ID NO: 2099403 - RNA, 19 nt, Artificial Sequence
  Description of Artificial Sequence: Synthetic oligonucleotide
  Antisense strand to SEQ ID NO: 2099402
aauacaccuacgaaaucuc

SEQ ID NO: 2099404 - RNA, 19 nt, Artificial Sequence
  Description of Artificial Sequence: Synthetic oligonucleotide
  Sense strand starting at position 1873 of SEQ ID NO: 1882159
agauuucguagguguauua

SEQ ID NO: 2099405 - RNA, 19 nt, Artificial Sequence
  Description of Artificial Sequence: Synthetic oligonucleotide
  Antisense strand to SEQ ID NO: 2099404
uaauacaccuacgaaaucu

SEQ ID NO: 2099406 - RNA, 19 nt, Artificial Sequence
  Description of Artificial Sequence: Synthetic oligonucleotide
  Sense strand starting at position 1883 of SEQ ID NO: 1882159
gguguauuacaucacaucu

SEQ ID NO: 2099407 - RNA, 19 nt, Artificial Sequence
  Description of Artificial Sequence: Synthetic oligonucleotide
  Antisense strand to SEQ ID NO: 2099406
agaugugauguaauacacc

SEQ ID NO: 2099408 - RNA, 19 nt, Artificial Sequence
  Description of Artificial Sequence: Synthetic oligonucleotide
  Sense strand starting at position 1910 of SEQ ID NO: 1882159
auuugacucuuguucguuu

SEQ ID NO: 2099409 - RNA, 19 nt, Artificial Sequence
  Description of Artificial Sequence: Synthetic oligonucleotide
  Antisense strand to SEQ ID NO: 2099408
aaacgaacaagagucaaau

SEQ ID NO: 2099410 - RNA, 19 nt, Artificial Sequence
  Description of Artificial Sequence: Synthetic oligonucleotide
  Sense strand starting at position 2321 of SEQ ID NO: 1882159
cccagucauccguauaaac

SEQ ID NO: 2099411 - RNA, 19 nt, Artificial Sequence
  Description of Artificial Sequence: Synthetic oligonucleotide
  Antisense strand to SEQ ID NO: 2099410
guuuauacggaugacuggg

SEQ ID NO: 2099412 - RNA, 19 nt, Artificial Sequence
  Description of Artificial Sequence: Synthetic oligonucleotide
  Sense strand starting at position 2412 of SEQ ID NO: 1882159
ggcuauaggccuugaggaa

SEQ ID NO: 2099413 - RNA, 19 nt, Artificial Sequence
  Description of Artificial Sequence: Synthetic oligonucleotide
  Antisense strand to SEQ ID NO: 2099412
uuccucaaggccuauagcc

SEQ ID NO: 2099414 - RNA, 19 nt, Artificial Sequence
  Description of Artificial Sequence: Synthetic oligonucleotide
  Sense strand starting at position 2413 of SEQ ID NO: 1882159
gcuauaggccuugaggaau

SEQ ID NO: 2099415 - RNA, 19 nt, Artificial Sequence
  Description of Artificial Sequence: Synthetic oligonucleotide
  Antisense strand to SEQ ID NO: 2099414
auuccucaaggccuauagc

SEQ ID NO: 2099416 - RNA, 19 nt, Artificial Sequence
  Description of Artificial Sequence: Synthetic oligonucleotide
  Sense strand starting at position 2473 of SEQ ID NO: 1882159
ccagccuucccagauaagu

SEQ ID NO: 2099417 - RNA, 19 nt, Artificial Sequence
  Description of Artificial Sequence: Synthetic oligonucleotide
  Antisense strand to SEQ ID NO: 2099416
acuuaucugggaaggcugg

SEQ ID NO: 2099418 - RNA, 19 nt, Artificial Sequence
  Description of Artificial Sequence: Synthetic oligonucleotide
  Sense strand starting at position 2521 of SEQ ID NO: 1882159
gccggaaggcaucaagaaa

SEQ ID NO: 2099419 - RNA, 19 nt, Artificial Sequence
  Description of Artificial Sequence: Synthetic oligonucleotide
  Antisense strand to SEQ ID NO: 2099418
uuucuugaugccuuccggc

SEQ ID NO: 2099420 - RNA, 19 nt, Artificial Sequence
  Description of Artificial Sequence: Synthetic oligonucleotide
  Sense strand starting at position 2770 of SEQ ID NO: 1882159
ucuagacucccugaaagcu

SEQ ID NO: 2099421 - RNA, 19 nt, Artificial Sequence
  Description of Artificial Sequence: Synthetic oligonucleotide
  Antisense strand to SEQ ID NO: 2099420
agcuuucagggagucuaga

SEQ ID NO: 2099422 - RNA, 19 nt, Artificial Sequence
  Description of Artificial Sequence: Synthetic oligonucleotide
  Sense strand starting at position 2859 of SEQ ID NO: 1882159
ucuagagcauucccaggua

SEQ ID NO: 2099423 - RNA, 19 nt, Artificial Sequence
  Description of Artificial Sequence: Synthetic oligonucleotide
  Antisense strand to SEQ ID NO: 2099422
uaccugggaaugcucuaga

SEQ ID NO: 2099424 - RNA, 19 nt, Artificial Sequence
  Description of Artificial Sequence: Synthetic oligonucleotide
  Sense strand starting at position 3152 of SEQ ID NO: 1882159
gggacuagucccuggcaaa

SEQ ID NO: 2099425 - RNA, 19 nt, Artificial Sequence
  Description of Artificial Sequence: Synthetic oligonucleotide
  Antisense strand to SEQ ID NO: 2099424
uuugccagggacuaguccc

SEQ ID NO: 2099426 - RNA, 19 nt, Artificial Sequence
  Description of Artificial Sequence: Synthetic oligonucleotide
  Sense strand starting at position 3153 of SEQ ID NO: 1882159
ggacuagucccuggcaaag

SEQ ID NO: 2099427 - RNA, 19 nt, Artificial Sequence
  Description of Artificial Sequence: Synthetic oligonucleotide
  Antisense strand to SEQ ID NO: 2099426
cuuugccagggacuagucc

SEQ ID NO: 2099428 - RNA, 19 nt, Artificial Sequence
  Description of Artificial Sequence: Synthetic oligonucleotide
  Sense strand starting at position 3176 of SEQ ID NO: 1882159
uucccuagucaaggguaaa

SEQ ID NO: 2099429 - RNA, 19 nt, Artificial Sequence
  Description of Artificial Sequence: Synthetic oligonucleotide
  Antisense strand to SEQ ID NO: 2099428
uuuacccuugacuagggaa

SEQ ID NO: 2099430 - RNA, 19 nt, Artificial Sequence
  Description of Artificial Sequence: Synthetic oligonucleotide
  Sense strand starting at position 3177 of SEQ ID NO: 1882159
ucccuagucaaggguaaag

SEQ ID NO: 2099431 - RNA, 19 nt, Artificial Sequence
  Description of Artificial Sequence: Synthetic oligonucleotide
  Antisense strand to SEQ ID NO: 2099430
cuuuacccuugacuaggga

SEQ ID NO: 2099432 - RNA, 19 nt, Artificial Sequence
  Description of Artificial Sequence: Synthetic oligonucleotide
  Sense strand starting at position 3320 of SEQ ID NO: 1882159
agcuuaaguggucauccua

SEQ ID NO: 2099433 - RNA, 19 nt, Artificial Sequence
  Description of Artificial Sequence: Synthetic oligonucleotide
  Antisense strand to SEQ ID NO: 2099432
uaggaugaccacuuaagcu

SEQ ID NO: 2099434 - RNA, 19 nt, Artificial Sequence
  Description of Artificial Sequence: Synthetic oligonucleotide
  Sense strand starting at position 3671 of SEQ ID NO: 1882159
accagugguguacaacuua

SEQ ID NO: 2099435 - RNA, 19 nt, Artificial Sequence
  Description of Artificial Sequence: Synthetic oligonucleotide
  Antisense strand to SEQ ID NO: 2099434
uaaguuguacaccacuggu

SEQ ID NO: 2099436 - RNA, 19 nt, Artificial Sequence
  Description of Artificial Sequence: Synthetic oligonucleotide
  Sense strand starting at position 201 of SEQ ID NO: 1882158
ccuuguaauggugacuuau

SEQ ID NO: 2099437 - RNA, 19 nt, Artificial Sequence
  Description of Artificial Sequence: Synthetic oligonucleotide
  Antisense strand to SEQ ID NO: 2099436
auaagucaccauuacaagg

SEQ ID NO: 2099438 - RNA, 19 nt, Artificial Sequence
  Description of Artificial Sequence: Synthetic oligonucleotide
  Sense strand starting at position 222 of SEQ ID NO: 1882158
cucuaauucuggccuagaa

SEQ ID NO: 2099439 - RNA, 19 nt, Artificial Sequence
  Description of Artificial Sequence: Synthetic oligonucleotide
  Antisense strand to SEQ ID NO: 2099438
uucuaggccagaauuagag

SEQ ID NO: 2099440 - RNA, 19 nt, Artificial Sequence
  Description of Artificial Sequence: Synthetic oligonucleotide
  Sense strand starting at position 224 of SEQ ID NO: 1882158
cuaauucuggccuagaaca

SEQ ID NO: 2099441 - RNA, 19 nt, Artificial Sequence
  Description of Artificial Sequence: Synthetic oligonucleotide
  Antisense strand to SEQ ID NO: 2099440
uguucuaggccagaauuag

SEQ ID NO: 2099442 - RNA, 19 nt, Artificial Sequence
  Description of Artificial Sequence: Synthetic oligonucleotide
  Sense strand starting at position 473 of SEQ ID NO: 1882158
uguaauuugucuuuccacu

SEQ ID NO: 2099443 - RNA, 19 nt, Artificial Sequence
  Description of Artificial Sequence: Synthetic oligonucleotide
  Antisense strand to SEQ ID NO: 2099442
aguggaaagacaaauuaca

SEQ ID NO: 2099444 - RNA, 19 nt, Artificial Sequence
  Description of Artificial Sequence: Synthetic oligonucleotide
  Sense strand starting at position 556 of SEQ ID NO: 1882158
guucucaagcuaggaagau

SEQ ID NO: 2099445 - RNA, 19 nt, Artificial Sequence
  Description of Artificial Sequence: Synthetic oligonucleotide
  Antisense strand to SEQ ID NO: 2099444
aucuuccuagcuugagaac

SEQ ID NO: 2099446 - RNA, 19 nt, Artificial Sequence
  Description of Artificial Sequence: Synthetic oligonucleotide
  Sense strand starting at position 583 of SEQ ID NO: 1882158
cagggcaaaugucuggaaa

SEQ ID NO: 2099447 - RNA, 19 nt, Artificial Sequence
  Description of Artificial Sequence: Synthetic oligonucleotide
  Antisense strand to SEQ ID NO: 2099446
uuuccagacauuugcccug

SEQ ID NO: 2099448 - RNA, 19 nt, Artificial Sequence
  Description of Artificial Sequence: Synthetic oligonucleotide
  Sense strand starting at position 584 of SEQ ID NO: 1882158
agggcaaaugucuggaaac

SEQ ID NO: 2099449 - RNA, 19 nt, Artificial Sequence
  Description of Artificial Sequence: Synthetic oligonucleotide
  Antisense strand to SEQ ID NO: 2099448
guuuccagacauuugcccu

SEQ ID NO: 2099450 - RNA, 19 nt, Artificial Sequence
  Description of Artificial Sequence: Synthetic oligonucleotide
  Sense strand starting at position 644 of SEQ ID NO: 1882158
uuggguagaagucagaguu

SEQ ID NO: 2099451 - RNA, 19 nt, Artificial Sequence
  Description of Artificial Sequence: Synthetic oligonucleotide
  Antisense strand to SEQ ID NO: 2099450
aacucugacuucuacccaa

SEQ ID NO: 2099452 - RNA, 19 nt, Artificial Sequence
  Description of Artificial Sequence: Synthetic oligonucleotide
  Sense strand starting at position 654 of SEQ ID NO: 1882158
gucagaguugcugauuaac

SEQ ID NO: 2099453 - RNA, 19 nt, Artificial Sequence
  Description of Artificial Sequence: Synthetic oligonucleotide
  Antisense strand to SEQ ID NO: 2099452
guuaaucagcaacucugac

SEQ ID NO: 2099454 - RNA, 19 nt, Artificial Sequence
  Description of Artificial Sequence: Synthetic oligonucleotide
  Sense strand starting at position 656 of SEQ ID NO: 1882158
cagaguugcugauuaacau

SEQ ID NO: 2099455 - RNA, 19 nt, Artificial Sequence
  Description of Artificial Sequence: Synthetic oligonucleotide
  Antisense strand to SEQ ID NO: 2099454
auguuaaucagcaacucug

SEQ ID NO: 2099456 - RNA, 19 nt, Artificial Sequence
  Description of Artificial Sequence: Synthetic oligonucleotide
  Sense strand starting at position 657 of SEQ ID NO: 1882158
agaguugcugauuaacaua

SEQ ID NO: 2099457 - RNA, 19 nt, Artificial Sequence
  Description of Artificial Sequence: Synthetic oligonucleotide
  Antisense strand to SEQ ID NO: 2099456
uauguuaaucagcaacucu

SEQ ID NO: 2099458 - RNA, 19 nt, Artificial Sequence
  Description of Artificial Sequence: Synthetic oligonucleotide
  Sense strand starting at position 699 of SEQ ID NO: 1882158
agaauuaucuggccacaac

SEQ ID NO: 2099459 - RNA, 19 nt, Artificial Sequence
  Description of Artificial Sequence: Synthetic oligonucleotide
  Antisense strand to SEQ ID NO: 2099458
guuguggccagauaauucu

SEQ ID NO: 2099460 - RNA, 19 nt, Artificial Sequence
  Description of Artificial Sequence: Synthetic oligonucleotide
  Sense strand starting at position 720 of SEQ ID NO: 1882158
aucaauacugcugaguuua

SEQ ID NO: 2099461 - RNA, 19 nt, Artificial Sequence
  Description of Artificial Sequence: Synthetic oligonucleotide
  Antisense strand to SEQ ID NO: 2099460
uaaacucagcaguauugau

SEQ ID NO: 2099462 - RNA, 19 nt, Artificial Sequence
  Description of Artificial Sequence: Synthetic oligonucleotide
  Sense strand starting at position 722 of SEQ ID NO: 1882158
caauacugcugaguuuaag

SEQ ID NO: 2099463 - RNA, 19 nt, Artificial Sequence
  Description of Artificial Sequence: Synthetic oligonucleotide
  Antisense strand to SEQ ID NO: 2099462
cuuaaacucagcaguauug

SEQ ID NO: 2099464 - RNA, 19 nt, Artificial Sequence
  Description of Artificial Sequence: Synthetic oligonucleotide
  Sense strand starting at position 725 of SEQ ID NO: 1882158
uacugcugaguuuaagaaa

SEQ ID NO: 2099465 - RNA, 19 nt, Artificial Sequence
  Description of Artificial Sequence: Synthetic oligonucleotide
  Antisense strand to SEQ ID NO: 2099464
uuucuuaaacucagcagua

SEQ ID NO: 2099466 - RNA, 19 nt, Artificial Sequence
  Description of Artificial Sequence: Synthetic oligonucleotide
  Sense strand starting at position 1002 of SEQ ID NO: 1882158
cucugaauuggccaaacuu

SEQ ID NO: 2099467 - RNA, 19 nt, Artificial Sequence
  Description of Artificial Sequence: Synthetic oligonucleotide
  Antisense strand to SEQ ID NO: 2099466
aaguuuggccaauucagag

SEQ ID NO: 2099468 - RNA, 19 nt, Artificial Sequence
  Description of Artificial Sequence: Synthetic oligonucleotide
  Sense strand starting at position 1191 of SEQ ID NO: 1882158
cguggacuuccugaaagca

SEQ ID NO: 2099469 - RNA, 19 nt, Artificial Sequence
  Description of Artificial Sequence: Synthetic oligonucleotide
  Antisense strand to SEQ ID NO: 2099468
ugcuuucaggaaguccacg

SEQ ID NO: 2099470 - RNA, 19 nt, Artificial Sequence
  Description of Artificial Sequence: Synthetic oligonucleotide
  Sense strand starting at position 1269 of SEQ ID NO: 1882158
uauagaagugcucaguaaa

SEQ ID NO: 2099471 - RNA, 19 nt, Artificial Sequence
  Description of Artificial Sequence: Synthetic oligonucleotide
  Antisense strand to SEQ ID NO: 2099470
uuuacugagcacuucuaua

SEQ ID NO: 2099472 - RNA, 19 nt, Artificial Sequence
  Description of Artificial Sequence: Synthetic oligonucleotide
  Sense strand starting at position 1272 of SEQ ID NO: 1882158
agaagugcucaguaaauaa

SEQ ID NO: 2099473 - RNA, 19 nt, Artificial Sequence
  Description of Artificial Sequence: Synthetic oligonucleotide
  Antisense strand to SEQ ID NO: 2099472
uuauuuacugagcacuucu

SEQ ID NO: 2099474 - RNA, 19 nt, Artificial Sequence
  Description of Artificial Sequence: Synthetic oligonucleotide
  Sense strand starting at position 1318 of SEQ ID NO: 1882158
aagucugacgauuaucaua

SEQ ID NO: 2099475 - RNA, 19 nt, Artificial Sequence
  Description of Artificial Sequence: Synthetic oligonucleotide
  Antisense strand to SEQ ID NO: 2099474
uaugauaaucgucagacuu

SEQ ID NO: 2099476 - RNA, 19 nt, Artificial Sequence
  Description of Artificial Sequence: Synthetic oligonucleotide
  Sense strand starting at position 1320 of SEQ ID NO: 1882158
gucugacgauuaucauaua

SEQ ID NO: 2099477 - RNA, 19 nt, Artificial Sequence
  Description of Artificial Sequence: Synthetic oligonucleotide
  Antisense strand to SEQ ID NO: 2099476
uauaugauaaucgucagac

SEQ ID NO: 2099478 - RNA, 19 nt, Artificial Sequence
  Description of Artificial Sequence: Synthetic oligonucleotide
  Sense strand starting at position 1386 of SEQ ID NO: 1882158
uggcaagagguauagguua

SEQ ID NO: 2099479 - RNA, 19 nt, Artificial Sequence
  Description of Artificial Sequence: Synthetic oligonucleotide
  Antisense strand to SEQ ID NO: 2099478
uaaccuauaccucuugcca

SEQ ID NO: 2099480 - RNA, 19 nt, Artificial Sequence
  Description of Artificial Sequence: Synthetic oligonucleotide
  Sense strand starting at position 1388 of SEQ ID NO: 1882158
gcaagagguauagguuaac

SEQ ID NO: 2099481 - RNA, 19 nt, Artificial Sequence
  Description of Artificial Sequence: Synthetic oligonucleotide
  Antisense strand to SEQ ID NO: 2099480
guuaaccuauaccucuugc

SEQ ID NO: 2099482 - RNA, 19 nt, Artificial Sequence
  Description of Artificial Sequence: Synthetic oligonucleotide
  Sense strand starting at position 1442 of SEQ ID NO: 1882158
aagccacaggucuggauaa

SEQ ID NO: 2099483 - RNA, 19 nt, Artificial Sequence
  Description of Artificial Sequence: Synthetic oligonucleotide
  Antisense strand to SEQ ID NO: 2099482
uuauccagaccuguggcuu

SEQ ID NO: 2099484 - RNA, 19 nt, Artificial Sequence
  Description of Artificial Sequence: Synthetic oligonucleotide
  Sense strand starting at position 2166 of SEQ ID NO: 1882158
acucgaaggcuccaucuaa

SEQ ID NO: 2099485 - RNA, 19 nt, Artificial Sequence
  Description of Artificial Sequence: Synthetic oligonucleotide
  Antisense strand to SEQ ID NO: 2099484
uuagauggagccuucgagu

SEQ ID NO: 2099486 - RNA, 19 nt, Artificial Sequence
  Description of Artificial Sequence: Synthetic oligonucleotide
  Sense strand starting at position 2505 of SEQ ID NO: 1882158
cucugagauuucguaggug

SEQ ID NO: 2099487 - RNA, 19 nt, Artificial Sequence
  Description of Artificial Sequence: Synthetic oligonucleotide
  Antisense strand to SEQ ID NO: 2099486
caccuacgaaaucucagag

SEQ ID NO: 2099488 - RNA, 19 nt, Artificial Sequence
  Description of Artificial Sequence: Synthetic oligonucleotide
  Sense strand starting at position 2508 of SEQ ID NO: 1882158
ugagauuucguagguguau

SEQ ID NO: 2099489 - RNA, 19 nt, Artificial Sequence
  Description of Artificial Sequence: Synthetic oligonucleotide
  Antisense strand to SEQ ID NO: 2099488
auacaccuacgaaaucuca

SEQ ID NO: 2099490 - RNA, 19 nt, Artificial Sequence
  Description of Artificial Sequence: Synthetic oligonucleotide
  Sense strand starting at position 2509 of SEQ ID NO: 1882158
gagauuucguagguguauu

SEQ ID NO: 2099491 - RNA, 19 nt, Artificial Sequence
  Description of Artificial Sequence: Synthetic oligonucleotide
  Antisense strand to SEQ ID NO: 2099490
aauacaccuacgaaaucuc

SEQ ID NO: 2099492 - RNA, 19 nt, Artificial Sequence
  Description of Artificial Sequence: Synthetic oligonucleotide
  Sense strand starting at position 2510 of SEQ ID NO: 1882158
agauuucguagguguauua

SEQ ID NO: 2099493 - RNA, 19 nt, Artificial Sequence
  Description of Artificial Sequence: Synthetic oligonucleotide
  Antisense strand to SEQ ID NO: 2099492
uaauacaccuacgaaaucu

SEQ ID NO: 2099494 - RNA, 19 nt, Artificial Sequence
  Description of Artificial Sequence: Synthetic oligonucleotide
  Sense strand starting at position 2520 of SEQ ID NO: 1882158
gguguauuacaucacaucu

SEQ ID NO: 2099495 - RNA, 19 nt, Artificial Sequence
  Description of Artificial Sequence: Synthetic oligonucleotide
  Antisense strand to SEQ ID NO: 2099494
agaugugauguaauacacc

SEQ ID NO: 2099496 - RNA, 19 nt, Artificial Sequence
  Description of Artificial Sequence: Synthetic oligonucleotide
  Sense strand starting at position 2547 of SEQ ID NO: 1882158
auuugacucuuguucguuu

SEQ ID NO: 2099497 - RNA, 19 nt, Artificial Sequence
  Description of Artificial Sequence: Synthetic oligonucleotide
  Antisense strand to SEQ ID NO: 2099496
aaacgaacaagagucaaau

SEQ ID NO: 2099498 - RNA, 19 nt, Artificial Sequence
  Description of Artificial Sequence: Synthetic oligonucleotide
  Sense strand starting at position 3049 of SEQ ID NO: 1882158
ggcuauaggccuugaggaa

SEQ ID NO: 2099499 - RNA, 19 nt, Artificial Sequence
  Description of Artificial Sequence: Synthetic oligonucleotide
  Antisense strand to SEQ ID NO: 2099498
uuccucaaggccuauagcc

SEQ ID NO: 2099500 - RNA, 19 nt, Artificial Sequence
  Description of Artificial Sequence: Synthetic oligonucleotide
  Sense strand starting at position 3050 of SEQ ID NO: 1882158
gcuauaggccuugaggaau

SEQ ID NO: 2099501 - RNA, 19 nt, Artificial Sequence
  Description of Artificial Sequence: Synthetic oligonucleotide
  Antisense strand to SEQ ID NO: 2099500
auuccucaaggccuauagc

SEQ ID NO: 2099502 - RNA, 19 nt, Artificial Sequence
  Description of Artificial Sequence: Synthetic oligonucleotide
  Sense strand starting at position 3110 of SEQ ID NO: 1882158
ccagccuucccagauaagu

SEQ ID NO: 2099503 - RNA, 19 nt, Artificial Sequence
  Description of Artificial Sequence: Synthetic oligonucleotide
  Antisense strand to SEQ ID NO: 2099502
acuuaucugggaaggcugg

SEQ ID NO: 2099504 - RNA, 19 nt, Artificial Sequence
  Description of Artificial Sequence: Synthetic oligonucleotide
  Sense strand starting at position 3158 of SEQ ID NO: 1882158
gccggaaggcaucaagaaa

SEQ ID NO: 2099505 - RNA, 19 nt, Artificial Sequence
  Description of Artificial Sequence: Synthetic oligonucleotide
  Antisense strand to SEQ ID NO: 2099504
uuucuugaugccuuccggc

SEQ ID NO: 2099506 - RNA, 19 nt, Artificial Sequence
  Description of Artificial Sequence: Synthetic oligonucleotide
  Sense strand starting at position 3407 of SEQ ID NO: 1882158
ucuagacucccugaaagcu

SEQ ID NO: 2099507 - RNA, 19 nt, Artificial Sequence
  Description of Artificial Sequence: Synthetic oligonucleotide
  Antisense strand to SEQ ID NO: 2099506
agcuuucagggagucuaga

SEQ ID NO: 2099508 - RNA, 19 nt, Artificial Sequence
  Description of Artificial Sequence: Synthetic oligonucleotide
  Sense strand starting at position 3789 of SEQ ID NO: 1882158
gggacuagucccuggcaaa

SEQ ID NO: 2099509 - RNA, 19 nt, Artificial Sequence
  Description of Artificial Sequence: Synthetic oligonucleotide
  Antisense strand to SEQ ID NO: 2099508
uuugccagggacuaguccc

SEQ ID NO: 2099510 - RNA, 19 nt, Artificial Sequence
  Description of Artificial Sequence: Synthetic oligonucleotide
  Sense strand starting at position 3790 of SEQ ID NO: 1882158
ggacuagucccuggcaaag

SEQ ID NO: 2099511 - RNA, 19 nt, Artificial Sequence
  Description of Artificial Sequence: Synthetic oligonucleotide
  Antisense strand to SEQ ID NO: 2099510
cuuugccagggacuagucc

SEQ ID NO: 2099512 - RNA, 19 nt, Artificial Sequence
  Description of Artificial Sequence: Synthetic oligonucleotide
  Sense strand starting at position 3813 of SEQ ID NO: 1882158
uucccuagucaaggguaaa

SEQ ID NO: 2099513 - RNA, 19 nt, Artificial Sequence
  Description of Artificial Sequence: Synthetic oligonucleotide
  Antisense strand to SEQ ID NO: 2099512
uuuacccuugacuagggaa

SEQ ID NO: 2099514 - RNA, 19 nt, Artificial Sequence
  Description of Artificial Sequence: Synthetic oligonucleotide
  Sense strand starting at position 3814 of SEQ ID NO: 1882158
ucccuagucaaggguaaag

SEQ ID NO: 2099515 - RNA, 19 nt, Artificial Sequence
  Description of Artificial Sequence: Synthetic oligonucleotide
  Antisense strand to SEQ ID NO: 2099514
cuuuacccuugacuaggga

SEQ ID NO: 2099516 - RNA, 19 nt, Artificial Sequence
  Description of Artificial Sequence: Synthetic oligonucleotide
  Sense strand starting at position 59 of SEQ ID NO: 1882160
uagacuguugagcaaagua

SEQ ID NO: 2099517 - RNA, 19 nt, Artificial Sequence
  Description of Artificial Sequence: Synthetic oligonucleotide
  Antisense strand to SEQ ID NO: 2099516
uacuuugcucaacagucua

SEQ ID NO: 2099518 - RNA, 19 nt, Artificial Sequence
  Description of Artificial Sequence: Synthetic oligonucleotide
  Sense strand starting at position 124 of SEQ ID NO: 1882160
uugaaauagauacguggau

SEQ ID NO: 2099519 - RNA, 19 nt, Artificial Sequence
  Description of Artificial Sequence: Synthetic oligonucleotide
  Antisense strand to SEQ ID NO: 2099518
auccacguaucuauuucaa

SEQ ID NO: 2099520 - RNA, 19 nt, Artificial Sequence
  Description of Artificial Sequence: Synthetic oligonucleotide
  Sense strand starting at position 125 of SEQ ID NO: 1882160
ugaaauagauacguggauu

SEQ ID NO: 2099521 - RNA, 19 nt, Artificial Sequence
  Description of Artificial Sequence: Synthetic oligonucleotide
  Antisense strand to SEQ ID NO: 2099520
aauccacguaucuauuuca

SEQ ID NO: 2099522 - RNA, 19 nt, Artificial Sequence
  Description of Artificial Sequence: Synthetic oligonucleotide
  Sense strand starting at position 156 of SEQ ID NO: 1882160
ccauuaaaccuguguaaac

SEQ ID NO: 2099523 - RNA, 19 nt, Artificial Sequence
  Description of Artificial Sequence: Synthetic oligonucleotide
  Antisense strand to SEQ ID NO: 2099522
guuuacacagguuuaaugg

SEQ ID NO: 2099524 - RNA, 19 nt, Artificial Sequence
  Description of Artificial Sequence: Synthetic oligonucleotide
  Sense strand starting at position 166 of SEQ ID NO: 1882160
uguguaaacccucacagua

SEQ ID NO: 2099525 - RNA, 19 nt, Artificial Sequence
  Description of Artificial Sequence: Synthetic oligonucleotide
  Antisense strand to SEQ ID NO: 2099524
uacugugaggguuuacaca

SEQ ID NO: 2099526 - RNA, 19 nt, Artificial Sequence
  Description of Artificial Sequence: Synthetic oligonucleotide
  Sense strand starting at position 337 of SEQ ID NO: 1882160
agcaaccugccuuaagauu

SEQ ID NO: 2099527 - RNA, 19 nt, Artificial Sequence
  Description of Artificial Sequence: Synthetic oligonucleotide
  Antisense strand to SEQ ID NO: 2099526
aaucuuaaggcagguugcu

SEQ ID NO: 2099528 - RNA, 19 nt, Artificial Sequence
  Description of Artificial Sequence: Synthetic oligonucleotide
  Sense strand starting at position 423 of SEQ ID NO: 1882160
uugaauuaaguagguacaa

SEQ ID NO: 2099529 - RNA, 19 nt, Artificial Sequence
  Description of Artificial Sequence: Synthetic oligonucleotide
  Antisense strand to SEQ ID NO: 2099528
uuguaccuacuuaauucaa

SEQ ID NO: 2099530 - RNA, 19 nt, Artificial Sequence
  Description of Artificial Sequence: Synthetic oligonucleotide
  Sense strand starting at position 625 of SEQ ID NO: 1882160
cauauaaacgauggaggua

SEQ ID NO: 2099531 - RNA, 19 nt, Artificial Sequence
  Description of Artificial Sequence: Synthetic oligonucleotide
  Antisense strand to SEQ ID NO: 2099530
uaccuccaucguuuauaug

SEQ ID NO: 2099532 - RNA, 19 nt, Artificial Sequence
  Description of Artificial Sequence: Synthetic oligonucleotide
  Sense strand starting at position 670 of SEQ ID NO: 1882160
gcaaguaguauuugguaau

SEQ ID NO: 2099533 - RNA, 19 nt, Artificial Sequence
  Description of Artificial Sequence: Synthetic oligonucleotide
  Antisense strand to SEQ ID NO: 2099532
auuaccaaauacuacuugc

SEQ ID NO: 2099534 - RNA, 19 nt, Artificial Sequence
  Description of Artificial Sequence: Synthetic oligonucleotide
  Sense strand starting at position 692 of SEQ ID NO: 1882160
uuuggugaggccgacuuaa

SEQ ID NO: 2099535 - RNA, 19 nt, Artificial Sequence
  Description of Artificial Sequence: Synthetic oligonucleotide
  Antisense strand to SEQ ID NO: 2099534
uuaagucggccucaccaaa

SEQ ID NO: 2099536 - RNA, 19 nt, Artificial Sequence
  Description of Artificial Sequence: Synthetic oligonucleotide
  Sense strand starting at position 1141 of SEQ ID NO: 1882160
cagggacuuucguuuauau

SEQ ID NO: 2099537 - RNA, 19 nt, Artificial Sequence
  Description of Artificial Sequence: Synthetic oligonucleotide
  Antisense strand to SEQ ID NO: 2099536
auauaaacgaaagucccug

SEQ ID NO: 2099538 - RNA, 19 nt, Artificial Sequence
  Description of Artificial Sequence: Synthetic oligonucleotide
  Sense strand starting at position 1273 of SEQ ID NO: 1882160
agcguaguugcgagauacu

SEQ ID NO: 2099539 - RNA, 19 nt, Artificial Sequence
  Description of Artificial Sequence: Synthetic oligonucleotide
  Antisense strand to SEQ ID NO: 2099538
aguaucucgcaacuacgcu

SEQ ID NO: 2099540 - RNA, 19 nt, Artificial Sequence
  Description of Artificial Sequence: Synthetic oligonucleotide
  Sense strand starting at position 2102 of SEQ ID NO: 1882160
ccgcucaccuauuuaagua

SEQ ID NO: 2099541 - RNA, 19 nt, Artificial Sequence
  Description of Artificial Sequence: Synthetic oligonucleotide
  Antisense strand to SEQ ID NO: 2099540
uacuuaaauaggugagcgg

SEQ ID NO: 2099542 - RNA, 19 nt, Artificial Sequence
  Description of Artificial Sequence: Synthetic oligonucleotide
  Sense strand starting at position 2148 of SEQ ID NO: 1882160
ucagcuguuaaaugggaga

SEQ ID NO: 2099543 - RNA, 19 nt, Artificial Sequence
  Description of Artificial Sequence: Synthetic oligonucleotide
  Antisense strand to SEQ ID NO: 2099542
ucucccauuuaacagcuga

SEQ ID NO: 2099544 - RNA, 19 nt, Artificial Sequence
  Description of Artificial Sequence: Synthetic oligonucleotide
  Sense strand starting at position 2175 of SEQ ID NO: 1882160
gguaaucccgcuugauuug

SEQ ID NO: 2099545 - RNA, 19 nt, Artificial Sequence
  Description of Artificial Sequence: Synthetic oligonucleotide
  Antisense strand to SEQ ID NO: 2099544
caaaucaagcgggauuacc

SEQ ID NO: 2099546 - RNA, 19 nt, Artificial Sequence
  Description of Artificial Sequence: Synthetic oligonucleotide
  Sense strand starting at position 2276 of SEQ ID NO: 1882160
caggcuucgcggaggugau

SEQ ID NO: 2099547 - RNA, 19 nt, Artificial Sequence
  Description of Artificial Sequence: Synthetic oligonucleotide
  Antisense strand to SEQ ID NO: 2099546
aucaccuccgcgaagccug

SEQ ID NO: 2099548 - RNA, 19 nt, Artificial Sequence
  Description of Artificial Sequence: Synthetic oligonucleotide
  Sense strand starting at position 2375 of SEQ ID NO: 1882160
ucaccaaaucagugucauu

SEQ ID NO: 2099549 - RNA, 19 nt, Artificial Sequence
  Description of Artificial Sequence: Synthetic oligonucleotide
  Antisense strand to SEQ ID NO: 2099548
aaugacacugauuugguga

SEQ ID NO: 2099550 - RNA, 19 nt, Artificial Sequence
  Description of Artificial Sequence: Synthetic oligonucleotide
  Sense strand starting at position 2404 of SEQ ID NO: 1882160
auuuacacuugagaaagau

SEQ ID NO: 2099551 - RNA, 19 nt, Artificial Sequence
  Description of Artificial Sequence: Synthetic oligonucleotide
  Antisense strand to SEQ ID NO: 2099550
aucuuucucaaguguaaau

SEQ ID NO: 2099552 - RNA, 19 nt, Artificial Sequence
  Description of Artificial Sequence: Synthetic oligonucleotide
  Sense strand starting at position 2573 of SEQ ID NO: 1882160
uuggaauucuggcuccauc

SEQ ID NO: 2099553 - RNA, 19 nt, Artificial Sequence
  Description of Artificial Sequence: Synthetic oligonucleotide
  Antisense strand to SEQ ID NO: 2099552
gauggagccagaauuccaa

SEQ ID NO: 2099554 - RNA, 19 nt, Artificial Sequence
  Description of Artificial Sequence: Synthetic oligonucleotide
  Sense strand starting at position 2668 of SEQ ID NO: 1882160
auguauagacauuaagcua

SEQ ID NO: 2099555 - RNA, 19 nt, Artificial Sequence
  Description of Artificial Sequence: Synthetic oligonucleotide
  Antisense strand to SEQ ID NO: 2099554
uagcuuaaugucuauacau

SEQ ID NO: 2099556 - RNA, 19 nt, Artificial Sequence
  Description of Artificial Sequence: Synthetic oligonucleotide
  Sense strand starting at position 2856 of SEQ ID NO: 1882160
aaggacugaccauguagua

SEQ ID NO: 2099557 - RNA, 19 nt, Artificial Sequence
  Description of Artificial Sequence: Synthetic oligonucleotide
  Antisense strand to SEQ ID NO: 2099556
uacuacauggucaguccuu

SEQ ID NO: 2099558 - RNA, 19 nt, Artificial Sequence
  Description of Artificial Sequence: Synthetic oligonucleotide
  Sense strand starting at position 2868 of SEQ ID NO: 1882160
uguaguaagugaucaauaa

SEQ ID NO: 2099559 - RNA, 19 nt, Artificial Sequence
  Description of Artificial Sequence: Synthetic oligonucleotide
  Antisense strand to SEQ ID NO: 2099558
uuauugaucacuuacuaca

SEQ ID NO: 2099560 - RNA, 19 nt, Artificial Sequence
  Description of Artificial Sequence: Synthetic oligonucleotide
  Sense strand starting at position 2959 of SEQ ID NO: 1882160
ggguuugaacaguaaguug

SEQ ID NO: 2099561 - RNA, 19 nt, Artificial Sequence
  Description of Artificial Sequence: Synthetic oligonucleotide
  Antisense strand to SEQ ID NO: 2099560
caacuuacuguucaaaccc

SEQ ID NO: 2099562 - RNA, 19 nt, Artificial Sequence
  Description of Artificial Sequence: Synthetic oligonucleotide
  Sense strand starting at position 2994 of SEQ ID NO: 1882160
guagaaauauacuuccaug

SEQ ID NO: 2099563 - RNA, 19 nt, Artificial Sequence
  Description of Artificial Sequence: Synthetic oligonucleotide
  Antisense strand to SEQ ID NO: 2099562
cauggaaguauauuucuac

SEQ ID NO: 2099564 - RNA, 19 nt, Artificial Sequence
  Description of Artificial Sequence: Synthetic oligonucleotide
  Sense strand starting at position 3200 of SEQ ID NO: 1882160
aaguccauggcauguuaaa

SEQ ID NO: 2099565 - RNA, 19 nt, Artificial Sequence
  Description of Artificial Sequence: Synthetic oligonucleotide
  Antisense strand to SEQ ID NO: 2099564
uuuaacaugccauggacuu

SEQ ID NO: 2099566 - RNA, 19 nt, Artificial Sequence
  Description of Artificial Sequence: Synthetic oligonucleotide
  Sense strand starting at position 3254 of SEQ ID NO: 1882160
caaguaaugcaagguuaga

SEQ ID NO: 2099567 - RNA, 19 nt, Artificial Sequence
  Description of Artificial Sequence: Synthetic oligonucleotide
  Antisense strand to SEQ ID NO: 2099566
ucuaaccuugcauuacuug

SEQ ID NO: 2099568 - RNA, 19 nt, Artificial Sequence
  Description of Artificial Sequence: Synthetic oligonucleotide
  Sense strand starting at position 3301 of SEQ ID NO: 1882160
agugaauucugaccuaguc

SEQ ID NO: 2099569 - RNA, 19 nt, Artificial Sequence
  Description of Artificial Sequence: Synthetic oligonucleotide
  Antisense strand to SEQ ID NO: 2099568
gacuaggucagaauucacu

SEQ ID NO: 2099570 - RNA, 19 nt, Artificial Sequence
  Description of Artificial Sequence: Synthetic oligonucleotide
  Sense strand starting at position 3303 of SEQ ID NO: 1882160
ugaauucugaccuagucgu

SEQ ID NO: 2099571 - RNA, 19 nt, Artificial Sequence
  Description of Artificial Sequence: Synthetic oligonucleotide
  Antisense strand to SEQ ID NO: 2099570
acgacuaggucagaauuca

SEQ ID NO: 2099572 - RNA, 19 nt, Artificial Sequence
  Description of Artificial Sequence: Synthetic oligonucleotide
  Sense strand starting at position 3412 of SEQ ID NO: 1882160
gccaucucacugugacaga

SEQ ID NO: 2099573 - RNA, 19 nt, Artificial Sequence
  Description of Artificial Sequence: Synthetic oligonucleotide
  Antisense strand to SEQ ID NO: 2099572
ucugucacagugagauggc

SEQ ID NO: 2099574 - RNA, 19 nt, Artificial Sequence
  Description of Artificial Sequence: Synthetic oligonucleotide
  Sense strand starting at position 3445 of SEQ ID NO: 1882160
uggaguuggauuggucaag

SEQ ID NO: 2099575 - RNA, 19 nt, Artificial Sequence
  Description of Artificial Sequence: Synthetic oligonucleotide
  Antisense strand to SEQ ID NO: 2099574
cuugaccaauccaacucca

SEQ ID NO: 2099576 - RNA, 19 nt, Artificial Sequence
  Description of Artificial Sequence: Synthetic oligonucleotide
  Sense strand starting at position 3446 of SEQ ID NO: 1882160
ggaguuggauuggucaaga

SEQ ID NO: 2099577 - RNA, 19 nt, Artificial Sequence
  Description of Artificial Sequence: Synthetic oligonucleotide
  Antisense strand to SEQ ID NO: 2099576
ucuugaccaauccaacucc

SEQ ID NO: 2099578 - RNA, 19 nt, Artificial Sequence
  Description of Artificial Sequence: Synthetic oligonucleotide
  Sense strand starting at position 3463 of SEQ ID NO: 1882160
gacuauggugcugauagau

SEQ ID NO: 2099579 - RNA, 19 nt, Artificial Sequence
  Description of Artificial Sequence: Synthetic oligonucleotide
  Antisense strand to SEQ ID NO: 2099578
aucuaucagcaccauaguc

SEQ ID NO: 2099580 - RNA, 19 nt, Artificial Sequence
  Description of Artificial Sequence: Synthetic oligonucleotide
  Sense strand starting at position 3608 of SEQ ID NO: 1882160
gguggacauuacucagcau

SEQ ID NO: 2099581 - RNA, 19 nt, Artificial Sequence
  Description of Artificial Sequence: Synthetic oligonucleotide
  Antisense strand to SEQ ID NO: 2099580
augcugaguaauguccacc

SEQ ID NO: 2099582 - RNA, 19 nt, Artificial Sequence
  Description of Artificial Sequence: Synthetic oligonucleotide
  Sense strand starting at position 3713 of SEQ ID NO: 1882160
cguguaaauguuagaguug

SEQ ID NO: 2099583 - RNA, 19 nt, Artificial Sequence
  Description of Artificial Sequence: Synthetic oligonucleotide
  Antisense strand to SEQ ID NO: 2099582
caacucuaacauuuacacg

SEQ ID NO: 2099584 - RNA, 19 nt, Artificial Sequence
  Description of Artificial Sequence: Synthetic oligonucleotide
  Sense strand starting at position 3719 of SEQ ID NO: 1882160
aauguuagaguuggauaau

SEQ ID NO: 2099585 - RNA, 19 nt, Artificial Sequence
  Description of Artificial Sequence: Synthetic oligonucleotide
  Antisense strand to SEQ ID NO: 2099584
auuauccaacucuaacauu

SEQ ID NO: 2099586 - RNA, 19 nt, Artificial Sequence
  Description of Artificial Sequence: Synthetic oligonucleotide
  Sense strand starting at position 3730 of SEQ ID NO: 1882160
uggauaauuuccugauaua

SEQ ID NO: 2099587 - RNA, 19 nt, Artificial Sequence
  Description of Artificial Sequence: Synthetic oligonucleotide
  Antisense strand to SEQ ID NO: 2099586
uauaucaggaaauuaucca

SEQ ID NO: 2099588 - RNA, 19 nt, Artificial Sequence
  Description of Artificial Sequence: Synthetic oligonucleotide
  Sense strand starting at position 3733 of SEQ ID NO: 1882160
auaauuuccugauauaagg

SEQ ID NO: 2099589 - RNA, 19 nt, Artificial Sequence
  Description of Artificial Sequence: Synthetic oligonucleotide
  Antisense strand to SEQ ID NO: 2099588
ccuuauaucaggaaauuau

SEQ ID NO: 2099590 - RNA, 19 nt, Artificial Sequence
  Description of Artificial Sequence: Synthetic oligonucleotide
  Sense strand starting at position 3798 of SEQ ID NO: 1882160
auggguucagaauggcauu

SEQ ID NO: 2099591 - RNA, 19 nt, Artificial Sequence
  Description of Artificial Sequence: Synthetic oligonucleotide
  Antisense strand to SEQ ID NO: 2099590
aaugccauucugaacccau

SEQ ID NO: 2099592 - RNA, 19 nt, Artificial Sequence
  Description of Artificial Sequence: Synthetic oligonucleotide
  Sense strand starting at position 3827 of SEQ ID NO: 1882160
accugacauucuccacagu

SEQ ID NO: 2099593 - RNA, 19 nt, Artificial Sequence
  Description of Artificial Sequence: Synthetic oligonucleotide
  Antisense strand to SEQ ID NO: 2099592
acuguggagaaugucaggu

SEQ ID NO: 2099594 - RNA, 19 nt, Artificial Sequence
  Description of Artificial Sequence: Synthetic oligonucleotide
  Sense strand starting at position 3828 of SEQ ID NO: 1882160
ccugacauucuccacaguu

SEQ ID NO: 2099595 - RNA, 19 nt, Artificial Sequence
  Description of Artificial Sequence: Synthetic oligonucleotide
  Antisense strand to SEQ ID NO: 2099594
aacuguggagaaugucagg

SEQ ID NO: 2099596 - RNA, 19 nt, Artificial Sequence
  Description of Artificial Sequence: Synthetic oligonucleotide
  Sense strand starting at position 345 of SEQ ID NO: 1882161
auguguuaaccauacauau

SEQ ID NO: 2099597 - RNA, 19 nt, Artificial Sequence
  Description of Artificial Sequence: Synthetic oligonucleotide
  Antisense strand to SEQ ID NO: 2099596
auauguaugguuaacacau

SEQ ID NO: 2099598 - RNA, 19 nt, Artificial Sequence
  Description of Artificial Sequence: Synthetic oligonucleotide
  Sense strand starting at position 387 of SEQ ID NO: 1882161
ggagaauauuuauggacau

SEQ ID NO: 2099599 - RNA, 19 nt, Artificial Sequence
  Description of Artificial Sequence: Synthetic oligonucleotide
  Antisense strand to SEQ ID NO: 2099598
auguccauaaauauucucc

SEQ ID NO: 2099600 - RNA, 19 nt, Artificial Sequence
  Description of Artificial Sequence: Synthetic oligonucleotide
  Sense strand starting at position 388 of SEQ ID NO: 1882161
gagaauauuuauggacaug

SEQ ID NO: 2099601 - RNA, 19 nt, Artificial Sequence
  Description of Artificial Sequence: Synthetic oligonucleotide
  Antisense strand to SEQ ID NO: 2099600
cauguccauaaauauucuc

SEQ ID NO: 2099602 - RNA, 19 nt, Artificial Sequence
  Description of Artificial Sequence: Synthetic oligonucleotide
  Sense strand starting at position 403 of SEQ ID NO: 1882161
cauggaaaguuguugacca

SEQ ID NO: 2099603 - RNA, 19 nt, Artificial Sequence
  Description of Artificial Sequence: Synthetic oligonucleotide
  Antisense strand to SEQ ID NO: 2099602
uggucaacaacuuuccaug

SEQ ID NO: 2099604 - RNA, 19 nt, Artificial Sequence
  Description of Artificial Sequence: Synthetic oligonucleotide
  Sense strand starting at position 407 of SEQ ID NO: 1882161
gaaaguuguugaccacauu

SEQ ID NO: 2099605 - RNA, 19 nt, Artificial Sequence
  Description of Artificial Sequence: Synthetic oligonucleotide
  Antisense strand to SEQ ID NO: 2099604
aauguggucaacaacuuuc

SEQ ID NO: 2099606 - RNA, 19 nt, Artificial Sequence
  Description of Artificial Sequence: Synthetic oligonucleotide
  Sense strand starting at position 410 of SEQ ID NO: 1882161
aguuguugaccacauucua

SEQ ID NO: 2099607 - RNA, 19 nt, Artificial Sequence
  Description of Artificial Sequence: Synthetic oligonucleotide
  Antisense strand to SEQ ID NO: 2099606
uagaauguggucaacaacu

SEQ ID NO: 2099608 - RNA, 19 nt, Artificial Sequence
  Description of Artificial Sequence: Synthetic oligonucleotide
  Sense strand starting at position 571 of SEQ ID NO: 1882161
ucaaucucgaguggacaau

SEQ ID NO: 2099609 - RNA, 19 nt, Artificial Sequence
  Description of Artificial Sequence: Synthetic oligonucleotide
  Antisense strand to SEQ ID NO: 2099608
auuguccacucgagauuga

SEQ ID NO: 2099610 - RNA, 19 nt, Artificial Sequence
  Description of Artificial Sequence: Synthetic oligonucleotide
  Sense strand starting at position 623 of SEQ ID NO: 1882161
cugucacagacuugggaua

SEQ ID NO: 2099611 - RNA, 19 nt, Artificial Sequence
  Description of Artificial Sequence: Synthetic oligonucleotide
  Antisense strand to SEQ ID NO: 2099610
uaucccaagucugugacag

SEQ ID NO: 2099612 - RNA, 19 nt, Artificial Sequence
  Description of Artificial Sequence: Synthetic oligonucleotide
  Sense strand starting at position 798 of SEQ ID NO: 1882161
auccuuguugccuaagauc

SEQ ID NO: 2099613 - RNA, 19 nt, Artificial Sequence
  Description of Artificial Sequence: Synthetic oligonucleotide
  Antisense strand to SEQ ID NO: 2099612
gaucuuaggcaacaaggau

SEQ ID NO: 2099614 - RNA, 19 nt, Artificial Sequence
  Description of Artificial Sequence: Synthetic oligonucleotide
  Sense strand starting at position 806 of SEQ ID NO: 1882161
ugccuaagauccuucugau

SEQ ID NO: 2099615 - RNA, 19 nt, Artificial Sequence
  Description of Artificial Sequence: Synthetic oligonucleotide
  Antisense strand to SEQ ID NO: 2099614
aucagaaggaucuuaggca

SEQ ID NO: 2099616 - RNA, 19 nt, Artificial Sequence
  Description of Artificial Sequence: Synthetic oligonucleotide
  Sense strand starting at position 812 of SEQ ID NO: 1882161
agauccuucugauuacugu

SEQ ID NO: 2099617 - RNA, 19 nt, Artificial Sequence
  Description of Artificial Sequence: Synthetic oligonucleotide
  Antisense strand to SEQ ID NO: 2099616
acaguaaucagaaggaucu

SEQ ID NO: 2099618 - RNA, 19 nt, Artificial Sequence
  Description of Artificial Sequence: Synthetic oligonucleotide
  Sense strand starting at position 939 of SEQ ID NO: 1882161
uguuuaccuggugaaauca

SEQ ID NO: 2099619 - RNA, 19 nt, Artificial Sequence
  Description of Artificial Sequence: Synthetic oligonucleotide
  Antisense strand to SEQ ID NO: 2099618
ugauuucaccagguaaaca

SEQ ID NO: 2099620 - RNA, 19 nt, Artificial Sequence
  Description of Artificial Sequence: Synthetic oligonucleotide
  Sense strand starting at position 1001 of SEQ ID NO: 1882161
ucuguaauaccacaagguu

SEQ ID NO: 2099621 - RNA, 19 nt, Artificial Sequence
  Description of Artificial Sequence: Synthetic oligonucleotide
  Antisense strand to SEQ ID NO: 2099620
aaccuugugguauuacaga

SEQ ID NO: 2099622 - RNA, 19 nt, Artificial Sequence
  Description of Artificial Sequence: Synthetic oligonucleotide
  Sense strand starting at position 1004 of SEQ ID NO: 1882161
guaauaccacaagguugau

SEQ ID NO: 2099623 - RNA, 19 nt, Artificial Sequence
  Description of Artificial Sequence: Synthetic oligonucleotide
  Antisense strand to SEQ ID NO: 2099622
aucaaccuugugguauuac

SEQ ID NO: 2099624 - RNA, 19 nt, Artificial Sequence
  Description of Artificial Sequence: Synthetic oligonucleotide
  Sense strand starting at position 1269 of SEQ ID NO: 1882161
uguguuucccgcuuacagu

SEQ ID NO: 2099625 - RNA, 19 nt, Artificial Sequence
  Description of Artificial Sequence: Synthetic oligonucleotide
  Antisense strand to SEQ ID NO: 2099624
acuguaagcgggaaacaca

SEQ ID NO: 2099626 - RNA, 19 nt, Artificial Sequence
  Description of Artificial Sequence: Synthetic oligonucleotide
  Sense strand starting at position 1320 of SEQ ID NO: 1882161
cuaagauucugauucuguc

SEQ ID NO: 2099627 - RNA, 19 nt, Artificial Sequence
  Description of Artificial Sequence: Synthetic oligonucleotide
  Antisense strand to SEQ ID NO: 2099626
gacagaaucagaaucuuag

SEQ ID NO: 2099628 - RNA, 19 nt, Artificial Sequence
  Description of Artificial Sequence: Synthetic oligonucleotide
  Sense strand starting at position 1344 of SEQ ID NO: 1882161
gucuaacuacuguagaugu

SEQ ID NO: 2099629 - RNA, 19 nt, Artificial Sequence
  Description of Artificial Sequence: Synthetic oligonucleotide
  Antisense strand to SEQ ID NO: 2099628
acaucuacaguaguuagac

SEQ ID NO: 2099630 - RNA, 19 nt, Artificial Sequence
  Description of Artificial Sequence: Synthetic oligonucleotide
  Sense strand starting at position 1445 of SEQ ID NO: 1882161
acccuaauuuaugaaugga

SEQ ID NO: 2099631 - RNA, 19 nt, Artificial Sequence
  Description of Artificial Sequence: Synthetic oligonucleotide
  Antisense strand to SEQ ID NO: 2099630
uccauucauaaauuagggu

SEQ ID NO: 2099632 - RNA, 19 nt, Artificial Sequence
  Description of Artificial Sequence: Synthetic oligonucleotide
  Sense strand starting at position 2090 of SEQ ID NO: 1882161
ccggacaccguagauaaua

SEQ ID NO: 2099633 - RNA, 19 nt, Artificial Sequence
  Description of Artificial Sequence: Synthetic oligonucleotide
  Antisense strand to SEQ ID NO: 2099632
uauuaucuacgguguccgg

SEQ ID NO: 2099634 - RNA, 19 nt, Artificial Sequence
  Description of Artificial Sequence: Synthetic oligonucleotide
  Sense strand starting at position 2111 of SEQ ID NO: 1882161
uaggucuuggucuaaacuu

SEQ ID NO: 2099635 - RNA, 19 nt, Artificial Sequence
  Description of Artificial Sequence: Synthetic oligonucleotide
  Antisense strand to SEQ ID NO: 2099634
aaguuuagaccaagaccua

SEQ ID NO: 2099636 - RNA, 19 nt, Artificial Sequence
  Description of Artificial Sequence: Synthetic oligonucleotide
  Sense strand starting at position 2121 of SEQ ID NO: 1882161
ucuaaacuuccgggaaguu

SEQ ID NO: 2099637 - RNA, 19 nt, Artificial Sequence
  Description of Artificial Sequence: Synthetic oligonucleotide
  Antisense strand to SEQ ID NO: 2099636
aacuucccggaaguuuaga

SEQ ID NO: 2099638 - RNA, 19 nt, Artificial Sequence
  Description of Artificial Sequence: Synthetic oligonucleotide
  Sense strand starting at position 2122 of SEQ ID NO: 1882161
cuaaacuuccgggaaguuu

SEQ ID NO: 2099639 - RNA, 19 nt, Artificial Sequence
  Description of Artificial Sequence: Synthetic oligonucleotide
  Antisense strand to SEQ ID NO: 2099638
aaacuucccggaaguuuag

SEQ ID NO: 2099640 - RNA, 19 nt, Artificial Sequence
  Description of Artificial Sequence: Synthetic oligonucleotide
  Sense strand starting at position 2330 of SEQ ID NO: 1882161
ccuguugauccgggacaaa

SEQ ID NO: 2099641 - RNA, 19 nt, Artificial Sequence
  Description of Artificial Sequence: Synthetic oligonucleotide
  Antisense strand to SEQ ID NO: 2099640
uuugucccggaucaacagg

SEQ ID NO: 2099642 - RNA, 19 nt, Artificial Sequence
  Description of Artificial Sequence: Synthetic oligonucleotide
  Sense strand starting at position 2341 of SEQ ID NO: 1882161
gggacaaacucuuccuuga

SEQ ID NO: 2099643 - RNA, 19 nt, Artificial Sequence
  Description of Artificial Sequence: Synthetic oligonucleotide
  Antisense strand to SEQ ID NO: 2099642
ucaaggaagaguuuguccc

SEQ ID NO: 2099644 - RNA, 19 nt, Artificial Sequence
  Description of Artificial Sequence: Synthetic oligonucleotide
  Sense strand starting at position 2506 of SEQ ID NO: 1882161
uuauguuaguaggcaauuu

SEQ ID NO: 2099645 - RNA, 19 nt, Artificial Sequence
  Description of Artificial Sequence: Synthetic oligonucleotide
  Antisense strand to SEQ ID NO: 2099644
aaauugccuacuaacauaa

SEQ ID NO: 2099646 - RNA, 19 nt, Artificial Sequence
  Description of Artificial Sequence: Synthetic oligonucleotide
  Sense strand starting at position 2620 of SEQ ID NO: 1882161
aguucuguucucuacaacu

SEQ ID NO: 2099647 - RNA, 19 nt, Artificial Sequence
  Description of Artificial Sequence: Synthetic oligonucleotide
  Antisense strand to SEQ ID NO: 2099646
aguuguagagaacagaacu

SEQ ID NO: 2099648 - RNA, 19 nt, Artificial Sequence
  Description of Artificial Sequence: Synthetic oligonucleotide
  Sense strand starting at position 2650 of SEQ ID NO: 1882161
ggguuauacuuuccaggaa

SEQ ID NO: 2099649 - RNA, 19 nt, Artificial Sequence
  Description of Artificial Sequence: Synthetic oligonucleotide
  Antisense strand to SEQ ID NO: 2099648
uuccuggaaaguauaaccc

SEQ ID NO: 2099650 - RNA, 19 nt, Artificial Sequence
  Description of Artificial Sequence: Synthetic oligonucleotide
  Sense strand starting at position 2787 of SEQ ID NO: 1882161
uuggacaaucccugauugu

SEQ ID NO: 2099651 - RNA, 19 nt, Artificial Sequence
  Description of Artificial Sequence: Synthetic oligonucleotide
  Antisense strand to SEQ ID NO: 2099650
acaaucagggauuguccaa

SEQ ID NO: 2099652 - RNA, 19 nt, Artificial Sequence
  Description of Artificial Sequence: Synthetic oligonucleotide
  Sense strand starting at position 2788 of SEQ ID NO: 1882161
uggacaaucccugauuguc

SEQ ID NO: 2099653 - RNA, 19 nt, Artificial Sequence
  Description of Artificial Sequence: Synthetic oligonucleotide
  Antisense strand to SEQ ID NO: 2099652
gacaaucagggauugucca

SEQ ID NO: 2099654 - RNA, 19 nt, Artificial Sequence
  Description of Artificial Sequence: Synthetic oligonucleotide
  Sense strand starting at position 2962 of SEQ ID NO: 1882161
cucauuuauugucagauuu

SEQ ID NO: 2099655 - RNA, 19 nt, Artificial Sequence
  Description of Artificial Sequence: Synthetic oligonucleotide
  Antisense strand to SEQ ID NO: 2099654
aaaucugacaauaaaugag

SEQ ID NO: 2099656 - RNA, 19 nt, Artificial Sequence
  Description of Artificial Sequence: Synthetic oligonucleotide
  Sense strand starting at position 3016 of SEQ ID NO: 1882161
ucccuuacuggaugaaaca

SEQ ID NO: 2099657 - RNA, 19 nt, Artificial Sequence
  Description of Artificial Sequence: Synthetic oligonucleotide
  Antisense strand to SEQ ID NO: 2099656
uguuucauccaguaaggga

SEQ ID NO: 2099658 - RNA, 19 nt, Artificial Sequence
  Description of Artificial Sequence: Synthetic oligonucleotide
  Sense strand starting at position 3274 of SEQ ID NO: 1882161
auuaauguguuccugauac

SEQ ID NO: 2099659 - RNA, 19 nt, Artificial Sequence
  Description of Artificial Sequence: Synthetic oligonucleotide
  Antisense strand to SEQ ID NO: 2099658
guaucaggaacacauuaau

SEQ ID NO: 2099660 - RNA, 19 nt, Artificial Sequence
  Description of Artificial Sequence: Synthetic oligonucleotide
  Sense strand starting at position 3354 of SEQ ID NO: 1882161
cugggauuguauccacaag

SEQ ID NO: 2099661 - RNA, 19 nt, Artificial Sequence
  Description of Artificial Sequence: Synthetic oligonucleotide
  Antisense strand to SEQ ID NO: 2099660
cuuguggauacaaucccag

SEQ ID NO: 2099662 - RNA, 19 nt, Artificial Sequence
  Description of Artificial Sequence: Synthetic oligonucleotide
  Sense strand starting at position 3456 of SEQ ID NO: 1882161
auuaauguuccucauguua

SEQ ID NO: 2099663 - RNA, 19 nt, Artificial Sequence
  Description of Artificial Sequence: Synthetic oligonucleotide
  Antisense strand to SEQ ID NO: 2099662
uaacaugaggaacauuaau

SEQ ID NO: 2099664 - RNA, 19 nt, Artificial Sequence
  Description of Artificial Sequence: Synthetic oligonucleotide
  Sense strand starting at position 3463 of SEQ ID NO: 1882161
uuccucauguuagugauuu

SEQ ID NO: 2099665 - RNA, 19 nt, Artificial Sequence
  Description of Artificial Sequence: Synthetic oligonucleotide
  Antisense strand to SEQ ID NO: 2099664
aaaucacuaacaugaggaa

SEQ ID NO: 2099666 - RNA, 19 nt, Artificial Sequence
  Description of Artificial Sequence: Synthetic oligonucleotide
  Sense strand starting at position 3532 of SEQ ID NO: 1882161
uagugucugcugguaguuu

SEQ ID NO: 2099667 - RNA, 19 nt, Artificial Sequence
  Description of Artificial Sequence: Synthetic oligonucleotide
  Antisense strand to SEQ ID NO: 2099666
aaacuaccagcagacacua

SEQ ID NO: 2099668 - RNA, 19 nt, Artificial Sequence
  Description of Artificial Sequence: Synthetic oligonucleotide
  Sense strand starting at position 3555 of SEQ ID NO: 1882161
ugguucuugguagaacuua

SEQ ID NO: 2099669 - RNA, 19 nt, Artificial Sequence
  Description of Artificial Sequence: Synthetic oligonucleotide
  Antisense strand to SEQ ID NO: 2099668
uaaguucuaccaagaacca

SEQ ID NO: 2099670 - RNA, 19 nt, Artificial Sequence
  Description of Artificial Sequence: Synthetic oligonucleotide
  Sense strand starting at position 3617 of SEQ ID NO: 1882161
gcaaguuuacuauauaugu

SEQ ID NO: 2099671 - RNA, 19 nt, Artificial Sequence
  Description of Artificial Sequence: Synthetic oligonucleotide
  Antisense strand to SEQ ID NO: 2099670
acauauauaguaaacuugc

SEQ ID NO: 2099672 - RNA, 19 nt, Artificial Sequence
  Description of Artificial Sequence: Synthetic oligonucleotide
  Sense strand starting at position 3729 of SEQ ID NO: 1882161
cugaucaguuggccuaaga

SEQ ID NO: 2099673 - RNA, 19 nt, Artificial Sequence
  Description of Artificial Sequence: Synthetic oligonucleotide
  Antisense strand to SEQ ID NO: 2099672
ucuuaggccaacugaucag

SEQ ID NO: 2099674 - RNA, 19 nt, Artificial Sequence
  Description of Artificial Sequence: Synthetic oligonucleotide
  Sense strand starting at position 3808 of SEQ ID NO: 1882161
uucuguccagagugauuga

SEQ ID NO: 2099675 - RNA, 19 nt, Artificial Sequence
  Description of Artificial Sequence: Synthetic oligonucleotide
  Antisense strand to SEQ ID NO: 2099674
ucaaucacucuggacagaa

SEQ ID NO: 2099676 - RNA, 19 nt, Artificial Sequence
  Description of Artificial Sequence: Synthetic oligonucleotide
  Sense strand starting at position 171 of SEQ ID NO: 1882162
uugucuaaucaugguucca

SEQ ID NO: 2099677 - RNA, 19 nt, Artificial Sequence
  Description of Artificial Sequence: Synthetic oligonucleotide
  Antisense strand to SEQ ID NO: 2099676
uggaaccaugauuagacaa

SEQ ID NO: 2099678 - RNA, 19 nt, Artificial Sequence
  Description of Artificial Sequence: Synthetic oligonucleotide
  Sense strand starting at position 261 of SEQ ID NO: 1882162
ucccaaaucuaaggguuua

SEQ ID NO: 2099679 - RNA, 19 nt, Artificial Sequence
  Description of Artificial Sequence: Synthetic oligonucleotide
  Antisense strand to SEQ ID NO: 2099678
uaaacccuuagauuuggga

SEQ ID NO: 2099680 - RNA, 19 nt, Artificial Sequence
  Description of Artificial Sequence: Synthetic oligonucleotide
  Sense strand starting at position 279 of SEQ ID NO: 1882162
auuuacaucuuguagggau

SEQ ID NO: 2099681 - RNA, 19 nt, Artificial Sequence
  Description of Artificial Sequence: Synthetic oligonucleotide
  Antisense strand to SEQ ID NO: 2099680
aucccuacaagauguaaau

SEQ ID NO: 2099682 - RNA, 19 nt, Artificial Sequence
  Description of Artificial Sequence: Synthetic oligonucleotide
  Sense strand starting at position 302 of SEQ ID NO: 1882162
aacgcaucuuuguuaagca

SEQ ID NO: 2099683 - RNA, 19 nt, Artificial Sequence
  Description of Artificial Sequence: Synthetic oligonucleotide
  Antisense strand to SEQ ID NO: 2099682
ugcuuaacaaagaugcguu

SEQ ID NO: 2099684 - RNA, 19 nt, Artificial Sequence
  Description of Artificial Sequence: Synthetic oligonucleotide
  Sense strand starting at position 303 of SEQ ID NO: 1882162
acgcaucuuuguuaagcau

SEQ ID NO: 2099685 - RNA, 19 nt, Artificial Sequence
  Description of Artificial Sequence: Synthetic oligonucleotide
  Antisense strand to SEQ ID NO: 2099684
augcuuaacaaagaugcgu

SEQ ID NO: 2099686 - RNA, 19 nt, Artificial Sequence
  Description of Artificial Sequence: Synthetic oligonucleotide
  Sense strand starting at position 331 of SEQ ID NO: 1882162
cagggugaguucucuggau

SEQ ID NO: 2099687 - RNA, 19 nt, Artificial Sequence
  Description of Artificial Sequence: Synthetic oligonucleotide
  Antisense strand to SEQ ID NO: 2099686
auccagagaacucacccug

SEQ ID NO: 2099688 - RNA, 19 nt, Artificial Sequence
  Description of Artificial Sequence: Synthetic oligonucleotide
  Sense strand starting at position 333 of SEQ ID NO: 1882162
gggugaguucucuggaugu

SEQ ID NO: 2099689 - RNA, 19 nt, Artificial Sequence
  Description of Artificial Sequence: Synthetic oligonucleotide
  Antisense strand to SEQ ID NO: 2099688
acauccagagaacucaccc

SEQ ID NO: 2099690 - RNA, 19 nt, Artificial Sequence
  Description of Artificial Sequence: Synthetic oligonucleotide
  Sense strand starting at position 337 of SEQ ID NO: 1882162
gaguucucuggauguaguc

SEQ ID NO: 2099691 - RNA, 19 nt, Artificial Sequence
  Description of Artificial Sequence: Synthetic oligonucleotide
  Antisense strand to SEQ ID NO: 2099690
gacuacauccagagaacuc

SEQ ID NO: 2099692 - RNA, 19 nt, Artificial Sequence
  Description of Artificial Sequence: Synthetic oligonucleotide
  Sense strand starting at position 346 of SEQ ID NO: 1882162
ggauguagucacuacauca

SEQ ID NO: 2099693 - RNA, 19 nt, Artificial Sequence
  Description of Artificial Sequence: Synthetic oligonucleotide
  Antisense strand to SEQ ID NO: 2099692
ugauguagugacuacaucc

SEQ ID NO: 2099694 - RNA, 19 nt, Artificial Sequence
  Description of Artificial Sequence: Synthetic oligonucleotide
  Sense strand starting at position 515 of SEQ ID NO: 1882162
ggagcucauuucuagagcu

SEQ ID NO: 2099695 - RNA, 19 nt, Artificial Sequence
  Description of Artificial Sequence: Synthetic oligonucleotide
  Antisense strand to SEQ ID NO: 2099694
agcucuagaaaugagcucc

SEQ ID NO: 2099696 - RNA, 19 nt, Artificial Sequence
  Description of Artificial Sequence: Synthetic oligonucleotide
  Sense strand starting at position 554 of SEQ ID NO: 1882162
agccuaggcuucuggaaag

SEQ ID NO: 2099697 - RNA, 19 nt, Artificial Sequence
  Description of Artificial Sequence: Synthetic oligonucleotide
  Antisense strand to SEQ ID NO: 2099696
cuuuccagaagccuaggcu

SEQ ID NO: 2099698 - RNA, 19 nt, Artificial Sequence
  Description of Artificial Sequence: Synthetic oligonucleotide
  Sense strand starting at position 568 of SEQ ID NO: 1882162
gaaagaagccuauaugucu

SEQ ID NO: 2099699 - RNA, 19 nt, Artificial Sequence
  Description of Artificial Sequence: Synthetic oligonucleotide
  Antisense strand to SEQ ID NO: 2099698
agacauauaggcuucuuuc

SEQ ID NO: 2099700 - RNA, 19 nt, Artificial Sequence
  Description of Artificial Sequence: Synthetic oligonucleotide
  Sense strand starting at position 575 of SEQ ID NO: 1882162
gccuauaugucuucucauu

SEQ ID NO: 2099701 - RNA, 19 nt, Artificial Sequence
  Description of Artificial Sequence: Synthetic oligonucleotide
  Antisense strand to SEQ ID NO: 2099700
aaugagaagacauauaggc

SEQ ID NO: 2099702 - RNA, 19 nt, Artificial Sequence
  Description of Artificial Sequence: Synthetic oligonucleotide
  Sense strand starting at position 635 of SEQ ID NO: 1882162
ucacuccuggucugaaaua

SEQ ID NO: 2099703 - RNA, 19 nt, Artificial Sequence
  Description of Artificial Sequence: Synthetic oligonucleotide
  Antisense strand to SEQ ID NO: 2099702
uauuucagaccaggaguga

SEQ ID NO: 2099704 - RNA, 19 nt, Artificial Sequence
  Description of Artificial Sequence: Synthetic oligonucleotide
  Sense strand starting at position 645 of SEQ ID NO: 1882162
ucugaaauagccuagcacu

SEQ ID NO: 2099705 - RNA, 19 nt, Artificial Sequence
  Description of Artificial Sequence: Synthetic oligonucleotide
  Antisense strand to SEQ ID NO: 2099704
agugcuaggcuauuucaga

SEQ ID NO: 2099706 - RNA, 19 nt, Artificial Sequence
  Description of Artificial Sequence: Synthetic oligonucleotide
  Sense strand starting at position 897 of SEQ ID NO: 1882162
uuaggucaucuguaccaau

SEQ ID NO: 2099707 - RNA, 19 nt, Artificial Sequence
  Description of Artificial Sequence: Synthetic oligonucleotide
  Antisense strand to SEQ ID NO: 2099706
auugguacagaugaccuaa

SEQ ID NO: 2099708 - RNA, 19 nt, Artificial Sequence
  Description of Artificial Sequence: Synthetic oligonucleotide
  Sense strand starting at position 915 of SEQ ID NO: 1882162
ugggcaugguuuguaaaga

SEQ ID NO: 2099709 - RNA, 19 nt, Artificial Sequence
  Description of Artificial Sequence: Synthetic oligonucleotide
  Antisense strand to SEQ ID NO: 2099708
ucuuuacaaaccaugccca

SEQ ID NO: 2099710 - RNA, 19 nt, Artificial Sequence
  Description of Artificial Sequence: Synthetic oligonucleotide
  Sense strand starting at position 916 of SEQ ID NO: 1882162
gggcaugguuuguaaagau

SEQ ID NO: 2099711 - RNA, 19 nt, Artificial Sequence
  Description of Artificial Sequence: Synthetic oligonucleotide
  Antisense strand to SEQ ID NO: 2099710
aucuuuacaaaccaugccc

SEQ ID NO: 2099712 - RNA, 19 nt, Artificial Sequence
  Description of Artificial Sequence: Synthetic oligonucleotide
  Sense strand starting at position 925 of SEQ ID NO: 1882162
uuguaaagaucaugaaauc

SEQ ID NO: 2099713 - RNA, 19 nt, Artificial Sequence
  Description of Artificial Sequence: Synthetic oligonucleotide
  Antisense strand to SEQ ID NO: 2099712
gauuucaugaucuuuacaa

SEQ ID NO: 2099714 - RNA, 19 nt, Artificial Sequence
  Description of Artificial Sequence: Synthetic oligonucleotide
  Sense strand starting at position 1041 of SEQ ID NO: 1882162
ccugguaugucugagacca

SEQ ID NO: 2099715 - RNA, 19 nt, Artificial Sequence
  Description of Artificial Sequence: Synthetic oligonucleotide
  Antisense strand to SEQ ID NO: 2099714
uggucucagacauaccagg

SEQ ID NO: 2099716 - RNA, 19 nt, Artificial Sequence
  Description of Artificial Sequence: Synthetic oligonucleotide
  Sense strand starting at position 1043 of SEQ ID NO: 1882162
ugguaugucugagaccaag

SEQ ID NO: 2099717 - RNA, 19 nt, Artificial Sequence
  Description of Artificial Sequence: Synthetic oligonucleotide
  Antisense strand to SEQ ID NO: 2099716
cuuggucucagacauacca

SEQ ID NO: 2099718 - RNA, 19 nt, Artificial Sequence
  Description of Artificial Sequence: Synthetic oligonucleotide
  Sense strand starting at position 1159 of SEQ ID NO: 1882162
gcacguuucuccugcacaa

SEQ ID NO: 2099719 - RNA, 19 nt, Artificial Sequence
  Description of Artificial Sequence: Synthetic oligonucleotide
  Antisense strand to SEQ ID NO: 2099718
uugugcaggagaaacgugc

SEQ ID NO: 2099720 - RNA, 19 nt, Artificial Sequence
  Description of Artificial Sequence: Synthetic oligonucleotide
  Sense strand starting at position 1235 of SEQ ID NO: 1882162
caggguuuccugggcuagu

SEQ ID NO: 2099721 - RNA, 19 nt, Artificial Sequence
  Description of Artificial Sequence: Synthetic oligonucleotide
  Antisense strand to SEQ ID NO: 2099720
acuagcccaggaaacccug

SEQ ID NO: 2099722 - RNA, 19 nt, Artificial Sequence
  Description of Artificial Sequence: Synthetic oligonucleotide
  Sense strand starting at position 1236 of SEQ ID NO: 1882162
aggguuuccugggcuaguu

SEQ ID NO: 2099723 - RNA, 19 nt, Artificial Sequence
  Description of Artificial Sequence: Synthetic oligonucleotide
  Antisense strand to SEQ ID NO: 2099722
aacuagcccaggaaacccu

SEQ ID NO: 2099724 - RNA, 19 nt, Artificial Sequence
  Description of Artificial Sequence: Synthetic oligonucleotide
  Sense strand starting at position 1244 of SEQ ID NO: 1882162
cugggcuaguuagaaaguu

SEQ ID NO: 2099725 - RNA, 19 nt, Artificial Sequence
  Description of Artificial Sequence: Synthetic oligonucleotide
  Antisense strand to SEQ ID NO: 2099724
aacuuucuaacuagcccag

SEQ ID NO: 2099726 - RNA, 19 nt, Artificial Sequence
  Description of Artificial Sequence: Synthetic oligonucleotide
  Sense strand starting at position 1517 of SEQ ID NO: 1882162
acaggagucucgucuauuu

SEQ ID NO: 2099727 - RNA, 19 nt, Artificial Sequence
  Description of Artificial Sequence: Synthetic oligonucleotide
  Antisense strand to SEQ ID NO: 2099726
aaauagacgagacuccugu

SEQ ID NO: 2099728 - RNA, 19 nt, Artificial Sequence
  Description of Artificial Sequence: Synthetic oligonucleotide
  Sense strand starting at position 2059 of SEQ ID NO: 1882162
gggucuguuuacuccuaua

SEQ ID NO: 2099729 - RNA, 19 nt, Artificial Sequence
  Description of Artificial Sequence: Synthetic oligonucleotide
  Antisense strand to SEQ ID NO: 2099728
uauaggaguaaacagaccc

SEQ ID NO: 2099730 - RNA, 19 nt, Artificial Sequence
  Description of Artificial Sequence: Synthetic oligonucleotide
  Sense strand starting at position 2064 of SEQ ID NO: 1882162
uguuuacuccuauaaaggu

SEQ ID NO: 2099731 - RNA, 19 nt, Artificial Sequence
  Description of Artificial Sequence: Synthetic oligonucleotide
  Antisense strand to SEQ ID NO: 2099730
accuuuauaggaguaaaca

SEQ ID NO: 2099732 - RNA, 19 nt, Artificial Sequence
  Description of Artificial Sequence: Synthetic oligonucleotide
  Sense strand starting at position 3129 of SEQ ID NO: 1882162
gucggacaagccugggaau

SEQ ID NO: 2099733 - RNA, 19 nt, Artificial Sequence
  Description of Artificial Sequence: Synthetic oligonucleotide
  Antisense strand to SEQ ID NO: 2099732
auucccaggcuuguccgac

SEQ ID NO: 2099734 - RNA, 19 nt, Artificial Sequence
  Description of Artificial Sequence: Synthetic oligonucleotide
  Sense strand starting at position 3132 of SEQ ID NO: 1882162
ggacaagccugggaaugau

SEQ ID NO: 2099735 - RNA, 19 nt, Artificial Sequence
  Description of Artificial Sequence: Synthetic oligonucleotide
  Antisense strand to SEQ ID NO: 2099734
aucauucccaggcuugucc

SEQ ID NO: 2099736 - RNA, 19 nt, Artificial Sequence
  Description of Artificial Sequence: Synthetic oligonucleotide
  Sense strand starting at position 3313 of SEQ ID NO: 1882162
agccguggugugaacugua

SEQ ID NO: 2099737 - RNA, 19 nt, Artificial Sequence
  Description of Artificial Sequence: Synthetic oligonucleotide
  Antisense strand to SEQ ID NO: 2099736
uacaguucacaccacggcu

SEQ ID NO: 2099738 - RNA, 19 nt, Artificial Sequence
  Description of Artificial Sequence: Synthetic oligonucleotide
  Sense strand starting at position 3566 of SEQ ID NO: 1882162
gcgugcagagcuuauacau

SEQ ID NO: 2099739 - RNA, 19 nt, Artificial Sequence
  Description of Artificial Sequence: Synthetic oligonucleotide
  Antisense strand to SEQ ID NO: 2099738
auguauaagcucugcacgc

SEQ ID NO: 2099740 - RNA, 19 nt, Artificial Sequence
  Description of Artificial Sequence: Synthetic oligonucleotide
  Sense strand starting at position 3723 of SEQ ID NO: 1882162
cccggagacucggaacuuu

SEQ ID NO: 2099741 - RNA, 19 nt, Artificial Sequence
  Description of Artificial Sequence: Synthetic oligonucleotide
  Antisense strand to SEQ ID NO: 2099740
aaaguuccgagucuccggg

SEQ ID NO: 2099742 - RNA, 19 nt, Artificial Sequence
  Description of Artificial Sequence: Synthetic oligonucleotide
  Sense strand starting at position 3758 of SEQ ID NO: 1882162
gcgggauuccgacaugggu

SEQ ID NO: 2099743 - RNA, 19 nt, Artificial Sequence
  Description of Artificial Sequence: Synthetic oligonucleotide
  Antisense strand to SEQ ID NO: 2099742
acccaugucggaaucccgc

SEQ ID NO: 2099744 - RNA, 19 nt, Artificial Sequence
  Description of Artificial Sequence: Synthetic oligonucleotide
  Sense strand starting at position 3789 of SEQ ID NO: 1882162
gcaacucaacccuagaagu

SEQ ID NO: 2099745 - RNA, 19 nt, Artificial Sequence
  Description of Artificial Sequence: Synthetic oligonucleotide
  Antisense strand to SEQ ID NO: 2099744
acuucuaggguugaguugc

SEQ ID NO: 2099746 - RNA, 19 nt, Artificial Sequence
  Description of Artificial Sequence: Synthetic oligonucleotide
  Sense strand starting at position 3819 of SEQ ID NO: 1882162
agcccaugacucugaaguu

SEQ ID NO: 2099747 - RNA, 19 nt, Artificial Sequence
  Description of Artificial Sequence: Synthetic oligonucleotide
  Antisense strand to SEQ ID NO: 2099746
aacuucagagucaugggcu

SEQ ID NO: 2099748 - RNA, 19 nt, Artificial Sequence
  Description of Artificial Sequence: Synthetic oligonucleotide
  Sense strand starting at position 3904 of SEQ ID NO: 1882162
gcgggaaagugccuggauu

SEQ ID NO: 2099749 - RNA, 19 nt, Artificial Sequence
  Description of Artificial Sequence: Synthetic oligonucleotide
  Antisense strand to SEQ ID NO: 2099748
aauccaggcacuuucccgc

SEQ ID NO: 2099750 - RNA, 19 nt, Artificial Sequence
  Description of Artificial Sequence: Synthetic oligonucleotide
  Sense strand starting at position 6 of SEQ ID NO: 1882163
ccaacuaguuaguuccaaa

SEQ ID NO: 2099751 - RNA, 19 nt, Artificial Sequence
  Description of Artificial Sequence: Synthetic oligonucleotide
  Antisense strand to SEQ ID NO: 2099750
uuuggaacuaacuaguugg

SEQ ID NO: 2099752 - RNA, 19 nt, Artificial Sequence
  Description of Artificial Sequence: Synthetic oligonucleotide
  Sense strand starting at position 353 of SEQ ID NO: 1882163
gagugauuacuaggcuuug

SEQ ID NO: 2099753 - RNA, 19 nt, Artificial Sequence
  Description of Artificial Sequence: Synthetic oligonucleotide
  Antisense strand to SEQ ID NO: 2099752
caaagccuaguaaucacuc

SEQ ID NO: 2099754 - RNA, 19 nt, Artificial Sequence
  Description of Artificial Sequence: Synthetic oligonucleotide
  Sense strand starting at position 486 of SEQ ID NO: 1882163
agagauagguuaucuggua

SEQ ID NO: 2099755 - RNA, 19 nt, Artificial Sequence
  Description of Artificial Sequence: Synthetic oligonucleotide
  Antisense strand to SEQ ID NO: 2099754
uaccagauaaccuaucucu

SEQ ID NO: 2099756 - RNA, 19 nt, Artificial Sequence
  Description of Artificial Sequence: Synthetic oligonucleotide
  Sense strand starting at position 487 of SEQ ID NO: 1882163
gagauagguuaucugguaa

SEQ ID NO: 2099757 - RNA, 19 nt, Artificial Sequence
  Description of Artificial Sequence: Synthetic oligonucleotide
  Antisense strand to SEQ ID NO: 2099756
uuaccagauaaccuaucuc

SEQ ID NO: 2099758 - RNA, 19 nt, Artificial Sequence
  Description of Artificial Sequence: Synthetic oligonucleotide
  Sense strand starting at position 645 of SEQ ID NO: 1882163
agcuaaauuccaggacaga

SEQ ID NO: 2099759 - RNA, 19 nt, Artificial Sequence
  Description of Artificial Sequence: Synthetic oligonucleotide
  Antisense strand to SEQ ID NO: 2099758
ucuguccuggaauuuagcu

SEQ ID NO: 2099760 - RNA, 19 nt, Artificial Sequence
  Description of Artificial Sequence: Synthetic oligonucleotide
  Sense strand starting at position 689 of SEQ ID NO: 1882163
ucuuguauacggugaagaa

SEQ ID NO: 2099761 - RNA, 19 nt, Artificial Sequence
  Description of Artificial Sequence: Synthetic oligonucleotide
  Antisense strand to SEQ ID NO: 2099760
uucuucaccguauacaaga

SEQ ID NO: 2099762 - RNA, 19 nt, Artificial Sequence
  Description of Artificial Sequence: Synthetic oligonucleotide
  Sense strand starting at position 690 of SEQ ID NO: 1882163
cuuguauacggugaagaaa

SEQ ID NO: 2099763 - RNA, 19 nt, Artificial Sequence
  Description of Artificial Sequence: Synthetic oligonucleotide
  Antisense strand to SEQ ID NO: 2099762
uuucuucaccguauacaag

SEQ ID NO: 2099764 - RNA, 19 nt, Artificial Sequence
  Description of Artificial Sequence: Synthetic oligonucleotide
  Sense strand starting at position 698 of SEQ ID NO: 1882163
cggugaagaaacugacaau

SEQ ID NO: 2099765 - RNA, 19 nt, Artificial Sequence
  Description of Artificial Sequence: Synthetic oligonucleotide
  Antisense strand to SEQ ID NO: 2099764
auugucaguuucuucaccg

SEQ ID NO: 2099766 - RNA, 19 nt, Artificial Sequence
  Description of Artificial Sequence: Synthetic oligonucleotide
  Sense strand starting at position 790 of SEQ ID NO: 1882163
cugagaaauuggcuuacug

SEQ ID NO: 2099767 - RNA, 19 nt, Artificial Sequence
  Description of Artificial Sequence: Synthetic oligonucleotide
  Antisense strand to SEQ ID NO: 2099766
caguaagccaauuucucag

SEQ ID NO: 2099768 - RNA, 19 nt, Artificial Sequence
  Description of Artificial Sequence: Synthetic oligonucleotide
  Sense strand starting at position 792 of SEQ ID NO: 1882163
gagaaauuggcuuacugca

SEQ ID NO: 2099769 - RNA, 19 nt, Artificial Sequence
  Description of Artificial Sequence: Synthetic oligonucleotide
  Antisense strand to SEQ ID NO: 2099768
ugcaguaagccaauuucuc

SEQ ID NO: 2099770 - RNA, 19 nt, Artificial Sequence
  Description of Artificial Sequence: Synthetic oligonucleotide
  Sense strand starting at position 797 of SEQ ID NO: 1882163
auuggcuuacugcaaagaa

SEQ ID NO: 2099771 - RNA, 19 nt, Artificial Sequence
  Description of Artificial Sequence: Synthetic oligonucleotide
  Antisense strand to SEQ ID NO: 2099770
uucuuugcaguaagccaau

SEQ ID NO: 2099772 - RNA, 19 nt, Artificial Sequence
  Description of Artificial Sequence: Synthetic oligonucleotide
  Sense strand starting at position 946 of SEQ ID NO: 1882163
guaccugucccacagauca

SEQ ID NO: 2099773 - RNA, 19 nt, Artificial Sequence
  Description of Artificial Sequence: Synthetic oligonucleotide
  Antisense strand to SEQ ID NO: 2099772
ugaucugugggacagguac

SEQ ID NO: 2099774 - RNA, 19 nt, Artificial Sequence
  Description of Artificial Sequence: Synthetic oligonucleotide
  Sense strand starting at position 1113 of SEQ ID NO: 1882163
ugguuacugccggaucaua

SEQ ID NO: 2099775 - RNA, 19 nt, Artificial Sequence
  Description of Artificial Sequence: Synthetic oligonucleotide
  Antisense strand to SEQ ID NO: 2099774
uaugauccggcaguaacca

SEQ ID NO: 2099776 - RNA, 19 nt, Artificial Sequence
  Description of Artificial Sequence: Synthetic oligonucleotide
  Sense strand starting at position 1282 of SEQ ID NO: 1882163
auuccuuucgaauaaaguc

SEQ ID NO: 2099777 - RNA, 19 nt, Artificial Sequence
  Description of Artificial Sequence: Synthetic oligonucleotide
  Antisense strand to SEQ ID NO: 2099776
gacuuuauucgaaaggaau

SEQ ID NO: 2099778 - RNA, 19 nt, Artificial Sequence
  Description of Artificial Sequence: Synthetic oligonucleotide
  Sense strand starting at position 1344 of SEQ ID NO: 1882163
uuaugaaauggcuaagugu

SEQ ID NO: 2099779 - RNA, 19 nt, Artificial Sequence
  Description of Artificial Sequence: Synthetic oligonucleotide
  Antisense strand to SEQ ID NO: 2099778
acacuuagccauuucauaa

SEQ ID NO: 2099780 - RNA, 19 nt, Artificial Sequence
  Description of Artificial Sequence: Synthetic oligonucleotide
  Sense strand starting at position 1347 of SEQ ID NO: 1882163
ugaaauggcuaaguguaaa

SEQ ID NO: 2099781 - RNA, 19 nt, Artificial Sequence
  Description of Artificial Sequence: Synthetic oligonucleotide
  Antisense strand to SEQ ID NO: 2099780
uuuacacuuagccauuuca

SEQ ID NO: 2099782 - RNA, 19 nt, Artificial Sequence
  Description of Artificial Sequence: Synthetic oligonucleotide
  Sense strand starting at position 1374 of SEQ ID NO: 1882163
ggacuaccguuucuuuaaa

SEQ ID NO: 2099783 - RNA, 19 nt, Artificial Sequence
  Description of Artificial Sequence: Synthetic oligonucleotide
  Antisense strand to SEQ ID NO: 2099782
uuuaaagaaacgguagucc

SEQ ID NO: 2099784 - RNA, 19 nt, Artificial Sequence
  Description of Artificial Sequence: Synthetic oligonucleotide
  Sense strand starting at position 1388 of SEQ ID NO: 1882163
uuaaaugacagguguugau

SEQ ID NO: 2099785 - RNA, 19 nt, Artificial Sequence
  Description of Artificial Sequence: Synthetic oligonucleotide
  Antisense strand to SEQ ID NO: 2099784
aucaacaccugucauuuaa

SEQ ID NO: 2099786 - RNA, 19 nt, Artificial Sequence
  Description of Artificial Sequence: Synthetic oligonucleotide
  Sense strand starting at position 1392 of SEQ ID NO: 1882163
augacagguguugaucuua

SEQ ID NO: 2099787 - RNA, 19 nt, Artificial Sequence
  Description of Artificial Sequence: Synthetic oligonucleotide
  Antisense strand to SEQ ID NO: 2099786
uaagaucaacaccugucau

SEQ ID NO: 2099788 - RNA, 19 nt, Artificial Sequence
  Description of Artificial Sequence: Synthetic oligonucleotide
  Sense strand starting at position 1600 of SEQ ID NO: 1882163
guccauacucccugacaga

SEQ ID NO: 2099789 - RNA, 19 nt, Artificial Sequence
  Description of Artificial Sequence: Synthetic oligonucleotide
  Antisense strand to SEQ ID NO: 2099788
ucugucagggaguauggac

SEQ ID NO: 2099790 - RNA, 19 nt, Artificial Sequence
  Description of Artificial Sequence: Synthetic oligonucleotide
  Sense strand starting at position 1853 of SEQ ID NO: 1882163
ggauaggucguggaccaga

SEQ ID NO: 2099791 - RNA, 19 nt, Artificial Sequence
  Description of Artificial Sequence: Synthetic oligonucleotide
  Antisense strand to SEQ ID NO: 2099790
ucugguccacgaccuaucc

SEQ ID NO: 2099792 - RNA, 19 nt, Artificial Sequence
  Description of Artificial Sequence: Synthetic oligonucleotide
  Sense strand starting at position 2592 of SEQ ID NO: 1882163
gcaauugaagccggaagaa

SEQ ID NO: 2099793 - RNA, 19 nt, Artificial Sequence
  Description of Artificial Sequence: Synthetic oligonucleotide
  Antisense strand to SEQ ID NO: 2099792
uucuuccggcuucaauugc

SEQ ID NO: 2099794 - RNA, 19 nt, Artificial Sequence
  Description of Artificial Sequence: Synthetic oligonucleotide
  Sense strand starting at position 2700 of SEQ ID NO: 1882163
auagauagaugcucuggga

SEQ ID NO: 2099795 - RNA, 19 nt, Artificial Sequence
  Description of Artificial Sequence: Synthetic oligonucleotide
  Antisense strand to SEQ ID NO: 2099794
ucccagagcaucuaucuau

SEQ ID NO: 2099796 - RNA, 19 nt, Artificial Sequence
  Description of Artificial Sequence: Synthetic oligonucleotide
  Sense strand starting at position 2899 of SEQ ID NO: 1882163
auagauaucgaucgauaga

SEQ ID NO: 2099797 - RNA, 19 nt, Artificial Sequence
  Description of Artificial Sequence: Synthetic oligonucleotide
  Antisense strand to SEQ ID NO: 2099796
ucuaucgaucgauaucuau

SEQ ID NO: 2099798 - RNA, 19 nt, Artificial Sequence
  Description of Artificial Sequence: Synthetic oligonucleotide
  Sense strand starting at position 2972 of SEQ ID NO: 1882163
uuuggauagauauguagac

SEQ ID NO: 2099799 - RNA, 19 nt, Artificial Sequence
  Description of Artificial Sequence: Synthetic oligonucleotide
  Antisense strand to SEQ ID NO: 2099798
gucuacauaucuauccaaa

SEQ ID NO: 2099800 - RNA, 19 nt, Artificial Sequence
  Description of Artificial Sequence: Synthetic oligonucleotide
  Sense strand starting at position 2976 of SEQ ID NO: 1882163
gauagauauguagacgucu

SEQ ID NO: 2099801 - RNA, 19 nt, Artificial Sequence
  Description of Artificial Sequence: Synthetic oligonucleotide
  Antisense strand to SEQ ID NO: 2099800
agacgucuacauaucuauc

SEQ ID NO: 2099802 - RNA, 19 nt, Artificial Sequence
  Description of Artificial Sequence: Synthetic oligonucleotide
  Sense strand starting at position 2982 of SEQ ID NO: 1882163
uauguagacgucuaucuau

SEQ ID NO: 2099803 - RNA, 19 nt, Artificial Sequence
  Description of Artificial Sequence: Synthetic oligonucleotide
  Antisense strand to SEQ ID NO: 2099802
auagauagacgucuacaua

SEQ ID NO: 2099804 - RNA, 19 nt, Artificial Sequence
  Description of Artificial Sequence: Synthetic oligonucleotide
  Sense strand starting at position 2985 of SEQ ID NO: 1882163
guagacgucuaucuauaaa

SEQ ID NO: 2099805 - RNA, 19 nt, Artificial Sequence
  Description of Artificial Sequence: Synthetic oligonucleotide
  Antisense strand to SEQ ID NO: 2099804
uuuauagauagacgucuac

SEQ ID NO: 2099806 - RNA, 19 nt, Artificial Sequence
  Description of Artificial Sequence: Synthetic oligonucleotide
  Sense strand starting at position 3252 of SEQ ID NO: 1882163
gcaggcuugaaauggauau

SEQ ID NO: 2099807 - RNA, 19 nt, Artificial Sequence
  Description of Artificial Sequence: Synthetic oligonucleotide
  Antisense strand to SEQ ID NO: 2099806
auauccauuucaagccugc

SEQ ID NO: 2099808 - RNA, 19 nt, Artificial Sequence
  Description of Artificial Sequence: Synthetic oligonucleotide
  Sense strand starting at position 3380 of SEQ ID NO: 1882163
uuguuaugaaguuggaauu

SEQ ID NO: 2099809 - RNA, 19 nt, Artificial Sequence
  Description of Artificial Sequence: Synthetic oligonucleotide
  Antisense strand to SEQ ID NO: 2099808
aauuccaacuucauaacaa

SEQ ID NO: 2099810 - RNA, 19 nt, Artificial Sequence
  Description of Artificial Sequence: Synthetic oligonucleotide
  Sense strand starting at position 3694 of SEQ ID NO: 1882163
agaucugggaaucguaagu

SEQ ID NO: 2099811 - RNA, 19 nt, Artificial Sequence
  Description of Artificial Sequence: Synthetic oligonucleotide
  Antisense strand to SEQ ID NO: 2099810
acuuacgauucccagaucu

SEQ ID NO: 2099812 - RNA, 19 nt, Artificial Sequence
  Description of Artificial Sequence: Synthetic oligonucleotide
  Sense strand starting at position 3699 of SEQ ID NO: 1882163
ugggaaucguaaguacuga

SEQ ID NO: 2099813 - RNA, 19 nt, Artificial Sequence
  Description of Artificial Sequence: Synthetic oligonucleotide
  Antisense strand to SEQ ID NO: 2099812
ucaguacuuacgauuccca

SEQ ID NO: 2099814 - RNA, 19 nt, Artificial Sequence
  Description of Artificial Sequence: Synthetic oligonucleotide
  Sense strand starting at position 3704 of SEQ ID NO: 1882163
aucguaaguacugacagaa

SEQ ID NO: 2099815 - RNA, 19 nt, Artificial Sequence
  Description of Artificial Sequence: Synthetic oligonucleotide
  Antisense strand to SEQ ID NO: 2099814
uucugucaguacuuacgau

SEQ ID NO: 2099816 - RNA, 19 nt, Artificial Sequence
  Description of Artificial Sequence: Synthetic oligonucleotide
  Sense strand starting at position 3742 of SEQ ID NO: 1882163
acuggagaauaguuuguga

SEQ ID NO: 2099817 - RNA, 19 nt, Artificial Sequence
  Description of Artificial Sequence: Synthetic oligonucleotide
  Antisense strand to SEQ ID NO: 2099816
ucacaaacuauucuccagu

SEQ ID NO: 2099818 - RNA, 19 nt, Artificial Sequence
  Description of Artificial Sequence: Synthetic oligonucleotide
  Sense strand starting at position 3744 of SEQ ID NO: 1882163
uggagaauaguuugugaaa

SEQ ID NO: 2099819 - RNA, 19 nt, Artificial Sequence
  Description of Artificial Sequence: Synthetic oligonucleotide
  Antisense strand to SEQ ID NO: 2099818
uuucacaaacuauucucca

SEQ ID NO: 2099820 - RNA, 19 nt, Artificial Sequence
  Description of Artificial Sequence: Synthetic oligonucleotide
  Sense strand starting at position 3745 of SEQ ID NO: 1882163
ggagaauaguuugugaaac

SEQ ID NO: 2099821 - RNA, 19 nt, Artificial Sequence
  Description of Artificial Sequence: Synthetic oligonucleotide
  Antisense strand to SEQ ID NO: 2099820
guuucacaaacuauucucc

SEQ ID NO: 2099822 - RNA, 19 nt, Artificial Sequence
  Description of Artificial Sequence: Synthetic oligonucleotide
  Sense strand starting at position 3818 of SEQ ID NO: 1882163
uagggacaagguuguaaau

SEQ ID NO: 2099823 - RNA, 19 nt, Artificial Sequence
  Description of Artificial Sequence: Synthetic oligonucleotide
  Antisense strand to SEQ ID NO: 2099822
auuuacaaccuugucccua

SEQ ID NO: 2099824 - RNA, 19 nt, Artificial Sequence
  Description of Artificial Sequence: Synthetic oligonucleotide
  Sense strand starting at position 3917 of SEQ ID NO: 1882163
gcugcuauccuugaggaag

SEQ ID NO: 2099825 - RNA, 19 nt, Artificial Sequence
  Description of Artificial Sequence: Synthetic oligonucleotide
  Antisense strand to SEQ ID NO: 2099824
cuuccucaaggauagcagc

SEQ ID NO: 2099826 - RNA, 19 nt, Artificial Sequence
  Description of Artificial Sequence: Synthetic oligonucleotide
  Sense strand starting at position 3946 of SEQ ID NO: 1882163
gaagguaaguggcuaucaa

SEQ ID NO: 2099827 - RNA, 19 nt, Artificial Sequence
  Description of Artificial Sequence: Synthetic oligonucleotide
  Antisense strand to SEQ ID NO: 2099826
uugauagccacuuaccuuc

SEQ ID NO: 2099828 - RNA, 19 nt, Artificial Sequence
  Description of Artificial Sequence: Synthetic oligonucleotide
  Sense strand starting at position 3975 of SEQ ID NO: 1882163
acaacacauucugugaagu

SEQ ID NO: 2099829 - RNA, 19 nt, Artificial Sequence
  Description of Artificial Sequence: Synthetic oligonucleotide
  Antisense strand to SEQ ID NO: 2099828
acuucacagaauguguugu

SEQ ID NO: 2099830 - RNA, 19 nt, Artificial Sequence
  Description of Artificial Sequence: Synthetic oligonucleotide
  Sense strand starting at position 35 of SEQ ID NO: 1882164
acagguugauagccacuua

SEQ ID NO: 2099831 - RNA, 19 nt, Artificial Sequence
  Description of Artificial Sequence: Synthetic oligonucleotide
  Antisense strand to SEQ ID NO: 2099830
uaaguggcuaucaaccugu

SEQ ID NO: 2099832 - RNA, 19 nt, Artificial Sequence
  Description of Artificial Sequence: Synthetic oligonucleotide
  Sense strand starting at position 158 of SEQ ID NO: 1882164
uggcuugucuauuuacaac

SEQ ID NO: 2099833 - RNA, 19 nt, Artificial Sequence
  Description of Artificial Sequence: Synthetic oligonucleotide
  Antisense strand to SEQ ID NO: 2099832
guuguaaauagacaagcca

SEQ ID NO: 2099834 - RNA, 19 nt, Artificial Sequence
  Description of Artificial Sequence: Synthetic oligonucleotide
  Sense strand starting at position 294 of SEQ ID NO: 1882164
uuacgauucccagaucuuc

SEQ ID NO: 2099835 - RNA, 19 nt, Artificial Sequence
  Description of Artificial Sequence: Synthetic oligonucleotide
  Antisense strand to SEQ ID NO: 2099834
gaagaucugggaaucguaa

SEQ ID NO: 2099836 - RNA, 19 nt, Artificial Sequence
  Description of Artificial Sequence: Synthetic oligonucleotide
  Sense strand starting at position 514 of SEQ ID NO: 1882164
cuuugauaagcagggugaa

SEQ ID NO: 2099837 - RNA, 19 nt, Artificial Sequence
  Description of Artificial Sequence: Synthetic oligonucleotide
  Antisense strand to SEQ ID NO: 2099836
uucacccugcuuaucaaag

SEQ ID NO: 2099838 - RNA, 19 nt, Artificial Sequence
  Description of Artificial Sequence: Synthetic oligonucleotide
  Sense strand starting at position 515 of SEQ ID NO: 1882164
uuugauaagcagggugaaa

SEQ ID NO: 2099839 - RNA, 19 nt, Artificial Sequence
  Description of Artificial Sequence: Synthetic oligonucleotide
  Antisense strand to SEQ ID NO: 2099838
uuucacccugcuuaucaaa

SEQ ID NO: 2099840 - RNA, 19 nt, Artificial Sequence
  Description of Artificial Sequence: Synthetic oligonucleotide
  Sense strand starting at position 517 of SEQ ID NO: 1882164
ugauaagcagggugaaauu

SEQ ID NO: 2099841 - RNA, 19 nt, Artificial Sequence
  Description of Artificial Sequence: Synthetic oligonucleotide
  Antisense strand to SEQ ID NO: 2099840
aauuucacccugcuuauca

SEQ ID NO: 2099842 - RNA, 19 nt, Artificial Sequence
  Description of Artificial Sequence: Synthetic oligonucleotide
  Sense strand starting at position 1005 of SEQ ID NO: 1882164
uagauagacgucuacauau

SEQ ID NO: 2099843 - RNA, 19 nt, Artificial Sequence
  Description of Artificial Sequence: Synthetic oligonucleotide
  Antisense strand to SEQ ID NO: 2099842
auauguagacgucuaucua

SEQ ID NO: 2099844 - RNA, 19 nt, Artificial Sequence
  Description of Artificial Sequence: Synthetic oligonucleotide
  Sense strand starting at position 1007 of SEQ ID NO: 1882164
gauagacgucuacauaucu

SEQ ID NO: 2099845 - RNA, 19 nt, Artificial Sequence
  Description of Artificial Sequence: Synthetic oligonucleotide
  Antisense strand to SEQ ID NO: 2099844
agauauguagacgucuauc

SEQ ID NO: 2099846 - RNA, 19 nt, Artificial Sequence
  Description of Artificial Sequence: Synthetic oligonucleotide
  Sense strand starting at position 1087 of SEQ ID NO: 1882164
ucuaucgaucgauaucuau

SEQ ID NO: 2099847 - RNA, 19 nt, Artificial Sequence
  Description of Artificial Sequence: Synthetic oligonucleotide
  Antisense strand to SEQ ID NO: 2099846
auagauaucgaucgauaga

SEQ ID NO: 2099848 - RNA, 19 nt, Artificial Sequence
  Description of Artificial Sequence: Synthetic oligonucleotide
  Sense strand starting at position 1301 of SEQ ID NO: 1882164
cuauauagauagguaucua

SEQ ID NO: 2099849 - RNA, 19 nt, Artificial Sequence
  Description of Artificial Sequence: Synthetic oligonucleotide
  Antisense strand to SEQ ID NO: 2099848
uagauaccuaucuauauag

SEQ ID NO: 2099850 - RNA, 19 nt, Artificial Sequence
  Description of Artificial Sequence: Synthetic oligonucleotide
  Sense strand starting at position 1305 of SEQ ID NO: 1882164
auagauagguaucuauaug

SEQ ID NO: 2099851 - RNA, 19 nt, Artificial Sequence
  Description of Artificial Sequence: Synthetic oligonucleotide
  Antisense strand to SEQ ID NO: 2099850
cauauagauaccuaucuau

SEQ ID NO: 2099852 - RNA, 19 nt, Artificial Sequence
  Description of Artificial Sequence: Synthetic oligonucleotide
  Sense strand starting at position 1331 of SEQ ID NO: 1882164
uccauauuggaacguauua

SEQ ID NO: 2099853 - RNA, 19 nt, Artificial Sequence
  Description of Artificial Sequence: Synthetic oligonucleotide
  Antisense strand to SEQ ID NO: 2099852
uaauacguuccaauaugga

SEQ ID NO: 2099854 - RNA, 19 nt, Artificial Sequence
  Description of Artificial Sequence: Synthetic oligonucleotide
  Sense strand starting at position 1342 of SEQ ID NO: 1882164
acguauuaaagaggcagaa

SEQ ID NO: 2099855 - RNA, 19 nt, Artificial Sequence
  Description of Artificial Sequence: Synthetic oligonucleotide
  Antisense strand to SEQ ID NO: 2099854
uucugccucuuuaauacgu

SEQ ID NO: 2099856 - RNA, 19 nt, Artificial Sequence
  Description of Artificial Sequence: Synthetic oligonucleotide
  Sense strand starting at position 1411 of SEQ ID NO: 1882164
gccaccugugaauagugaa

SEQ ID NO: 2099857 - RNA, 19 nt, Artificial Sequence
  Description of Artificial Sequence: Synthetic oligonucleotide
  Antisense strand to SEQ ID NO: 2099856
uucacuauucacagguggc

SEQ ID NO: 2099858 - RNA, 19 nt, Artificial Sequence
  Description of Artificial Sequence: Synthetic oligonucleotide
  Sense strand starting at position 1511 of SEQ ID NO: 1882164
gacggacaggucuguggaa

SEQ ID NO: 2099859 - RNA, 19 nt, Artificial Sequence
  Description of Artificial Sequence: Synthetic oligonucleotide
  Antisense strand to SEQ ID NO: 2099858
uuccacagaccuguccguc

SEQ ID NO: 2099860 - RNA, 19 nt, Artificial Sequence
  Description of Artificial Sequence: Synthetic oligonucleotide
  Sense strand starting at position 1512 of SEQ ID NO: 1882164
acggacaggucuguggaaa

SEQ ID NO: 2099861 - RNA, 19 nt, Artificial Sequence
  Description of Artificial Sequence: Synthetic oligonucleotide
  Antisense strand to SEQ ID NO: 2099860
uuuccacagaccuguccgu

SEQ ID NO: 2099862 - RNA, 19 nt, Artificial Sequence
  Description of Artificial Sequence: Synthetic oligonucleotide
  Sense strand starting at position 1513 of SEQ ID NO: 1882164
cggacaggucuguggaaau

SEQ ID NO: 2099863 - RNA, 19 nt, Artificial Sequence
  Description of Artificial Sequence: Synthetic oligonucleotide
  Antisense strand to SEQ ID NO: 2099862
auuuccacagaccuguccg

SEQ ID NO: 2099864 - RNA, 19 nt, Artificial Sequence
  Description of Artificial Sequence: Synthetic oligonucleotide
  Sense strand starting at position 1576 of SEQ ID NO: 1882164
acaagagggcgucaguuaa

SEQ ID NO: 2099865 - RNA, 19 nt, Artificial Sequence
  Description of Artificial Sequence: Synthetic oligonucleotide
  Antisense strand to SEQ ID NO: 2099864
uuaacugacgcccucuugu

SEQ ID NO: 2099866 - RNA, 19 nt, Artificial Sequence
  Description of Artificial Sequence: Synthetic oligonucleotide
  Sense strand starting at position 1586 of SEQ ID NO: 1882164
gucaguuaagcugagacaa

SEQ ID NO: 2099867 - RNA, 19 nt, Artificial Sequence
  Description of Artificial Sequence: Synthetic oligonucleotide
  Antisense strand to SEQ ID NO: 2099866
uugucucagcuuaacugac

SEQ ID NO: 2099868 - RNA, 19 nt, Artificial Sequence
  Description of Artificial Sequence: Synthetic oligonucleotide
  Sense strand starting at position 2094 of SEQ ID NO: 1882164
agguaagagguuugggacu

SEQ ID NO: 2099869 - RNA, 19 nt, Artificial Sequence
  Description of Artificial Sequence: Synthetic oligonucleotide
  Antisense strand to SEQ ID NO: 2099868
agucccaaaccucuuaccu

SEQ ID NO: 2099870 - RNA, 19 nt, Artificial Sequence
  Description of Artificial Sequence: Synthetic oligonucleotide
  Sense strand starting at position 2262 of SEQ ID NO: 1882164
aguugagacguugggauga

SEQ ID NO: 2099871 - RNA, 19 nt, Artificial Sequence
  Description of Artificial Sequence: Synthetic oligonucleotide
  Antisense strand to SEQ ID NO: 2099870
ucaucccaacgucucaacu

SEQ ID NO: 2099872 - RNA, 19 nt, Artificial Sequence
  Description of Artificial Sequence: Synthetic oligonucleotide
  Sense strand starting at position 2380 of SEQ ID NO: 1882164
ggcguaucugucagggagu

SEQ ID NO: 2099873 - RNA, 19 nt, Artificial Sequence
  Description of Artificial Sequence: Synthetic oligonucleotide
  Antisense strand to SEQ ID NO: 2099872
acucccugacagauacgcc

SEQ ID NO: 2099874 - RNA, 19 nt, Artificial Sequence
  Description of Artificial Sequence: Synthetic oligonucleotide
  Sense strand starting at position 2383 of SEQ ID NO: 1882164
guaucugucagggaguaug

SEQ ID NO: 2099875 - RNA, 19 nt, Artificial Sequence
  Description of Artificial Sequence: Synthetic oligonucleotide
  Antisense strand to SEQ ID NO: 2099874
cauacucccugacagauac

SEQ ID NO: 2099876 - RNA, 19 nt, Artificial Sequence
  Description of Artificial Sequence: Synthetic oligonucleotide
  Sense strand starting at position 2582 of SEQ ID NO: 1882164
ggucuccuuguauaagauc

SEQ ID NO: 2099877 - RNA, 19 nt, Artificial Sequence
  Description of Artificial Sequence: Synthetic oligonucleotide
  Antisense strand to SEQ ID NO: 2099876
gaucuuauacaaggagacc

SEQ ID NO: 2099878 - RNA, 19 nt, Artificial Sequence
  Description of Artificial Sequence: Synthetic oligonucleotide
  Sense strand starting at position 2700 of SEQ ID NO: 1882164
gacagacuuuauucgaaag

SEQ ID NO: 2099879 - RNA, 19 nt, Artificial Sequence
  Description of Artificial Sequence: Synthetic oligonucleotide
  Antisense strand to SEQ ID NO: 2099878
cuuucgaauaaagucuguc

SEQ ID NO: 2099880 - RNA, 19 nt, Artificial Sequence
  Description of Artificial Sequence: Synthetic oligonucleotide
  Sense strand starting at position 2777 of SEQ ID NO: 1882164
guaagauuugcaugcaccu

SEQ ID NO: 2099881 - RNA, 19 nt, Artificial Sequence
  Description of Artificial Sequence: Synthetic oligonucleotide
  Antisense strand to SEQ ID NO: 2099880
aggugcaugcaaaucuuac

SEQ ID NO: 2099882 - RNA, 19 nt, Artificial Sequence
  Description of Artificial Sequence: Synthetic oligonucleotide
  Sense strand starting at position 2794 of SEQ ID NO: 1882164
cuuaaagguuaggcagaaa

SEQ ID NO: 2099883 - RNA, 19 nt, Artificial Sequence
  Description of Artificial Sequence: Synthetic oligonucleotide
  Antisense strand to SEQ ID NO: 2099882
uuucugccuaaccuuuaag

SEQ ID NO: 2099884 - RNA, 19 nt, Artificial Sequence
  Description of Artificial Sequence: Synthetic oligonucleotide
  Sense strand starting at position 2935 of SEQ ID NO: 1882164
uuaggagagguuuguauau

SEQ ID NO: 2099885 - RNA, 19 nt, Artificial Sequence
  Description of Artificial Sequence: Synthetic oligonucleotide
  Antisense strand to SEQ ID NO: 2099884
auauacaaaccucuccuaa

SEQ ID NO: 2099886 - RNA, 19 nt, Artificial Sequence
  Description of Artificial Sequence: Synthetic oligonucleotide
  Sense strand starting at position 2954 of SEQ ID NO: 1882164
guuguuucagacugaggga

SEQ ID NO: 2099887 - RNA, 19 nt, Artificial Sequence
  Description of Artificial Sequence: Synthetic oligonucleotide
  Antisense strand to SEQ ID NO: 2099886
ucccucagucugaaacaac

SEQ ID NO: 2099888 - RNA, 19 nt, Artificial Sequence
  Description of Artificial Sequence: Synthetic oligonucleotide
  Sense strand starting at position 3035 of SEQ ID NO: 1882164
ccgauugaucugugggaca

SEQ ID NO: 2099889 - RNA, 19 nt, Artificial Sequence
  Description of Artificial Sequence: Synthetic oligonucleotide
  Antisense strand to SEQ ID NO: 2099888
ugucccacagaucaaucgg

SEQ ID NO: 2099890 - RNA, 19 nt, Artificial Sequence
  Description of Artificial Sequence: Synthetic oligonucleotide
  Sense strand starting at position 3146 of SEQ ID NO: 1882164
uggaucaacccuuagucuu

SEQ ID NO: 2099891 - RNA, 19 nt, Artificial Sequence
  Description of Artificial Sequence: Synthetic oligonucleotide
  Antisense strand to SEQ ID NO: 2099890
aagacuaaggguugaucca

SEQ ID NO: 2099892 - RNA, 19 nt, Artificial Sequence
  Description of Artificial Sequence: Synthetic oligonucleotide
  Sense strand starting at position 3180 of SEQ ID NO: 1882164
gaaagaugauucuuugcag

SEQ ID NO: 2099893 - RNA, 19 nt, Artificial Sequence
  Description of Artificial Sequence: Synthetic oligonucleotide
  Antisense strand to SEQ ID NO: 2099892
cugcaaagaaucaucuuuc

SEQ ID NO: 2099894 - RNA, 19 nt, Artificial Sequence
  Description of Artificial Sequence: Synthetic oligonucleotide
  Sense strand starting at position 3181 of SEQ ID NO: 1882164
aaagaugauucuuugcagu

SEQ ID NO: 2099895 - RNA, 19 nt, Artificial Sequence
  Description of Artificial Sequence: Synthetic oligonucleotide
  Antisense strand to SEQ ID NO: 2099894
acugcaaagaaucaucuuu

SEQ ID NO: 2099896 - RNA, 19 nt, Artificial Sequence
  Description of Artificial Sequence: Synthetic oligonucleotide
  Sense strand starting at position 3183 of SEQ ID NO: 1882164
agaugauucuuugcaguaa

SEQ ID NO: 2099897 - RNA, 19 nt, Artificial Sequence
  Description of Artificial Sequence: Synthetic oligonucleotide
  Antisense strand to SEQ ID NO: 2099896
uuacugcaaagaaucaucu

SEQ ID NO: 2099898 - RNA, 19 nt, Artificial Sequence
  Description of Artificial Sequence: Synthetic oligonucleotide
  Sense strand starting at position 3337 of SEQ ID NO: 1882164
ggcuucuguccuggaauuu

SEQ ID NO: 2099899 - RNA, 19 nt, Artificial Sequence
  Description of Artificial Sequence: Synthetic oligonucleotide
  Antisense strand to SEQ ID NO: 2099898
aaauuccaggacagaagcc

SEQ ID NO: 2099900 - RNA, 19 nt, Artificial Sequence
  Description of Artificial Sequence: Synthetic oligonucleotide
  Sense strand starting at position 3438 of SEQ ID NO: 1882164
uuuagaaacuuagcugaau

SEQ ID NO: 2099901 - RNA, 19 nt, Artificial Sequence
  Description of Artificial Sequence: Synthetic oligonucleotide
  Antisense strand to SEQ ID NO: 2099900
auucagcuaaguuucuaaa

SEQ ID NO: 2099902 - RNA, 19 nt, Artificial Sequence
  Description of Artificial Sequence: Synthetic oligonucleotide
  Sense strand starting at position 3685 of SEQ ID NO: 1882164
gggucuagaaauugacagu

SEQ ID NO: 2099903 - RNA, 19 nt, Artificial Sequence
  Description of Artificial Sequence: Synthetic oligonucleotide
  Antisense strand to SEQ ID NO: 2099902
acugucaauuucuagaccc

SEQ ID NO: 2099904 - RNA, 19 nt, Artificial Sequence
  Description of Artificial Sequence: Synthetic oligonucleotide
  Sense strand starting at position 3726 of SEQ ID NO: 1882164
uuuggcagucuggacuaaa

SEQ ID NO: 2099905 - RNA, 19 nt, Artificial Sequence
  Description of Artificial Sequence: Synthetic oligonucleotide
  Antisense strand to SEQ ID NO: 2099904
uuuaguccagacugccaaa

SEQ ID NO: 2099906 - RNA, 19 nt, Artificial Sequence
  Description of Artificial Sequence: Synthetic oligonucleotide
  Sense strand starting at position 3927 of SEQ ID NO: 1882164
gaugguuaauguuuggaac

SEQ ID NO: 2099907 - RNA, 19 nt, Artificial Sequence
  Description of Artificial Sequence: Synthetic oligonucleotide
  Antisense strand to SEQ ID NO: 2099906
guuccaaacauuaaccauc

SEQ ID NO: 2099908 - RNA, 19 nt, Artificial Sequence
  Description of Artificial Sequence: Synthetic oligonucleotide
  Sense strand starting at position 3928 of SEQ ID NO: 1882164
augguuaauguuuggaacu

SEQ ID NO: 2099909 - RNA, 19 nt, Artificial Sequence
  Description of Artificial Sequence: Synthetic oligonucleotide
  Antisense strand to SEQ ID NO: 2099908
aguuccaaacauuaaccau

SEQ ID NO: 2099910 - RNA, 19 nt, Artificial Sequence
  Description of Artificial Sequence: Synthetic oligonucleotide
  Sense strand starting at position 169 of SEQ ID NO: 1882165
acagguugauagccacuua

SEQ ID NO: 2099911 - RNA, 19 nt, Artificial Sequence
  Description of Artificial Sequence: Synthetic oligonucleotide
  Antisense strand to SEQ ID NO: 2099910
uaaguggcuaucaaccugu

SEQ ID NO: 2099912 - RNA, 19 nt, Artificial Sequence
  Description of Artificial Sequence: Synthetic oligonucleotide
  Sense strand starting at position 292 of SEQ ID NO: 1882165
uggcuugucuauuuacaac

SEQ ID NO: 2099913 - RNA, 19 nt, Artificial Sequence
  Description of Artificial Sequence: Synthetic oligonucleotide
  Antisense strand to SEQ ID NO: 2099912
guuguaaauagacaagcca

SEQ ID NO: 2099914 - RNA, 19 nt, Artificial Sequence
  Description of Artificial Sequence: Synthetic oligonucleotide
  Sense strand starting at position 428 of SEQ ID NO: 1882165
uuacgauucccagaucuuc

SEQ ID NO: 2099915 - RNA, 19 nt, Artificial Sequence
  Description of Artificial Sequence: Synthetic oligonucleotide
  Antisense strand to SEQ ID NO: 2099914
gaagaucugggaaucguaa

SEQ ID NO: 2099916 - RNA, 19 nt, Artificial Sequence
  Description of Artificial Sequence: Synthetic oligonucleotide
  Sense strand starting at position 648 of SEQ ID NO: 1882165
cuuugauaagcagggugaa

SEQ ID NO: 2099917 - RNA, 19 nt, Artificial Sequence
  Description of Artificial Sequence: Synthetic oligonucleotide
  Antisense strand to SEQ ID NO: 2099916
uucacccugcuuaucaaag

SEQ ID NO: 2099918 - RNA, 19 nt, Artificial Sequence
  Description of Artificial Sequence: Synthetic oligonucleotide
  Sense strand starting at position 649 of SEQ ID NO: 1882165
uuugauaagcagggugaaa

SEQ ID NO: 2099919 - RNA, 19 nt, Artificial Sequence
  Description of Artificial Sequence: Synthetic oligonucleotide
  Antisense strand to SEQ ID NO: 2099918
uuucacccugcuuaucaaa

SEQ ID NO: 2099920 - RNA, 19 nt, Artificial Sequence
  Description of Artificial Sequence: Synthetic oligonucleotide
  Sense strand starting at position 651 of SEQ ID NO: 1882165
ugauaagcagggugaaauu

SEQ ID NO: 2099921 - RNA, 19 nt, Artificial Sequence
  Description of Artificial Sequence: Synthetic oligonucleotide
  Antisense strand to SEQ ID NO: 2099920
aauuucacccugcuuauca

SEQ ID NO: 2099922 - RNA, 19 nt, Artificial Sequence
  Description of Artificial Sequence: Synthetic oligonucleotide
  Sense strand starting at position 855 of SEQ ID NO: 1882165
gaaagugcucuguauaucc

SEQ ID NO: 2099923 - RNA, 19 nt, Artificial Sequence
  Description of Artificial Sequence: Synthetic oligonucleotide
  Antisense strand to SEQ ID NO: 2099922
ggauauacagagcacuuuc

SEQ ID NO: 2099924 - RNA, 19 nt, Artificial Sequence
  Description of Artificial Sequence: Synthetic oligonucleotide
  Sense strand starting at position 1139 of SEQ ID NO: 1882165
uagauagacgucuacauau

SEQ ID NO: 2099925 - RNA, 19 nt, Artificial Sequence
  Description of Artificial Sequence: Synthetic oligonucleotide
  Antisense strand to SEQ ID NO: 2099924
auauguagacgucuaucua

SEQ ID NO: 2099926 - RNA, 19 nt, Artificial Sequence
  Description of Artificial Sequence: Synthetic oligonucleotide
  Sense strand starting at position 1141 of SEQ ID NO: 1882165
gauagacgucuacauaucu

SEQ ID NO: 2099927 - RNA, 19 nt, Artificial Sequence
  Description of Artificial Sequence: Synthetic oligonucleotide
  Antisense strand to SEQ ID NO: 2099926
agauauguagacgucuauc

SEQ ID NO: 2099928 - RNA, 19 nt, Artificial Sequence
  Description of Artificial Sequence: Synthetic oligonucleotide
  Sense strand starting at position 1221 of SEQ ID NO: 1882165
ucuaucgaucgauaucuau

SEQ ID NO: 2099929 - RNA, 19 nt, Artificial Sequence
  Description of Artificial Sequence: Synthetic oligonucleotide
  Antisense strand to SEQ ID NO: 2099928
auagauaucgaucgauaga

SEQ ID NO: 2099930 - RNA, 19 nt, Artificial Sequence
  Description of Artificial Sequence: Synthetic oligonucleotide
  Sense strand starting at position 1435 of SEQ ID NO: 1882165
cuauauagauagguaucua

SEQ ID NO: 2099931 - RNA, 19 nt, Artificial Sequence
  Description of Artificial Sequence: Synthetic oligonucleotide
  Antisense strand to SEQ ID NO: 2099930
uagauaccuaucuauauag

SEQ ID NO: 2099932 - RNA, 19 nt, Artificial Sequence
  Description of Artificial Sequence: Synthetic oligonucleotide
  Sense strand starting at position 1439 of SEQ ID NO: 1882165
auagauagguaucuauaug

SEQ ID NO: 2099933 - RNA, 19 nt, Artificial Sequence
  Description of Artificial Sequence: Synthetic oligonucleotide
  Antisense strand to SEQ ID NO: 2099932
cauauagauaccuaucuau

SEQ ID NO: 2099934 - RNA, 19 nt, Artificial Sequence
  Description of Artificial Sequence: Synthetic oligonucleotide
  Sense strand starting at position 1465 of SEQ ID NO: 1882165
uccauauuggaacguauua

SEQ ID NO: 2099935 - RNA, 19 nt, Artificial Sequence
  Description of Artificial Sequence: Synthetic oligonucleotide
  Antisense strand to SEQ ID NO: 2099934
uaauacguuccaauaugga

SEQ ID NO: 2099936 - RNA, 19 nt, Artificial Sequence
  Description of Artificial Sequence: Synthetic oligonucleotide
  Sense strand starting at position 1476 of SEQ ID NO: 1882165
acguauuaaagaggcagaa

SEQ ID NO: 2099937 - RNA, 19 nt, Artificial Sequence
  Description of Artificial Sequence: Synthetic oligonucleotide
  Antisense strand to SEQ ID NO: 2099936
uucugccucuuuaauacgu

SEQ ID NO: 2099938 - RNA, 19 nt, Artificial Sequence
  Description of Artificial Sequence: Synthetic oligonucleotide
  Sense strand starting at position 1545 of SEQ ID NO: 1882165
gccaccugugaauagugaa

SEQ ID NO: 2099939 - RNA, 19 nt, Artificial Sequence
  Description of Artificial Sequence: Synthetic oligonucleotide
  Antisense strand to SEQ ID NO: 2099938
uucacuauucacagguggc

SEQ ID NO: 2099940 - RNA, 19 nt, Artificial Sequence
  Description of Artificial Sequence: Synthetic oligonucleotide
  Sense strand starting at position 1645 of SEQ ID NO: 1882165
gacggacaggucuguggaa

SEQ ID NO: 2099941 - RNA, 19 nt, Artificial Sequence
  Description of Artificial Sequence: Synthetic oligonucleotide
  Antisense strand to SEQ ID NO: 2099940
uuccacagaccuguccguc

SEQ ID NO: 2099942 - RNA, 19 nt, Artificial Sequence
  Description of Artificial Sequence: Synthetic oligonucleotide
  Sense strand starting at position 1646 of SEQ ID NO: 1882165
acggacaggucuguggaaa

SEQ ID NO: 2099943 - RNA, 19 nt, Artificial Sequence
  Description of Artificial Sequence: Synthetic oligonucleotide
  Antisense strand to SEQ ID NO: 2099942
uuuccacagaccuguccgu

SEQ ID NO: 2099944 - RNA, 19 nt, Artificial Sequence
  Description of Artificial Sequence: Synthetic oligonucleotide
  Sense strand starting at position 1647 of SEQ ID NO: 1882165
cggacaggucuguggaaau

SEQ ID NO: 2099945 - RNA, 19 nt, Artificial Sequence
  Description of Artificial Sequence: Synthetic oligonucleotide
  Antisense strand to SEQ ID NO: 2099944
auuuccacagaccuguccg

SEQ ID NO: 2099946 - RNA, 19 nt, Artificial Sequence
  Description of Artificial Sequence: Synthetic oligonucleotide
  Sense strand starting at position 1710 of SEQ ID NO: 1882165
acaagagggcgucaguuaa

SEQ ID NO: 2099947 - RNA, 19 nt, Artificial Sequence
  Description of Artificial Sequence: Synthetic oligonucleotide
  Antisense strand to SEQ ID NO: 2099946
uuaacugacgcccucuugu

SEQ ID NO: 2099948 - RNA, 19 nt, Artificial Sequence
  Description of Artificial Sequence: Synthetic oligonucleotide
  Sense strand starting at position 1720 of SEQ ID NO: 1882165
gucaguuaagcugagacaa

SEQ ID NO: 2099949 - RNA, 19 nt, Artificial Sequence
  Description of Artificial Sequence: Synthetic oligonucleotide
  Antisense strand to SEQ ID NO: 2099948
uugucucagcuuaacugac

SEQ ID NO: 2099950 - RNA, 19 nt, Artificial Sequence
  Description of Artificial Sequence: Synthetic oligonucleotide
  Sense strand starting at position 2228 of SEQ ID NO: 1882165
agguaagagguuugggacu

SEQ ID NO: 2099951 - RNA, 19 nt, Artificial Sequence
  Description of Artificial Sequence: Synthetic oligonucleotide
  Antisense strand to SEQ ID NO: 2099950
agucccaaaccucuuaccu

SEQ ID NO: 2099952 - RNA, 19 nt, Artificial Sequence
  Description of Artificial Sequence: Synthetic oligonucleotide
  Sense strand starting at position 2396 of SEQ ID NO: 1882165
aguugagacguugggauga

SEQ ID NO: 2099953 - RNA, 19 nt, Artificial Sequence
  Description of Artificial Sequence: Synthetic oligonucleotide
  Antisense strand to SEQ ID NO: 2099952
ucaucccaacgucucaacu

SEQ ID NO: 2099954 - RNA, 19 nt, Artificial Sequence
  Description of Artificial Sequence: Synthetic oligonucleotide
  Sense strand starting at position 2514 of SEQ ID NO: 1882165
ggcguaucugucagggagu

SEQ ID NO: 2099955 - RNA, 19 nt, Artificial Sequence
  Description of Artificial Sequence: Synthetic oligonucleotide
  Antisense strand to SEQ ID NO: 2099954
acucccugacagauacgcc

SEQ ID NO: 2099956 - RNA, 19 nt, Artificial Sequence
  Description of Artificial Sequence: Synthetic oligonucleotide
  Sense strand starting at position 2517 of SEQ ID NO: 1882165
guaucugucagggaguaug

SEQ ID NO: 2099957 - RNA, 19 nt, Artificial Sequence
  Description of Artificial Sequence: Synthetic oligonucleotide
  Antisense strand to SEQ ID NO: 2099956
cauacucccugacagauac

SEQ ID NO: 2099958 - RNA, 19 nt, Artificial Sequence
  Description of Artificial Sequence: Synthetic oligonucleotide
  Sense strand starting at position 2716 of SEQ ID NO: 1882165
ggucuccuuguauaagauc

SEQ ID NO: 2099959 - RNA, 19 nt, Artificial Sequence
  Description of Artificial Sequence: Synthetic oligonucleotide
  Antisense strand to SEQ ID NO: 2099958
gaucuuauacaaggagacc

SEQ ID NO: 2099960 - RNA, 19 nt, Artificial Sequence
  Description of Artificial Sequence: Synthetic oligonucleotide
  Sense strand starting at position 2834 of SEQ ID NO: 1882165
gacagacuuuauucgaaag

SEQ ID NO: 2099961 - RNA, 19 nt, Artificial Sequence
  Description of Artificial Sequence: Synthetic oligonucleotide
  Antisense strand to SEQ ID NO: 2099960
cuuucgaauaaagucuguc

SEQ ID NO: 2099962 - RNA, 19 nt, Artificial Sequence
  Description of Artificial Sequence: Synthetic oligonucleotide
  Sense strand starting at position 2911 of SEQ ID NO: 1882165
guaagauuugcaugcaccu

SEQ ID NO: 2099963 - RNA, 19 nt, Artificial Sequence
  Description of Artificial Sequence: Synthetic oligonucleotide
  Antisense strand to SEQ ID NO: 2099962
aggugcaugcaaaucuuac

SEQ ID NO: 2099964 - RNA, 19 nt, Artificial Sequence
  Description of Artificial Sequence: Synthetic oligonucleotide
  Sense strand starting at position 2928 of SEQ ID NO: 1882165
cuuaaagguuaggcagaaa

SEQ ID NO: 2099965 - RNA, 19 nt, Artificial Sequence
  Description of Artificial Sequence: Synthetic oligonucleotide
  Antisense strand to SEQ ID NO: 2099964
uuucugccuaaccuuuaag

SEQ ID NO: 2099966 - RNA, 19 nt, Artificial Sequence
  Description of Artificial Sequence: Synthetic oligonucleotide
  Sense strand starting at position 3069 of SEQ ID NO: 1882165
uuaggagagguuuguauau

SEQ ID NO: 2099967 - RNA, 19 nt, Artificial Sequence
  Description of Artificial Sequence: Synthetic oligonucleotide
  Antisense strand to SEQ ID NO: 2099966
auauacaaaccucuccuaa

SEQ ID NO: 2099968 - RNA, 19 nt, Artificial Sequence
  Description of Artificial Sequence: Synthetic oligonucleotide
  Sense strand starting at position 3088 of SEQ ID NO: 1882165
guuguuucagacugaggga

SEQ ID NO: 2099969 - RNA, 19 nt, Artificial Sequence
  Description of Artificial Sequence: Synthetic oligonucleotide
  Antisense strand to SEQ ID NO: 2099968
ucccucagucugaaacaac

SEQ ID NO: 2099970 - RNA, 19 nt, Artificial Sequence
  Description of Artificial Sequence: Synthetic oligonucleotide
  Sense strand starting at position 3169 of SEQ ID NO: 1882165
ccgauugaucugugggaca

SEQ ID NO: 2099971 - RNA, 19 nt, Artificial Sequence
  Description of Artificial Sequence: Synthetic oligonucleotide
  Antisense strand to SEQ ID NO: 2099970
ugucccacagaucaaucgg

SEQ ID NO: 2099972 - RNA, 19 nt, Artificial Sequence
  Description of Artificial Sequence: Synthetic oligonucleotide
  Sense strand starting at position 3280 of SEQ ID NO: 1882165
uggaucaacccuuagucuu

SEQ ID NO: 2099973 - RNA, 19 nt, Artificial Sequence
  Description of Artificial Sequence: Synthetic oligonucleotide
  Antisense strand to SEQ ID NO: 2099972
aagacuaaggguugaucca

SEQ ID NO: 2099974 - RNA, 19 nt, Artificial Sequence
  Description of Artificial Sequence: Synthetic oligonucleotide
  Sense strand starting at position 3314 of SEQ ID NO: 1882165
gaaagaugauucuuugcag

SEQ ID NO: 2099975 - RNA, 19 nt, Artificial Sequence
  Description of Artificial Sequence: Synthetic oligonucleotide
  Antisense strand to SEQ ID NO: 2099974
cugcaaagaaucaucuuuc

SEQ ID NO: 2099976 - RNA, 19 nt, Artificial Sequence
  Description of Artificial Sequence: Synthetic oligonucleotide
  Sense strand starting at position 3315 of SEQ ID NO: 1882165
aaagaugauucuuugcagu

SEQ ID NO: 2099977 - RNA, 19 nt, Artificial Sequence
  Description of Artificial Sequence: Synthetic oligonucleotide
  Antisense strand to SEQ ID NO: 2099976
acugcaaagaaucaucuuu

SEQ ID NO: 2099978 - RNA, 19 nt, Artificial Sequence
  Description of Artificial Sequence: Synthetic oligonucleotide
  Sense strand starting at position 3317 of SEQ ID NO: 1882165
agaugauucuuugcaguaa

SEQ ID NO: 2099979 - RNA, 19 nt, Artificial Sequence
  Description of Artificial Sequence: Synthetic oligonucleotide
  Antisense strand to SEQ ID NO: 2099978
uuacugcaaagaaucaucu

SEQ ID NO: 2099980 - RNA, 19 nt, Artificial Sequence
  Description of Artificial Sequence: Synthetic oligonucleotide
  Sense strand starting at position 3471 of SEQ ID NO: 1882165
ggcuucuguccuggaauuu

SEQ ID NO: 2099981 - RNA, 19 nt, Artificial Sequence
  Description of Artificial Sequence: Synthetic oligonucleotide
  Antisense strand to SEQ ID NO: 2099980
aaauuccaggacagaagcc

SEQ ID NO: 2099982 - RNA, 19 nt, Artificial Sequence
  Description of Artificial Sequence: Synthetic oligonucleotide
  Sense strand starting at position 3516 of SEQ ID NO: 1882165
ggccaaauauugccaacau

SEQ ID NO: 2099983 - RNA, 19 nt, Artificial Sequence
  Description of Artificial Sequence: Synthetic oligonucleotide
  Antisense strand to SEQ ID NO: 2099982
auguuggcaauauuuggcc

SEQ ID NO: 2099984 - RNA, 19 nt, Artificial Sequence
  Description of Artificial Sequence: Synthetic oligonucleotide
  Sense strand starting at position 3572 of SEQ ID NO: 1882165
uuuagaaacuuagcugaau

SEQ ID NO: 2099985 - RNA, 19 nt, Artificial Sequence
  Description of Artificial Sequence: Synthetic oligonucleotide
  Antisense strand to SEQ ID NO: 2099984
auucagcuaaguuucuaaa

SEQ ID NO: 2099986 - RNA, 19 nt, Artificial Sequence
  Description of Artificial Sequence: Synthetic oligonucleotide
  Sense strand starting at position 3819 of SEQ ID NO: 1882165
gggucuagaaauugacagu

SEQ ID NO: 2099987 - RNA, 19 nt, Artificial Sequence
  Description of Artificial Sequence: Synthetic oligonucleotide
  Antisense strand to SEQ ID NO: 2099986
acugucaauuucuagaccc

SEQ ID NO: 2099988 - RNA, 19 nt, Artificial Sequence
  Description of Artificial Sequence: Synthetic oligonucleotide
  Sense strand starting at position 3860 of SEQ ID NO: 1882165
uuuggcagucuggacuaaa

SEQ ID NO: 2099989 - RNA, 19 nt, Artificial Sequence
  Description of Artificial Sequence: Synthetic oligonucleotide
  Antisense strand to SEQ ID NO: 2099988
uuuaguccagacugccaaa

SEQ ID NO: 2099990 - RNA, 19 nt, Artificial Sequence
  Description of Artificial Sequence: Synthetic oligonucleotide
  Sense strand starting at position 57 of SEQ ID NO: 1882166
uagaaaucacauuguaggu

SEQ ID NO: 2099991 - RNA, 19 nt, Artificial Sequence
  Description of Artificial Sequence: Synthetic oligonucleotide
  Antisense strand to SEQ ID NO: 2099990
accuacaaugugauuucua

SEQ ID NO: 2099992 - RNA, 19 nt, Artificial Sequence
  Description of Artificial Sequence: Synthetic oligonucleotide
  Sense strand starting at position 66 of SEQ ID NO: 1882166
cauuguaggucauuugcaa

SEQ ID NO: 2099993 - RNA, 19 nt, Artificial Sequence
  Description of Artificial Sequence: Synthetic oligonucleotide
  Antisense strand to SEQ ID NO: 2099992
uugcaaaugaccuacaaug

SEQ ID NO: 2099994 - RNA, 19 nt, Artificial Sequence
  Description of Artificial Sequence: Synthetic oligonucleotide
  Sense strand starting at position 132 of SEQ ID NO: 1882166
augccaucgagguauggaa

SEQ ID NO: 2099995 - RNA, 19 nt, Artificial Sequence
  Description of Artificial Sequence: Synthetic oligonucleotide
  Antisense strand to SEQ ID NO: 2099994
uuccauaccucgauggcau

SEQ ID NO: 2099996 - RNA, 19 nt, Artificial Sequence
  Description of Artificial Sequence: Synthetic oligonucleotide
  Sense strand starting at position 176 of SEQ ID NO: 1882166
uguauuuagguuuguacau

SEQ ID NO: 2099997 - RNA, 19 nt, Artificial Sequence
  Description of Artificial Sequence: Synthetic oligonucleotide
  Antisense strand to SEQ ID NO: 2099996
auguacaaaccuaaauaca

SEQ ID NO: 2099998 - RNA, 19 nt, Artificial Sequence
  Description of Artificial Sequence: Synthetic oligonucleotide
  Sense strand starting at position 188 of SEQ ID NO: 1882166
uguacauagugacuagacu

SEQ ID NO: 2099999 - RNA, 19 nt, Artificial Sequence
  Description of Artificial Sequence: Synthetic oligonucleotide
  Antisense strand to SEQ ID NO: 2099998
agucuagucacuauguaca

SEQ ID NO: 2100000 - RNA, 19 nt, Artificial Sequence
  Description of Artificial Sequence: Synthetic oligonucleotide
  Sense strand starting at position 218 of SEQ ID NO: 1882166
acacuugaaugugugaaca

SEQ ID NO: 2100001 - RNA, 19 nt, Artificial Sequence
  Description of Artificial Sequence: Synthetic oligonucleotide
  Antisense strand to SEQ ID NO: 2100000
uguucacacauucaagugu

SEQ ID NO: 2100002 - RNA, 19 nt, Artificial Sequence
  Description of Artificial Sequence: Synthetic oligonucleotide
  Sense strand starting at position 352 of SEQ ID NO: 1882166
guucauggucuggauucga

SEQ ID NO: 2100003 - RNA, 19 nt, Artificial Sequence
  Description of Artificial Sequence: Synthetic oligonucleotide
  Antisense strand to SEQ ID NO: 2100002
ucgaauccagaccaugaac

SEQ ID NO: 2100004 - RNA, 19 nt, Artificial Sequence
  Description of Artificial Sequence: Synthetic oligonucleotide
  Sense strand starting at position 573 of SEQ ID NO: 1882166
agauuaagcucaccaguaa

SEQ ID NO: 2100005 - RNA, 19 nt, Artificial Sequence
  Description of Artificial Sequence: Synthetic oligonucleotide
  Antisense strand to SEQ ID NO: 2100004
uuacuggugagcuuaaucu

SEQ ID NO: 2100006 - RNA, 19 nt, Artificial Sequence
  Description of Artificial Sequence: Synthetic oligonucleotide
  Sense strand starting at position 682 of SEQ ID NO: 1882166
guauuuggcucuuucuaau

SEQ ID NO: 2100007 - RNA, 19 nt, Artificial Sequence
  Description of Artificial Sequence: Synthetic oligonucleotide
  Antisense strand to SEQ ID NO: 2100006
auuagaaagagccaaauac

SEQ ID NO: 2100008 - RNA, 19 nt, Artificial Sequence
  Description of Artificial Sequence: Synthetic oligonucleotide
  Sense strand starting at position 699 of SEQ ID NO: 1882166
auagauuuauagcagguua

SEQ ID NO: 2100009 - RNA, 19 nt, Artificial Sequence
  Description of Artificial Sequence: Synthetic oligonucleotide
  Antisense strand to SEQ ID NO: 2100008
uaaccugcuauaaaucuau

SEQ ID NO: 2100010 - RNA, 19 nt, Artificial Sequence
  Description of Artificial Sequence: Synthetic oligonucleotide
  Sense strand starting at position 881 of SEQ ID NO: 1882166
acauuuauaugaggucaga

SEQ ID NO: 2100011 - RNA, 19 nt, Artificial Sequence
  Description of Artificial Sequence: Synthetic oligonucleotide
  Antisense strand to SEQ ID NO: 2100010
ucugaccucauauaaaugu

SEQ ID NO: 2100012 - RNA, 19 nt, Artificial Sequence
  Description of Artificial Sequence: Synthetic oligonucleotide
  Sense strand starting at position 923 of SEQ ID NO: 1882166
uuaaccucuugggucauaa

SEQ ID NO: 2100013 - RNA, 19 nt, Artificial Sequence
  Description of Artificial Sequence: Synthetic oligonucleotide
  Antisense strand to SEQ ID NO: 2100012
uuaugacccaagagguuaa

SEQ ID NO: 2100014 - RNA, 19 nt, Artificial Sequence
  Description of Artificial Sequence: Synthetic oligonucleotide
  Sense strand starting at position 965 of SEQ ID NO: 1882166
guaguuauuuaucggauuu

SEQ ID NO: 2100015 - RNA, 19 nt, Artificial Sequence
  Description of Artificial Sequence: Synthetic oligonucleotide
  Antisense strand to SEQ ID NO: 2100014
aaauccgauaaauaacuac

SEQ ID NO: 2100016 - RNA, 19 nt, Artificial Sequence
  Description of Artificial Sequence: Synthetic oligonucleotide
  Sense strand starting at position 989 of SEQ ID NO: 1882166
guaccugaucauugccaca

SEQ ID NO: 2100017 - RNA, 19 nt, Artificial Sequence
  Description of Artificial Sequence: Synthetic oligonucleotide
  Antisense strand to SEQ ID NO: 2100016
uguggcaaugaucagguac

SEQ ID NO: 2100018 - RNA, 19 nt, Artificial Sequence
  Description of Artificial Sequence: Synthetic oligonucleotide
  Sense strand starting at position 991 of SEQ ID NO: 1882166
accugaucauugccacaga

SEQ ID NO: 2100019 - RNA, 19 nt, Artificial Sequence
  Description of Artificial Sequence: Synthetic oligonucleotide
  Antisense strand to SEQ ID NO: 2100018
ucuguggcaaugaucaggu

SEQ ID NO: 2100020 - RNA, 19 nt, Artificial Sequence
  Description of Artificial Sequence: Synthetic oligonucleotide
  Sense strand starting at position 994 of SEQ ID NO: 1882166
ugaucauugccacagaauc

SEQ ID NO: 2100021 - RNA, 19 nt, Artificial Sequence
  Description of Artificial Sequence: Synthetic oligonucleotide
  Antisense strand to SEQ ID NO: 2100020
gauucuguggcaaugauca

SEQ ID NO: 2100022 - RNA, 19 nt, Artificial Sequence
  Description of Artificial Sequence: Synthetic oligonucleotide
  Sense strand starting at position 1021 of SEQ ID NO: 1882166
ugaaacuaauugggauuua

SEQ ID NO: 2100023 - RNA, 19 nt, Artificial Sequence
  Description of Artificial Sequence: Synthetic oligonucleotide
  Antisense strand to SEQ ID NO: 2100022
uaaaucccaauuaguuuca

SEQ ID NO: 2100024 - RNA, 19 nt, Artificial Sequence
  Description of Artificial Sequence: Synthetic oligonucleotide
  Sense strand starting at position 1449 of SEQ ID NO: 1882166
uauugaaacugcguaauua

SEQ ID NO: 2100025 - RNA, 19 nt, Artificial Sequence
  Description of Artificial Sequence: Synthetic oligonucleotide
  Antisense strand to SEQ ID NO: 2100024
uaauuacgcaguuucaaua

SEQ ID NO: 2100026 - RNA, 19 nt, Artificial Sequence
  Description of Artificial Sequence: Synthetic oligonucleotide
  Sense strand starting at position 1450 of SEQ ID NO: 1882166
auugaaacugcguaauuaa

SEQ ID NO: 2100027 - RNA, 19 nt, Artificial Sequence
  Description of Artificial Sequence: Synthetic oligonucleotide
  Antisense strand to SEQ ID NO: 2100026
uuaauuacgcaguuucaau

SEQ ID NO: 2100028 - RNA, 19 nt, Artificial Sequence
  Description of Artificial Sequence: Synthetic oligonucleotide
  Sense strand starting at position 2148 of SEQ ID NO: 1882166
uaaaguauaggugagcauu

SEQ ID NO: 2100029 - RNA, 19 nt, Artificial Sequence
  Description of Artificial Sequence: Synthetic oligonucleotide
  Antisense strand to SEQ ID NO: 2100028
aaugcucaccuauacuuua

SEQ ID NO: 2100030 - RNA, 19 nt, Artificial Sequence
  Description of Artificial Sequence: Synthetic oligonucleotide
  Sense strand starting at position 2203 of SEQ ID NO: 1882166
cccagaguuggagaauguu

SEQ ID NO: 2100031 - RNA, 19 nt, Artificial Sequence
  Description of Artificial Sequence: Synthetic oligonucleotide
  Antisense strand to SEQ ID NO: 2100030
aacauucuccaacucuggg

SEQ ID NO: 2100032 - RNA, 19 nt, Artificial Sequence
  Description of Artificial Sequence: Synthetic oligonucleotide
  Sense strand starting at position 2206 of SEQ ID NO: 1882166
agaguuggagaauguucaa

SEQ ID NO: 2100033 - RNA, 19 nt, Artificial Sequence
  Description of Artificial Sequence: Synthetic oligonucleotide
  Antisense strand to SEQ ID NO: 2100032
uugaacauucuccaacucu

SEQ ID NO: 2100034 - RNA, 19 nt, Artificial Sequence
  Description of Artificial Sequence: Synthetic oligonucleotide
  Sense strand starting at position 2309 of SEQ ID NO: 1882166
gguuaugugugacccaaac

SEQ ID NO: 2100035 - RNA, 19 nt, Artificial Sequence
  Description of Artificial Sequence: Synthetic oligonucleotide
  Antisense strand to SEQ ID NO: 2100034
guuugggucacacauaacc

SEQ ID NO: 2100036 - RNA, 19 nt, Artificial Sequence
  Description of Artificial Sequence: Synthetic oligonucleotide
  Sense strand starting at position 2533 of SEQ ID NO: 1882166
guggcuaguuacccaaaga

SEQ ID NO: 2100037 - RNA, 19 nt, Artificial Sequence
  Description of Artificial Sequence: Synthetic oligonucleotide
  Antisense strand to SEQ ID NO: 2100036
ucuuuggguaacuagccac

SEQ ID NO: 2100038 - RNA, 19 nt, Artificial Sequence
  Description of Artificial Sequence: Synthetic oligonucleotide
  Sense strand starting at position 2615 of SEQ ID NO: 1882166
ugcccagacuugucuagga

SEQ ID NO: 2100039 - RNA, 19 nt, Artificial Sequence
  Description of Artificial Sequence: Synthetic oligonucleotide
  Antisense strand to SEQ ID NO: 2100038
uccuagacaagucugggca

SEQ ID NO: 2100040 - RNA, 19 nt, Artificial Sequence
  Description of Artificial Sequence: Synthetic oligonucleotide
  Sense strand starting at position 2744 of SEQ ID NO: 1882166
uugcaugagugacucuaau

SEQ ID NO: 2100041 - RNA, 19 nt, Artificial Sequence
  Description of Artificial Sequence: Synthetic oligonucleotide
  Antisense strand to SEQ ID NO: 2100040
auuagagucacucaugcaa

SEQ ID NO: 2100042 - RNA, 19 nt, Artificial Sequence
  Description of Artificial Sequence: Synthetic oligonucleotide
  Sense strand starting at position 2817 of SEQ ID NO: 1882166
aauccugaacucggugauu

SEQ ID NO: 2100043 - RNA, 19 nt, Artificial Sequence
  Description of Artificial Sequence: Synthetic oligonucleotide
  Antisense strand to SEQ ID NO: 2100042
aaucaccgaguucaggauu

SEQ ID NO: 2100044 - RNA, 19 nt, Artificial Sequence
  Description of Artificial Sequence: Synthetic oligonucleotide
  Sense strand starting at position 2829 of SEQ ID NO: 1882166
ggugauugugucaggugca

SEQ ID NO: 2100045 - RNA, 19 nt, Artificial Sequence
  Description of Artificial Sequence: Synthetic oligonucleotide
  Antisense strand to SEQ ID NO: 2100044
ugcaccugacacaaucacc

SEQ ID NO: 2100046 - RNA, 19 nt, Artificial Sequence
  Description of Artificial Sequence: Synthetic oligonucleotide
  Sense strand starting at position 3170 of SEQ ID NO: 1882166
uccuauucugugcaagaua

SEQ ID NO: 2100047 - RNA, 19 nt, Artificial Sequence
  Description of Artificial Sequence: Synthetic oligonucleotide
  Antisense strand to SEQ ID NO: 2100046
uaucuugcacagaauagga

SEQ ID NO: 2100048 - RNA, 19 nt, Artificial Sequence
  Description of Artificial Sequence: Synthetic oligonucleotide
  Sense strand starting at position 3181 of SEQ ID NO: 1882166
gcaagauacuuugcuuuaa

SEQ ID NO: 2100049 - RNA, 19 nt, Artificial Sequence
  Description of Artificial Sequence: Synthetic oligonucleotide
  Antisense strand to SEQ ID NO: 2100048
uuaaagcaaaguaucuugc

SEQ ID NO: 2100050 - RNA, 19 nt, Artificial Sequence
  Description of Artificial Sequence: Synthetic oligonucleotide
  Sense strand starting at position 3249 of SEQ ID NO: 1882166
ggaacccuaucacuugauu

SEQ ID NO: 2100051 - RNA, 19 nt, Artificial Sequence
  Description of Artificial Sequence: Synthetic oligonucleotide
  Antisense strand to SEQ ID NO: 2100050
aaucaagugauaggguucc

SEQ ID NO: 2100052 - RNA, 19 nt, Artificial Sequence
  Description of Artificial Sequence: Synthetic oligonucleotide
  Sense strand starting at position 3254 of SEQ ID NO: 1882166
ccuaucacuugauugcaga

SEQ ID NO: 2100053 - RNA, 19 nt, Artificial Sequence
  Description of Artificial Sequence: Synthetic oligonucleotide
  Antisense strand to SEQ ID NO: 2100052
ucugcaaucaagugauagg

SEQ ID NO: 2100054 - RNA, 19 nt, Artificial Sequence
  Description of Artificial Sequence: Synthetic oligonucleotide
  Sense strand starting at position 3255 of SEQ ID NO: 1882166
cuaucacuugauugcagaa

SEQ ID NO: 2100055 - RNA, 19 nt, Artificial Sequence
  Description of Artificial Sequence: Synthetic oligonucleotide
  Antisense strand to SEQ ID NO: 2100054
uucugcaaucaagugauag

SEQ ID NO: 2100056 - RNA, 19 nt, Artificial Sequence
  Description of Artificial Sequence: Synthetic oligonucleotide
  Sense strand starting at position 3296 of SEQ ID NO: 1882166
guggaacuguuauuaagga

SEQ ID NO: 2100057 - RNA, 19 nt, Artificial Sequence
  Description of Artificial Sequence: Synthetic oligonucleotide
  Antisense strand to SEQ ID NO: 2100056
uccuuaauaacaguuccac

SEQ ID NO: 2100058 - RNA, 19 nt, Artificial Sequence
  Description of Artificial Sequence: Synthetic oligonucleotide
  Sense strand starting at position 3301 of SEQ ID NO: 1882166
acuguuauuaaggagcagu

SEQ ID NO: 2100059 - RNA, 19 nt, Artificial Sequence
  Description of Artificial Sequence: Synthetic oligonucleotide
  Antisense strand to SEQ ID NO: 2100058
acugcuccuuaauaacagu

SEQ ID NO: 2100060 - RNA, 19 nt, Artificial Sequence
  Description of Artificial Sequence: Synthetic oligonucleotide
  Sense strand starting at position 3586 of SEQ ID NO: 1882166
auaguaagugcucaauguc

SEQ ID NO: 2100061 - RNA, 19 nt, Artificial Sequence
  Description of Artificial Sequence: Synthetic oligonucleotide
  Antisense strand to SEQ ID NO: 2100060
gacauugagcacuuacuau

SEQ ID NO: 2100062 - RNA, 19 nt, Artificial Sequence
  Description of Artificial Sequence: Synthetic oligonucleotide
  Sense strand starting at position 3602 of SEQ ID NO: 1882166
gucagcuaugauuauuauu

SEQ ID NO: 2100063 - RNA, 19 nt, Artificial Sequence
  Description of Artificial Sequence: Synthetic oligonucleotide
  Antisense strand to SEQ ID NO: 2100062
aauaauaaucauagcugac

SEQ ID NO: 2100064 - RNA, 19 nt, Artificial Sequence
  Description of Artificial Sequence: Synthetic oligonucleotide
  Sense strand starting at position 3828 of SEQ ID NO: 1882166
acaagaauucccugugcuu

SEQ ID NO: 2100065 - RNA, 19 nt, Artificial Sequence
  Description of Artificial Sequence: Synthetic oligonucleotide
  Antisense strand to SEQ ID NO: 2100064
aagcacagggaauucuugu

SEQ ID NO: 2100066 - RNA, 19 nt, Artificial Sequence
  Description of Artificial Sequence: Synthetic oligonucleotide
  Sense strand starting at position 3966 of SEQ ID NO: 1882166
agcagauucugggugagga

SEQ ID NO: 2100067 - RNA, 19 nt, Artificial Sequence
  Description of Artificial Sequence: Synthetic oligonucleotide
  Antisense strand to SEQ ID NO: 2100066
uccucacccagaaucugcu

SEQ ID NO: 2100068 - RNA, 19 nt, Artificial Sequence
  Description of Artificial Sequence: Synthetic oligonucleotide
  Sense strand starting at position 3967 of SEQ ID NO: 1882166
gcagauucugggugaggac

SEQ ID NO: 2100069 - RNA, 19 nt, Artificial Sequence
  Description of Artificial Sequence: Synthetic oligonucleotide
  Antisense strand to SEQ ID NO: 2100068
guccucacccagaaucugc

SEQ ID NO: 2100070 - RNA, 19 nt, Artificial Sequence
  Description of Artificial Sequence: Synthetic oligonucleotide
  Sense strand starting at position 317 of SEQ ID NO: 1882167
acacguagcaguuaauaga

SEQ ID NO: 2100071 - RNA, 19 nt, Artificial Sequence
  Description of Artificial Sequence: Synthetic oligonucleotide
  Antisense strand to SEQ ID NO: 2100070
ucuauuaacugcuacgugu

SEQ ID NO: 2100072 - RNA, 19 nt, Artificial Sequence
  Description of Artificial Sequence: Synthetic oligonucleotide
  Sense strand starting at position 584 of SEQ ID NO: 1882167
cuucuccacgaguaacaau

SEQ ID NO: 2100073 - RNA, 19 nt, Artificial Sequence
  Description of Artificial Sequence: Synthetic oligonucleotide
  Antisense strand to SEQ ID NO: 2100072
auuguuacucguggagaag

SEQ ID NO: 2100074 - RNA, 19 nt, Artificial Sequence
  Description of Artificial Sequence: Synthetic oligonucleotide
  Sense strand starting at position 655 of SEQ ID NO: 1882167
gucccaucacuguaucacu

SEQ ID NO: 2100075 - RNA, 19 nt, Artificial Sequence
  Description of Artificial Sequence: Synthetic oligonucleotide
  Antisense strand to SEQ ID NO: 2100074
agugauacagugaugggac

SEQ ID NO: 2100076 - RNA, 19 nt, Artificial Sequence
  Description of Artificial Sequence: Synthetic oligonucleotide
  Sense strand starting at position 699 of SEQ ID NO: 1882167
agacaaucucgcuaacaca

SEQ ID NO: 2100077 - RNA, 19 nt, Artificial Sequence
  Description of Artificial Sequence: Synthetic oligonucleotide
  Antisense strand to SEQ ID NO: 2100076
uguguuagcgagauugucu

SEQ ID NO: 2100078 - RNA, 19 nt, Artificial Sequence
  Description of Artificial Sequence: Synthetic oligonucleotide
  Sense strand starting at position 800 of SEQ ID NO: 1882167
ggaugccauaaguaaagua

SEQ ID NO: 2100079 - RNA, 19 nt, Artificial Sequence
  Description of Artificial Sequence: Synthetic oligonucleotide
  Antisense strand to SEQ ID NO: 2100078
uacuuuacuuauggcaucc

SEQ ID NO: 2100080 - RNA, 19 nt, Artificial Sequence
  Description of Artificial Sequence: Synthetic oligonucleotide
  Sense strand starting at position 827 of SEQ ID NO: 1882167
ucaauugaacccgaauguu

SEQ ID NO: 2100081 - RNA, 19 nt, Artificial Sequence
  Description of Artificial Sequence: Synthetic oligonucleotide
  Antisense strand to SEQ ID NO: 2100080
aacauucggguucaauuga

SEQ ID NO: 2100082 - RNA, 19 nt, Artificial Sequence
  Description of Artificial Sequence: Synthetic oligonucleotide
  Sense strand starting at position 869 of SEQ ID NO: 1882167
ucaagaagucauuguuaac

SEQ ID NO: 2100083 - RNA, 19 nt, Artificial Sequence
  Description of Artificial Sequence: Synthetic oligonucleotide
  Antisense strand to SEQ ID NO: 2100082
guuaacaaugacuucuuga

SEQ ID NO: 2100084 - RNA, 19 nt, Artificial Sequence
  Description of Artificial Sequence: Synthetic oligonucleotide
  Sense strand starting at position 875 of SEQ ID NO: 1882167
agucauuguuaaccauaua

SEQ ID NO: 2100085 - RNA, 19 nt, Artificial Sequence
  Description of Artificial Sequence: Synthetic oligonucleotide
  Antisense strand to SEQ ID NO: 2100084
uauaugguuaacaaugacu

SEQ ID NO: 2100086 - RNA, 19 nt, Artificial Sequence
  Description of Artificial Sequence: Synthetic oligonucleotide
  Sense strand starting at position 1101 of SEQ ID NO: 1882167
acauuagaucucggacaua

SEQ ID NO: 2100087 - RNA, 19 nt, Artificial Sequence
  Description of Artificial Sequence: Synthetic oligonucleotide
  Antisense strand to SEQ ID NO: 2100086
uauguccgagaucuaaugu

SEQ ID NO: 2100088 - RNA, 19 nt, Artificial Sequence
  Description of Artificial Sequence: Synthetic oligonucleotide
  Sense strand starting at position 1246 of SEQ ID NO: 1882167
gaagcugaagccugauuaa

SEQ ID NO: 2100089 - RNA, 19 nt, Artificial Sequence
  Description of Artificial Sequence: Synthetic oligonucleotide
  Antisense strand to SEQ ID NO: 2100088
uuaaucaggcuucagcuuc

SEQ ID NO: 2100090 - RNA, 19 nt, Artificial Sequence
  Description of Artificial Sequence: Synthetic oligonucleotide
  Sense strand starting at position 1332 of SEQ ID NO: 1882167
cacagagaucuccacggua

SEQ ID NO: 2100091 - RNA, 19 nt, Artificial Sequence
  Description of Artificial Sequence: Synthetic oligonucleotide
  Antisense strand to SEQ ID NO: 2100090
uaccguggagaucucugug

SEQ ID NO: 2100092 - RNA, 19 nt, Artificial Sequence
  Description of Artificial Sequence: Synthetic oligonucleotide
  Sense strand starting at position 1335 of SEQ ID NO: 1882167
agagaucuccacgguagga

SEQ ID NO: 2100093 - RNA, 19 nt, Artificial Sequence
  Description of Artificial Sequence: Synthetic oligonucleotide
  Antisense strand to SEQ ID NO: 2100092
uccuaccguggagaucucu

SEQ ID NO: 2100094 - RNA, 19 nt, Artificial Sequence
  Description of Artificial Sequence: Synthetic oligonucleotide
  Sense strand starting at position 1425 of SEQ ID NO: 1882167
guaucuauuucguucuaga

SEQ ID NO: 2100095 - RNA, 19 nt, Artificial Sequence
  Description of Artificial Sequence: Synthetic oligonucleotide
  Antisense strand to SEQ ID NO: 2100094
ucuagaacgaaauagauac

SEQ ID NO: 2100096 - RNA, 19 nt, Artificial Sequence
  Description of Artificial Sequence: Synthetic oligonucleotide
  Sense strand starting at position 1518 of SEQ ID NO: 1882167
gggcgagcacugaguguuu

SEQ ID NO: 2100097 - RNA, 19 nt, Artificial Sequence
  Description of Artificial Sequence: Synthetic oligonucleotide
  Antisense strand to SEQ ID NO: 2100096
aaacacucagugcucgccc

SEQ ID NO: 2100098 - RNA, 19 nt, Artificial Sequence
  Description of Artificial Sequence: Synthetic oligonucleotide
  Sense strand starting at position 1563 of SEQ ID NO: 1882167
ggcuucgauaaguagggaa

SEQ ID NO: 2100099 - RNA, 19 nt, Artificial Sequence
  Description of Artificial Sequence: Synthetic oligonucleotide
  Antisense strand to SEQ ID NO: 2100098
uucccuacuuaucgaagcc

SEQ ID NO: 2100100 - RNA, 19 nt, Artificial Sequence
  Description of Artificial Sequence: Synthetic oligonucleotide
  Sense strand starting at position 2544 of SEQ ID NO: 1882167
ggaccuugcgugcucuauu

SEQ ID NO: 2100101 - RNA, 19 nt, Artificial Sequence
  Description of Artificial Sequence: Synthetic oligonucleotide
  Antisense strand to SEQ ID NO: 2100100
aauagagcacgcaaggucc

SEQ ID NO: 2100102 - RNA, 19 nt, Artificial Sequence
  Description of Artificial Sequence: Synthetic oligonucleotide
  Sense strand starting at position 2700 of SEQ ID NO: 1882167
cuccuauggccugaaauug

SEQ ID NO: 2100103 - RNA, 19 nt, Artificial Sequence
  Description of Artificial Sequence: Synthetic oligonucleotide
  Antisense strand to SEQ ID NO: 2100102
caauuucaggccauaggag

SEQ ID NO: 2100104 - RNA, 19 nt, Artificial Sequence
  Description of Artificial Sequence: Synthetic oligonucleotide
  Sense strand starting at position 2737 of SEQ ID NO: 1882167
acaugucaucaucgggaca

SEQ ID NO: 2100105 - RNA, 19 nt, Artificial Sequence
  Description of Artificial Sequence: Synthetic oligonucleotide
  Antisense strand to SEQ ID NO: 2100104
ugucccgaugaugacaugu

SEQ ID NO: 2100106 - RNA, 19 nt, Artificial Sequence
  Description of Artificial Sequence: Synthetic oligonucleotide
  Sense strand starting at position 2839 of SEQ ID NO: 1882167
agacauuaauuagcuuagu

SEQ ID NO: 2100107 - RNA, 19 nt, Artificial Sequence
  Description of Artificial Sequence: Synthetic oligonucleotide
  Antisense strand to SEQ ID NO: 2100106
acuaagcuaauuaaugucu

SEQ ID NO: 2100108 - RNA, 19 nt, Artificial Sequence
  Description of Artificial Sequence: Synthetic oligonucleotide
  Sense strand starting at position 2926 of SEQ ID NO: 1882167
uuaugaaguagaugugaau

SEQ ID NO: 2100109 - RNA, 19 nt, Artificial Sequence
  Description of Artificial Sequence: Synthetic oligonucleotide
  Antisense strand to SEQ ID NO: 2100108
auucacaucuacuucauaa

SEQ ID NO: 2100110 - RNA, 19 nt, Artificial Sequence
  Description of Artificial Sequence: Synthetic oligonucleotide
  Sense strand starting at position 3034 of SEQ ID NO: 1882167
ucuuguacugcgucuguaa

SEQ ID NO: 2100111 - RNA, 19 nt, Artificial Sequence
  Description of Artificial Sequence: Synthetic oligonucleotide
  Antisense strand to SEQ ID NO: 2100110
uuacagacgcaguacaaga

SEQ ID NO: 2100112 - RNA, 19 nt, Artificial Sequence
  Description of Artificial Sequence: Synthetic oligonucleotide
  Sense strand starting at position 3035 of SEQ ID NO: 1882167
cuuguacugcgucuguaau

SEQ ID NO: 2100113 - RNA, 19 nt, Artificial Sequence
  Description of Artificial Sequence: Synthetic oligonucleotide
  Antisense strand to SEQ ID NO: 2100112
auuacagacgcaguacaag

SEQ ID NO: 2100114 - RNA, 19 nt, Artificial Sequence
  Description of Artificial Sequence: Synthetic oligonucleotide
  Sense strand starting at position 3093 of SEQ ID NO: 1882167
aguaguacagucuauuaac

SEQ ID NO: 2100115 - RNA, 19 nt, Artificial Sequence
  Description of Artificial Sequence: Synthetic oligonucleotide
  Antisense strand to SEQ ID NO: 2100114
guuaauagacuguacuacu

SEQ ID NO: 2100116 - RNA, 19 nt, Artificial Sequence
  Description of Artificial Sequence: Synthetic oligonucleotide
  Sense strand starting at position 3144 of SEQ ID NO: 1882167
gggcauuaacgauagaguu

SEQ ID NO: 2100117 - RNA, 19 nt, Artificial Sequence
  Description of Artificial Sequence: Synthetic oligonucleotide
  Antisense strand to SEQ ID NO: 2100116
aacucuaucguuaaugccc

SEQ ID NO: 2100118 - RNA, 19 nt, Artificial Sequence
  Description of Artificial Sequence: Synthetic oligonucleotide
  Sense strand starting at position 3146 of SEQ ID NO: 1882167
gcauuaacgauagaguuua

SEQ ID NO: 2100119 - RNA, 19 nt, Artificial Sequence
  Description of Artificial Sequence: Synthetic oligonucleotide
  Antisense strand to SEQ ID NO: 2100118
uaaacucuaucguuaaugc

SEQ ID NO: 2100120 - RNA, 19 nt, Artificial Sequence
  Description of Artificial Sequence: Synthetic oligonucleotide
  Sense strand starting at position 3200 of SEQ ID NO: 1882167
auguauacaugcuccagaa

SEQ ID NO: 2100121 - RNA, 19 nt, Artificial Sequence
  Description of Artificial Sequence: Synthetic oligonucleotide
  Antisense strand to SEQ ID NO: 2100120
uucuggagcauguauacau

SEQ ID NO: 2100122 - RNA, 19 nt, Artificial Sequence
  Description of Artificial Sequence: Synthetic oligonucleotide
  Sense strand starting at position 3202 of SEQ ID NO: 1882167
guauacaugcuccagaauc

SEQ ID NO: 2100123 - RNA, 19 nt, Artificial Sequence
  Description of Artificial Sequence: Synthetic oligonucleotide
  Antisense strand to SEQ ID NO: 2100122
gauucuggagcauguauac

SEQ ID NO: 2100124 - RNA, 19 nt, Artificial Sequence
  Description of Artificial Sequence: Synthetic oligonucleotide
  Sense strand starting at position 3303 of SEQ ID NO: 1882167
cugaucccauugguuuaua

SEQ ID NO: 2100125 - RNA, 19 nt, Artificial Sequence
  Description of Artificial Sequence: Synthetic oligonucleotide
  Antisense strand to SEQ ID NO: 2100124
uauaaaccaaugggaucag

SEQ ID NO: 2100126 - RNA, 19 nt, Artificial Sequence
  Description of Artificial Sequence: Synthetic oligonucleotide
  Sense strand starting at position 3313 of SEQ ID NO: 1882167
ugguuuauagaguaaccuu

SEQ ID NO: 2100127 - RNA, 19 nt, Artificial Sequence
  Description of Artificial Sequence: Synthetic oligonucleotide
  Antisense strand to SEQ ID NO: 2100126
aagguuacucuauaaacca

SEQ ID NO: 2100128 - RNA, 19 nt, Artificial Sequence
  Description of Artificial Sequence: Synthetic oligonucleotide
  Sense strand starting at position 3433 of SEQ ID NO: 1882167
uucugaugagguugacauc

SEQ ID NO: 2100129 - RNA, 19 nt, Artificial Sequence
  Description of Artificial Sequence: Synthetic oligonucleotide
  Antisense strand to SEQ ID NO: 2100128
gaugucaaccucaucagaa

SEQ ID NO: 2100130 - RNA, 19 nt, Artificial Sequence
  Description of Artificial Sequence: Synthetic oligonucleotide
  Sense strand starting at position 3488 of SEQ ID NO: 1882167
ugcaaccaggguuaugaau

SEQ ID NO: 2100131 - RNA, 19 nt, Artificial Sequence
  Description of Artificial Sequence: Synthetic oligonucleotide
  Antisense strand to SEQ ID NO: 2100130
auucauaacccugguugca

SEQ ID NO: 2100132 - RNA, 19 nt, Artificial Sequence
  Description of Artificial Sequence: Synthetic oligonucleotide
  Sense strand starting at position 3497 of SEQ ID NO: 1882167
gguuaugaauuacugauca

SEQ ID NO: 2100133 - RNA, 19 nt, Artificial Sequence
  Description of Artificial Sequence: Synthetic oligonucleotide
  Antisense strand to SEQ ID NO: 2100132
ugaucaguaauucauaacc

SEQ ID NO: 2100134 - RNA, 19 nt, Artificial Sequence
  Description of Artificial Sequence: Synthetic oligonucleotide
  Sense strand starting at position 3501 of SEQ ID NO: 1882167
augaauuacugaucaaggu

SEQ ID NO: 2100135 - RNA, 19 nt, Artificial Sequence
  Description of Artificial Sequence: Synthetic oligonucleotide
  Antisense strand to SEQ ID NO: 2100134
accuugaucaguaauucau

SEQ ID NO: 2100136 - RNA, 19 nt, Artificial Sequence
  Description of Artificial Sequence: Synthetic oligonucleotide
  Sense strand starting at position 3550 of SEQ ID NO: 1882167
aguagacaccuaugauuau

SEQ ID NO: 2100137 - RNA, 19 nt, Artificial Sequence
  Description of Artificial Sequence: Synthetic oligonucleotide
  Antisense strand to SEQ ID NO: 2100136
auaaucauaggugucuacu

SEQ ID NO: 2100138 - RNA, 19 nt, Artificial Sequence
  Description of Artificial Sequence: Synthetic oligonucleotide
  Sense strand starting at position 3675 of SEQ ID NO: 1882167
gaaguuauucuacagguac

SEQ ID NO: 2100139 - RNA, 19 nt, Artificial Sequence
  Description of Artificial Sequence: Synthetic oligonucleotide
  Antisense strand to SEQ ID NO: 2100138
guaccuguagaauaacuuc

SEQ ID NO: 2100140 - RNA, 19 nt, Artificial Sequence
  Description of Artificial Sequence: Synthetic oligonucleotide
  Sense strand starting at position 3805 of SEQ ID NO: 1882167
gugaauuaacuugaaguuu

SEQ ID NO: 2100141 - RNA, 19 nt, Artificial Sequence
  Description of Artificial Sequence: Synthetic oligonucleotide
  Antisense strand to SEQ ID NO: 2100140
aaacuucaaguuaauucac

SEQ ID NO: 2100142 - RNA, 19 nt, Artificial Sequence
  Description of Artificial Sequence: Synthetic oligonucleotide
  Sense strand starting at position 3834 of SEQ ID NO: 1882167
ucauaauuggaauggguau

SEQ ID NO: 2100143 - RNA, 19 nt, Artificial Sequence
  Description of Artificial Sequence: Synthetic oligonucleotide
  Antisense strand to SEQ ID NO: 2100142
auacccauuccaauuauga

SEQ ID NO: 2100144 - RNA, 19 nt, Artificial Sequence
  Description of Artificial Sequence: Synthetic oligonucleotide
  Sense strand starting at position 3905 of SEQ ID NO: 1882167
guaccaaagccugauguaa

SEQ ID NO: 2100145 - RNA, 19 nt, Artificial Sequence
  Description of Artificial Sequence: Synthetic oligonucleotide
  Antisense strand to SEQ ID NO: 2100144
uuacaucaggcuuugguac

SEQ ID NO: 2100146 - RNA, 19 nt, Artificial Sequence
  Description of Artificial Sequence: Synthetic oligonucleotide
  Sense strand starting at position 3928 of SEQ ID NO: 1882167
aguuucuuacagcacagaa

SEQ ID NO: 2100147 - RNA, 19 nt, Artificial Sequence
  Description of Artificial Sequence: Synthetic oligonucleotide
  Antisense strand to SEQ ID NO: 2100146
uucugugcuguaagaaacu

SEQ ID NO: 2100148 - RNA, 19 nt, Artificial Sequence
  Description of Artificial Sequence: Synthetic oligonucleotide
  Sense strand starting at position 3938 of SEQ ID NO: 1882167
agcacagaauuugauacau

SEQ ID NO: 2100149 - RNA, 19 nt, Artificial Sequence
  Description of Artificial Sequence: Synthetic oligonucleotide
  Antisense strand to SEQ ID NO: 2100148
auguaucaaauucugugcu

SEQ ID NO: 2100150 - RNA, 19 nt, Artificial Sequence
  Description of Artificial Sequence: Synthetic oligonucleotide
  Sense strand starting at position 140 of SEQ ID NO: 1882168
acuuaagacucacccgaaa

SEQ ID NO: 2100151 - RNA, 19 nt, Artificial Sequence
  Description of Artificial Sequence: Synthetic oligonucleotide
  Antisense strand to SEQ ID NO: 2100150
uuucgggugagucuuaagu

SEQ ID NO: 2100152 - RNA, 19 nt, Artificial Sequence
  Description of Artificial Sequence: Synthetic oligonucleotide
  Sense strand starting at position 215 of SEQ ID NO: 1882168
ucuauuugcuuugaggaag

SEQ ID NO: 2100153 - RNA, 19 nt, Artificial Sequence
  Description of Artificial Sequence: Synthetic oligonucleotide
  Antisense strand to SEQ ID NO: 2100152
cuuccucaaagcaaauaga

SEQ ID NO: 2100154 - RNA, 19 nt, Artificial Sequence
  Description of Artificial Sequence: Synthetic oligonucleotide
  Sense strand starting at position 261 of SEQ ID NO: 1882168
aucugcucuguguacagaa

SEQ ID NO: 2100155 - RNA, 19 nt, Artificial Sequence
  Description of Artificial Sequence: Synthetic oligonucleotide
  Antisense strand to SEQ ID NO: 2100154
uucuguacacagagcagau

SEQ ID NO: 2100156 - RNA, 19 nt, Artificial Sequence
  Description of Artificial Sequence: Synthetic oligonucleotide
  Sense strand starting at position 307 of SEQ ID NO: 1882168
gcaguaagugcuuagauaa

SEQ ID NO: 2100157 - RNA, 19 nt, Artificial Sequence
  Description of Artificial Sequence: Synthetic oligonucleotide
  Antisense strand to SEQ ID NO: 2100156
uuaucuaagcacuuacugc

SEQ ID NO: 2100158 - RNA, 19 nt, Artificial Sequence
  Description of Artificial Sequence: Synthetic oligonucleotide
  Sense strand starting at position 314 of SEQ ID NO: 1882168
gugcuuagauaagcaaacu

SEQ ID NO: 2100159 - RNA, 19 nt, Artificial Sequence
  Description of Artificial Sequence: Synthetic oligonucleotide
  Antisense strand to SEQ ID NO: 2100158
aguuugcuuaucuaagcac

SEQ ID NO: 2100160 - RNA, 19 nt, Artificial Sequence
  Description of Artificial Sequence: Synthetic oligonucleotide
  Sense strand starting at position 326 of SEQ ID NO: 1882168
gcaaacuuggcucaccaau

SEQ ID NO: 2100161 - RNA, 19 nt, Artificial Sequence
  Description of Artificial Sequence: Synthetic oligonucleotide
  Antisense strand to SEQ ID NO: 2100160
auuggugagccaaguuugc

SEQ ID NO: 2100162 - RNA, 19 nt, Artificial Sequence
  Description of Artificial Sequence: Synthetic oligonucleotide
  Sense strand starting at position 337 of SEQ ID NO: 1882168
ucaccaauaccaugagguu

SEQ ID NO: 2100163 - RNA, 19 nt, Artificial Sequence
  Description of Artificial Sequence: Synthetic oligonucleotide
  Antisense strand to SEQ ID NO: 2100162
aaccucaugguauugguga

SEQ ID NO: 2100164 - RNA, 19 nt, Artificial Sequence
  Description of Artificial Sequence: Synthetic oligonucleotide
  Sense strand starting at position 351 of SEQ ID NO: 1882168
agguucuuuggugggugaa

SEQ ID NO: 2100165 - RNA, 19 nt, Artificial Sequence
  Description of Artificial Sequence: Synthetic oligonucleotide
  Antisense strand to SEQ ID NO: 2100164
uucacccaccaaagaaccu

SEQ ID NO: 2100166 - RNA, 19 nt, Artificial Sequence
  Description of Artificial Sequence: Synthetic oligonucleotide
  Sense strand starting at position 352 of SEQ ID NO: 1882168
gguucuuuggugggugaag

SEQ ID NO: 2100167 - RNA, 19 nt, Artificial Sequence
  Description of Artificial Sequence: Synthetic oligonucleotide
  Antisense strand to SEQ ID NO: 2100166
cuucacccaccaaagaacc

SEQ ID NO: 2100168 - RNA, 19 nt, Artificial Sequence
  Description of Artificial Sequence: Synthetic oligonucleotide
  Sense strand starting at position 353 of SEQ ID NO: 1882168
guucuuuggugggugaaga

SEQ ID NO: 2100169 - RNA, 19 nt, Artificial Sequence
  Description of Artificial Sequence: Synthetic oligonucleotide
  Antisense strand to SEQ ID NO: 2100168
ucuucacccaccaaagaac

SEQ ID NO: 2100170 - RNA, 19 nt, Artificial Sequence
  Description of Artificial Sequence: Synthetic oligonucleotide
  Sense strand starting at position 2187 of SEQ ID NO: 1882168
acugucucaugguuuagau

SEQ ID NO: 2100171 - RNA, 19 nt, Artificial Sequence
  Description of Artificial Sequence: Synthetic oligonucleotide
  Antisense strand to SEQ ID NO: 2100170
aucuaaaccaugagacagu

SEQ ID NO: 2100172 - RNA, 19 nt, Artificial Sequence
  Description of Artificial Sequence: Synthetic oligonucleotide
  Sense strand starting at position 2189 of SEQ ID NO: 1882168
ugucucaugguuuagauga

SEQ ID NO: 2100173 - RNA, 19 nt, Artificial Sequence
  Description of Artificial Sequence: Synthetic oligonucleotide
  Antisense strand to SEQ ID NO: 2100172
ucaucuaaaccaugagaca

SEQ ID NO: 2100174 - RNA, 19 nt, Artificial Sequence
  Description of Artificial Sequence: Synthetic oligonucleotide
  Sense strand starting at position 2232 of SEQ ID NO: 1882168
agaaguggugacgaaucau

SEQ ID NO: 2100175 - RNA, 19 nt, Artificial Sequence
  Description of Artificial Sequence: Synthetic oligonucleotide
  Antisense strand to SEQ ID NO: 2100174
augauucgucaccacuucu

SEQ ID NO: 2100176 - RNA, 19 nt, Artificial Sequence
  Description of Artificial Sequence: Synthetic oligonucleotide
  Sense strand starting at position 2238 of SEQ ID NO: 1882168
ggugacgaaucauuacauc

SEQ ID NO: 2100177 - RNA, 19 nt, Artificial Sequence
  Description of Artificial Sequence: Synthetic oligonucleotide
  Antisense strand to SEQ ID NO: 2100176
gauguaaugauucgucacc

SEQ ID NO: 2100178 - RNA, 19 nt, Artificial Sequence
  Description of Artificial Sequence: Synthetic oligonucleotide
  Sense strand starting at position 2290 of SEQ ID NO: 1882168
cuuugugcgguagaaauaa

SEQ ID NO: 2100179 - RNA, 19 nt, Artificial Sequence
  Description of Artificial Sequence: Synthetic oligonucleotide
  Antisense strand to SEQ ID NO: 2100178
uuauuucuaccgcacaaag

SEQ ID NO: 2100180 - RNA, 19 nt, Artificial Sequence
  Description of Artificial Sequence: Synthetic oligonucleotide
  Sense strand starting at position 2548 of SEQ ID NO: 1882168
ggccucugaguaugucaga

SEQ ID NO: 2100181 - RNA, 19 nt, Artificial Sequence
  Description of Artificial Sequence: Synthetic oligonucleotide
  Antisense strand to SEQ ID NO: 2100180
ucugacauacucagaggcc

SEQ ID NO: 2100182 - RNA, 19 nt, Artificial Sequence
  Description of Artificial Sequence: Synthetic oligonucleotide
  Sense strand starting at position 2549 of SEQ ID NO: 1882168
gccucugaguaugucagau

SEQ ID NO: 2100183 - RNA, 19 nt, Artificial Sequence
  Description of Artificial Sequence: Synthetic oligonucleotide
  Antisense strand to SEQ ID NO: 2100182
aucugacauacucagaggc

SEQ ID NO: 2100184 - RNA, 19 nt, Artificial Sequence
  Description of Artificial Sequence: Synthetic oligonucleotide
  Sense strand starting at position 2600 of SEQ ID NO: 1882168
ugaacuaugcuaggccauu

SEQ ID NO: 2100185 - RNA, 19 nt, Artificial Sequence
  Description of Artificial Sequence: Synthetic oligonucleotide
  Antisense strand to SEQ ID NO: 2100184
aauggccuagcauaguuca

SEQ ID NO: 2100186 - RNA, 19 nt, Artificial Sequence
  Description of Artificial Sequence: Synthetic oligonucleotide
  Sense strand starting at position 2755 of SEQ ID NO: 1882168
gugugucuucaggacgaug

SEQ ID NO: 2100187 - RNA, 19 nt, Artificial Sequence
  Description of Artificial Sequence: Synthetic oligonucleotide
  Antisense strand to SEQ ID NO: 2100186
caucguccugaagacacac

SEQ ID NO: 2100188 - RNA, 19 nt, Artificial Sequence
  Description of Artificial Sequence: Synthetic oligonucleotide
  Sense strand starting at position 2793 of SEQ ID NO: 1882168
ggugguuuccguaguguag

SEQ ID NO: 2100189 - RNA, 19 nt, Artificial Sequence
  Description of Artificial Sequence: Synthetic oligonucleotide
  Antisense strand to SEQ ID NO: 2100188
cuacacuacggaaaccacc

SEQ ID NO: 2100190 - RNA, 19 nt, Artificial Sequence
  Description of Artificial Sequence: Synthetic oligonucleotide
  Sense strand starting at position 2875 of SEQ ID NO: 1882168
uggucuguucgggagauuc

SEQ ID NO: 2100191 - RNA, 19 nt, Artificial Sequence
  Description of Artificial Sequence: Synthetic oligonucleotide
  Antisense strand to SEQ ID NO: 2100190
gaaucucccgaacagacca

SEQ ID NO: 2100192 - RNA, 19 nt, Artificial Sequence
  Description of Artificial Sequence: Synthetic oligonucleotide
  Sense strand starting at position 3060 of SEQ ID NO: 1882168
uguacaggaauccguagau

SEQ ID NO: 2100193 - RNA, 19 nt, Artificial Sequence
  Description of Artificial Sequence: Synthetic oligonucleotide
  Antisense strand to SEQ ID NO: 2100192
aucuacggauuccuguaca

SEQ ID NO: 2100194 - RNA, 19 nt, Artificial Sequence
  Description of Artificial Sequence: Synthetic oligonucleotide
  Sense strand starting at position 3090 of SEQ ID NO: 1882168
ggcucuagugccuagaaca

SEQ ID NO: 2100195 - RNA, 19 nt, Artificial Sequence
  Description of Artificial Sequence: Synthetic oligonucleotide
  Antisense strand to SEQ ID NO: 2100194
uguucuaggcacuagagcc

SEQ ID NO: 2100196 - RNA, 19 nt, Artificial Sequence
  Description of Artificial Sequence: Synthetic oligonucleotide
  Sense strand starting at position 3124 of SEQ ID NO: 1882168
gcuucuuaguauuugcaca

SEQ ID NO: 2100197 - RNA, 19 nt, Artificial Sequence
  Description of Artificial Sequence: Synthetic oligonucleotide
  Antisense strand to SEQ ID NO: 2100196
ugugcaaauacuaagaagc

SEQ ID NO: 2100198 - RNA, 19 nt, Artificial Sequence
  Description of Artificial Sequence: Synthetic oligonucleotide
  Sense strand starting at position 3185 of SEQ ID NO: 1882168
gagacaaaguuagaauaca

SEQ ID NO: 2100199 - RNA, 19 nt, Artificial Sequence
  Description of Artificial Sequence: Synthetic oligonucleotide
  Antisense strand to SEQ ID NO: 2100198
uguauucuaacuuugucuc

SEQ ID NO: 2100200 - RNA, 19 nt, Artificial Sequence
  Description of Artificial Sequence: Synthetic oligonucleotide
  Sense strand starting at position 3338 of SEQ ID NO: 1882168
augguauucucuguaccaa

SEQ ID NO: 2100201 - RNA, 19 nt, Artificial Sequence
  Description of Artificial Sequence: Synthetic oligonucleotide
  Antisense strand to SEQ ID NO: 2100200
uugguacagagaauaccau

SEQ ID NO: 2100202 - RNA, 19 nt, Artificial Sequence
  Description of Artificial Sequence: Synthetic oligonucleotide
  Sense strand starting at position 3339 of SEQ ID NO: 1882168
ugguauucucuguaccaag

SEQ ID NO: 2100203 - RNA, 19 nt, Artificial Sequence
  Description of Artificial Sequence: Synthetic oligonucleotide
  Antisense strand to SEQ ID NO: 2100202
cuugguacagagaauacca

SEQ ID NO: 2100204 - RNA, 19 nt, Artificial Sequence
  Description of Artificial Sequence: Synthetic oligonucleotide
  Sense strand starting at position 3388 of SEQ ID NO: 1882168
gguguuagaacuuggacua

SEQ ID NO: 2100205 - RNA, 19 nt, Artificial Sequence
  Description of Artificial Sequence: Synthetic oligonucleotide
  Antisense strand to SEQ ID NO: 2100204
uaguccaaguucuaacacc

SEQ ID NO: 2100206 - RNA, 19 nt, Artificial Sequence
  Description of Artificial Sequence: Synthetic oligonucleotide
  Sense strand starting at position 3389 of SEQ ID NO: 1882168
guguuagaacuuggacuaa

SEQ ID NO: 2100207 - RNA, 19 nt, Artificial Sequence
  Description of Artificial Sequence: Synthetic oligonucleotide
  Antisense strand to SEQ ID NO: 2100206
uuaguccaaguucuaacac

SEQ ID NO: 2100208 - RNA, 19 nt, Artificial Sequence
  Description of Artificial Sequence: Synthetic oligonucleotide
  Sense strand starting at position 3441 of SEQ ID NO: 1882168
cgagcagaauucucacaac

SEQ ID NO: 2100209 - RNA, 19 nt, Artificial Sequence
  Description of Artificial Sequence: Synthetic oligonucleotide
  Antisense strand to SEQ ID NO: 2100208
guugugagaauucugcucg

SEQ ID NO: 2100210 - RNA, 19 nt, Artificial Sequence
  Description of Artificial Sequence: Synthetic oligonucleotide
  Sense strand starting at position 3537 of SEQ ID NO: 1882168
gggcuaucgugcaugcaug

SEQ ID NO: 2100211 - RNA, 19 nt, Artificial Sequence
  Description of Artificial Sequence: Synthetic oligonucleotide
  Antisense strand to SEQ ID NO: 2100210
caugcaugcacgauagccc

SEQ ID NO: 2100212 - RNA, 19 nt, Artificial Sequence
  Description of Artificial Sequence: Synthetic oligonucleotide
  Sense strand starting at position 3656 of SEQ ID NO: 1882168
gagggaacaaugugguuua

SEQ ID NO: 2100213 - RNA, 19 nt, Artificial Sequence
  Description of Artificial Sequence: Synthetic oligonucleotide
  Antisense strand to SEQ ID NO: 2100212
uaaaccacauuguucccuc

SEQ ID NO: 2100214 - RNA, 19 nt, Artificial Sequence
  Description of Artificial Sequence: Synthetic oligonucleotide
  Sense strand starting at position 3661 of SEQ ID NO: 1882168
aacaaugugguuuaucgaa

SEQ ID NO: 2100215 - RNA, 19 nt, Artificial Sequence
  Description of Artificial Sequence: Synthetic oligonucleotide
  Antisense strand to SEQ ID NO: 2100214
uucgauaaaccacauuguu

SEQ ID NO: 2100216 - RNA, 19 nt, Artificial Sequence
  Description of Artificial Sequence: Synthetic oligonucleotide
  Sense strand starting at position 3663 of SEQ ID NO: 1882168
caaugugguuuaucgaaac

SEQ ID NO: 2100217 - RNA, 19 nt, Artificial Sequence
  Description of Artificial Sequence: Synthetic oligonucleotide
  Antisense strand to SEQ ID NO: 2100216
guuucgauaaaccacauug

SEQ ID NO: 2100218 - RNA, 19 nt, Artificial Sequence
  Description of Artificial Sequence: Synthetic oligonucleotide
  Sense strand starting at position 3743 of SEQ ID NO: 1882168
cccacuuuacugggagauu

SEQ ID NO: 2100219 - RNA, 19 nt, Artificial Sequence
  Description of Artificial Sequence: Synthetic oligonucleotide
  Antisense strand to SEQ ID NO: 2100218
aaucucccaguaaaguggg

SEQ ID NO: 2100220 - RNA, 19 nt, Artificial Sequence
  Description of Artificial Sequence: Synthetic oligonucleotide
  Sense strand starting at position 3744 of SEQ ID NO: 1882168
ccacuuuacugggagauuu

SEQ ID NO: 2100221 - RNA, 19 nt, Artificial Sequence
  Description of Artificial Sequence: Synthetic oligonucleotide
  Antisense strand to SEQ ID NO: 2100220
aaaucucccaguaaagugg

SEQ ID NO: 2100222 - RNA, 19 nt, Artificial Sequence
  Description of Artificial Sequence: Synthetic oligonucleotide
  Sense strand starting at position 3815 of SEQ ID NO: 1882168
caagaaagaugcuuugugu

SEQ ID NO: 2100223 - RNA, 19 nt, Artificial Sequence
  Description of Artificial Sequence: Synthetic oligonucleotide
  Antisense strand to SEQ ID NO: 2100222
acacaaagcaucuuucuug

SEQ ID NO: 2100224 - RNA, 19 nt, Artificial Sequence
  Description of Artificial Sequence: Synthetic oligonucleotide
  Sense strand starting at position 3818 of SEQ ID NO: 1882168
gaaagaugcuuugugucau

SEQ ID NO: 2100225 - RNA, 19 nt, Artificial Sequence
  Description of Artificial Sequence: Synthetic oligonucleotide
  Antisense strand to SEQ ID NO: 2100224
augacacaaagcaucuuuc

SEQ ID NO: 2100226 - RNA, 19 nt, Artificial Sequence
  Description of Artificial Sequence: Synthetic oligonucleotide
  Sense strand starting at position 3844 of SEQ ID NO: 1882168
acuugucuuccguauauuc

SEQ ID NO: 2100227 - RNA, 19 nt, Artificial Sequence
  Description of Artificial Sequence: Synthetic oligonucleotide
  Antisense strand to SEQ ID NO: 2100226
gaauauacggaagacaagu

SEQ ID NO: 2100228 - RNA, 19 nt, Artificial Sequence
  Description of Artificial Sequence: Synthetic oligonucleotide
  Sense strand starting at position 3870 of SEQ ID NO: 1882168
ugcucuugacuuuaagagu

SEQ ID NO: 2100229 - RNA, 19 nt, Artificial Sequence
  Description of Artificial Sequence: Synthetic oligonucleotide
  Antisense strand to SEQ ID NO: 2100228
acucuuaaagucaagagca

SEQ ID NO: 2100230 - RNA, 19 nt, Artificial Sequence
  Description of Artificial Sequence: Synthetic oligonucleotide
  Sense strand starting at position 58 of SEQ ID NO: 1882169
ggguaaaucaggcauagug

SEQ ID NO: 2100231 - RNA, 19 nt, Artificial Sequence
  Description of Artificial Sequence: Synthetic oligonucleotide
  Antisense strand to SEQ ID NO: 2100230
cacuaugccugauuuaccc

SEQ ID NO: 2100232 - RNA, 19 nt, Artificial Sequence
  Description of Artificial Sequence: Synthetic oligonucleotide
  Sense strand starting at position 145 of SEQ ID NO: 1882169
ggugguagggugcaauaau

SEQ ID NO: 2100233 - RNA, 19 nt, Artificial Sequence
  Description of Artificial Sequence: Synthetic oligonucleotide
  Antisense strand to SEQ ID NO: 2100232
auuauugcacccuaccacc

SEQ ID NO: 2100234 - RNA, 19 nt, Artificial Sequence
  Description of Artificial Sequence: Synthetic oligonucleotide
  Sense strand starting at position 155 of SEQ ID NO: 1882169
ugcaauaaucgugacuaua

SEQ ID NO: 2100235 - RNA, 19 nt, Artificial Sequence
  Description of Artificial Sequence: Synthetic oligonucleotide
  Antisense strand to SEQ ID NO: 2100234
uauagucacgauuauugca

SEQ ID NO: 2100236 - RNA, 19 nt, Artificial Sequence
  Description of Artificial Sequence: Synthetic oligonucleotide
  Sense strand starting at position 233 of SEQ ID NO: 1882169
aagaaauuagccuggagug

SEQ ID NO: 2100237 - RNA, 19 nt, Artificial Sequence
  Description of Artificial Sequence: Synthetic oligonucleotide
  Antisense strand to SEQ ID NO: 2100236
cacuccaggcuaauuucuu

SEQ ID NO: 2100238 - RNA, 19 nt, Artificial Sequence
  Description of Artificial Sequence: Synthetic oligonucleotide
  Sense strand starting at position 411 of SEQ ID NO: 1882169
aggaguucugccuacacuc

SEQ ID NO: 2100239 - RNA, 19 nt, Artificial Sequence
  Description of Artificial Sequence: Synthetic oligonucleotide
  Antisense strand to SEQ ID NO: 2100238
gaguguaggcagaacuccu

SEQ ID NO: 2100240 - RNA, 19 nt, Artificial Sequence
  Description of Artificial Sequence: Synthetic oligonucleotide
  Sense strand starting at position 489 of SEQ ID NO: 1882169
gguagaacaucuguacaca

SEQ ID NO: 2100241 - RNA, 19 nt, Artificial Sequence
  Description of Artificial Sequence: Synthetic oligonucleotide
  Antisense strand to SEQ ID NO: 2100240
uguguacagauguucuacc

SEQ ID NO: 2100242 - RNA, 19 nt, Artificial Sequence
  Description of Artificial Sequence: Synthetic oligonucleotide
  Sense strand starting at position 1220 of SEQ ID NO: 1882169
gaggaaguguggucccaaa

SEQ ID NO: 2100243 - RNA, 19 nt, Artificial Sequence
  Description of Artificial Sequence: Synthetic oligonucleotide
  Antisense strand to SEQ ID NO: 2100242
uuugggaccacacuuccuc

SEQ ID NO: 2100244 - RNA, 19 nt, Artificial Sequence
  Description of Artificial Sequence: Synthetic oligonucleotide
  Sense strand starting at position 2392 of SEQ ID NO: 1882169
gcauuaagauggcugguua

SEQ ID NO: 2100245 - RNA, 19 nt, Artificial Sequence
  Description of Artificial Sequence: Synthetic oligonucleotide
  Antisense strand to SEQ ID NO: 2100244
uaaccagccaucuuaaugc

SEQ ID NO: 2100246 - RNA, 19 nt, Artificial Sequence
  Description of Artificial Sequence: Synthetic oligonucleotide
  Sense strand starting at position 2393 of SEQ ID NO: 1882169
cauuaagauggcugguuau

SEQ ID NO: 2100247 - RNA, 19 nt, Artificial Sequence
  Description of Artificial Sequence: Synthetic oligonucleotide
  Antisense strand to SEQ ID NO: 2100246
auaaccagccaucuuaaug

SEQ ID NO: 2100248 - RNA, 19 nt, Artificial Sequence
  Description of Artificial Sequence: Synthetic oligonucleotide
  Sense strand starting at position 2452 of SEQ ID NO: 1882169
cggugugugccaucugcuu

SEQ ID NO: 2100249 - RNA, 19 nt, Artificial Sequence
  Description of Artificial Sequence: Synthetic oligonucleotide
  Antisense strand to SEQ ID NO: 2100248
aagcagauggcacacaccg

SEQ ID NO: 2100250 - RNA, 19 nt, Artificial Sequence
  Description of Artificial Sequence: Synthetic oligonucleotide
  Sense strand starting at position 2664 of SEQ ID NO: 1882169
gggaaugcugacgaagagu

SEQ ID NO: 2100251 - RNA, 19 nt, Artificial Sequence
  Description of Artificial Sequence: Synthetic oligonucleotide
  Antisense strand to SEQ ID NO: 2100250
acucuucgucagcauuccc

SEQ ID NO: 2100252 - RNA, 19 nt, Artificial Sequence
  Description of Artificial Sequence: Synthetic oligonucleotide
  Sense strand starting at position 2673 of SEQ ID NO: 1882169
gacgaagaguuguuccaag

SEQ ID NO: 2100253 - RNA, 19 nt, Artificial Sequence
  Description of Artificial Sequence: Synthetic oligonucleotide
  Antisense strand to SEQ ID NO: 2100252
cuuggaacaacucuucguc

SEQ ID NO: 2100254 - RNA, 19 nt, Artificial Sequence
  Description of Artificial Sequence: Synthetic oligonucleotide
  Sense strand starting at position 2719 of SEQ ID NO: 1882169
gugacagugguauaacuaa

SEQ ID NO: 2100255 - RNA, 19 nt, Artificial Sequence
  Description of Artificial Sequence: Synthetic oligonucleotide
  Antisense strand to SEQ ID NO: 2100254
uuaguuauaccacugucac

SEQ ID NO: 2100256 - RNA, 19 nt, Artificial Sequence
  Description of Artificial Sequence: Synthetic oligonucleotide
  Sense strand starting at position 2796 of SEQ ID NO: 1882169
gacuauuaccuaggaggcu

SEQ ID NO: 2100257 - RNA, 19 nt, Artificial Sequence
  Description of Artificial Sequence: Synthetic oligonucleotide
  Antisense strand to SEQ ID NO: 2100256
agccuccuagguaauaguc

SEQ ID NO: 2100258 - RNA, 19 nt, Artificial Sequence
  Description of Artificial Sequence: Synthetic oligonucleotide
  Sense strand starting at position 2828 of SEQ ID NO: 1882169
gagaauugaugucuaccga

SEQ ID NO: 2100259 - RNA, 19 nt, Artificial Sequence
  Description of Artificial Sequence: Synthetic oligonucleotide
  Antisense strand to SEQ ID NO: 2100258
ucgguagacaucaauucuc

SEQ ID NO: 2100260 - RNA, 19 nt, Artificial Sequence
  Description of Artificial Sequence: Synthetic oligonucleotide
  Sense strand starting at position 2883 of SEQ ID NO: 1882169
gaugaagagcuguauccug

SEQ ID NO: 2100261 - RNA, 19 nt, Artificial Sequence
  Description of Artificial Sequence: Synthetic oligonucleotide
  Antisense strand to SEQ ID NO: 2100260
caggauacagcucuucauc

SEQ ID NO: 2100262 - RNA, 19 nt, Artificial Sequence
  Description of Artificial Sequence: Synthetic oligonucleotide
  Sense strand starting at position 2957 of SEQ ID NO: 1882169
ccgaaagagcuuuacacgu

SEQ ID NO: 2100263 - RNA, 19 nt, Artificial Sequence
  Description of Artificial Sequence: Synthetic oligonucleotide
  Antisense strand to SEQ ID NO: 2100262
acguguaaagcucuuucgg

SEQ ID NO: 2100264 - RNA, 19 nt, Artificial Sequence
  Description of Artificial Sequence: Synthetic oligonucleotide
  Sense strand starting at position 2977 of SEQ ID NO: 1882169
gcagcuuucgucccaacuu

SEQ ID NO: 2100265 - RNA, 19 nt, Artificial Sequence
  Description of Artificial Sequence: Synthetic oligonucleotide
  Antisense strand to SEQ ID NO: 2100264
aaguugggacgaaagcugc

SEQ ID NO: 2100266 - RNA, 19 nt, Artificial Sequence
  Description of Artificial Sequence: Synthetic oligonucleotide
  Sense strand starting at position 3003 of SEQ ID NO: 1882169
gccaacaugguccagauaa

SEQ ID NO: 2100267 - RNA, 19 nt, Artificial Sequence
  Description of Artificial Sequence: Synthetic oligonucleotide
  Antisense strand to SEQ ID NO: 2100266
uuaucuggaccauguuggc

SEQ ID NO: 2100268 - RNA, 19 nt, Artificial Sequence
  Description of Artificial Sequence: Synthetic oligonucleotide
  Sense strand starting at position 3013 of SEQ ID NO: 1882169
uccagauaauucgccagau

SEQ ID NO: 2100269 - RNA, 19 nt, Artificial Sequence
  Description of Artificial Sequence: Synthetic oligonucleotide
  Antisense strand to SEQ ID NO: 2100268
aucuggcgaauuaucugga

SEQ ID NO: 2100270 - RNA, 19 nt, Artificial Sequence
  Description of Artificial Sequence: Synthetic oligonucleotide
  Sense strand starting at position 3014 of SEQ ID NO: 1882169
ccagauaauucgccagaug

SEQ ID NO: 2100271 - RNA, 19 nt, Artificial Sequence
  Description of Artificial Sequence: Synthetic oligonucleotide
  Antisense strand to SEQ ID NO: 2100270
caucuggcgaauuaucugg

SEQ ID NO: 2100272 - RNA, 19 nt, Artificial Sequence
  Description of Artificial Sequence: Synthetic oligonucleotide
  Sense strand starting at position 3015 of SEQ ID NO: 1882169
cagauaauucgccagaugu

SEQ ID NO: 2100273 - RNA, 19 nt, Artificial Sequence
  Description of Artificial Sequence: Synthetic oligonucleotide
  Antisense strand to SEQ ID NO: 2100272
acaucuggcgaauuaucug

SEQ ID NO: 2100274 - RNA, 19 nt, Artificial Sequence
  Description of Artificial Sequence: Synthetic oligonucleotide
  Sense strand starting at position 3057 of SEQ ID NO: 1882169
cggaguaaugaucagggca

SEQ ID NO: 2100275 - RNA, 19 nt, Artificial Sequence
  Description of Artificial Sequence: Synthetic oligonucleotide
  Antisense strand to SEQ ID NO: 2100274
ugcccugaucauuacuccg

SEQ ID NO: 2100276 - RNA, 19 nt, Artificial Sequence
  Description of Artificial Sequence: Synthetic oligonucleotide
  Sense strand starting at position 3060 of SEQ ID NO: 1882169
aguaaugaucagggcaugu

SEQ ID NO: 2100277 - RNA, 19 nt, Artificial Sequence
  Description of Artificial Sequence: Synthetic oligonucleotide
  Antisense strand to SEQ ID NO: 2100276
acaugcccugaucauuacu

SEQ ID NO: 2100278 - RNA, 19 nt, Artificial Sequence
  Description of Artificial Sequence: Synthetic oligonucleotide
  Sense strand starting at position 3071 of SEQ ID NO: 1882169
gggcaugugcuuuaaacac

SEQ ID NO: 2100279 - RNA, 19 nt, Artificial Sequence
  Description of Artificial Sequence: Synthetic oligonucleotide
  Antisense strand to SEQ ID NO: 2100278
guguuuaaagcacaugccc

SEQ ID NO: 2100280 - RNA, 19 nt, Artificial Sequence
  Description of Artificial Sequence: Synthetic oligonucleotide
  Sense strand starting at position 3097 of SEQ ID NO: 1882169
cccugaaacucuucuguga

SEQ ID NO: 2100281 - RNA, 19 nt, Artificial Sequence
  Description of Artificial Sequence: Synthetic oligonucleotide
  Antisense strand to SEQ ID NO: 2100280
ucacagaagaguuucaggg

SEQ ID NO: 2100282 - RNA, 19 nt, Artificial Sequence
  Description of Artificial Sequence: Synthetic oligonucleotide
  Sense strand starting at position 3101 of SEQ ID NO: 1882169
gaaacucuucugugaggug

SEQ ID NO: 2100283 - RNA, 19 nt, Artificial Sequence
  Description of Artificial Sequence: Synthetic oligonucleotide
  Antisense strand to SEQ ID NO: 2100282
caccucacagaagaguuuc

SEQ ID NO: 2100284 - RNA, 19 nt, Artificial Sequence
  Description of Artificial Sequence: Synthetic oligonucleotide
  Sense strand starting at position 3106 of SEQ ID NO: 1882169
ucuucugugagguggacaa

SEQ ID NO: 2100285 - RNA, 19 nt, Artificial Sequence
  Description of Artificial Sequence: Synthetic oligonucleotide
  Antisense strand to SEQ ID NO: 2100284
uuguccaccucacagaaga

SEQ ID NO: 2100286 - RNA, 19 nt, Artificial Sequence
  Description of Artificial Sequence: Synthetic oligonucleotide
  Sense strand starting at position 3134 of SEQ ID NO: 1882169
cuguguggugugccgagaa

SEQ ID NO: 2100287 - RNA, 19 nt, Artificial Sequence
  Description of Artificial Sequence: Synthetic oligonucleotide
  Antisense strand to SEQ ID NO: 2100286
uucucggcacaccacacag

SEQ ID NO: 2100288 - RNA, 19 nt, Artificial Sequence
  Description of Artificial Sequence: Synthetic oligonucleotide
  Sense strand starting at position 3200 of SEQ ID NO: 1882169
gcaggaguaccaggugaga

SEQ ID NO: 2100289 - RNA, 19 nt, Artificial Sequence
  Description of Artificial Sequence: Synthetic oligonucleotide
  Antisense strand to SEQ ID NO: 2100288
ucucaccugguacuccugc

SEQ ID NO: 2100290 - RNA, 19 nt, Artificial Sequence
  Description of Artificial Sequence: Synthetic oligonucleotide
  Sense strand starting at position 3437 of SEQ ID NO: 1882169
agauaauaugacggucacu

SEQ ID NO: 2100291 - RNA, 19 nt, Artificial Sequence
  Description of Artificial Sequence: Synthetic oligonucleotide
  Antisense strand to SEQ ID NO: 2100290
agugaccgucauauuaucu

SEQ ID NO: 2100292 - RNA, 19 nt, Artificial Sequence
  Description of Artificial Sequence: Synthetic oligonucleotide
  Sense strand starting at position 3541 of SEQ ID NO: 1882169
uaaugugaguccuugacca

SEQ ID NO: 2100293 - RNA, 19 nt, Artificial Sequence
  Description of Artificial Sequence: Synthetic oligonucleotide
  Antisense strand to SEQ ID NO: 2100292
uggucaaggacucacauua

SEQ ID NO: 2100294 - RNA, 19 nt, Artificial Sequence
  Description of Artificial Sequence: Synthetic oligonucleotide
  Sense strand starting at position 3545 of SEQ ID NO: 1882169
gugaguccuugaccaauuc

SEQ ID NO: 2100295 - RNA, 19 nt, Artificial Sequence
  Description of Artificial Sequence: Synthetic oligonucleotide
  Antisense strand to SEQ ID NO: 2100294
gaauuggucaaggacucac

SEQ ID NO: 2100296 - RNA, 19 nt, Artificial Sequence
  Description of Artificial Sequence: Synthetic oligonucleotide
  Sense strand starting at position 3554 of SEQ ID NO: 1882169
ugaccaauucccugggaca

SEQ ID NO: 2100297 - RNA, 19 nt, Artificial Sequence
  Description of Artificial Sequence: Synthetic oligonucleotide
  Antisense strand to SEQ ID NO: 2100296
ugucccagggaauugguca

SEQ ID NO: 2100298 - RNA, 19 nt, Artificial Sequence
  Description of Artificial Sequence: Synthetic oligonucleotide
  Sense strand starting at position 3592 of SEQ ID NO: 1882169
agccacaguacuuggagau

SEQ ID NO: 2100299 - RNA, 19 nt, Artificial Sequence
  Description of Artificial Sequence: Synthetic oligonucleotide
  Antisense strand to SEQ ID NO: 2100298
aucuccaaguacuguggcu

SEQ ID NO: 2100300 - RNA, 19 nt, Artificial Sequence
  Description of Artificial Sequence: Synthetic oligonucleotide
  Sense strand starting at position 3593 of SEQ ID NO: 1882169
gccacaguacuuggagaua

SEQ ID NO: 2100301 - RNA, 19 nt, Artificial Sequence
  Description of Artificial Sequence: Synthetic oligonucleotide
  Antisense strand to SEQ ID NO: 2100300
uaucuccaaguacuguggc

SEQ ID NO: 2100302 - RNA, 19 nt, Artificial Sequence
  Description of Artificial Sequence: Synthetic oligonucleotide
  Sense strand starting at position 3648 of SEQ ID NO: 1882169
auagauguauugguagaca

SEQ ID NO: 2100303 - RNA, 19 nt, Artificial Sequence
  Description of Artificial Sequence: Synthetic oligonucleotide
  Antisense strand to SEQ ID NO: 2100302
ugucuaccaauacaucuau

SEQ ID NO: 2100304 - RNA, 19 nt, Artificial Sequence
  Description of Artificial Sequence: Synthetic oligonucleotide
  Sense strand starting at position 3731 of SEQ ID NO: 1882169
gggauugcaucucuaccuu

SEQ ID NO: 2100305 - RNA, 19 nt, Artificial Sequence
  Description of Artificial Sequence: Synthetic oligonucleotide
  Antisense strand to SEQ ID NO: 2100304
aagguagagaugcaauccc

SEQ ID NO: 2100306 - RNA, 19 nt, Artificial Sequence
  Description of Artificial Sequence: Synthetic oligonucleotide
  Sense strand starting at position 3806 of SEQ ID NO: 1882169
aucagaaugugccucauau

SEQ ID NO: 2100307 - RNA, 19 nt, Artificial Sequence
  Description of Artificial Sequence: Synthetic oligonucleotide
  Antisense strand to SEQ ID NO: 2100306
auaugaggcacauucugau

SEQ ID NO: 2100308 - RNA, 19 nt, Artificial Sequence
  Description of Artificial Sequence: Synthetic oligonucleotide
  Sense strand starting at position 3901 of SEQ ID NO: 1882169
ccacuuacugucuagucuu

SEQ ID NO: 2100309 - RNA, 19 nt, Artificial Sequence
  Description of Artificial Sequence: Synthetic oligonucleotide
  Antisense strand to SEQ ID NO: 2100308
aagacuagacaguaagugg

SEQ ID NO: 2100310 - RNA, 19 nt, Artificial Sequence
  Description of Artificial Sequence: Synthetic oligonucleotide
  Sense strand starting at position 535 of SEQ ID NO: 1882170
ucaguaaagucaucaggaa

SEQ ID NO: 2100311 - RNA, 19 nt, Artificial Sequence
  Description of Artificial Sequence: Synthetic oligonucleotide
  Antisense strand to SEQ ID NO: 2100310
uuccugaugacuuuacuga

SEQ ID NO: 2100312 - RNA, 19 nt, Artificial Sequence
  Description of Artificial Sequence: Synthetic oligonucleotide
  Sense strand starting at position 2021 of SEQ ID NO: 1882170
caggguauugugggaugau

SEQ ID NO: 2100313 - RNA, 19 nt, Artificial Sequence
  Description of Artificial Sequence: Synthetic oligonucleotide
  Antisense strand to SEQ ID NO: 2100312
aucaucccacaauacccug

SEQ ID NO: 2100314 - RNA, 19 nt, Artificial Sequence
  Description of Artificial Sequence: Synthetic oligonucleotide
  Sense strand starting at position 2072 of SEQ ID NO: 1882170
agauuauucuggucggcag

SEQ ID NO: 2100315 - RNA, 19 nt, Artificial Sequence
  Description of Artificial Sequence: Synthetic oligonucleotide
  Antisense strand to SEQ ID NO: 2100314
cugccgaccagaauaaucu

SEQ ID NO: 2100316 - RNA, 19 nt, Artificial Sequence
  Description of Artificial Sequence: Synthetic oligonucleotide
  Sense strand starting at position 2097 of SEQ ID NO: 1882170
auuauuauauaggcagaca

SEQ ID NO: 2100317 - RNA, 19 nt, Artificial Sequence
  Description of Artificial Sequence: Synthetic oligonucleotide
  Antisense strand to SEQ ID NO: 2100316
ugucugccuauauaauaau

SEQ ID NO: 2100318 - RNA, 19 nt, Artificial Sequence
  Description of Artificial Sequence: Synthetic oligonucleotide
  Sense strand starting at position 2335 of SEQ ID NO: 1882170
ugcauucuucuggagguau

SEQ ID NO: 2100319 - RNA, 19 nt, Artificial Sequence
  Description of Artificial Sequence: Synthetic oligonucleotide
  Antisense strand to SEQ ID NO: 2100318
auaccuccagaagaaugca

SEQ ID NO: 2100320 - RNA, 19 nt, Artificial Sequence
  Description of Artificial Sequence: Synthetic oligonucleotide
  Sense strand starting at position 2337 of SEQ ID NO: 1882170
cauucuucuggagguauaa

SEQ ID NO: 2100321 - RNA, 19 nt, Artificial Sequence
  Description of Artificial Sequence: Synthetic oligonucleotide
  Antisense strand to SEQ ID NO: 2100320
uuauaccuccagaagaaug

SEQ ID NO: 2100322 - RNA, 19 nt, Artificial Sequence
  Description of Artificial Sequence: Synthetic oligonucleotide
  Sense strand starting at position 2400 of SEQ ID NO: 1882170
gugucuaugaucuauguag

SEQ ID NO: 2100323 - RNA, 19 nt, Artificial Sequence
  Description of Artificial Sequence: Synthetic oligonucleotide
  Antisense strand to SEQ ID NO: 2100322
cuacauagaucauagacac

SEQ ID NO: 2100324 - RNA, 19 nt, Artificial Sequence
  Description of Artificial Sequence: Synthetic oligonucleotide
  Sense strand starting at position 2402 of SEQ ID NO: 1882170
gucuaugaucuauguagag

SEQ ID NO: 2100325 - RNA, 19 nt, Artificial Sequence
  Description of Artificial Sequence: Synthetic oligonucleotide
  Antisense strand to SEQ ID NO: 2100324
cucuacauagaucauagac

SEQ ID NO: 2100326 - RNA, 19 nt, Artificial Sequence
  Description of Artificial Sequence: Synthetic oligonucleotide
  Sense strand starting at position 2442 of SEQ ID NO: 1882170
caggguaucucuuucuaag

SEQ ID NO: 2100327 - RNA, 19 nt, Artificial Sequence
  Description of Artificial Sequence: Synthetic oligonucleotide
  Antisense strand to SEQ ID NO: 2100326
cuuagaaagagauacccug

SEQ ID NO: 2100328 - RNA, 19 nt, Artificial Sequence
  Description of Artificial Sequence: Synthetic oligonucleotide
  Sense strand starting at position 2534 of SEQ ID NO: 1882170
guaauuaugugaccucuua

SEQ ID NO: 2100329 - RNA, 19 nt, Artificial Sequence
  Description of Artificial Sequence: Synthetic oligonucleotide
  Antisense strand to SEQ ID NO: 2100328
uaagaggucacauaauuac

SEQ ID NO: 2100330 - RNA, 19 nt, Artificial Sequence
  Description of Artificial Sequence: Synthetic oligonucleotide
  Sense strand starting at position 2546 of SEQ ID NO: 1882170
ccucuuagaucaccuggau

SEQ ID NO: 2100331 - RNA, 19 nt, Artificial Sequence
  Description of Artificial Sequence: Synthetic oligonucleotide
  Antisense strand to SEQ ID NO: 2100330
auccaggugaucuaagagg

SEQ ID NO: 2100332 - RNA, 19 nt, Artificial Sequence
  Description of Artificial Sequence: Synthetic oligonucleotide
  Sense strand starting at position 2549 of SEQ ID NO: 1882170
cuuagaucaccuggauuau

SEQ ID NO: 2100333 - RNA, 19 nt, Artificial Sequence
  Description of Artificial Sequence: Synthetic oligonucleotide
  Antisense strand to SEQ ID NO: 2100332
auaauccaggugaucuaag

SEQ ID NO: 2100334 - RNA, 19 nt, Artificial Sequence
  Description of Artificial Sequence: Synthetic oligonucleotide
  Sense strand starting at position 2561 of SEQ ID NO: 1882170
ggauuauauuacuugucug

SEQ ID NO: 2100335 - RNA, 19 nt, Artificial Sequence
  Description of Artificial Sequence: Synthetic oligonucleotide
  Antisense strand to SEQ ID NO: 2100334
cagacaaguaauauaaucc

SEQ ID NO: 2100336 - RNA, 19 nt, Artificial Sequence
  Description of Artificial Sequence: Synthetic oligonucleotide
  Sense strand starting at position 2702 of SEQ ID NO: 1882170
acaguaucugaagguaaua

SEQ ID NO: 2100337 - RNA, 19 nt, Artificial Sequence
  Description of Artificial Sequence: Synthetic oligonucleotide
  Antisense strand to SEQ ID NO: 2100336
uauuaccuucagauacugu

SEQ ID NO: 2100338 - RNA, 19 nt, Artificial Sequence
  Description of Artificial Sequence: Synthetic oligonucleotide
  Sense strand starting at position 2714 of SEQ ID NO: 1882170
gguaauaugcucuaaacau

SEQ ID NO: 2100339 - RNA, 19 nt, Artificial Sequence
  Description of Artificial Sequence: Synthetic oligonucleotide
  Antisense strand to SEQ ID NO: 2100338
auguuuagagcauauuacc

SEQ ID NO: 2100340 - RNA, 19 nt, Artificial Sequence
  Description of Artificial Sequence: Synthetic oligonucleotide
  Sense strand starting at position 2992 of SEQ ID NO: 1882170
uuaccuuuccaguagcauu

SEQ ID NO: 2100341 - RNA, 19 nt, Artificial Sequence
  Description of Artificial Sequence: Synthetic oligonucleotide
  Antisense strand to SEQ ID NO: 2100340
aaugcuacuggaaagguaa

SEQ ID NO: 2100342 - RNA, 19 nt, Artificial Sequence
  Description of Artificial Sequence: Synthetic oligonucleotide
  Sense strand starting at position 3011 of SEQ ID NO: 1882170
ugaagugauuugcaauaaa

SEQ ID NO: 2100343 - RNA, 19 nt, Artificial Sequence
  Description of Artificial Sequence: Synthetic oligonucleotide
  Antisense strand to SEQ ID NO: 2100342
uuuauugcaaaucacuuca

SEQ ID NO: 2100344 - RNA, 19 nt, Artificial Sequence
  Description of Artificial Sequence: Synthetic oligonucleotide
  Sense strand starting at position 3025 of SEQ ID NO: 1882170
auaaauacauuggugucaa

SEQ ID NO: 2100345 - RNA, 19 nt, Artificial Sequence
  Description of Artificial Sequence: Synthetic oligonucleotide
  Antisense strand to SEQ ID NO: 2100344
uugacaccaauguauuuau

SEQ ID NO: 2100346 - RNA, 19 nt, Artificial Sequence
  Description of Artificial Sequence: Synthetic oligonucleotide
  Sense strand starting at position 3085 of SEQ ID NO: 1882170
aaggaauagggcgguuaga

SEQ ID NO: 2100347 - RNA, 19 nt, Artificial Sequence
  Description of Artificial Sequence: Synthetic oligonucleotide
  Antisense strand to SEQ ID NO: 2100346
ucuaaccgcccuauuccuu

SEQ ID NO: 2100348 - RNA, 19 nt, Artificial Sequence
  Description of Artificial Sequence: Synthetic oligonucleotide
  Sense strand starting at position 3143 of SEQ ID NO: 1882170
acuggagaauuauaacaau

SEQ ID NO: 2100349 - RNA, 19 nt, Artificial Sequence
  Description of Artificial Sequence: Synthetic oligonucleotide
  Antisense strand to SEQ ID NO: 2100348
auuguuauaauucuccagu

SEQ ID NO: 2100350 - RNA, 19 nt, Artificial Sequence
  Description of Artificial Sequence: Synthetic oligonucleotide
  Sense strand starting at position 3146 of SEQ ID NO: 1882170
ggagaauuauaacaauuga

SEQ ID NO: 2100351 - RNA, 19 nt, Artificial Sequence
  Description of Artificial Sequence: Synthetic oligonucleotide
  Antisense strand to SEQ ID NO: 2100350
ucaauuguuauaauucucc

SEQ ID NO: 2100352 - RNA, 19 nt, Artificial Sequence
  Description of Artificial Sequence: Synthetic oligonucleotide
  Sense strand starting at position 3262 of SEQ ID NO: 1882170
uuaagcuuauggucaucau

SEQ ID NO: 2100353 - RNA, 19 nt, Artificial Sequence
  Description of Artificial Sequence: Synthetic oligonucleotide
  Antisense strand to SEQ ID NO: 2100352
augaugaccauaagcuuaa

SEQ ID NO: 2100354 - RNA, 19 nt, Artificial Sequence
  Description of Artificial Sequence: Synthetic oligonucleotide
  Sense strand starting at position 3265 of SEQ ID NO: 1882170
agcuuauggucaucaucau

SEQ ID NO: 2100355 - RNA, 19 nt, Artificial Sequence
  Description of Artificial Sequence: Synthetic oligonucleotide
  Antisense strand to SEQ ID NO: 2100354
augaugaugaccauaagcu

SEQ ID NO: 2100356 - RNA, 19 nt, Artificial Sequence
  Description of Artificial Sequence: Synthetic oligonucleotide
  Sense strand starting at position 3266 of SEQ ID NO: 1882170
gcuuauggucaucaucaua

SEQ ID NO: 2100357 - RNA, 19 nt, Artificial Sequence
  Description of Artificial Sequence: Synthetic oligonucleotide
  Antisense strand to SEQ ID NO: 2100356
uaugaugaugaccauaagc

SEQ ID NO: 2100358 - RNA, 19 nt, Artificial Sequence
  Description of Artificial Sequence: Synthetic oligonucleotide
  Sense strand starting at position 3295 of SEQ ID NO: 1882170
ggcugucuucuguacuaca

SEQ ID NO: 2100359 - RNA, 19 nt, Artificial Sequence
  Description of Artificial Sequence: Synthetic oligonucleotide
  Antisense strand to SEQ ID NO: 2100358
uguaguacagaagacagcc

SEQ ID NO: 2100360 - RNA, 19 nt, Artificial Sequence
  Description of Artificial Sequence: Synthetic oligonucleotide
  Sense strand starting at position 3300 of SEQ ID NO: 1882170
ucuucuguacuacauguaa

SEQ ID NO: 2100361 - RNA, 19 nt, Artificial Sequence
  Description of Artificial Sequence: Synthetic oligonucleotide
  Antisense strand to SEQ ID NO: 2100360
uuacauguaguacagaaga

SEQ ID NO: 2100362 - RNA, 19 nt, Artificial Sequence
  Description of Artificial Sequence: Synthetic oligonucleotide
  Sense strand starting at position 3329 of SEQ ID NO: 1882170
augaauucucaaugugcuu

SEQ ID NO: 2100363 - RNA, 19 nt, Artificial Sequence
  Description of Artificial Sequence: Synthetic oligonucleotide
  Antisense strand to SEQ ID NO: 2100362
aagcacauugagaauucau

SEQ ID NO: 2100364 - RNA, 19 nt, Artificial Sequence
  Description of Artificial Sequence: Synthetic oligonucleotide
  Sense strand starting at position 3335 of SEQ ID NO: 1882170
ucucaaugugcuuaagcau

SEQ ID NO: 2100365 - RNA, 19 nt, Artificial Sequence
  Description of Artificial Sequence: Synthetic oligonucleotide
  Antisense strand to SEQ ID NO: 2100364
augcuuaagcacauugaga

SEQ ID NO: 2100366 - RNA, 19 nt, Artificial Sequence
  Description of Artificial Sequence: Synthetic oligonucleotide
  Sense strand starting at position 3341 of SEQ ID NO: 1882170
ugugcuuaagcauauuaac

SEQ ID NO: 2100367 - RNA, 19 nt, Artificial Sequence
  Description of Artificial Sequence: Synthetic oligonucleotide
  Antisense strand to SEQ ID NO: 2100366
guuaauaugcuuaagcaca

SEQ ID NO: 2100368 - RNA, 19 nt, Artificial Sequence
  Description of Artificial Sequence: Synthetic oligonucleotide
  Sense strand starting at position 3454 of SEQ ID NO: 1882170
cuggaaucugcuuaugucu

SEQ ID NO: 2100369 - RNA, 19 nt, Artificial Sequence
  Description of Artificial Sequence: Synthetic oligonucleotide
  Antisense strand to SEQ ID NO: 2100368
agacauaagcagauuccag

SEQ ID NO: 2100370 - RNA, 19 nt, Artificial Sequence
  Description of Artificial Sequence: Synthetic oligonucleotide
  Sense strand starting at position 3575 of SEQ ID NO: 1882170
agugaacaguaucugcaua

SEQ ID NO: 2100371 - RNA, 19 nt, Artificial Sequence
  Description of Artificial Sequence: Synthetic oligonucleotide
  Antisense strand to SEQ ID NO: 2100370
uaugcagauacuguucacu

SEQ ID NO: 2100372 - RNA, 19 nt, Artificial Sequence
  Description of Artificial Sequence: Synthetic oligonucleotide
  Sense strand starting at position 3602 of SEQ ID NO: 1882170
gggaaauccuagguuaggu

SEQ ID NO: 2100373 - RNA, 19 nt, Artificial Sequence
  Description of Artificial Sequence: Synthetic oligonucleotide
  Antisense strand to SEQ ID NO: 2100372
accuaaccuaggauuuccc

SEQ ID NO: 2100374 - RNA, 19 nt, Artificial Sequence
  Description of Artificial Sequence: Synthetic oligonucleotide
  Sense strand starting at position 3612 of SEQ ID NO: 1882170
agguuaggucaagaauggu

SEQ ID NO: 2100375 - RNA, 19 nt, Artificial Sequence
  Description of Artificial Sequence: Synthetic oligonucleotide
  Antisense strand to SEQ ID NO: 2100374
accauucuugaccuaaccu

SEQ ID NO: 2100376 - RNA, 19 nt, Artificial Sequence
  Description of Artificial Sequence: Synthetic oligonucleotide
  Sense strand starting at position 3629 of SEQ ID NO: 1882170
gugugucuuccauauggaa

SEQ ID NO: 2100377 - RNA, 19 nt, Artificial Sequence
  Description of Artificial Sequence: Synthetic oligonucleotide
  Antisense strand to SEQ ID NO: 2100376
uuccauauggaagacacac

SEQ ID NO: 2100378 - RNA, 19 nt, Artificial Sequence
  Description of Artificial Sequence: Synthetic oligonucleotide
  Sense strand starting at position 3663 of SEQ ID NO: 1882170
uuuguaacacucugugauu

SEQ ID NO: 2100379 - RNA, 19 nt, Artificial Sequence
  Description of Artificial Sequence: Synthetic oligonucleotide
  Antisense strand to SEQ ID NO: 2100378
aaucacagaguguuacaaa

SEQ ID NO: 2100380 - RNA, 19 nt, Artificial Sequence
  Description of Artificial Sequence: Synthetic oligonucleotide
  Sense strand starting at position 3664 of SEQ ID NO: 1882170
uuguaacacucugugauua

SEQ ID NO: 2100381 - RNA, 19 nt, Artificial Sequence
  Description of Artificial Sequence: Synthetic oligonucleotide
  Antisense strand to SEQ ID NO: 2100380
uaaucacagaguguuacaa

SEQ ID NO: 2100382 - RNA, 19 nt, Artificial Sequence
  Description of Artificial Sequence: Synthetic oligonucleotide
  Sense strand starting at position 3672 of SEQ ID NO: 1882170
cucugugauuacucaggaa

SEQ ID NO: 2100383 - RNA, 19 nt, Artificial Sequence
  Description of Artificial Sequence: Synthetic oligonucleotide
  Antisense strand to SEQ ID NO: 2100382
uuccugaguaaucacagag

SEQ ID NO: 2100384 - RNA, 19 nt, Artificial Sequence
  Description of Artificial Sequence: Synthetic oligonucleotide
  Sense strand starting at position 3676 of SEQ ID NO: 1882170
gugauuacucaggaagcuu

SEQ ID NO: 2100385 - RNA, 19 nt, Artificial Sequence
  Description of Artificial Sequence: Synthetic oligonucleotide
  Antisense strand to SEQ ID NO: 2100384
aagcuuccugaguaaucac

SEQ ID NO: 2100386 - RNA, 19 nt, Artificial Sequence
  Description of Artificial Sequence: Synthetic oligonucleotide
  Sense strand starting at position 3921 of SEQ ID NO: 1882170
uuccuugaauuguccugaa

SEQ ID NO: 2100387 - RNA, 19 nt, Artificial Sequence
  Description of Artificial Sequence: Synthetic oligonucleotide
  Antisense strand to SEQ ID NO: 2100386
uucaggacaauucaaggaa

SEQ ID NO: 2100388 - RNA, 19 nt, Artificial Sequence
  Description of Artificial Sequence: Synthetic oligonucleotide
  Sense strand starting at position 3942 of SEQ ID NO: 1882170
uuuaaaguagccuagaacu

SEQ ID NO: 2100389 - RNA, 19 nt, Artificial Sequence
  Description of Artificial Sequence: Synthetic oligonucleotide
  Antisense strand to SEQ ID NO: 2100388
aguucuaggcuacuuuaaa

SEQ ID NO: 2100390 - RNA, 19 nt, Artificial Sequence
  Description of Artificial Sequence: Synthetic oligonucleotide
  Sense strand starting at position 152 of SEQ ID NO: 1882171
agagaagcuugauccucaa

SEQ ID NO: 2100391 - RNA, 19 nt, Artificial Sequence
  Description of Artificial Sequence: Synthetic oligonucleotide
  Antisense strand to SEQ ID NO: 2100390
uugaggaucaagcuucucu

SEQ ID NO: 2100392 - RNA, 19 nt, Artificial Sequence
  Description of Artificial Sequence: Synthetic oligonucleotide
  Sense strand starting at position 261 of SEQ ID NO: 1882171
aaaggaagaucagaagaga

SEQ ID NO: 2100393 - RNA, 19 nt, Artificial Sequence
  Description of Artificial Sequence: Synthetic oligonucleotide
  Antisense strand to SEQ ID NO: 2100392
ucucuucugaucuuccuuu

SEQ ID NO: 2100394 - RNA, 19 nt, Artificial Sequence
  Description of Artificial Sequence: Synthetic oligonucleotide
  Sense strand starting at position 328 of SEQ ID NO: 1882171
ggaguagagaaguaguguu

SEQ ID NO: 2100395 - RNA, 19 nt, Artificial Sequence
  Description of Artificial Sequence: Synthetic oligonucleotide
  Antisense strand to SEQ ID NO: 2100394
aacacuacuucucuacucc

SEQ ID NO: 2100396 - RNA, 19 nt, Artificial Sequence
  Description of Artificial Sequence: Synthetic oligonucleotide
  Sense strand starting at position 354 of SEQ ID NO: 1882171
cugaaugacucaguuuacu

SEQ ID NO: 2100397 - RNA, 19 nt, Artificial Sequence
  Description of Artificial Sequence: Synthetic oligonucleotide
  Antisense strand to SEQ ID NO: 2100396
aguaaacugagucauucag

SEQ ID NO: 2100398 - RNA, 19 nt, Artificial Sequence
  Description of Artificial Sequence: Synthetic oligonucleotide
  Sense strand starting at position 583 of SEQ ID NO: 1882171
cuucuuggagccugaggaa

SEQ ID NO: 2100399 - RNA, 19 nt, Artificial Sequence
  Description of Artificial Sequence: Synthetic oligonucleotide
  Antisense strand to SEQ ID NO: 2100398
uuccucaggcuccaagaag

SEQ ID NO: 2100400 - RNA, 19 nt, Artificial Sequence
  Description of Artificial Sequence: Synthetic oligonucleotide
  Sense strand starting at position 738 of SEQ ID NO: 1882171
agggcuucagaguggaagu

SEQ ID NO: 2100401 - RNA, 19 nt, Artificial Sequence
  Description of Artificial Sequence: Synthetic oligonucleotide
  Antisense strand to SEQ ID NO: 2100400
acuuccacucugaagcccu

SEQ ID NO: 2100402 - RNA, 19 nt, Artificial Sequence
  Description of Artificial Sequence: Synthetic oligonucleotide
  Sense strand starting at position 794 of SEQ ID NO: 1882171
uuaauuccucaugggacau

SEQ ID NO: 2100403 - RNA, 19 nt, Artificial Sequence
  Description of Artificial Sequence: Synthetic oligonucleotide
  Antisense strand to SEQ ID NO: 2100402
augucccaugaggaauuaa

SEQ ID NO: 2100404 - RNA, 19 nt, Artificial Sequence
  Description of Artificial Sequence: Synthetic oligonucleotide
  Sense strand starting at position 865 of SEQ ID NO: 1882171
uugcccucucaggaaauga

SEQ ID NO: 2100405 - RNA, 19 nt, Artificial Sequence
  Description of Artificial Sequence: Synthetic oligonucleotide
  Antisense strand to SEQ ID NO: 2100404
ucauuuccugagagggcaa

SEQ ID NO: 2100406 - RNA, 19 nt, Artificial Sequence
  Description of Artificial Sequence: Synthetic oligonucleotide
  Sense strand starting at position 967 of SEQ ID NO: 1882171
aacccacuauggguugaaa

SEQ ID NO: 2100407 - RNA, 19 nt, Artificial Sequence
  Description of Artificial Sequence: Synthetic oligonucleotide
  Antisense strand to SEQ ID NO: 2100406
uuucaacccauaguggguu

SEQ ID NO: 2100408 - RNA, 19 nt, Artificial Sequence
  Description of Artificial Sequence: Synthetic oligonucleotide
  Sense strand starting at position 969 of SEQ ID NO: 1882171
cccacuauggguugaaaua

SEQ ID NO: 2100409 - RNA, 19 nt, Artificial Sequence
  Description of Artificial Sequence: Synthetic oligonucleotide
  Antisense strand to SEQ ID NO: 2100408
uauuucaacccauaguggg

SEQ ID NO: 2100410 - RNA, 19 nt, Artificial Sequence
  Description of Artificial Sequence: Synthetic oligonucleotide
  Sense strand starting at position 999 of SEQ ID NO: 1882171
aagcucgauccugagauga

SEQ ID NO: 2100411 - RNA, 19 nt, Artificial Sequence
  Description of Artificial Sequence: Synthetic oligonucleotide
  Antisense strand to SEQ ID NO: 2100410
ucaucucaggaucgagcuu

SEQ ID NO: 2100412 - RNA, 19 nt, Artificial Sequence
  Description of Artificial Sequence: Synthetic oligonucleotide
  Sense strand starting at position 1009 of SEQ ID NO: 1882171
cugagaugaucccuuuaug

SEQ ID NO: 2100413 - RNA, 19 nt, Artificial Sequence
  Description of Artificial Sequence: Synthetic oligonucleotide
  Antisense strand to SEQ ID NO: 2100412
cauaaagggaucaucucag

SEQ ID NO: 2100414 - RNA, 19 nt, Artificial Sequence
  Description of Artificial Sequence: Synthetic oligonucleotide
  Sense strand starting at position 1012 of SEQ ID NO: 1882171
agaugaucccuuuauguuc

SEQ ID NO: 2100415 - RNA, 19 nt, Artificial Sequence
  Description of Artificial Sequence: Synthetic oligonucleotide
  Antisense strand to SEQ ID NO: 2100414
gaacauaaagggaucaucu

SEQ ID NO: 2100416 - RNA, 19 nt, Artificial Sequence
  Description of Artificial Sequence: Synthetic oligonucleotide
  Sense strand starting at position 1247 of SEQ ID NO: 1882171
uggcauugcagccaugaaa

SEQ ID NO: 2100417 - RNA, 19 nt, Artificial Sequence
  Description of Artificial Sequence: Synthetic oligonucleotide
  Antisense strand to SEQ ID NO: 2100416
uuucauggcugcaaugcca

SEQ ID NO: 2100418 - RNA, 19 nt, Artificial Sequence
  Description of Artificial Sequence: Synthetic oligonucleotide
  Sense strand starting at position 1371 of SEQ ID NO: 1882171
cuguuucuacuggaagcua

SEQ ID NO: 2100419 - RNA, 19 nt, Artificial Sequence
  Description of Artificial Sequence: Synthetic oligonucleotide
  Antisense strand to SEQ ID NO: 2100418
uagcuuccaguagaaacag

SEQ ID NO: 2100420 - RNA, 19 nt, Artificial Sequence
  Description of Artificial Sequence: Synthetic oligonucleotide
  Sense strand starting at position 1484 of SEQ ID NO: 1882171
ugggaugagucucaaauuu

SEQ ID NO: 2100421 - RNA, 19 nt, Artificial Sequence
  Description of Artificial Sequence: Synthetic oligonucleotide
  Antisense strand to SEQ ID NO: 2100420
aaauuugagacucauccca

SEQ ID NO: 2100422 - RNA, 19 nt, Artificial Sequence
  Description of Artificial Sequence: Synthetic oligonucleotide
  Sense strand starting at position 1680 of SEQ ID NO: 1882171
cguggaugacucugaucaa

SEQ ID NO: 2100423 - RNA, 19 nt, Artificial Sequence
  Description of Artificial Sequence: Synthetic oligonucleotide
  Antisense strand to SEQ ID NO: 2100422
uugaucagagucauccacg

SEQ ID NO: 2100424 - RNA, 19 nt, Artificial Sequence
  Description of Artificial Sequence: Synthetic oligonucleotide
  Sense strand starting at position 2045 of SEQ ID NO: 1882171
ugcuccauuggauaaucua

SEQ ID NO: 2100425 - RNA, 19 nt, Artificial Sequence
  Description of Artificial Sequence: Synthetic oligonucleotide
  Antisense strand to SEQ ID NO: 2100424
uagauuauccaauggagca

SEQ ID NO: 2100426 - RNA, 19 nt, Artificial Sequence
  Description of Artificial Sequence: Synthetic oligonucleotide
  Sense strand starting at position 2161 of SEQ ID NO: 1882171
aaauccuuacugugaguga

SEQ ID NO: 2100427 - RNA, 19 nt, Artificial Sequence
  Description of Artificial Sequence: Synthetic oligonucleotide
  Antisense strand to SEQ ID NO: 2100426
ucacucacaguaaggauuu

SEQ ID NO: 2100428 - RNA, 19 nt, Artificial Sequence
  Description of Artificial Sequence: Synthetic oligonucleotide
  Sense strand starting at position 2165 of SEQ ID NO: 1882171
ccuuacugugagugaggaa

SEQ ID NO: 2100429 - RNA, 19 nt, Artificial Sequence
  Description of Artificial Sequence: Synthetic oligonucleotide
  Antisense strand to SEQ ID NO: 2100428
uuccucacucacaguaagg

SEQ ID NO: 2100430 - RNA, 19 nt, Artificial Sequence
  Description of Artificial Sequence: Synthetic oligonucleotide
  Sense strand starting at position 2166 of SEQ ID NO: 1882171
cuuacugugagugaggaau

SEQ ID NO: 2100431 - RNA, 19 nt, Artificial Sequence
  Description of Artificial Sequence: Synthetic oligonucleotide
  Antisense strand to SEQ ID NO: 2100430
auuccucacucacaguaag

SEQ ID NO: 2100432 - RNA, 19 nt, Artificial Sequence
  Description of Artificial Sequence: Synthetic oligonucleotide
  Sense strand starting at position 2197 of SEQ ID NO: 1882171
aguaaaucgagcugaugaa

SEQ ID NO: 2100433 - RNA, 19 nt, Artificial Sequence
  Description of Artificial Sequence: Synthetic oligonucleotide
  Antisense strand to SEQ ID NO: 2100432
uucaucagcucgauuuacu

SEQ ID NO: 2100434 - RNA, 19 nt, Artificial Sequence
  Description of Artificial Sequence: Synthetic oligonucleotide
  Sense strand starting at position 2198 of SEQ ID NO: 1882171
guaaaucgagcugaugaaa

SEQ ID NO: 2100435 - RNA, 19 nt, Artificial Sequence
  Description of Artificial Sequence: Synthetic oligonucleotide
  Antisense strand to SEQ ID NO: 2100434
uuucaucagcucgauuuac

SEQ ID NO: 2100436 - RNA, 19 nt, Artificial Sequence
  Description of Artificial Sequence: Synthetic oligonucleotide
  Sense strand starting at position 2318 of SEQ ID NO: 1882171
cgcgaucuauuuccugaga

SEQ ID NO: 2100437 - RNA, 19 nt, Artificial Sequence
  Description of Artificial Sequence: Synthetic oligonucleotide
  Antisense strand to SEQ ID NO: 2100436
ucucaggaaauagaucgcg

SEQ ID NO: 2100438 - RNA, 19 nt, Artificial Sequence
  Description of Artificial Sequence: Synthetic oligonucleotide
  Sense strand starting at position 2323 of SEQ ID NO: 1882171
ucuauuuccugagagacuu

SEQ ID NO: 2100439 - RNA, 19 nt, Artificial Sequence
  Description of Artificial Sequence: Synthetic oligonucleotide
  Antisense strand to SEQ ID NO: 2100438
aagucucucaggaaauaga

SEQ ID NO: 2100440 - RNA, 19 nt, Artificial Sequence
  Description of Artificial Sequence: Synthetic oligonucleotide
  Sense strand starting at position 2439 of SEQ ID NO: 1882171
gucucuuuagaagguaaca

SEQ ID NO: 2100441 - RNA, 19 nt, Artificial Sequence
  Description of Artificial Sequence: Synthetic oligonucleotide
  Antisense strand to SEQ ID NO: 2100440
uguuaccuucuaaagagac

SEQ ID NO: 2100442 - RNA, 19 nt, Artificial Sequence
  Description of Artificial Sequence: Synthetic oligonucleotide
  Sense strand starting at position 2495 of SEQ ID NO: 1882171
caggucugucccuggagga

SEQ ID NO: 2100443 - RNA, 19 nt, Artificial Sequence
  Description of Artificial Sequence: Synthetic oligonucleotide
  Antisense strand to SEQ ID NO: 2100442
uccuccagggacagaccug

SEQ ID NO: 2100444 - RNA, 19 nt, Artificial Sequence
  Description of Artificial Sequence: Synthetic oligonucleotide
  Sense strand starting at position 2542 of SEQ ID NO: 1882171
cugaaugaguauccugaaa

SEQ ID NO: 2100445 - RNA, 19 nt, Artificial Sequence
  Description of Artificial Sequence: Synthetic oligonucleotide
  Antisense strand to SEQ ID NO: 2100444
uuucaggauacucauucag

SEQ ID NO: 2100446 - RNA, 19 nt, Artificial Sequence
  Description of Artificial Sequence: Synthetic oligonucleotide
  Sense strand starting at position 2565 of SEQ ID NO: 1882171
acuggugaaucuuuccaua

SEQ ID NO: 2100447 - RNA, 19 nt, Artificial Sequence
  Description of Artificial Sequence: Synthetic oligonucleotide
  Antisense strand to SEQ ID NO: 2100446
uauggaaagauucaccagu

SEQ ID NO: 2100448 - RNA, 19 nt, Artificial Sequence
  Description of Artificial Sequence: Synthetic oligonucleotide
  Sense strand starting at position 2567 of SEQ ID NO: 1882171
uggugaaucuuuccauaau

SEQ ID NO: 2100449 - RNA, 19 nt, Artificial Sequence
  Description of Artificial Sequence: Synthetic oligonucleotide
  Antisense strand to SEQ ID NO: 2100448
auuauggaaagauucacca

SEQ ID NO: 2100450 - RNA, 19 nt, Artificial Sequence
  Description of Artificial Sequence: Synthetic oligonucleotide
  Sense strand starting at position 2744 of SEQ ID NO: 1882171
agagaaauccuugguugca

SEQ ID NO: 2100451 - RNA, 19 nt, Artificial Sequence
  Description of Artificial Sequence: Synthetic oligonucleotide
  Antisense strand to SEQ ID NO: 2100450
ugcaaccaaggauuucucu

SEQ ID NO: 2100452 - RNA, 19 nt, Artificial Sequence
  Description of Artificial Sequence: Synthetic oligonucleotide
  Sense strand starting at position 2745 of SEQ ID NO: 1882171
gagaaauccuugguugcag

SEQ ID NO: 2100453 - RNA, 19 nt, Artificial Sequence
  Description of Artificial Sequence: Synthetic oligonucleotide
  Antisense strand to SEQ ID NO: 2100452
cugcaaccaaggauuucuc

SEQ ID NO: 2100454 - RNA, 19 nt, Artificial Sequence
  Description of Artificial Sequence: Synthetic oligonucleotide
  Sense strand starting at position 2965 of SEQ ID NO: 1882171
cgagguuuaccagacauca

SEQ ID NO: 2100455 - RNA, 19 nt, Artificial Sequence
  Description of Artificial Sequence: Synthetic oligonucleotide
  Antisense strand to SEQ ID NO: 2100454
ugaugucugguaaaccucg

SEQ ID NO: 2100456 - RNA, 19 nt, Artificial Sequence
  Description of Artificial Sequence: Synthetic oligonucleotide
  Sense strand starting at position 3038 of SEQ ID NO: 1882171
aggauuuguuaucaaacuc

SEQ ID NO: 2100457 - RNA, 19 nt, Artificial Sequence
  Description of Artificial Sequence: Synthetic oligonucleotide
  Antisense strand to SEQ ID NO: 2100456
gaguuugauaacaaauccu

SEQ ID NO: 2100458 - RNA, 19 nt, Artificial Sequence
  Description of Artificial Sequence: Synthetic oligonucleotide
  Sense strand starting at position 3383 of SEQ ID NO: 1882171
ccuggcugauagcuauuua

SEQ ID NO: 2100459 - RNA, 19 nt, Artificial Sequence
  Description of Artificial Sequence: Synthetic oligonucleotide
  Antisense strand to SEQ ID NO: 2100458
uaaauagcuaucagccagg

SEQ ID NO: 2100460 - RNA, 19 nt, Artificial Sequence
  Description of Artificial Sequence: Synthetic oligonucleotide
  Sense strand starting at position 3474 of SEQ ID NO: 1882171
uggcaaauguuacuaagaa

SEQ ID NO: 2100461 - RNA, 19 nt, Artificial Sequence
  Description of Artificial Sequence: Synthetic oligonucleotide
  Antisense strand to SEQ ID NO: 2100460
uucuuaguaacauuugcca

SEQ ID NO: 2100462 - RNA, 19 nt, Artificial Sequence
  Description of Artificial Sequence: Synthetic oligonucleotide
  Sense strand starting at position 3551 of SEQ ID NO: 1882171
gcaugauuccaauggacuc

SEQ ID NO: 2100463 - RNA, 19 nt, Artificial Sequence
  Description of Artificial Sequence: Synthetic oligonucleotide
  Antisense strand to SEQ ID NO: 2100462
gaguccauuggaaucaugc

SEQ ID NO: 2100464 - RNA, 19 nt, Artificial Sequence
  Description of Artificial Sequence: Synthetic oligonucleotide
  Sense strand starting at position 3632 of SEQ ID NO: 1882171
uguugcuuuggagaagagu

SEQ ID NO: 2100465 - RNA, 19 nt, Artificial Sequence
  Description of Artificial Sequence: Synthetic oligonucleotide
  Antisense strand to SEQ ID NO: 2100464
acucuucuccaaagcaaca

SEQ ID NO: 2100466 - RNA, 19 nt, Artificial Sequence
  Description of Artificial Sequence: Synthetic oligonucleotide
  Sense strand starting at position 3643 of SEQ ID NO: 1882171
agaagaguucuauguaauu

SEQ ID NO: 2100467 - RNA, 19 nt, Artificial Sequence
  Description of Artificial Sequence: Synthetic oligonucleotide
  Antisense strand to SEQ ID NO: 2100466
aauuacauagaacucuucu

SEQ ID NO: 2100468 - RNA, 19 nt, Artificial Sequence
  Description of Artificial Sequence: Synthetic oligonucleotide
  Sense strand starting at position 3770 of SEQ ID NO: 1882171
ggccauccuggccaauaua

SEQ ID NO: 2100469 - RNA, 19 nt, Artificial Sequence
  Description of Artificial Sequence: Synthetic oligonucleotide
  Antisense strand to SEQ ID NO: 2100468
uauauuggccaggauggcc

SEQ ID NO: 2100470 - RNA, 19 nt, Artificial Sequence
  Description of Artificial Sequence: Synthetic oligonucleotide
  Sense strand starting at position 102 of SEQ ID NO: 1882172
ggccauguacuggaauagu

SEQ ID NO: 2100471 - RNA, 19 nt, Artificial Sequence
  Description of Artificial Sequence: Synthetic oligonucleotide
  Antisense strand to SEQ ID NO: 2100470
acuauuccaguacauggcc

SEQ ID NO: 2100472 - RNA, 19 nt, Artificial Sequence
  Description of Artificial Sequence: Synthetic oligonucleotide
  Sense strand starting at position 130 of SEQ ID NO: 1882172
ucaguaaagauggguggau

SEQ ID NO: 2100473 - RNA, 19 nt, Artificial Sequence
  Description of Artificial Sequence: Synthetic oligonucleotide
  Antisense strand to SEQ ID NO: 2100472
auccacccaucuuuacuga

SEQ ID NO: 2100474 - RNA, 19 nt, Artificial Sequence
  Description of Artificial Sequence: Synthetic oligonucleotide
  Sense strand starting at position 131 of SEQ ID NO: 1882172
caguaaagauggguggauu

SEQ ID NO: 2100475 - RNA, 19 nt, Artificial Sequence
  Description of Artificial Sequence: Synthetic oligonucleotide
  Antisense strand to SEQ ID NO: 2100474
aauccacccaucuuuacug

SEQ ID NO: 2100476 - RNA, 19 nt, Artificial Sequence
  Description of Artificial Sequence: Synthetic oligonucleotide
  Sense strand starting at position 139 of SEQ ID NO: 1882172
auggguggauucugacaca

SEQ ID NO: 2100477 - RNA, 19 nt, Artificial Sequence
  Description of Artificial Sequence: Synthetic oligonucleotide
  Antisense strand to SEQ ID NO: 2100476
ugugucagaauccacccau

SEQ ID NO: 2100478 - RNA, 19 nt, Artificial Sequence
  Description of Artificial Sequence: Synthetic oligonucleotide
  Sense strand starting at position 142 of SEQ ID NO: 1882172
gguggauucugacacaaga

SEQ ID NO: 2100479 - RNA, 19 nt, Artificial Sequence
  Description of Artificial Sequence: Synthetic oligonucleotide
  Antisense strand to SEQ ID NO: 2100478
ucuugugucagaauccacc

SEQ ID NO: 2100480 - RNA, 19 nt, Artificial Sequence
  Description of Artificial Sequence: Synthetic oligonucleotide
  Sense strand starting at position 352 of SEQ ID NO: 1882172
aguggagaaguuuaggcaa

SEQ ID NO: 2100481 - RNA, 19 nt, Artificial Sequence
  Description of Artificial Sequence: Synthetic oligonucleotide
  Antisense strand to SEQ ID NO: 2100480
uugccuaaacuucuccacu

SEQ ID NO: 2100482 - RNA, 19 nt, Artificial Sequence
  Description of Artificial Sequence: Synthetic oligonucleotide
  Sense strand starting at position 354 of SEQ ID NO: 1882172
uggagaaguuuaggcaaca

SEQ ID NO: 2100483 - RNA, 19 nt, Artificial Sequence
  Description of Artificial Sequence: Synthetic oligonucleotide
  Antisense strand to SEQ ID NO: 2100482
uguugccuaaacuucucca

SEQ ID NO: 2100484 - RNA, 19 nt, Artificial Sequence
  Description of Artificial Sequence: Synthetic oligonucleotide
  Sense strand starting at position 495 of SEQ ID NO: 1882172
acugcuccagcuugacaau

SEQ ID NO: 2100485 - RNA, 19 nt, Artificial Sequence
  Description of Artificial Sequence: Synthetic oligonucleotide
  Antisense strand to SEQ ID NO: 2100484
auugucaagcuggagcagu

SEQ ID NO: 2100486 - RNA, 19 nt, Artificial Sequence
  Description of Artificial Sequence: Synthetic oligonucleotide
  Sense strand starting at position 550 of SEQ ID NO: 1882172
agcugaaaguuacucaaua

SEQ ID NO: 2100487 - RNA, 19 nt, Artificial Sequence
  Description of Artificial Sequence: Synthetic oligonucleotide
  Antisense strand to SEQ ID NO: 2100486
uauugaguaacuuucagcu

SEQ ID NO: 2100488 - RNA, 19 nt, Artificial Sequence
  Description of Artificial Sequence: Synthetic oligonucleotide
  Sense strand starting at position 551 of SEQ ID NO: 1882172
gcugaaaguuacucaauac

SEQ ID NO: 2100489 - RNA, 19 nt, Artificial Sequence
  Description of Artificial Sequence: Synthetic oligonucleotide
  Antisense strand to SEQ ID NO: 2100488
guauugaguaacuuucagc

SEQ ID NO: 2100490 - RNA, 19 nt, Artificial Sequence
  Description of Artificial Sequence: Synthetic oligonucleotide
  Sense strand starting at position 573 of SEQ ID NO: 1882172
guauacaaaugcuugucaa

SEQ ID NO: 2100491 - RNA, 19 nt, Artificial Sequence
  Description of Artificial Sequence: Synthetic oligonucleotide
  Antisense strand to SEQ ID NO: 2100490
uugacaagcauuuguauac

SEQ ID NO: 2100492 - RNA, 19 nt, Artificial Sequence
  Description of Artificial Sequence: Synthetic oligonucleotide
  Sense strand starting at position 586 of SEQ ID NO: 1882172
ugucaauaauagugaaaga

SEQ ID NO: 2100493 - RNA, 19 nt, Artificial Sequence
  Description of Artificial Sequence: Synthetic oligonucleotide
  Antisense strand to SEQ ID NO: 2100492
ucuuucacuauuauugaca

SEQ ID NO: 2100494 - RNA, 19 nt, Artificial Sequence
  Description of Artificial Sequence: Synthetic oligonucleotide
  Sense strand starting at position 709 of SEQ ID NO: 1882172
gugucaggguuucuacuua

SEQ ID NO: 2100495 - RNA, 19 nt, Artificial Sequence
  Description of Artificial Sequence: Synthetic oligonucleotide
  Antisense strand to SEQ ID NO: 2100494
uaaguagaaacccugacac

SEQ ID NO: 2100496 - RNA, 19 nt, Artificial Sequence
  Description of Artificial Sequence: Synthetic oligonucleotide
  Sense strand starting at position 819 of SEQ ID NO: 1882172
gcucccguccuauagauga

SEQ ID NO: 2100497 - RNA, 19 nt, Artificial Sequence
  Description of Artificial Sequence: Synthetic oligonucleotide
  Antisense strand to SEQ ID NO: 2100496
ucaucuauaggacgggagc

SEQ ID NO: 2100498 - RNA, 19 nt, Artificial Sequence
  Description of Artificial Sequence: Synthetic oligonucleotide
  Sense strand starting at position 821 of SEQ ID NO: 1882172
ucccguccuauagaugaga

SEQ ID NO: 2100499 - RNA, 19 nt, Artificial Sequence
  Description of Artificial Sequence: Synthetic oligonucleotide
  Antisense strand to SEQ ID NO: 2100498
ucucaucuauaggacggga

SEQ ID NO: 2100500 - RNA, 19 nt, Artificial Sequence
  Description of Artificial Sequence: Synthetic oligonucleotide
  Sense strand starting at position 823 of SEQ ID NO: 1882172
ccguccuauagaugagaaa

SEQ ID NO: 2100501 - RNA, 19 nt, Artificial Sequence
  Description of Artificial Sequence: Synthetic oligonucleotide
  Antisense strand to SEQ ID NO: 2100500
uuucucaucuauaggacgg

SEQ ID NO: 2100502 - RNA, 19 nt, Artificial Sequence
  Description of Artificial Sequence: Synthetic oligonucleotide
  Sense strand starting at position 854 of SEQ ID NO: 1882172
ggacuucccagcuguguga

SEQ ID NO: 2100503 - RNA, 19 nt, Artificial Sequence
  Description of Artificial Sequence: Synthetic oligonucleotide
  Antisense strand to SEQ ID NO: 2100502
ucacacagcugggaagucc

SEQ ID NO: 2100504 - RNA, 19 nt, Artificial Sequence
  Description of Artificial Sequence: Synthetic oligonucleotide
  Sense strand starting at position 921 of SEQ ID NO: 1882172
ccgaaacaguuuccagaau

SEQ ID NO: 2100505 - RNA, 19 nt, Artificial Sequence
  Description of Artificial Sequence: Synthetic oligonucleotide
  Antisense strand to SEQ ID NO: 2100504
auucuggaaacuguuucgg

SEQ ID NO: 2100506 - RNA, 19 nt, Artificial Sequence
  Description of Artificial Sequence: Synthetic oligonucleotide
  Sense strand starting at position 945 of SEQ ID NO: 1882172
gccgcauuuggcgaaugaa

SEQ ID NO: 2100507 - RNA, 19 nt, Artificial Sequence
  Description of Artificial Sequence: Synthetic oligonucleotide
  Antisense strand to SEQ ID NO: 2100506
uucauucgccaaaugcggc

SEQ ID NO: 2100508 - RNA, 19 nt, Artificial Sequence
  Description of Artificial Sequence: Synthetic oligonucleotide
  Sense strand starting at position 1098 of SEQ ID NO: 1882172
gcgcguuccgcucuagaag

SEQ ID NO: 2100509 - RNA, 19 nt, Artificial Sequence
  Description of Artificial Sequence: Synthetic oligonucleotide
  Antisense strand to SEQ ID NO: 2100508
cuucuagagcggaacgcgc

SEQ ID NO: 2100510 - RNA, 19 nt, Artificial Sequence
  Description of Artificial Sequence: Synthetic oligonucleotide
  Sense strand starting at position 1109 of SEQ ID NO: 1882172
ucuagaaggcucuggcaca

SEQ ID NO: 2100511 - RNA, 19 nt, Artificial Sequence
  Description of Artificial Sequence: Synthetic oligonucleotide
  Antisense strand to SEQ ID NO: 2100510
ugugccagagccuucuaga

SEQ ID NO: 2100512 - RNA, 19 nt, Artificial Sequence
  Description of Artificial Sequence: Synthetic oligonucleotide
  Sense strand starting at position 2069 of SEQ ID NO: 1882172
ggguucuugcuggaaaccu

SEQ ID NO: 2100513 - RNA, 19 nt, Artificial Sequence
  Description of Artificial Sequence: Synthetic oligonucleotide
  Antisense strand to SEQ ID NO: 2100512
agguuuccagcaagaaccc

SEQ ID NO: 2100514 - RNA, 19 nt, Artificial Sequence
  Description of Artificial Sequence: Synthetic oligonucleotide
  Sense strand starting at position 2456 of SEQ ID NO: 1882172
ucuagacaaucucagagaa

SEQ ID NO: 2100515 - RNA, 19 nt, Artificial Sequence
  Description of Artificial Sequence: Synthetic oligonucleotide
  Antisense strand to SEQ ID NO: 2100514
uucucugagauugucuaga

SEQ ID NO: 2100516 - RNA, 19 nt, Artificial Sequence
  Description of Artificial Sequence: Synthetic oligonucleotide
  Sense strand starting at position 2547 of SEQ ID NO: 1882172
ccaugcauuugagaggcaa

SEQ ID NO: 2100517 - RNA, 19 nt, Artificial Sequence
  Description of Artificial Sequence: Synthetic oligonucleotide
  Antisense strand to SEQ ID NO: 2100516
uugccucucaaaugcaugg

SEQ ID NO: 2100518 - RNA, 19 nt, Artificial Sequence
  Description of Artificial Sequence: Synthetic oligonucleotide
  Sense strand starting at position 2630 of SEQ ID NO: 1882172
aggagaucacgccgguuau

SEQ ID NO: 2100519 - RNA, 19 nt, Artificial Sequence
  Description of Artificial Sequence: Synthetic oligonucleotide
  Antisense strand to SEQ ID NO: 2100518
auaaccggcgugaucuccu

SEQ ID NO: 2100520 - RNA, 19 nt, Artificial Sequence
  Description of Artificial Sequence: Synthetic oligonucleotide
  Sense strand starting at position 2631 of SEQ ID NO: 1882172
ggagaucacgccgguuaug

SEQ ID NO: 2100521 - RNA, 19 nt, Artificial Sequence
  Description of Artificial Sequence: Synthetic oligonucleotide
  Antisense strand to SEQ ID NO: 2100520
cauaaccggcgugaucucc

SEQ ID NO: 2100522 - RNA, 19 nt, Artificial Sequence
  Description of Artificial Sequence: Synthetic oligonucleotide
  Sense strand starting at position 2761 of SEQ ID NO: 1882172
aagcgaguggucucguuca

SEQ ID NO: 2100523 - RNA, 19 nt, Artificial Sequence
  Description of Artificial Sequence: Synthetic oligonucleotide
  Antisense strand to SEQ ID NO: 2100522
ugaacgagaccacucgcuu

SEQ ID NO: 2100524 - RNA, 19 nt, Artificial Sequence
  Description of Artificial Sequence: Synthetic oligonucleotide
  Sense strand starting at position 2829 of SEQ ID NO: 1882172
cgagaauuaauucguagau

SEQ ID NO: 2100525 - RNA, 19 nt, Artificial Sequence
  Description of Artificial Sequence: Synthetic oligonucleotide
  Antisense strand to SEQ ID NO: 2100524
aucuacgaauuaauucucg

SEQ ID NO: 2100526 - RNA, 19 nt, Artificial Sequence
  Description of Artificial Sequence: Synthetic oligonucleotide
  Sense strand starting at position 2830 of SEQ ID NO: 1882172
gagaauuaauucguagaug

SEQ ID NO: 2100527 - RNA, 19 nt, Artificial Sequence
  Description of Artificial Sequence: Synthetic oligonucleotide
  Antisense strand to SEQ ID NO: 2100526
caucuacgaauuaauucuc

SEQ ID NO: 2100528 - RNA, 19 nt, Artificial Sequence
  Description of Artificial Sequence: Synthetic oligonucleotide
  Sense strand starting at position 2831 of SEQ ID NO: 1882172
agaauuaauucguagaugg

SEQ ID NO: 2100529 - RNA, 19 nt, Artificial Sequence
  Description of Artificial Sequence: Synthetic oligonucleotide
  Antisense strand to SEQ ID NO: 2100528
ccaucuacgaauuaauucu

SEQ ID NO: 2100530 - RNA, 19 nt, Artificial Sequence
  Description of Artificial Sequence: Synthetic oligonucleotide
  Sense strand starting at position 2848 of SEQ ID NO: 1882172
ggacgaagauucuacacau

SEQ ID NO: 2100531 - RNA, 19 nt, Artificial Sequence
  Description of Artificial Sequence: Synthetic oligonucleotide
  Antisense strand to SEQ ID NO: 2100530
auguguagaaucuucgucc

SEQ ID NO: 2100532 - RNA, 19 nt, Artificial Sequence
  Description of Artificial Sequence: Synthetic oligonucleotide
  Sense strand starting at position 2865 of SEQ ID NO: 1882172
auccuucgccuuugaucaa

SEQ ID NO: 2100533 - RNA, 19 nt, Artificial Sequence
  Description of Artificial Sequence: Synthetic oligonucleotide
  Antisense strand to SEQ ID NO: 2100532
uugaucaaaggcgaaggau

SEQ ID NO: 2100534 - RNA, 19 nt, Artificial Sequence
  Description of Artificial Sequence: Synthetic oligonucleotide
  Sense strand starting at position 2868 of SEQ ID NO: 1882172
cuucgccuuugaucaacaa

SEQ ID NO: 2100535 - RNA, 19 nt, Artificial Sequence
  Description of Artificial Sequence: Synthetic oligonucleotide
  Antisense strand to SEQ ID NO: 2100534
uuguugaucaaaggcgaag

SEQ ID NO: 2100536 - RNA, 19 nt, Artificial Sequence
  Description of Artificial Sequence: Synthetic oligonucleotide
  Sense strand starting at position 2869 of SEQ ID NO: 1882172
uucgccuuugaucaacaaa

SEQ ID NO: 2100537 - RNA, 19 nt, Artificial Sequence
  Description of Artificial Sequence: Synthetic oligonucleotide
  Antisense strand to SEQ ID NO: 2100536
uuuguugaucaaaggcgaa

SEQ ID NO: 2100538 - RNA, 19 nt, Artificial Sequence
  Description of Artificial Sequence: Synthetic oligonucleotide
  Sense strand starting at position 2872 of SEQ ID NO: 1882172
gccuuugaucaacaaacgu

SEQ ID NO: 2100539 - RNA, 19 nt, Artificial Sequence
  Description of Artificial Sequence: Synthetic oligonucleotide
  Antisense strand to SEQ ID NO: 2100538
acguuuguugaucaaaggc

SEQ ID NO: 2100540 - RNA, 19 nt, Artificial Sequence
  Description of Artificial Sequence: Synthetic oligonucleotide
  Sense strand starting at position 3219 of SEQ ID NO: 1882172
gaguguaggacggauucua

SEQ ID NO: 2100541 - RNA, 19 nt, Artificial Sequence
  Description of Artificial Sequence: Synthetic oligonucleotide
  Antisense strand to SEQ ID NO: 2100540
uagaauccguccuacacuc

SEQ ID NO: 2100542 - RNA, 19 nt, Artificial Sequence
  Description of Artificial Sequence: Synthetic oligonucleotide
  Sense strand starting at position 3252 of SEQ ID NO: 1882172
gcacgaguugccugggaac

SEQ ID NO: 2100543 - RNA, 19 nt, Artificial Sequence
  Description of Artificial Sequence: Synthetic oligonucleotide
  Antisense strand to SEQ ID NO: 2100542
guucccaggcaacucgugc

SEQ ID NO: 2100544 - RNA, 19 nt, Artificial Sequence
  Description of Artificial Sequence: Synthetic oligonucleotide
  Sense strand starting at position 3468 of SEQ ID NO: 1882172
ucaacuccgcuuuaaagaa

SEQ ID NO: 2100545 - RNA, 19 nt, Artificial Sequence
  Description of Artificial Sequence: Synthetic oligonucleotide
  Antisense strand to SEQ ID NO: 2100544
uucuuuaaagcggaguuga

SEQ ID NO: 2100546 - RNA, 19 nt, Artificial Sequence
  Description of Artificial Sequence: Synthetic oligonucleotide
  Sense strand starting at position 3713 of SEQ ID NO: 1882172
gcuggagucagcugagauu

SEQ ID NO: 2100547 - RNA, 19 nt, Artificial Sequence
  Description of Artificial Sequence: Synthetic oligonucleotide
  Antisense strand to SEQ ID NO: 2100546
aaucucagcugacuccagc

SEQ ID NO: 2100548 - RNA, 19 nt, Artificial Sequence
  Description of Artificial Sequence: Synthetic oligonucleotide
  Sense strand starting at position 3945 of SEQ ID NO: 1882172
uucagaguguugguguaag

SEQ ID NO: 2100549 - RNA, 19 nt, Artificial Sequence
  Description of Artificial Sequence: Synthetic oligonucleotide
  Antisense strand to SEQ ID NO: 2100548
cuuacaccaacacucugaa

SEQ ID NO: 2100550 - RNA, 19 nt, Artificial Sequence
  Description of Artificial Sequence: Synthetic oligonucleotide
  Sense strand starting at position 25 of SEQ ID NO: 1882173
auuguuugagacugguaau

SEQ ID NO: 2100551 - RNA, 19 nt, Artificial Sequence
  Description of Artificial Sequence: Synthetic oligonucleotide
  Antisense strand to SEQ ID NO: 2100550
auuaccagucucaaacaau

SEQ ID NO: 2100552 - RNA, 19 nt, Artificial Sequence
  Description of Artificial Sequence: Synthetic oligonucleotide
  Sense strand starting at position 26 of SEQ ID NO: 1882173
uuguuugagacugguaaug

SEQ ID NO: 2100553 - RNA, 19 nt, Artificial Sequence
  Description of Artificial Sequence: Synthetic oligonucleotide
  Antisense strand to SEQ ID NO: 2100552
cauuaccagucucaaacaa

SEQ ID NO: 2100554 - RNA, 19 nt, Artificial Sequence
  Description of Artificial Sequence: Synthetic oligonucleotide
  Sense strand starting at position 100 of SEQ ID NO: 1882173
gggcuucacggugaagaga

SEQ ID NO: 2100555 - RNA, 19 nt, Artificial Sequence
  Description of Artificial Sequence: Synthetic oligonucleotide
  Antisense strand to SEQ ID NO: 2100554
ucucuucaccgugaagccc

SEQ ID NO: 2100556 - RNA, 19 nt, Artificial Sequence
  Description of Artificial Sequence: Synthetic oligonucleotide
  Sense strand starting at position 121 of SEQ ID NO: 1882173
ggaagcaagcagugaauaa

SEQ ID NO: 2100557 - RNA, 19 nt, Artificial Sequence
  Description of Artificial Sequence: Synthetic oligonucleotide
  Antisense strand to SEQ ID NO: 2100556
uuauucacugcuugcuucc

SEQ ID NO: 2100558 - RNA, 19 nt, Artificial Sequence
  Description of Artificial Sequence: Synthetic oligonucleotide
  Sense strand starting at position 131 of SEQ ID NO: 1882173
agugaauaacaguaccagu

SEQ ID NO: 2100559 - RNA, 19 nt, Artificial Sequence
  Description of Artificial Sequence: Synthetic oligonucleotide
  Antisense strand to SEQ ID NO: 2100558
acugguacuguuauucacu

SEQ ID NO: 2100560 - RNA, 19 nt, Artificial Sequence
  Description of Artificial Sequence: Synthetic oligonucleotide
  Sense strand starting at position 159 of SEQ ID NO: 1882173
guggcuuacuccucuaaac

SEQ ID NO: 2100561 - RNA, 19 nt, Artificial Sequence
  Description of Artificial Sequence: Synthetic oligonucleotide
  Antisense strand to SEQ ID NO: 2100560
guuuagaggaguaagccac

SEQ ID NO: 2100562 - RNA, 19 nt, Artificial Sequence
  Description of Artificial Sequence: Synthetic oligonucleotide
  Sense strand starting at position 381 of SEQ ID NO: 1882173
gggagagguugcaaagcua

SEQ ID NO: 2100563 - RNA, 19 nt, Artificial Sequence
  Description of Artificial Sequence: Synthetic oligonucleotide
  Antisense strand to SEQ ID NO: 2100562
uagcuuugcaaccucuccc

SEQ ID NO: 2100564 - RNA, 19 nt, Artificial Sequence
  Description of Artificial Sequence: Synthetic oligonucleotide
  Sense strand starting at position 464 of SEQ ID NO: 1882173
aauuaagagucucagagau

SEQ ID NO: 2100565 - RNA, 19 nt, Artificial Sequence
  Description of Artificial Sequence: Synthetic oligonucleotide
  Antisense strand to SEQ ID NO: 2100564
aucucugagacucuuaauu

SEQ ID NO: 2100566 - RNA, 19 nt, Artificial Sequence
  Description of Artificial Sequence: Synthetic oligonucleotide
  Sense strand starting at position 963 of SEQ ID NO: 1882173
ccucauuuguaauugcuga

SEQ ID NO: 2100567 - RNA, 19 nt, Artificial Sequence
  Description of Artificial Sequence: Synthetic oligonucleotide
  Antisense strand to SEQ ID NO: 2100566
ucagcaauuacaaaugagg

SEQ ID NO: 2100568 - RNA, 19 nt, Artificial Sequence
  Description of Artificial Sequence: Synthetic oligonucleotide
  Sense strand starting at position 968 of SEQ ID NO: 1882173
uuuguaauugcugaaacug

SEQ ID NO: 2100569 - RNA, 19 nt, Artificial Sequence
  Description of Artificial Sequence: Synthetic oligonucleotide
  Antisense strand to SEQ ID NO: 2100568
caguuucagcaauuacaaa

SEQ ID NO: 2100570 - RNA, 19 nt, Artificial Sequence
  Description of Artificial Sequence: Synthetic oligonucleotide
  Sense strand starting at position 1016 of SEQ ID NO: 1882173
aauugcagacaugguauau

SEQ ID NO: 2100571 - RNA, 19 nt, Artificial Sequence
  Description of Artificial Sequence: Synthetic oligonucleotide
  Antisense strand to SEQ ID NO: 2100570
auauaccaugucugcaauu

SEQ ID NO: 2100572 - RNA, 19 nt, Artificial Sequence
  Description of Artificial Sequence: Synthetic oligonucleotide
  Sense strand starting at position 1132 of SEQ ID NO: 1882173
gcaaucauuugguaacaug

SEQ ID NO: 2100573 - RNA, 19 nt, Artificial Sequence
  Description of Artificial Sequence: Synthetic oligonucleotide
  Antisense strand to SEQ ID NO: 2100572
cauguuaccaaaugauugc

SEQ ID NO: 2100574 - RNA, 19 nt, Artificial Sequence
  Description of Artificial Sequence: Synthetic oligonucleotide
  Sense strand starting at position 1394 of SEQ ID NO: 1882173
gagagaaagugguauagag

SEQ ID NO: 2100575 - RNA, 19 nt, Artificial Sequence
  Description of Artificial Sequence: Synthetic oligonucleotide
  Antisense strand to SEQ ID NO: 2100574
cucuauaccacuuucucuc

SEQ ID NO: 2100576 - RNA, 19 nt, Artificial Sequence
  Description of Artificial Sequence: Synthetic oligonucleotide
  Sense strand starting at position 1402 of SEQ ID NO: 1882173
gugguauagaggcaaagau

SEQ ID NO: 2100577 - RNA, 19 nt, Artificial Sequence
  Description of Artificial Sequence: Synthetic oligonucleotide
  Antisense strand to SEQ ID NO: 2100576
aucuuugccucuauaccac

SEQ ID NO: 2100578 - RNA, 19 nt, Artificial Sequence
  Description of Artificial Sequence: Synthetic oligonucleotide
  Sense strand starting at position 1596 of SEQ ID NO: 1882173
uccugugggccucaguaaa

SEQ ID NO: 2100579 - RNA, 19 nt, Artificial Sequence
  Description of Artificial Sequence: Synthetic oligonucleotide
  Antisense strand to SEQ ID NO: 2100578
uuuacugaggcccacagga

SEQ ID NO: 2100580 - RNA, 19 nt, Artificial Sequence
  Description of Artificial Sequence: Synthetic oligonucleotide
  Sense strand starting at position 1733 of SEQ ID NO: 1882173
acuuucuagcucuaugaga

SEQ ID NO: 2100581 - RNA, 19 nt, Artificial Sequence
  Description of Artificial Sequence: Synthetic oligonucleotide
  Antisense strand to SEQ ID NO: 2100580
ucucauagagcuagaaagu

SEQ ID NO: 2100582 - RNA, 19 nt, Artificial Sequence
  Description of Artificial Sequence: Synthetic oligonucleotide
  Sense strand starting at position 1735 of SEQ ID NO: 1882173
uuucuagcucuaugagaug

SEQ ID NO: 2100583 - RNA, 19 nt, Artificial Sequence
  Description of Artificial Sequence: Synthetic oligonucleotide
  Antisense strand to SEQ ID NO: 2100582
caucucauagagcuagaaa

SEQ ID NO: 2100584 - RNA, 19 nt, Artificial Sequence
  Description of Artificial Sequence: Synthetic oligonucleotide
  Sense strand starting at position 1756 of SEQ ID NO: 1882173
ccacguccauuucuauauu

SEQ ID NO: 2100585 - RNA, 19 nt, Artificial Sequence
  Description of Artificial Sequence: Synthetic oligonucleotide
  Antisense strand to SEQ ID NO: 2100584
aauauagaaauggacgugg

SEQ ID NO: 2100586 - RNA, 19 nt, Artificial Sequence
  Description of Artificial Sequence: Synthetic oligonucleotide
  Sense strand starting at position 2184 of SEQ ID NO: 1882173
uuuccuaaucccugaagag

SEQ ID NO: 2100587 - RNA, 19 nt, Artificial Sequence
  Description of Artificial Sequence: Synthetic oligonucleotide
  Antisense strand to SEQ ID NO: 2100586
cucuucagggauuaggaaa

SEQ ID NO: 2100588 - RNA, 19 nt, Artificial Sequence
  Description of Artificial Sequence: Synthetic oligonucleotide
  Sense strand starting at position 2321 of SEQ ID NO: 1882173
cagggucacuucgugauca

SEQ ID NO: 2100589 - RNA, 19 nt, Artificial Sequence
  Description of Artificial Sequence: Synthetic oligonucleotide
  Antisense strand to SEQ ID NO: 2100588
ugaucacgaagugacccug

SEQ ID NO: 2100590 - RNA, 19 nt, Artificial Sequence
  Description of Artificial Sequence: Synthetic oligonucleotide
  Sense strand starting at position 2323 of SEQ ID NO: 1882173
gggucacuucgugaucaaa

SEQ ID NO: 2100591 - RNA, 19 nt, Artificial Sequence
  Description of Artificial Sequence: Synthetic oligonucleotide
  Antisense strand to SEQ ID NO: 2100590
uuugaucacgaagugaccc

SEQ ID NO: 2100592 - RNA, 19 nt, Artificial Sequence
  Description of Artificial Sequence: Synthetic oligonucleotide
  Sense strand starting at position 2325 of SEQ ID NO: 1882173
gucacuucgugaucaaauc

SEQ ID NO: 2100593 - RNA, 19 nt, Artificial Sequence
  Description of Artificial Sequence: Synthetic oligonucleotide
  Antisense strand to SEQ ID NO: 2100592
gauuugaucacgaagugac

SEQ ID NO: 2100594 - RNA, 19 nt, Artificial Sequence
  Description of Artificial Sequence: Synthetic oligonucleotide
  Sense strand starting at position 2331 of SEQ ID NO: 1882173
ucgugaucaaaucgacuuu

SEQ ID NO: 2100595 - RNA, 19 nt, Artificial Sequence
  Description of Artificial Sequence: Synthetic oligonucleotide
  Antisense strand to SEQ ID NO: 2100594
aaagucgauuugaucacga

SEQ ID NO: 2100596 - RNA, 19 nt, Artificial Sequence
  Description of Artificial Sequence: Synthetic oligonucleotide
  Sense strand starting at position 2565 of SEQ ID NO: 1882173
ccucuuagccucgcgagua

SEQ ID NO: 2100597 - RNA, 19 nt, Artificial Sequence
  Description of Artificial Sequence: Synthetic oligonucleotide
  Antisense strand to SEQ ID NO: 2100596
uacucgcgaggcuaagagg

SEQ ID NO: 2100598 - RNA, 19 nt, Artificial Sequence
  Description of Artificial Sequence: Synthetic oligonucleotide
  Sense strand starting at position 2702 of SEQ ID NO: 1882173
ccggguuccagcgauuucu

SEQ ID NO: 2100599 - RNA, 19 nt, Artificial Sequence
  Description of Artificial Sequence: Synthetic oligonucleotide
  Antisense strand to SEQ ID NO: 2100598
agaaaucgcuggaacccgg

SEQ ID NO: 2100600 - RNA, 19 nt, Artificial Sequence
  Description of Artificial Sequence: Synthetic oligonucleotide
  Sense strand starting at position 3082 of SEQ ID NO: 1882173
aggauacucucggucucuu

SEQ ID NO: 2100601 - RNA, 19 nt, Artificial Sequence
  Description of Artificial Sequence: Synthetic oligonucleotide
  Antisense strand to SEQ ID NO: 2100600
aagagaccgagaguauccu

SEQ ID NO: 2100602 - RNA, 19 nt, Artificial Sequence
  Description of Artificial Sequence: Synthetic oligonucleotide
  Sense strand starting at position 3540 of SEQ ID NO: 1882173
uguaacugcccucaagaga

SEQ ID NO: 2100603 - RNA, 19 nt, Artificial Sequence
  Description of Artificial Sequence: Synthetic oligonucleotide
  Antisense strand to SEQ ID NO: 2100602
ucucuugagggcaguuaca

SEQ ID NO: 2100604 - RNA, 19 nt, Artificial Sequence
  Description of Artificial Sequence: Synthetic oligonucleotide
  Sense strand starting at position 3636 of SEQ ID NO: 1882173
uuuaauacugcaggaacau

SEQ ID NO: 2100605 - RNA, 19 nt, Artificial Sequence
  Description of Artificial Sequence: Synthetic oligonucleotide
  Antisense strand to SEQ ID NO: 2100604
auguuccugcaguauuaaa

SEQ ID NO: 2100606 - RNA, 19 nt, Artificial Sequence
  Description of Artificial Sequence: Synthetic oligonucleotide
  Sense strand starting at position 3664 of SEQ ID NO: 1882173
uuauguauacuguaaacag

SEQ ID NO: 2100607 - RNA, 19 nt, Artificial Sequence
  Description of Artificial Sequence: Synthetic oligonucleotide
  Antisense strand to SEQ ID NO: 2100606
cuguuuacaguauacauaa

SEQ ID NO: 2100608 - RNA, 19 nt, Artificial Sequence
  Description of Artificial Sequence: Synthetic oligonucleotide
  Sense strand starting at position 3814 of SEQ ID NO: 1882173
ugggaauccaguuguugga

SEQ ID NO: 2100609 - RNA, 19 nt, Artificial Sequence
  Description of Artificial Sequence: Synthetic oligonucleotide
  Antisense strand to SEQ ID NO: 2100608
uccaacaacuggauuccca

SEQ ID NO: 2100610 - RNA, 19 nt, Artificial Sequence
  Description of Artificial Sequence: Synthetic oligonucleotide
  Sense strand starting at position 3816 of SEQ ID NO: 1882173
ggaauccaguuguuggaua

SEQ ID NO: 2100611 - RNA, 19 nt, Artificial Sequence
  Description of Artificial Sequence: Synthetic oligonucleotide
  Antisense strand to SEQ ID NO: 2100610
uauccaacaacuggauucc

SEQ ID NO: 2100612 - RNA, 19 nt, Artificial Sequence
  Description of Artificial Sequence: Synthetic oligonucleotide
  Sense strand starting at position 3818 of SEQ ID NO: 1882173
aauccaguuguuggauauu

SEQ ID NO: 2100613 - RNA, 19 nt, Artificial Sequence
  Description of Artificial Sequence: Synthetic oligonucleotide
  Antisense strand to SEQ ID NO: 2100612
aauauccaacaacuggauu

SEQ ID NO: 2100614 - RNA, 19 nt, Artificial Sequence
  Description of Artificial Sequence: Synthetic oligonucleotide
  Sense strand starting at position 3821 of SEQ ID NO: 1882173
ccaguuguuggauauuguu

SEQ ID NO: 2100615 - RNA, 19 nt, Artificial Sequence
  Description of Artificial Sequence: Synthetic oligonucleotide
  Antisense strand to SEQ ID NO: 2100614
aacaauauccaacaacugg

SEQ ID NO: 2100616 - RNA, 19 nt, Artificial Sequence
  Description of Artificial Sequence: Synthetic oligonucleotide
  Sense strand starting at position 3827 of SEQ ID NO: 1882173
guuggauauuguuuaccua

SEQ ID NO: 2100617 - RNA, 19 nt, Artificial Sequence
  Description of Artificial Sequence: Synthetic oligonucleotide
  Antisense strand to SEQ ID NO: 2100616
uagguaaacaauauccaac

SEQ ID NO: 2100618 - RNA, 19 nt, Artificial Sequence
  Description of Artificial Sequence: Synthetic oligonucleotide
  Sense strand starting at position 3828 of SEQ ID NO: 1882173
uuggauauuguuuaccuaa

SEQ ID NO: 2100619 - RNA, 19 nt, Artificial Sequence
  Description of Artificial Sequence: Synthetic oligonucleotide
  Antisense strand to SEQ ID NO: 2100618
uuagguaaacaauauccaa

SEQ ID NO: 2100620 - RNA, 19 nt, Artificial Sequence
  Description of Artificial Sequence: Synthetic oligonucleotide
  Sense strand starting at position 3830 of SEQ ID NO: 1882173
ggauauuguuuaccuaaca

SEQ ID NO: 2100621 - RNA, 19 nt, Artificial Sequence
  Description of Artificial Sequence: Synthetic oligonucleotide
  Antisense strand to SEQ ID NO: 2100620
uguuagguaaacaauaucc

SEQ ID NO: 2100622 - RNA, 19 nt, Artificial Sequence
  Description of Artificial Sequence: Synthetic oligonucleotide
  Sense strand starting at position 3866 of SEQ ID NO: 1882173
uucugaucacugcguauaa

SEQ ID NO: 2100623 - RNA, 19 nt, Artificial Sequence
  Description of Artificial Sequence: Synthetic oligonucleotide
  Antisense strand to SEQ ID NO: 2100622
uuauacgcagugaucagaa

SEQ ID NO: 2100624 - RNA, 19 nt, Artificial Sequence
  Description of Artificial Sequence: Synthetic oligonucleotide
  Sense strand starting at position 3867 of SEQ ID NO: 1882173
ucugaucacugcguauaaa

SEQ ID NO: 2100625 - RNA, 19 nt, Artificial Sequence
  Description of Artificial Sequence: Synthetic oligonucleotide
  Antisense strand to SEQ ID NO: 2100624
uuuauacgcagugaucaga

SEQ ID NO: 2100626 - RNA, 19 nt, Artificial Sequence
  Description of Artificial Sequence: Synthetic oligonucleotide
  Sense strand starting at position 3868 of SEQ ID NO: 1882173
cugaucacugcguauaaau

SEQ ID NO: 2100627 - RNA, 19 nt, Artificial Sequence
  Description of Artificial Sequence: Synthetic oligonucleotide
  Antisense strand to SEQ ID NO: 2100626
auuuauacgcagugaucag

SEQ ID NO: 2100628 - RNA, 19 nt, Artificial Sequence
  Description of Artificial Sequence: Synthetic oligonucleotide
  Sense strand starting at position 3870 of SEQ ID NO: 1882173
gaucacugcguauaaaucu

SEQ ID NO: 2100629 - RNA, 19 nt, Artificial Sequence
  Description of Artificial Sequence: Synthetic oligonucleotide
  Antisense strand to SEQ ID NO: 2100628
agauuuauacgcagugauc

SEQ ID NO: 2100630 - RNA, 19 nt, Artificial Sequence
  Description of Artificial Sequence: Synthetic oligonucleotide
  Sense strand starting at position 67 of SEQ ID NO: 1882174
ggaagcaagcaaugaguaa

SEQ ID NO: 2100631 - RNA, 19 nt, Artificial Sequence
  Description of Artificial Sequence: Synthetic oligonucleotide
  Antisense strand to SEQ ID NO: 2100630
uuacucauugcuugcuucc

SEQ ID NO: 2100632 - RNA, 19 nt, Artificial Sequence
  Description of Artificial Sequence: Synthetic oligonucleotide
  Sense strand starting at position 107 of SEQ ID NO: 1882174
ggcucacugcuguaaacca

SEQ ID NO: 2100633 - RNA, 19 nt, Artificial Sequence
  Description of Artificial Sequence: Synthetic oligonucleotide
  Antisense strand to SEQ ID NO: 2100632
ugguuuacagcagugagcc

SEQ ID NO: 2100634 - RNA, 19 nt, Artificial Sequence
  Description of Artificial Sequence: Synthetic oligonucleotide
  Sense strand starting at position 115 of SEQ ID NO: 1882174
gcuguaaaccaacauuaug

SEQ ID NO: 2100635 - RNA, 19 nt, Artificial Sequence
  Description of Artificial Sequence: Synthetic oligonucleotide
  Antisense strand to SEQ ID NO: 2100634
cauaauguugguuuacagc

SEQ ID NO: 2100636 - RNA, 19 nt, Artificial Sequence
  Description of Artificial Sequence: Synthetic oligonucleotide
  Sense strand starting at position 1059 of SEQ ID NO: 1882174
acaaucauuugguaacaug

SEQ ID NO: 2100637 - RNA, 19 nt, Artificial Sequence
  Description of Artificial Sequence: Synthetic oligonucleotide
  Antisense strand to SEQ ID NO: 2100636
cauguuaccaaaugauugu

SEQ ID NO: 2100638 - RNA, 19 nt, Artificial Sequence
  Description of Artificial Sequence: Synthetic oligonucleotide
  Sense strand starting at position 1430 of SEQ ID NO: 1882174
aguuaagaguuugguuguu

SEQ ID NO: 2100639 - RNA, 19 nt, Artificial Sequence
  Description of Artificial Sequence: Synthetic oligonucleotide
  Antisense strand to SEQ ID NO: 2100638
aacaaccaaacucuuaacu

SEQ ID NO: 2100640 - RNA, 19 nt, Artificial Sequence
  Description of Artificial Sequence: Synthetic oligonucleotide
  Sense strand starting at position 1803 of SEQ ID NO: 1882174
acuuucuagcacugugaga

SEQ ID NO: 2100641 - RNA, 19 nt, Artificial Sequence
  Description of Artificial Sequence: Synthetic oligonucleotide
  Antisense strand to SEQ ID NO: 2100640
ucucacagugcuagaaagu

SEQ ID NO: 2100642 - RNA, 19 nt, Artificial Sequence
  Description of Artificial Sequence: Synthetic oligonucleotide
  Sense strand starting at position 1805 of SEQ ID NO: 1882174
uuucuagcacugugagaug

SEQ ID NO: 2100643 - RNA, 19 nt, Artificial Sequence
  Description of Artificial Sequence: Synthetic oligonucleotide
  Antisense strand to SEQ ID NO: 2100642
caucucacagugcuagaaa

SEQ ID NO: 2100644 - RNA, 19 nt, Artificial Sequence
  Description of Artificial Sequence: Synthetic oligonucleotide
  Sense strand starting at position 1843 of SEQ ID NO: 1882174
uuuccugcccagugcuaaa

SEQ ID NO: 2100645 - RNA, 19 nt, Artificial Sequence
  Description of Artificial Sequence: Synthetic oligonucleotide
  Antisense strand to SEQ ID NO: 2100644
uuuagcacugggcaggaaa

SEQ ID NO: 2100646 - RNA, 19 nt, Artificial Sequence
  Description of Artificial Sequence: Synthetic oligonucleotide
  Sense strand starting at position 2003 of SEQ ID NO: 1882174
agaggcuaucuccggauua

SEQ ID NO: 2100647 - RNA, 19 nt, Artificial Sequence
  Description of Artificial Sequence: Synthetic oligonucleotide
  Antisense strand to SEQ ID NO: 2100646
uaauccggagauagccucu

SEQ ID NO: 2100648 - RNA, 19 nt, Artificial Sequence
  Description of Artificial Sequence: Synthetic oligonucleotide
  Sense strand starting at position 2004 of SEQ ID NO: 1882174
gaggcuaucuccggauuau

SEQ ID NO: 2100649 - RNA, 19 nt, Artificial Sequence
  Description of Artificial Sequence: Synthetic oligonucleotide
  Antisense strand to SEQ ID NO: 2100648
auaauccggagauagccuc

SEQ ID NO: 2100650 - RNA, 19 nt, Artificial Sequence
  Description of Artificial Sequence: Synthetic oligonucleotide
  Sense strand starting at position 2005 of SEQ ID NO: 1882174
aggcuaucuccggauuaua

SEQ ID NO: 2100651 - RNA, 19 nt, Artificial Sequence
  Description of Artificial Sequence: Synthetic oligonucleotide
  Antisense strand to SEQ ID NO: 2100650
uauaauccggagauagccu

SEQ ID NO: 2100652 - RNA, 19 nt, Artificial Sequence
  Description of Artificial Sequence: Synthetic oligonucleotide
  Sense strand starting at position 2196 of SEQ ID NO: 1882174
gcucuuccgcaguugugua

SEQ ID NO: 2100653 - RNA, 19 nt, Artificial Sequence
  Description of Artificial Sequence: Synthetic oligonucleotide
  Antisense strand to SEQ ID NO: 2100652
uacacaacugcggaagagc

SEQ ID NO: 2100654 - RNA, 19 nt, Artificial Sequence
  Description of Artificial Sequence: Synthetic oligonucleotide
  Sense strand starting at position 2206 of SEQ ID NO: 1882174
aguuguguaccuggcuuau

SEQ ID NO: 2100655 - RNA, 19 nt, Artificial Sequence
  Description of Artificial Sequence: Synthetic oligonucleotide
  Antisense strand to SEQ ID NO: 2100654
auaagccagguacacaacu

SEQ ID NO: 2100656 - RNA, 19 nt, Artificial Sequence
  Description of Artificial Sequence: Synthetic oligonucleotide
  Sense strand starting at position 2372 of SEQ ID NO: 1882174
gcgucuuuacaagguguaa

SEQ ID NO: 2100657 - RNA, 19 nt, Artificial Sequence
  Description of Artificial Sequence: Synthetic oligonucleotide
  Antisense strand to SEQ ID NO: 2100656
uuacaccuuguaaagacgc

SEQ ID NO: 2100658 - RNA, 19 nt, Artificial Sequence
  Description of Artificial Sequence: Synthetic oligonucleotide
  Sense strand starting at position 2456 of SEQ ID NO: 1882174
aggugaaacuuccuguuau

SEQ ID NO: 2100659 - RNA, 19 nt, Artificial Sequence
  Description of Artificial Sequence: Synthetic oligonucleotide
  Antisense strand to SEQ ID NO: 2100658
auaacaggaaguuucaccu

SEQ ID NO: 2100660 - RNA, 19 nt, Artificial Sequence
  Description of Artificial Sequence: Synthetic oligonucleotide
  Sense strand starting at position 2457 of SEQ ID NO: 1882174
ggugaaacuuccuguuaug

SEQ ID NO: 2100661 - RNA, 19 nt, Artificial Sequence
  Description of Artificial Sequence: Synthetic oligonucleotide
  Antisense strand to SEQ ID NO: 2100660
cauaacaggaaguuucacc

SEQ ID NO: 2100662 - RNA, 19 nt, Artificial Sequence
  Description of Artificial Sequence: Synthetic oligonucleotide
  Sense strand starting at position 2965 of SEQ ID NO: 1882174
uguuguugucggagacgga

SEQ ID NO: 2100663 - RNA, 19 nt, Artificial Sequence
  Description of Artificial Sequence: Synthetic oligonucleotide
  Antisense strand to SEQ ID NO: 2100662
uccgucuccgacaacaaca

SEQ ID NO: 2100664 - RNA, 19 nt, Artificial Sequence
  Description of Artificial Sequence: Synthetic oligonucleotide
  Sense strand starting at position 2978 of SEQ ID NO: 1882174
gacggagucuuccuaugug

SEQ ID NO: 2100665 - RNA, 19 nt, Artificial Sequence
  Description of Artificial Sequence: Synthetic oligonucleotide
  Antisense strand to SEQ ID NO: 2100664
cacauaggaagacuccguc

SEQ ID NO: 2100666 - RNA, 19 nt, Artificial Sequence
  Description of Artificial Sequence: Synthetic oligonucleotide
  Sense strand starting at position 3231 of SEQ ID NO: 1882174
uuccucaaucuguauaugu

SEQ ID NO: 2100667 - RNA, 19 nt, Artificial Sequence
  Description of Artificial Sequence: Synthetic oligonucleotide
  Antisense strand to SEQ ID NO: 2100666
acauauacagauugaggaa

SEQ ID NO: 2100668 - RNA, 19 nt, Artificial Sequence
  Description of Artificial Sequence: Synthetic oligonucleotide
  Sense strand starting at position 3233 of SEQ ID NO: 1882174
ccucaaucuguauauguaa

SEQ ID NO: 2100669 - RNA, 19 nt, Artificial Sequence
  Description of Artificial Sequence: Synthetic oligonucleotide
  Antisense strand to SEQ ID NO: 2100668
uuacauauacagauugagg

SEQ ID NO: 2100670 - RNA, 19 nt, Artificial Sequence
  Description of Artificial Sequence: Synthetic oligonucleotide
  Sense strand starting at position 3240 of SEQ ID NO: 1882174
cuguauauguaacuguaca

SEQ ID NO: 2100671 - RNA, 19 nt, Artificial Sequence
  Description of Artificial Sequence: Synthetic oligonucleotide
  Antisense strand to SEQ ID NO: 2100670
uguacaguuacauauacag

SEQ ID NO: 2100672 - RNA, 19 nt, Artificial Sequence
  Description of Artificial Sequence: Synthetic oligonucleotide
  Sense strand starting at position 3427 of SEQ ID NO: 1882174
aucauaaagcugcaguaau

SEQ ID NO: 2100673 - RNA, 19 nt, Artificial Sequence
  Description of Artificial Sequence: Synthetic oligonucleotide
  Antisense strand to SEQ ID NO: 2100672
auuacugcagcuuuaugau

SEQ ID NO: 2100674 - RNA, 19 nt, Artificial Sequence
  Description of Artificial Sequence: Synthetic oligonucleotide
  Sense strand starting at position 3474 of SEQ ID NO: 1882174
acacaaauauguuguuaga

SEQ ID NO: 2100675 - RNA, 19 nt, Artificial Sequence
  Description of Artificial Sequence: Synthetic oligonucleotide
  Antisense strand to SEQ ID NO: 2100674
ucuaacaacauauuugugu

SEQ ID NO: 2100676 - RNA, 19 nt, Artificial Sequence
  Description of Artificial Sequence: Synthetic oligonucleotide
  Sense strand starting at position 3790 of SEQ ID NO: 1882174
agaagccucucuuugagau

SEQ ID NO: 2100677 - RNA, 19 nt, Artificial Sequence
  Description of Artificial Sequence: Synthetic oligonucleotide
  Antisense strand to SEQ ID NO: 2100676
aucucaaagagaggcuucu

SEQ ID NO: 2100678 - RNA, 19 nt, Artificial Sequence
  Description of Artificial Sequence: Synthetic oligonucleotide
  Sense strand starting at position 3794 of SEQ ID NO: 1882174
gccucucuuugagauuucu

SEQ ID NO: 2100679 - RNA, 19 nt, Artificial Sequence
  Description of Artificial Sequence: Synthetic oligonucleotide
  Antisense strand to SEQ ID NO: 2100678
agaaaucucaaagagaggc

SEQ ID NO: 2100680 - RNA, 19 nt, Artificial Sequence
  Description of Artificial Sequence: Synthetic oligonucleotide
  Sense strand starting at position 119 of SEQ ID NO: 1882175
auuguuugagacuggcaau

SEQ ID NO: 2100681 - RNA, 19 nt, Artificial Sequence
  Description of Artificial Sequence: Synthetic oligonucleotide
  Antisense strand to SEQ ID NO: 2100680
auugccagucucaaacaau

SEQ ID NO: 2100682 - RNA, 19 nt, Artificial Sequence
  Description of Artificial Sequence: Synthetic oligonucleotide
  Sense strand starting at position 227 of SEQ ID NO: 1882175
cgaagcaagcaaugaguaa

SEQ ID NO: 2100683 - RNA, 19 nt, Artificial Sequence
  Description of Artificial Sequence: Synthetic oligonucleotide
  Antisense strand to SEQ ID NO: 2100682
uuacucauugcuugcuucg

SEQ ID NO: 2100684 - RNA, 19 nt, Artificial Sequence
  Description of Artificial Sequence: Synthetic oligonucleotide
  Sense strand starting at position 574 of SEQ ID NO: 1882175
aguuaagagucccacagaa

SEQ ID NO: 2100685 - RNA, 19 nt, Artificial Sequence
  Description of Artificial Sequence: Synthetic oligonucleotide
  Antisense strand to SEQ ID NO: 2100684
uucugugggacucuuaacu

SEQ ID NO: 2100686 - RNA, 19 nt, Artificial Sequence
  Description of Artificial Sequence: Synthetic oligonucleotide
  Sense strand starting at position 625 of SEQ ID NO: 1882175
gccagugcgccacucuaaa

SEQ ID NO: 2100687 - RNA, 19 nt, Artificial Sequence
  Description of Artificial Sequence: Synthetic oligonucleotide
  Antisense strand to SEQ ID NO: 2100686
uuuagaguggcgcacuggc

SEQ ID NO: 2100688 - RNA, 19 nt, Artificial Sequence
  Description of Artificial Sequence: Synthetic oligonucleotide
  Sense strand starting at position 870 of SEQ ID NO: 1882175
acaauaauuugguaacaug

SEQ ID NO: 2100689 - RNA, 19 nt, Artificial Sequence
  Description of Artificial Sequence: Synthetic oligonucleotide
  Antisense strand to SEQ ID NO: 2100688
cauguuaccaaauuauugu

SEQ ID NO: 2100690 - RNA, 19 nt, Artificial Sequence
  Description of Artificial Sequence: Synthetic oligonucleotide
  Sense strand starting at position 1023 of SEQ ID NO: 1882175
auuauaagauguucgaaga

SEQ ID NO: 2100691 - RNA, 19 nt, Artificial Sequence
  Description of Artificial Sequence: Synthetic oligonucleotide
  Antisense strand to SEQ ID NO: 2100690
ucuucgaacaucuuauaau

SEQ ID NO: 2100692 - RNA, 19 nt, Artificial Sequence
  Description of Artificial Sequence: Synthetic oligonucleotide
  Sense strand starting at position 1024 of SEQ ID NO: 1882175
uuauaagauguucgaagag

SEQ ID NO: 2100693 - RNA, 19 nt, Artificial Sequence
  Description of Artificial Sequence: Synthetic oligonucleotide
  Antisense strand to SEQ ID NO: 2100692
cucuucgaacaucuuauaa

SEQ ID NO: 2100694 - RNA, 19 nt, Artificial Sequence
  Description of Artificial Sequence: Synthetic oligonucleotide
  Sense strand starting at position 1078 of SEQ ID NO: 1882175
gaggaaagguauuaacaca

SEQ ID NO: 2100695 - RNA, 19 nt, Artificial Sequence
  Description of Artificial Sequence: Synthetic oligonucleotide
  Antisense strand to SEQ ID NO: 2100694
uguguuaauaccuuuccuc

SEQ ID NO: 2100696 - RNA, 19 nt, Artificial Sequence
  Description of Artificial Sequence: Synthetic oligonucleotide
  Sense strand starting at position 1596 of SEQ ID NO: 1882175
aaugaucaagucugaggua

SEQ ID NO: 2100697 - RNA, 19 nt, Artificial Sequence
  Description of Artificial Sequence: Synthetic oligonucleotide
  Antisense strand to SEQ ID NO: 2100696
uaccucagacuugaucauu

SEQ ID NO: 2100698 - RNA, 19 nt, Artificial Sequence
  Description of Artificial Sequence: Synthetic oligonucleotide
  Sense strand starting at position 1597 of SEQ ID NO: 1882175
augaucaagucugagguau

SEQ ID NO: 2100699 - RNA, 19 nt, Artificial Sequence
  Description of Artificial Sequence: Synthetic oligonucleotide
  Antisense strand to SEQ ID NO: 2100698
auaccucagacuugaucau

SEQ ID NO: 2100700 - RNA, 19 nt, Artificial Sequence
  Description of Artificial Sequence: Synthetic oligonucleotide
  Sense strand starting at position 1599 of SEQ ID NO: 1882175
gaucaagucugagguauau

SEQ ID NO: 2100701 - RNA, 19 nt, Artificial Sequence
  Description of Artificial Sequence: Synthetic oligonucleotide
  Antisense strand to SEQ ID NO: 2100700
auauaccucagacuugauc

SEQ ID NO: 2100702 - RNA, 19 nt, Artificial Sequence
  Description of Artificial Sequence: Synthetic oligonucleotide
  Sense strand starting at position 1603 of SEQ ID NO: 1882175
aagucugagguauaucuua

SEQ ID NO: 2100703 - RNA, 19 nt, Artificial Sequence
  Description of Artificial Sequence: Synthetic oligonucleotide
  Antisense strand to SEQ ID NO: 2100702
uaagauauaccucagacuu

SEQ ID NO: 2100704 - RNA, 19 nt, Artificial Sequence
  Description of Artificial Sequence: Synthetic oligonucleotide
  Sense strand starting at position 1608 of SEQ ID NO: 1882175
ugagguauaucuuagagca

SEQ ID NO: 2100705 - RNA, 19 nt, Artificial Sequence
  Description of Artificial Sequence: Synthetic oligonucleotide
  Antisense strand to SEQ ID NO: 2100704
ugcucuaagauauaccuca

SEQ ID NO: 2100706 - RNA, 19 nt, Artificial Sequence
  Description of Artificial Sequence: Synthetic oligonucleotide
  Sense strand starting at position 1610 of SEQ ID NO: 1882175
agguauaucuuagagcauc

SEQ ID NO: 2100707 - RNA, 19 nt, Artificial Sequence
  Description of Artificial Sequence: Synthetic oligonucleotide
  Antisense strand to SEQ ID NO: 2100706
gaugcucuaagauauaccu

SEQ ID NO: 2100708 - RNA, 19 nt, Artificial Sequence
  Description of Artificial Sequence: Synthetic oligonucleotide
  Sense strand starting at position 1622 of SEQ ID NO: 1882175
gagcauccauuagauuuga

SEQ ID NO: 2100709 - RNA, 19 nt, Artificial Sequence
  Description of Artificial Sequence: Synthetic oligonucleotide
  Antisense strand to SEQ ID NO: 2100708
ucaaaucuaauggaugcuc

SEQ ID NO: 2100710 - RNA, 19 nt, Artificial Sequence
  Description of Artificial Sequence: Synthetic oligonucleotide
  Sense strand starting at position 1694 of SEQ ID NO: 1882175
agguaacuguuagaacaaa

SEQ ID NO: 2100711 - RNA, 19 nt, Artificial Sequence
  Description of Artificial Sequence: Synthetic oligonucleotide
  Antisense strand to SEQ ID NO: 2100710
uuuguucuaacaguuaccu

SEQ ID NO: 2100712 - RNA, 19 nt, Artificial Sequence
  Description of Artificial Sequence: Synthetic oligonucleotide
  Sense strand starting at position 1714 of SEQ ID NO: 1882175
acgugaacauuacugaaca

SEQ ID NO: 2100713 - RNA, 19 nt, Artificial Sequence
  Description of Artificial Sequence: Synthetic oligonucleotide
  Antisense strand to SEQ ID NO: 2100712
uguucaguaauguucacgu

SEQ ID NO: 2100714 - RNA, 19 nt, Artificial Sequence
  Description of Artificial Sequence: Synthetic oligonucleotide
  Sense strand starting at position 1751 of SEQ ID NO: 1882175
uuaagaguuugguuguguu

SEQ ID NO: 2100715 - RNA, 19 nt, Artificial Sequence
  Description of Artificial Sequence: Synthetic oligonucleotide
  Antisense strand to SEQ ID NO: 2100714
aacacaaccaaacucuuaa

SEQ ID NO: 2100716 - RNA, 19 nt, Artificial Sequence
  Description of Artificial Sequence: Synthetic oligonucleotide
  Sense strand starting at position 1755 of SEQ ID NO: 1882175
gaguuugguuguguuugga

SEQ ID NO: 2100717 - RNA, 19 nt, Artificial Sequence
  Description of Artificial Sequence: Synthetic oligonucleotide
  Antisense strand to SEQ ID NO: 2100716
uccaaacacaaccaaacuc

SEQ ID NO: 2100718 - RNA, 19 nt, Artificial Sequence
  Description of Artificial Sequence: Synthetic oligonucleotide
  Sense strand starting at position 1804 of SEQ ID NO: 1882175
cgaggugcuccguguccau

SEQ ID NO: 2100719 - RNA, 19 nt, Artificial Sequence
  Description of Artificial Sequence: Synthetic oligonucleotide
  Antisense strand to SEQ ID NO: 2100718
auggacacggagcaccucg

SEQ ID NO: 2100720 - RNA, 19 nt, Artificial Sequence
  Description of Artificial Sequence: Synthetic oligonucleotide
  Sense strand starting at position 1814 of SEQ ID NO: 1882175
cguguccauuucuauauuu

SEQ ID NO: 2100721 - RNA, 19 nt, Artificial Sequence
  Description of Artificial Sequence: Synthetic oligonucleotide
  Antisense strand to SEQ ID NO: 2100720
aaauauagaaauggacacg

SEQ ID NO: 2100722 - RNA, 19 nt, Artificial Sequence
  Description of Artificial Sequence: Synthetic oligonucleotide
  Sense strand starting at position 1888 of SEQ ID NO: 1882175
uggaaagugagcugaacuu

SEQ ID NO: 2100723 - RNA, 19 nt, Artificial Sequence
  Description of Artificial Sequence: Synthetic oligonucleotide
  Antisense strand to SEQ ID NO: 2100722
aaguucagcucacuuucca

SEQ ID NO: 2100724 - RNA, 19 nt, Artificial Sequence
  Description of Artificial Sequence: Synthetic oligonucleotide
  Sense strand starting at position 2000 of SEQ ID NO: 1882175
cccagagguugcuuucgga

SEQ ID NO: 2100725 - RNA, 19 nt, Artificial Sequence
  Description of Artificial Sequence: Synthetic oligonucleotide
  Antisense strand to SEQ ID NO: 2100724
uccgaaagcaaccucuggg

SEQ ID NO: 2100726 - RNA, 19 nt, Artificial Sequence
  Description of Artificial Sequence: Synthetic oligonucleotide
  Sense strand starting at position 2008 of SEQ ID NO: 1882175
uugcuuucggauuguauuu

SEQ ID NO: 2100727 - RNA, 19 nt, Artificial Sequence
  Description of Artificial Sequence: Synthetic oligonucleotide
  Antisense strand to SEQ ID NO: 2100726
aaauacaauccgaaagcaa

SEQ ID NO: 2100728 - RNA, 19 nt, Artificial Sequence
  Description of Artificial Sequence: Synthetic oligonucleotide
  Sense strand starting at position 2076 of SEQ ID NO: 1882175
ggugcuuuagcuugacuca

SEQ ID NO: 2100729 - RNA, 19 nt, Artificial Sequence
  Description of Artificial Sequence: Synthetic oligonucleotide
  Antisense strand to SEQ ID NO: 2100728
ugagucaagcuaaagcacc

SEQ ID NO: 2100730 - RNA, 19 nt, Artificial Sequence
  Description of Artificial Sequence: Synthetic oligonucleotide
  Sense strand starting at position 2117 of SEQ ID NO: 1882175
ccgcuaucuccaggcaauu

SEQ ID NO: 2100731 - RNA, 19 nt, Artificial Sequence
  Description of Artificial Sequence: Synthetic oligonucleotide
  Antisense strand to SEQ ID NO: 2100730
aauugccuggagauagcgg

SEQ ID NO: 2100732 - RNA, 19 nt, Artificial Sequence
  Description of Artificial Sequence: Synthetic oligonucleotide
  Sense strand starting at position 2221 of SEQ ID NO: 1882175
ccgguuuauucucuccuca

SEQ ID NO: 2100733 - RNA, 19 nt, Artificial Sequence
  Description of Artificial Sequence: Synthetic oligonucleotide
  Antisense strand to SEQ ID NO: 2100732
ugaggagagaauaaaccgg

SEQ ID NO: 2100734 - RNA, 19 nt, Artificial Sequence
  Description of Artificial Sequence: Synthetic oligonucleotide
  Sense strand starting at position 2348 of SEQ ID NO: 1882175
caaguagagcuugggucau

SEQ ID NO: 2100735 - RNA, 19 nt, Artificial Sequence
  Description of Artificial Sequence: Synthetic oligonucleotide
  Antisense strand to SEQ ID NO: 2100734
augacccaagcucuacuug

SEQ ID NO: 2100736 - RNA, 19 nt, Artificial Sequence
  Description of Artificial Sequence: Synthetic oligonucleotide
  Sense strand starting at position 2350 of SEQ ID NO: 1882175
aguagagcuugggucauaa

SEQ ID NO: 2100737 - RNA, 19 nt, Artificial Sequence
  Description of Artificial Sequence: Synthetic oligonucleotide
  Antisense strand to SEQ ID NO: 2100736
uuaugacccaagcucuacu

SEQ ID NO: 2100738 - RNA, 19 nt, Artificial Sequence
  Description of Artificial Sequence: Synthetic oligonucleotide
  Sense strand starting at position 2354 of SEQ ID NO: 1882175
gagcuugggucauaagagu

SEQ ID NO: 2100739 - RNA, 19 nt, Artificial Sequence
  Description of Artificial Sequence: Synthetic oligonucleotide
  Antisense strand to SEQ ID NO: 2100738
acucuuaugacccaagcuc

SEQ ID NO: 2100740 - RNA, 19 nt, Artificial Sequence
  Description of Artificial Sequence: Synthetic oligonucleotide
  Sense strand starting at position 2362 of SEQ ID NO: 1882175
gucauaagaguggagucuu

SEQ ID NO: 2100741 - RNA, 19 nt, Artificial Sequence
  Description of Artificial Sequence: Synthetic oligonucleotide
  Antisense strand to SEQ ID NO: 2100740
aagacuccacucuuaugac

SEQ ID NO: 2100742 - RNA, 19 nt, Artificial Sequence
  Description of Artificial Sequence: Synthetic oligonucleotide
  Sense strand starting at position 3407 of SEQ ID NO: 1882175
aucauaaagcugcagugau

SEQ ID NO: 2100743 - RNA, 19 nt, Artificial Sequence
  Description of Artificial Sequence: Synthetic oligonucleotide
  Antisense strand to SEQ ID NO: 2100742
aucacugcagcuuuaugau

SEQ ID NO: 2100744 - RNA, 19 nt, Artificial Sequence
  Description of Artificial Sequence: Synthetic oligonucleotide
  Sense strand starting at position 3422 of SEQ ID NO: 1882175
ugauacacaucuugguaca

SEQ ID NO: 2100745 - RNA, 19 nt, Artificial Sequence
  Description of Artificial Sequence: Synthetic oligonucleotide
  Antisense strand to SEQ ID NO: 2100744
uguaccaagauguguauca

SEQ ID NO: 2100746 - RNA, 19 nt, Artificial Sequence
  Description of Artificial Sequence: Synthetic oligonucleotide
  Sense strand starting at position 3507 of SEQ ID NO: 1882175
uggagaaaguuaugggaga

SEQ ID NO: 2100747 - RNA, 19 nt, Artificial Sequence
  Description of Artificial Sequence: Synthetic oligonucleotide
  Antisense strand to SEQ ID NO: 2100746
ucucccauaacuuucucca

SEQ ID NO: 2100748 - RNA, 19 nt, Artificial Sequence
  Description of Artificial Sequence: Synthetic oligonucleotide
  Sense strand starting at position 3508 of SEQ ID NO: 1882175
ggagaaaguuaugggagaa

SEQ ID NO: 2100749 - RNA, 19 nt, Artificial Sequence
  Description of Artificial Sequence: Synthetic oligonucleotide
  Antisense strand to SEQ ID NO: 2100748
uucucccauaacuuucucc

SEQ ID NO: 2100750 - RNA, 19 nt, Artificial Sequence
  Description of Artificial Sequence: Synthetic oligonucleotide
  Sense strand starting at position 3554 of SEQ ID NO: 1882175
gccguaggaucaucuuuag

SEQ ID NO: 2100751 - RNA, 19 nt, Artificial Sequence
  Description of Artificial Sequence: Synthetic oligonucleotide
  Antisense strand to SEQ ID NO: 2100750
cuaaagaugauccuacggc

SEQ ID NO: 2100752 - RNA, 19 nt, Artificial Sequence
  Description of Artificial Sequence: Synthetic oligonucleotide
  Sense strand starting at position 3557 of SEQ ID NO: 1882175
guaggaucaucuuuaguaa

SEQ ID NO: 2100753 - RNA, 19 nt, Artificial Sequence
  Description of Artificial Sequence: Synthetic oligonucleotide
  Antisense strand to SEQ ID NO: 2100752
uuacuaaagaugauccuac

SEQ ID NO: 2100754 - RNA, 19 nt, Artificial Sequence
  Description of Artificial Sequence: Synthetic oligonucleotide
  Sense strand starting at position 3560 of SEQ ID NO: 1882175
ggaucaucuuuaguaauaa

SEQ ID NO: 2100755 - RNA, 19 nt, Artificial Sequence
  Description of Artificial Sequence: Synthetic oligonucleotide
  Antisense strand to SEQ ID NO: 2100754
uuauuacuaaagaugaucc

SEQ ID NO: 2100756 - RNA, 19 nt, Artificial Sequence
  Description of Artificial Sequence: Synthetic oligonucleotide
  Sense strand starting at position 3755 of SEQ ID NO: 1882175
uuuagaaagcccugaaaca

SEQ ID NO: 2100757 - RNA, 19 nt, Artificial Sequence
  Description of Artificial Sequence: Synthetic oligonucleotide
  Antisense strand to SEQ ID NO: 2100756
uguuucagggcuuucuaaa

SEQ ID NO: 2100758 - RNA, 19 nt, Artificial Sequence
  Description of Artificial Sequence: Synthetic oligonucleotide
  Sense strand starting at position 3771 of SEQ ID NO: 1882175
acaagcuucucuuugagau

SEQ ID NO: 2100759 - RNA, 19 nt, Artificial Sequence
  Description of Artificial Sequence: Synthetic oligonucleotide
  Antisense strand to SEQ ID NO: 2100758
aucucaaagagaagcuugu

SEQ ID NO: 2100760 - RNA, 19 nt, Artificial Sequence
  Description of Artificial Sequence: Synthetic oligonucleotide
  Sense strand starting at position 110 of SEQ ID NO: 1882176
gggagaagguuugaggaga

SEQ ID NO: 2100761 - RNA, 19 nt, Artificial Sequence
  Description of Artificial Sequence: Synthetic oligonucleotide
  Antisense strand to SEQ ID NO: 2100760
ucuccucaaaccuucuccc

SEQ ID NO: 2100762 - RNA, 19 nt, Artificial Sequence
  Description of Artificial Sequence: Synthetic oligonucleotide
  Sense strand starting at position 144 of SEQ ID NO: 1882176
ucacacuaguguucuuuaa

SEQ ID NO: 2100763 - RNA, 19 nt, Artificial Sequence
  Description of Artificial Sequence: Synthetic oligonucleotide
  Antisense strand to SEQ ID NO: 2100762
uuaaagaacacuaguguga

SEQ ID NO: 2100764 - RNA, 19 nt, Artificial Sequence
  Description of Artificial Sequence: Synthetic oligonucleotide
  Sense strand starting at position 371 of SEQ ID NO: 1882176
aucaaauguugaguugaau

SEQ ID NO: 2100765 - RNA, 19 nt, Artificial Sequence
  Description of Artificial Sequence: Synthetic oligonucleotide
  Antisense strand to SEQ ID NO: 2100764
auucaacucaacauuugau

SEQ ID NO: 2100766 - RNA, 19 nt, Artificial Sequence
  Description of Artificial Sequence: Synthetic oligonucleotide
  Sense strand starting at position 380 of SEQ ID NO: 1882176
ugaguugaaucccucuagu

SEQ ID NO: 2100767 - RNA, 19 nt, Artificial Sequence
  Description of Artificial Sequence: Synthetic oligonucleotide
  Antisense strand to SEQ ID NO: 2100766
acuagagggauucaacuca

SEQ ID NO: 2100768 - RNA, 19 nt, Artificial Sequence
  Description of Artificial Sequence: Synthetic oligonucleotide
  Sense strand starting at position 443 of SEQ ID NO: 1882176
cuaucauaggucuagcuca

SEQ ID NO: 2100769 - RNA, 19 nt, Artificial Sequence
  Description of Artificial Sequence: Synthetic oligonucleotide
  Antisense strand to SEQ ID NO: 2100768
ugagcuagaccuaugauag

SEQ ID NO: 2100770 - RNA, 19 nt, Artificial Sequence
  Description of Artificial Sequence: Synthetic oligonucleotide
  Sense strand starting at position 448 of SEQ ID NO: 1882176
auaggucuagcucaauagu

SEQ ID NO: 2100771 - RNA, 19 nt, Artificial Sequence
  Description of Artificial Sequence: Synthetic oligonucleotide
  Antisense strand to SEQ ID NO: 2100770
acuauugagcuagaccuau

SEQ ID NO: 2100772 - RNA, 19 nt, Artificial Sequence
  Description of Artificial Sequence: Synthetic oligonucleotide
  Sense strand starting at position 531 of SEQ ID NO: 1882176
gguuguuucucucccagag

SEQ ID NO: 2100773 - RNA, 19 nt, Artificial Sequence
  Description of Artificial Sequence: Synthetic oligonucleotide
  Antisense strand to SEQ ID NO: 2100772
cucugggagagaaacaacc

SEQ ID NO: 2100774 - RNA, 19 nt, Artificial Sequence
  Description of Artificial Sequence: Synthetic oligonucleotide
  Sense strand starting at position 1188 of SEQ ID NO: 1882176
aguuguguuccacaauucu

SEQ ID NO: 2100775 - RNA, 19 nt, Artificial Sequence
  Description of Artificial Sequence: Synthetic oligonucleotide
  Antisense strand to SEQ ID NO: 2100774
agaauuguggaacacaacu

SEQ ID NO: 2100776 - RNA, 19 nt, Artificial Sequence
  Description of Artificial Sequence: Synthetic oligonucleotide
  Sense strand starting at position 1203 of SEQ ID NO: 1882176
uucuacuuauagggauuua

SEQ ID NO: 2100777 - RNA, 19 nt, Artificial Sequence
  Description of Artificial Sequence: Synthetic oligonucleotide
  Antisense strand to SEQ ID NO: 2100776
uaaaucccuauaaguagaa

SEQ ID NO: 2100778 - RNA, 19 nt, Artificial Sequence
  Description of Artificial Sequence: Synthetic oligonucleotide
  Sense strand starting at position 1237 of SEQ ID NO: 1882176
gugcaugucccugugcauu

SEQ ID NO: 2100779 - RNA, 19 nt, Artificial Sequence
  Description of Artificial Sequence: Synthetic oligonucleotide
  Antisense strand to SEQ ID NO: 2100778
aaugcacagggacaugcac

SEQ ID NO: 2100780 - RNA, 19 nt, Artificial Sequence
  Description of Artificial Sequence: Synthetic oligonucleotide
  Sense strand starting at position 1451 of SEQ ID NO: 1882176
ggaagaaacuuggaacuuu

SEQ ID NO: 2100781 - RNA, 19 nt, Artificial Sequence
  Description of Artificial Sequence: Synthetic oligonucleotide
  Antisense strand to SEQ ID NO: 2100780
aaaguuccaaguuucuucc

SEQ ID NO: 2100782 - RNA, 19 nt, Artificial Sequence
  Description of Artificial Sequence: Synthetic oligonucleotide
  Sense strand starting at position 1535 of SEQ ID NO: 1882176
gguggcaauauaugugaaa

SEQ ID NO: 2100783 - RNA, 19 nt, Artificial Sequence
  Description of Artificial Sequence: Synthetic oligonucleotide
  Antisense strand to SEQ ID NO: 2100782
uuucacauauauugccacc

SEQ ID NO: 2100784 - RNA, 19 nt, Artificial Sequence
  Description of Artificial Sequence: Synthetic oligonucleotide
  Sense strand starting at position 1617 of SEQ ID NO: 1882176
ggacgaaauccauaacgca

SEQ ID NO: 2100785 - RNA, 19 nt, Artificial Sequence
  Description of Artificial Sequence: Synthetic oligonucleotide
  Antisense strand to SEQ ID NO: 2100784
ugcguuauggauuucgucc

SEQ ID NO: 2100786 - RNA, 19 nt, Artificial Sequence
  Description of Artificial Sequence: Synthetic oligonucleotide
  Sense strand starting at position 1674 of SEQ ID NO: 1882176
gugugucucgugaacugca

SEQ ID NO: 2100787 - RNA, 19 nt, Artificial Sequence
  Description of Artificial Sequence: Synthetic oligonucleotide
  Antisense strand to SEQ ID NO: 2100786
ugcaguucacgagacacac

SEQ ID NO: 2100788 - RNA, 19 nt, Artificial Sequence
  Description of Artificial Sequence: Synthetic oligonucleotide
  Sense strand starting at position 1681 of SEQ ID NO: 1882176
ucgugaacugcacaagcau

SEQ ID NO: 2100789 - RNA, 19 nt, Artificial Sequence
  Description of Artificial Sequence: Synthetic oligonucleotide
  Antisense strand to SEQ ID NO: 2100788
augcuugugcaguucacga

SEQ ID NO: 2100790 - RNA, 19 nt, Artificial Sequence
  Description of Artificial Sequence: Synthetic oligonucleotide
  Sense strand starting at position 2007 of SEQ ID NO: 1882176
gagugugcgacugaaacuu

SEQ ID NO: 2100791 - RNA, 19 nt, Artificial Sequence
  Description of Artificial Sequence: Synthetic oligonucleotide
  Antisense strand to SEQ ID NO: 2100790
aaguuucagucgcacacuc

SEQ ID NO: 2100792 - RNA, 19 nt, Artificial Sequence
  Description of Artificial Sequence: Synthetic oligonucleotide
  Sense strand starting at position 2030 of SEQ ID NO: 1882176
accauagaagagugacgau

SEQ ID NO: 2100793 - RNA, 19 nt, Artificial Sequence
  Description of Artificial Sequence: Synthetic oligonucleotide
  Antisense strand to SEQ ID NO: 2100792
aucgucacucuucuauggu

SEQ ID NO: 2100794 - RNA, 19 nt, Artificial Sequence
  Description of Artificial Sequence: Synthetic oligonucleotide
  Sense strand starting at position 2491 of SEQ ID NO: 1882176
gagugauuagcagggcacu

SEQ ID NO: 2100795 - RNA, 19 nt, Artificial Sequence
  Description of Artificial Sequence: Synthetic oligonucleotide
  Antisense strand to SEQ ID NO: 2100794
agugcccugcuaaucacuc

SEQ ID NO: 2100796 - RNA, 19 nt, Artificial Sequence
  Description of Artificial Sequence: Synthetic oligonucleotide
  Sense strand starting at position 2492 of SEQ ID NO: 1882176
agugauuagcagggcacua

SEQ ID NO: 2100797 - RNA, 19 nt, Artificial Sequence
  Description of Artificial Sequence: Synthetic oligonucleotide
  Antisense strand to SEQ ID NO: 2100796
uagugcccugcuaaucacu

SEQ ID NO: 2100798 - RNA, 19 nt, Artificial Sequence
  Description of Artificial Sequence: Synthetic oligonucleotide
  Sense strand starting at position 2573 of SEQ ID NO: 1882176
agagaaacgcucuguuaag

SEQ ID NO: 2100799 - RNA, 19 nt, Artificial Sequence
  Description of Artificial Sequence: Synthetic oligonucleotide
  Antisense strand to SEQ ID NO: 2100798
cuuaacagagcguuucucu

SEQ ID NO: 2100800 - RNA, 19 nt, Artificial Sequence
  Description of Artificial Sequence: Synthetic oligonucleotide
  Sense strand starting at position 2574 of SEQ ID NO: 1882176
gagaaacgcucuguuaagg

SEQ ID NO: 2100801 - RNA, 19 nt, Artificial Sequence
  Description of Artificial Sequence: Synthetic oligonucleotide
  Antisense strand to SEQ ID NO: 2100800
ccuuaacagagcguuucuc

SEQ ID NO: 2100802 - RNA, 19 nt, Artificial Sequence
  Description of Artificial Sequence: Synthetic oligonucleotide
  Sense strand starting at position 2582 of SEQ ID NO: 1882176
cucuguuaaggcugaagga

SEQ ID NO: 2100803 - RNA, 19 nt, Artificial Sequence
  Description of Artificial Sequence: Synthetic oligonucleotide
  Antisense strand to SEQ ID NO: 2100802
uccuucagccuuaacagag

SEQ ID NO: 2100804 - RNA, 19 nt, Artificial Sequence
  Description of Artificial Sequence: Synthetic oligonucleotide
  Sense strand starting at position 2761 of SEQ ID NO: 1882176
cacgcucuggguuaaacau

SEQ ID NO: 2100805 - RNA, 19 nt, Artificial Sequence
  Description of Artificial Sequence: Synthetic oligonucleotide
  Antisense strand to SEQ ID NO: 2100804
auguuuaacccagagcgug

SEQ ID NO: 2100806 - RNA, 19 nt, Artificial Sequence
  Description of Artificial Sequence: Synthetic oligonucleotide
  Sense strand starting at position 2796 of SEQ ID NO: 1882176
ccggaacaacucugagauc

SEQ ID NO: 2100807 - RNA, 19 nt, Artificial Sequence
  Description of Artificial Sequence: Synthetic oligonucleotide
  Antisense strand to SEQ ID NO: 2100806
gaucucagaguuguuccgg

SEQ ID NO: 2100808 - RNA, 19 nt, Artificial Sequence
  Description of Artificial Sequence: Synthetic oligonucleotide
  Sense strand starting at position 2805 of SEQ ID NO: 1882176
cucugagauccauaauguu

SEQ ID NO: 2100809 - RNA, 19 nt, Artificial Sequence
  Description of Artificial Sequence: Synthetic oligonucleotide
  Antisense strand to SEQ ID NO: 2100808
aacauuauggaucucagag

SEQ ID NO: 2100810 - RNA, 19 nt, Artificial Sequence
  Description of Artificial Sequence: Synthetic oligonucleotide
  Sense strand starting at position 2848 of SEQ ID NO: 1882176
cugagaaucagugguggua

SEQ ID NO: 2100811 - RNA, 19 nt, Artificial Sequence
  Description of Artificial Sequence: Synthetic oligonucleotide
  Antisense strand to SEQ ID NO: 2100810
uaccaccacugauucucag

SEQ ID NO: 2100812 - RNA, 19 nt, Artificial Sequence
  Description of Artificial Sequence: Synthetic oligonucleotide
  Sense strand starting at position 2851 of SEQ ID NO: 1882176
agaaucaguggugguaagu

SEQ ID NO: 2100813 - RNA, 19 nt, Artificial Sequence
  Description of Artificial Sequence: Synthetic oligonucleotide
  Antisense strand to SEQ ID NO: 2100812
acuuaccaccacugauucu

SEQ ID NO: 2100814 - RNA, 19 nt, Artificial Sequence
  Description of Artificial Sequence: Synthetic oligonucleotide
  Sense strand starting at position 2860 of SEQ ID NO: 1882176
ggugguaaguaacugaaau

SEQ ID NO: 2100815 - RNA, 19 nt, Artificial Sequence
  Description of Artificial Sequence: Synthetic oligonucleotide
  Antisense strand to SEQ ID NO: 2100814
auuucaguuacuuaccacc

SEQ ID NO: 2100816 - RNA, 19 nt, Artificial Sequence
  Description of Artificial Sequence: Synthetic oligonucleotide
  Sense strand starting at position 2861 of SEQ ID NO: 1882176
gugguaaguaacugaaaug

SEQ ID NO: 2100817 - RNA, 19 nt, Artificial Sequence
  Description of Artificial Sequence: Synthetic oligonucleotide
  Antisense strand to SEQ ID NO: 2100816
cauuucaguuacuuaccac

SEQ ID NO: 2100818 - RNA, 19 nt, Artificial Sequence
  Description of Artificial Sequence: Synthetic oligonucleotide
  Sense strand starting at position 2862 of SEQ ID NO: 1882176
ugguaaguaacugaaaugu

SEQ ID NO: 2100819 - RNA, 19 nt, Artificial Sequence
  Description of Artificial Sequence: Synthetic oligonucleotide
  Antisense strand to SEQ ID NO: 2100818
acauuucaguuacuuacca

SEQ ID NO: 2100820 - RNA, 19 nt, Artificial Sequence
  Description of Artificial Sequence: Synthetic oligonucleotide
  Sense strand starting at position 2937 of SEQ ID NO: 1882176
gaaagaguugccuguagug

SEQ ID NO: 2100821 - RNA, 19 nt, Artificial Sequence
  Description of Artificial Sequence: Synthetic oligonucleotide
  Antisense strand to SEQ ID NO: 2100820
cacuacaggcaacucuuuc

SEQ ID NO: 2100822 - RNA, 19 nt, Artificial Sequence
  Description of Artificial Sequence: Synthetic oligonucleotide
  Sense strand starting at position 2939 of SEQ ID NO: 1882176
aagaguugccuguagugua

SEQ ID NO: 2100823 - RNA, 19 nt, Artificial Sequence
  Description of Artificial Sequence: Synthetic oligonucleotide
  Antisense strand to SEQ ID NO: 2100822
uacacuacaggcaacucuu

SEQ ID NO: 2100824 - RNA, 19 nt, Artificial Sequence
  Description of Artificial Sequence: Synthetic oligonucleotide
  Sense strand starting at position 3485 of SEQ ID NO: 1882176
accugcuuugugggaaauu

SEQ ID NO: 2100825 - RNA, 19 nt, Artificial Sequence
  Description of Artificial Sequence: Synthetic oligonucleotide
  Antisense strand to SEQ ID NO: 2100824
aauuucccacaaagcaggu

SEQ ID NO: 2100826 - RNA, 19 nt, Artificial Sequence
  Description of Artificial Sequence: Synthetic oligonucleotide
  Sense strand starting at position 3547 of SEQ ID NO: 1882176
ccaagagugcaugaagcau

SEQ ID NO: 2100827 - RNA, 19 nt, Artificial Sequence
  Description of Artificial Sequence: Synthetic oligonucleotide
  Antisense strand to SEQ ID NO: 2100826
augcuucaugcacucuugg

SEQ ID NO: 2100828 - RNA, 19 nt, Artificial Sequence
  Description of Artificial Sequence: Synthetic oligonucleotide
  Sense strand starting at position 3582 of SEQ ID NO: 1882176
cccuguuagggcuagacau

SEQ ID NO: 2100829 - RNA, 19 nt, Artificial Sequence
  Description of Artificial Sequence: Synthetic oligonucleotide
  Antisense strand to SEQ ID NO: 2100828
augucuagcccuaacaggg

SEQ ID NO: 2100830 - RNA, 19 nt, Artificial Sequence
  Description of Artificial Sequence: Synthetic oligonucleotide
  Sense strand starting at position 3590 of SEQ ID NO: 1882176
gggcuagacauugaagguu

SEQ ID NO: 2100831 - RNA, 19 nt, Artificial Sequence
  Description of Artificial Sequence: Synthetic oligonucleotide
  Antisense strand to SEQ ID NO: 2100830
aaccuucaaugucuagccc

SEQ ID NO: 2100832 - RNA, 19 nt, Artificial Sequence
  Description of Artificial Sequence: Synthetic oligonucleotide
  Sense strand starting at position 3641 of SEQ ID NO: 1882176
ccaauagcgcuccaaugaa

SEQ ID NO: 2100833 - RNA, 19 nt, Artificial Sequence
  Description of Artificial Sequence: Synthetic oligonucleotide
  Antisense strand to SEQ ID NO: 2100832
uucauuggagcgcuauugg

SEQ ID NO: 2100834 - RNA, 19 nt, Artificial Sequence
  Description of Artificial Sequence: Synthetic oligonucleotide
  Sense strand starting at position 3726 of SEQ ID NO: 1882176
uggaauugcugggcugaau

SEQ ID NO: 2100835 - RNA, 19 nt, Artificial Sequence
  Description of Artificial Sequence: Synthetic oligonucleotide
  Antisense strand to SEQ ID NO: 2100834
auucagcccagcaauucca

SEQ ID NO: 2100836 - RNA, 19 nt, Artificial Sequence
  Description of Artificial Sequence: Synthetic oligonucleotide
  Sense strand starting at position 3737 of SEQ ID NO: 1882176
ggcugaauagcauauaugu

SEQ ID NO: 2100837 - RNA, 19 nt, Artificial Sequence
  Description of Artificial Sequence: Synthetic oligonucleotide
  Antisense strand to SEQ ID NO: 2100836
acauauaugcuauucagcc

SEQ ID NO: 2100838 - RNA, 19 nt, Artificial Sequence
  Description of Artificial Sequence: Synthetic oligonucleotide
  Sense strand starting at position 3869 of SEQ ID NO: 1882176
cuaguagucucgguaaaca

SEQ ID NO: 2100839 - RNA, 19 nt, Artificial Sequence
  Description of Artificial Sequence: Synthetic oligonucleotide
  Antisense strand to SEQ ID NO: 2100838
uguuuaccgagacuacuag

SEQ ID NO: 2100840 - RNA, 19 nt, Artificial Sequence
  Description of Artificial Sequence: Synthetic oligonucleotide
  Sense strand starting at position 297 of SEQ ID NO: 1882177
gauuauaggcaugguucca

SEQ ID NO: 2100841 - RNA, 19 nt, Artificial Sequence
  Description of Artificial Sequence: Synthetic oligonucleotide
  Antisense strand to SEQ ID NO: 2100840
uggaaccaugccuauaauc

SEQ ID NO: 2100842 - RNA, 19 nt, Artificial Sequence
  Description of Artificial Sequence: Synthetic oligonucleotide
  Sense strand starting at position 364 of SEQ ID NO: 1882177
cuauucucaggugaauguu

SEQ ID NO: 2100843 - RNA, 19 nt, Artificial Sequence
  Description of Artificial Sequence: Synthetic oligonucleotide
  Antisense strand to SEQ ID NO: 2100842
aacauucaccugagaauag

SEQ ID NO: 2100844 - RNA, 19 nt, Artificial Sequence
  Description of Artificial Sequence: Synthetic oligonucleotide
  Sense strand starting at position 520 of SEQ ID NO: 1882177
ggcaguuagccaugugaaa

SEQ ID NO: 2100845 - RNA, 19 nt, Artificial Sequence
  Description of Artificial Sequence: Synthetic oligonucleotide
  Antisense strand to SEQ ID NO: 2100844
uuucacauggcuaacugcc

SEQ ID NO: 2100846 - RNA, 19 nt, Artificial Sequence
  Description of Artificial Sequence: Synthetic oligonucleotide
  Sense strand starting at position 531 of SEQ ID NO: 1882177
augugaaacuuccucagga

SEQ ID NO: 2100847 - RNA, 19 nt, Artificial Sequence
  Description of Artificial Sequence: Synthetic oligonucleotide
  Antisense strand to SEQ ID NO: 2100846
uccugaggaaguuucacau

SEQ ID NO: 2100848 - RNA, 19 nt, Artificial Sequence
  Description of Artificial Sequence: Synthetic oligonucleotide
  Sense strand starting at position 532 of SEQ ID NO: 1882177
ugugaaacuuccucaggag

SEQ ID NO: 2100849 - RNA, 19 nt, Artificial Sequence
  Description of Artificial Sequence: Synthetic oligonucleotide
  Antisense strand to SEQ ID NO: 2100848
cuccugaggaaguuucaca

SEQ ID NO: 2100850 - RNA, 19 nt, Artificial Sequence
  Description of Artificial Sequence: Synthetic oligonucleotide
  Sense strand starting at position 585 of SEQ ID NO: 1882177
caugcaacucagugcaaga

SEQ ID NO: 2100851 - RNA, 19 nt, Artificial Sequence
  Description of Artificial Sequence: Synthetic oligonucleotide
  Antisense strand to SEQ ID NO: 2100850
ucuugcacugaguugcaug

SEQ ID NO: 2100852 - RNA, 19 nt, Artificial Sequence
  Description of Artificial Sequence: Synthetic oligonucleotide
  Sense strand starting at position 595 of SEQ ID NO: 1882177
agugcaagaucagugugua

SEQ ID NO: 2100853 - RNA, 19 nt, Artificial Sequence
  Description of Artificial Sequence: Synthetic oligonucleotide
  Antisense strand to SEQ ID NO: 2100852
uacacacugaucuugcacu

SEQ ID NO: 2100854 - RNA, 19 nt, Artificial Sequence
  Description of Artificial Sequence: Synthetic oligonucleotide
  Sense strand starting at position 596 of SEQ ID NO: 1882177
gugcaagaucaguguguac

SEQ ID NO: 2100855 - RNA, 19 nt, Artificial Sequence
  Description of Artificial Sequence: Synthetic oligonucleotide
  Antisense strand to SEQ ID NO: 2100854
guacacacugaucuugcac

SEQ ID NO: 2100856 - RNA, 19 nt, Artificial Sequence
  Description of Artificial Sequence: Synthetic oligonucleotide
  Sense strand starting at position 598 of SEQ ID NO: 1882177
gcaagaucaguguguacaa

SEQ ID NO: 2100857 - RNA, 19 nt, Artificial Sequence
  Description of Artificial Sequence: Synthetic oligonucleotide
  Antisense strand to SEQ ID NO: 2100856
uuguacacacugaucuugc

SEQ ID NO: 2100858 - RNA, 19 nt, Artificial Sequence
  Description of Artificial Sequence: Synthetic oligonucleotide
  Sense strand starting at position 599 of SEQ ID NO: 1882177
caagaucaguguguacaaa

SEQ ID NO: 2100859 - RNA, 19 nt, Artificial Sequence
  Description of Artificial Sequence: Synthetic oligonucleotide
  Antisense strand to SEQ ID NO: 2100858
uuuguacacacugaucuug

SEQ ID NO: 2100860 - RNA, 19 nt, Artificial Sequence
  Description of Artificial Sequence: Synthetic oligonucleotide
  Sense strand starting at position 1016 of SEQ ID NO: 1882177
cccauaggauacuucugau

SEQ ID NO: 2100861 - RNA, 19 nt, Artificial Sequence
  Description of Artificial Sequence: Synthetic oligonucleotide
  Antisense strand to SEQ ID NO: 2100860
aucagaaguauccuauggg

SEQ ID NO: 2100862 - RNA, 19 nt, Artificial Sequence
  Description of Artificial Sequence: Synthetic oligonucleotide
  Sense strand starting at position 1019 of SEQ ID NO: 1882177
auaggauacuucugaugaa

SEQ ID NO: 2100863 - RNA, 19 nt, Artificial Sequence
  Description of Artificial Sequence: Synthetic oligonucleotide
  Antisense strand to SEQ ID NO: 2100862
uucaucagaaguauccuau

SEQ ID NO: 2100864 - RNA, 19 nt, Artificial Sequence
  Description of Artificial Sequence: Synthetic oligonucleotide
  Sense strand starting at position 1022 of SEQ ID NO: 1882177
ggauacuucugaugaacua

SEQ ID NO: 2100865 - RNA, 19 nt, Artificial Sequence
  Description of Artificial Sequence: Synthetic oligonucleotide
  Antisense strand to SEQ ID NO: 2100864
uaguucaucagaaguaucc

SEQ ID NO: 2100866 - RNA, 19 nt, Artificial Sequence
  Description of Artificial Sequence: Synthetic oligonucleotide
  Sense strand starting at position 1049 of SEQ ID NO: 1882177
uggccuuacugacccaaau

SEQ ID NO: 2100867 - RNA, 19 nt, Artificial Sequence
  Description of Artificial Sequence: Synthetic oligonucleotide
  Antisense strand to SEQ ID NO: 2100866
auuugggucaguaaggcca

SEQ ID NO: 2100868 - RNA, 19 nt, Artificial Sequence
  Description of Artificial Sequence: Synthetic oligonucleotide
  Sense strand starting at position 1232 of SEQ ID NO: 1882177
acaggugagucccacacaa

SEQ ID NO: 2100869 - RNA, 19 nt, Artificial Sequence
  Description of Artificial Sequence: Synthetic oligonucleotide
  Antisense strand to SEQ ID NO: 2100868
uugugugggacucaccugu

SEQ ID NO: 2100870 - RNA, 19 nt, Artificial Sequence
  Description of Artificial Sequence: Synthetic oligonucleotide
  Sense strand starting at position 1385 of SEQ ID NO: 1882177
gucagauaggccuggcaaa

SEQ ID NO: 2100871 - RNA, 19 nt, Artificial Sequence
  Description of Artificial Sequence: Synthetic oligonucleotide
  Antisense strand to SEQ ID NO: 2100870
uuugccaggccuaucugac

SEQ ID NO: 2100872 - RNA, 19 nt, Artificial Sequence
  Description of Artificial Sequence: Synthetic oligonucleotide
  Sense strand starting at position 1472 of SEQ ID NO: 1882177
ugggccagcucuccauuaa

SEQ ID NO: 2100873 - RNA, 19 nt, Artificial Sequence
  Description of Artificial Sequence: Synthetic oligonucleotide
  Antisense strand to SEQ ID NO: 2100872
uuaauggagagcuggccca

SEQ ID NO: 2100874 - RNA, 19 nt, Artificial Sequence
  Description of Artificial Sequence: Synthetic oligonucleotide
  Sense strand starting at position 1473 of SEQ ID NO: 1882177
gggccagcucuccauuaag

SEQ ID NO: 2100875 - RNA, 19 nt, Artificial Sequence
  Description of Artificial Sequence: Synthetic oligonucleotide
  Antisense strand to SEQ ID NO: 2100874
cuuaauggagagcuggccc

SEQ ID NO: 2100876 - RNA, 19 nt, Artificial Sequence
  Description of Artificial Sequence: Synthetic oligonucleotide
  Sense strand starting at position 2081 of SEQ ID NO: 1882177
uccuauacgugagauuucu

SEQ ID NO: 2100877 - RNA, 19 nt, Artificial Sequence
  Description of Artificial Sequence: Synthetic oligonucleotide
  Antisense strand to SEQ ID NO: 2100876
agaaaucucacguauagga

SEQ ID NO: 2100878 - RNA, 19 nt, Artificial Sequence
  Description of Artificial Sequence: Synthetic oligonucleotide
  Sense strand starting at position 2087 of SEQ ID NO: 1882177
acgugagauuucuuucuuc

SEQ ID NO: 2100879 - RNA, 19 nt, Artificial Sequence
  Description of Artificial Sequence: Synthetic oligonucleotide
  Antisense strand to SEQ ID NO: 2100878
gaagaaagaaaucucacgu

SEQ ID NO: 2100880 - RNA, 19 nt, Artificial Sequence
  Description of Artificial Sequence: Synthetic oligonucleotide
  Sense strand starting at position 2198 of SEQ ID NO: 1882177
ucaccuauucuuggagcua

SEQ ID NO: 2100881 - RNA, 19 nt, Artificial Sequence
  Description of Artificial Sequence: Synthetic oligonucleotide
  Antisense strand to SEQ ID NO: 2100880
uagcuccaagaauagguga

SEQ ID NO: 2100882 - RNA, 19 nt, Artificial Sequence
  Description of Artificial Sequence: Synthetic oligonucleotide
  Sense strand starting at position 2223 of SEQ ID NO: 1882177
ccucaucugucagugagag

SEQ ID NO: 2100883 - RNA, 19 nt, Artificial Sequence
  Description of Artificial Sequence: Synthetic oligonucleotide
  Antisense strand to SEQ ID NO: 2100882
cucucacugacagaugagg

SEQ ID NO: 2100884 - RNA, 19 nt, Artificial Sequence
  Description of Artificial Sequence: Synthetic oligonucleotide
  Sense strand starting at position 2411 of SEQ ID NO: 1882177
aguccaucucugcaacagu

SEQ ID NO: 2100885 - RNA, 19 nt, Artificial Sequence
  Description of Artificial Sequence: Synthetic oligonucleotide
  Antisense strand to SEQ ID NO: 2100884
acuguugcagagauggacu

SEQ ID NO: 2100886 - RNA, 19 nt, Artificial Sequence
  Description of Artificial Sequence: Synthetic oligonucleotide
  Sense strand starting at position 2445 of SEQ ID NO: 1882177
cuagcaacugcugggaaau

SEQ ID NO: 2100887 - RNA, 19 nt, Artificial Sequence
  Description of Artificial Sequence: Synthetic oligonucleotide
  Antisense strand to SEQ ID NO: 2100886
auuucccagcaguugcuag

SEQ ID NO: 2100888 - RNA, 19 nt, Artificial Sequence
  Description of Artificial Sequence: Synthetic oligonucleotide
  Sense strand starting at position 2446 of SEQ ID NO: 1882177
uagcaacugcugggaaauu

SEQ ID NO: 2100889 - RNA, 19 nt, Artificial Sequence
  Description of Artificial Sequence: Synthetic oligonucleotide
  Antisense strand to SEQ ID NO: 2100888
aauuucccagcaguugcua

SEQ ID NO: 2100890 - RNA, 19 nt, Artificial Sequence
  Description of Artificial Sequence: Synthetic oligonucleotide
  Sense strand starting at position 2447 of SEQ ID NO: 1882177
agcaacugcugggaaauuu

SEQ ID NO: 2100891 - RNA, 19 nt, Artificial Sequence
  Description of Artificial Sequence: Synthetic oligonucleotide
  Antisense strand to SEQ ID NO: 2100890
aaauuucccagcaguugcu

SEQ ID NO: 2100892 - RNA, 19 nt, Artificial Sequence
  Description of Artificial Sequence: Synthetic oligonucleotide
  Sense strand starting at position 2491 of SEQ ID NO: 1882177
uuuauaucugaggguuaca

SEQ ID NO: 2100893 - RNA, 19 nt, Artificial Sequence
  Description of Artificial Sequence: Synthetic oligonucleotide
  Antisense strand to SEQ ID NO: 2100892
uguaacccucagauauaaa

SEQ ID NO: 2100894 - RNA, 19 nt, Artificial Sequence
  Description of Artificial Sequence: Synthetic oligonucleotide
  Sense strand starting at position 2562 of SEQ ID NO: 1882177
aggguuauauuugggaaga

SEQ ID NO: 2100895 - RNA, 19 nt, Artificial Sequence
  Description of Artificial Sequence: Synthetic oligonucleotide
  Antisense strand to SEQ ID NO: 2100894
ucuucccaaauauaacccu

SEQ ID NO: 2100896 - RNA, 19 nt, Artificial Sequence
  Description of Artificial Sequence: Synthetic oligonucleotide
  Sense strand starting at position 2563 of SEQ ID NO: 1882177
ggguuauauuugggaagac

SEQ ID NO: 2100897 - RNA, 19 nt, Artificial Sequence
  Description of Artificial Sequence: Synthetic oligonucleotide
  Antisense strand to SEQ ID NO: 2100896
gucuucccaaauauaaccc

SEQ ID NO: 2100898 - RNA, 19 nt, Artificial Sequence
  Description of Artificial Sequence: Synthetic oligonucleotide
  Sense strand starting at position 2564 of SEQ ID NO: 1882177
gguuauauuugggaagacu

SEQ ID NO: 2100899 - RNA, 19 nt, Artificial Sequence
  Description of Artificial Sequence: Synthetic oligonucleotide
  Antisense strand to SEQ ID NO: 2100898
agucuucccaaauauaacc

SEQ ID NO: 2100900 - RNA, 19 nt, Artificial Sequence
  Description of Artificial Sequence: Synthetic oligonucleotide
  Sense strand starting at position 2907 of SEQ ID NO: 1882177
uucugauacuacuuuguua

SEQ ID NO: 2100901 - RNA, 19 nt, Artificial Sequence
  Description of Artificial Sequence: Synthetic oligonucleotide
  Antisense strand to SEQ ID NO: 2100900
uaacaaaguaguaucagaa

SEQ ID NO: 2100902 - RNA, 19 nt, Artificial Sequence
  Description of Artificial Sequence: Synthetic oligonucleotide
  Sense strand starting at position 2909 of SEQ ID NO: 1882177
cugauacuacuuuguuacu

SEQ ID NO: 2100903 - RNA, 19 nt, Artificial Sequence
  Description of Artificial Sequence: Synthetic oligonucleotide
  Antisense strand to SEQ ID NO: 2100902
aguaacaaaguaguaucag

SEQ ID NO: 2100904 - RNA, 19 nt, Artificial Sequence
  Description of Artificial Sequence: Synthetic oligonucleotide
  Sense strand starting at position 2910 of SEQ ID NO: 1882177
ugauacuacuuuguuacua

SEQ ID NO: 2100905 - RNA, 19 nt, Artificial Sequence
  Description of Artificial Sequence: Synthetic oligonucleotide
  Antisense strand to SEQ ID NO: 2100904
uaguaacaaaguaguauca

SEQ ID NO: 2100906 - RNA, 19 nt, Artificial Sequence
  Description of Artificial Sequence: Synthetic oligonucleotide
  Sense strand starting at position 3086 of SEQ ID NO: 1882177
cuuccugggaucgagcaau

SEQ ID NO: 2100907 - RNA, 19 nt, Artificial Sequence
  Description of Artificial Sequence: Synthetic oligonucleotide
  Antisense strand to SEQ ID NO: 2100906
auugcucgaucccaggaag

SEQ ID NO: 2100908 - RNA, 19 nt, Artificial Sequence
  Description of Artificial Sequence: Synthetic oligonucleotide
  Sense strand starting at position 3222 of SEQ ID NO: 1882177
ucuuaaucucgugauccac

SEQ ID NO: 2100909 - RNA, 19 nt, Artificial Sequence
  Description of Artificial Sequence: Synthetic oligonucleotide
  Antisense strand to SEQ ID NO: 2100908
guggaucacgagauuaaga

SEQ ID NO: 2100910 - RNA, 19 nt, Artificial Sequence
  Description of Artificial Sequence: Synthetic oligonucleotide
  Sense strand starting at position 3623 of SEQ ID NO: 1882177
guucuuagagcuuaagaag

SEQ ID NO: 2100911 - RNA, 19 nt, Artificial Sequence
  Description of Artificial Sequence: Synthetic oligonucleotide
  Antisense strand to SEQ ID NO: 2100910
cuucuuaagcucuaagaac

SEQ ID NO: 2100912 - RNA, 19 nt, Artificial Sequence
  Description of Artificial Sequence: Synthetic oligonucleotide
  Sense strand starting at position 3739 of SEQ ID NO: 1882177
ugcugaagcucuuuccuaa

SEQ ID NO: 2100913 - RNA, 19 nt, Artificial Sequence
  Description of Artificial Sequence: Synthetic oligonucleotide
  Antisense strand to SEQ ID NO: 2100912
uuaggaaagagcuucagca

SEQ ID NO: 2100914 - RNA, 19 nt, Artificial Sequence
  Description of Artificial Sequence: Synthetic oligonucleotide
  Sense strand starting at position 3799 of SEQ ID NO: 1882177
gauggaaagucacaguucu

SEQ ID NO: 2100915 - RNA, 19 nt, Artificial Sequence
  Description of Artificial Sequence: Synthetic oligonucleotide
  Antisense strand to SEQ ID NO: 2100914
agaacugugacuuuccauc

SEQ ID NO: 2100916 - RNA, 19 nt, Artificial Sequence
  Description of Artificial Sequence: Synthetic oligonucleotide
  Sense strand starting at position 3822 of SEQ ID NO: 1882177
ccauccugugaccauuaca

SEQ ID NO: 2100917 - RNA, 19 nt, Artificial Sequence
  Description of Artificial Sequence: Synthetic oligonucleotide
  Antisense strand to SEQ ID NO: 2100916
uguaauggucacaggaugg

SEQ ID NO: 2100918 - RNA, 19 nt, Artificial Sequence
  Description of Artificial Sequence: Synthetic oligonucleotide
  Sense strand starting at position 3949 of SEQ ID NO: 1882177
uagggcauacuccaaguau

SEQ ID NO: 2100919 - RNA, 19 nt, Artificial Sequence
  Description of Artificial Sequence: Synthetic oligonucleotide
  Antisense strand to SEQ ID NO: 2100918
auacuuggaguaugcccua

SEQ ID NO: 2100920 - RNA, 19 nt, Artificial Sequence
  Description of Artificial Sequence: Synthetic oligonucleotide
  Sense strand starting at position 128 of SEQ ID NO: 1882178
aaggaauauuggguggagu

SEQ ID NO: 2100921 - RNA, 19 nt, Artificial Sequence
  Description of Artificial Sequence: Synthetic oligonucleotide
  Antisense strand to SEQ ID NO: 2100920
acuccacccaauauuccuu

SEQ ID NO: 2100922 - RNA, 19 nt, Artificial Sequence
  Description of Artificial Sequence: Synthetic oligonucleotide
  Sense strand starting at position 129 of SEQ ID NO: 1882178
aggaauauuggguggaguu

SEQ ID NO: 2100923 - RNA, 19 nt, Artificial Sequence
  Description of Artificial Sequence: Synthetic oligonucleotide
  Antisense strand to SEQ ID NO: 2100922
aacuccacccaauauuccu

SEQ ID NO: 2100924 - RNA, 19 nt, Artificial Sequence
  Description of Artificial Sequence: Synthetic oligonucleotide
  Sense strand starting at position 130 of SEQ ID NO: 1882178
ggaauauuggguggaguuc

SEQ ID NO: 2100925 - RNA, 19 nt, Artificial Sequence
  Description of Artificial Sequence: Synthetic oligonucleotide
  Antisense strand to SEQ ID NO: 2100924
gaacuccacccaauauucc

SEQ ID NO: 2100926 - RNA, 19 nt, Artificial Sequence
  Description of Artificial Sequence: Synthetic oligonucleotide
  Sense strand starting at position 196 of SEQ ID NO: 1882178
ggaagaucaucucccuacu

SEQ ID NO: 2100927 - RNA, 19 nt, Artificial Sequence
  Description of Artificial Sequence: Synthetic oligonucleotide
  Antisense strand to SEQ ID NO: 2100926
aguagggagaugaucuucc

SEQ ID NO: 2100928 - RNA, 19 nt, Artificial Sequence
  Description of Artificial Sequence: Synthetic oligonucleotide
  Sense strand starting at position 859 of SEQ ID NO: 1882178
cagcuugugccagucaugu

SEQ ID NO: 2100929 - RNA, 19 nt, Artificial Sequence
  Description of Artificial Sequence: Synthetic oligonucleotide
  Antisense strand to SEQ ID NO: 2100928
acaugacuggcacaagcug

SEQ ID NO: 2100930 - RNA, 19 nt, Artificial Sequence
  Description of Artificial Sequence: Synthetic oligonucleotide
  Sense strand starting at position 865 of SEQ ID NO: 1882178
gugccagucauguacagga

SEQ ID NO: 2100931 - RNA, 19 nt, Artificial Sequence
  Description of Artificial Sequence: Synthetic oligonucleotide
  Antisense strand to SEQ ID NO: 2100930
uccuguacaugacuggcac

SEQ ID NO: 2100932 - RNA, 19 nt, Artificial Sequence
  Description of Artificial Sequence: Synthetic oligonucleotide
  Sense strand starting at position 880 of SEQ ID NO: 1882178
aggagcuaauuguuaaauu

SEQ ID NO: 2100933 - RNA, 19 nt, Artificial Sequence
  Description of Artificial Sequence: Synthetic oligonucleotide
  Antisense strand to SEQ ID NO: 2100932
aauuuaacaauuagcuccu

SEQ ID NO: 2100934 - RNA, 19 nt, Artificial Sequence
  Description of Artificial Sequence: Synthetic oligonucleotide
  Sense strand starting at position 889 of SEQ ID NO: 1882178
uuguuaaauuuccaggaac

SEQ ID NO: 2100935 - RNA, 19 nt, Artificial Sequence
  Description of Artificial Sequence: Synthetic oligonucleotide
  Antisense strand to SEQ ID NO: 2100934
guuccuggaaauuuaacaa

SEQ ID NO: 2100936 - RNA, 19 nt, Artificial Sequence
  Description of Artificial Sequence: Synthetic oligonucleotide
  Sense strand starting at position 1013 of SEQ ID NO: 1882178
ccucaaaguugguuuacca

SEQ ID NO: 2100937 - RNA, 19 nt, Artificial Sequence
  Description of Artificial Sequence: Synthetic oligonucleotide
  Antisense strand to SEQ ID NO: 2100936
ugguaaaccaacuuugagg

SEQ ID NO: 2100938 - RNA, 19 nt, Artificial Sequence
  Description of Artificial Sequence: Synthetic oligonucleotide
  Sense strand starting at position 1121 of SEQ ID NO: 1882178
caguaauucgcuugagaaa

SEQ ID NO: 2100939 - RNA, 19 nt, Artificial Sequence
  Description of Artificial Sequence: Synthetic oligonucleotide
  Antisense strand to SEQ ID NO: 2100938
uuucucaagcgaauuacug

SEQ ID NO: 2100940 - RNA, 19 nt, Artificial Sequence
  Description of Artificial Sequence: Synthetic oligonucleotide
  Sense strand starting at position 1304 of SEQ ID NO: 1882178
gccuacagccugcaaagau

SEQ ID NO: 2100941 - RNA, 19 nt, Artificial Sequence
  Description of Artificial Sequence: Synthetic oligonucleotide
  Antisense strand to SEQ ID NO: 2100940
aucuuugcaggcuguaggc

SEQ ID NO: 2100942 - RNA, 19 nt, Artificial Sequence
  Description of Artificial Sequence: Synthetic oligonucleotide
  Sense strand starting at position 1413 of SEQ ID NO: 1882178
ucagcuauugcgucaucuu

SEQ ID NO: 2100943 - RNA, 19 nt, Artificial Sequence
  Description of Artificial Sequence: Synthetic oligonucleotide
  Antisense strand to SEQ ID NO: 2100942
aagaugacgcaauagcuga

SEQ ID NO: 2100944 - RNA, 19 nt, Artificial Sequence
  Description of Artificial Sequence: Synthetic oligonucleotide
  Sense strand starting at position 1448 of SEQ ID NO: 1882178
caaaucugucgcucgcgau

SEQ ID NO: 2100945 - RNA, 19 nt, Artificial Sequence
  Description of Artificial Sequence: Synthetic oligonucleotide
  Antisense strand to SEQ ID NO: 2100944
aucgcgagcgacagauuug

SEQ ID NO: 2100946 - RNA, 19 nt, Artificial Sequence
  Description of Artificial Sequence: Synthetic oligonucleotide
  Sense strand starting at position 1551 of SEQ ID NO: 1882178
ugcagcgcugugucuuuaa

SEQ ID NO: 2100947 - RNA, 19 nt, Artificial Sequence
  Description of Artificial Sequence: Synthetic oligonucleotide
  Antisense strand to SEQ ID NO: 2100946
uuaaagacacagcgcugca

SEQ ID NO: 2100948 - RNA, 19 nt, Artificial Sequence
  Description of Artificial Sequence: Synthetic oligonucleotide
  Sense strand starting at position 1994 of SEQ ID NO: 1882178
auuaaaguugucugauuac

SEQ ID NO: 2100949 - RNA, 19 nt, Artificial Sequence
  Description of Artificial Sequence: Synthetic oligonucleotide
  Antisense strand to SEQ ID NO: 2100948
guaaucagacaacuuuaau

SEQ ID NO: 2100950 - RNA, 19 nt, Artificial Sequence
  Description of Artificial Sequence: Synthetic oligonucleotide
  Sense strand starting at position 1997 of SEQ ID NO: 1882178
aaaguugucugauuacagu

SEQ ID NO: 2100951 - RNA, 19 nt, Artificial Sequence
  Description of Artificial Sequence: Synthetic oligonucleotide
  Antisense strand to SEQ ID NO: 2100950
acuguaaucagacaacuuu

SEQ ID NO: 2100952 - RNA, 19 nt, Artificial Sequence
  Description of Artificial Sequence: Synthetic oligonucleotide
  Sense strand starting at position 2075 of SEQ ID NO: 1882178
gcuugaugucgcccacuuu

SEQ ID NO: 2100953 - RNA, 19 nt, Artificial Sequence
  Description of Artificial Sequence: Synthetic oligonucleotide
  Antisense strand to SEQ ID NO: 2100952
aaagugggcgacaucaagc

SEQ ID NO: 2100954 - RNA, 19 nt, Artificial Sequence
  Description of Artificial Sequence: Synthetic oligonucleotide
  Sense strand starting at position 2086 of SEQ ID NO: 1882178
cccacuuucggagggagaa

SEQ ID NO: 2100955 - RNA, 19 nt, Artificial Sequence
  Description of Artificial Sequence: Synthetic oligonucleotide
  Antisense strand to SEQ ID NO: 2100954
uucucccuccgaaaguggg

SEQ ID NO: 2100956 - RNA, 19 nt, Artificial Sequence
  Description of Artificial Sequence: Synthetic oligonucleotide
  Sense strand starting at position 2204 of SEQ ID NO: 1882178
ggagcaguuucugugauuu

SEQ ID NO: 2100957 - RNA, 19 nt, Artificial Sequence
  Description of Artificial Sequence: Synthetic oligonucleotide
  Antisense strand to SEQ ID NO: 2100956
aaaucacagaaacugcucc

SEQ ID NO: 2100958 - RNA, 19 nt, Artificial Sequence
  Description of Artificial Sequence: Synthetic oligonucleotide
  Sense strand starting at position 2287 of SEQ ID NO: 1882178
acuuaccacuagucgaauu

SEQ ID NO: 2100959 - RNA, 19 nt, Artificial Sequence
  Description of Artificial Sequence: Synthetic oligonucleotide
  Antisense strand to SEQ ID NO: 2100958
aauucgacuagugguaagu

SEQ ID NO: 2100960 - RNA, 19 nt, Artificial Sequence
  Description of Artificial Sequence: Synthetic oligonucleotide
  Sense strand starting at position 2442 of SEQ ID NO: 1882178
gcuugaggcagccaagaau

SEQ ID NO: 2100961 - RNA, 19 nt, Artificial Sequence
  Description of Artificial Sequence: Synthetic oligonucleotide
  Antisense strand to SEQ ID NO: 2100960
auucuuggcugccucaagc

SEQ ID NO: 2100962 - RNA, 19 nt, Artificial Sequence
  Description of Artificial Sequence: Synthetic oligonucleotide
  Sense strand starting at position 2470 of SEQ ID NO: 1882178
aguagacagcaauacguau

SEQ ID NO: 2100963 - RNA, 19 nt, Artificial Sequence
  Description of Artificial Sequence: Synthetic oligonucleotide
  Antisense strand to SEQ ID NO: 2100962
auacguauugcugucuacu

SEQ ID NO: 2100964 - RNA, 19 nt, Artificial Sequence
  Description of Artificial Sequence: Synthetic oligonucleotide
  Sense strand starting at position 2800 of SEQ ID NO: 1882178
aagaguuuggcuuaugcca

SEQ ID NO: 2100965 - RNA, 19 nt, Artificial Sequence
  Description of Artificial Sequence: Synthetic oligonucleotide
  Antisense strand to SEQ ID NO: 2100964
uggcauaagccaaacucuu

SEQ ID NO: 2100966 - RNA, 19 nt, Artificial Sequence
  Description of Artificial Sequence: Synthetic oligonucleotide
  Sense strand starting at position 2853 of SEQ ID NO: 1882178
cugugaguccaguguauuu

SEQ ID NO: 2100967 - RNA, 19 nt, Artificial Sequence
  Description of Artificial Sequence: Synthetic oligonucleotide
  Antisense strand to SEQ ID NO: 2100966
aaauacacuggacucacag

SEQ ID NO: 2100968 - RNA, 19 nt, Artificial Sequence
  Description of Artificial Sequence: Synthetic oligonucleotide
  Sense strand starting at position 3013 of SEQ ID NO: 1882178
uuucuaauugucuggaucu

SEQ ID NO: 2100969 - RNA, 19 nt, Artificial Sequence
  Description of Artificial Sequence: Synthetic oligonucleotide
  Antisense strand to SEQ ID NO: 2100968
agauccagacaauuagaaa

SEQ ID NO: 2100970 - RNA, 19 nt, Artificial Sequence
  Description of Artificial Sequence: Synthetic oligonucleotide
  Sense strand starting at position 3015 of SEQ ID NO: 1882178
ucuaauugucuggaucucu

SEQ ID NO: 2100971 - RNA, 19 nt, Artificial Sequence
  Description of Artificial Sequence: Synthetic oligonucleotide
  Antisense strand to SEQ ID NO: 2100970
agagauccagacaauuaga

SEQ ID NO: 2100972 - RNA, 19 nt, Artificial Sequence
  Description of Artificial Sequence: Synthetic oligonucleotide
  Sense strand starting at position 3020 of SEQ ID NO: 1882178
uugucuggaucucuuuaua

SEQ ID NO: 2100973 - RNA, 19 nt, Artificial Sequence
  Description of Artificial Sequence: Synthetic oligonucleotide
  Antisense strand to SEQ ID NO: 2100972
uauaaagagauccagacaa

SEQ ID NO: 2100974 - RNA, 19 nt, Artificial Sequence
  Description of Artificial Sequence: Synthetic oligonucleotide
  Sense strand starting at position 3121 of SEQ ID NO: 1882178
aguugucaacucuaauuac

SEQ ID NO: 2100975 - RNA, 19 nt, Artificial Sequence
  Description of Artificial Sequence: Synthetic oligonucleotide
  Antisense strand to SEQ ID NO: 2100974
guaauuagaguugacaacu

SEQ ID NO: 2100976 - RNA, 19 nt, Artificial Sequence
  Description of Artificial Sequence: Synthetic oligonucleotide
  Sense strand starting at position 3166 of SEQ ID NO: 1882178
cauuaaagucacuggugga

SEQ ID NO: 2100977 - RNA, 19 nt, Artificial Sequence
  Description of Artificial Sequence: Synthetic oligonucleotide
  Antisense strand to SEQ ID NO: 2100976
uccaccagugacuuuaaug

SEQ ID NO: 2100978 - RNA, 19 nt, Artificial Sequence
  Description of Artificial Sequence: Synthetic oligonucleotide
  Sense strand starting at position 3167 of SEQ ID NO: 1882178
auuaaagucacugguggau

SEQ ID NO: 2100979 - RNA, 19 nt, Artificial Sequence
  Description of Artificial Sequence: Synthetic oligonucleotide
  Antisense strand to SEQ ID NO: 2100978
auccaccagugacuuuaau

SEQ ID NO: 2100980 - RNA, 19 nt, Artificial Sequence
  Description of Artificial Sequence: Synthetic oligonucleotide
  Sense strand starting at position 3173 of SEQ ID NO: 1882178
gucacugguggaugaagua

SEQ ID NO: 2100981 - RNA, 19 nt, Artificial Sequence
  Description of Artificial Sequence: Synthetic oligonucleotide
  Antisense strand to SEQ ID NO: 2100980
uacuucauccaccagugac

SEQ ID NO: 2100982 - RNA, 19 nt, Artificial Sequence
  Description of Artificial Sequence: Synthetic oligonucleotide
  Sense strand starting at position 3256 of SEQ ID NO: 1882178
aucuaagauccaggcucaa

SEQ ID NO: 2100983 - RNA, 19 nt, Artificial Sequence
  Description of Artificial Sequence: Synthetic oligonucleotide
  Antisense strand to SEQ ID NO: 2100982
uugagccuggaucuuagau

SEQ ID NO: 2100984 - RNA, 19 nt, Artificial Sequence
  Description of Artificial Sequence: Synthetic oligonucleotide
  Sense strand starting at position 3319 of SEQ ID NO: 1882178
guaaguagccuugaguaua

SEQ ID NO: 2100985 - RNA, 19 nt, Artificial Sequence
  Description of Artificial Sequence: Synthetic oligonucleotide
  Antisense strand to SEQ ID NO: 2100984
uauacucaaggcuacuuac

SEQ ID NO: 2100986 - RNA, 19 nt, Artificial Sequence
  Description of Artificial Sequence: Synthetic oligonucleotide
  Sense strand starting at position 3322 of SEQ ID NO: 1882178
aguagccuugaguauagaa

SEQ ID NO: 2100987 - RNA, 19 nt, Artificial Sequence
  Description of Artificial Sequence: Synthetic oligonucleotide
  Antisense strand to SEQ ID NO: 2100986
uucuauacucaaggcuacu

SEQ ID NO: 2100988 - RNA, 19 nt, Artificial Sequence
  Description of Artificial Sequence: Synthetic oligonucleotide
  Sense strand starting at position 3342 of SEQ ID NO: 1882178
gacaaauagagguguaguu

SEQ ID NO: 2100989 - RNA, 19 nt, Artificial Sequence
  Description of Artificial Sequence: Synthetic oligonucleotide
  Antisense strand to SEQ ID NO: 2100988
aacuacaccucuauuuguc

SEQ ID NO: 2100990 - RNA, 19 nt, Artificial Sequence
  Description of Artificial Sequence: Synthetic oligonucleotide
  Sense strand starting at position 3430 of SEQ ID NO: 1882178
gcacaagcauaaguauaaa

SEQ ID NO: 2100991 - RNA, 19 nt, Artificial Sequence
  Description of Artificial Sequence: Synthetic oligonucleotide
  Antisense strand to SEQ ID NO: 2100990
uuuauacuuaugcuugugc

SEQ ID NO: 2100992 - RNA, 19 nt, Artificial Sequence
  Description of Artificial Sequence: Synthetic oligonucleotide
  Sense strand starting at position 3598 of SEQ ID NO: 1882178
ugaggaaucugggauuuaa

SEQ ID NO: 2100993 - RNA, 19 nt, Artificial Sequence
  Description of Artificial Sequence: Synthetic oligonucleotide
  Antisense strand to SEQ ID NO: 2100992
uuaaaucccagauuccuca

SEQ ID NO: 2100994 - RNA, 19 nt, Artificial Sequence
  Description of Artificial Sequence: Synthetic oligonucleotide
  Sense strand starting at position 3608 of SEQ ID NO: 1882178
gggauuuaaucugauaguu

SEQ ID NO: 2100995 - RNA, 19 nt, Artificial Sequence
  Description of Artificial Sequence: Synthetic oligonucleotide
  Antisense strand to SEQ ID NO: 2100994
aacuaucagauuaaauccc

SEQ ID NO: 2100996 - RNA, 19 nt, Artificial Sequence
  Description of Artificial Sequence: Synthetic oligonucleotide
  Sense strand starting at position 3948 of SEQ ID NO: 1882178
ucguuauacaacugaggaa

SEQ ID NO: 2100997 - RNA, 19 nt, Artificial Sequence
  Description of Artificial Sequence: Synthetic oligonucleotide
  Antisense strand to SEQ ID NO: 2100996
uuccucaguuguauaacga

SEQ ID NO: 2100998 - RNA, 19 nt, Artificial Sequence
  Description of Artificial Sequence: Synthetic oligonucleotide
  Sense strand starting at position 3977 of SEQ ID NO: 1882178
auuagagucgaguacuaag

SEQ ID NO: 2100999 - RNA, 19 nt, Artificial Sequence
  Description of Artificial Sequence: Synthetic oligonucleotide
  Antisense strand to SEQ ID NO: 2100998
cuuaguacucgacucuaau

SEQ ID NO: 2101000 - RNA, 19 nt, Artificial Sequence
  Description of Artificial Sequence: Synthetic oligonucleotide
  Sense strand starting at position 15 of SEQ ID NO: 1882179
aucucagaauugucugacu

SEQ ID NO: 2101001 - RNA, 19 nt, Artificial Sequence
  Description of Artificial Sequence: Synthetic oligonucleotide
  Antisense strand to SEQ ID NO: 2101000
agucagacaauucugagau

SEQ ID NO: 2101002 - RNA, 19 nt, Artificial Sequence
  Description of Artificial Sequence: Synthetic oligonucleotide
  Sense strand starting at position 17 of SEQ ID NO: 1882179
cucagaauugucugacuua

SEQ ID NO: 2101003 - RNA, 19 nt, Artificial Sequence
  Description of Artificial Sequence: Synthetic oligonucleotide
  Antisense strand to SEQ ID NO: 2101002
uaagucagacaauucugag

SEQ ID NO: 2101004 - RNA, 19 nt, Artificial Sequence
  Description of Artificial Sequence: Synthetic oligonucleotide
  Sense strand starting at position 20 of SEQ ID NO: 1882179
agaauugucugacuuaaug

SEQ ID NO: 2101005 - RNA, 19 nt, Artificial Sequence
  Description of Artificial Sequence: Synthetic oligonucleotide
  Antisense strand to SEQ ID NO: 2101004
cauuaagucagacaauucu

SEQ ID NO: 2101006 - RNA, 19 nt, Artificial Sequence
  Description of Artificial Sequence: Synthetic oligonucleotide
  Sense strand starting at position 387 of SEQ ID NO: 1882179
cccuaagucugucuguaca

SEQ ID NO: 2101007 - RNA, 19 nt, Artificial Sequence
  Description of Artificial Sequence: Synthetic oligonucleotide
  Antisense strand to SEQ ID NO: 2101006
uguacagacagacuuaggg

SEQ ID NO: 2101008 - RNA, 19 nt, Artificial Sequence
  Description of Artificial Sequence: Synthetic oligonucleotide
  Sense strand starting at position 389 of SEQ ID NO: 1882179
cuaagucugucuguacauu

SEQ ID NO: 2101009 - RNA, 19 nt, Artificial Sequence
  Description of Artificial Sequence: Synthetic oligonucleotide
  Antisense strand to SEQ ID NO: 2101008
aauguacagacagacuuag

SEQ ID NO: 2101010 - RNA, 19 nt, Artificial Sequence
  Description of Artificial Sequence: Synthetic oligonucleotide
  Sense strand starting at position 520 of SEQ ID NO: 1882179
agcagacucugagcuacau

SEQ ID NO: 2101011 - RNA, 19 nt, Artificial Sequence
  Description of Artificial Sequence: Synthetic oligonucleotide
  Antisense strand to SEQ ID NO: 2101010
auguagcucagagucugcu

SEQ ID NO: 2101012 - RNA, 19 nt, Artificial Sequence
  Description of Artificial Sequence: Synthetic oligonucleotide
  Sense strand starting at position 581 of SEQ ID NO: 1882179
gaggcagaugucuggaugu

SEQ ID NO: 2101013 - RNA, 19 nt, Artificial Sequence
  Description of Artificial Sequence: Synthetic oligonucleotide
  Antisense strand to SEQ ID NO: 2101012
acauccagacaucugccuc

SEQ ID NO: 2101014 - RNA, 19 nt, Artificial Sequence
  Description of Artificial Sequence: Synthetic oligonucleotide
  Sense strand starting at position 974 of SEQ ID NO: 1882179
uugcauuauuugucagcua

SEQ ID NO: 2101015 - RNA, 19 nt, Artificial Sequence
  Description of Artificial Sequence: Synthetic oligonucleotide
  Antisense strand to SEQ ID NO: 2101014
uagcugacaaauaaugcaa

SEQ ID NO: 2101016 - RNA, 19 nt, Artificial Sequence
  Description of Artificial Sequence: Synthetic oligonucleotide
  Sense strand starting at position 1025 of SEQ ID NO: 1882179
aggcguaauggcuaucuuu

SEQ ID NO: 2101017 - RNA, 19 nt, Artificial Sequence
  Description of Artificial Sequence: Synthetic oligonucleotide
  Antisense strand to SEQ ID NO: 2101016
aaagauagccauuacgccu

SEQ ID NO: 2101018 - RNA, 19 nt, Artificial Sequence
  Description of Artificial Sequence: Synthetic oligonucleotide
  Sense strand starting at position 1091 of SEQ ID NO: 1882179
uccggaugcucuuucucaa

SEQ ID NO: 2101019 - RNA, 19 nt, Artificial Sequence
  Description of Artificial Sequence: Synthetic oligonucleotide
  Antisense strand to SEQ ID NO: 2101018
uugagaaagagcauccgga

SEQ ID NO: 2101020 - RNA, 19 nt, Artificial Sequence
  Description of Artificial Sequence: Synthetic oligonucleotide
  Sense strand starting at position 1288 of SEQ ID NO: 1882179
uguuuccaucacuagaaug

SEQ ID NO: 2101021 - RNA, 19 nt, Artificial Sequence
  Description of Artificial Sequence: Synthetic oligonucleotide
  Antisense strand to SEQ ID NO: 2101020
cauucuagugauggaaaca

SEQ ID NO: 2101022 - RNA, 19 nt, Artificial Sequence
  Description of Artificial Sequence: Synthetic oligonucleotide
  Sense strand starting at position 1430 of SEQ ID NO: 1882179
guaagauagccugggaaag

SEQ ID NO: 2101023 - RNA, 19 nt, Artificial Sequence
  Description of Artificial Sequence: Synthetic oligonucleotide
  Antisense strand to SEQ ID NO: 2101022
cuuucccaggcuaucuuac

SEQ ID NO: 2101024 - RNA, 19 nt, Artificial Sequence
  Description of Artificial Sequence: Synthetic oligonucleotide
  Sense strand starting at position 1441 of SEQ ID NO: 1882179
ugggaaagcaaucggcauu

SEQ ID NO: 2101025 - RNA, 19 nt, Artificial Sequence
  Description of Artificial Sequence: Synthetic oligonucleotide
  Antisense strand to SEQ ID NO: 2101024
aaugccgauugcuuuccca

SEQ ID NO: 2101026 - RNA, 19 nt, Artificial Sequence
  Description of Artificial Sequence: Synthetic oligonucleotide
  Sense strand starting at position 1444 of SEQ ID NO: 1882179
gaaagcaaucggcauugaa

SEQ ID NO: 2101027 - RNA, 19 nt, Artificial Sequence
  Description of Artificial Sequence: Synthetic oligonucleotide
  Antisense strand to SEQ ID NO: 2101026
uucaaugccgauugcuuuc

SEQ ID NO: 2101028 - RNA, 19 nt, Artificial Sequence
  Description of Artificial Sequence: Synthetic oligonucleotide
  Sense strand starting at position 1476 of SEQ ID NO: 1882179
uaaggaaggcgcuagaaua

SEQ ID NO: 2101029 - RNA, 19 nt, Artificial Sequence
  Description of Artificial Sequence: Synthetic oligonucleotide
  Antisense strand to SEQ ID NO: 2101028
uauucuagcgccuuccuua

SEQ ID NO: 2101030 - RNA, 19 nt, Artificial Sequence
  Description of Artificial Sequence: Synthetic oligonucleotide
  Sense strand starting at position 1542 of SEQ ID NO: 1882179
agguuuacgucggcuggaa

SEQ ID NO: 2101031 - RNA, 19 nt, Artificial Sequence
  Description of Artificial Sequence: Synthetic oligonucleotide
  Antisense strand to SEQ ID NO: 2101030
uuccagccgacguaaaccu

SEQ ID NO: 2101032 - RNA, 19 nt, Artificial Sequence
  Description of Artificial Sequence: Synthetic oligonucleotide
  Sense strand starting at position 1546 of SEQ ID NO: 1882179
uuacgucggcuggaauaaa

SEQ ID NO: 2101033 - RNA, 19 nt, Artificial Sequence
  Description of Artificial Sequence: Synthetic oligonucleotide
  Antisense strand to SEQ ID NO: 2101032
uuuauuccagccgacguaa

SEQ ID NO: 2101034 - RNA, 19 nt, Artificial Sequence
  Description of Artificial Sequence: Synthetic oligonucleotide
  Sense strand starting at position 1619 of SEQ ID NO: 1882179
ggcauaaaucacugaguga

SEQ ID NO: 2101035 - RNA, 19 nt, Artificial Sequence
  Description of Artificial Sequence: Synthetic oligonucleotide
  Antisense strand to SEQ ID NO: 2101034
ucacucagugauuuaugcc

SEQ ID NO: 2101036 - RNA, 19 nt, Artificial Sequence
  Description of Artificial Sequence: Synthetic oligonucleotide
  Sense strand starting at position 1788 of SEQ ID NO: 1882179
gagccagaagaguguuuga

SEQ ID NO: 2101037 - RNA, 19 nt, Artificial Sequence
  Description of Artificial Sequence: Synthetic oligonucleotide
  Antisense strand to SEQ ID NO: 2101036
ucaaacacucuucuggcuc

SEQ ID NO: 2101038 - RNA, 19 nt, Artificial Sequence
  Description of Artificial Sequence: Synthetic oligonucleotide
  Sense strand starting at position 1793 of SEQ ID NO: 1882179
agaagaguguuugagaaac

SEQ ID NO: 2101039 - RNA, 19 nt, Artificial Sequence
  Description of Artificial Sequence: Synthetic oligonucleotide
  Antisense strand to SEQ ID NO: 2101038
guuucucaaacacucuucu

SEQ ID NO: 2101040 - RNA, 19 nt, Artificial Sequence
  Description of Artificial Sequence: Synthetic oligonucleotide
  Sense strand starting at position 1799 of SEQ ID NO: 1882179
guguuugagaaacggacau

SEQ ID NO: 2101041 - RNA, 19 nt, Artificial Sequence
  Description of Artificial Sequence: Synthetic oligonucleotide
  Antisense strand to SEQ ID NO: 2101040
auguccguuucucaaacac

SEQ ID NO: 2101042 - RNA, 19 nt, Artificial Sequence
  Description of Artificial Sequence: Synthetic oligonucleotide
  Sense strand starting at position 1914 of SEQ ID NO: 1882179
gcuugucuccgggcuauua

SEQ ID NO: 2101043 - RNA, 19 nt, Artificial Sequence
  Description of Artificial Sequence: Synthetic oligonucleotide
  Antisense strand to SEQ ID NO: 2101042
uaauagcccggagacaagc

SEQ ID NO: 2101044 - RNA, 19 nt, Artificial Sequence
  Description of Artificial Sequence: Synthetic oligonucleotide
  Sense strand starting at position 1924 of SEQ ID NO: 1882179
gggcuauuagccgaugcau

SEQ ID NO: 2101045 - RNA, 19 nt, Artificial Sequence
  Description of Artificial Sequence: Synthetic oligonucleotide
  Antisense strand to SEQ ID NO: 2101044
augcaucggcuaauagccc

SEQ ID NO: 2101046 - RNA, 19 nt, Artificial Sequence
  Description of Artificial Sequence: Synthetic oligonucleotide
  Sense strand starting at position 1987 of SEQ ID NO: 1882179
uugggaaacuccucggaag

SEQ ID NO: 2101047 - RNA, 19 nt, Artificial Sequence
  Description of Artificial Sequence: Synthetic oligonucleotide
  Antisense strand to SEQ ID NO: 2101046
cuuccgaggaguuucccaa

SEQ ID NO: 2101048 - RNA, 19 nt, Artificial Sequence
  Description of Artificial Sequence: Synthetic oligonucleotide
  Sense strand starting at position 2357 of SEQ ID NO: 1882179
cuagaaguagucuggagaa

SEQ ID NO: 2101049 - RNA, 19 nt, Artificial Sequence
  Description of Artificial Sequence: Synthetic oligonucleotide
  Antisense strand to SEQ ID NO: 2101048
uucuccagacuacuucuag

SEQ ID NO: 2101050 - RNA, 19 nt, Artificial Sequence
  Description of Artificial Sequence: Synthetic oligonucleotide
  Sense strand starting at position 2385 of SEQ ID NO: 1882179
auuaguugaccaggauuga

SEQ ID NO: 2101051 - RNA, 19 nt, Artificial Sequence
  Description of Artificial Sequence: Synthetic oligonucleotide
  Antisense strand to SEQ ID NO: 2101050
ucaauccuggucaacuaau

SEQ ID NO: 2101052 - RNA, 19 nt, Artificial Sequence
  Description of Artificial Sequence: Synthetic oligonucleotide
  Sense strand starting at position 2473 of SEQ ID NO: 1882179
uguauuucacagcguuguu

SEQ ID NO: 2101053 - RNA, 19 nt, Artificial Sequence
  Description of Artificial Sequence: Synthetic oligonucleotide
  Antisense strand to SEQ ID NO: 2101052
aacaacgcugugaaauaca

SEQ ID NO: 2101054 - RNA, 19 nt, Artificial Sequence
  Description of Artificial Sequence: Synthetic oligonucleotide
  Sense strand starting at position 2485 of SEQ ID NO: 1882179
cguuguuacgaguacuaaa

SEQ ID NO: 2101055 - RNA, 19 nt, Artificial Sequence
  Description of Artificial Sequence: Synthetic oligonucleotide
  Antisense strand to SEQ ID NO: 2101054
uuuaguacucguaacaacg

SEQ ID NO: 2101056 - RNA, 19 nt, Artificial Sequence
  Description of Artificial Sequence: Synthetic oligonucleotide
  Sense strand starting at position 2593 of SEQ ID NO: 1882179
agcucacggagcuauuauu

SEQ ID NO: 2101057 - RNA, 19 nt, Artificial Sequence
  Description of Artificial Sequence: Synthetic oligonucleotide
  Antisense strand to SEQ ID NO: 2101056
aauaauagcuccgugagcu

SEQ ID NO: 2101058 - RNA, 19 nt, Artificial Sequence
  Description of Artificial Sequence: Synthetic oligonucleotide
  Sense strand starting at position 2599 of SEQ ID NO: 1882179
cggagcuauuauucucuua

SEQ ID NO: 2101059 - RNA, 19 nt, Artificial Sequence
  Description of Artificial Sequence: Synthetic oligonucleotide
  Antisense strand to SEQ ID NO: 2101058
uaagagaauaauagcuccg

SEQ ID NO: 2101060 - RNA, 19 nt, Artificial Sequence
  Description of Artificial Sequence: Synthetic oligonucleotide
  Sense strand starting at position 2620 of SEQ ID NO: 1882179
acccacguucucugaaaua

SEQ ID NO: 2101061 - RNA, 19 nt, Artificial Sequence
  Description of Artificial Sequence: Synthetic oligonucleotide
  Antisense strand to SEQ ID NO: 2101060
uauuucagagaacgugggu

SEQ ID NO: 2101062 - RNA, 19 nt, Artificial Sequence
  Description of Artificial Sequence: Synthetic oligonucleotide
  Sense strand starting at position 2663 of SEQ ID NO: 1882179
guguuucugggucauccau

SEQ ID NO: 2101063 - RNA, 19 nt, Artificial Sequence
  Description of Artificial Sequence: Synthetic oligonucleotide
  Antisense strand to SEQ ID NO: 2101062
auggaugacccagaaacac

SEQ ID NO: 2101064 - RNA, 19 nt, Artificial Sequence
  Description of Artificial Sequence: Synthetic oligonucleotide
  Sense strand starting at position 2665 of SEQ ID NO: 1882179
guuucugggucauccauau

SEQ ID NO: 2101065 - RNA, 19 nt, Artificial Sequence
  Description of Artificial Sequence: Synthetic oligonucleotide
  Antisense strand to SEQ ID NO: 2101064
auauggaugacccagaaac

SEQ ID NO: 2101066 - RNA, 19 nt, Artificial Sequence
  Description of Artificial Sequence: Synthetic oligonucleotide
  Sense strand starting at position 2771 of SEQ ID NO: 1882179
cugggucccugguucaaga

SEQ ID NO: 2101067 - RNA, 19 nt, Artificial Sequence
  Description of Artificial Sequence: Synthetic oligonucleotide
  Antisense strand to SEQ ID NO: 2101066
ucuugaaccagggacccag

SEQ ID NO: 2101068 - RNA, 19 nt, Artificial Sequence
  Description of Artificial Sequence: Synthetic oligonucleotide
  Sense strand starting at position 3096 of SEQ ID NO: 1882179
gacuauucucaugggcaua

SEQ ID NO: 2101069 - RNA, 19 nt, Artificial Sequence
  Description of Artificial Sequence: Synthetic oligonucleotide
  Antisense strand to SEQ ID NO: 2101068
uaugcccaugagaauaguc

SEQ ID NO: 2101070 - RNA, 19 nt, Artificial Sequence
  Description of Artificial Sequence: Synthetic oligonucleotide
  Sense strand starting at position 3110 of SEQ ID NO: 1882179
gcauaaguacucuaacgaa

SEQ ID NO: 2101071 - RNA, 19 nt, Artificial Sequence
  Description of Artificial Sequence: Synthetic oligonucleotide
  Antisense strand to SEQ ID NO: 2101070
uucguuagaguacuuaugc

SEQ ID NO: 2101072 - RNA, 19 nt, Artificial Sequence
  Description of Artificial Sequence: Synthetic oligonucleotide
  Sense strand starting at position 3259 of SEQ ID NO: 1882179
uccucaguguacuuaugaa

SEQ ID NO: 2101073 - RNA, 19 nt, Artificial Sequence
  Description of Artificial Sequence: Synthetic oligonucleotide
  Antisense strand to SEQ ID NO: 2101072
uucauaaguacacugagga

SEQ ID NO: 2101074 - RNA, 19 nt, Artificial Sequence
  Description of Artificial Sequence: Synthetic oligonucleotide
  Sense strand starting at position 3480 of SEQ ID NO: 1882179
aagagauucgcuugaacuu

SEQ ID NO: 2101075 - RNA, 19 nt, Artificial Sequence
  Description of Artificial Sequence: Synthetic oligonucleotide
  Antisense strand to SEQ ID NO: 2101074
aaguucaagcgaaucucuu

SEQ ID NO: 2101076 - RNA, 19 nt, Artificial Sequence
  Description of Artificial Sequence: Synthetic oligonucleotide
  Sense strand starting at position 3481 of SEQ ID NO: 1882179
agagauucgcuugaacuug

SEQ ID NO: 2101077 - RNA, 19 nt, Artificial Sequence
  Description of Artificial Sequence: Synthetic oligonucleotide
  Antisense strand to SEQ ID NO: 2101076
caaguucaagcgaaucucu

SEQ ID NO: 2101078 - RNA, 19 nt, Artificial Sequence
  Description of Artificial Sequence: Synthetic oligonucleotide
  Sense strand starting at position 3601 of SEQ ID NO: 1882179
uuucccaugucugcacaua

SEQ ID NO: 2101079 - RNA, 19 nt, Artificial Sequence
  Description of Artificial Sequence: Synthetic oligonucleotide
  Antisense strand to SEQ ID NO: 2101078
uaugugcagacaugggaaa

SEQ ID NO: 2101080 - RNA, 19 nt, Artificial Sequence
  Description of Artificial Sequence: Synthetic oligonucleotide
  Sense strand starting at position 83 of SEQ ID NO: 1882180
cuggauaugucugcuauga

SEQ ID NO: 2101081 - RNA, 19 nt, Artificial Sequence
  Description of Artificial Sequence: Synthetic oligonucleotide
  Antisense strand to SEQ ID NO: 2101080
ucauagcagacauauccag

SEQ ID NO: 2101082 - RNA, 19 nt, Artificial Sequence
  Description of Artificial Sequence: Synthetic oligonucleotide
  Sense strand starting at position 128 of SEQ ID NO: 1882180
ggaagcuccaucuauggua

SEQ ID NO: 2101083 - RNA, 19 nt, Artificial Sequence
  Description of Artificial Sequence: Synthetic oligonucleotide
  Antisense strand to SEQ ID NO: 2101082
uaccauagauggagcuucc

SEQ ID NO: 2101084 - RNA, 19 nt, Artificial Sequence
  Description of Artificial Sequence: Synthetic oligonucleotide
  Sense strand starting at position 130 of SEQ ID NO: 1882180
aagcuccaucuaugguaga

SEQ ID NO: 2101085 - RNA, 19 nt, Artificial Sequence
  Description of Artificial Sequence: Synthetic oligonucleotide
  Antisense strand to SEQ ID NO: 2101084
ucuaccauagauggagcuu

SEQ ID NO: 2101086 - RNA, 19 nt, Artificial Sequence
  Description of Artificial Sequence: Synthetic oligonucleotide
  Sense strand starting at position 291 of SEQ ID NO: 1882180
guaugagugcugcaaugga

SEQ ID NO: 2101087 - RNA, 19 nt, Artificial Sequence
  Description of Artificial Sequence: Synthetic oligonucleotide
  Antisense strand to SEQ ID NO: 2101086
uccauugcagcacucauac

SEQ ID NO: 2101088 - RNA, 19 nt, Artificial Sequence
  Description of Artificial Sequence: Synthetic oligonucleotide
  Sense strand starting at position 1073 of SEQ ID NO: 1882180
ccuaauuggagucgggaga

SEQ ID NO: 2101089 - RNA, 19 nt, Artificial Sequence
  Description of Artificial Sequence: Synthetic oligonucleotide
  Antisense strand to SEQ ID NO: 2101088
ucucccgacuccaauuagg

SEQ ID NO: 2101090 - RNA, 19 nt, Artificial Sequence
  Description of Artificial Sequence: Synthetic oligonucleotide
  Sense strand starting at position 1521 of SEQ ID NO: 1882180
agggcuugcucucugagaa

SEQ ID NO: 2101091 - RNA, 19 nt, Artificial Sequence
  Description of Artificial Sequence: Synthetic oligonucleotide
  Antisense strand to SEQ ID NO: 2101090
uucucagagagcaagcccu

SEQ ID NO: 2101092 - RNA, 19 nt, Artificial Sequence
  Description of Artificial Sequence: Synthetic oligonucleotide
  Sense strand starting at position 1522 of SEQ ID NO: 1882180
gggcuugcucucugagaag

SEQ ID NO: 2101093 - RNA, 19 nt, Artificial Sequence
  Description of Artificial Sequence: Synthetic oligonucleotide
  Antisense strand to SEQ ID NO: 2101092
cuucucagagagcaagccc

SEQ ID NO: 2101094 - RNA, 19 nt, Artificial Sequence
  Description of Artificial Sequence: Synthetic oligonucleotide
  Sense strand starting at position 1675 of SEQ ID NO: 1882180
gaaugaacucgccaaccgu

SEQ ID NO: 2101095 - RNA, 19 nt, Artificial Sequence
  Description of Artificial Sequence: Synthetic oligonucleotide
  Antisense strand to SEQ ID NO: 2101094
acgguuggcgaguucauuc

SEQ ID NO: 2101096 - RNA, 19 nt, Artificial Sequence
  Description of Artificial Sequence: Synthetic oligonucleotide
  Sense strand starting at position 2029 of SEQ ID NO: 1882180
ggaaucuuccuccgcgaag

SEQ ID NO: 2101097 - RNA, 19 nt, Artificial Sequence
  Description of Artificial Sequence: Synthetic oligonucleotide
  Antisense strand to SEQ ID NO: 2101096
cuucgcggaggaagauucc

SEQ ID NO: 2101098 - RNA, 19 nt, Artificial Sequence
  Description of Artificial Sequence: Synthetic oligonucleotide
  Sense strand starting at position 2096 of SEQ ID NO: 1882180
ccuggagcugcucagaauu

SEQ ID NO: 2101099 - RNA, 19 nt, Artificial Sequence
  Description of Artificial Sequence: Synthetic oligonucleotide
  Antisense strand to SEQ ID NO: 2101098
aauucugagcagcuccagg

SEQ ID NO: 2101100 - RNA, 19 nt, Artificial Sequence
  Description of Artificial Sequence: Synthetic oligonucleotide
  Sense strand starting at position 2488 of SEQ ID NO: 1882180
ugugacugcuuccuuaauu

SEQ ID NO: 2101101 - RNA, 19 nt, Artificial Sequence
  Description of Artificial Sequence: Synthetic oligonucleotide
  Antisense strand to SEQ ID NO: 2101100
aauuaaggaagcagucaca

SEQ ID NO: 2101102 - RNA, 19 nt, Artificial Sequence
  Description of Artificial Sequence: Synthetic oligonucleotide
  Sense strand starting at position 2489 of SEQ ID NO: 1882180
gugacugcuuccuuaauuc

SEQ ID NO: 2101103 - RNA, 19 nt, Artificial Sequence
  Description of Artificial Sequence: Synthetic oligonucleotide
  Antisense strand to SEQ ID NO: 2101102
gaauuaaggaagcagucac

SEQ ID NO: 2101104 - RNA, 19 nt, Artificial Sequence
  Description of Artificial Sequence: Synthetic oligonucleotide
  Sense strand starting at position 2613 of SEQ ID NO: 1882180
cucaaauagcuauauggua

SEQ ID NO: 2101105 - RNA, 19 nt, Artificial Sequence
  Description of Artificial Sequence: Synthetic oligonucleotide
  Antisense strand to SEQ ID NO: 2101104
uaccauauagcuauuugag

SEQ ID NO: 2101106 - RNA, 19 nt, Artificial Sequence
  Description of Artificial Sequence: Synthetic oligonucleotide
  Sense strand starting at position 2689 of SEQ ID NO: 1882180
gaaguccagcugugaacaa

SEQ ID NO: 2101107 - RNA, 19 nt, Artificial Sequence
  Description of Artificial Sequence: Synthetic oligonucleotide
  Antisense strand to SEQ ID NO: 2101106
uuguucacagcuggacuuc

SEQ ID NO: 2101108 - RNA, 19 nt, Artificial Sequence
  Description of Artificial Sequence: Synthetic oligonucleotide
  Sense strand starting at position 2696 of SEQ ID NO: 1882180
agcugugaacaagguauau

SEQ ID NO: 2101109 - RNA, 19 nt, Artificial Sequence
  Description of Artificial Sequence: Synthetic oligonucleotide
  Antisense strand to SEQ ID NO: 2101108
auauaccuuguucacagcu

SEQ ID NO: 2101110 - RNA, 19 nt, Artificial Sequence
  Description of Artificial Sequence: Synthetic oligonucleotide
  Sense strand starting at position 2698 of SEQ ID NO: 1882180
cugugaacaagguauaugu

SEQ ID NO: 2101111 - RNA, 19 nt, Artificial Sequence
  Description of Artificial Sequence: Synthetic oligonucleotide
  Antisense strand to SEQ ID NO: 2101110
acauauaccuuguucacag

SEQ ID NO: 2101112 - RNA, 19 nt, Artificial Sequence
  Description of Artificial Sequence: Synthetic oligonucleotide
  Sense strand starting at position 2702 of SEQ ID NO: 1882180
gaacaagguauaugugguu

SEQ ID NO: 2101113 - RNA, 19 nt, Artificial Sequence
  Description of Artificial Sequence: Synthetic oligonucleotide
  Antisense strand to SEQ ID NO: 2101112
aaccacauauaccuuguuc

SEQ ID NO: 2101114 - RNA, 19 nt, Artificial Sequence
  Description of Artificial Sequence: Synthetic oligonucleotide
  Sense strand starting at position 2729 of SEQ ID NO: 1882180
ucugaaucuuaagucuagu

SEQ ID NO: 2101115 - RNA, 19 nt, Artificial Sequence
  Description of Artificial Sequence: Synthetic oligonucleotide
  Antisense strand to SEQ ID NO: 2101114
acuagacuuaagauucaga

SEQ ID NO: 2101116 - RNA, 19 nt, Artificial Sequence
  Description of Artificial Sequence: Synthetic oligonucleotide
  Sense strand starting at position 2742 of SEQ ID NO: 1882180
ucuaguagacugcauagau

SEQ ID NO: 2101117 - RNA, 19 nt, Artificial Sequence
  Description of Artificial Sequence: Synthetic oligonucleotide
  Antisense strand to SEQ ID NO: 2101116
aucuaugcagucuacuaga

SEQ ID NO: 2101118 - RNA, 19 nt, Artificial Sequence
  Description of Artificial Sequence: Synthetic oligonucleotide
  Sense strand starting at position 2817 of SEQ ID NO: 1882180
cgaaguaacugggugucaa

SEQ ID NO: 2101119 - RNA, 19 nt, Artificial Sequence
  Description of Artificial Sequence: Synthetic oligonucleotide
  Antisense strand to SEQ ID NO: 2101118
uugacacccaguuacuucg

SEQ ID NO: 2101120 - RNA, 19 nt, Artificial Sequence
  Description of Artificial Sequence: Synthetic oligonucleotide
  Sense strand starting at position 2818 of SEQ ID NO: 1882180
gaaguaacugggugucaag

SEQ ID NO: 2101121 - RNA, 19 nt, Artificial Sequence
  Description of Artificial Sequence: Synthetic oligonucleotide
  Antisense strand to SEQ ID NO: 2101120
cuugacacccaguuacuuc

SEQ ID NO: 2101122 - RNA, 19 nt, Artificial Sequence
  Description of Artificial Sequence: Synthetic oligonucleotide
  Sense strand starting at position 2927 of SEQ ID NO: 1882180
aggaguucagcccaggagu

SEQ ID NO: 2101123 - RNA, 19 nt, Artificial Sequence
  Description of Artificial Sequence: Synthetic oligonucleotide
  Antisense strand to SEQ ID NO: 2101122
acuccugggcugaacuccu

SEQ ID NO: 2101124 - RNA, 19 nt, Artificial Sequence
  Description of Artificial Sequence: Synthetic oligonucleotide
  Sense strand starting at position 3008 of SEQ ID NO: 1882180
ugaugugaagucuaagugu

SEQ ID NO: 2101125 - RNA, 19 nt, Artificial Sequence
  Description of Artificial Sequence: Synthetic oligonucleotide
  Antisense strand to SEQ ID NO: 2101124
acacuuagacuucacauca

SEQ ID NO: 2101126 - RNA, 19 nt, Artificial Sequence
  Description of Artificial Sequence: Synthetic oligonucleotide
  Sense strand starting at position 3084 of SEQ ID NO: 1882180
gaaacaauguugcuggaua

SEQ ID NO: 2101127 - RNA, 19 nt, Artificial Sequence
  Description of Artificial Sequence: Synthetic oligonucleotide
  Antisense strand to SEQ ID NO: 2101126
uauccagcaacauuguuuc

SEQ ID NO: 2101128 - RNA, 19 nt, Artificial Sequence
  Description of Artificial Sequence: Synthetic oligonucleotide
  Sense strand starting at position 3106 of SEQ ID NO: 1882180
gcacaagggugccuuauaa

SEQ ID NO: 2101129 - RNA, 19 nt, Artificial Sequence
  Description of Artificial Sequence: Synthetic oligonucleotide
  Antisense strand to SEQ ID NO: 2101128
uuauaaggcacccuugugc

SEQ ID NO: 2101130 - RNA, 19 nt, Artificial Sequence
  Description of Artificial Sequence: Synthetic oligonucleotide
  Sense strand starting at position 3126 of SEQ ID NO: 1882180
aaguguugaagaugucaga

SEQ ID NO: 2101131 - RNA, 19 nt, Artificial Sequence
  Description of Artificial Sequence: Synthetic oligonucleotide
  Antisense strand to SEQ ID NO: 2101130
ucugacaucuucaacacuu

SEQ ID NO: 2101132 - RNA, 19 nt, Artificial Sequence
  Description of Artificial Sequence: Synthetic oligonucleotide
  Sense strand starting at position 3129 of SEQ ID NO: 1882180
uguugaagaugucagauuu

SEQ ID NO: 2101133 - RNA, 19 nt, Artificial Sequence
  Description of Artificial Sequence: Synthetic oligonucleotide
  Antisense strand to SEQ ID NO: 2101132
aaaucugacaucuucaaca

SEQ ID NO: 2101134 - RNA, 19 nt, Artificial Sequence
  Description of Artificial Sequence: Synthetic oligonucleotide
  Sense strand starting at position 3273 of SEQ ID NO: 1882180
gggagacuguuaguaaugu

SEQ ID NO: 2101135 - RNA, 19 nt, Artificial Sequence
  Description of Artificial Sequence: Synthetic oligonucleotide
  Antisense strand to SEQ ID NO: 2101134
acauuacuaacagucuccc

SEQ ID NO: 2101136 - RNA, 19 nt, Artificial Sequence
  Description of Artificial Sequence: Synthetic oligonucleotide
  Sense strand starting at position 3279 of SEQ ID NO: 1882180
cuguuaguaauguagauga

SEQ ID NO: 2101137 - RNA, 19 nt, Artificial Sequence
  Description of Artificial Sequence: Synthetic oligonucleotide
  Antisense strand to SEQ ID NO: 2101136
ucaucuacauuacuaacag

SEQ ID NO: 2101138 - RNA, 19 nt, Artificial Sequence
  Description of Artificial Sequence: Synthetic oligonucleotide
  Sense strand starting at position 3315 of SEQ ID NO: 1882180
gaauuagagagcuggucag

SEQ ID NO: 2101139 - RNA, 19 nt, Artificial Sequence
  Description of Artificial Sequence: Synthetic oligonucleotide
  Antisense strand to SEQ ID NO: 2101138
cugaccagcucucuaauuc

SEQ ID NO: 2101140 - RNA, 19 nt, Artificial Sequence
  Description of Artificial Sequence: Synthetic oligonucleotide
  Sense strand starting at position 3654 of SEQ ID NO: 1882180
caacauuggcuguaaagca

SEQ ID NO: 2101141 - RNA, 19 nt, Artificial Sequence
  Description of Artificial Sequence: Synthetic oligonucleotide
  Antisense strand to SEQ ID NO: 2101140
ugcuuuacagccaauguug

SEQ ID NO: 2101142 - RNA, 19 nt, Artificial Sequence
  Description of Artificial Sequence: Synthetic oligonucleotide
  Sense strand starting at position 3697 of SEQ ID NO: 1882180
gcuggauauauuggugaca

SEQ ID NO: 2101143 - RNA, 19 nt, Artificial Sequence
  Description of Artificial Sequence: Synthetic oligonucleotide
  Antisense strand to SEQ ID NO: 2101142
ugucaccaauauauccagc

SEQ ID NO: 2101144 - RNA, 19 nt, Artificial Sequence
  Description of Artificial Sequence: Synthetic oligonucleotide
  Sense strand starting at position 3698 of SEQ ID NO: 1882180
cuggauauauuggugacaa

SEQ ID NO: 2101145 - RNA, 19 nt, Artificial Sequence
  Description of Artificial Sequence: Synthetic oligonucleotide
  Antisense strand to SEQ ID NO: 2101144
uugucaccaauauauccag

SEQ ID NO: 2101146 - RNA, 19 nt, Artificial Sequence
  Description of Artificial Sequence: Synthetic oligonucleotide
  Sense strand starting at position 3733 of SEQ ID NO: 1882180
aaagauggcuccuggauuu

SEQ ID NO: 2101147 - RNA, 19 nt, Artificial Sequence
  Description of Artificial Sequence: Synthetic oligonucleotide
  Antisense strand to SEQ ID NO: 2101146
aaauccaggagccaucuuu

SEQ ID NO: 2101148 - RNA, 19 nt, Artificial Sequence
  Description of Artificial Sequence: Synthetic oligonucleotide
  Sense strand starting at position 3746 of SEQ ID NO: 1882180
ggauuucuggcuugagcca

SEQ ID NO: 2101149 - RNA, 19 nt, Artificial Sequence
  Description of Artificial Sequence: Synthetic oligonucleotide
  Antisense strand to SEQ ID NO: 2101148
uggcucaagccagaaaucc

SEQ ID NO: 2101150 - RNA, 19 nt, Artificial Sequence
  Description of Artificial Sequence: Synthetic oligonucleotide
  Sense strand starting at position 3764 of SEQ ID NO: 1882180
aguagauuguuggcaccau

SEQ ID NO: 2101151 - RNA, 19 nt, Artificial Sequence
  Description of Artificial Sequence: Synthetic oligonucleotide
  Antisense strand to SEQ ID NO: 2101150
auggugccaacaaucuacu

SEQ ID NO: 2101152 - RNA, 19 nt, Artificial Sequence
  Description of Artificial Sequence: Synthetic oligonucleotide
  Sense strand starting at position 3829 of SEQ ID NO: 1882180
gauggaaccagagguguua

SEQ ID NO: 2101153 - RNA, 19 nt, Artificial Sequence
  Description of Artificial Sequence: Synthetic oligonucleotide
  Antisense strand to SEQ ID NO: 2101152
uaacaccucugguuccauc

SEQ ID NO: 2101154 - RNA, 19 nt, Artificial Sequence
  Description of Artificial Sequence: Synthetic oligonucleotide
  Sense strand starting at position 3863 of SEQ ID NO: 1882180
guuagaggcccuuggauau

SEQ ID NO: 2101155 - RNA, 19 nt, Artificial Sequence
  Description of Artificial Sequence: Synthetic oligonucleotide
  Antisense strand to SEQ ID NO: 2101154
auauccaagggccucuaac

SEQ ID NO: 2101156 - RNA, 19 nt, Artificial Sequence
  Description of Artificial Sequence: Synthetic oligonucleotide
  Sense strand starting at position 3923 of SEQ ID NO: 1882180
gauagagauuugcaaguuu

SEQ ID NO: 2101157 - RNA, 19 nt, Artificial Sequence
  Description of Artificial Sequence: Synthetic oligonucleotide
  Antisense strand to SEQ ID NO: 2101156
aaacuugcaaaucucuauc

SEQ ID NO: 2101158 - RNA, 19 nt, Artificial Sequence
  Description of Artificial Sequence: Synthetic oligonucleotide
  Sense strand starting at position 3953 of SEQ ID NO: 1882180
ggaauauugaaguguuaag

SEQ ID NO: 2101159 - RNA, 19 nt, Artificial Sequence
  Description of Artificial Sequence: Synthetic oligonucleotide
  Antisense strand to SEQ ID NO: 2101158
cuuaacacuucaauauucc

SEQ ID NO: 2101160 - RNA, 19 nt, Artificial Sequence
  Description of Artificial Sequence: Synthetic oligonucleotide
  Sense strand starting at position 53 of SEQ ID NO: 1882181
uuccuauggugucuugaua

SEQ ID NO: 2101161 - RNA, 19 nt, Artificial Sequence
  Description of Artificial Sequence: Synthetic oligonucleotide
  Antisense strand to SEQ ID NO: 2101160
uaucaagacaccauaggaa

SEQ ID NO: 2101162 - RNA, 19 nt, Artificial Sequence
  Description of Artificial Sequence: Synthetic oligonucleotide
  Sense strand starting at position 91 of SEQ ID NO: 1882181
accaauuguuugcuaagua

SEQ ID NO: 2101163 - RNA, 19 nt, Artificial Sequence
  Description of Artificial Sequence: Synthetic oligonucleotide
  Antisense strand to SEQ ID NO: 2101162
uacuuagcaaacaauuggu

SEQ ID NO: 2101164 - RNA, 19 nt, Artificial Sequence
  Description of Artificial Sequence: Synthetic oligonucleotide
  Sense strand starting at position 96 of SEQ ID NO: 1882181
uuguuugcuaaguauugua

SEQ ID NO: 2101165 - RNA, 19 nt, Artificial Sequence
  Description of Artificial Sequence: Synthetic oligonucleotide
  Antisense strand to SEQ ID NO: 2101164
uacaauacuuagcaaacaa

SEQ ID NO: 2101166 - RNA, 19 nt, Artificial Sequence
  Description of Artificial Sequence: Synthetic oligonucleotide
  Sense strand starting at position 439 of SEQ ID NO: 1882181
ggcagcuaucuuggcaaau

SEQ ID NO: 2101167 - RNA, 19 nt, Artificial Sequence
  Description of Artificial Sequence: Synthetic oligonucleotide
  Antisense strand to SEQ ID NO: 2101166
auuugccaagauagcugcc

SEQ ID NO: 2101168 - RNA, 19 nt, Artificial Sequence
  Description of Artificial Sequence: Synthetic oligonucleotide
  Sense strand starting at position 440 of SEQ ID NO: 1882181
gcagcuaucuuggcaaaug

SEQ ID NO: 2101169 - RNA, 19 nt, Artificial Sequence
  Description of Artificial Sequence: Synthetic oligonucleotide
  Antisense strand to SEQ ID NO: 2101168
cauuugccaagauagcugc

SEQ ID NO: 2101170 - RNA, 19 nt, Artificial Sequence
  Description of Artificial Sequence: Synthetic oligonucleotide
  Sense strand starting at position 451 of SEQ ID NO: 1882181
ggcaaauguuaaucucaau

SEQ ID NO: 2101171 - RNA, 19 nt, Artificial Sequence
  Description of Artificial Sequence: Synthetic oligonucleotide
  Antisense strand to SEQ ID NO: 2101170
auugagauuaacauuugcc

SEQ ID NO: 2101172 - RNA, 19 nt, Artificial Sequence
  Description of Artificial Sequence: Synthetic oligonucleotide
  Sense strand starting at position 675 of SEQ ID NO: 1882181
gcuggauaugucugcuaug

SEQ ID NO: 2101173 - RNA, 19 nt, Artificial Sequence
  Description of Artificial Sequence: Synthetic oligonucleotide
  Antisense strand to SEQ ID NO: 2101172
cauagcagacauauccagc

SEQ ID NO: 2101174 - RNA, 19 nt, Artificial Sequence
  Description of Artificial Sequence: Synthetic oligonucleotide
  Sense strand starting at position 676 of SEQ ID NO: 1882181
cuggauaugucugcuauga

SEQ ID NO: 2101175 - RNA, 19 nt, Artificial Sequence
  Description of Artificial Sequence: Synthetic oligonucleotide
  Antisense strand to SEQ ID NO: 2101174
ucauagcagacauauccag

SEQ ID NO: 2101176 - RNA, 19 nt, Artificial Sequence
  Description of Artificial Sequence: Synthetic oligonucleotide
  Sense strand starting at position 721 of SEQ ID NO: 1882181
ggaagcuccaucuauggua

SEQ ID NO: 2101177 - RNA, 19 nt, Artificial Sequence
  Description of Artificial Sequence: Synthetic oligonucleotide
  Antisense strand to SEQ ID NO: 2101176
uaccauagauggagcuucc

SEQ ID NO: 2101178 - RNA, 19 nt, Artificial Sequence
  Description of Artificial Sequence: Synthetic oligonucleotide
  Sense strand starting at position 723 of SEQ ID NO: 1882181
aagcuccaucuaugguaga

SEQ ID NO: 2101179 - RNA, 19 nt, Artificial Sequence
  Description of Artificial Sequence: Synthetic oligonucleotide
  Antisense strand to SEQ ID NO: 2101178
ucuaccauagauggagcuu

SEQ ID NO: 2101180 - RNA, 19 nt, Artificial Sequence
  Description of Artificial Sequence: Synthetic oligonucleotide
  Sense strand starting at position 884 of SEQ ID NO: 1882181
guaugagugcugcaaugga

SEQ ID NO: 2101181 - RNA, 19 nt, Artificial Sequence
  Description of Artificial Sequence: Synthetic oligonucleotide
  Antisense strand to SEQ ID NO: 2101180
uccauugcagcacucauac

SEQ ID NO: 2101182 - RNA, 19 nt, Artificial Sequence
  Description of Artificial Sequence: Synthetic oligonucleotide
  Sense strand starting at position 1161 of SEQ ID NO: 1882181
agugcaaucuggucccagu

SEQ ID NO: 2101183 - RNA, 19 nt, Artificial Sequence
  Description of Artificial Sequence: Synthetic oligonucleotide
  Antisense strand to SEQ ID NO: 2101182
acugggaccagauugcacu

SEQ ID NO: 2101184 - RNA, 19 nt, Artificial Sequence
  Description of Artificial Sequence: Synthetic oligonucleotide
  Sense strand starting at position 1666 of SEQ ID NO: 1882181
ccuaauuggagucgggaga

SEQ ID NO: 2101185 - RNA, 19 nt, Artificial Sequence
  Description of Artificial Sequence: Synthetic oligonucleotide
  Antisense strand to SEQ ID NO: 2101184
ucucccgacuccaauuagg

SEQ ID NO: 2101186 - RNA, 19 nt, Artificial Sequence
  Description of Artificial Sequence: Synthetic oligonucleotide
  Sense strand starting at position 2114 of SEQ ID NO: 1882181
agggcuugcucucugagaa

SEQ ID NO: 2101187 - RNA, 19 nt, Artificial Sequence
  Description of Artificial Sequence: Synthetic oligonucleotide
  Antisense strand to SEQ ID NO: 2101186
uucucagagagcaagcccu

SEQ ID NO: 2101188 - RNA, 19 nt, Artificial Sequence
  Description of Artificial Sequence: Synthetic oligonucleotide
  Sense strand starting at position 2115 of SEQ ID NO: 1882181
gggcuugcucucugagaag

SEQ ID NO: 2101189 - RNA, 19 nt, Artificial Sequence
  Description of Artificial Sequence: Synthetic oligonucleotide
  Antisense strand to SEQ ID NO: 2101188
cuucucagagagcaagccc

SEQ ID NO: 2101190 - RNA, 19 nt, Artificial Sequence
  Description of Artificial Sequence: Synthetic oligonucleotide
  Sense strand starting at position 2268 of SEQ ID NO: 1882181
gaaugaacucgccaaccgu

SEQ ID NO: 2101191 - RNA, 19 nt, Artificial Sequence
  Description of Artificial Sequence: Synthetic oligonucleotide
  Antisense strand to SEQ ID NO: 2101190
acgguuggcgaguucauuc

SEQ ID NO: 2101192 - RNA, 19 nt, Artificial Sequence
  Description of Artificial Sequence: Synthetic oligonucleotide
  Sense strand starting at position 2622 of SEQ ID NO: 1882181
ggaaucuuccuccgcgaag

SEQ ID NO: 2101193 - RNA, 19 nt, Artificial Sequence
  Description of Artificial Sequence: Synthetic oligonucleotide
  Antisense strand to SEQ ID NO: 2101192
cuucgcggaggaagauucc

SEQ ID NO: 2101194 - RNA, 19 nt, Artificial Sequence
  Description of Artificial Sequence: Synthetic oligonucleotide
  Sense strand starting at position 2689 of SEQ ID NO: 1882181
ccuggagcugcucagaauu

SEQ ID NO: 2101195 - RNA, 19 nt, Artificial Sequence
  Description of Artificial Sequence: Synthetic oligonucleotide
  Antisense strand to SEQ ID NO: 2101194
aauucugagcagcuccagg

SEQ ID NO: 2101196 - RNA, 19 nt, Artificial Sequence
  Description of Artificial Sequence: Synthetic oligonucleotide
  Sense strand starting at position 3081 of SEQ ID NO: 1882181
ugugacugcuuccuuaauu

SEQ ID NO: 2101197 - RNA, 19 nt, Artificial Sequence
  Description of Artificial Sequence: Synthetic oligonucleotide
  Antisense strand to SEQ ID NO: 2101196
aauuaaggaagcagucaca

SEQ ID NO: 2101198 - RNA, 19 nt, Artificial Sequence
  Description of Artificial Sequence: Synthetic oligonucleotide
  Sense strand starting at position 3082 of SEQ ID NO: 1882181
gugacugcuuccuuaauuc

SEQ ID NO: 2101199 - RNA, 19 nt, Artificial Sequence
  Description of Artificial Sequence: Synthetic oligonucleotide
  Antisense strand to SEQ ID NO: 2101198
gaauuaaggaagcagucac

SEQ ID NO: 2101200 - RNA, 19 nt, Artificial Sequence
  Description of Artificial Sequence: Synthetic oligonucleotide
  Sense strand starting at position 3206 of SEQ ID NO: 1882181
cucaaauagcuauauggua

SEQ ID NO: 2101201 - RNA, 19 nt, Artificial Sequence
  Description of Artificial Sequence: Synthetic oligonucleotide
  Antisense strand to SEQ ID NO: 2101200
uaccauauagcuauuugag

SEQ ID NO: 2101202 - RNA, 19 nt, Artificial Sequence
  Description of Artificial Sequence: Synthetic oligonucleotide
  Sense strand starting at position 3257 of SEQ ID NO: 1882181
ugagaauccuaguacuaga

SEQ ID NO: 2101203 - RNA, 19 nt, Artificial Sequence
  Description of Artificial Sequence: Synthetic oligonucleotide
  Antisense strand to SEQ ID NO: 2101202
ucuaguacuaggauucuca

SEQ ID NO: 2101204 - RNA, 19 nt, Artificial Sequence
  Description of Artificial Sequence: Synthetic oligonucleotide
  Sense strand starting at position 3282 of SEQ ID NO: 1882181
gaaguccagcugugaacaa

SEQ ID NO: 2101205 - RNA, 19 nt, Artificial Sequence
  Description of Artificial Sequence: Synthetic oligonucleotide
  Antisense strand to SEQ ID NO: 2101204
uuguucacagcuggacuuc

SEQ ID NO: 2101206 - RNA, 19 nt, Artificial Sequence
  Description of Artificial Sequence: Synthetic oligonucleotide
  Sense strand starting at position 3289 of SEQ ID NO: 1882181
agcugugaacaagguauau

SEQ ID NO: 2101207 - RNA, 19 nt, Artificial Sequence
  Description of Artificial Sequence: Synthetic oligonucleotide
  Antisense strand to SEQ ID NO: 2101206
auauaccuuguucacagcu

SEQ ID NO: 2101208 - RNA, 19 nt, Artificial Sequence
  Description of Artificial Sequence: Synthetic oligonucleotide
  Sense strand starting at position 3291 of SEQ ID NO: 1882181
cugugaacaagguauaugu

SEQ ID NO: 2101209 - RNA, 19 nt, Artificial Sequence
  Description of Artificial Sequence: Synthetic oligonucleotide
  Antisense strand to SEQ ID NO: 2101208
acauauaccuuguucacag

SEQ ID NO: 2101210 - RNA, 19 nt, Artificial Sequence
  Description of Artificial Sequence: Synthetic oligonucleotide
  Sense strand starting at position 3295 of SEQ ID NO: 1882181
gaacaagguauaugugguu

SEQ ID NO: 2101211 - RNA, 19 nt, Artificial Sequence
  Description of Artificial Sequence: Synthetic oligonucleotide
  Antisense strand to SEQ ID NO: 2101210
aaccacauauaccuuguuc

SEQ ID NO: 2101212 - RNA, 19 nt, Artificial Sequence
  Description of Artificial Sequence: Synthetic oligonucleotide
  Sense strand starting at position 3322 of SEQ ID NO: 1882181
ucugaaucuuaagucuagu

SEQ ID NO: 2101213 - RNA, 19 nt, Artificial Sequence
  Description of Artificial Sequence: Synthetic oligonucleotide
  Antisense strand to SEQ ID NO: 2101212
acuagacuuaagauucaga

SEQ ID NO: 2101214 - RNA, 19 nt, Artificial Sequence
  Description of Artificial Sequence: Synthetic oligonucleotide
  Sense strand starting at position 3335 of SEQ ID NO: 1882181
ucuaguagacugcauagau

SEQ ID NO: 2101215 - RNA, 19 nt, Artificial Sequence
  Description of Artificial Sequence: Synthetic oligonucleotide
  Antisense strand to SEQ ID NO: 2101214
aucuaugcagucuacuaga

SEQ ID NO: 2101216 - RNA, 19 nt, Artificial Sequence
  Description of Artificial Sequence: Synthetic oligonucleotide
  Sense strand starting at position 3410 of SEQ ID NO: 1882181
cgaaguaacugggugucaa

SEQ ID NO: 2101217 - RNA, 19 nt, Artificial Sequence
  Description of Artificial Sequence: Synthetic oligonucleotide
  Antisense strand to SEQ ID NO: 2101216
uugacacccaguuacuucg

SEQ ID NO: 2101218 - RNA, 19 nt, Artificial Sequence
  Description of Artificial Sequence: Synthetic oligonucleotide
  Sense strand starting at position 3411 of SEQ ID NO: 1882181
gaaguaacugggugucaag

SEQ ID NO: 2101219 - RNA, 19 nt, Artificial Sequence
  Description of Artificial Sequence: Synthetic oligonucleotide
  Antisense strand to SEQ ID NO: 2101218
cuugacacccaguuacuuc

SEQ ID NO: 2101220 - RNA, 19 nt, Artificial Sequence
  Description of Artificial Sequence: Synthetic oligonucleotide
  Sense strand starting at position 3520 of SEQ ID NO: 1882181
aggaguucagcccaggagu

SEQ ID NO: 2101221 - RNA, 19 nt, Artificial Sequence
  Description of Artificial Sequence: Synthetic oligonucleotide
  Antisense strand to SEQ ID NO: 2101220
acuccugggcugaacuccu

SEQ ID NO: 2101222 - RNA, 19 nt, Artificial Sequence
  Description of Artificial Sequence: Synthetic oligonucleotide
  Sense strand starting at position 3601 of SEQ ID NO: 1882181
ugaugugaagucuaagugu

SEQ ID NO: 2101223 - RNA, 19 nt, Artificial Sequence
  Description of Artificial Sequence: Synthetic oligonucleotide
  Antisense strand to SEQ ID NO: 2101222
acacuuagacuucacauca

SEQ ID NO: 2101224 - RNA, 19 nt, Artificial Sequence
  Description of Artificial Sequence: Synthetic oligonucleotide
  Sense strand starting at position 3604 of SEQ ID NO: 1882181
ugugaagucuaaguguucu

SEQ ID NO: 2101225 - RNA, 19 nt, Artificial Sequence
  Description of Artificial Sequence: Synthetic oligonucleotide
  Antisense strand to SEQ ID NO: 2101224
agaacacuuagacuucaca

SEQ ID NO: 2101226 - RNA, 19 nt, Artificial Sequence
  Description of Artificial Sequence: Synthetic oligonucleotide
  Sense strand starting at position 3677 of SEQ ID NO: 1882181
gaaacaauguugcuggaua

SEQ ID NO: 2101227 - RNA, 19 nt, Artificial Sequence
  Description of Artificial Sequence: Synthetic oligonucleotide
  Antisense strand to SEQ ID NO: 2101226
uauccagcaacauuguuuc

SEQ ID NO: 2101228 - RNA, 19 nt, Artificial Sequence
  Description of Artificial Sequence: Synthetic oligonucleotide
  Sense strand starting at position 3699 of SEQ ID NO: 1882181
gcacaagggugccuuauaa

SEQ ID NO: 2101229 - RNA, 19 nt, Artificial Sequence
  Description of Artificial Sequence: Synthetic oligonucleotide
  Antisense strand to SEQ ID NO: 2101228
uuauaaggcacccuugugc

SEQ ID NO: 2101230 - RNA, 19 nt, Artificial Sequence
  Description of Artificial Sequence: Synthetic oligonucleotide
  Sense strand starting at position 3719 of SEQ ID NO: 1882181
aaguguugaagaugucaga

SEQ ID NO: 2101231 - RNA, 19 nt, Artificial Sequence
  Description of Artificial Sequence: Synthetic oligonucleotide
  Antisense strand to SEQ ID NO: 2101230
ucugacaucuucaacacuu

SEQ ID NO: 2101232 - RNA, 19 nt, Artificial Sequence
  Description of Artificial Sequence: Synthetic oligonucleotide
  Sense strand starting at position 3722 of SEQ ID NO: 1882181
uguugaagaugucagauuu

SEQ ID NO: 2101233 - RNA, 19 nt, Artificial Sequence
  Description of Artificial Sequence: Synthetic oligonucleotide
  Antisense strand to SEQ ID NO: 2101232
aaaucugacaucuucaaca

SEQ ID NO: 2101234 - RNA, 19 nt, Artificial Sequence
  Description of Artificial Sequence: Synthetic oligonucleotide
  Sense strand starting at position 3866 of SEQ ID NO: 1882181
gggagacuguuaguaaugu

SEQ ID NO: 2101235 - RNA, 19 nt, Artificial Sequence
  Description of Artificial Sequence: Synthetic oligonucleotide
  Antisense strand to SEQ ID NO: 2101234
acauuacuaacagucuccc

SEQ ID NO: 2101236 - RNA, 19 nt, Artificial Sequence
  Description of Artificial Sequence: Synthetic oligonucleotide
  Sense strand starting at position 3872 of SEQ ID NO: 1882181
cuguuaguaauguagauga

SEQ ID NO: 2101237 - RNA, 19 nt, Artificial Sequence
  Description of Artificial Sequence: Synthetic oligonucleotide
  Antisense strand to SEQ ID NO: 2101236
ucaucuacauuacuaacag

SEQ ID NO: 2101238 - RNA, 19 nt, Artificial Sequence
  Description of Artificial Sequence: Synthetic oligonucleotide
  Sense strand starting at position 3908 of SEQ ID NO: 1882181
gaauuagagagcuggucag

SEQ ID NO: 2101239 - RNA, 19 nt, Artificial Sequence
  Description of Artificial Sequence: Synthetic oligonucleotide
  Antisense strand to SEQ ID NO: 2101238
cugaccagcucucuaauuc

SEQ ID NO: 2101240 - RNA, 19 nt, Artificial Sequence
  Description of Artificial Sequence: Synthetic oligonucleotide
  Sense strand starting at position 352 of SEQ ID NO: 1882182
gaaaguacuuagcugguaa

SEQ ID NO: 2101241 - RNA, 19 nt, Artificial Sequence
  Description of Artificial Sequence: Synthetic oligonucleotide
  Antisense strand to SEQ ID NO: 2101240
uuaccagcuaaguacuuuc

SEQ ID NO: 2101242 - RNA, 19 nt, Artificial Sequence
  Description of Artificial Sequence: Synthetic oligonucleotide
  Sense strand starting at position 430 of SEQ ID NO: 1882182
ggaauaucaugauagagag

SEQ ID NO: 2101243 - RNA, 19 nt, Artificial Sequence
  Description of Artificial Sequence: Synthetic oligonucleotide
  Antisense strand to SEQ ID NO: 2101242
cucucuaucaugauauucc

SEQ ID NO: 2101244 - RNA, 19 nt, Artificial Sequence
  Description of Artificial Sequence: Synthetic oligonucleotide
  Sense strand starting at position 465 of SEQ ID NO: 1882182
caucccaggguuugucaaa

SEQ ID NO: 2101245 - RNA, 19 nt, Artificial Sequence
  Description of Artificial Sequence: Synthetic oligonucleotide
  Antisense strand to SEQ ID NO: 2101244
uuugacaaacccugggaug

SEQ ID NO: 2101246 - RNA, 19 nt, Artificial Sequence
  Description of Artificial Sequence: Synthetic oligonucleotide
  Sense strand starting at position 500 of SEQ ID NO: 1882182
acaaucaaauagucauguu

SEQ ID NO: 2101247 - RNA, 19 nt, Artificial Sequence
  Description of Artificial Sequence: Synthetic oligonucleotide
  Antisense strand to SEQ ID NO: 2101246
aacaugacuauuugauugu

SEQ ID NO: 2101248 - RNA, 19 nt, Artificial Sequence
  Description of Artificial Sequence: Synthetic oligonucleotide
  Sense strand starting at position 512 of SEQ ID NO: 1882182
ucauguuaaugucugaaca

SEQ ID NO: 2101249 - RNA, 19 nt, Artificial Sequence
  Description of Artificial Sequence: Synthetic oligonucleotide
  Antisense strand to SEQ ID NO: 2101248
uguucagacauuaacauga

SEQ ID NO: 2101250 - RNA, 19 nt, Artificial Sequence
  Description of Artificial Sequence: Synthetic oligonucleotide
  Sense strand starting at position 660 of SEQ ID NO: 1882182
cuuagaaugcucugauauc

SEQ ID NO: 2101251 - RNA, 19 nt, Artificial Sequence
  Description of Artificial Sequence: Synthetic oligonucleotide
  Antisense strand to SEQ ID NO: 2101250
gauaucagagcauucuaag

SEQ ID NO: 2101252 - RNA, 19 nt, Artificial Sequence
  Description of Artificial Sequence: Synthetic oligonucleotide
  Sense strand starting at position 666 of SEQ ID NO: 1882182
augcucugauaucuaagaa

SEQ ID NO: 2101253 - RNA, 19 nt, Artificial Sequence
  Description of Artificial Sequence: Synthetic oligonucleotide
  Antisense strand to SEQ ID NO: 2101252
uucuuagauaucagagcau

SEQ ID NO: 2101254 - RNA, 19 nt, Artificial Sequence
  Description of Artificial Sequence: Synthetic oligonucleotide
  Sense strand starting at position 752 of SEQ ID NO: 1882182
ccgcuaugugaccaggaua

SEQ ID NO: 2101255 - RNA, 19 nt, Artificial Sequence
  Description of Artificial Sequence: Synthetic oligonucleotide
  Antisense strand to SEQ ID NO: 2101254
uauccuggucacauagcgg

SEQ ID NO: 2101256 - RNA, 19 nt, Artificial Sequence
  Description of Artificial Sequence: Synthetic oligonucleotide
  Sense strand starting at position 1179 of SEQ ID NO: 1882182
caggguauuccugguuuau

SEQ ID NO: 2101257 - RNA, 19 nt, Artificial Sequence
  Description of Artificial Sequence: Synthetic oligonucleotide
  Antisense strand to SEQ ID NO: 2101256
auaaaccaggaauacccug

SEQ ID NO: 2101258 - RNA, 19 nt, Artificial Sequence
  Description of Artificial Sequence: Synthetic oligonucleotide
  Sense strand starting at position 1276 of SEQ ID NO: 1882182
cugugaaggcacgaguuau

SEQ ID NO: 2101259 - RNA, 19 nt, Artificial Sequence
  Description of Artificial Sequence: Synthetic oligonucleotide
  Antisense strand to SEQ ID NO: 2101258
auaacucgugccuucacag

SEQ ID NO: 2101260 - RNA, 19 nt, Artificial Sequence
  Description of Artificial Sequence: Synthetic oligonucleotide
  Sense strand starting at position 1300 of SEQ ID NO: 1882182
ggacaagugguuugagaaa

SEQ ID NO: 2101261 - RNA, 19 nt, Artificial Sequence
  Description of Artificial Sequence: Synthetic oligonucleotide
  Antisense strand to SEQ ID NO: 2101260
uuucucaaaccacuugucc

SEQ ID NO: 2101262 - RNA, 19 nt, Artificial Sequence
  Description of Artificial Sequence: Synthetic oligonucleotide
  Sense strand starting at position 1340 of SEQ ID NO: 1882182
gagaguagucugugaccug

SEQ ID NO: 2101263 - RNA, 19 nt, Artificial Sequence
  Description of Artificial Sequence: Synthetic oligonucleotide
  Antisense strand to SEQ ID NO: 2101262
caggucacagacuacucuc

SEQ ID NO: 2101264 - RNA, 19 nt, Artificial Sequence
  Description of Artificial Sequence: Synthetic oligonucleotide
  Sense strand starting at position 1347 of SEQ ID NO: 1882182
gucugugaccugcagagau

SEQ ID NO: 2101265 - RNA, 19 nt, Artificial Sequence
  Description of Artificial Sequence: Synthetic oligonucleotide
  Antisense strand to SEQ ID NO: 2101264
aucucugcaggucacagac

SEQ ID NO: 2101266 - RNA, 19 nt, Artificial Sequence
  Description of Artificial Sequence: Synthetic oligonucleotide
  Sense strand starting at position 1379 of SEQ ID NO: 1882182
cuguucuaauaaguuggaa

SEQ ID NO: 2101267 - RNA, 19 nt, Artificial Sequence
  Description of Artificial Sequence: Synthetic oligonucleotide
  Antisense strand to SEQ ID NO: 2101266
uuccaacuuauuagaacag

SEQ ID NO: 2101268 - RNA, 19 nt, Artificial Sequence
  Description of Artificial Sequence: Synthetic oligonucleotide
  Sense strand starting at position 1382 of SEQ ID NO: 1882182
uucuaauaaguuggaacua

SEQ ID NO: 2101269 - RNA, 19 nt, Artificial Sequence
  Description of Artificial Sequence: Synthetic oligonucleotide
  Antisense strand to SEQ ID NO: 2101268
uaguuccaacuuauuagaa

SEQ ID NO: 2101270 - RNA, 19 nt, Artificial Sequence
  Description of Artificial Sequence: Synthetic oligonucleotide
  Sense strand starting at position 1435 of SEQ ID NO: 1882182
ucgccagguccagaaauca

SEQ ID NO: 2101271 - RNA, 19 nt, Artificial Sequence
  Description of Artificial Sequence: Synthetic oligonucleotide
  Antisense strand to SEQ ID NO: 2101270
ugauuucuggaccuggcga

SEQ ID NO: 2101272 - RNA, 19 nt, Artificial Sequence
  Description of Artificial Sequence: Synthetic oligonucleotide
  Sense strand starting at position 1485 of SEQ ID NO: 1882182
ccaucauagcaccagucau

SEQ ID NO: 2101273 - RNA, 19 nt, Artificial Sequence
  Description of Artificial Sequence: Synthetic oligonucleotide
  Antisense strand to SEQ ID NO: 2101272
augacuggugcuaugaugg

SEQ ID NO: 2101274 - RNA, 19 nt, Artificial Sequence
  Description of Artificial Sequence: Synthetic oligonucleotide
  Sense strand starting at position 1499 of SEQ ID NO: 1882182
gucauacagguccauaagu

SEQ ID NO: 2101275 - RNA, 19 nt, Artificial Sequence
  Description of Artificial Sequence: Synthetic oligonucleotide
  Antisense strand to SEQ ID NO: 2101274
acuuauggaccuguaugac

SEQ ID NO: 2101276 - RNA, 19 nt, Artificial Sequence
  Description of Artificial Sequence: Synthetic oligonucleotide
  Sense strand starting at position 1643 of SEQ ID NO: 1882182
cauagaccucgucacugaa

SEQ ID NO: 2101277 - RNA, 19 nt, Artificial Sequence
  Description of Artificial Sequence: Synthetic oligonucleotide
  Antisense strand to SEQ ID NO: 2101276
uucagugacgaggucuaug

SEQ ID NO: 2101278 - RNA, 19 nt, Artificial Sequence
  Description of Artificial Sequence: Synthetic oligonucleotide
  Sense strand starting at position 1888 of SEQ ID NO: 1882182
ggcuuuguucaggaggcaa

SEQ ID NO: 2101279 - RNA, 19 nt, Artificial Sequence
  Description of Artificial Sequence: Synthetic oligonucleotide
  Antisense strand to SEQ ID NO: 2101278
uugccuccugaacaaagcc

SEQ ID NO: 2101280 - RNA, 19 nt, Artificial Sequence
  Description of Artificial Sequence: Synthetic oligonucleotide
  Sense strand starting at position 2126 of SEQ ID NO: 1882182
gugcuacuguccuccauuu

SEQ ID NO: 2101281 - RNA, 19 nt, Artificial Sequence
  Description of Artificial Sequence: Synthetic oligonucleotide
  Antisense strand to SEQ ID NO: 2101280
aaauggaggacaguagcac

SEQ ID NO: 2101282 - RNA, 19 nt, Artificial Sequence
  Description of Artificial Sequence: Synthetic oligonucleotide
  Sense strand starting at position 2145 of SEQ ID NO: 1882182
aaggaugcuuauguugaaa

SEQ ID NO: 2101283 - RNA, 19 nt, Artificial Sequence
  Description of Artificial Sequence: Synthetic oligonucleotide
  Antisense strand to SEQ ID NO: 2101282
uuucaacauaagcauccuu

SEQ ID NO: 2101284 - RNA, 19 nt, Artificial Sequence
  Description of Artificial Sequence: Synthetic oligonucleotide
  Sense strand starting at position 2198 of SEQ ID NO: 1882182
ggcgauuccaauuaaacgu

SEQ ID NO: 2101285 - RNA, 19 nt, Artificial Sequence
  Description of Artificial Sequence: Synthetic oligonucleotide
  Antisense strand to SEQ ID NO: 2101284
acguuuaauuggaaucgcc

SEQ ID NO: 2101286 - RNA, 19 nt, Artificial Sequence
  Description of Artificial Sequence: Synthetic oligonucleotide
  Sense strand starting at position 2747 of SEQ ID NO: 1882182
ccaguuucccuggaugagu

SEQ ID NO: 2101287 - RNA, 19 nt, Artificial Sequence
  Description of Artificial Sequence: Synthetic oligonucleotide
  Antisense strand to SEQ ID NO: 2101286
acucauccagggaaacugg

SEQ ID NO: 2101288 - RNA, 19 nt, Artificial Sequence
  Description of Artificial Sequence: Synthetic oligonucleotide
  Sense strand starting at position 2817 of SEQ ID NO: 1882182
gguugaaagggaugguuau

SEQ ID NO: 2101289 - RNA, 19 nt, Artificial Sequence
  Description of Artificial Sequence: Synthetic oligonucleotide
  Antisense strand to SEQ ID NO: 2101288
auaaccaucccuuucaacc

SEQ ID NO: 2101290 - RNA, 19 nt, Artificial Sequence
  Description of Artificial Sequence: Synthetic oligonucleotide
  Sense strand starting at position 2818 of SEQ ID NO: 1882182
guugaaagggaugguuauu

SEQ ID NO: 2101291 - RNA, 19 nt, Artificial Sequence
  Description of Artificial Sequence: Synthetic oligonucleotide
  Antisense strand to SEQ ID NO: 2101290
aauaaccaucccuuucaac

SEQ ID NO: 2101292 - RNA, 19 nt, Artificial Sequence
  Description of Artificial Sequence: Synthetic oligonucleotide
  Sense strand starting at position 2838 of SEQ ID NO: 1882182
uugucaagucaauauggca

SEQ ID NO: 2101293 - RNA, 19 nt, Artificial Sequence
  Description of Artificial Sequence: Synthetic oligonucleotide
  Antisense strand to SEQ ID NO: 2101292
ugccauauugacuugacaa

SEQ ID NO: 2101294 - RNA, 19 nt, Artificial Sequence
  Description of Artificial Sequence: Synthetic oligonucleotide
  Sense strand starting at position 2845 of SEQ ID NO: 1882182
gucaauauggcauagauuc

SEQ ID NO: 2101295 - RNA, 19 nt, Artificial Sequence
  Description of Artificial Sequence: Synthetic oligonucleotide
  Antisense strand to SEQ ID NO: 2101294
gaaucuaugccauauugac

SEQ ID NO: 2101296 - RNA, 19 nt, Artificial Sequence
  Description of Artificial Sequence: Synthetic oligonucleotide
  Sense strand starting at position 2907 of SEQ ID NO: 1882182
gagguuggcgaccauaauu

SEQ ID NO: 2101297 - RNA, 19 nt, Artificial Sequence
  Description of Artificial Sequence: Synthetic oligonucleotide
  Antisense strand to SEQ ID NO: 2101296
aauuauggucgccaaccuc

SEQ ID NO: 2101298 - RNA, 19 nt, Artificial Sequence
  Description of Artificial Sequence: Synthetic oligonucleotide
  Sense strand starting at position 2965 of SEQ ID NO: 1882182
uuggaauguugggauuuaa

SEQ ID NO: 2101299 - RNA, 19 nt, Artificial Sequence
  Description of Artificial Sequence: Synthetic oligonucleotide
  Antisense strand to SEQ ID NO: 2101298
uuaaaucccaacauuccaa

SEQ ID NO: 2101300 - RNA, 19 nt, Artificial Sequence
  Description of Artificial Sequence: Synthetic oligonucleotide
  Sense strand starting at position 2980 of SEQ ID NO: 1882182
uuaaguguaugacuuaagu

SEQ ID NO: 2101301 - RNA, 19 nt, Artificial Sequence
  Description of Artificial Sequence: Synthetic oligonucleotide
  Antisense strand to SEQ ID NO: 2101300
acuuaagucauacacuuaa

SEQ ID NO: 2101302 - RNA, 19 nt, Artificial Sequence
  Description of Artificial Sequence: Synthetic oligonucleotide
  Sense strand starting at position 3020 of SEQ ID NO: 1882182
aggaguguuuaaguuggau

SEQ ID NO: 2101303 - RNA, 19 nt, Artificial Sequence
  Description of Artificial Sequence: Synthetic oligonucleotide
  Antisense strand to SEQ ID NO: 2101302
auccaacuuaaacacuccu

SEQ ID NO: 2101304 - RNA, 19 nt, Artificial Sequence
  Description of Artificial Sequence: Synthetic oligonucleotide
  Sense strand starting at position 3022 of SEQ ID NO: 1882182
gaguguuuaaguuggauua

SEQ ID NO: 2101305 - RNA, 19 nt, Artificial Sequence
  Description of Artificial Sequence: Synthetic oligonucleotide
  Antisense strand to SEQ ID NO: 2101304
uaauccaacuuaaacacuc

SEQ ID NO: 2101306 - RNA, 19 nt, Artificial Sequence
  Description of Artificial Sequence: Synthetic oligonucleotide
  Sense strand starting at position 3023 of SEQ ID NO: 1882182
aguguuuaaguuggauuaa

SEQ ID NO: 2101307 - RNA, 19 nt, Artificial Sequence
  Description of Artificial Sequence: Synthetic oligonucleotide
  Antisense strand to SEQ ID NO: 2101306
uuaauccaacuuaaacacu

SEQ ID NO: 2101308 - RNA, 19 nt, Artificial Sequence
  Description of Artificial Sequence: Synthetic oligonucleotide
  Sense strand starting at position 3188 of SEQ ID NO: 1882182
uuuaaugacggcuauaaac

SEQ ID NO: 2101309 - RNA, 19 nt, Artificial Sequence
  Description of Artificial Sequence: Synthetic oligonucleotide
  Antisense strand to SEQ ID NO: 2101308
guuuauagccgucauuaaa

SEQ ID NO: 2101310 - RNA, 19 nt, Artificial Sequence
  Description of Artificial Sequence: Synthetic oligonucleotide
  Sense strand starting at position 3270 of SEQ ID NO: 1882182
aauuuaggauugggcauaa

SEQ ID NO: 2101311 - RNA, 19 nt, Artificial Sequence
  Description of Artificial Sequence: Synthetic oligonucleotide
  Antisense strand to SEQ ID NO: 2101310
uuaugcccaauccuaaauu

SEQ ID NO: 2101312 - RNA, 19 nt, Artificial Sequence
  Description of Artificial Sequence: Synthetic oligonucleotide
  Sense strand starting at position 3315 of SEQ ID NO: 1882182
cggagacugaauuguacaa

SEQ ID NO: 2101313 - RNA, 19 nt, Artificial Sequence
  Description of Artificial Sequence: Synthetic oligonucleotide
  Antisense strand to SEQ ID NO: 2101312
uuguacaauucagucuccg

SEQ ID NO: 2101314 - RNA, 19 nt, Artificial Sequence
  Description of Artificial Sequence: Synthetic oligonucleotide
  Sense strand starting at position 3459 of SEQ ID NO: 1882182
agaguaaugcuauaccuca

SEQ ID NO: 2101315 - RNA, 19 nt, Artificial Sequence
  Description of Artificial Sequence: Synthetic oligonucleotide
  Antisense strand to SEQ ID NO: 2101314
ugagguauagcauuacucu

SEQ ID NO: 2101316 - RNA, 19 nt, Artificial Sequence
  Description of Artificial Sequence: Synthetic oligonucleotide
  Sense strand starting at position 3830 of SEQ ID NO: 1882182
aggaguuaugccuguauuu

SEQ ID NO: 2101317 - RNA, 19 nt, Artificial Sequence
  Description of Artificial Sequence: Synthetic oligonucleotide
  Antisense strand to SEQ ID NO: 2101316
aaauacaggcauaacuccu

SEQ ID NO: 2101318 - RNA, 19 nt, Artificial Sequence
  Description of Artificial Sequence: Synthetic oligonucleotide
  Sense strand starting at position 3935 of SEQ ID NO: 1882182
cuauauuagugucuacauu

SEQ ID NO: 2101319 - RNA, 19 nt, Artificial Sequence
  Description of Artificial Sequence: Synthetic oligonucleotide
  Antisense strand to SEQ ID NO: 2101318
aauguagacacuaauauag

SEQ ID NO: 2101320 - RNA, 19 nt, Artificial Sequence
  Description of Artificial Sequence: Synthetic oligonucleotide
  Sense strand starting at position 197 of SEQ ID NO: 1882183
ugaccuuuccuguacaagu

SEQ ID NO: 2101321 - RNA, 19 nt, Artificial Sequence
  Description of Artificial Sequence: Synthetic oligonucleotide
  Antisense strand to SEQ ID NO: 2101320
acuuguacaggaaagguca

SEQ ID NO: 2101322 - RNA, 19 nt, Artificial Sequence
  Description of Artificial Sequence: Synthetic oligonucleotide
  Sense strand starting at position 356 of SEQ ID NO: 1882183
uggacaaccugagggauau

SEQ ID NO: 2101323 - RNA, 19 nt, Artificial Sequence
  Description of Artificial Sequence: Synthetic oligonucleotide
  Antisense strand to SEQ ID NO: 2101322
auaucccucagguugucca

SEQ ID NO: 2101324 - RNA, 19 nt, Artificial Sequence
  Description of Artificial Sequence: Synthetic oligonucleotide
  Sense strand starting at position 368 of SEQ ID NO: 1882183
gggauaucauaucauauuu

SEQ ID NO: 2101325 - RNA, 19 nt, Artificial Sequence
  Description of Artificial Sequence: Synthetic oligonucleotide
  Antisense strand to SEQ ID NO: 2101324
aaauaugauaugauauccc

SEQ ID NO: 2101326 - RNA, 19 nt, Artificial Sequence
  Description of Artificial Sequence: Synthetic oligonucleotide
  Sense strand starting at position 377 of SEQ ID NO: 1882183
uaucauauuugguguauga

SEQ ID NO: 2101327 - RNA, 19 nt, Artificial Sequence
  Description of Artificial Sequence: Synthetic oligonucleotide
  Antisense strand to SEQ ID NO: 2101326
ucauacaccaaauaugaua

SEQ ID NO: 2101328 - RNA, 19 nt, Artificial Sequence
  Description of Artificial Sequence: Synthetic oligonucleotide
  Sense strand starting at position 414 of SEQ ID NO: 1882183
ugcucaguauuuguugaaa

SEQ ID NO: 2101329 - RNA, 19 nt, Artificial Sequence
  Description of Artificial Sequence: Synthetic oligonucleotide
  Antisense strand to SEQ ID NO: 2101328
uuucaacaaauacugagca

SEQ ID NO: 2101330 - RNA, 19 nt, Artificial Sequence
  Description of Artificial Sequence: Synthetic oligonucleotide
  Sense strand starting at position 446 of SEQ ID NO: 1882183
uguaauggaggcugggaaa

SEQ ID NO: 2101331 - RNA, 19 nt, Artificial Sequence
  Description of Artificial Sequence: Synthetic oligonucleotide
  Antisense strand to SEQ ID NO: 2101330
uuucccagccuccauuaca

SEQ ID NO: 2101332 - RNA, 19 nt, Artificial Sequence
  Description of Artificial Sequence: Synthetic oligonucleotide
  Sense strand starting at position 512 of SEQ ID NO: 1882183
ugucuuccaucuccagaca

SEQ ID NO: 2101333 - RNA, 19 nt, Artificial Sequence
  Description of Artificial Sequence: Synthetic oligonucleotide
  Antisense strand to SEQ ID NO: 2101332
ugucuggagauggaagaca

SEQ ID NO: 2101334 - RNA, 19 nt, Artificial Sequence
  Description of Artificial Sequence: Synthetic oligonucleotide
  Sense strand starting at position 513 of SEQ ID NO: 1882183
gucuuccaucuccagacau

SEQ ID NO: 2101335 - RNA, 19 nt, Artificial Sequence
  Description of Artificial Sequence: Synthetic oligonucleotide
  Antisense strand to SEQ ID NO: 2101334
augucuggagauggaagac

SEQ ID NO: 2101336 - RNA, 19 nt, Artificial Sequence
  Description of Artificial Sequence: Synthetic oligonucleotide
  Sense strand starting at position 556 of SEQ ID NO: 1882183
cucucugucuacucaaguu

SEQ ID NO: 2101337 - RNA, 19 nt, Artificial Sequence
  Description of Artificial Sequence: Synthetic oligonucleotide
  Antisense strand to SEQ ID NO: 2101336
aacuugaguagacagagag

SEQ ID NO: 2101338 - RNA, 19 nt, Artificial Sequence
  Description of Artificial Sequence: Synthetic oligonucleotide
  Sense strand starting at position 692 of SEQ ID NO: 1882183
gguuaguugccagggagga

SEQ ID NO: 2101339 - RNA, 19 nt, Artificial Sequence
  Description of Artificial Sequence: Synthetic oligonucleotide
  Antisense strand to SEQ ID NO: 2101338
uccucccuggcaacuaacc

SEQ ID NO: 2101340 - RNA, 19 nt, Artificial Sequence
  Description of Artificial Sequence: Synthetic oligonucleotide
  Sense strand starting at position 731 of SEQ ID NO: 1882183
ggacuuagcaccugcagau

SEQ ID NO: 2101341 - RNA, 19 nt, Artificial Sequence
  Description of Artificial Sequence: Synthetic oligonucleotide
  Antisense strand to SEQ ID NO: 2101340
aucugcaggugcuaagucc

SEQ ID NO: 2101342 - RNA, 19 nt, Artificial Sequence
  Description of Artificial Sequence: Synthetic oligonucleotide
  Sense strand starting at position 794 of SEQ ID NO: 1882183
cagagaaagcagugcuaca

SEQ ID NO: 2101343 - RNA, 19 nt, Artificial Sequence
  Description of Artificial Sequence: Synthetic oligonucleotide
  Antisense strand to SEQ ID NO: 2101342
uguagcacugcuuucucug

SEQ ID NO: 2101344 - RNA, 19 nt, Artificial Sequence
  Description of Artificial Sequence: Synthetic oligonucleotide
  Sense strand starting at position 952 of SEQ ID NO: 1882183
acaggugggucugaaagau

SEQ ID NO: 2101345 - RNA, 19 nt, Artificial Sequence
  Description of Artificial Sequence: Synthetic oligonucleotide
  Antisense strand to SEQ ID NO: 2101344
aucuuucagacccaccugu

SEQ ID NO: 2101346 - RNA, 19 nt, Artificial Sequence
  Description of Artificial Sequence: Synthetic oligonucleotide
  Sense strand starting at position 1009 of SEQ ID NO: 1882183
ggaugcugucagcauguuu

SEQ ID NO: 2101347 - RNA, 19 nt, Artificial Sequence
  Description of Artificial Sequence: Synthetic oligonucleotide
  Antisense strand to SEQ ID NO: 2101346
aaacaugcugacagcaucc

SEQ ID NO: 2101348 - RNA, 19 nt, Artificial Sequence
  Description of Artificial Sequence: Synthetic oligonucleotide
  Sense strand starting at position 1145 of SEQ ID NO: 1882183
guucuagucucguugacua

SEQ ID NO: 2101349 - RNA, 19 nt, Artificial Sequence
  Description of Artificial Sequence: Synthetic oligonucleotide
  Antisense strand to SEQ ID NO: 2101348
uagucaacgagacuagaac

SEQ ID NO: 2101350 - RNA, 19 nt, Artificial Sequence
  Description of Artificial Sequence: Synthetic oligonucleotide
  Sense strand starting at position 1362 of SEQ ID NO: 1882183
aaggguuaguuugagaaga

SEQ ID NO: 2101351 - RNA, 19 nt, Artificial Sequence
  Description of Artificial Sequence: Synthetic oligonucleotide
  Antisense strand to SEQ ID NO: 2101350
ucuucucaaacuaacccuu

SEQ ID NO: 2101352 - RNA, 19 nt, Artificial Sequence
  Description of Artificial Sequence: Synthetic oligonucleotide
  Sense strand starting at position 1364 of SEQ ID NO: 1882183
ggguuaguuugagaagaaa

SEQ ID NO: 2101353 - RNA, 19 nt, Artificial Sequence
  Description of Artificial Sequence: Synthetic oligonucleotide
  Antisense strand to SEQ ID NO: 2101352
uuucuucucaaacuaaccc

SEQ ID NO: 2101354 - RNA, 19 nt, Artificial Sequence
  Description of Artificial Sequence: Synthetic oligonucleotide
  Sense strand starting at position 1434 of SEQ ID NO: 1882183
guaguugacuaagaagaga

SEQ ID NO: 2101355 - RNA, 19 nt, Artificial Sequence
  Description of Artificial Sequence: Synthetic oligonucleotide
  Antisense strand to SEQ ID NO: 2101354
ucucuucuuagucaacuac

SEQ ID NO: 2101356 - RNA, 19 nt, Artificial Sequence
  Description of Artificial Sequence: Synthetic oligonucleotide
  Sense strand starting at position 1545 of SEQ ID NO: 1882183
ccgccagcucuccagaaua

SEQ ID NO: 2101357 - RNA, 19 nt, Artificial Sequence
  Description of Artificial Sequence: Synthetic oligonucleotide
  Antisense strand to SEQ ID NO: 2101356
uauucuggagagcuggcgg

SEQ ID NO: 2101358 - RNA, 19 nt, Artificial Sequence
  Description of Artificial Sequence: Synthetic oligonucleotide
  Sense strand starting at position 1547 of SEQ ID NO: 1882183
gccagcucuccagaauaca

SEQ ID NO: 2101359 - RNA, 19 nt, Artificial Sequence
  Description of Artificial Sequence: Synthetic oligonucleotide
  Antisense strand to SEQ ID NO: 2101358
uguauucuggagagcuggc

SEQ ID NO: 2101360 - RNA, 19 nt, Artificial Sequence
  Description of Artificial Sequence: Synthetic oligonucleotide
  Sense strand starting at position 1765 of SEQ ID NO: 1882183
ggucucuucccgggacuca

SEQ ID NO: 2101361 - RNA, 19 nt, Artificial Sequence
  Description of Artificial Sequence: Synthetic oligonucleotide
  Antisense strand to SEQ ID NO: 2101360
ugagucccgggaagagacc

SEQ ID NO: 2101362 - RNA, 19 nt, Artificial Sequence
  Description of Artificial Sequence: Synthetic oligonucleotide
  Sense strand starting at position 1766 of SEQ ID NO: 1882183
gucucuucccgggacucaa

SEQ ID NO: 2101363 - RNA, 19 nt, Artificial Sequence
  Description of Artificial Sequence: Synthetic oligonucleotide
  Antisense strand to SEQ ID NO: 2101362
uugagucccgggaagagac

SEQ ID NO: 2101364 - RNA, 19 nt, Artificial Sequence
  Description of Artificial Sequence: Synthetic oligonucleotide
  Sense strand starting at position 1915 of SEQ ID NO: 1882183
gcgugacuuuaacucagga

SEQ ID NO: 2101365 - RNA, 19 nt, Artificial Sequence
  Description of Artificial Sequence: Synthetic oligonucleotide
  Antisense strand to SEQ ID NO: 2101364
uccugaguuaaagucacgc

SEQ ID NO: 2101366 - RNA, 19 nt, Artificial Sequence
  Description of Artificial Sequence: Synthetic oligonucleotide
  Sense strand starting at position 1955 of SEQ ID NO: 1882183
gcggauaacuggcuugaca

SEQ ID NO: 2101367 - RNA, 19 nt, Artificial Sequence
  Description of Artificial Sequence: Synthetic oligonucleotide
  Antisense strand to SEQ ID NO: 2101366
ugucaagccaguuauccgc

SEQ ID NO: 2101368 - RNA, 19 nt, Artificial Sequence
  Description of Artificial Sequence: Synthetic oligonucleotide
  Sense strand starting at position 1957 of SEQ ID NO: 1882183
ggauaacuggcuugacaag

SEQ ID NO: 2101369 - RNA, 19 nt, Artificial Sequence
  Description of Artificial Sequence: Synthetic oligonucleotide
  Antisense strand to SEQ ID NO: 2101368
cuugucaagccaguuaucc

SEQ ID NO: 2101370 - RNA, 19 nt, Artificial Sequence
  Description of Artificial Sequence: Synthetic oligonucleotide
  Sense strand starting at position 2356 of SEQ ID NO: 1882183
agaguuucgcgcaguugga

SEQ ID NO: 2101371 - RNA, 19 nt, Artificial Sequence
  Description of Artificial Sequence: Synthetic oligonucleotide
  Antisense strand to SEQ ID NO: 2101370
uccaacugcgcgaaacucu

SEQ ID NO: 2101372 - RNA, 19 nt, Artificial Sequence
  Description of Artificial Sequence: Synthetic oligonucleotide
  Sense strand starting at position 2384 of SEQ ID NO: 1882183
acagcagugguccgaaacu

SEQ ID NO: 2101373 - RNA, 19 nt, Artificial Sequence
  Description of Artificial Sequence: Synthetic oligonucleotide
  Antisense strand to SEQ ID NO: 2101372
aguuucggaccacugcugu

SEQ ID NO: 2101374 - RNA, 19 nt, Artificial Sequence
  Description of Artificial Sequence: Synthetic oligonucleotide
  Sense strand starting at position 2412 of SEQ ID NO: 1882183
ccacuagaacgcggagaau

SEQ ID NO: 2101375 - RNA, 19 nt, Artificial Sequence
  Description of Artificial Sequence: Synthetic oligonucleotide
  Antisense strand to SEQ ID NO: 2101374
auucuccgcguucuagugg

SEQ ID NO: 2101376 - RNA, 19 nt, Artificial Sequence
  Description of Artificial Sequence: Synthetic oligonucleotide
  Sense strand starting at position 2468 of SEQ ID NO: 1882183
gucucauuauuggcagacu

SEQ ID NO: 2101377 - RNA, 19 nt, Artificial Sequence
  Description of Artificial Sequence: Synthetic oligonucleotide
  Antisense strand to SEQ ID NO: 2101376
agucugccaauaaugagac

SEQ ID NO: 2101378 - RNA, 19 nt, Artificial Sequence
  Description of Artificial Sequence: Synthetic oligonucleotide
  Sense strand starting at position 2471 of SEQ ID NO: 1882183
ucauuauuggcagacucua

SEQ ID NO: 2101379 - RNA, 19 nt, Artificial Sequence
  Description of Artificial Sequence: Synthetic oligonucleotide
  Antisense strand to SEQ ID NO: 2101378
uagagucugccaauaauga

SEQ ID NO: 2101380 - RNA, 19 nt, Artificial Sequence
  Description of Artificial Sequence: Synthetic oligonucleotide
  Sense strand starting at position 2519 of SEQ ID NO: 1882183
aggaguacuugauaagagu

SEQ ID NO: 2101381 - RNA, 19 nt, Artificial Sequence
  Description of Artificial Sequence: Synthetic oligonucleotide
  Antisense strand to SEQ ID NO: 2101380
acucuuaucaaguacuccu

SEQ ID NO: 2101382 - RNA, 19 nt, Artificial Sequence
  Description of Artificial Sequence: Synthetic oligonucleotide
  Sense strand starting at position 2545 of SEQ ID NO: 1882183
aacauaaggugucuaggaa

SEQ ID NO: 2101383 - RNA, 19 nt, Artificial Sequence
  Description of Artificial Sequence: Synthetic oligonucleotide
  Antisense strand to SEQ ID NO: 2101382
uuccuagacaccuuauguu

SEQ ID NO: 2101384 - RNA, 19 nt, Artificial Sequence
  Description of Artificial Sequence: Synthetic oligonucleotide
  Sense strand starting at position 2557 of SEQ ID NO: 1882183
cuaggaauguaucuaguac

SEQ ID NO: 2101385 - RNA, 19 nt, Artificial Sequence
  Description of Artificial Sequence: Synthetic oligonucleotide
  Antisense strand to SEQ ID NO: 2101384
guacuagauacauuccuag

SEQ ID NO: 2101386 - RNA, 19 nt, Artificial Sequence
  Description of Artificial Sequence: Synthetic oligonucleotide
  Sense strand starting at position 2561 of SEQ ID NO: 1882183
gaauguaucuaguacaaga

SEQ ID NO: 2101387 - RNA, 19 nt, Artificial Sequence
  Description of Artificial Sequence: Synthetic oligonucleotide
  Antisense strand to SEQ ID NO: 2101386
ucuuguacuagauacauuc

SEQ ID NO: 2101388 - RNA, 19 nt, Artificial Sequence
  Description of Artificial Sequence: Synthetic oligonucleotide
  Sense strand starting at position 3236 of SEQ ID NO: 1882183
ggaguuugagaucgcucca

SEQ ID NO: 2101389 - RNA, 19 nt, Artificial Sequence
  Description of Artificial Sequence: Synthetic oligonucleotide
  Antisense strand to SEQ ID NO: 2101388
uggagcgaucucaaacucc

SEQ ID NO: 2101390 - RNA, 19 nt, Artificial Sequence
  Description of Artificial Sequence: Synthetic oligonucleotide
  Sense strand starting at position 3399 of SEQ ID NO: 1882183
acaguaagauaugcggaau

SEQ ID NO: 2101391 - RNA, 19 nt, Artificial Sequence
  Description of Artificial Sequence: Synthetic oligonucleotide
  Antisense strand to SEQ ID NO: 2101390
auuccgcauaucuuacugu

SEQ ID NO: 2101392 - RNA, 19 nt, Artificial Sequence
  Description of Artificial Sequence: Synthetic oligonucleotide
  Sense strand starting at position 3402 of SEQ ID NO: 1882183
guaagauaugcggaauauu

SEQ ID NO: 2101393 - RNA, 19 nt, Artificial Sequence
  Description of Artificial Sequence: Synthetic oligonucleotide
  Antisense strand to SEQ ID NO: 2101392
aauauuccgcauaucuuac

SEQ ID NO: 2101394 - RNA, 19 nt, Artificial Sequence
  Description of Artificial Sequence: Synthetic oligonucleotide
  Sense strand starting at position 3446 of SEQ ID NO: 1882183
uacuguuaugcaugaacug

SEQ ID NO: 2101395 - RNA, 19 nt, Artificial Sequence
  Description of Artificial Sequence: Synthetic oligonucleotide
  Antisense strand to SEQ ID NO: 2101394
caguucaugcauaacagua

SEQ ID NO: 2101396 - RNA, 19 nt, Artificial Sequence
  Description of Artificial Sequence: Synthetic oligonucleotide
  Sense strand starting at position 3509 of SEQ ID NO: 1882183
gaauguauacgugauacua

SEQ ID NO: 2101397 - RNA, 19 nt, Artificial Sequence
  Description of Artificial Sequence: Synthetic oligonucleotide
  Antisense strand to SEQ ID NO: 2101396
uaguaucacguauacauuc

SEQ ID NO: 2101398 - RNA, 19 nt, Artificial Sequence
  Description of Artificial Sequence: Synthetic oligonucleotide
  Sense strand starting at position 3591 of SEQ ID NO: 1882183
ucagaauugugguuacaca

SEQ ID NO: 2101399 - RNA, 19 nt, Artificial Sequence
  Description of Artificial Sequence: Synthetic oligonucleotide
  Antisense strand to SEQ ID NO: 2101398
uguguaaccacaauucuga

SEQ ID NO: 2101400 - RNA, 19 nt, Artificial Sequence
  Description of Artificial Sequence: Synthetic oligonucleotide
  Sense strand starting at position 69 of SEQ ID NO: 1882184
uggacaaccugagggauau

SEQ ID NO: 2101401 - RNA, 19 nt, Artificial Sequence
  Description of Artificial Sequence: Synthetic oligonucleotide
  Antisense strand to SEQ ID NO: 2101400
auaucccucagguugucca

SEQ ID NO: 2101402 - RNA, 19 nt, Artificial Sequence
  Description of Artificial Sequence: Synthetic oligonucleotide
  Sense strand starting at position 81 of SEQ ID NO: 1882184
gggauaucauaucauauuu

SEQ ID NO: 2101403 - RNA, 19 nt, Artificial Sequence
  Description of Artificial Sequence: Synthetic oligonucleotide
  Antisense strand to SEQ ID NO: 2101402
aaauaugauaugauauccc

SEQ ID NO: 2101404 - RNA, 19 nt, Artificial Sequence
  Description of Artificial Sequence: Synthetic oligonucleotide
  Sense strand starting at position 90 of SEQ ID NO: 1882184
uaucauauuugguguauga

SEQ ID NO: 2101405 - RNA, 19 nt, Artificial Sequence
  Description of Artificial Sequence: Synthetic oligonucleotide
  Antisense strand to SEQ ID NO: 2101404
ucauacaccaaauaugaua

SEQ ID NO: 2101406 - RNA, 19 nt, Artificial Sequence
  Description of Artificial Sequence: Synthetic oligonucleotide
  Sense strand starting at position 127 of SEQ ID NO: 1882184
ugcucaguauuuguugaaa

SEQ ID NO: 2101407 - RNA, 19 nt, Artificial Sequence
  Description of Artificial Sequence: Synthetic oligonucleotide
  Antisense strand to SEQ ID NO: 2101406
uuucaacaaauacugagca

SEQ ID NO: 2101408 - RNA, 19 nt, Artificial Sequence
  Description of Artificial Sequence: Synthetic oligonucleotide
  Sense strand starting at position 159 of SEQ ID NO: 1882184
uguaauggaggcugggaaa

SEQ ID NO: 2101409 - RNA, 19 nt, Artificial Sequence
  Description of Artificial Sequence: Synthetic oligonucleotide
  Antisense strand to SEQ ID NO: 2101408
uuucccagccuccauuaca

SEQ ID NO: 2101410 - RNA, 19 nt, Artificial Sequence
  Description of Artificial Sequence: Synthetic oligonucleotide
  Sense strand starting at position 225 of SEQ ID NO: 1882184
ugucuuccaucuccagaca

SEQ ID NO: 2101411 - RNA, 19 nt, Artificial Sequence
  Description of Artificial Sequence: Synthetic oligonucleotide
  Antisense strand to SEQ ID NO: 2101410
ugucuggagauggaagaca

SEQ ID NO: 2101412 - RNA, 19 nt, Artificial Sequence
  Description of Artificial Sequence: Synthetic oligonucleotide
  Sense strand starting at position 226 of SEQ ID NO: 1882184
gucuuccaucuccagacau

SEQ ID NO: 2101413 - RNA, 19 nt, Artificial Sequence
  Description of Artificial Sequence: Synthetic oligonucleotide
  Antisense strand to SEQ ID NO: 2101412
augucuggagauggaagac

SEQ ID NO: 2101414 - RNA, 19 nt, Artificial Sequence
  Description of Artificial Sequence: Synthetic oligonucleotide
  Sense strand starting at position 269 of SEQ ID NO: 1882184
cucucugucuacucaaguu

SEQ ID NO: 2101415 - RNA, 19 nt, Artificial Sequence
  Description of Artificial Sequence: Synthetic oligonucleotide
  Antisense strand to SEQ ID NO: 2101414
aacuugaguagacagagag

SEQ ID NO: 2101416 - RNA, 19 nt, Artificial Sequence
  Description of Artificial Sequence: Synthetic oligonucleotide
  Sense strand starting at position 405 of SEQ ID NO: 1882184
gguuaguugccagggagga

SEQ ID NO: 2101417 - RNA, 19 nt, Artificial Sequence
  Description of Artificial Sequence: Synthetic oligonucleotide
  Antisense strand to SEQ ID NO: 2101416
uccucccuggcaacuaacc

SEQ ID NO: 2101418 - RNA, 19 nt, Artificial Sequence
  Description of Artificial Sequence: Synthetic oligonucleotide
  Sense strand starting at position 444 of SEQ ID NO: 1882184
ggacuuagcaccugcagau

SEQ ID NO: 2101419 - RNA, 19 nt, Artificial Sequence
  Description of Artificial Sequence: Synthetic oligonucleotide
  Antisense strand to SEQ ID NO: 2101418
aucugcaggugcuaagucc

SEQ ID NO: 2101420 - RNA, 19 nt, Artificial Sequence
  Description of Artificial Sequence: Synthetic oligonucleotide
  Sense strand starting at position 507 of SEQ ID NO: 1882184
cagagaaagcagugcuaca

SEQ ID NO: 2101421 - RNA, 19 nt, Artificial Sequence
  Description of Artificial Sequence: Synthetic oligonucleotide
  Antisense strand to SEQ ID NO: 2101420
uguagcacugcuuucucug

SEQ ID NO: 2101422 - RNA, 19 nt, Artificial Sequence
  Description of Artificial Sequence: Synthetic oligonucleotide
  Sense strand starting at position 665 of SEQ ID NO: 1882184
acaggugggucugaaagau

SEQ ID NO: 2101423 - RNA, 19 nt, Artificial Sequence
  Description of Artificial Sequence: Synthetic oligonucleotide
  Antisense strand to SEQ ID NO: 2101422
aucuuucagacccaccugu

SEQ ID NO: 2101424 - RNA, 19 nt, Artificial Sequence
  Description of Artificial Sequence: Synthetic oligonucleotide
  Sense strand starting at position 722 of SEQ ID NO: 1882184
ggaugcugucagcauguuu

SEQ ID NO: 2101425 - RNA, 19 nt, Artificial Sequence
  Description of Artificial Sequence: Synthetic oligonucleotide
  Antisense strand to SEQ ID NO: 2101424
aaacaugcugacagcaucc

SEQ ID NO: 2101426 - RNA, 19 nt, Artificial Sequence
  Description of Artificial Sequence: Synthetic oligonucleotide
  Sense strand starting at position 858 of SEQ ID NO: 1882184
guucuagucucguugacua

SEQ ID NO: 2101427 - RNA, 19 nt, Artificial Sequence
  Description of Artificial Sequence: Synthetic oligonucleotide
  Antisense strand to SEQ ID NO: 2101426
uagucaacgagacuagaac

SEQ ID NO: 2101428 - RNA, 19 nt, Artificial Sequence
  Description of Artificial Sequence: Synthetic oligonucleotide
  Sense strand starting at position 1075 of SEQ ID NO: 1882184
aaggguuaguuugagaaga

SEQ ID NO: 2101429 - RNA, 19 nt, Artificial Sequence
  Description of Artificial Sequence: Synthetic oligonucleotide
  Antisense strand to SEQ ID NO: 2101428
ucuucucaaacuaacccuu

SEQ ID NO: 2101430 - RNA, 19 nt, Artificial Sequence
  Description of Artificial Sequence: Synthetic oligonucleotide
  Sense strand starting at position 1077 of SEQ ID NO: 1882184
ggguuaguuugagaagaaa

SEQ ID NO: 2101431 - RNA, 19 nt, Artificial Sequence
  Description of Artificial Sequence: Synthetic oligonucleotide
  Antisense strand to SEQ ID NO: 2101430
uuucuucucaaacuaaccc

SEQ ID NO: 2101432 - RNA, 19 nt, Artificial Sequence
  Description of Artificial Sequence: Synthetic oligonucleotide
  Sense strand starting at position 1147 of SEQ ID NO: 1882184
guaguugacuaagaagaga

SEQ ID NO: 2101433 - RNA, 19 nt, Artificial Sequence
  Description of Artificial Sequence: Synthetic oligonucleotide
  Antisense strand to SEQ ID NO: 2101432
ucucuucuuagucaacuac

SEQ ID NO: 2101434 - RNA, 19 nt, Artificial Sequence
  Description of Artificial Sequence: Synthetic oligonucleotide
  Sense strand starting at position 1258 of SEQ ID NO: 1882184
ccgccagcucuccagaaua

SEQ ID NO: 2101435 - RNA, 19 nt, Artificial Sequence
  Description of Artificial Sequence: Synthetic oligonucleotide
  Antisense strand to SEQ ID NO: 2101434
uauucuggagagcuggcgg

SEQ ID NO: 2101436 - RNA, 19 nt, Artificial Sequence
  Description of Artificial Sequence: Synthetic oligonucleotide
  Sense strand starting at position 1260 of SEQ ID NO: 1882184
gccagcucuccagaauaca

SEQ ID NO: 2101437 - RNA, 19 nt, Artificial Sequence
  Description of Artificial Sequence: Synthetic oligonucleotide
  Antisense strand to SEQ ID NO: 2101436
uguauucuggagagcuggc

SEQ ID NO: 2101438 - RNA, 19 nt, Artificial Sequence
  Description of Artificial Sequence: Synthetic oligonucleotide
  Sense strand starting at position 1478 of SEQ ID NO: 1882184
ggucucuucccgggacuca

SEQ ID NO: 2101439 - RNA, 19 nt, Artificial Sequence
  Description of Artificial Sequence: Synthetic oligonucleotide
  Antisense strand to SEQ ID NO: 2101438
ugagucccgggaagagacc

SEQ ID NO: 2101440 - RNA, 19 nt, Artificial Sequence
  Description of Artificial Sequence: Synthetic oligonucleotide
  Sense strand starting at position 1479 of SEQ ID NO: 1882184
gucucuucccgggacucaa

SEQ ID NO: 2101441 - RNA, 19 nt, Artificial Sequence
  Description of Artificial Sequence: Synthetic oligonucleotide
  Antisense strand to SEQ ID NO: 2101440
uugagucccgggaagagac

SEQ ID NO: 2101442 - RNA, 19 nt, Artificial Sequence
  Description of Artificial Sequence: Synthetic oligonucleotide
  Sense strand starting at position 1628 of SEQ ID NO: 1882184
gcgugacuuuaacucagga

SEQ ID NO: 2101443 - RNA, 19 nt, Artificial Sequence
  Description of Artificial Sequence: Synthetic oligonucleotide
  Antisense strand to SEQ ID NO: 2101442
uccugaguuaaagucacgc

SEQ ID NO: 2101444 - RNA, 19 nt, Artificial Sequence
  Description of Artificial Sequence: Synthetic oligonucleotide
  Sense strand starting at position 1668 of SEQ ID NO: 1882184
gcggauaacuggcuugaca

SEQ ID NO: 2101445 - RNA, 19 nt, Artificial Sequence
  Description of Artificial Sequence: Synthetic oligonucleotide
  Antisense strand to SEQ ID NO: 2101444
ugucaagccaguuauccgc

SEQ ID NO: 2101446 - RNA, 19 nt, Artificial Sequence
  Description of Artificial Sequence: Synthetic oligonucleotide
  Sense strand starting at position 1670 of SEQ ID NO: 1882184
ggauaacuggcuugacaag

SEQ ID NO: 2101447 - RNA, 19 nt, Artificial Sequence
  Description of Artificial Sequence: Synthetic oligonucleotide
  Antisense strand to SEQ ID NO: 2101446
cuugucaagccaguuaucc

SEQ ID NO: 2101448 - RNA, 19 nt, Artificial Sequence
  Description of Artificial Sequence: Synthetic oligonucleotide
  Sense strand starting at position 2069 of SEQ ID NO: 1882184
agaguuucgcgcaguugga

SEQ ID NO: 2101449 - RNA, 19 nt, Artificial Sequence
  Description of Artificial Sequence: Synthetic oligonucleotide
  Antisense strand to SEQ ID NO: 2101448
uccaacugcgcgaaacucu

SEQ ID NO: 2101450 - RNA, 19 nt, Artificial Sequence
  Description of Artificial Sequence: Synthetic oligonucleotide
  Sense strand starting at position 2097 of SEQ ID NO: 1882184
acagcagugguccgaaacu

SEQ ID NO: 2101451 - RNA, 19 nt, Artificial Sequence
  Description of Artificial Sequence: Synthetic oligonucleotide
  Antisense strand to SEQ ID NO: 2101450
aguuucggaccacugcugu

SEQ ID NO: 2101452 - RNA, 19 nt, Artificial Sequence
  Description of Artificial Sequence: Synthetic oligonucleotide
  Sense strand starting at position 2125 of SEQ ID NO: 1882184
ccacuagaacgcggagaau

SEQ ID NO: 2101453 - RNA, 19 nt, Artificial Sequence
  Description of Artificial Sequence: Synthetic oligonucleotide
  Antisense strand to SEQ ID NO: 2101452
auucuccgcguucuagugg

SEQ ID NO: 2101454 - RNA, 19 nt, Artificial Sequence
  Description of Artificial Sequence: Synthetic oligonucleotide
  Sense strand starting at position 2181 of SEQ ID NO: 1882184
gucucauuauuggcagacu

SEQ ID NO: 2101455 - RNA, 19 nt, Artificial Sequence
  Description of Artificial Sequence: Synthetic oligonucleotide
  Antisense strand to SEQ ID NO: 2101454
agucugccaauaaugagac

SEQ ID NO: 2101456 - RNA, 19 nt, Artificial Sequence
  Description of Artificial Sequence: Synthetic oligonucleotide
  Sense strand starting at position 2184 of SEQ ID NO: 1882184
ucauuauuggcagacucua

SEQ ID NO: 2101457 - RNA, 19 nt, Artificial Sequence
  Description of Artificial Sequence: Synthetic oligonucleotide
  Antisense strand to SEQ ID NO: 2101456
uagagucugccaauaauga

SEQ ID NO: 2101458 - RNA, 19 nt, Artificial Sequence
  Description of Artificial Sequence: Synthetic oligonucleotide
  Sense strand starting at position 2232 of SEQ ID NO: 1882184
aggaguacuugauaagagu

SEQ ID NO: 2101459 - RNA, 19 nt, Artificial Sequence
  Description of Artificial Sequence: Synthetic oligonucleotide
  Antisense strand to SEQ ID NO: 2101458
acucuuaucaaguacuccu

SEQ ID NO: 2101460 - RNA, 19 nt, Artificial Sequence
  Description of Artificial Sequence: Synthetic oligonucleotide
  Sense strand starting at position 2258 of SEQ ID NO: 1882184
aacauaaggugucuaggaa

SEQ ID NO: 2101461 - RNA, 19 nt, Artificial Sequence
  Description of Artificial Sequence: Synthetic oligonucleotide
  Antisense strand to SEQ ID NO: 2101460
uuccuagacaccuuauguu

SEQ ID NO: 2101462 - RNA, 19 nt, Artificial Sequence
  Description of Artificial Sequence: Synthetic oligonucleotide
  Sense strand starting at position 2270 of SEQ ID NO: 1882184
cuaggaauguaucuaguac

SEQ ID NO: 2101463 - RNA, 19 nt, Artificial Sequence
  Description of Artificial Sequence: Synthetic oligonucleotide
  Antisense strand to SEQ ID NO: 2101462
guacuagauacauuccuag

SEQ ID NO: 2101464 - RNA, 19 nt, Artificial Sequence
  Description of Artificial Sequence: Synthetic oligonucleotide
  Sense strand starting at position 2949 of SEQ ID NO: 1882184
ggaguuugagaucgcucca

SEQ ID NO: 2101465 - RNA, 19 nt, Artificial Sequence
  Description of Artificial Sequence: Synthetic oligonucleotide
  Antisense strand to SEQ ID NO: 2101464
uggagcgaucucaaacucc

SEQ ID NO: 2101466 - RNA, 19 nt, Artificial Sequence
  Description of Artificial Sequence: Synthetic oligonucleotide
  Sense strand starting at position 3112 of SEQ ID NO: 1882184
acaguaagauaugcggaau

SEQ ID NO: 2101467 - RNA, 19 nt, Artificial Sequence
  Description of Artificial Sequence: Synthetic oligonucleotide
  Antisense strand to SEQ ID NO: 2101466
auuccgcauaucuuacugu

SEQ ID NO: 2101468 - RNA, 19 nt, Artificial Sequence
  Description of Artificial Sequence: Synthetic oligonucleotide
  Sense strand starting at position 3115 of SEQ ID NO: 1882184
guaagauaugcggaauauu

SEQ ID NO: 2101469 - RNA, 19 nt, Artificial Sequence
  Description of Artificial Sequence: Synthetic oligonucleotide
  Antisense strand to SEQ ID NO: 2101468
aauauuccgcauaucuuac

SEQ ID NO: 2101470 - RNA, 19 nt, Artificial Sequence
  Description of Artificial Sequence: Synthetic oligonucleotide
  Sense strand starting at position 3159 of SEQ ID NO: 1882184
uacuguuaugcaugaacug

SEQ ID NO: 2101471 - RNA, 19 nt, Artificial Sequence
  Description of Artificial Sequence: Synthetic oligonucleotide
  Antisense strand to SEQ ID NO: 2101470
caguucaugcauaacagua

SEQ ID NO: 2101472 - RNA, 19 nt, Artificial Sequence
  Description of Artificial Sequence: Synthetic oligonucleotide
  Sense strand starting at position 3222 of SEQ ID NO: 1882184
gaauguauacgugauacua

SEQ ID NO: 2101473 - RNA, 19 nt, Artificial Sequence
  Description of Artificial Sequence: Synthetic oligonucleotide
  Antisense strand to SEQ ID NO: 2101472
uaguaucacguauacauuc

SEQ ID NO: 2101474 - RNA, 19 nt, Artificial Sequence
  Description of Artificial Sequence: Synthetic oligonucleotide
  Sense strand starting at position 3304 of SEQ ID NO: 1882184
ucagaauugugguuacaca

SEQ ID NO: 2101475 - RNA, 19 nt, Artificial Sequence
  Description of Artificial Sequence: Synthetic oligonucleotide
  Antisense strand to SEQ ID NO: 2101474
uguguaaccacaauucuga

SEQ ID NO: 2101476 - RNA, 19 nt, Artificial Sequence
  Description of Artificial Sequence: Synthetic oligonucleotide
  Sense strand starting at position 3962 of SEQ ID NO: 1882184
ccgaguccggccuggaaua

SEQ ID NO: 2101477 - RNA, 19 nt, Artificial Sequence
  Description of Artificial Sequence: Synthetic oligonucleotide
  Antisense strand to SEQ ID NO: 2101476
uauuccaggccggacucgg

SEQ ID NO: 2101478 - RNA, 19 nt, Artificial Sequence
  Description of Artificial Sequence: Synthetic oligonucleotide
  Sense strand starting at position 3964 of SEQ ID NO: 1882184
gaguccggccuggaauauu

SEQ ID NO: 2101479 - RNA, 19 nt, Artificial Sequence
  Description of Artificial Sequence: Synthetic oligonucleotide
  Antisense strand to SEQ ID NO: 2101478
aauauuccaggccggacuc

SEQ ID NO: 2101480 - RNA, 19 nt, Artificial Sequence
  Description of Artificial Sequence: Synthetic oligonucleotide
  Sense strand starting at position 33 of SEQ ID NO: 1882185
guguuuauugucuguccca

SEQ ID NO: 2101481 - RNA, 19 nt, Artificial Sequence
  Description of Artificial Sequence: Synthetic oligonucleotide
  Antisense strand to SEQ ID NO: 2101480
ugggacagacaauaaacac

SEQ ID NO: 2101482 - RNA, 19 nt, Artificial Sequence
  Description of Artificial Sequence: Synthetic oligonucleotide
  Sense strand starting at position 36 of SEQ ID NO: 1882185
uuuauugucugucccacua

SEQ ID NO: 2101483 - RNA, 19 nt, Artificial Sequence
  Description of Artificial Sequence: Synthetic oligonucleotide
  Antisense strand to SEQ ID NO: 2101482
uagugggacagacaauaaa

SEQ ID NO: 2101484 - RNA, 19 nt, Artificial Sequence
  Description of Artificial Sequence: Synthetic oligonucleotide
  Sense strand starting at position 71 of SEQ ID NO: 1882185
aggguacucugucuuacuu

SEQ ID NO: 2101485 - RNA, 19 nt, Artificial Sequence
  Description of Artificial Sequence: Synthetic oligonucleotide
  Antisense strand to SEQ ID NO: 2101484
aaguaagacagaguacccu

SEQ ID NO: 2101486 - RNA, 19 nt, Artificial Sequence
  Description of Artificial Sequence: Synthetic oligonucleotide
  Sense strand starting at position 98 of SEQ ID NO: 1882185
aguucuaguacccagaagu

SEQ ID NO: 2101487 - RNA, 19 nt, Artificial Sequence
  Description of Artificial Sequence: Synthetic oligonucleotide
  Antisense strand to SEQ ID NO: 2101486
acuucuggguacuagaacu

SEQ ID NO: 2101488 - RNA, 19 nt, Artificial Sequence
  Description of Artificial Sequence: Synthetic oligonucleotide
  Sense strand starting at position 108 of SEQ ID NO: 1882185
cccagaaguugcugguauu

SEQ ID NO: 2101489 - RNA, 19 nt, Artificial Sequence
  Description of Artificial Sequence: Synthetic oligonucleotide
  Antisense strand to SEQ ID NO: 2101488
aauaccagcaacuucuggg

SEQ ID NO: 2101490 - RNA, 19 nt, Artificial Sequence
  Description of Artificial Sequence: Synthetic oligonucleotide
  Sense strand starting at position 109 of SEQ ID NO: 1882185
ccagaaguugcugguauua

SEQ ID NO: 2101491 - RNA, 19 nt, Artificial Sequence
  Description of Artificial Sequence: Synthetic oligonucleotide
  Antisense strand to SEQ ID NO: 2101490
uaauaccagcaacuucugg

SEQ ID NO: 2101492 - RNA, 19 nt, Artificial Sequence
  Description of Artificial Sequence: Synthetic oligonucleotide
  Sense strand starting at position 111 of SEQ ID NO: 1882185
agaaguugcugguauuaga

SEQ ID NO: 2101493 - RNA, 19 nt, Artificial Sequence
  Description of Artificial Sequence: Synthetic oligonucleotide
  Antisense strand to SEQ ID NO: 2101492
ucuaauaccagcaacuucu

SEQ ID NO: 2101494 - RNA, 19 nt, Artificial Sequence
  Description of Artificial Sequence: Synthetic oligonucleotide
  Sense strand starting at position 114 of SEQ ID NO: 1882185
aguugcugguauuagagua

SEQ ID NO: 2101495 - RNA, 19 nt, Artificial Sequence
  Description of Artificial Sequence: Synthetic oligonucleotide
  Antisense strand to SEQ ID NO: 2101494
uacucuaauaccagcaacu

SEQ ID NO: 2101496 - RNA, 19 nt, Artificial Sequence
  Description of Artificial Sequence: Synthetic oligonucleotide
  Sense strand starting at position 119 of SEQ ID NO: 1882185
cugguauuagaguacauac

SEQ ID NO: 2101497 - RNA, 19 nt, Artificial Sequence
  Description of Artificial Sequence: Synthetic oligonucleotide
  Antisense strand to SEQ ID NO: 2101496
guauguacucuaauaccag

SEQ ID NO: 2101498 - RNA, 19 nt, Artificial Sequence
  Description of Artificial Sequence: Synthetic oligonucleotide
  Sense strand starting at position 137 of SEQ ID NO: 1882185
cacgauauagaauguuuau

SEQ ID NO: 2101499 - RNA, 19 nt, Artificial Sequence
  Description of Artificial Sequence: Synthetic oligonucleotide
  Antisense strand to SEQ ID NO: 2101498
auaaacauucuauaucgug

SEQ ID NO: 2101500 - RNA, 19 nt, Artificial Sequence
  Description of Artificial Sequence: Synthetic oligonucleotide
  Sense strand starting at position 194 of SEQ ID NO: 1882185
ccuuccauguguuccuuaa

SEQ ID NO: 2101501 - RNA, 19 nt, Artificial Sequence
  Description of Artificial Sequence: Synthetic oligonucleotide
  Antisense strand to SEQ ID NO: 2101500
uuaaggaacacauggaagg

SEQ ID NO: 2101502 - RNA, 19 nt, Artificial Sequence
  Description of Artificial Sequence: Synthetic oligonucleotide
  Sense strand starting at position 198 of SEQ ID NO: 1882185
ccauguguuccuuaaggau

SEQ ID NO: 2101503 - RNA, 19 nt, Artificial Sequence
  Description of Artificial Sequence: Synthetic oligonucleotide
  Antisense strand to SEQ ID NO: 2101502
auccuuaaggaacacaugg

SEQ ID NO: 2101504 - RNA, 19 nt, Artificial Sequence
  Description of Artificial Sequence: Synthetic oligonucleotide
  Sense strand starting at position 201 of SEQ ID NO: 1882185
uguguuccuuaaggauaag

SEQ ID NO: 2101505 - RNA, 19 nt, Artificial Sequence
  Description of Artificial Sequence: Synthetic oligonucleotide
  Antisense strand to SEQ ID NO: 2101504
cuuauccuuaaggaacaca

SEQ ID NO: 2101506 - RNA, 19 nt, Artificial Sequence
  Description of Artificial Sequence: Synthetic oligonucleotide
  Sense strand starting at position 235 of SEQ ID NO: 1882185
ucaaauucuuaacggagau

SEQ ID NO: 2101507 - RNA, 19 nt, Artificial Sequence
  Description of Artificial Sequence: Synthetic oligonucleotide
  Antisense strand to SEQ ID NO: 2101506
aucuccguuaagaauuuga

SEQ ID NO: 2101508 - RNA, 19 nt, Artificial Sequence
  Description of Artificial Sequence: Synthetic oligonucleotide
  Sense strand starting at position 260 of SEQ ID NO: 1882185
aaguaauuauucuggugaa

SEQ ID NO: 2101509 - RNA, 19 nt, Artificial Sequence
  Description of Artificial Sequence: Synthetic oligonucleotide
  Antisense strand to SEQ ID NO: 2101508
uucaccagaauaauuacuu

SEQ ID NO: 2101510 - RNA, 19 nt, Artificial Sequence
  Description of Artificial Sequence: Synthetic oligonucleotide
  Sense strand starting at position 261 of SEQ ID NO: 1882185
aguaauuauucuggugaau

SEQ ID NO: 2101511 - RNA, 19 nt, Artificial Sequence
  Description of Artificial Sequence: Synthetic oligonucleotide
  Antisense strand to SEQ ID NO: 2101510
auucaccagaauaauuacu

SEQ ID NO: 2101512 - RNA, 19 nt, Artificial Sequence
  Description of Artificial Sequence: Synthetic oligonucleotide
  Sense strand starting at position 270 of SEQ ID NO: 1882185
ucuggugaaucucagaaug

SEQ ID NO: 2101513 - RNA, 19 nt, Artificial Sequence
  Description of Artificial Sequence: Synthetic oligonucleotide
  Antisense strand to SEQ ID NO: 2101512
cauucugagauucaccaga

SEQ ID NO: 2101514 - RNA, 19 nt, Artificial Sequence
  Description of Artificial Sequence: Synthetic oligonucleotide
  Sense strand starting at position 272 of SEQ ID NO: 1882185
uggugaaucucagaaugau

SEQ ID NO: 2101515 - RNA, 19 nt, Artificial Sequence
  Description of Artificial Sequence: Synthetic oligonucleotide
  Antisense strand to SEQ ID NO: 2101514
aucauucugagauucacca

SEQ ID NO: 2101516 - RNA, 19 nt, Artificial Sequence
  Description of Artificial Sequence: Synthetic oligonucleotide
  Sense strand starting at position 306 of SEQ ID NO: 1882185
gggcacugucaguaaagga

SEQ ID NO: 2101517 - RNA, 19 nt, Artificial Sequence
  Description of Artificial Sequence: Synthetic oligonucleotide
  Antisense strand to SEQ ID NO: 2101516
uccuuuacugacagugccc

SEQ ID NO: 2101518 - RNA, 19 nt, Artificial Sequence
  Description of Artificial Sequence: Synthetic oligonucleotide
  Sense strand starting at position 322 of SEQ ID NO: 1882185
ggaugagaauguuacguaa

SEQ ID NO: 2101519 - RNA, 19 nt, Artificial Sequence
  Description of Artificial Sequence: Synthetic oligonucleotide
  Antisense strand to SEQ ID NO: 2101518
uuacguaacauucucaucc

SEQ ID NO: 2101520 - RNA, 19 nt, Artificial Sequence
  Description of Artificial Sequence: Synthetic oligonucleotide
  Sense strand starting at position 324 of SEQ ID NO: 1882185
augagaauguuacguaagu

SEQ ID NO: 2101521 - RNA, 19 nt, Artificial Sequence
  Description of Artificial Sequence: Synthetic oligonucleotide
  Antisense strand to SEQ ID NO: 2101520
acuuacguaacauucucau

SEQ ID NO: 2101522 - RNA, 19 nt, Artificial Sequence
  Description of Artificial Sequence: Synthetic oligonucleotide
  Sense strand starting at position 325 of SEQ ID NO: 1882185
ugagaauguuacguaagua

SEQ ID NO: 2101523 - RNA, 19 nt, Artificial Sequence
  Description of Artificial Sequence: Synthetic oligonucleotide
  Antisense strand to SEQ ID NO: 2101522
uacuuacguaacauucuca

SEQ ID NO: 2101524 - RNA, 19 nt, Artificial Sequence
  Description of Artificial Sequence: Synthetic oligonucleotide
  Sense strand starting at position 326 of SEQ ID NO: 1882185
gagaauguuacguaaguac

SEQ ID NO: 2101525 - RNA, 19 nt, Artificial Sequence
  Description of Artificial Sequence: Synthetic oligonucleotide
  Antisense strand to SEQ ID NO: 2101524
guacuuacguaacauucuc

SEQ ID NO: 2101526 - RNA, 19 nt, Artificial Sequence
  Description of Artificial Sequence: Synthetic oligonucleotide
  Sense strand starting at position 329 of SEQ ID NO: 1882185
aauguuacguaaguacuaa

SEQ ID NO: 2101527 - RNA, 19 nt, Artificial Sequence
  Description of Artificial Sequence: Synthetic oligonucleotide
  Antisense strand to SEQ ID NO: 2101526
uuaguacuuacguaacauu

SEQ ID NO: 2101528 - RNA, 19 nt, Artificial Sequence
  Description of Artificial Sequence: Synthetic oligonucleotide
  Sense strand starting at position 350 of SEQ ID NO: 1882185
gguauaaggucagaguaau

SEQ ID NO: 2101529 - RNA, 19 nt, Artificial Sequence
  Description of Artificial Sequence: Synthetic oligonucleotide
  Antisense strand to SEQ ID NO: 2101528
auuacucugaccuuauacc

SEQ ID NO: 2101530 - RNA, 19 nt, Artificial Sequence
  Description of Artificial Sequence: Synthetic oligonucleotide
  Sense strand starting at position 363 of SEQ ID NO: 1882185
aguaauuucuguuggguag

SEQ ID NO: 2101531 - RNA, 19 nt, Artificial Sequence
  Description of Artificial Sequence: Synthetic oligonucleotide
  Antisense strand to SEQ ID NO: 2101530
cuacccaacagaaauuacu

SEQ ID NO: 2101532 - RNA, 19 nt, Artificial Sequence
  Description of Artificial Sequence: Synthetic oligonucleotide
  Sense strand starting at position 496 of SEQ ID NO: 1882185
cuggauaucuggcaaauau

SEQ ID NO: 2101533 - RNA, 19 nt, Artificial Sequence
  Description of Artificial Sequence: Synthetic oligonucleotide
  Antisense strand to SEQ ID NO: 2101532
auauuugccagauauccag

SEQ ID NO: 2101534 - RNA, 19 nt, Artificial Sequence
  Description of Artificial Sequence: Synthetic oligonucleotide
  Sense strand starting at position 520 of SEQ ID NO: 1882185
agcuuaauacauggcagaa

SEQ ID NO: 2101535 - RNA, 19 nt, Artificial Sequence
  Description of Artificial Sequence: Synthetic oligonucleotide
  Antisense strand to SEQ ID NO: 2101534
uucugccauguauuaagcu

SEQ ID NO: 2101536 - RNA, 19 nt, Artificial Sequence
  Description of Artificial Sequence: Synthetic oligonucleotide
  Sense strand starting at position 623 of SEQ ID NO: 1882185
ugagauacguuauuguuag

SEQ ID NO: 2101537 - RNA, 19 nt, Artificial Sequence
  Description of Artificial Sequence: Synthetic oligonucleotide
  Antisense strand to SEQ ID NO: 2101536
cuaacaauaacguaucuca

SEQ ID NO: 2101538 - RNA, 19 nt, Artificial Sequence
  Description of Artificial Sequence: Synthetic oligonucleotide
  Sense strand starting at position 624 of SEQ ID NO: 1882185
gagauacguuauuguuaga

SEQ ID NO: 2101539 - RNA, 19 nt, Artificial Sequence
  Description of Artificial Sequence: Synthetic oligonucleotide
  Antisense strand to SEQ ID NO: 2101538
ucuaacaauaacguaucuc

SEQ ID NO: 2101540 - RNA, 19 nt, Artificial Sequence
  Description of Artificial Sequence: Synthetic oligonucleotide
  Sense strand starting at position 12 of SEQ ID NO: 1882186
gcccuaucucagggaggau

SEQ ID NO: 2101541 - RNA, 19 nt, Artificial Sequence
  Description of Artificial Sequence: Synthetic oligonucleotide
  Antisense strand to SEQ ID NO: 2101540
auccucccugagauagggc

SEQ ID NO: 2101542 - RNA, 19 nt, Artificial Sequence
  Description of Artificial Sequence: Synthetic oligonucleotide
  Sense strand starting at position 403 of SEQ ID NO: 1882186
gagaguuacacuugugagu

SEQ ID NO: 2101543 - RNA, 19 nt, Artificial Sequence
  Description of Artificial Sequence: Synthetic oligonucleotide
  Antisense strand to SEQ ID NO: 2101542
acucacaaguguaacucuc

SEQ ID NO: 2101544 - RNA, 19 nt, Artificial Sequence
  Description of Artificial Sequence: Synthetic oligonucleotide
  Sense strand starting at position 412 of SEQ ID NO: 1882186
acuugugagugaucccagu

SEQ ID NO: 2101545 - RNA, 19 nt, Artificial Sequence
  Description of Artificial Sequence: Synthetic oligonucleotide
  Antisense strand to SEQ ID NO: 2101544
acugggaucacucacaagu

SEQ ID NO: 2101546 - RNA, 19 nt, Artificial Sequence
  Description of Artificial Sequence: Synthetic oligonucleotide
  Sense strand starting at position 418 of SEQ ID NO: 1882186
gagugaucccaguggccau

SEQ ID NO: 2101547 - RNA, 19 nt, Artificial Sequence
  Description of Artificial Sequence: Synthetic oligonucleotide
  Antisense strand to SEQ ID NO: 2101546
auggccacugggaucacuc

SEQ ID NO: 2101548 - RNA, 19 nt, Artificial Sequence
  Description of Artificial Sequence: Synthetic oligonucleotide
  Sense strand starting at position 463 of SEQ ID NO: 1882186
gucagacuuccagaacgug

SEQ ID NO: 2101549 - RNA, 19 nt, Artificial Sequence
  Description of Artificial Sequence: Synthetic oligonucleotide
  Antisense strand to SEQ ID NO: 2101548
cacguucuggaagucugac

SEQ ID NO: 2101550 - RNA, 19 nt, Artificial Sequence
  Description of Artificial Sequence: Synthetic oligonucleotide
  Sense strand starting at position 722 of SEQ ID NO: 1882186
aaauuaucccagggugggu

SEQ ID NO: 2101551 - RNA, 19 nt, Artificial Sequence
  Description of Artificial Sequence: Synthetic oligonucleotide
  Antisense strand to SEQ ID NO: 2101550
acccacccugggauaauuu

SEQ ID NO: 2101552 - RNA, 19 nt, Artificial Sequence
  Description of Artificial Sequence: Synthetic oligonucleotide
  Sense strand starting at position 822 of SEQ ID NO: 1882186
ccaagugccagcuaagagu

SEQ ID NO: 2101553 - RNA, 19 nt, Artificial Sequence
  Description of Artificial Sequence: Synthetic oligonucleotide
  Antisense strand to SEQ ID NO: 2101552
acucuuagcuggcacuugg

SEQ ID NO: 2101554 - RNA, 19 nt, Artificial Sequence
  Description of Artificial Sequence: Synthetic oligonucleotide
  Sense strand starting at position 850 of SEQ ID NO: 1882186
guagcuucccucugacaca

SEQ ID NO: 2101555 - RNA, 19 nt, Artificial Sequence
  Description of Artificial Sequence: Synthetic oligonucleotide
  Antisense strand to SEQ ID NO: 2101554
ugugucagagggaagcuac

SEQ ID NO: 2101556 - RNA, 19 nt, Artificial Sequence
  Description of Artificial Sequence: Synthetic oligonucleotide
  Sense strand starting at position 994 of SEQ ID NO: 1882186
uccacuaccuuauugggaa

SEQ ID NO: 2101557 - RNA, 19 nt, Artificial Sequence
  Description of Artificial Sequence: Synthetic oligonucleotide
  Antisense strand to SEQ ID NO: 2101556
uucccaauaagguagugga

SEQ ID NO: 2101558 - RNA, 19 nt, Artificial Sequence
  Description of Artificial Sequence: Synthetic oligonucleotide
  Sense strand starting at position 1057 of SEQ ID NO: 1882186
ccaggaaucucugaaggag

SEQ ID NO: 2101559 - RNA, 19 nt, Artificial Sequence
  Description of Artificial Sequence: Synthetic oligonucleotide
  Antisense strand to SEQ ID NO: 2101558
cuccuucagagauuccugg

SEQ ID NO: 2101560 - RNA, 19 nt, Artificial Sequence
  Description of Artificial Sequence: Synthetic oligonucleotide
  Sense strand starting at position 1083 of SEQ ID NO: 1882186
ccagucagaggcuguaauu

SEQ ID NO: 2101561 - RNA, 19 nt, Artificial Sequence
  Description of Artificial Sequence: Synthetic oligonucleotide
  Antisense strand to SEQ ID NO: 2101560
aauuacagccucugacugg

SEQ ID NO: 2101562 - RNA, 19 nt, Artificial Sequence
  Description of Artificial Sequence: Synthetic oligonucleotide
  Sense strand starting at position 1100 of SEQ ID NO: 1882186
uugugaagguucucaaacu

SEQ ID NO: 2101563 - RNA, 19 nt, Artificial Sequence
  Description of Artificial Sequence: Synthetic oligonucleotide
  Antisense strand to SEQ ID NO: 2101562
aguuugagaaccuucacaa

SEQ ID NO: 2101564 - RNA, 19 nt, Artificial Sequence
  Description of Artificial Sequence: Synthetic oligonucleotide
  Sense strand starting at position 1223 of SEQ ID NO: 1882186
gaauucuuacgguagacac

SEQ ID NO: 2101565 - RNA, 19 nt, Artificial Sequence
  Description of Artificial Sequence: Synthetic oligonucleotide
  Antisense strand to SEQ ID NO: 2101564
gugucuaccguaagaauuc

SEQ ID NO: 2101566 - RNA, 19 nt, Artificial Sequence
  Description of Artificial Sequence: Synthetic oligonucleotide
  Sense strand starting at position 1457 of SEQ ID NO: 1882186
gugcaaggccuuugggaaa

SEQ ID NO: 2101567 - RNA, 19 nt, Artificial Sequence
  Description of Artificial Sequence: Synthetic oligonucleotide
  Antisense strand to SEQ ID NO: 2101566
uuucccaaaggccuugcac

SEQ ID NO: 2101568 - RNA, 19 nt, Artificial Sequence
  Description of Artificial Sequence: Synthetic oligonucleotide
  Sense strand starting at position 1670 of SEQ ID NO: 1882186
gagauagcaccaugguaga

SEQ ID NO: 2101569 - RNA, 19 nt, Artificial Sequence
  Description of Artificial Sequence: Synthetic oligonucleotide
  Antisense strand to SEQ ID NO: 2101568
ucuaccauggugcuaucuc

SEQ ID NO: 2101570 - RNA, 19 nt, Artificial Sequence
  Description of Artificial Sequence: Synthetic oligonucleotide
  Sense strand starting at position 2002 of SEQ ID NO: 1882186
cgucuugucacagggaaug

SEQ ID NO: 2101571 - RNA, 19 nt, Artificial Sequence
  Description of Artificial Sequence: Synthetic oligonucleotide
  Antisense strand to SEQ ID NO: 2101570
cauucccugugacaagacg

SEQ ID NO: 2101572 - RNA, 19 nt, Artificial Sequence
  Description of Artificial Sequence: Synthetic oligonucleotide
  Sense strand starting at position 2012 of SEQ ID NO: 1882186
cagggaaugcuaggaauuc

SEQ ID NO: 2101573 - RNA, 19 nt, Artificial Sequence
  Description of Artificial Sequence: Synthetic oligonucleotide
  Antisense strand to SEQ ID NO: 2101572
gaauuccuagcauucccug

SEQ ID NO: 2101574 - RNA, 19 nt, Artificial Sequence
  Description of Artificial Sequence: Synthetic oligonucleotide
  Sense strand starting at position 2031 of SEQ ID NO: 1882186
augccuuugggacaagagu

SEQ ID NO: 2101575 - RNA, 19 nt, Artificial Sequence
  Description of Artificial Sequence: Synthetic oligonucleotide
  Antisense strand to SEQ ID NO: 2101574
acucuugucccaaaggcau

SEQ ID NO: 2101576 - RNA, 19 nt, Artificial Sequence
  Description of Artificial Sequence: Synthetic oligonucleotide
  Sense strand starting at position 2040 of SEQ ID NO: 1882186
ggacaagaguccuucaggu

SEQ ID NO: 2101577 - RNA, 19 nt, Artificial Sequence
  Description of Artificial Sequence: Synthetic oligonucleotide
  Antisense strand to SEQ ID NO: 2101576
accugaaggacucuugucc

SEQ ID NO: 2101578 - RNA, 19 nt, Artificial Sequence
  Description of Artificial Sequence: Synthetic oligonucleotide
  Sense strand starting at position 2266 of SEQ ID NO: 1882186
gacuguugucugcaagggu

SEQ ID NO: 2101579 - RNA, 19 nt, Artificial Sequence
  Description of Artificial Sequence: Synthetic oligonucleotide
  Antisense strand to SEQ ID NO: 2101578
acccuugcagacaacaguc

SEQ ID NO: 2101580 - RNA, 19 nt, Artificial Sequence
  Description of Artificial Sequence: Synthetic oligonucleotide
  Sense strand starting at position 2327 of SEQ ID NO: 1882186
gagaaaccuguuuggaacu

SEQ ID NO: 2101581 - RNA, 19 nt, Artificial Sequence
  Description of Artificial Sequence: Synthetic oligonucleotide
  Antisense strand to SEQ ID NO: 2101580
aguuccaaacagguuucuc

SEQ ID NO: 2101582 - RNA, 19 nt, Artificial Sequence
  Description of Artificial Sequence: Synthetic oligonucleotide
  Sense strand starting at position 2605 of SEQ ID NO: 1882186
aaauccugagaaugucuga

SEQ ID NO: 2101583 - RNA, 19 nt, Artificial Sequence
  Description of Artificial Sequence: Synthetic oligonucleotide
  Antisense strand to SEQ ID NO: 2101582
ucagacauucucaggauuu

SEQ ID NO: 2101584 - RNA, 19 nt, Artificial Sequence
  Description of Artificial Sequence: Synthetic oligonucleotide
  Sense strand starting at position 2640 of SEQ ID NO: 1882186
cuaguucagggcugaggau

SEQ ID NO: 2101585 - RNA, 19 nt, Artificial Sequence
  Description of Artificial Sequence: Synthetic oligonucleotide
  Antisense strand to SEQ ID NO: 2101584
auccucagcccugaacuag

SEQ ID NO: 2101586 - RNA, 19 nt, Artificial Sequence
  Description of Artificial Sequence: Synthetic oligonucleotide
  Sense strand starting at position 2658 of SEQ ID NO: 1882186
ugggacaguguugauguua

SEQ ID NO: 2101587 - RNA, 19 nt, Artificial Sequence
  Description of Artificial Sequence: Synthetic oligonucleotide
  Antisense strand to SEQ ID NO: 2101586
uaacaucaacacuguccca

SEQ ID NO: 2101588 - RNA, 19 nt, Artificial Sequence
  Description of Artificial Sequence: Synthetic oligonucleotide
  Sense strand starting at position 3346 of SEQ ID NO: 1882186
gauggaucccaggguuucu

SEQ ID NO: 2101589 - RNA, 19 nt, Artificial Sequence
  Description of Artificial Sequence: Synthetic oligonucleotide
  Antisense strand to SEQ ID NO: 2101588
agaaacccugggauccauc

SEQ ID NO: 2101590 - RNA, 19 nt, Artificial Sequence
  Description of Artificial Sequence: Synthetic oligonucleotide
  Sense strand starting at position 3434 of SEQ ID NO: 1882186
cucccuccgagguagauau

SEQ ID NO: 2101591 - RNA, 19 nt, Artificial Sequence
  Description of Artificial Sequence: Synthetic oligonucleotide
  Antisense strand to SEQ ID NO: 2101590
auaucuaccucggagggag

SEQ ID NO: 2101592 - RNA, 19 nt, Artificial Sequence
  Description of Artificial Sequence: Synthetic oligonucleotide
  Sense strand starting at position 3438 of SEQ ID NO: 1882186
cuccgagguagauaucuga

SEQ ID NO: 2101593 - RNA, 19 nt, Artificial Sequence
  Description of Artificial Sequence: Synthetic oligonucleotide
  Antisense strand to SEQ ID NO: 2101592
ucagauaucuaccucggag

SEQ ID NO: 2101594 - RNA, 19 nt, Artificial Sequence
  Description of Artificial Sequence: Synthetic oligonucleotide
  Sense strand starting at position 3442 of SEQ ID NO: 1882186
gagguagauaucugaguca

SEQ ID NO: 2101595 - RNA, 19 nt, Artificial Sequence
  Description of Artificial Sequence: Synthetic oligonucleotide
  Antisense strand to SEQ ID NO: 2101594
ugacucagauaucuaccuc

SEQ ID NO: 2101596 - RNA, 19 nt, Artificial Sequence
  Description of Artificial Sequence: Synthetic oligonucleotide
  Sense strand starting at position 3445 of SEQ ID NO: 1882186
guagauaucugagucagac

SEQ ID NO: 2101597 - RNA, 19 nt, Artificial Sequence
  Description of Artificial Sequence: Synthetic oligonucleotide
  Antisense strand to SEQ ID NO: 2101596
gucugacucagauaucuac

SEQ ID NO: 2101598 - RNA, 19 nt, Artificial Sequence
  Description of Artificial Sequence: Synthetic oligonucleotide
  Sense strand starting at position 3478 of SEQ ID NO: 1882186
agcgauucuauugguuuaa

SEQ ID NO: 2101599 - RNA, 19 nt, Artificial Sequence
  Description of Artificial Sequence: Synthetic oligonucleotide
  Antisense strand to SEQ ID NO: 2101598
uuaaaccaauagaaucgcu

SEQ ID NO: 2101600 - RNA, 19 nt, Artificial Sequence
  Description of Artificial Sequence: Synthetic oligonucleotide
  Sense strand starting at position 3479 of SEQ ID NO: 1882186
gcgauucuauugguuuaag

SEQ ID NO: 2101601 - RNA, 19 nt, Artificial Sequence
  Description of Artificial Sequence: Synthetic oligonucleotide
  Antisense strand to SEQ ID NO: 2101600
cuuaaaccaauagaaucgc

SEQ ID NO: 2101602 - RNA, 19 nt, Artificial Sequence
  Description of Artificial Sequence: Synthetic oligonucleotide
  Sense strand starting at position 3480 of SEQ ID NO: 1882186
cgauucuauugguuuaaga

SEQ ID NO: 2101603 - RNA, 19 nt, Artificial Sequence
  Description of Artificial Sequence: Synthetic oligonucleotide
  Antisense strand to SEQ ID NO: 2101602
ucuuaaaccaauagaaucg

SEQ ID NO: 2101604 - RNA, 19 nt, Artificial Sequence
  Description of Artificial Sequence: Synthetic oligonucleotide
  Sense strand starting at position 3503 of SEQ ID NO: 1882186
cugcguaugagguaaguaa

SEQ ID NO: 2101605 - RNA, 19 nt, Artificial Sequence
  Description of Artificial Sequence: Synthetic oligonucleotide
  Antisense strand to SEQ ID NO: 2101604
uuacuuaccucauacgcag

SEQ ID NO: 2101606 - RNA, 19 nt, Artificial Sequence
  Description of Artificial Sequence: Synthetic oligonucleotide
  Sense strand starting at position 3568 of SEQ ID NO: 1882186
guccucuguccagaaguca

SEQ ID NO: 2101607 - RNA, 19 nt, Artificial Sequence
  Description of Artificial Sequence: Synthetic oligonucleotide
  Antisense strand to SEQ ID NO: 2101606
ugacuucuggacagaggac

SEQ ID NO: 2101608 - RNA, 19 nt, Artificial Sequence
  Description of Artificial Sequence: Synthetic oligonucleotide
  Sense strand starting at position 3768 of SEQ ID NO: 1882186
gucugagaaauagguuucu

SEQ ID NO: 2101609 - RNA, 19 nt, Artificial Sequence
  Description of Artificial Sequence: Synthetic oligonucleotide
  Antisense strand to SEQ ID NO: 2101608
agaaaccuauuucucagac

SEQ ID NO: 2101610 - RNA, 19 nt, Artificial Sequence
  Description of Artificial Sequence: Synthetic oligonucleotide
  Sense strand starting at position 3773 of SEQ ID NO: 1882186
agaaauagguuucucggua

SEQ ID NO: 2101611 - RNA, 19 nt, Artificial Sequence
  Description of Artificial Sequence: Synthetic oligonucleotide
  Antisense strand to SEQ ID NO: 2101610
uaccgagaaaccuauuucu

SEQ ID NO: 2101612 - RNA, 19 nt, Artificial Sequence
  Description of Artificial Sequence: Synthetic oligonucleotide
  Sense strand starting at position 3774 of SEQ ID NO: 1882186
gaaauagguuucucgguau

SEQ ID NO: 2101613 - RNA, 19 nt, Artificial Sequence
  Description of Artificial Sequence: Synthetic oligonucleotide
  Antisense strand to SEQ ID NO: 2101612
auaccgagaaaccuauuuc

SEQ ID NO: 2101614 - RNA, 19 nt, Artificial Sequence
  Description of Artificial Sequence: Synthetic oligonucleotide
  Sense strand starting at position 3795 of SEQ ID NO: 1882186
guauguuucuguguaagaa

SEQ ID NO: 2101615 - RNA, 19 nt, Artificial Sequence
  Description of Artificial Sequence: Synthetic oligonucleotide
  Antisense strand to SEQ ID NO: 2101614
uucuuacacagaaacauac

SEQ ID NO: 2101616 - RNA, 19 nt, Artificial Sequence
  Description of Artificial Sequence: Synthetic oligonucleotide
  Sense strand starting at position 3796 of SEQ ID NO: 1882186
uauguuucuguguaagaaa

SEQ ID NO: 2101617 - RNA, 19 nt, Artificial Sequence
  Description of Artificial Sequence: Synthetic oligonucleotide
  Antisense strand to SEQ ID NO: 2101616
uuucuuacacagaaacaua

SEQ ID NO: 2101618 - RNA, 19 nt, Artificial Sequence
  Description of Artificial Sequence: Synthetic oligonucleotide
  Sense strand starting at position 3914 of SEQ ID NO: 1882186
cagagagucucguuaggga

SEQ ID NO: 2101619 - RNA, 19 nt, Artificial Sequence
  Description of Artificial Sequence: Synthetic oligonucleotide
  Antisense strand to SEQ ID NO: 2101618
ucccuaacgagacucucug

SEQ ID NO: 2101620 - RNA, 19 nt, Artificial Sequence
  Description of Artificial Sequence: Synthetic oligonucleotide
  Sense strand starting at position 507 of SEQ ID NO: 1882187
agacuuuauccacguggga

SEQ ID NO: 2101621 - RNA, 19 nt, Artificial Sequence
  Description of Artificial Sequence: Synthetic oligonucleotide
  Antisense strand to SEQ ID NO: 2101620
ucccacguggauaaagucu

SEQ ID NO: 2101622 - RNA, 19 nt, Artificial Sequence
  Description of Artificial Sequence: Synthetic oligonucleotide
  Sense strand starting at position 509 of SEQ ID NO: 1882187
acuuuauccacgugggaca

SEQ ID NO: 2101623 - RNA, 19 nt, Artificial Sequence
  Description of Artificial Sequence: Synthetic oligonucleotide
  Antisense strand to SEQ ID NO: 2101622
ugucccacguggauaaagu

SEQ ID NO: 2101624 - RNA, 19 nt, Artificial Sequence
  Description of Artificial Sequence: Synthetic oligonucleotide
  Sense strand starting at position 595 of SEQ ID NO: 1882187
caaacuauucuggguuuga

SEQ ID NO: 2101625 - RNA, 19 nt, Artificial Sequence
  Description of Artificial Sequence: Synthetic oligonucleotide
  Antisense strand to SEQ ID NO: 2101624
ucaaacccagaauaguuug

SEQ ID NO: 2101626 - RNA, 19 nt, Artificial Sequence
  Description of Artificial Sequence: Synthetic oligonucleotide
  Sense strand starting at position 596 of SEQ ID NO: 1882187
aaacuauucuggguuugac

SEQ ID NO: 2101627 - RNA, 19 nt, Artificial Sequence
  Description of Artificial Sequence: Synthetic oligonucleotide
  Antisense strand to SEQ ID NO: 2101626
gucaaacccagaauaguuu

SEQ ID NO: 2101628 - RNA, 19 nt, Artificial Sequence
  Description of Artificial Sequence: Synthetic oligonucleotide
  Sense strand starting at position 665 of SEQ ID NO: 1882187
gcaggauacugaucacuac

SEQ ID NO: 2101629 - RNA, 19 nt, Artificial Sequence
  Description of Artificial Sequence: Synthetic oligonucleotide
  Antisense strand to SEQ ID NO: 2101628
guagugaucaguauccugc

SEQ ID NO: 2101630 - RNA, 19 nt, Artificial Sequence
  Description of Artificial Sequence: Synthetic oligonucleotide
  Sense strand starting at position 928 of SEQ ID NO: 1882187
gagcgauuggccucgccca

SEQ ID NO: 2101631 - RNA, 19 nt, Artificial Sequence
  Description of Artificial Sequence: Synthetic oligonucleotide
  Antisense strand to SEQ ID NO: 2101630
ugggcgaggccaaucgcuc

SEQ ID NO: 2101632 - RNA, 19 nt, Artificial Sequence
  Description of Artificial Sequence: Synthetic oligonucleotide
  Sense strand starting at position 1094 of SEQ ID NO: 1882187
ggcugugaccguuugcuga

SEQ ID NO: 2101633 - RNA, 19 nt, Artificial Sequence
  Description of Artificial Sequence: Synthetic oligonucleotide
  Antisense strand to SEQ ID NO: 2101632
ucagcaaacggucacagcc

SEQ ID NO: 2101634 - RNA, 19 nt, Artificial Sequence
  Description of Artificial Sequence: Synthetic oligonucleotide
  Sense strand starting at position 1179 of SEQ ID NO: 1882187
cagacucuggcuuguuaaa

SEQ ID NO: 2101635 - RNA, 19 nt, Artificial Sequence
  Description of Artificial Sequence: Synthetic oligonucleotide
  Antisense strand to SEQ ID NO: 2101634
uuuaacaagccagagucug

SEQ ID NO: 2101636 - RNA, 19 nt, Artificial Sequence
  Description of Artificial Sequence: Synthetic oligonucleotide
  Sense strand starting at position 1181 of SEQ ID NO: 1882187
gacucuggcuuguuaaaga

SEQ ID NO: 2101637 - RNA, 19 nt, Artificial Sequence
  Description of Artificial Sequence: Synthetic oligonucleotide
  Antisense strand to SEQ ID NO: 2101636
ucuuuaacaagccagaguc

SEQ ID NO: 2101638 - RNA, 19 nt, Artificial Sequence
  Description of Artificial Sequence: Synthetic oligonucleotide
  Sense strand starting at position 1295 of SEQ ID NO: 1882187
gaugguagucgguaugaac

SEQ ID NO: 2101639 - RNA, 19 nt, Artificial Sequence
  Description of Artificial Sequence: Synthetic oligonucleotide
  Antisense strand to SEQ ID NO: 2101638
guucauaccgacuaccauc

SEQ ID NO: 2101640 - RNA, 19 nt, Artificial Sequence
  Description of Artificial Sequence: Synthetic oligonucleotide
  Sense strand starting at position 1398 of SEQ ID NO: 1882187
ggguuccucauccauguga

SEQ ID NO: 2101641 - RNA, 19 nt, Artificial Sequence
  Description of Artificial Sequence: Synthetic oligonucleotide
  Antisense strand to SEQ ID NO: 2101640
ucacauggaugaggaaccc

SEQ ID NO: 2101642 - RNA, 19 nt, Artificial Sequence
  Description of Artificial Sequence: Synthetic oligonucleotide
  Sense strand starting at position 1405 of SEQ ID NO: 1882187
ucauccaugugauuccaga

SEQ ID NO: 2101643 - RNA, 19 nt, Artificial Sequence
  Description of Artificial Sequence: Synthetic oligonucleotide
  Antisense strand to SEQ ID NO: 2101642
ucuggaaucacauggauga

SEQ ID NO: 2101644 - RNA, 19 nt, Artificial Sequence
  Description of Artificial Sequence: Synthetic oligonucleotide
  Sense strand starting at position 1503 of SEQ ID NO: 1882187
gccugcagagcugaugaau

SEQ ID NO: 2101645 - RNA, 19 nt, Artificial Sequence
  Description of Artificial Sequence: Synthetic oligonucleotide
  Antisense strand to SEQ ID NO: 2101644
auucaucagcucugcaggc

SEQ ID NO: 2101646 - RNA, 19 nt, Artificial Sequence
  Description of Artificial Sequence: Synthetic oligonucleotide
  Sense strand starting at position 1683 of SEQ ID NO: 1882187
caaagagcccuugacaagu

SEQ ID NO: 2101647 - RNA, 19 nt, Artificial Sequence
  Description of Artificial Sequence: Synthetic oligonucleotide
  Antisense strand to SEQ ID NO: 2101646
acuugucaagggcucuuug

SEQ ID NO: 2101648 - RNA, 19 nt, Artificial Sequence
  Description of Artificial Sequence: Synthetic oligonucleotide
  Sense strand starting at position 1722 of SEQ ID NO: 1882187
ggguaaaggcggugaaaua

SEQ ID NO: 2101649 - RNA, 19 nt, Artificial Sequence
  Description of Artificial Sequence: Synthetic oligonucleotide
  Antisense strand to SEQ ID NO: 2101648
uauuucaccgccuuuaccc

SEQ ID NO: 2101650 - RNA, 19 nt, Artificial Sequence
  Description of Artificial Sequence: Synthetic oligonucleotide
  Sense strand starting at position 1723 of SEQ ID NO: 1882187
gguaaaggcggugaaauaa

SEQ ID NO: 2101651 - RNA, 19 nt, Artificial Sequence
  Description of Artificial Sequence: Synthetic oligonucleotide
  Antisense strand to SEQ ID NO: 2101650
uuauuucaccgccuuuacc

SEQ ID NO: 2101652 - RNA, 19 nt, Artificial Sequence
  Description of Artificial Sequence: Synthetic oligonucleotide
  Sense strand starting at position 1758 of SEQ ID NO: 1882187
cacggucuccuagagaaac

SEQ ID NO: 2101653 - RNA, 19 nt, Artificial Sequence
  Description of Artificial Sequence: Synthetic oligonucleotide
  Antisense strand to SEQ ID NO: 2101652
guuucucuaggagaccgug

SEQ ID NO: 2101654 - RNA, 19 nt, Artificial Sequence
  Description of Artificial Sequence: Synthetic oligonucleotide
  Sense strand starting at position 1846 of SEQ ID NO: 1882187
aaauccuucguuuaaagag

SEQ ID NO: 2101655 - RNA, 19 nt, Artificial Sequence
  Description of Artificial Sequence: Synthetic oligonucleotide
  Antisense strand to SEQ ID NO: 2101654
cucuuuaaacgaaggauuu

SEQ ID NO: 2101656 - RNA, 19 nt, Artificial Sequence
  Description of Artificial Sequence: Synthetic oligonucleotide
  Sense strand starting at position 1941 of SEQ ID NO: 1882187
ccuuucucugugcaaagaa

SEQ ID NO: 2101657 - RNA, 19 nt, Artificial Sequence
  Description of Artificial Sequence: Synthetic oligonucleotide
  Antisense strand to SEQ ID NO: 2101656
uucuuugcacagagaaagg

SEQ ID NO: 2101658 - RNA, 19 nt, Artificial Sequence
  Description of Artificial Sequence: Synthetic oligonucleotide
  Sense strand starting at position 1996 of SEQ ID NO: 1882187
gauuuauguuuauagagac

SEQ ID NO: 2101659 - RNA, 19 nt, Artificial Sequence
  Description of Artificial Sequence: Synthetic oligonucleotide
  Antisense strand to SEQ ID NO: 2101658
gucucuauaaacauaaauc

SEQ ID NO: 2101660 - RNA, 19 nt, Artificial Sequence
  Description of Artificial Sequence: Synthetic oligonucleotide
  Sense strand starting at position 2457 of SEQ ID NO: 1882187
ugccauauuccgggaaaca

SEQ ID NO: 2101661 - RNA, 19 nt, Artificial Sequence
  Description of Artificial Sequence: Synthetic oligonucleotide
  Antisense strand to SEQ ID NO: 2101660
uguuucccggaauauggca

SEQ ID NO: 2101662 - RNA, 19 nt, Artificial Sequence
  Description of Artificial Sequence: Synthetic oligonucleotide
  Sense strand starting at position 2458 of SEQ ID NO: 1882187
gccauauuccgggaaacac

SEQ ID NO: 2101663 - RNA, 19 nt, Artificial Sequence
  Description of Artificial Sequence: Synthetic oligonucleotide
  Antisense strand to SEQ ID NO: 2101662
guguuucccggaauauggc

SEQ ID NO: 2101664 - RNA, 19 nt, Artificial Sequence
  Description of Artificial Sequence: Synthetic oligonucleotide
  Sense strand starting at position 2604 of SEQ ID NO: 1882187
cuggauuccugaccacaua

SEQ ID NO: 2101665 - RNA, 19 nt, Artificial Sequence
  Description of Artificial Sequence: Synthetic oligonucleotide
  Antisense strand to SEQ ID NO: 2101664
uauguggucaggaauccag

SEQ ID NO: 2101666 - RNA, 19 nt, Artificial Sequence
  Description of Artificial Sequence: Synthetic oligonucleotide
  Sense strand starting at position 2708 of SEQ ID NO: 1882187
ggcuucuuuaaggaucuga

SEQ ID NO: 2101667 - RNA, 19 nt, Artificial Sequence
  Description of Artificial Sequence: Synthetic oligonucleotide
  Antisense strand to SEQ ID NO: 2101666
ucagauccuuaaagaagcc

SEQ ID NO: 2101668 - RNA, 19 nt, Artificial Sequence
  Description of Artificial Sequence: Synthetic oligonucleotide
  Sense strand starting at position 2747 of SEQ ID NO: 1882187
ccggcagauaaauauugau

SEQ ID NO: 2101669 - RNA, 19 nt, Artificial Sequence
  Description of Artificial Sequence: Synthetic oligonucleotide
  Antisense strand to SEQ ID NO: 2101668
aucaauauuuaucugccgg

SEQ ID NO: 2101670 - RNA, 19 nt, Artificial Sequence
  Description of Artificial Sequence: Synthetic oligonucleotide
  Sense strand starting at position 2826 of SEQ ID NO: 1882187
gaacgaucaugcucuuaug

SEQ ID NO: 2101671 - RNA, 19 nt, Artificial Sequence
  Description of Artificial Sequence: Synthetic oligonucleotide
  Antisense strand to SEQ ID NO: 2101670
cauaagagcaugaucguuc

SEQ ID NO: 2101672 - RNA, 19 nt, Artificial Sequence
  Description of Artificial Sequence: Synthetic oligonucleotide
  Sense strand starting at position 3006 of SEQ ID NO: 1882187
gugugacuccaagaucaac

SEQ ID NO: 2101673 - RNA, 19 nt, Artificial Sequence
  Description of Artificial Sequence: Synthetic oligonucleotide
  Antisense strand to SEQ ID NO: 2101672
guugaucuuggagucacac

SEQ ID NO: 2101674 - RNA, 19 nt, Artificial Sequence
  Description of Artificial Sequence: Synthetic oligonucleotide
  Sense strand starting at position 3119 of SEQ ID NO: 1882187
augggaucuugaguacauu

SEQ ID NO: 2101675 - RNA, 19 nt, Artificial Sequence
  Description of Artificial Sequence: Synthetic oligonucleotide
  Antisense strand to SEQ ID NO: 2101674
aauguacucaagaucccau

SEQ ID NO: 2101676 - RNA, 19 nt, Artificial Sequence
  Description of Artificial Sequence: Synthetic oligonucleotide
  Sense strand starting at position 3220 of SEQ ID NO: 1882187
cuucgugaauuucugcaaa

SEQ ID NO: 2101677 - RNA, 19 nt, Artificial Sequence
  Description of Artificial Sequence: Synthetic oligonucleotide
  Antisense strand to SEQ ID NO: 2101676
uuugcagaaauucacgaag

SEQ ID NO: 2101678 - RNA, 19 nt, Artificial Sequence
  Description of Artificial Sequence: Synthetic oligonucleotide
  Sense strand starting at position 3222 of SEQ ID NO: 1882187
ucgugaauuucugcaaauu

SEQ ID NO: 2101679 - RNA, 19 nt, Artificial Sequence
  Description of Artificial Sequence: Synthetic oligonucleotide
  Antisense strand to SEQ ID NO: 2101678
aauuugcagaaauucacga

SEQ ID NO: 2101680 - RNA, 19 nt, Artificial Sequence
  Description of Artificial Sequence: Synthetic oligonucleotide
  Sense strand starting at position 3265 of SEQ ID NO: 1882187
uuccucuuggacugugaua

SEQ ID NO: 2101681 - RNA, 19 nt, Artificial Sequence
  Description of Artificial Sequence: Synthetic oligonucleotide
  Antisense strand to SEQ ID NO: 2101680
uaucacaguccaagaggaa

SEQ ID NO: 2101682 - RNA, 19 nt, Artificial Sequence
  Description of Artificial Sequence: Synthetic oligonucleotide
  Sense strand starting at position 3274 of SEQ ID NO: 1882187
gacugugauaggugaggau

SEQ ID NO: 2101683 - RNA, 19 nt, Artificial Sequence
  Description of Artificial Sequence: Synthetic oligonucleotide
  Antisense strand to SEQ ID NO: 2101682
auccucaccuaucacaguc

SEQ ID NO: 2101684 - RNA, 19 nt, Artificial Sequence
  Description of Artificial Sequence: Synthetic oligonucleotide
  Sense strand starting at position 3425 of SEQ ID NO: 1882187
uucugaaggucauuaaaga

SEQ ID NO: 2101685 - RNA, 19 nt, Artificial Sequence
  Description of Artificial Sequence: Synthetic oligonucleotide
  Antisense strand to SEQ ID NO: 2101684
ucuuuaaugaccuucagaa

SEQ ID NO: 2101686 - RNA, 19 nt, Artificial Sequence
  Description of Artificial Sequence: Synthetic oligonucleotide
  Sense strand starting at position 3452 of SEQ ID NO: 1882187
guugcugaacaaugaauau

SEQ ID NO: 2101687 - RNA, 19 nt, Artificial Sequence
  Description of Artificial Sequence: Synthetic oligonucleotide
  Antisense strand to SEQ ID NO: 2101686
auauucauuguucagcaac

SEQ ID NO: 2101688 - RNA, 19 nt, Artificial Sequence
  Description of Artificial Sequence: Synthetic oligonucleotide
  Sense strand starting at position 3543 of SEQ ID NO: 1882187
gccacagcucuccaguaga

SEQ ID NO: 2101689 - RNA, 19 nt, Artificial Sequence
  Description of Artificial Sequence: Synthetic oligonucleotide
  Antisense strand to SEQ ID NO: 2101688
ucuacuggagagcuguggc

SEQ ID NO: 2101690 - RNA, 19 nt, Artificial Sequence
  Description of Artificial Sequence: Synthetic oligonucleotide
  Sense strand starting at position 3743 of SEQ ID NO: 1882187
gugguguuuggagaagaga

SEQ ID NO: 2101691 - RNA, 19 nt, Artificial Sequence
  Description of Artificial Sequence: Synthetic oligonucleotide
  Antisense strand to SEQ ID NO: 2101690
ucucuucuccaaacaccac

SEQ ID NO: 2101692 - RNA, 19 nt, Artificial Sequence
  Description of Artificial Sequence: Synthetic oligonucleotide
  Sense strand starting at position 3777 of SEQ ID NO: 1882187
ggaagcacuuuagcaagaa

SEQ ID NO: 2101693 - RNA, 19 nt, Artificial Sequence
  Description of Artificial Sequence: Synthetic oligonucleotide
  Antisense strand to SEQ ID NO: 2101692
uucuugcuaaagugcuucc

SEQ ID NO: 2101694 - RNA, 19 nt, Artificial Sequence
  Description of Artificial Sequence: Synthetic oligonucleotide
  Sense strand starting at position 3781 of SEQ ID NO: 1882187
gcacuuuagcaagaaucca

SEQ ID NO: 2101695 - RNA, 19 nt, Artificial Sequence
  Description of Artificial Sequence: Synthetic oligonucleotide
  Antisense strand to SEQ ID NO: 2101694
uggauucuugcuaaagugc

SEQ ID NO: 2101696 - RNA, 19 nt, Artificial Sequence
  Description of Artificial Sequence: Synthetic oligonucleotide
  Sense strand starting at position 3831 of SEQ ID NO: 1882187
ccaaacuuccagugagaag

SEQ ID NO: 2101697 - RNA, 19 nt, Artificial Sequence
  Description of Artificial Sequence: Synthetic oligonucleotide
  Antisense strand to SEQ ID NO: 2101696
cuucucacuggaaguuugg

SEQ ID NO: 2101698 - RNA, 19 nt, Artificial Sequence
  Description of Artificial Sequence: Synthetic oligonucleotide
  Sense strand starting at position 3914 of SEQ ID NO: 1882187
cgaagacucuaauccuaag

SEQ ID NO: 2101699 - RNA, 19 nt, Artificial Sequence
  Description of Artificial Sequence: Synthetic oligonucleotide
  Antisense strand to SEQ ID NO: 2101698
cuuaggauuagagucuucg

SEQ ID NO: 2101700 - RNA, 19 nt, Artificial Sequence
  Description of Artificial Sequence: Synthetic oligonucleotide
  Sense strand starting at position 14 of SEQ ID NO: 1882188
cugaacuugccaggaaaca

SEQ ID NO: 2101701 - RNA, 19 nt, Artificial Sequence
  Description of Artificial Sequence: Synthetic oligonucleotide
  Antisense strand to SEQ ID NO: 2101700
uguuuccuggcaaguucag

SEQ ID NO: 2101702 - RNA, 19 nt, Artificial Sequence
  Description of Artificial Sequence: Synthetic oligonucleotide
  Sense strand starting at position 894 of SEQ ID NO: 1882188
ggguguugcagauggagaa

SEQ ID NO: 2101703 - RNA, 19 nt, Artificial Sequence
  Description of Artificial Sequence: Synthetic oligonucleotide
  Antisense strand to SEQ ID NO: 2101702
uucuccaucugcaacaccc

SEQ ID NO: 2101704 - RNA, 19 nt, Artificial Sequence
  Description of Artificial Sequence: Synthetic oligonucleotide
  Sense strand starting at position 931 of SEQ ID NO: 1882188
uuugcuugcaggcagaaga

SEQ ID NO: 2101705 - RNA, 19 nt, Artificial Sequence
  Description of Artificial Sequence: Synthetic oligonucleotide
  Antisense strand to SEQ ID NO: 2101704
ucuucugccugcaagcaaa

SEQ ID NO: 2101706 - RNA, 19 nt, Artificial Sequence
  Description of Artificial Sequence: Synthetic oligonucleotide
  Sense strand starting at position 1022 of SEQ ID NO: 1882188
uguauaugggauuggauca

SEQ ID NO: 2101707 - RNA, 19 nt, Artificial Sequence
  Description of Artificial Sequence: Synthetic oligonucleotide
  Antisense strand to SEQ ID NO: 2101706
ugauccaaucccauauaca

SEQ ID NO: 2101708 - RNA, 19 nt, Artificial Sequence
  Description of Artificial Sequence: Synthetic oligonucleotide
  Sense strand starting at position 1029 of SEQ ID NO: 1882188
gggauuggaucagcuauca

SEQ ID NO: 2101709 - RNA, 19 nt, Artificial Sequence
  Description of Artificial Sequence: Synthetic oligonucleotide
  Antisense strand to SEQ ID NO: 2101708
ugauagcugauccaauccc

SEQ ID NO: 2101710 - RNA, 19 nt, Artificial Sequence
  Description of Artificial Sequence: Synthetic oligonucleotide
  Sense strand starting at position 1078 of SEQ ID NO: 1882188
uguguuaauccauagacua

SEQ ID NO: 2101711 - RNA, 19 nt, Artificial Sequence
  Description of Artificial Sequence: Synthetic oligonucleotide
  Antisense strand to SEQ ID NO: 2101710
uagucuauggauuaacaca

SEQ ID NO: 2101712 - RNA, 19 nt, Artificial Sequence
  Description of Artificial Sequence: Synthetic oligonucleotide
  Sense strand starting at position 1172 of SEQ ID NO: 1882188
ggcaguaaccacuaucugu

SEQ ID NO: 2101713 - RNA, 19 nt, Artificial Sequence
  Description of Artificial Sequence: Synthetic oligonucleotide
  Antisense strand to SEQ ID NO: 2101712
acagauagugguuacugcc

SEQ ID NO: 2101714 - RNA, 19 nt, Artificial Sequence
  Description of Artificial Sequence: Synthetic oligonucleotide
  Sense strand starting at position 1212 of SEQ ID NO: 1882188
uuucgcuaggaguaaucau

SEQ ID NO: 2101715 - RNA, 19 nt, Artificial Sequence
  Description of Artificial Sequence: Synthetic oligonucleotide
  Antisense strand to SEQ ID NO: 2101714
augauuacuccuagcgaaa

SEQ ID NO: 2101716 - RNA, 19 nt, Artificial Sequence
  Description of Artificial Sequence: Synthetic oligonucleotide
  Sense strand starting at position 1336 of SEQ ID NO: 1882188
uugggacuuaagugauaac

SEQ ID NO: 2101717 - RNA, 19 nt, Artificial Sequence
  Description of Artificial Sequence: Synthetic oligonucleotide
  Antisense strand to SEQ ID NO: 2101716
guuaucacuuaagucccaa

SEQ ID NO: 2101718 - RNA, 19 nt, Artificial Sequence
  Description of Artificial Sequence: Synthetic oligonucleotide
  Sense strand starting at position 1430 of SEQ ID NO: 1882188
uguggaucugcugaaguua

SEQ ID NO: 2101719 - RNA, 19 nt, Artificial Sequence
  Description of Artificial Sequence: Synthetic oligonucleotide
  Antisense strand to SEQ ID NO: 2101718
uaacuucagcagauccaca

SEQ ID NO: 2101720 - RNA, 19 nt, Artificial Sequence
  Description of Artificial Sequence: Synthetic oligonucleotide
  Sense strand starting at position 1501 of SEQ ID NO: 1882188
uucugaagagcaugagaua

SEQ ID NO: 2101721 - RNA, 19 nt, Artificial Sequence
  Description of Artificial Sequence: Synthetic oligonucleotide
  Antisense strand to SEQ ID NO: 2101720
uaucucaugcucuucagaa

SEQ ID NO: 2101722 - RNA, 19 nt, Artificial Sequence
  Description of Artificial Sequence: Synthetic oligonucleotide
  Sense strand starting at position 1597 of SEQ ID NO: 1882188
ggucauagggcacacgaau

SEQ ID NO: 2101723 - RNA, 19 nt, Artificial Sequence
  Description of Artificial Sequence: Synthetic oligonucleotide
  Antisense strand to SEQ ID NO: 2101722
auucgugugcccuaugacc

SEQ ID NO: 2101724 - RNA, 19 nt, Artificial Sequence
  Description of Artificial Sequence: Synthetic oligonucleotide
  Sense strand starting at position 1643 of SEQ ID NO: 1882188
ugacuuacauaguuguuga

SEQ ID NO: 2101725 - RNA, 19 nt, Artificial Sequence
  Description of Artificial Sequence: Synthetic oligonucleotide
  Antisense strand to SEQ ID NO: 2101724
ucaacaacuauguaaguca

SEQ ID NO: 2101726 - RNA, 19 nt, Artificial Sequence
  Description of Artificial Sequence: Synthetic oligonucleotide
  Sense strand starting at position 1744 of SEQ ID NO: 1882188
gaugguuguaaaugguaua

SEQ ID NO: 2101727 - RNA, 19 nt, Artificial Sequence
  Description of Artificial Sequence: Synthetic oligonucleotide
  Antisense strand to SEQ ID NO: 2101726
uauaccauuuacaaccauc

SEQ ID NO: 2101728 - RNA, 19 nt, Artificial Sequence
  Description of Artificial Sequence: Synthetic oligonucleotide
  Sense strand starting at position 1749 of SEQ ID NO: 1882188
uuguaaaugguauaccauu

SEQ ID NO: 2101729 - RNA, 19 nt, Artificial Sequence
  Description of Artificial Sequence: Synthetic oligonucleotide
  Antisense strand to SEQ ID NO: 2101728
aaugguauaccauuuacaa

SEQ ID NO: 2101730 - RNA, 19 nt, Artificial Sequence
  Description of Artificial Sequence: Synthetic oligonucleotide
  Sense strand starting at position 1846 of SEQ ID NO: 1882188
ugauuugcuugaucauguc

SEQ ID NO: 2101731 - RNA, 19 nt, Artificial Sequence
  Description of Artificial Sequence: Synthetic oligonucleotide
  Antisense strand to SEQ ID NO: 2101730
gacaugaucaagcaaauca

SEQ ID NO: 2101732 - RNA, 19 nt, Artificial Sequence
  Description of Artificial Sequence: Synthetic oligonucleotide
  Sense strand starting at position 1889 of SEQ ID NO: 1882188
gugugugaccuagauuaga

SEQ ID NO: 2101733 - RNA, 19 nt, Artificial Sequence
  Description of Artificial Sequence: Synthetic oligonucleotide
  Antisense strand to SEQ ID NO: 2101732
ucuaaucuaggucacacac

SEQ ID NO: 2101734 - RNA, 19 nt, Artificial Sequence
  Description of Artificial Sequence: Synthetic oligonucleotide
  Sense strand starting at position 1987 of SEQ ID NO: 1882188
uggugugugcuuucucagu

SEQ ID NO: 2101735 - RNA, 19 nt, Artificial Sequence
  Description of Artificial Sequence: Synthetic oligonucleotide
  Antisense strand to SEQ ID NO: 2101734
acugagaaagcacacacca

SEQ ID NO: 2101736 - RNA, 19 nt, Artificial Sequence
  Description of Artificial Sequence: Synthetic oligonucleotide
  Sense strand starting at position 2020 of SEQ ID NO: 1882188
cguccuuuauuuccuggaa

SEQ ID NO: 2101737 - RNA, 19 nt, Artificial Sequence
  Description of Artificial Sequence: Synthetic oligonucleotide
  Antisense strand to SEQ ID NO: 2101736
uuccaggaaauaaaggacg

SEQ ID NO: 2101738 - RNA, 19 nt, Artificial Sequence
  Description of Artificial Sequence: Synthetic oligonucleotide
  Sense strand starting at position 2077 of SEQ ID NO: 1882188
uguguauguagagauucuu

SEQ ID NO: 2101739 - RNA, 19 nt, Artificial Sequence
  Description of Artificial Sequence: Synthetic oligonucleotide
  Antisense strand to SEQ ID NO: 2101738
aagaaucucuacauacaca

SEQ ID NO: 2101740 - RNA, 19 nt, Artificial Sequence
  Description of Artificial Sequence: Synthetic oligonucleotide
  Sense strand starting at position 2102 of SEQ ID NO: 1882188
gguucuuugccaguucugu

SEQ ID NO: 2101741 - RNA, 19 nt, Artificial Sequence
  Description of Artificial Sequence: Synthetic oligonucleotide
  Antisense strand to SEQ ID NO: 2101740
acagaacuggcaaagaacc

SEQ ID NO: 2101742 - RNA, 19 nt, Artificial Sequence
  Description of Artificial Sequence: Synthetic oligonucleotide
  Sense strand starting at position 2616 of SEQ ID NO: 1882188
auuuccaguucuguuuauu

SEQ ID NO: 2101743 - RNA, 19 nt, Artificial Sequence
  Description of Artificial Sequence: Synthetic oligonucleotide
  Antisense strand to SEQ ID NO: 2101742
aauaaacagaacuggaaau

SEQ ID NO: 2101744 - RNA, 19 nt, Artificial Sequence
  Description of Artificial Sequence: Synthetic oligonucleotide
  Sense strand starting at position 2619 of SEQ ID NO: 1882188
uccaguucuguuuauugaa

SEQ ID NO: 2101745 - RNA, 19 nt, Artificial Sequence
  Description of Artificial Sequence: Synthetic oligonucleotide
  Antisense strand to SEQ ID NO: 2101744
uucaauaaacagaacugga

SEQ ID NO: 2101746 - RNA, 19 nt, Artificial Sequence
  Description of Artificial Sequence: Synthetic oligonucleotide
  Sense strand starting at position 2721 of SEQ ID NO: 1882188
ucgauuggucucuauucua

SEQ ID NO: 2101747 - RNA, 19 nt, Artificial Sequence
  Description of Artificial Sequence: Synthetic oligonucleotide
  Antisense strand to SEQ ID NO: 2101746
uagaauagagaccaaucga

SEQ ID NO: 2101748 - RNA, 19 nt, Artificial Sequence
  Description of Artificial Sequence: Synthetic oligonucleotide
  Sense strand starting at position 2745 of SEQ ID NO: 1882188
uugaucaguuuauuccuau

SEQ ID NO: 2101749 - RNA, 19 nt, Artificial Sequence
  Description of Artificial Sequence: Synthetic oligonucleotide
  Antisense strand to SEQ ID NO: 2101748
auaggaauaaacugaucaa

SEQ ID NO: 2101750 - RNA, 19 nt, Artificial Sequence
  Description of Artificial Sequence: Synthetic oligonucleotide
  Sense strand starting at position 2746 of SEQ ID NO: 1882188
ugaucaguuuauuccuaug

SEQ ID NO: 2101751 - RNA, 19 nt, Artificial Sequence
  Description of Artificial Sequence: Synthetic oligonucleotide
  Antisense strand to SEQ ID NO: 2101750
cauaggaauaaacugauca

SEQ ID NO: 2101752 - RNA, 19 nt, Artificial Sequence
  Description of Artificial Sequence: Synthetic oligonucleotide
  Sense strand starting at position 2816 of SEQ ID NO: 1882188
caguaauguccuggacaag

SEQ ID NO: 2101753 - RNA, 19 nt, Artificial Sequence
  Description of Artificial Sequence: Synthetic oligonucleotide
  Antisense strand to SEQ ID NO: 2101752
cuuguccaggacauuacug

SEQ ID NO: 2101754 - RNA, 19 nt, Artificial Sequence
  Description of Artificial Sequence: Synthetic oligonucleotide
  Sense strand starting at position 2831 of SEQ ID NO: 1882188
caagcagagauguggucau

SEQ ID NO: 2101755 - RNA, 19 nt, Artificial Sequence
  Description of Artificial Sequence: Synthetic oligonucleotide
  Antisense strand to SEQ ID NO: 2101754
augaccacaucucugcuug

SEQ ID NO: 2101756 - RNA, 19 nt, Artificial Sequence
  Description of Artificial Sequence: Synthetic oligonucleotide
  Sense strand starting at position 2835 of SEQ ID NO: 1882188
cagagauguggucauucua

SEQ ID NO: 2101757 - RNA, 19 nt, Artificial Sequence
  Description of Artificial Sequence: Synthetic oligonucleotide
  Antisense strand to SEQ ID NO: 2101756
uagaaugaccacaucucug

SEQ ID NO: 2101758 - RNA, 19 nt, Artificial Sequence
  Description of Artificial Sequence: Synthetic oligonucleotide
  Sense strand starting at position 2858 of SEQ ID NO: 1882188
ugggccuuucuagagaaug

SEQ ID NO: 2101759 - RNA, 19 nt, Artificial Sequence
  Description of Artificial Sequence: Synthetic oligonucleotide
  Antisense strand to SEQ ID NO: 2101758
cauucucuagaaaggccca

SEQ ID NO: 2101760 - RNA, 19 nt, Artificial Sequence
  Description of Artificial Sequence: Synthetic oligonucleotide
  Sense strand starting at position 2860 of SEQ ID NO: 1882188
ggccuuucuagagaauguu

SEQ ID NO: 2101761 - RNA, 19 nt, Artificial Sequence
  Description of Artificial Sequence: Synthetic oligonucleotide
  Antisense strand to SEQ ID NO: 2101760
aacauucucuagaaaggcc

SEQ ID NO: 2101762 - RNA, 19 nt, Artificial Sequence
  Description of Artificial Sequence: Synthetic oligonucleotide
  Sense strand starting at position 2863 of SEQ ID NO: 1882188
cuuucuagagaauguugau

SEQ ID NO: 2101763 - RNA, 19 nt, Artificial Sequence
  Description of Artificial Sequence: Synthetic oligonucleotide
  Antisense strand to SEQ ID NO: 2101762
aucaacauucucuagaaag

SEQ ID NO: 2101764 - RNA, 19 nt, Artificial Sequence
  Description of Artificial Sequence: Synthetic oligonucleotide
  Sense strand starting at position 2887 of SEQ ID NO: 1882188
agcauaugugaugggaagu

SEQ ID NO: 2101765 - RNA, 19 nt, Artificial Sequence
  Description of Artificial Sequence: Synthetic oligonucleotide
  Antisense strand to SEQ ID NO: 2101764
acuucccaucacauaugcu

SEQ ID NO: 2101766 - RNA, 19 nt, Artificial Sequence
  Description of Artificial Sequence: Synthetic oligonucleotide
  Sense strand starting at position 2888 of SEQ ID NO: 1882188
gcauaugugaugggaagua

SEQ ID NO: 2101767 - RNA, 19 nt, Artificial Sequence
  Description of Artificial Sequence: Synthetic oligonucleotide
  Antisense strand to SEQ ID NO: 2101766
uacuucccaucacauaugc

SEQ ID NO: 2101768 - RNA, 19 nt, Artificial Sequence
  Description of Artificial Sequence: Synthetic oligonucleotide
  Sense strand starting at position 2922 of SEQ ID NO: 1882188
ggcugaguuauauauccug

SEQ ID NO: 2101769 - RNA, 19 nt, Artificial Sequence
  Description of Artificial Sequence: Synthetic oligonucleotide
  Antisense strand to SEQ ID NO: 2101768
caggauauauaacucagcc

SEQ ID NO: 2101770 - RNA, 19 nt, Artificial Sequence
  Description of Artificial Sequence: Synthetic oligonucleotide
  Sense strand starting at position 2925 of SEQ ID NO: 1882188
ugaguuauauauccugauu

SEQ ID NO: 2101771 - RNA, 19 nt, Artificial Sequence
  Description of Artificial Sequence: Synthetic oligonucleotide
  Antisense strand to SEQ ID NO: 2101770
aaucaggauauauaacuca

SEQ ID NO: 2101772 - RNA, 19 nt, Artificial Sequence
  Description of Artificial Sequence: Synthetic oligonucleotide
  Sense strand starting at position 2966 of SEQ ID NO: 1882188
gugcaagauggaugaggaa

SEQ ID NO: 2101773 - RNA, 19 nt, Artificial Sequence
  Description of Artificial Sequence: Synthetic oligonucleotide
  Antisense strand to SEQ ID NO: 2101772
uuccucauccaucuugcac

SEQ ID NO: 2101774 - RNA, 19 nt, Artificial Sequence
  Description of Artificial Sequence: Synthetic oligonucleotide
  Sense strand starting at position 3703 of SEQ ID NO: 1882188
aagugauuacuguguuaaa

SEQ ID NO: 2101775 - RNA, 19 nt, Artificial Sequence
  Description of Artificial Sequence: Synthetic oligonucleotide
  Antisense strand to SEQ ID NO: 2101774
uuuaacacaguaaucacuu

SEQ ID NO: 2101776 - RNA, 19 nt, Artificial Sequence
  Description of Artificial Sequence: Synthetic oligonucleotide
  Sense strand starting at position 3954 of SEQ ID NO: 1882188
ggacauaauuguguaaauu

SEQ ID NO: 2101777 - RNA, 19 nt, Artificial Sequence
  Description of Artificial Sequence: Synthetic oligonucleotide
  Antisense strand to SEQ ID NO: 2101776
aauuuacacaauuaugucc

SEQ ID NO: 2101778 - RNA, 19 nt, Artificial Sequence
  Description of Artificial Sequence: Synthetic oligonucleotide
  Sense strand starting at position 3983 of SEQ ID NO: 1882188
uucuuauuaugggcauauu

SEQ ID NO: 2101779 - RNA, 19 nt, Artificial Sequence
  Description of Artificial Sequence: Synthetic oligonucleotide
  Antisense strand to SEQ ID NO: 2101778
aauaugcccauaauaagaa

SEQ ID NO: 2101780 - RNA, 19 nt, Artificial Sequence
  Description of Artificial Sequence: Synthetic oligonucleotide
  Sense strand starting at position 33 of SEQ ID NO: 1882189
ccaucuuucucaucuguga

SEQ ID NO: 2101781 - RNA, 19 nt, Artificial Sequence
  Description of Artificial Sequence: Synthetic oligonucleotide
  Antisense strand to SEQ ID NO: 2101780
ucacagaugagaaagaugg

SEQ ID NO: 2101782 - RNA, 19 nt, Artificial Sequence
  Description of Artificial Sequence: Synthetic oligonucleotide
  Sense strand starting at position 121 of SEQ ID NO: 1882189
uaguaagcgcuauagacau

SEQ ID NO: 2101783 - RNA, 19 nt, Artificial Sequence
  Description of Artificial Sequence: Synthetic oligonucleotide
  Antisense strand to SEQ ID NO: 2101782
augucuauagcgcuuacua

SEQ ID NO: 2101784 - RNA, 19 nt, Artificial Sequence
  Description of Artificial Sequence: Synthetic oligonucleotide
  Sense strand starting at position 166 of SEQ ID NO: 1882189
aaaugagacgugugacauu

SEQ ID NO: 2101785 - RNA, 19 nt, Artificial Sequence
  Description of Artificial Sequence: Synthetic oligonucleotide
  Antisense strand to SEQ ID NO: 2101784
aaugucacacgucucauuu

SEQ ID NO: 2101786 - RNA, 19 nt, Artificial Sequence
  Description of Artificial Sequence: Synthetic oligonucleotide
  Sense strand starting at position 184 of SEQ ID NO: 1882189
uuuagcuaugacuaguauu

SEQ ID NO: 2101787 - RNA, 19 nt, Artificial Sequence
  Description of Artificial Sequence: Synthetic oligonucleotide
  Antisense strand to SEQ ID NO: 2101786
aauacuagucauagcuaaa

SEQ ID NO: 2101788 - RNA, 19 nt, Artificial Sequence
  Description of Artificial Sequence: Synthetic oligonucleotide
  Sense strand starting at position 250 of SEQ ID NO: 1882189
ucccgucgugccuuaaagu

SEQ ID NO: 2101789 - RNA, 19 nt, Artificial Sequence
  Description of Artificial Sequence: Synthetic oligonucleotide
  Antisense strand to SEQ ID NO: 2101788
acuuuaaggcacgacggga

SEQ ID NO: 2101790 - RNA, 19 nt, Artificial Sequence
  Description of Artificial Sequence: Synthetic oligonucleotide
  Sense strand starting at position 688 of SEQ ID NO: 1882189
ccagauuccuuugcucaag

SEQ ID NO: 2101791 - RNA, 19 nt, Artificial Sequence
  Description of Artificial Sequence: Synthetic oligonucleotide
  Antisense strand to SEQ ID NO: 2101790
cuugagcaaaggaaucugg

SEQ ID NO: 2101792 - RNA, 19 nt, Artificial Sequence
  Description of Artificial Sequence: Synthetic oligonucleotide
  Sense strand starting at position 1128 of SEQ ID NO: 1882189
cgaauuagcgccugacuaa

SEQ ID NO: 2101793 - RNA, 19 nt, Artificial Sequence
  Description of Artificial Sequence: Synthetic oligonucleotide
  Antisense strand to SEQ ID NO: 2101792
uuagucaggcgcuaauucg

SEQ ID NO: 2101794 - RNA, 19 nt, Artificial Sequence
  Description of Artificial Sequence: Synthetic oligonucleotide
  Sense strand starting at position 1129 of SEQ ID NO: 1882189
gaauuagcgccugacuaag

SEQ ID NO: 2101795 - RNA, 19 nt, Artificial Sequence
  Description of Artificial Sequence: Synthetic oligonucleotide
  Antisense strand to SEQ ID NO: 2101794
cuuagucaggcgcuaauuc

SEQ ID NO: 2101796 - RNA, 19 nt, Artificial Sequence
  Description of Artificial Sequence: Synthetic oligonucleotide
  Sense strand starting at position 1984 of SEQ ID NO: 1882189
ggccauacuguguaagcga

SEQ ID NO: 2101797 - RNA, 19 nt, Artificial Sequence
  Description of Artificial Sequence: Synthetic oligonucleotide
  Antisense strand to SEQ ID NO: 2101796
ucgcuuacacaguauggcc

SEQ ID NO: 2101798 - RNA, 19 nt, Artificial Sequence
  Description of Artificial Sequence: Synthetic oligonucleotide
  Sense strand starting at position 2014 of SEQ ID NO: 1882189
gagcaccgcccuuauauau

SEQ ID NO: 2101799 - RNA, 19 nt, Artificial Sequence
  Description of Artificial Sequence: Synthetic oligonucleotide
  Antisense strand to SEQ ID NO: 2101798
auauauaagggcggugcuc

SEQ ID NO: 2101800 - RNA, 19 nt, Artificial Sequence
  Description of Artificial Sequence: Synthetic oligonucleotide
  Sense strand starting at position 2238 of SEQ ID NO: 1882189
acuagaaaccucggaucga

SEQ ID NO: 2101801 - RNA, 19 nt, Artificial Sequence
  Description of Artificial Sequence: Synthetic oligonucleotide
  Antisense strand to SEQ ID NO: 2101800
ucgauccgagguuucuagu

SEQ ID NO: 2101802 - RNA, 19 nt, Artificial Sequence
  Description of Artificial Sequence: Synthetic oligonucleotide
  Sense strand starting at position 2443 of SEQ ID NO: 1882189
gagguacuuggccauucuu

SEQ ID NO: 2101803 - RNA, 19 nt, Artificial Sequence
  Description of Artificial Sequence: Synthetic oligonucleotide
  Antisense strand to SEQ ID NO: 2101802
aagaauggccaaguaccuc

SEQ ID NO: 2101804 - RNA, 19 nt, Artificial Sequence
  Description of Artificial Sequence: Synthetic oligonucleotide
  Sense strand starting at position 2541 of SEQ ID NO: 1882189
cgaauuagaaggcgcuuua

SEQ ID NO: 2101805 - RNA, 19 nt, Artificial Sequence
  Description of Artificial Sequence: Synthetic oligonucleotide
  Antisense strand to SEQ ID NO: 2101804
uaaagcgccuucuaauucg

SEQ ID NO: 2101806 - RNA, 19 nt, Artificial Sequence
  Description of Artificial Sequence: Synthetic oligonucleotide
  Sense strand starting at position 2574 of SEQ ID NO: 1882189
uuggcugaugugcgaauga

SEQ ID NO: 2101807 - RNA, 19 nt, Artificial Sequence
  Description of Artificial Sequence: Synthetic oligonucleotide
  Antisense strand to SEQ ID NO: 2101806
ucauucgcacaucagccaa

SEQ ID NO: 2101808 - RNA, 19 nt, Artificial Sequence
  Description of Artificial Sequence: Synthetic oligonucleotide
  Sense strand starting at position 2782 of SEQ ID NO: 1882189
agcucaacuggugggaauu

SEQ ID NO: 2101809 - RNA, 19 nt, Artificial Sequence
  Description of Artificial Sequence: Synthetic oligonucleotide
  Antisense strand to SEQ ID NO: 2101808
aauucccaccaguugagcu

SEQ ID NO: 2101810 - RNA, 19 nt, Artificial Sequence
  Description of Artificial Sequence: Synthetic oligonucleotide
  Sense strand starting at position 2784 of SEQ ID NO: 1882189
cucaacuggugggaauuua

SEQ ID NO: 2101811 - RNA, 19 nt, Artificial Sequence
  Description of Artificial Sequence: Synthetic oligonucleotide
  Antisense strand to SEQ ID NO: 2101810
uaaauucccaccaguugag

SEQ ID NO: 2101812 - RNA, 19 nt, Artificial Sequence
  Description of Artificial Sequence: Synthetic oligonucleotide
  Sense strand starting at position 2819 of SEQ ID NO: 1882189
cuagaaacugaauguguua

SEQ ID NO: 2101813 - RNA, 19 nt, Artificial Sequence
  Description of Artificial Sequence: Synthetic oligonucleotide
  Antisense strand to SEQ ID NO: 2101812
uaacacauucaguuucuag

SEQ ID NO: 2101814 - RNA, 19 nt, Artificial Sequence
  Description of Artificial Sequence: Synthetic oligonucleotide
  Sense strand starting at position 2822 of SEQ ID NO: 1882189
gaaacugaauguguuaaau

SEQ ID NO: 2101815 - RNA, 19 nt, Artificial Sequence
  Description of Artificial Sequence: Synthetic oligonucleotide
  Antisense strand to SEQ ID NO: 2101814
auuuaacacauucaguuuc

SEQ ID NO: 2101816 - RNA, 19 nt, Artificial Sequence
  Description of Artificial Sequence: Synthetic oligonucleotide
  Sense strand starting at position 2888 of SEQ ID NO: 1882189
ugauguauuaauugaugga

SEQ ID NO: 2101817 - RNA, 19 nt, Artificial Sequence
  Description of Artificial Sequence: Synthetic oligonucleotide
  Antisense strand to SEQ ID NO: 2101816
uccaucaauuaauacauca

SEQ ID NO: 2101818 - RNA, 19 nt, Artificial Sequence
  Description of Artificial Sequence: Synthetic oligonucleotide
  Sense strand starting at position 2892 of SEQ ID NO: 1882189
guauuaauugauggagguu

SEQ ID NO: 2101819 - RNA, 19 nt, Artificial Sequence
  Description of Artificial Sequence: Synthetic oligonucleotide
  Antisense strand to SEQ ID NO: 2101818
aaccuccaucaauuaauac

SEQ ID NO: 2101820 - RNA, 19 nt, Artificial Sequence
  Description of Artificial Sequence: Synthetic oligonucleotide
  Sense strand starting at position 2941 of SEQ ID NO: 1882189
cuucccaugugcuuaagaa

SEQ ID NO: 2101821 - RNA, 19 nt, Artificial Sequence
  Description of Artificial Sequence: Synthetic oligonucleotide
  Antisense strand to SEQ ID NO: 2101820
uucuuaagcacaugggaag

SEQ ID NO: 2101822 - RNA, 19 nt, Artificial Sequence
  Description of Artificial Sequence: Synthetic oligonucleotide
  Sense strand starting at position 2942 of SEQ ID NO: 1882189
uucccaugugcuuaagaag

SEQ ID NO: 2101823 - RNA, 19 nt, Artificial Sequence
  Description of Artificial Sequence: Synthetic oligonucleotide
  Antisense strand to SEQ ID NO: 2101822
cuucuuaagcacaugggaa

SEQ ID NO: 2101824 - RNA, 19 nt, Artificial Sequence
  Description of Artificial Sequence: Synthetic oligonucleotide
  Sense strand starting at position 2994 of SEQ ID NO: 1882189
agagcuaucacugguggua

SEQ ID NO: 2101825 - RNA, 19 nt, Artificial Sequence
  Description of Artificial Sequence: Synthetic oligonucleotide
  Antisense strand to SEQ ID NO: 2101824
uaccaccagugauagcucu

SEQ ID NO: 2101826 - RNA, 19 nt, Artificial Sequence
  Description of Artificial Sequence: Synthetic oligonucleotide
  Sense strand starting at position 2997 of SEQ ID NO: 1882189
gcuaucacuggugguaacu

SEQ ID NO: 2101827 - RNA, 19 nt, Artificial Sequence
  Description of Artificial Sequence: Synthetic oligonucleotide
  Antisense strand to SEQ ID NO: 2101826
aguuaccaccagugauagc

SEQ ID NO: 2101828 - RNA, 19 nt, Artificial Sequence
  Description of Artificial Sequence: Synthetic oligonucleotide
  Sense strand starting at position 3063 of SEQ ID NO: 1882189
ucgucaagccauggucaaa

SEQ ID NO: 2101829 - RNA, 19 nt, Artificial Sequence
  Description of Artificial Sequence: Synthetic oligonucleotide
  Antisense strand to SEQ ID NO: 2101828
uuugaccauggcuugacga

SEQ ID NO: 2101830 - RNA, 19 nt, Artificial Sequence
  Description of Artificial Sequence: Synthetic oligonucleotide
  Sense strand starting at position 3130 of SEQ ID NO: 1882189
uugggaauaugggaggaaa

SEQ ID NO: 2101831 - RNA, 19 nt, Artificial Sequence
  Description of Artificial Sequence: Synthetic oligonucleotide
  Antisense strand to SEQ ID NO: 2101830
uuuccucccauauucccaa

SEQ ID NO: 2101832 - RNA, 19 nt, Artificial Sequence
  Description of Artificial Sequence: Synthetic oligonucleotide
  Sense strand starting at position 3200 of SEQ ID NO: 1882189
ucgcuaucauccuuagaaa

SEQ ID NO: 2101833 - RNA, 19 nt, Artificial Sequence
  Description of Artificial Sequence: Synthetic oligonucleotide
  Antisense strand to SEQ ID NO: 2101832
uuucuaaggaugauagcga

SEQ ID NO: 2101834 - RNA, 19 nt, Artificial Sequence
  Description of Artificial Sequence: Synthetic oligonucleotide
  Sense strand starting at position 3239 of SEQ ID NO: 1882189
auaagaugaugucaacaug

SEQ ID NO: 2101835 - RNA, 19 nt, Artificial Sequence
  Description of Artificial Sequence: Synthetic oligonucleotide
  Antisense strand to SEQ ID NO: 2101834
cauguugacaucaucuuau

SEQ ID NO: 2101836 - RNA, 19 nt, Artificial Sequence
  Description of Artificial Sequence: Synthetic oligonucleotide
  Sense strand starting at position 3285 of SEQ ID NO: 1882189
ggguuugcacucuagauac

SEQ ID NO: 2101837 - RNA, 19 nt, Artificial Sequence
  Description of Artificial Sequence: Synthetic oligonucleotide
  Antisense strand to SEQ ID NO: 2101836
guaucuagagugcaaaccc

SEQ ID NO: 2101838 - RNA, 19 nt, Artificial Sequence
  Description of Artificial Sequence: Synthetic oligonucleotide
  Sense strand starting at position 3341 of SEQ ID NO: 1882189
acgugucuccgugaaaccu

SEQ ID NO: 2101839 - RNA, 19 nt, Artificial Sequence
  Description of Artificial Sequence: Synthetic oligonucleotide
  Antisense strand to SEQ ID NO: 2101838
agguuucacggagacacgu

SEQ ID NO: 2101840 - RNA, 19 nt, Artificial Sequence
  Description of Artificial Sequence: Synthetic oligonucleotide
  Sense strand starting at position 3347 of SEQ ID NO: 1882189
cuccgugaaaccuguugaa

SEQ ID NO: 2101841 - RNA, 19 nt, Artificial Sequence
  Description of Artificial Sequence: Synthetic oligonucleotide
  Antisense strand to SEQ ID NO: 2101840
uucaacagguuucacggag

SEQ ID NO: 2101842 - RNA, 19 nt, Artificial Sequence
  Description of Artificial Sequence: Synthetic oligonucleotide
  Sense strand starting at position 3363 of SEQ ID NO: 1882189
gaaagaagcuauguuguga

SEQ ID NO: 2101843 - RNA, 19 nt, Artificial Sequence
  Description of Artificial Sequence: Synthetic oligonucleotide
  Antisense strand to SEQ ID NO: 2101842
ucacaacauagcuucuuuc

SEQ ID NO: 2101844 - RNA, 19 nt, Artificial Sequence
  Description of Artificial Sequence: Synthetic oligonucleotide
  Sense strand starting at position 3374 of SEQ ID NO: 1882189
uguugugagcuagguacau

SEQ ID NO: 2101845 - RNA, 19 nt, Artificial Sequence
  Description of Artificial Sequence: Synthetic oligonucleotide
  Antisense strand to SEQ ID NO: 2101844
auguaccuagcucacaaca

SEQ ID NO: 2101846 - RNA, 19 nt, Artificial Sequence
  Description of Artificial Sequence: Synthetic oligonucleotide
  Sense strand starting at position 3376 of SEQ ID NO: 1882189
uugugagcuagguacauaa

SEQ ID NO: 2101847 - RNA, 19 nt, Artificial Sequence
  Description of Artificial Sequence: Synthetic oligonucleotide
  Antisense strand to SEQ ID NO: 2101846
uuauguaccuagcucacaa

SEQ ID NO: 2101848 - RNA, 19 nt, Artificial Sequence
  Description of Artificial Sequence: Synthetic oligonucleotide
  Sense strand starting at position 3777 of SEQ ID NO: 1882189
gaaugugguuacucuacuu

SEQ ID NO: 2101849 - RNA, 19 nt, Artificial Sequence
  Description of Artificial Sequence: Synthetic oligonucleotide
  Antisense strand to SEQ ID NO: 2101848
aaguagaguaaccacauuc

SEQ ID NO: 2101850 - RNA, 19 nt, Artificial Sequence
  Description of Artificial Sequence: Synthetic oligonucleotide
  Sense strand starting at position 3782 of SEQ ID NO: 1882189
ugguuacucuacuuggaau

SEQ ID NO: 2101851 - RNA, 19 nt, Artificial Sequence
  Description of Artificial Sequence: Synthetic oligonucleotide
  Antisense strand to SEQ ID NO: 2101850
auuccaaguagaguaacca

SEQ ID NO: 2101852 - RNA, 19 nt, Artificial Sequence
  Description of Artificial Sequence: Synthetic oligonucleotide
  Sense strand starting at position 3784 of SEQ ID NO: 1882189
guuacucuacuuggaauaa

SEQ ID NO: 2101853 - RNA, 19 nt, Artificial Sequence
  Description of Artificial Sequence: Synthetic oligonucleotide
  Antisense strand to SEQ ID NO: 2101852
uuauuccaaguagaguaac

SEQ ID NO: 2101854 - RNA, 19 nt, Artificial Sequence
  Description of Artificial Sequence: Synthetic oligonucleotide
  Sense strand starting at position 3860 of SEQ ID NO: 1882189
ugaagaaucugccuacuaa

SEQ ID NO: 2101855 - RNA, 19 nt, Artificial Sequence
  Description of Artificial Sequence: Synthetic oligonucleotide
  Antisense strand to SEQ ID NO: 2101854
uuaguaggcagauucuuca

SEQ ID NO: 2101856 - RNA, 19 nt, Artificial Sequence
  Description of Artificial Sequence: Synthetic oligonucleotide
  Sense strand starting at position 3892 of SEQ ID NO: 1882189
cuaauugugguauaaacau

SEQ ID NO: 2101857 - RNA, 19 nt, Artificial Sequence
  Description of Artificial Sequence: Synthetic oligonucleotide
  Antisense strand to SEQ ID NO: 2101856
auguuuauaccacaauuag

SEQ ID NO: 2101858 - RNA, 19 nt, Artificial Sequence
  Description of Artificial Sequence: Synthetic oligonucleotide
  Sense strand starting at position 3916 of SEQ ID NO: 1882189
ggcuuauaauugcuuauaa

SEQ ID NO: 2101859 - RNA, 19 nt, Artificial Sequence
  Description of Artificial Sequence: Synthetic oligonucleotide
  Antisense strand to SEQ ID NO: 2101858
uuauaagcaauuauaagcc

SEQ ID NO: 2101860 - RNA, 19 nt, Artificial Sequence
  Description of Artificial Sequence: Synthetic oligonucleotide
  Sense strand starting at position 88 of SEQ ID NO: 1882190
uugggugaccaguauauua

SEQ ID NO: 2101861 - RNA, 19 nt, Artificial Sequence
  Description of Artificial Sequence: Synthetic oligonucleotide
  Antisense strand to SEQ ID NO: 2101860
uaauauacuggucacccaa

SEQ ID NO: 2101862 - RNA, 19 nt, Artificial Sequence
  Description of Artificial Sequence: Synthetic oligonucleotide
  Sense strand starting at position 131 of SEQ ID NO: 1882190
ugguguaauguuugaauuu

SEQ ID NO: 2101863 - RNA, 19 nt, Artificial Sequence
  Description of Artificial Sequence: Synthetic oligonucleotide
  Antisense strand to SEQ ID NO: 2101862
aaauucaaacauuacacca

SEQ ID NO: 2101864 - RNA, 19 nt, Artificial Sequence
  Description of Artificial Sequence: Synthetic oligonucleotide
  Sense strand starting at position 903 of SEQ ID NO: 1882190
ggcacaagugcucauuaaa

SEQ ID NO: 2101865 - RNA, 19 nt, Artificial Sequence
  Description of Artificial Sequence: Synthetic oligonucleotide
  Antisense strand to SEQ ID NO: 2101864
uuuaaugagcacuugugcc

SEQ ID NO: 2101866 - RNA, 19 nt, Artificial Sequence
  Description of Artificial Sequence: Synthetic oligonucleotide
  Sense strand starting at position 906 of SEQ ID NO: 1882190
acaagugcucauuaaacag

SEQ ID NO: 2101867 - RNA, 19 nt, Artificial Sequence
  Description of Artificial Sequence: Synthetic oligonucleotide
  Antisense strand to SEQ ID NO: 2101866
cuguuuaaugagcacuugu

SEQ ID NO: 2101868 - RNA, 19 nt, Artificial Sequence
  Description of Artificial Sequence: Synthetic oligonucleotide
  Sense strand starting at position 1011 of SEQ ID NO: 1882190
ugugucuuucuggaggacu

SEQ ID NO: 2101869 - RNA, 19 nt, Artificial Sequence
  Description of Artificial Sequence: Synthetic oligonucleotide
  Antisense strand to SEQ ID NO: 2101868
aguccuccagaaagacaca

SEQ ID NO: 2101870 - RNA, 19 nt, Artificial Sequence
  Description of Artificial Sequence: Synthetic oligonucleotide
  Sense strand starting at position 1127 of SEQ ID NO: 1882190
gcuggccggccuuuaaauu

SEQ ID NO: 2101871 - RNA, 19 nt, Artificial Sequence
  Description of Artificial Sequence: Synthetic oligonucleotide
  Antisense strand to SEQ ID NO: 2101870
aauuuaaaggccggccagc

SEQ ID NO: 2101872 - RNA, 19 nt, Artificial Sequence
  Description of Artificial Sequence: Synthetic oligonucleotide
  Sense strand starting at position 1227 of SEQ ID NO: 1882190
ugacaagucgugcaacuua

SEQ ID NO: 2101873 - RNA, 19 nt, Artificial Sequence
  Description of Artificial Sequence: Synthetic oligonucleotide
  Antisense strand to SEQ ID NO: 2101872
uaaguugcacgacuuguca

SEQ ID NO: 2101874 - RNA, 19 nt, Artificial Sequence
  Description of Artificial Sequence: Synthetic oligonucleotide
  Sense strand starting at position 1343 of SEQ ID NO: 1882190
cgaaaucuagcccaaccaa

SEQ ID NO: 2101875 - RNA, 19 nt, Artificial Sequence
  Description of Artificial Sequence: Synthetic oligonucleotide
  Antisense strand to SEQ ID NO: 2101874
uugguugggcuagauuucg

SEQ ID NO: 2101876 - RNA, 19 nt, Artificial Sequence
  Description of Artificial Sequence: Synthetic oligonucleotide
  Sense strand starting at position 2183 of SEQ ID NO: 1882190
gccguuucgggucuauagu

SEQ ID NO: 2101877 - RNA, 19 nt, Artificial Sequence
  Description of Artificial Sequence: Synthetic oligonucleotide
  Antisense strand to SEQ ID NO: 2101876
acuauagacccgaaacggc

SEQ ID NO: 2101878 - RNA, 19 nt, Artificial Sequence
  Description of Artificial Sequence: Synthetic oligonucleotide
  Sense strand starting at position 2192 of SEQ ID NO: 1882190
ggucuauagugaguuagga

SEQ ID NO: 2101879 - RNA, 19 nt, Artificial Sequence
  Description of Artificial Sequence: Synthetic oligonucleotide
  Antisense strand to SEQ ID NO: 2101878
uccuaacucacuauagacc

SEQ ID NO: 2101880 - RNA, 19 nt, Artificial Sequence
  Description of Artificial Sequence: Synthetic oligonucleotide
  Sense strand starting at position 2200 of SEQ ID NO: 1882190
gugaguuaggaggguucga

SEQ ID NO: 2101881 - RNA, 19 nt, Artificial Sequence
  Description of Artificial Sequence: Synthetic oligonucleotide
  Antisense strand to SEQ ID NO: 2101880
ucgaacccuccuaacucac

SEQ ID NO: 2101882 - RNA, 19 nt, Artificial Sequence
  Description of Artificial Sequence: Synthetic oligonucleotide
  Sense strand starting at position 2391 of SEQ ID NO: 1882190
uugugauuggcgucgugga

SEQ ID NO: 2101883 - RNA, 19 nt, Artificial Sequence
  Description of Artificial Sequence: Synthetic oligonucleotide
  Antisense strand to SEQ ID NO: 2101882
uccacgacgccaaucacaa

SEQ ID NO: 2101884 - RNA, 19 nt, Artificial Sequence
  Description of Artificial Sequence: Synthetic oligonucleotide
  Sense strand starting at position 2558 of SEQ ID NO: 1882190
ggauuaaugcuagggaguc

SEQ ID NO: 2101885 - RNA, 19 nt, Artificial Sequence
  Description of Artificial Sequence: Synthetic oligonucleotide
  Antisense strand to SEQ ID NO: 2101884
gacucccuagcauuaaucc

SEQ ID NO: 2101886 - RNA, 19 nt, Artificial Sequence
  Description of Artificial Sequence: Synthetic oligonucleotide
  Sense strand starting at position 2572 of SEQ ID NO: 1882190
gagucuuucggguacacuc

SEQ ID NO: 2101887 - RNA, 19 nt, Artificial Sequence
  Description of Artificial Sequence: Synthetic oligonucleotide
  Antisense strand to SEQ ID NO: 2101886
gaguguacccgaaagacuc

SEQ ID NO: 2101888 - RNA, 19 nt, Artificial Sequence
  Description of Artificial Sequence: Synthetic oligonucleotide
  Sense strand starting at position 2620 of SEQ ID NO: 1882190
uucguucuucuuuagagac

SEQ ID NO: 2101889 - RNA, 19 nt, Artificial Sequence
  Description of Artificial Sequence: Synthetic oligonucleotide
  Antisense strand to SEQ ID NO: 2101888
gucucuaaagaagaacgaa

SEQ ID NO: 2101890 - RNA, 19 nt, Artificial Sequence
  Description of Artificial Sequence: Synthetic oligonucleotide
  Sense strand starting at position 2644 of SEQ ID NO: 1882190
ggccauggagccuaaugau

SEQ ID NO: 2101891 - RNA, 19 nt, Artificial Sequence
  Description of Artificial Sequence: Synthetic oligonucleotide
  Antisense strand to SEQ ID NO: 2101890
aucauuaggcuccauggcc

SEQ ID NO: 2101892 - RNA, 19 nt, Artificial Sequence
  Description of Artificial Sequence: Synthetic oligonucleotide
  Sense strand starting at position 2777 of SEQ ID NO: 1882190
ggaagacaccuuuagcuuu

SEQ ID NO: 2101893 - RNA, 19 nt, Artificial Sequence
  Description of Artificial Sequence: Synthetic oligonucleotide
  Antisense strand to SEQ ID NO: 2101892
aaagcuaaaggugucuucc

SEQ ID NO: 2101894 - RNA, 19 nt, Artificial Sequence
  Description of Artificial Sequence: Synthetic oligonucleotide
  Sense strand starting at position 3183 of SEQ ID NO: 1882190
uucguauuccaguagaacg

SEQ ID NO: 2101895 - RNA, 19 nt, Artificial Sequence
  Description of Artificial Sequence: Synthetic oligonucleotide
  Antisense strand to SEQ ID NO: 2101894
cguucuacuggaauacgaa

SEQ ID NO: 2101896 - RNA, 19 nt, Artificial Sequence
  Description of Artificial Sequence: Synthetic oligonucleotide
  Sense strand starting at position 3235 of SEQ ID NO: 1882190
uucuguccuccacauggau

SEQ ID NO: 2101897 - RNA, 19 nt, Artificial Sequence
  Description of Artificial Sequence: Synthetic oligonucleotide
  Antisense strand to SEQ ID NO: 2101896
auccauguggaggacagaa

SEQ ID NO: 2101898 - RNA, 19 nt, Artificial Sequence
  Description of Artificial Sequence: Synthetic oligonucleotide
  Sense strand starting at position 3282 of SEQ ID NO: 1882190
gaaggaagaaucugugugu

SEQ ID NO: 2101899 - RNA, 19 nt, Artificial Sequence
  Description of Artificial Sequence: Synthetic oligonucleotide
  Antisense strand to SEQ ID NO: 2101898
acacacagauucuuccuuc

SEQ ID NO: 2101900 - RNA, 19 nt, Artificial Sequence
  Description of Artificial Sequence: Synthetic oligonucleotide
  Sense strand starting at position 3286 of SEQ ID NO: 1882190
gaagaaucugugugucauc

SEQ ID NO: 2101901 - RNA, 19 nt, Artificial Sequence
  Description of Artificial Sequence: Synthetic oligonucleotide
  Antisense strand to SEQ ID NO: 2101900
gaugacacacagauucuuc

SEQ ID NO: 2101902 - RNA, 19 nt, Artificial Sequence
  Description of Artificial Sequence: Synthetic oligonucleotide
  Sense strand starting at position 3287 of SEQ ID NO: 1882190
aagaaucugugugucauca

SEQ ID NO: 2101903 - RNA, 19 nt, Artificial Sequence
  Description of Artificial Sequence: Synthetic oligonucleotide
  Antisense strand to SEQ ID NO: 2101902
ugaugacacacagauucuu

SEQ ID NO: 2101904 - RNA, 19 nt, Artificial Sequence
  Description of Artificial Sequence: Synthetic oligonucleotide
  Sense strand starting at position 3383 of SEQ ID NO: 1882190
aagugugucuuacugauag

SEQ ID NO: 2101905 - RNA, 19 nt, Artificial Sequence
  Description of Artificial Sequence: Synthetic oligonucleotide
  Antisense strand to SEQ ID NO: 2101904
cuaucaguaagacacacuu

SEQ ID NO: 2101906 - RNA, 19 nt, Artificial Sequence
  Description of Artificial Sequence: Synthetic oligonucleotide
  Sense strand starting at position 3385 of SEQ ID NO: 1882190
gugugucuuacugauagac

SEQ ID NO: 2101907 - RNA, 19 nt, Artificial Sequence
  Description of Artificial Sequence: Synthetic oligonucleotide
  Antisense strand to SEQ ID NO: 2101906
gucuaucaguaagacacac

SEQ ID NO: 2101908 - RNA, 19 nt, Artificial Sequence
  Description of Artificial Sequence: Synthetic oligonucleotide
  Sense strand starting at position 3421 of SEQ ID NO: 1882190
uguguucuuaaaggguaga

SEQ ID NO: 2101909 - RNA, 19 nt, Artificial Sequence
  Description of Artificial Sequence: Synthetic oligonucleotide
  Antisense strand to SEQ ID NO: 2101908
ucuacccuuuaagaacaca

SEQ ID NO: 2101910 - RNA, 19 nt, Artificial Sequence
  Description of Artificial Sequence: Synthetic oligonucleotide
  Sense strand starting at position 3422 of SEQ ID NO: 1882190
guguucuuaaaggguagaa

SEQ ID NO: 2101911 - RNA, 19 nt, Artificial Sequence
  Description of Artificial Sequence: Synthetic oligonucleotide
  Antisense strand to SEQ ID NO: 2101910
uucuacccuuuaagaacac

SEQ ID NO: 2101912 - RNA, 19 nt, Artificial Sequence
  Description of Artificial Sequence: Synthetic oligonucleotide
  Sense strand starting at position 3471 of SEQ ID NO: 1882190
auagacuguugagugaaau

SEQ ID NO: 2101913 - RNA, 19 nt, Artificial Sequence
  Description of Artificial Sequence: Synthetic oligonucleotide
  Antisense strand to SEQ ID NO: 2101912
auuucacucaacagucuau

SEQ ID NO: 2101914 - RNA, 19 nt, Artificial Sequence
  Description of Artificial Sequence: Synthetic oligonucleotide
  Sense strand starting at position 3472 of SEQ ID NO: 1882190
uagacuguugagugaaauu

SEQ ID NO: 2101915 - RNA, 19 nt, Artificial Sequence
  Description of Artificial Sequence: Synthetic oligonucleotide
  Antisense strand to SEQ ID NO: 2101914
aauuucacucaacagucua

SEQ ID NO: 2101916 - RNA, 19 nt, Artificial Sequence
  Description of Artificial Sequence: Synthetic oligonucleotide
  Sense strand starting at position 3512 of SEQ ID NO: 1882190
ugagucucuugagcuuaaa

SEQ ID NO: 2101917 - RNA, 19 nt, Artificial Sequence
  Description of Artificial Sequence: Synthetic oligonucleotide
  Antisense strand to SEQ ID NO: 2101916
uuuaagcucaagagacuca

SEQ ID NO: 2101918 - RNA, 19 nt, Artificial Sequence
  Description of Artificial Sequence: Synthetic oligonucleotide
  Sense strand starting at position 3523 of SEQ ID NO: 1882190
agcuuaaagccuuggacau

SEQ ID NO: 2101919 - RNA, 19 nt, Artificial Sequence
  Description of Artificial Sequence: Synthetic oligonucleotide
  Antisense strand to SEQ ID NO: 2101918
auguccaaggcuuuaagcu

SEQ ID NO: 2101920 - RNA, 19 nt, Artificial Sequence
  Description of Artificial Sequence: Synthetic oligonucleotide
  Sense strand starting at position 3524 of SEQ ID NO: 1882190
gcuuaaagccuuggacaua

SEQ ID NO: 2101921 - RNA, 19 nt, Artificial Sequence
  Description of Artificial Sequence: Synthetic oligonucleotide
  Antisense strand to SEQ ID NO: 2101920
uauguccaaggcuuuaagc

SEQ ID NO: 2101922 - RNA, 19 nt, Artificial Sequence
  Description of Artificial Sequence: Synthetic oligonucleotide
  Sense strand starting at position 3561 of SEQ ID NO: 1882190
ccuguaauacuuggagaca

SEQ ID NO: 2101923 - RNA, 19 nt, Artificial Sequence
  Description of Artificial Sequence: Synthetic oligonucleotide
  Antisense strand to SEQ ID NO: 2101922
ugucuccaaguauuacagg

SEQ ID NO: 2101924 - RNA, 19 nt, Artificial Sequence
  Description of Artificial Sequence: Synthetic oligonucleotide
  Sense strand starting at position 3613 of SEQ ID NO: 1882190
augugauauuaccuggaua

SEQ ID NO: 2101925 - RNA, 19 nt, Artificial Sequence
  Description of Artificial Sequence: Synthetic oligonucleotide
  Antisense strand to SEQ ID NO: 2101924
uauccagguaauaucacau

SEQ ID NO: 2101926 - RNA, 19 nt, Artificial Sequence
  Description of Artificial Sequence: Synthetic oligonucleotide
  Sense strand starting at position 3615 of SEQ ID NO: 1882190
gugauauuaccuggauaua

SEQ ID NO: 2101927 - RNA, 19 nt, Artificial Sequence
  Description of Artificial Sequence: Synthetic oligonucleotide
  Antisense strand to SEQ ID NO: 2101926
uauauccagguaauaucac

SEQ ID NO: 2101928 - RNA, 19 nt, Artificial Sequence
  Description of Artificial Sequence: Synthetic oligonucleotide
  Sense strand starting at position 3646 of SEQ ID NO: 1882190
auagacuugugauuagaug

SEQ ID NO: 2101929 - RNA, 19 nt, Artificial Sequence
  Description of Artificial Sequence: Synthetic oligonucleotide
  Antisense strand to SEQ ID NO: 2101928
caucuaaucacaagucuau

SEQ ID NO: 2101930 - RNA, 19 nt, Artificial Sequence
  Description of Artificial Sequence: Synthetic oligonucleotide
  Sense strand starting at position 3647 of SEQ ID NO: 1882190
uagacuugugauuagaugu

SEQ ID NO: 2101931 - RNA, 19 nt, Artificial Sequence
  Description of Artificial Sequence: Synthetic oligonucleotide
  Antisense strand to SEQ ID NO: 2101930
acaucuaaucacaagucua

SEQ ID NO: 2101932 - RNA, 19 nt, Artificial Sequence
  Description of Artificial Sequence: Synthetic oligonucleotide
  Sense strand starting at position 3664 of SEQ ID NO: 1882190
guauauaaauacucuggua

SEQ ID NO: 2101933 - RNA, 19 nt, Artificial Sequence
  Description of Artificial Sequence: Synthetic oligonucleotide
  Antisense strand to SEQ ID NO: 2101932
uaccagaguauuuauauac

SEQ ID NO: 2101934 - RNA, 19 nt, Artificial Sequence
  Description of Artificial Sequence: Synthetic oligonucleotide
  Sense strand starting at position 3685 of SEQ ID NO: 1882190
ucccaagagucaguuugua

SEQ ID NO: 2101935 - RNA, 19 nt, Artificial Sequence
  Description of Artificial Sequence: Synthetic oligonucleotide
  Antisense strand to SEQ ID NO: 2101934
uacaaacugacucuuggga

SEQ ID NO: 2101936 - RNA, 19 nt, Artificial Sequence
  Description of Artificial Sequence: Synthetic oligonucleotide
  Sense strand starting at position 3689 of SEQ ID NO: 1882190
aagagucaguuuguaguua

SEQ ID NO: 2101937 - RNA, 19 nt, Artificial Sequence
  Description of Artificial Sequence: Synthetic oligonucleotide
  Antisense strand to SEQ ID NO: 2101936
uaacuacaaacugacucuu

SEQ ID NO: 2101938 - RNA, 19 nt, Artificial Sequence
  Description of Artificial Sequence: Synthetic oligonucleotide
  Sense strand starting at position 3694 of SEQ ID NO: 1882190
ucaguuuguaguuaggaaa

SEQ ID NO: 2101939 - RNA, 19 nt, Artificial Sequence
  Description of Artificial Sequence: Synthetic oligonucleotide
  Antisense strand to SEQ ID NO: 2101938
uuuccuaacuacaaacuga

SEQ ID NO: 2101940 - RNA, 19 nt, Artificial Sequence
  Description of Artificial Sequence: Synthetic oligonucleotide
  Sense strand starting at position 115 of SEQ ID NO: 1882191
gccuguguuguguccucaa

SEQ ID NO: 2101941 - RNA, 19 nt, Artificial Sequence
  Description of Artificial Sequence: Synthetic oligonucleotide
  Antisense strand to SEQ ID NO: 2101940
uugaggacacaacacaggc

SEQ ID NO: 2101942 - RNA, 19 nt, Artificial Sequence
  Description of Artificial Sequence: Synthetic oligonucleotide
  Sense strand starting at position 117 of SEQ ID NO: 1882191
cuguguuguguccucaagu

SEQ ID NO: 2101943 - RNA, 19 nt, Artificial Sequence
  Description of Artificial Sequence: Synthetic oligonucleotide
  Antisense strand to SEQ ID NO: 2101942
acuugaggacacaacacag

SEQ ID NO: 2101944 - RNA, 19 nt, Artificial Sequence
  Description of Artificial Sequence: Synthetic oligonucleotide
  Sense strand starting at position 486 of SEQ ID NO: 1882191
aaauguaguugugcauuua

SEQ ID NO: 2101945 - RNA, 19 nt, Artificial Sequence
  Description of Artificial Sequence: Synthetic oligonucleotide
  Antisense strand to SEQ ID NO: 2101944
uaaaugcacaacuacauuu

SEQ ID NO: 2101946 - RNA, 19 nt, Artificial Sequence
  Description of Artificial Sequence: Synthetic oligonucleotide
  Sense strand starting at position 708 of SEQ ID NO: 1882191
aagugagcaccagaaaguu

SEQ ID NO: 2101947 - RNA, 19 nt, Artificial Sequence
  Description of Artificial Sequence: Synthetic oligonucleotide
  Antisense strand to SEQ ID NO: 2101946
aacuuucuggugcucacuu

SEQ ID NO: 2101948 - RNA, 19 nt, Artificial Sequence
  Description of Artificial Sequence: Synthetic oligonucleotide
  Sense strand starting at position 716 of SEQ ID NO: 1882191
accagaaaguugucaagug

SEQ ID NO: 2101949 - RNA, 19 nt, Artificial Sequence
  Description of Artificial Sequence: Synthetic oligonucleotide
  Antisense strand to SEQ ID NO: 2101948
cacuugacaacuuucuggu

SEQ ID NO: 2101950 - RNA, 19 nt, Artificial Sequence
  Description of Artificial Sequence: Synthetic oligonucleotide
  Sense strand starting at position 730 of SEQ ID NO: 1882191
aaguguagcucagucauuu

SEQ ID NO: 2101951 - RNA, 19 nt, Artificial Sequence
  Description of Artificial Sequence: Synthetic oligonucleotide
  Antisense strand to SEQ ID NO: 2101950
aaaugacugagcuacacuu

SEQ ID NO: 2101952 - RNA, 19 nt, Artificial Sequence
  Description of Artificial Sequence: Synthetic oligonucleotide
  Sense strand starting at position 752 of SEQ ID NO: 1882191
aguaguagauugguaacca

SEQ ID NO: 2101953 - RNA, 19 nt, Artificial Sequence
  Description of Artificial Sequence: Synthetic oligonucleotide
  Antisense strand to SEQ ID NO: 2101952
ugguuaccaaucuacuacu

SEQ ID NO: 2101954 - RNA, 19 nt, Artificial Sequence
  Description of Artificial Sequence: Synthetic oligonucleotide
  Sense strand starting at position 756 of SEQ ID NO: 1882191
guagauugguaaccagaag

SEQ ID NO: 2101955 - RNA, 19 nt, Artificial Sequence
  Description of Artificial Sequence: Synthetic oligonucleotide
  Antisense strand to SEQ ID NO: 2101954
cuucugguuaccaaucuac

SEQ ID NO: 2101956 - RNA, 19 nt, Artificial Sequence
  Description of Artificial Sequence: Synthetic oligonucleotide
  Sense strand starting at position 785 of SEQ ID NO: 1882191
uguuucuuccuggguauuu

SEQ ID NO: 2101957 - RNA, 19 nt, Artificial Sequence
  Description of Artificial Sequence: Synthetic oligonucleotide
  Antisense strand to SEQ ID NO: 2101956
aaauacccaggaagaaaca

SEQ ID NO: 2101958 - RNA, 19 nt, Artificial Sequence
  Description of Artificial Sequence: Synthetic oligonucleotide
  Sense strand starting at position 786 of SEQ ID NO: 1882191
guuucuuccuggguauuua

SEQ ID NO: 2101959 - RNA, 19 nt, Artificial Sequence
  Description of Artificial Sequence: Synthetic oligonucleotide
  Antisense strand to SEQ ID NO: 2101958
uaaauacccaggaagaaac

SEQ ID NO: 2101960 - RNA, 19 nt, Artificial Sequence
  Description of Artificial Sequence: Synthetic oligonucleotide
  Sense strand starting at position 850 of SEQ ID NO: 1882191
gcuaauaagcaaggaaacu

SEQ ID NO: 2101961 - RNA, 19 nt, Artificial Sequence
  Description of Artificial Sequence: Synthetic oligonucleotide
  Antisense strand to SEQ ID NO: 2101960
aguuuccuugcuuauuagc

SEQ ID NO: 2101962 - RNA, 19 nt, Artificial Sequence
  Description of Artificial Sequence: Synthetic oligonucleotide
  Sense strand starting at position 950 of SEQ ID NO: 1882191
uugcaagucccacaggauu

SEQ ID NO: 2101963 - RNA, 19 nt, Artificial Sequence
  Description of Artificial Sequence: Synthetic oligonucleotide
  Antisense strand to SEQ ID NO: 2101962
aauccugugggacuugcaa

SEQ ID NO: 2101964 - RNA, 19 nt, Artificial Sequence
  Description of Artificial Sequence: Synthetic oligonucleotide
  Sense strand starting at position 1021 of SEQ ID NO: 1882191
gugcuauuucuuggugaaa

SEQ ID NO: 2101965 - RNA, 19 nt, Artificial Sequence
  Description of Artificial Sequence: Synthetic oligonucleotide
  Antisense strand to SEQ ID NO: 2101964
uuucaccaagaaauagcac

SEQ ID NO: 2101966 - RNA, 19 nt, Artificial Sequence
  Description of Artificial Sequence: Synthetic oligonucleotide
  Sense strand starting at position 1034 of SEQ ID NO: 1882191
gugaaaugcuacuuaagag

SEQ ID NO: 2101967 - RNA, 19 nt, Artificial Sequence
  Description of Artificial Sequence: Synthetic oligonucleotide
  Antisense strand to SEQ ID NO: 2101966
cucuuaaguagcauuucac

SEQ ID NO: 2101968 - RNA, 19 nt, Artificial Sequence
  Description of Artificial Sequence: Synthetic oligonucleotide
  Sense strand starting at position 1065 of SEQ ID NO: 1882191
ucuacuaaguccuuuagag

SEQ ID NO: 2101969 - RNA, 19 nt, Artificial Sequence
  Description of Artificial Sequence: Synthetic oligonucleotide
  Antisense strand to SEQ ID NO: 2101968
cucuaaaggacuuaguaga

SEQ ID NO: 2101970 - RNA, 19 nt, Artificial Sequence
  Description of Artificial Sequence: Synthetic oligonucleotide
  Sense strand starting at position 1156 of SEQ ID NO: 1882191
guguguuuaaguuugugca

SEQ ID NO: 2101971 - RNA, 19 nt, Artificial Sequence
  Description of Artificial Sequence: Synthetic oligonucleotide
  Antisense strand to SEQ ID NO: 2101970
ugcacaaacuuaaacacac

SEQ ID NO: 2101972 - RNA, 19 nt, Artificial Sequence
  Description of Artificial Sequence: Synthetic oligonucleotide
  Sense strand starting at position 1160 of SEQ ID NO: 1882191
guuuaaguuugugcauuua

SEQ ID NO: 2101973 - RNA, 19 nt, Artificial Sequence
  Description of Artificial Sequence: Synthetic oligonucleotide
  Antisense strand to SEQ ID NO: 2101972
uaaaugcacaaacuuaaac

SEQ ID NO: 2101974 - RNA, 19 nt, Artificial Sequence
  Description of Artificial Sequence: Synthetic oligonucleotide
  Sense strand starting at position 1583 of SEQ ID NO: 1882191
aucaucccacagugagauu

SEQ ID NO: 2101975 - RNA, 19 nt, Artificial Sequence
  Description of Artificial Sequence: Synthetic oligonucleotide
  Antisense strand to SEQ ID NO: 2101974
aaucucacugugggaugau

SEQ ID NO: 2101976 - RNA, 19 nt, Artificial Sequence
  Description of Artificial Sequence: Synthetic oligonucleotide
  Sense strand starting at position 1619 of SEQ ID NO: 1882191
ggugacaagucucucaaga

SEQ ID NO: 2101977 - RNA, 19 nt, Artificial Sequence
  Description of Artificial Sequence: Synthetic oligonucleotide
  Antisense strand to SEQ ID NO: 2101976
ucuugagagacuugucacc

SEQ ID NO: 2101978 - RNA, 19 nt, Artificial Sequence
  Description of Artificial Sequence: Synthetic oligonucleotide
  Sense strand starting at position 1858 of SEQ ID NO: 1882191
ccuccaguagcugaacauu

SEQ ID NO: 2101979 - RNA, 19 nt, Artificial Sequence
  Description of Artificial Sequence: Synthetic oligonucleotide
  Antisense strand to SEQ ID NO: 2101978
aauguucagcuacuggagg

SEQ ID NO: 2101980 - RNA, 19 nt, Artificial Sequence
  Description of Artificial Sequence: Synthetic oligonucleotide
  Sense strand starting at position 1922 of SEQ ID NO: 1882191
ggaauaagaagugguuugu

SEQ ID NO: 2101981 - RNA, 19 nt, Artificial Sequence
  Description of Artificial Sequence: Synthetic oligonucleotide
  Antisense strand to SEQ ID NO: 2101980
acaaaccacuucuuauucc

SEQ ID NO: 2101982 - RNA, 19 nt, Artificial Sequence
  Description of Artificial Sequence: Synthetic oligonucleotide
  Sense strand starting at position 1933 of SEQ ID NO: 1882191
ugguuuguacccuagagga

SEQ ID NO: 2101983 - RNA, 19 nt, Artificial Sequence
  Description of Artificial Sequence: Synthetic oligonucleotide
  Antisense strand to SEQ ID NO: 2101982
uccucuaggguacaaacca

SEQ ID NO: 2101984 - RNA, 19 nt, Artificial Sequence
  Description of Artificial Sequence: Synthetic oligonucleotide
  Sense strand starting at position 2554 of SEQ ID NO: 1882191
aggcaaaggagaugaguuu

SEQ ID NO: 2101985 - RNA, 19 nt, Artificial Sequence
  Description of Artificial Sequence: Synthetic oligonucleotide
  Antisense strand to SEQ ID NO: 2101984
aaacucaucuccuuugccu

SEQ ID NO: 2101986 - RNA, 19 nt, Artificial Sequence
  Description of Artificial Sequence: Synthetic oligonucleotide
  Sense strand starting at position 2563 of SEQ ID NO: 1882191
agaugaguuuggagggaua

SEQ ID NO: 2101987 - RNA, 19 nt, Artificial Sequence
  Description of Artificial Sequence: Synthetic oligonucleotide
  Antisense strand to SEQ ID NO: 2101986
uaucccuccaaacucaucu

SEQ ID NO: 2101988 - RNA, 19 nt, Artificial Sequence
  Description of Artificial Sequence: Synthetic oligonucleotide
  Sense strand starting at position 2746 of SEQ ID NO: 1882191
uguagaguuuggguaagag

SEQ ID NO: 2101989 - RNA, 19 nt, Artificial Sequence
  Description of Artificial Sequence: Synthetic oligonucleotide
  Antisense strand to SEQ ID NO: 2101988
cucuuacccaaacucuaca

SEQ ID NO: 2101990 - RNA, 19 nt, Artificial Sequence
  Description of Artificial Sequence: Synthetic oligonucleotide
  Sense strand starting at position 2881 of SEQ ID NO: 1882191
ugcugucagaaaugagaua

SEQ ID NO: 2101991 - RNA, 19 nt, Artificial Sequence
  Description of Artificial Sequence: Synthetic oligonucleotide
  Antisense strand to SEQ ID NO: 2101990
uaucucauuucugacagca

SEQ ID NO: 2101992 - RNA, 19 nt, Artificial Sequence
  Description of Artificial Sequence: Synthetic oligonucleotide
  Sense strand starting at position 3157 of SEQ ID NO: 1882191
aucugucuaccucagagau

SEQ ID NO: 2101993 - RNA, 19 nt, Artificial Sequence
  Description of Artificial Sequence: Synthetic oligonucleotide
  Antisense strand to SEQ ID NO: 2101992
aucucugagguagacagau

SEQ ID NO: 2101994 - RNA, 19 nt, Artificial Sequence
  Description of Artificial Sequence: Synthetic oligonucleotide
  Sense strand starting at position 3301 of SEQ ID NO: 1882191
cuggauguacaauggugaa

SEQ ID NO: 2101995 - RNA, 19 nt, Artificial Sequence
  Description of Artificial Sequence: Synthetic oligonucleotide
  Antisense strand to SEQ ID NO: 2101994
uucaccauuguacauccag

SEQ ID NO: 2101996 - RNA, 19 nt, Artificial Sequence
  Description of Artificial Sequence: Synthetic oligonucleotide
  Sense strand starting at position 3402 of SEQ ID NO: 1882191
uagcauuaaguagaguuua

SEQ ID NO: 2101997 - RNA, 19 nt, Artificial Sequence
  Description of Artificial Sequence: Synthetic oligonucleotide
  Antisense strand to SEQ ID NO: 2101996
uaaacucuacuuaaugcua

SEQ ID NO: 2101998 - RNA, 19 nt, Artificial Sequence
  Description of Artificial Sequence: Synthetic oligonucleotide
  Sense strand starting at position 3426 of SEQ ID NO: 1882191
gcauauaugguaugagaug

SEQ ID NO: 2101999 - RNA, 19 nt, Artificial Sequence
  Description of Artificial Sequence: Synthetic oligonucleotide
  Antisense strand to SEQ ID NO: 2101998
caucucauaccauauaugc

SEQ ID NO: 2102000 - RNA, 19 nt, Artificial Sequence
  Description of Artificial Sequence: Synthetic oligonucleotide
  Sense strand starting at position 3506 of SEQ ID NO: 1882191
gaauauuauccugggagcu

SEQ ID NO: 2102001 - RNA, 19 nt, Artificial Sequence
  Description of Artificial Sequence: Synthetic oligonucleotide
  Antisense strand to SEQ ID NO: 2102000
agcucccaggauaauauuc

SEQ ID NO: 2102002 - RNA, 19 nt, Artificial Sequence
  Description of Artificial Sequence: Synthetic oligonucleotide
  Sense strand starting at position 3608 of SEQ ID NO: 1882191
gauggugucaucuauugag

SEQ ID NO: 2102003 - RNA, 19 nt, Artificial Sequence
  Description of Artificial Sequence: Synthetic oligonucleotide
  Antisense strand to SEQ ID NO: 2102002
cucaauagaugacaccauc

SEQ ID NO: 2102004 - RNA, 19 nt, Artificial Sequence
  Description of Artificial Sequence: Synthetic oligonucleotide
  Sense strand starting at position 3703 of SEQ ID NO: 1882191
uuggaaauacgugagguau

SEQ ID NO: 2102005 - RNA, 19 nt, Artificial Sequence
  Description of Artificial Sequence: Synthetic oligonucleotide
  Antisense strand to SEQ ID NO: 2102004
auaccucacguauuuccaa

SEQ ID NO: 2102006 - RNA, 19 nt, Artificial Sequence
  Description of Artificial Sequence: Synthetic oligonucleotide
  Sense strand starting at position 3707 of SEQ ID NO: 1882191
aaauacgugagguauugua

SEQ ID NO: 2102007 - RNA, 19 nt, Artificial Sequence
  Description of Artificial Sequence: Synthetic oligonucleotide
  Antisense strand to SEQ ID NO: 2102006
uacaauaccucacguauuu

SEQ ID NO: 2102008 - RNA, 19 nt, Artificial Sequence
  Description of Artificial Sequence: Synthetic oligonucleotide
  Sense strand starting at position 3714 of SEQ ID NO: 1882191
ugagguauuguauauuacu

SEQ ID NO: 2102009 - RNA, 19 nt, Artificial Sequence
  Description of Artificial Sequence: Synthetic oligonucleotide
  Antisense strand to SEQ ID NO: 2102008
aguaauauacaauaccuca

SEQ ID NO: 2102010 - RNA, 19 nt, Artificial Sequence
  Description of Artificial Sequence: Synthetic oligonucleotide
  Sense strand starting at position 3739 of SEQ ID NO: 1882191
uguguaucacgugcaguaa

SEQ ID NO: 2102011 - RNA, 19 nt, Artificial Sequence
  Description of Artificial Sequence: Synthetic oligonucleotide
  Antisense strand to SEQ ID NO: 2102010
uuacugcacgugauacaca

SEQ ID NO: 2102012 - RNA, 19 nt, Artificial Sequence
  Description of Artificial Sequence: Synthetic oligonucleotide
  Sense strand starting at position 3751 of SEQ ID NO: 1882191
gcaguaaauggguaggaau

SEQ ID NO: 2102013 - RNA, 19 nt, Artificial Sequence
  Description of Artificial Sequence: Synthetic oligonucleotide
  Antisense strand to SEQ ID NO: 2102012
auuccuacccauuuacugc

SEQ ID NO: 2102014 - RNA, 19 nt, Artificial Sequence
  Description of Artificial Sequence: Synthetic oligonucleotide
  Sense strand starting at position 3852 of SEQ ID NO: 1882191
gaagaaacuugagcugucu

SEQ ID NO: 2102015 - RNA, 19 nt, Artificial Sequence
  Description of Artificial Sequence: Synthetic oligonucleotide
  Antisense strand to SEQ ID NO: 2102014
agacagcucaaguuucuuc

SEQ ID NO: 2102016 - RNA, 19 nt, Artificial Sequence
  Description of Artificial Sequence: Synthetic oligonucleotide
  Sense strand starting at position 3858 of SEQ ID NO: 1882191
acuugagcugucuaaacuu

SEQ ID NO: 2102017 - RNA, 19 nt, Artificial Sequence
  Description of Artificial Sequence: Synthetic oligonucleotide
  Antisense strand to SEQ ID NO: 2102016
aaguuuagacagcucaagu

SEQ ID NO: 2102018 - RNA, 19 nt, Artificial Sequence
  Description of Artificial Sequence: Synthetic oligonucleotide
  Sense strand starting at position 3877 of SEQ ID NO: 1882191
uugcuaaugaggugagaau

SEQ ID NO: 2102019 - RNA, 19 nt, Artificial Sequence
  Description of Artificial Sequence: Synthetic oligonucleotide
  Antisense strand to SEQ ID NO: 2102018
auucucaccucauuagcaa

SEQ ID NO: 2102020 - RNA, 19 nt, Artificial Sequence
  Description of Artificial Sequence: Synthetic oligonucleotide
  Sense strand starting at position 351 of SEQ ID NO: 1882192
guugucaauuuggccaaau

SEQ ID NO: 2102021 - RNA, 19 nt, Artificial Sequence
  Description of Artificial Sequence: Synthetic oligonucleotide
  Antisense strand to SEQ ID NO: 2102020
auuuggccaaauugacaac

SEQ ID NO: 2102022 - RNA, 19 nt, Artificial Sequence
  Description of Artificial Sequence: Synthetic oligonucleotide
  Sense strand starting at position 616 of SEQ ID NO: 1882192
auuacucacguguauauaa

SEQ ID NO: 2102023 - RNA, 19 nt, Artificial Sequence
  Description of Artificial Sequence: Synthetic oligonucleotide
  Antisense strand to SEQ ID NO: 2102022
uuauauacacgugaguaau

SEQ ID NO: 2102024 - RNA, 19 nt, Artificial Sequence
  Description of Artificial Sequence: Synthetic oligonucleotide
  Sense strand starting at position 1073 of SEQ ID NO: 1882192
aguaacgacaauugagaau

SEQ ID NO: 2102025 - RNA, 19 nt, Artificial Sequence
  Description of Artificial Sequence: Synthetic oligonucleotide
  Antisense strand to SEQ ID NO: 2102024
auucucaauugucguuacu

SEQ ID NO: 2102026 - RNA, 19 nt, Artificial Sequence
  Description of Artificial Sequence: Synthetic oligonucleotide
  Sense strand starting at position 1106 of SEQ ID NO: 1882192
ugggcuauucagugaacag

SEQ ID NO: 2102027 - RNA, 19 nt, Artificial Sequence
  Description of Artificial Sequence: Synthetic oligonucleotide
  Antisense strand to SEQ ID NO: 2102026
cuguucacugaauagccca

SEQ ID NO: 2102028 - RNA, 19 nt, Artificial Sequence
  Description of Artificial Sequence: Synthetic oligonucleotide
  Sense strand starting at position 1128 of SEQ ID NO: 1882192
ggaugucaucucugacaga

SEQ ID NO: 2102029 - RNA, 19 nt, Artificial Sequence
  Description of Artificial Sequence: Synthetic oligonucleotide
  Antisense strand to SEQ ID NO: 2102028
ucugucagagaugacaucc

SEQ ID NO: 2102030 - RNA, 19 nt, Artificial Sequence
  Description of Artificial Sequence: Synthetic oligonucleotide
  Sense strand starting at position 1146 of SEQ ID NO: 1882192
aggcauaaacugggauuau

SEQ ID NO: 2102031 - RNA, 19 nt, Artificial Sequence
  Description of Artificial Sequence: Synthetic oligonucleotide
  Antisense strand to SEQ ID NO: 2102030
auaaucccaguuuaugccu

SEQ ID NO: 2102032 - RNA, 19 nt, Artificial Sequence
  Description of Artificial Sequence: Synthetic oligonucleotide
  Sense strand starting at position 1256 of SEQ ID NO: 1882192
gcaagucuaugugcaauuu

SEQ ID NO: 2102033 - RNA, 19 nt, Artificial Sequence
  Description of Artificial Sequence: Synthetic oligonucleotide
  Antisense strand to SEQ ID NO: 2102032
aaauugcacauagacuugc

SEQ ID NO: 2102034 - RNA, 19 nt, Artificial Sequence
  Description of Artificial Sequence: Synthetic oligonucleotide
  Sense strand starting at position 1398 of SEQ ID NO: 1882192
acaaacaguugcuuagaau

SEQ ID NO: 2102035 - RNA, 19 nt, Artificial Sequence
  Description of Artificial Sequence: Synthetic oligonucleotide
  Antisense strand to SEQ ID NO: 2102034
auucuaagcaacuguuugu

SEQ ID NO: 2102036 - RNA, 19 nt, Artificial Sequence
  Description of Artificial Sequence: Synthetic oligonucleotide
  Sense strand starting at position 1552 of SEQ ID NO: 1882192
ggcaccauagcugaugauu

SEQ ID NO: 2102037 - RNA, 19 nt, Artificial Sequence
  Description of Artificial Sequence: Synthetic oligonucleotide
  Antisense strand to SEQ ID NO: 2102036
aaucaucagcuauggugcc

SEQ ID NO: 2102038 - RNA, 19 nt, Artificial Sequence
  Description of Artificial Sequence: Synthetic oligonucleotide
  Sense strand starting at position 1608 of SEQ ID NO: 1882192
uccagaacgcaucaugaca

SEQ ID NO: 2102039 - RNA, 19 nt, Artificial Sequence
  Description of Artificial Sequence: Synthetic oligonucleotide
  Antisense strand to SEQ ID NO: 2102038
ugucaugaugcguucugga

SEQ ID NO: 2102040 - RNA, 19 nt, Artificial Sequence
  Description of Artificial Sequence: Synthetic oligonucleotide
  Sense strand starting at position 1660 of SEQ ID NO: 1882192
agcauuagaggugauuauu

SEQ ID NO: 2102041 - RNA, 19 nt, Artificial Sequence
  Description of Artificial Sequence: Synthetic oligonucleotide
  Antisense strand to SEQ ID NO: 2102040
aauaaucaccucuaaugcu

SEQ ID NO: 2102042 - RNA, 19 nt, Artificial Sequence
  Description of Artificial Sequence: Synthetic oligonucleotide
  Sense strand starting at position 1724 of SEQ ID NO: 1882192
augaauuagcuguaucuaa

SEQ ID NO: 2102043 - RNA, 19 nt, Artificial Sequence
  Description of Artificial Sequence: Synthetic oligonucleotide
  Antisense strand to SEQ ID NO: 2102042
uuagauacagcuaauucau

SEQ ID NO: 2102044 - RNA, 19 nt, Artificial Sequence
  Description of Artificial Sequence: Synthetic oligonucleotide
  Sense strand starting at position 1871 of SEQ ID NO: 1882192
cugauauagcgugaaacaa

SEQ ID NO: 2102045 - RNA, 19 nt, Artificial Sequence
  Description of Artificial Sequence: Synthetic oligonucleotide
  Antisense strand to SEQ ID NO: 2102044
uuguuucacgcuauaucag

SEQ ID NO: 2102046 - RNA, 19 nt, Artificial Sequence
  Description of Artificial Sequence: Synthetic oligonucleotide
  Sense strand starting at position 1880 of SEQ ID NO: 1882192
cgugaaacaaguuggaauu

SEQ ID NO: 2102047 - RNA, 19 nt, Artificial Sequence
  Description of Artificial Sequence: Synthetic oligonucleotide
  Antisense strand to SEQ ID NO: 2102046
aauuccaacuuguuucacg

SEQ ID NO: 2102048 - RNA, 19 nt, Artificial Sequence
  Description of Artificial Sequence: Synthetic oligonucleotide
  Sense strand starting at position 1891 of SEQ ID NO: 1882192
uuggaauucguccaaacca

SEQ ID NO: 2102049 - RNA, 19 nt, Artificial Sequence
  Description of Artificial Sequence: Synthetic oligonucleotide
  Antisense strand to SEQ ID NO: 2102048
ugguuuggacgaauuccaa

SEQ ID NO: 2102050 - RNA, 19 nt, Artificial Sequence
  Description of Artificial Sequence: Synthetic oligonucleotide
  Sense strand starting at position 1939 of SEQ ID NO: 1882192
ucauucuuccaggaguuaa

SEQ ID NO: 2102051 - RNA, 19 nt, Artificial Sequence
  Description of Artificial Sequence: Synthetic oligonucleotide
  Antisense strand to SEQ ID NO: 2102050
uuaacuccuggaagaauga

SEQ ID NO: 2102052 - RNA, 19 nt, Artificial Sequence
  Description of Artificial Sequence: Synthetic oligonucleotide
  Sense strand starting at position 1951 of SEQ ID NO: 1882192
gaguuaaagcaguacauac

SEQ ID NO: 2102053 - RNA, 19 nt, Artificial Sequence
  Description of Artificial Sequence: Synthetic oligonucleotide
  Antisense strand to SEQ ID NO: 2102052
guauguacugcuuuaacuc

SEQ ID NO: 2102054 - RNA, 19 nt, Artificial Sequence
  Description of Artificial Sequence: Synthetic oligonucleotide
  Sense strand starting at position 2013 of SEQ ID NO: 1882192
ugaagagcauuagucagau

SEQ ID NO: 2102055 - RNA, 19 nt, Artificial Sequence
  Description of Artificial Sequence: Synthetic oligonucleotide
  Antisense strand to SEQ ID NO: 2102054
aucugacuaaugcucuuca

SEQ ID NO: 2102056 - RNA, 19 nt, Artificial Sequence
  Description of Artificial Sequence: Synthetic oligonucleotide
  Sense strand starting at position 2028 of SEQ ID NO: 1882192
agauccuugcaacgaugaa

SEQ ID NO: 2102057 - RNA, 19 nt, Artificial Sequence
  Description of Artificial Sequence: Synthetic oligonucleotide
  Antisense strand to SEQ ID NO: 2102056
uucaucguugcaaggaucu

SEQ ID NO: 2102058 - RNA, 19 nt, Artificial Sequence
  Description of Artificial Sequence: Synthetic oligonucleotide
  Sense strand starting at position 2417 of SEQ ID NO: 1882192
uuuccuacuccagauaguu

SEQ ID NO: 2102059 - RNA, 19 nt, Artificial Sequence
  Description of Artificial Sequence: Synthetic oligonucleotide
  Antisense strand to SEQ ID NO: 2102058
aacuaucuggaguaggaaa

SEQ ID NO: 2102060 - RNA, 19 nt, Artificial Sequence
  Description of Artificial Sequence: Synthetic oligonucleotide
  Sense strand starting at position 2743 of SEQ ID NO: 1882192
ccacuuggaucucucagaa

SEQ ID NO: 2102061 - RNA, 19 nt, Artificial Sequence
  Description of Artificial Sequence: Synthetic oligonucleotide
  Antisense strand to SEQ ID NO: 2102060
uucugagagauccaagugg

SEQ ID NO: 2102062 - RNA, 19 nt, Artificial Sequence
  Description of Artificial Sequence: Synthetic oligonucleotide
  Sense strand starting at position 2866 of SEQ ID NO: 1882192
gcuaauauucugcaacuga

SEQ ID NO: 2102063 - RNA, 19 nt, Artificial Sequence
  Description of Artificial Sequence: Synthetic oligonucleotide
  Antisense strand to SEQ ID NO: 2102062
ucaguugcagaauauuagc

SEQ ID NO: 2102064 - RNA, 19 nt, Artificial Sequence
  Description of Artificial Sequence: Synthetic oligonucleotide
  Sense strand starting at position 3307 of SEQ ID NO: 1882192
uuauuaaacugaguccagu

SEQ ID NO: 2102065 - RNA, 19 nt, Artificial Sequence
  Description of Artificial Sequence: Synthetic oligonucleotide
  Antisense strand to SEQ ID NO: 2102064
acuggacucaguuuaauaa

SEQ ID NO: 2102066 - RNA, 19 nt, Artificial Sequence
  Description of Artificial Sequence: Synthetic oligonucleotide
  Sense strand starting at position 3387 of SEQ ID NO: 1882192
acuuuaagcgaaugauaua

SEQ ID NO: 2102067 - RNA, 19 nt, Artificial Sequence
  Description of Artificial Sequence: Synthetic oligonucleotide
  Antisense strand to SEQ ID NO: 2102066
uauaucauucgcuuaaagu

SEQ ID NO: 2102068 - RNA, 19 nt, Artificial Sequence
  Description of Artificial Sequence: Synthetic oligonucleotide
  Sense strand starting at position 3394 of SEQ ID NO: 1882192
gcgaaugauauacaugcau

SEQ ID NO: 2102069 - RNA, 19 nt, Artificial Sequence
  Description of Artificial Sequence: Synthetic oligonucleotide
  Antisense strand to SEQ ID NO: 2102068
augcauguauaucauucgc

SEQ ID NO: 2102070 - RNA, 19 nt, Artificial Sequence
  Description of Artificial Sequence: Synthetic oligonucleotide
  Sense strand starting at position 3457 of SEQ ID NO: 1882192
uauugaguuucugcauuug

SEQ ID NO: 2102071 - RNA, 19 nt, Artificial Sequence
  Description of Artificial Sequence: Synthetic oligonucleotide
  Antisense strand to SEQ ID NO: 2102070
caaaugcagaaacucaaua

SEQ ID NO: 2102072 - RNA, 19 nt, Artificial Sequence
  Description of Artificial Sequence: Synthetic oligonucleotide
  Sense strand starting at position 3536 of SEQ ID NO: 1882192
ucacuacguccugauuaca

SEQ ID NO: 2102073 - RNA, 19 nt, Artificial Sequence
  Description of Artificial Sequence: Synthetic oligonucleotide
  Antisense strand to SEQ ID NO: 2102072
uguaaucaggacguaguga

SEQ ID NO: 2102074 - RNA, 19 nt, Artificial Sequence
  Description of Artificial Sequence: Synthetic oligonucleotide
  Sense strand starting at position 3539 of SEQ ID NO: 1882192
cuacguccugauuacauua

SEQ ID NO: 2102075 - RNA, 19 nt, Artificial Sequence
  Description of Artificial Sequence: Synthetic oligonucleotide
  Antisense strand to SEQ ID NO: 2102074
uaauguaaucaggacguag

SEQ ID NO: 2102076 - RNA, 19 nt, Artificial Sequence
  Description of Artificial Sequence: Synthetic oligonucleotide
  Sense strand starting at position 3600 of SEQ ID NO: 1882192
uaaugaaaucuagguuaug

SEQ ID NO: 2102077 - RNA, 19 nt, Artificial Sequence
  Description of Artificial Sequence: Synthetic oligonucleotide
  Antisense strand to SEQ ID NO: 2102076
cauaaccuagauuucauua

SEQ ID NO: 2102078 - RNA, 19 nt, Artificial Sequence
  Description of Artificial Sequence: Synthetic oligonucleotide
  Sense strand starting at position 3643 of SEQ ID NO: 1882192
aucugauauaaagguggua

SEQ ID NO: 2102079 - RNA, 19 nt, Artificial Sequence
  Description of Artificial Sequence: Synthetic oligonucleotide
  Antisense strand to SEQ ID NO: 2102078
uaccaccuuuauaucagau

SEQ ID NO: 2102080 - RNA, 19 nt, Artificial Sequence
  Description of Artificial Sequence: Synthetic oligonucleotide
  Sense strand starting at position 3645 of SEQ ID NO: 1882192
cugauauaaaggugguaug

SEQ ID NO: 2102081 - RNA, 19 nt, Artificial Sequence
  Description of Artificial Sequence: Synthetic oligonucleotide
  Antisense strand to SEQ ID NO: 2102080
cauaccaccuuuauaucag

SEQ ID NO: 2102082 - RNA, 19 nt, Artificial Sequence
  Description of Artificial Sequence: Synthetic oligonucleotide
  Sense strand starting at position 3805 of SEQ ID NO: 1882192
aguugaagucacuauauug

SEQ ID NO: 2102083 - RNA, 19 nt, Artificial Sequence
  Description of Artificial Sequence: Synthetic oligonucleotide
  Antisense strand to SEQ ID NO: 2102082
caauauagugacuucaacu

SEQ ID NO: 2102084 - RNA, 19 nt, Artificial Sequence
  Description of Artificial Sequence: Synthetic oligonucleotide
  Sense strand starting at position 3815 of SEQ ID NO: 1882192
acuauauugucacuauuga

SEQ ID NO: 2102085 - RNA, 19 nt, Artificial Sequence
  Description of Artificial Sequence: Synthetic oligonucleotide
  Antisense strand to SEQ ID NO: 2102084
ucaauagugacaauauagu

SEQ ID NO: 2102086 - RNA, 19 nt, Artificial Sequence
  Description of Artificial Sequence: Synthetic oligonucleotide
  Sense strand starting at position 3816 of SEQ ID NO: 1882192
cuauauugucacuauugau

SEQ ID NO: 2102087 - RNA, 19 nt, Artificial Sequence
  Description of Artificial Sequence: Synthetic oligonucleotide
  Antisense strand to SEQ ID NO: 2102086
aucaauagugacaauauag

SEQ ID NO: 2102088 - RNA, 19 nt, Artificial Sequence
  Description of Artificial Sequence: Synthetic oligonucleotide
  Sense strand starting at position 3926 of SEQ ID NO: 1882192
auaguaaucugauugguca

SEQ ID NO: 2102089 - RNA, 19 nt, Artificial Sequence
  Description of Artificial Sequence: Synthetic oligonucleotide
  Antisense strand to SEQ ID NO: 2102088
ugaccaaucagauuacuau

SEQ ID NO: 2102090 - RNA, 19 nt, Artificial Sequence
  Description of Artificial Sequence: Synthetic oligonucleotide
  Sense strand starting at position 3927 of SEQ ID NO: 1882192
uaguaaucugauuggucag

SEQ ID NO: 2102091 - RNA, 19 nt, Artificial Sequence
  Description of Artificial Sequence: Synthetic oligonucleotide
  Antisense strand to SEQ ID NO: 2102090
cugaccaaucagauuacua

SEQ ID NO: 2102092 - RNA, 19 nt, Artificial Sequence
  Description of Artificial Sequence: Synthetic oligonucleotide
  Sense strand starting at position 3928 of SEQ ID NO: 1882192
aguaaucugauuggucaga

SEQ ID NO: 2102093 - RNA, 19 nt, Artificial Sequence
  Description of Artificial Sequence: Synthetic oligonucleotide
  Antisense strand to SEQ ID NO: 2102092
ucugaccaaucagauuacu

SEQ ID NO: 2102094 - RNA, 19 nt, Artificial Sequence
  Description of Artificial Sequence: Synthetic oligonucleotide
  Sense strand starting at position 3929 of SEQ ID NO: 1882192
guaaucugauuggucagau

SEQ ID NO: 2102095 - RNA, 19 nt, Artificial Sequence
  Description of Artificial Sequence: Synthetic oligonucleotide
  Antisense strand to SEQ ID NO: 2102094
aucugaccaaucagauuac

SEQ ID NO: 2102096 - RNA, 19 nt, Artificial Sequence
  Description of Artificial Sequence: Synthetic oligonucleotide
  Sense strand starting at position 3930 of SEQ ID NO: 1882192
uaaucugauuggucagauu

SEQ ID NO: 2102097 - RNA, 19 nt, Artificial Sequence
  Description of Artificial Sequence: Synthetic oligonucleotide
  Antisense strand to SEQ ID NO: 2102096
aaucugaccaaucagauua

SEQ ID NO: 2102098 - RNA, 19 nt, Artificial Sequence
  Description of Artificial Sequence: Synthetic oligonucleotide
  Sense strand starting at position 3968 of SEQ ID NO: 1882192
guuuauuaauaggcaggga

SEQ ID NO: 2102099 - RNA, 19 nt, Artificial Sequence
  Description of Artificial Sequence: Synthetic oligonucleotide
  Antisense strand to SEQ ID NO: 2102098
ucccugccuauuaauaaac

SEQ ID NO: 2102100 - RNA, 19 nt, Artificial Sequence
  Description of Artificial Sequence: Synthetic oligonucleotide
  Sense strand starting at position 756 of SEQ ID NO: 1882193
gcguaaucucggcugauug

SEQ ID NO: 2102101 - RNA, 19 nt, Artificial Sequence
  Description of Artificial Sequence: Synthetic oligonucleotide
  Antisense strand to SEQ ID NO: 2102100
caaucagccgagauuacgc

SEQ ID NO: 2102102 - RNA, 19 nt, Artificial Sequence
  Description of Artificial Sequence: Synthetic oligonucleotide
  Sense strand starting at position 1333 of SEQ ID NO: 1882193
cgguauaauuucguuauua

SEQ ID NO: 2102103 - RNA, 19 nt, Artificial Sequence
  Description of Artificial Sequence: Synthetic oligonucleotide
  Antisense strand to SEQ ID NO: 2102102
uaauaacgaaauuauaccg

SEQ ID NO: 2102104 - RNA, 19 nt, Artificial Sequence
  Description of Artificial Sequence: Synthetic oligonucleotide
  Sense strand starting at position 2005 of SEQ ID NO: 1882193
ccaagaugucuauggcaaa

SEQ ID NO: 2102105 - RNA, 19 nt, Artificial Sequence
  Description of Artificial Sequence: Synthetic oligonucleotide
  Antisense strand to SEQ ID NO: 2102104
uuugccauagacaucuugg

SEQ ID NO: 2102106 - RNA, 19 nt, Artificial Sequence
  Description of Artificial Sequence: Synthetic oligonucleotide
  Sense strand starting at position 2326 of SEQ ID NO: 1882193
guucuuggacucggacauu

SEQ ID NO: 2102107 - RNA, 19 nt, Artificial Sequence
  Description of Artificial Sequence: Synthetic oligonucleotide
  Antisense strand to SEQ ID NO: 2102106
aauguccgaguccaagaac

SEQ ID NO: 2102108 - RNA, 19 nt, Artificial Sequence
  Description of Artificial Sequence: Synthetic oligonucleotide
  Sense strand starting at position 2440 of SEQ ID NO: 1882193
ggcgaagacgaucagcauu

SEQ ID NO: 2102109 - RNA, 19 nt, Artificial Sequence
  Description of Artificial Sequence: Synthetic oligonucleotide
  Antisense strand to SEQ ID NO: 2102108
aaugcugaucgucuucgcc

SEQ ID NO: 2102110 - RNA, 19 nt, Artificial Sequence
  Description of Artificial Sequence: Synthetic oligonucleotide
  Sense strand starting at position 2442 of SEQ ID NO: 1882193
cgaagacgaucagcauuaa

SEQ ID NO: 2102111 - RNA, 19 nt, Artificial Sequence
  Description of Artificial Sequence: Synthetic oligonucleotide
  Antisense strand to SEQ ID NO: 2102110
uuaaugcugaucgucuucg

SEQ ID NO: 2102112 - RNA, 19 nt, Artificial Sequence
  Description of Artificial Sequence: Synthetic oligonucleotide
  Sense strand starting at position 2522 of SEQ ID NO: 1882193
uauaauagaugucucgcau

SEQ ID NO: 2102113 - RNA, 19 nt, Artificial Sequence
  Description of Artificial Sequence: Synthetic oligonucleotide
  Antisense strand to SEQ ID NO: 2102112
augcgagacaucuauuaua

SEQ ID NO: 2102114 - RNA, 19 nt, Artificial Sequence
  Description of Artificial Sequence: Synthetic oligonucleotide
  Sense strand starting at position 2645 of SEQ ID NO: 1882193
gccauaucuugccuugauu

SEQ ID NO: 2102115 - RNA, 19 nt, Artificial Sequence
  Description of Artificial Sequence: Synthetic oligonucleotide
  Antisense strand to SEQ ID NO: 2102114
aaucaaggcaagauauggc

SEQ ID NO: 2102116 - RNA, 19 nt, Artificial Sequence
  Description of Artificial Sequence: Synthetic oligonucleotide
  Sense strand starting at position 2657 of SEQ ID NO: 1882193
cuugauucguacuugaaag

SEQ ID NO: 2102117 - RNA, 19 nt, Artificial Sequence
  Description of Artificial Sequence: Synthetic oligonucleotide
  Antisense strand to SEQ ID NO: 2102116
cuuucaaguacgaaucaag

SEQ ID NO: 2102118 - RNA, 19 nt, Artificial Sequence
  Description of Artificial Sequence: Synthetic oligonucleotide
  Sense strand starting at position 2658 of SEQ ID NO: 1882193
uugauucguacuugaaagg

SEQ ID NO: 2102119 - RNA, 19 nt, Artificial Sequence
  Description of Artificial Sequence: Synthetic oligonucleotide
  Antisense strand to SEQ ID NO: 2102118
ccuuucaaguacgaaucaa

SEQ ID NO: 2102120 - RNA, 19 nt, Artificial Sequence
  Description of Artificial Sequence: Synthetic oligonucleotide
  Sense strand starting at position 2659 of SEQ ID NO: 1882193
ugauucguacuugaaaggu

SEQ ID NO: 2102121 - RNA, 19 nt, Artificial Sequence
  Description of Artificial Sequence: Synthetic oligonucleotide
  Antisense strand to SEQ ID NO: 2102120
accuuucaaguacgaauca

SEQ ID NO: 2102122 - RNA, 19 nt, Artificial Sequence
  Description of Artificial Sequence: Synthetic oligonucleotide
  Sense strand starting at position 2683 of SEQ ID NO: 1882193
cagagacauuucugaugug

SEQ ID NO: 2102123 - RNA, 19 nt, Artificial Sequence
  Description of Artificial Sequence: Synthetic oligonucleotide
  Antisense strand to SEQ ID NO: 2102122
cacaucagaaaugucucug

SEQ ID NO: 2102124 - RNA, 19 nt, Artificial Sequence
  Description of Artificial Sequence: Synthetic oligonucleotide
  Sense strand starting at position 2684 of SEQ ID NO: 1882193
agagacauuucugaugugu

SEQ ID NO: 2102125 - RNA, 19 nt, Artificial Sequence
  Description of Artificial Sequence: Synthetic oligonucleotide
  Antisense strand to SEQ ID NO: 2102124
acacaucagaaaugucucu

SEQ ID NO: 2102126 - RNA, 19 nt, Artificial Sequence
  Description of Artificial Sequence: Synthetic oligonucleotide
  Sense strand starting at position 2748 of SEQ ID NO: 1882193
augcgagcacguuaaauuu

SEQ ID NO: 2102127 - RNA, 19 nt, Artificial Sequence
  Description of Artificial Sequence: Synthetic oligonucleotide
  Antisense strand to SEQ ID NO: 2102126
aaauuuaacgugcucgcau

SEQ ID NO: 2102128 - RNA, 19 nt, Artificial Sequence
  Description of Artificial Sequence: Synthetic oligonucleotide
  Sense strand starting at position 2862 of SEQ ID NO: 1882193
aaggucauuugaggagaaa

SEQ ID NO: 2102129 - RNA, 19 nt, Artificial Sequence
  Description of Artificial Sequence: Synthetic oligonucleotide
  Antisense strand to SEQ ID NO: 2102128
uuucuccucaaaugaccuu

SEQ ID NO: 2102130 - RNA, 19 nt, Artificial Sequence
  Description of Artificial Sequence: Synthetic oligonucleotide
  Sense strand starting at position 2877 of SEQ ID NO: 1882193
gaaagaggugccugacuaa

SEQ ID NO: 2102131 - RNA, 19 nt, Artificial Sequence
  Description of Artificial Sequence: Synthetic oligonucleotide
  Antisense strand to SEQ ID NO: 2102130
uuagucaggcaccucuuuc

SEQ ID NO: 2102132 - RNA, 19 nt, Artificial Sequence
  Description of Artificial Sequence: Synthetic oligonucleotide
  Sense strand starting at position 2890 of SEQ ID NO: 1882193
gacuaaucggguuacccuu

SEQ ID NO: 2102133 - RNA, 19 nt, Artificial Sequence
  Description of Artificial Sequence: Synthetic oligonucleotide
  Antisense strand to SEQ ID NO: 2102132
aaggguaacccgauuaguc

SEQ ID NO: 2102134 - RNA, 19 nt, Artificial Sequence
  Description of Artificial Sequence: Synthetic oligonucleotide
  Sense strand starting at position 2896 of SEQ ID NO: 1882193
ucggguuacccuuguagag

SEQ ID NO: 2102135 - RNA, 19 nt, Artificial Sequence
  Description of Artificial Sequence: Synthetic oligonucleotide
  Antisense strand to SEQ ID NO: 2102134
cucuacaaggguaacccga

SEQ ID NO: 2102136 - RNA, 19 nt, Artificial Sequence
  Description of Artificial Sequence: Synthetic oligonucleotide
  Sense strand starting at position 3002 of SEQ ID NO: 1882193
cuaagaggcucucugugau

SEQ ID NO: 2102137 - RNA, 19 nt, Artificial Sequence
  Description of Artificial Sequence: Synthetic oligonucleotide
  Antisense strand to SEQ ID NO: 2102136
aucacagagagccucuuag

SEQ ID NO: 2102138 - RNA, 19 nt, Artificial Sequence
  Description of Artificial Sequence: Synthetic oligonucleotide
  Sense strand starting at position 3054 of SEQ ID NO: 1882193
ggacaauugucuuccaauu

SEQ ID NO: 2102139 - RNA, 19 nt, Artificial Sequence
  Description of Artificial Sequence: Synthetic oligonucleotide
  Antisense strand to SEQ ID NO: 2102138
aauuggaagacaauugucc

SEQ ID NO: 2102140 - RNA, 19 nt, Artificial Sequence
  Description of Artificial Sequence: Synthetic oligonucleotide
  Sense strand starting at position 3093 of SEQ ID NO: 1882193
agguaugaguccucugguu

SEQ ID NO: 2102141 - RNA, 19 nt, Artificial Sequence
  Description of Artificial Sequence: Synthetic oligonucleotide
  Antisense strand to SEQ ID NO: 2102140
aaccagaggacucauaccu

SEQ ID NO: 2102142 - RNA, 19 nt, Artificial Sequence
  Description of Artificial Sequence: Synthetic oligonucleotide
  Sense strand starting at position 3099 of SEQ ID NO: 1882193
gaguccucugguugucuga

SEQ ID NO: 2102143 - RNA, 19 nt, Artificial Sequence
  Description of Artificial Sequence: Synthetic oligonucleotide
  Antisense strand to SEQ ID NO: 2102142
ucagacaaccagaggacuc

SEQ ID NO: 2102144 - RNA, 19 nt, Artificial Sequence
  Description of Artificial Sequence: Synthetic oligonucleotide
  Sense strand starting at position 3236 of SEQ ID NO: 1882193
gccaacacuggcuguuaga

SEQ ID NO: 2102145 - RNA, 19 nt, Artificial Sequence
  Description of Artificial Sequence: Synthetic oligonucleotide
  Antisense strand to SEQ ID NO: 2102144
ucuaacagccaguguuggc

SEQ ID NO: 2102146 - RNA, 19 nt, Artificial Sequence
  Description of Artificial Sequence: Synthetic oligonucleotide
  Sense strand starting at position 3247 of SEQ ID NO: 1882193
cuguuagaagagugaucac

SEQ ID NO: 2102147 - RNA, 19 nt, Artificial Sequence
  Description of Artificial Sequence: Synthetic oligonucleotide
  Antisense strand to SEQ ID NO: 2102146
gugaucacucuucuaacag

SEQ ID NO: 2102148 - RNA, 19 nt, Artificial Sequence
  Description of Artificial Sequence: Synthetic oligonucleotide
  Sense strand starting at position 3250 of SEQ ID NO: 1882193
uuagaagagugaucacuuu

SEQ ID NO: 2102149 - RNA, 19 nt, Artificial Sequence
  Description of Artificial Sequence: Synthetic oligonucleotide
  Antisense strand to SEQ ID NO: 2102148
aaagugaucacucuucuaa

SEQ ID NO: 2102150 - RNA, 19 nt, Artificial Sequence
  Description of Artificial Sequence: Synthetic oligonucleotide
  Sense strand starting at position 3256 of SEQ ID NO: 1882193
gagugaucacuuuggguaa

SEQ ID NO: 2102151 - RNA, 19 nt, Artificial Sequence
  Description of Artificial Sequence: Synthetic oligonucleotide
  Antisense strand to SEQ ID NO: 2102150
uuacccaaagugaucacuc

SEQ ID NO: 2102152 - RNA, 19 nt, Artificial Sequence
  Description of Artificial Sequence: Synthetic oligonucleotide
  Sense strand starting at position 3292 of SEQ ID NO: 1882193
aaugcugugugacuauagu

SEQ ID NO: 2102153 - RNA, 19 nt, Artificial Sequence
  Description of Artificial Sequence: Synthetic oligonucleotide
  Antisense strand to SEQ ID NO: 2102152
acuauagucacacagcauu

SEQ ID NO: 2102154 - RNA, 19 nt, Artificial Sequence
  Description of Artificial Sequence: Synthetic oligonucleotide
  Sense strand starting at position 3374 of SEQ ID NO: 1882193
ccagacuugagcugagcaa

SEQ ID NO: 2102155 - RNA, 19 nt, Artificial Sequence
  Description of Artificial Sequence: Synthetic oligonucleotide
  Antisense strand to SEQ ID NO: 2102154
uugcucagcucaagucugg

SEQ ID NO: 2102156 - RNA, 19 nt, Artificial Sequence
  Description of Artificial Sequence: Synthetic oligonucleotide
  Sense strand starting at position 3375 of SEQ ID NO: 1882193
cagacuugagcugagcaau

SEQ ID NO: 2102157 - RNA, 19 nt, Artificial Sequence
  Description of Artificial Sequence: Synthetic oligonucleotide
  Antisense strand to SEQ ID NO: 2102156
auugcucagcucaagucug

SEQ ID NO: 2102158 - RNA, 19 nt, Artificial Sequence
  Description of Artificial Sequence: Synthetic oligonucleotide
  Sense strand starting at position 3381 of SEQ ID NO: 1882193
ugagcugagcaauggaaua

SEQ ID NO: 2102159 - RNA, 19 nt, Artificial Sequence
  Description of Artificial Sequence: Synthetic oligonucleotide
  Antisense strand to SEQ ID NO: 2102158
uauuccauugcucagcuca

SEQ ID NO: 2102160 - RNA, 19 nt, Artificial Sequence
  Description of Artificial Sequence: Synthetic oligonucleotide
  Sense strand starting at position 3418 of SEQ ID NO: 1882193
gugauuguuggaugggaaa

SEQ ID NO: 2102161 - RNA, 19 nt, Artificial Sequence
  Description of Artificial Sequence: Synthetic oligonucleotide
  Antisense strand to SEQ ID NO: 2102160
uuucccauccaacaaucac

SEQ ID NO: 2102162 - RNA, 19 nt, Artificial Sequence
  Description of Artificial Sequence: Synthetic oligonucleotide
  Sense strand starting at position 3478 of SEQ ID NO: 1882193
uggagacuauuccucugau

SEQ ID NO: 2102163 - RNA, 19 nt, Artificial Sequence
  Description of Artificial Sequence: Synthetic oligonucleotide
  Antisense strand to SEQ ID NO: 2102162
aucagaggaauagucucca

SEQ ID NO: 2102164 - RNA, 19 nt, Artificial Sequence
  Description of Artificial Sequence: Synthetic oligonucleotide
  Sense strand starting at position 3479 of SEQ ID NO: 1882193
ggagacuauuccucugauu

SEQ ID NO: 2102165 - RNA, 19 nt, Artificial Sequence
  Description of Artificial Sequence: Synthetic oligonucleotide
  Antisense strand to SEQ ID NO: 2102164
aaucagaggaauagucucc

SEQ ID NO: 2102166 - RNA, 19 nt, Artificial Sequence
  Description of Artificial Sequence: Synthetic oligonucleotide
  Sense strand starting at position 3534 of SEQ ID NO: 1882193
ggguagugagucuagugua

SEQ ID NO: 2102167 - RNA, 19 nt, Artificial Sequence
  Description of Artificial Sequence: Synthetic oligonucleotide
  Antisense strand to SEQ ID NO: 2102166
uacacuagacucacuaccc

SEQ ID NO: 2102168 - RNA, 19 nt, Artificial Sequence
  Description of Artificial Sequence: Synthetic oligonucleotide
  Sense strand starting at position 3672 of SEQ ID NO: 1882193
acaggaauuugaugacaag

SEQ ID NO: 2102169 - RNA, 19 nt, Artificial Sequence
  Description of Artificial Sequence: Synthetic oligonucleotide
  Antisense strand to SEQ ID NO: 2102168
cuugucaucaaauuccugu

SEQ ID NO: 2102170 - RNA, 19 nt, Artificial Sequence
  Description of Artificial Sequence: Synthetic oligonucleotide
  Sense strand starting at position 3683 of SEQ ID NO: 1882193
augacaagauugguuuguu

SEQ ID NO: 2102171 - RNA, 19 nt, Artificial Sequence
  Description of Artificial Sequence: Synthetic oligonucleotide
  Antisense strand to SEQ ID NO: 2102170
aacaaaccaaucuugucau

SEQ ID NO: 2102172 - RNA, 19 nt, Artificial Sequence
  Description of Artificial Sequence: Synthetic oligonucleotide
  Sense strand starting at position 3684 of SEQ ID NO: 1882193
ugacaagauugguuuguuc

SEQ ID NO: 2102173 - RNA, 19 nt, Artificial Sequence
  Description of Artificial Sequence: Synthetic oligonucleotide
  Antisense strand to SEQ ID NO: 2102172
gaacaaaccaaucuuguca

SEQ ID NO: 2102174 - RNA, 19 nt, Artificial Sequence
  Description of Artificial Sequence: Synthetic oligonucleotide
  Sense strand starting at position 3686 of SEQ ID NO: 1882193
acaagauugguuuguucuu

SEQ ID NO: 2102175 - RNA, 19 nt, Artificial Sequence
  Description of Artificial Sequence: Synthetic oligonucleotide
  Antisense strand to SEQ ID NO: 2102174
aagaacaaaccaaucuugu

SEQ ID NO: 2102176 - RNA, 19 nt, Artificial Sequence
  Description of Artificial Sequence: Synthetic oligonucleotide
  Sense strand starting at position 3687 of SEQ ID NO: 1882193
caagauugguuuguucuuu

SEQ ID NO: 2102177 - RNA, 19 nt, Artificial Sequence
  Description of Artificial Sequence: Synthetic oligonucleotide
  Antisense strand to SEQ ID NO: 2102176
aaagaacaaaccaaucuug

SEQ ID NO: 2102178 - RNA, 19 nt, Artificial Sequence
  Description of Artificial Sequence: Synthetic oligonucleotide
  Sense strand starting at position 3793 of SEQ ID NO: 1882193
ggguucaagugguucuuau

SEQ ID NO: 2102179 - RNA, 19 nt, Artificial Sequence
  Description of Artificial Sequence: Synthetic oligonucleotide
  Antisense strand to SEQ ID NO: 2102178
auaagaaccacuugaaccc

SEQ ID NO: 2102180 - RNA, 19 nt, Artificial Sequence
  Description of Artificial Sequence: Synthetic oligonucleotide
  Sense strand starting at position 50 of SEQ ID NO: 1882194
caggguugcuacuuacuga

SEQ ID NO: 2102181 - RNA, 19 nt, Artificial Sequence
  Description of Artificial Sequence: Synthetic oligonucleotide
  Antisense strand to SEQ ID NO: 2102180
ucaguaaguagcaacccug

SEQ ID NO: 2102182 - RNA, 19 nt, Artificial Sequence
  Description of Artificial Sequence: Synthetic oligonucleotide
  Sense strand starting at position 51 of SEQ ID NO: 1882194
aggguugcuacuuacugaa

SEQ ID NO: 2102183 - RNA, 19 nt, Artificial Sequence
  Description of Artificial Sequence: Synthetic oligonucleotide
  Antisense strand to SEQ ID NO: 2102182
uucaguaaguagcaacccu

SEQ ID NO: 2102184 - RNA, 19 nt, Artificial Sequence
  Description of Artificial Sequence: Synthetic oligonucleotide
  Sense strand starting at position 89 of SEQ ID NO: 1882194
ggaacugugcuagacuuua

SEQ ID NO: 2102185 - RNA, 19 nt, Artificial Sequence
  Description of Artificial Sequence: Synthetic oligonucleotide
  Antisense strand to SEQ ID NO: 2102184
uaaagucuagcacaguucc

SEQ ID NO: 2102186 - RNA, 19 nt, Artificial Sequence
  Description of Artificial Sequence: Synthetic oligonucleotide
  Sense strand starting at position 94 of SEQ ID NO: 1882194
ugugcuagacuuuacagaa

SEQ ID NO: 2102187 - RNA, 19 nt, Artificial Sequence
  Description of Artificial Sequence: Synthetic oligonucleotide
  Antisense strand to SEQ ID NO: 2102186
uucuguaaagucuagcaca

SEQ ID NO: 2102188 - RNA, 19 nt, Artificial Sequence
  Description of Artificial Sequence: Synthetic oligonucleotide
  Sense strand starting at position 149 of SEQ ID NO: 1882194
gcauuauuaucaucccagu

SEQ ID NO: 2102189 - RNA, 19 nt, Artificial Sequence
  Description of Artificial Sequence: Synthetic oligonucleotide
  Antisense strand to SEQ ID NO: 2102188
acugggaugauaauaaugc

SEQ ID NO: 2102190 - RNA, 19 nt, Artificial Sequence
  Description of Artificial Sequence: Synthetic oligonucleotide
  Sense strand starting at position 267 of SEQ ID NO: 1882194
cacugaagucaggauguuu

SEQ ID NO: 2102191 - RNA, 19 nt, Artificial Sequence
  Description of Artificial Sequence: Synthetic oligonucleotide
  Antisense strand to SEQ ID NO: 2102190
aaacauccugacuucagug

SEQ ID NO: 2102192 - RNA, 19 nt, Artificial Sequence
  Description of Artificial Sequence: Synthetic oligonucleotide
  Sense strand starting at position 332 of SEQ ID NO: 1882194
gugagaaugacuuggaagu

SEQ ID NO: 2102193 - RNA, 19 nt, Artificial Sequence
  Description of Artificial Sequence: Synthetic oligonucleotide
  Antisense strand to SEQ ID NO: 2102192
acuuccaagucauucucac

SEQ ID NO: 2102194 - RNA, 19 nt, Artificial Sequence
  Description of Artificial Sequence: Synthetic oligonucleotide
  Sense strand starting at position 357 of SEQ ID NO: 1882194
agucccagugaggguuaaa

SEQ ID NO: 2102195 - RNA, 19 nt, Artificial Sequence
  Description of Artificial Sequence: Synthetic oligonucleotide
  Antisense strand to SEQ ID NO: 2102194
uuuaacccucacugggacu

SEQ ID NO: 2102196 - RNA, 19 nt, Artificial Sequence
  Description of Artificial Sequence: Synthetic oligonucleotide
  Sense strand starting at position 408 of SEQ ID NO: 1882194
auuuauaagugucacagga

SEQ ID NO: 2102197 - RNA, 19 nt, Artificial Sequence
  Description of Artificial Sequence: Synthetic oligonucleotide
  Antisense strand to SEQ ID NO: 2102196
uccugugacacuuauaaau

SEQ ID NO: 2102198 - RNA, 19 nt, Artificial Sequence
  Description of Artificial Sequence: Synthetic oligonucleotide
  Sense strand starting at position 506 of SEQ ID NO: 1882194
gaggauuucuuugagggag

SEQ ID NO: 2102199 - RNA, 19 nt, Artificial Sequence
  Description of Artificial Sequence: Synthetic oligonucleotide
  Antisense strand to SEQ ID NO: 2102198
cucccucaaagaaauccuc

SEQ ID NO: 2102200 - RNA, 19 nt, Artificial Sequence
  Description of Artificial Sequence: Synthetic oligonucleotide
  Sense strand starting at position 1411 of SEQ ID NO: 1882194
aauguaauagcaggaguca

SEQ ID NO: 2102201 - RNA, 19 nt, Artificial Sequence
  Description of Artificial Sequence: Synthetic oligonucleotide
  Antisense strand to SEQ ID NO: 2102200
ugacuccugcuauuacauu

SEQ ID NO: 2102202 - RNA, 19 nt, Artificial Sequence
  Description of Artificial Sequence: Synthetic oligonucleotide
  Sense strand starting at position 1661 of SEQ ID NO: 1882194
ccgcuucucagcuugcaga

SEQ ID NO: 2102203 - RNA, 19 nt, Artificial Sequence
  Description of Artificial Sequence: Synthetic oligonucleotide
  Antisense strand to SEQ ID NO: 2102202
ucugcaagcugagaagcgg

SEQ ID NO: 2102204 - RNA, 19 nt, Artificial Sequence
  Description of Artificial Sequence: Synthetic oligonucleotide
  Sense strand starting at position 1704 of SEQ ID NO: 1882194
cuggccauuucuguuguua

SEQ ID NO: 2102205 - RNA, 19 nt, Artificial Sequence
  Description of Artificial Sequence: Synthetic oligonucleotide
  Antisense strand to SEQ ID NO: 2102204
uaacaacagaaauggccag

SEQ ID NO: 2102206 - RNA, 19 nt, Artificial Sequence
  Description of Artificial Sequence: Synthetic oligonucleotide
  Sense strand starting at position 2127 of SEQ ID NO: 1882194
uaaggaugucaucaugcaa

SEQ ID NO: 2102207 - RNA, 19 nt, Artificial Sequence
  Description of Artificial Sequence: Synthetic oligonucleotide
  Antisense strand to SEQ ID NO: 2102206
uugcaugaugacauccuua

SEQ ID NO: 2102208 - RNA, 19 nt, Artificial Sequence
  Description of Artificial Sequence: Synthetic oligonucleotide
  Sense strand starting at position 2160 of SEQ ID NO: 1882194
agagcauucugggcuuaau

SEQ ID NO: 2102209 - RNA, 19 nt, Artificial Sequence
  Description of Artificial Sequence: Synthetic oligonucleotide
  Antisense strand to SEQ ID NO: 2102208
auuaagcccagaaugcucu

SEQ ID NO: 2102210 - RNA, 19 nt, Artificial Sequence
  Description of Artificial Sequence: Synthetic oligonucleotide
  Sense strand starting at position 2163 of SEQ ID NO: 1882194
gcauucugggcuuaauucu

SEQ ID NO: 2102211 - RNA, 19 nt, Artificial Sequence
  Description of Artificial Sequence: Synthetic oligonucleotide
  Antisense strand to SEQ ID NO: 2102210
agaauuaagcccagaaugc

SEQ ID NO: 2102212 - RNA, 19 nt, Artificial Sequence
  Description of Artificial Sequence: Synthetic oligonucleotide
  Sense strand starting at position 2924 of SEQ ID NO: 1882194
agaucauuauuggagauua

SEQ ID NO: 2102213 - RNA, 19 nt, Artificial Sequence
  Description of Artificial Sequence: Synthetic oligonucleotide
  Antisense strand to SEQ ID NO: 2102212
uaaucuccaauaaugaucu

SEQ ID NO: 2102214 - RNA, 19 nt, Artificial Sequence
  Description of Artificial Sequence: Synthetic oligonucleotide
  Sense strand starting at position 2934 of SEQ ID NO: 1882194
uggagauuaucugugacuu

SEQ ID NO: 2102215 - RNA, 19 nt, Artificial Sequence
  Description of Artificial Sequence: Synthetic oligonucleotide
  Antisense strand to SEQ ID NO: 2102214
aagucacagauaaucucca

SEQ ID NO: 2102216 - RNA, 19 nt, Artificial Sequence
  Description of Artificial Sequence: Synthetic oligonucleotide
  Sense strand starting at position 2935 of SEQ ID NO: 1882194
ggagauuaucugugacuuu

SEQ ID NO: 2102217 - RNA, 19 nt, Artificial Sequence
  Description of Artificial Sequence: Synthetic oligonucleotide
  Antisense strand to SEQ ID NO: 2102216
aaagucacagauaaucucc

SEQ ID NO: 2102218 - RNA, 19 nt, Artificial Sequence
  Description of Artificial Sequence: Synthetic oligonucleotide
  Sense strand starting at position 3047 of SEQ ID NO: 1882194
gcuccugagccuuaaacca

SEQ ID NO: 2102219 - RNA, 19 nt, Artificial Sequence
  Description of Artificial Sequence: Synthetic oligonucleotide
  Antisense strand to SEQ ID NO: 2102218
ugguuuaaggcucaggagc

SEQ ID NO: 2102220 - RNA, 19 nt, Artificial Sequence
  Description of Artificial Sequence: Synthetic oligonucleotide
  Sense strand starting at position 3186 of SEQ ID NO: 1882194
ccucaucucuugcugaaga

SEQ ID NO: 2102221 - RNA, 19 nt, Artificial Sequence
  Description of Artificial Sequence: Synthetic oligonucleotide
  Antisense strand to SEQ ID NO: 2102220
ucuucagcaagagaugagg

SEQ ID NO: 2102222 - RNA, 19 nt, Artificial Sequence
  Description of Artificial Sequence: Synthetic oligonucleotide
  Sense strand starting at position 3188 of SEQ ID NO: 1882194
ucaucucuugcugaagaua

SEQ ID NO: 2102223 - RNA, 19 nt, Artificial Sequence
  Description of Artificial Sequence: Synthetic oligonucleotide
  Antisense strand to SEQ ID NO: 2102222
uaucuucagcaagagauga

SEQ ID NO: 2102224 - RNA, 19 nt, Artificial Sequence
  Description of Artificial Sequence: Synthetic oligonucleotide
  Sense strand starting at position 3191 of SEQ ID NO: 1882194
ucucuugcugaagauauua

SEQ ID NO: 2102225 - RNA, 19 nt, Artificial Sequence
  Description of Artificial Sequence: Synthetic oligonucleotide
  Antisense strand to SEQ ID NO: 2102224
uaauaucuucagcaagaga

SEQ ID NO: 2102226 - RNA, 19 nt, Artificial Sequence
  Description of Artificial Sequence: Synthetic oligonucleotide
  Sense strand starting at position 3653 of SEQ ID NO: 1882194
accaauaguugagaaauaa

SEQ ID NO: 2102227 - RNA, 19 nt, Artificial Sequence
  Description of Artificial Sequence: Synthetic oligonucleotide
  Antisense strand to SEQ ID NO: 2102226
uuauuucucaacuauuggu

SEQ ID NO: 2102228 - RNA, 19 nt, Artificial Sequence
  Description of Artificial Sequence: Synthetic oligonucleotide
  Sense strand starting at position 3662 of SEQ ID NO: 1882194
ugagaaauaagcugguuau

SEQ ID NO: 2102229 - RNA, 19 nt, Artificial Sequence
  Description of Artificial Sequence: Synthetic oligonucleotide
  Antisense strand to SEQ ID NO: 2102228
auaaccagcuuauuucuca

SEQ ID NO: 2102230 - RNA, 19 nt, Artificial Sequence
  Description of Artificial Sequence: Synthetic oligonucleotide
  Sense strand starting at position 3672 of SEQ ID NO: 1882194
gcugguuauuuggucauca

SEQ ID NO: 2102231 - RNA, 19 nt, Artificial Sequence
  Description of Artificial Sequence: Synthetic oligonucleotide
  Antisense strand to SEQ ID NO: 2102230
ugaugaccaaauaaccagc

SEQ ID NO: 2102232 - RNA, 19 nt, Artificial Sequence
  Description of Artificial Sequence: Synthetic oligonucleotide
  Sense strand starting at position 3725 of SEQ ID NO: 1882194
ggcugucauuugucccuuu

SEQ ID NO: 2102233 - RNA, 19 nt, Artificial Sequence
  Description of Artificial Sequence: Synthetic oligonucleotide
  Antisense strand to SEQ ID NO: 2102232
aaagggacaaaugacagcc

SEQ ID NO: 2102234 - RNA, 19 nt, Artificial Sequence
  Description of Artificial Sequence: Synthetic oligonucleotide
  Sense strand starting at position 3726 of SEQ ID NO: 1882194
gcugucauuugucccuuua

SEQ ID NO: 2102235 - RNA, 19 nt, Artificial Sequence
  Description of Artificial Sequence: Synthetic oligonucleotide
  Antisense strand to SEQ ID NO: 2102234
uaaagggacaaaugacagc

SEQ ID NO: 2102236 - RNA, 19 nt, Artificial Sequence
  Description of Artificial Sequence: Synthetic oligonucleotide
  Sense strand starting at position 3728 of SEQ ID NO: 1882194
ugucauuugucccuuuaca

SEQ ID NO: 2102237 - RNA, 19 nt, Artificial Sequence
  Description of Artificial Sequence: Synthetic oligonucleotide
  Antisense strand to SEQ ID NO: 2102236
uguaaagggacaaaugaca

SEQ ID NO: 2102238 - RNA, 19 nt, Artificial Sequence
  Description of Artificial Sequence: Synthetic oligonucleotide
  Sense strand starting at position 3750 of SEQ ID NO: 1882194
cugagcuaccauugucuga

SEQ ID NO: 2102239 - RNA, 19 nt, Artificial Sequence
  Description of Artificial Sequence: Synthetic oligonucleotide
  Antisense strand to SEQ ID NO: 2102238
ucagacaaugguagcucag

SEQ ID NO: 2102240 - RNA, 19 nt, Artificial Sequence
  Description of Artificial Sequence: Synthetic oligonucleotide
  Sense strand starting at position 3752 of SEQ ID NO: 1882194
gagcuaccauugucugaag

SEQ ID NO: 2102241 - RNA, 19 nt, Artificial Sequence
  Description of Artificial Sequence: Synthetic oligonucleotide
  Antisense strand to SEQ ID NO: 2102240
cuucagacaaugguagcuc

SEQ ID NO: 2102242 - RNA, 19 nt, Artificial Sequence
  Description of Artificial Sequence: Synthetic oligonucleotide
  Sense strand starting at position 3754 of SEQ ID NO: 1882194
gcuaccauugucugaagaa

SEQ ID NO: 2102243 - RNA, 19 nt, Artificial Sequence
  Description of Artificial Sequence: Synthetic oligonucleotide
  Antisense strand to SEQ ID NO: 2102242
uucuucagacaaugguagc

SEQ ID NO: 2102244 - RNA, 19 nt, Artificial Sequence
  Description of Artificial Sequence: Synthetic oligonucleotide
  Sense strand starting at position 3815 of SEQ ID NO: 1882194
cuguuuagauuaguagcua

SEQ ID NO: 2102245 - RNA, 19 nt, Artificial Sequence
  Description of Artificial Sequence: Synthetic oligonucleotide
  Antisense strand to SEQ ID NO: 2102244
uagcuacuaaucuaaacag

SEQ ID NO: 2102246 - RNA, 19 nt, Artificial Sequence
  Description of Artificial Sequence: Synthetic oligonucleotide
  Sense strand starting at position 3819 of SEQ ID NO: 1882194
uuagauuaguagcuacuuu

SEQ ID NO: 2102247 - RNA, 19 nt, Artificial Sequence
  Description of Artificial Sequence: Synthetic oligonucleotide
  Antisense strand to SEQ ID NO: 2102246
aaaguagcuacuaaucuaa

SEQ ID NO: 2102248 - RNA, 19 nt, Artificial Sequence
  Description of Artificial Sequence: Synthetic oligonucleotide
  Sense strand starting at position 3830 of SEQ ID NO: 1882194
gcuacuuuguuucuugaca

SEQ ID NO: 2102249 - RNA, 19 nt, Artificial Sequence
  Description of Artificial Sequence: Synthetic oligonucleotide
  Antisense strand to SEQ ID NO: 2102248
ugucaagaaacaaaguagc

SEQ ID NO: 2102250 - RNA, 19 nt, Artificial Sequence
  Description of Artificial Sequence: Synthetic oligonucleotide
  Sense strand starting at position 3849 of SEQ ID NO: 1882194
gauuguuugcucguagcca

SEQ ID NO: 2102251 - RNA, 19 nt, Artificial Sequence
  Description of Artificial Sequence: Synthetic oligonucleotide
  Antisense strand to SEQ ID NO: 2102250
uggcuacgagcaaacaauc

SEQ ID NO: 2102252 - RNA, 19 nt, Artificial Sequence
  Description of Artificial Sequence: Synthetic oligonucleotide
  Sense strand starting at position 3880 of SEQ ID NO: 1882194
gaagguaggcucuggaguu

SEQ ID NO: 2102253 - RNA, 19 nt, Artificial Sequence
  Description of Artificial Sequence: Synthetic oligonucleotide
  Antisense strand to SEQ ID NO: 2102252
aacuccagagccuaccuuc

SEQ ID NO: 2102254 - RNA, 19 nt, Artificial Sequence
  Description of Artificial Sequence: Synthetic oligonucleotide
  Sense strand starting at position 3893 of SEQ ID NO: 1882194
ggaguuagauugccuggau

SEQ ID NO: 2102255 - RNA, 19 nt, Artificial Sequence
  Description of Artificial Sequence: Synthetic oligonucleotide
  Antisense strand to SEQ ID NO: 2102254
auccaggcaaucuaacucc

SEQ ID NO: 2102256 - RNA, 19 nt, Artificial Sequence
  Description of Artificial Sequence: Synthetic oligonucleotide
  Sense strand starting at position 3894 of SEQ ID NO: 1882194
gaguuagauugccuggauu

SEQ ID NO: 2102257 - RNA, 19 nt, Artificial Sequence
  Description of Artificial Sequence: Synthetic oligonucleotide
  Antisense strand to SEQ ID NO: 2102256
aauccaggcaaucuaacuc

SEQ ID NO: 2102258 - RNA, 19 nt, Artificial Sequence
  Description of Artificial Sequence: Synthetic oligonucleotide
  Sense strand starting at position 3954 of SEQ ID NO: 1882194
cguauucuuggacagguua

SEQ ID NO: 2102259 - RNA, 19 nt, Artificial Sequence
  Description of Artificial Sequence: Synthetic oligonucleotide
  Antisense strand to SEQ ID NO: 2102258
uaaccuguccaagaauacg

SEQ ID NO: 2102260 - RNA, 19 nt, Artificial Sequence
  Description of Artificial Sequence: Synthetic oligonucleotide
  Sense strand starting at position 153 of SEQ ID NO: 1882195
uugaauaacuggucuguga

SEQ ID NO: 2102261 - RNA, 19 nt, Artificial Sequence
  Description of Artificial Sequence: Synthetic oligonucleotide
  Antisense strand to SEQ ID NO: 2102260
ucacagaccaguuauucaa

SEQ ID NO: 2102262 - RNA, 19 nt, Artificial Sequence
  Description of Artificial Sequence: Synthetic oligonucleotide
  Sense strand starting at position 155 of SEQ ID NO: 1882195
gaauaacuggucugugauc

SEQ ID NO: 2102263 - RNA, 19 nt, Artificial Sequence
  Description of Artificial Sequence: Synthetic oligonucleotide
  Antisense strand to SEQ ID NO: 2102262
gaucacagaccaguuauuc

SEQ ID NO: 2102264 - RNA, 19 nt, Artificial Sequence
  Description of Artificial Sequence: Synthetic oligonucleotide
  Sense strand starting at position 157 of SEQ ID NO: 1882195
auaacuggucugugaucca

SEQ ID NO: 2102265 - RNA, 19 nt, Artificial Sequence
  Description of Artificial Sequence: Synthetic oligonucleotide
  Antisense strand to SEQ ID NO: 2102264
uggaucacagaccaguuau

SEQ ID NO: 2102266 - RNA, 19 nt, Artificial Sequence
  Description of Artificial Sequence: Synthetic oligonucleotide
  Sense strand starting at position 225 of SEQ ID NO: 1882195
aggguuaauccaugcuaaa

SEQ ID NO: 2102267 - RNA, 19 nt, Artificial Sequence
  Description of Artificial Sequence: Synthetic oligonucleotide
  Antisense strand to SEQ ID NO: 2102266
uuuagcauggauuaacccu

SEQ ID NO: 2102268 - RNA, 19 nt, Artificial Sequence
  Description of Artificial Sequence: Synthetic oligonucleotide
  Sense strand starting at position 306 of SEQ ID NO: 1882195
caguuuagacuauggacua

SEQ ID NO: 2102269 - RNA, 19 nt, Artificial Sequence
  Description of Artificial Sequence: Synthetic oligonucleotide
  Antisense strand to SEQ ID NO: 2102268
uaguccauagucuaaacug

SEQ ID NO: 2102270 - RNA, 19 nt, Artificial Sequence
  Description of Artificial Sequence: Synthetic oligonucleotide
  Sense strand starting at position 347 of SEQ ID NO: 1882195
aguggauguguacacugau

SEQ ID NO: 2102271 - RNA, 19 nt, Artificial Sequence
  Description of Artificial Sequence: Synthetic oligonucleotide
  Antisense strand to SEQ ID NO: 2102270
aucaguguacacauccacu

SEQ ID NO: 2102272 - RNA, 19 nt, Artificial Sequence
  Description of Artificial Sequence: Synthetic oligonucleotide
  Sense strand starting at position 350 of SEQ ID NO: 1882195
ggauguguacacugauaca

SEQ ID NO: 2102273 - RNA, 19 nt, Artificial Sequence
  Description of Artificial Sequence: Synthetic oligonucleotide
  Antisense strand to SEQ ID NO: 2102272
uguaucaguguacacaucc

SEQ ID NO: 2102274 - RNA, 19 nt, Artificial Sequence
  Description of Artificial Sequence: Synthetic oligonucleotide
  Sense strand starting at position 410 of SEQ ID NO: 1882195
agacauguauaccuagcau

SEQ ID NO: 2102275 - RNA, 19 nt, Artificial Sequence
  Description of Artificial Sequence: Synthetic oligonucleotide
  Antisense strand to SEQ ID NO: 2102274
augcuagguauacaugucu

SEQ ID NO: 2102276 - RNA, 19 nt, Artificial Sequence
  Description of Artificial Sequence: Synthetic oligonucleotide
  Sense strand starting at position 437 of SEQ ID NO: 1882195
cuagguauguacccuggaa

SEQ ID NO: 2102277 - RNA, 19 nt, Artificial Sequence
  Description of Artificial Sequence: Synthetic oligonucleotide
  Antisense strand to SEQ ID NO: 2102276
uuccaggguacauaccuag

SEQ ID NO: 2102278 - RNA, 19 nt, Artificial Sequence
  Description of Artificial Sequence: Synthetic oligonucleotide
  Sense strand starting at position 498 of SEQ ID NO: 1882195
acagcauagguguaauauc

SEQ ID NO: 2102279 - RNA, 19 nt, Artificial Sequence
  Description of Artificial Sequence: Synthetic oligonucleotide
  Antisense strand to SEQ ID NO: 2102278
gauauuacaccuaugcugu

SEQ ID NO: 2102280 - RNA, 19 nt, Artificial Sequence
  Description of Artificial Sequence: Synthetic oligonucleotide
  Sense strand starting at position 788 of SEQ ID NO: 1882195
gauaguggcuaccuugaga

SEQ ID NO: 2102281 - RNA, 19 nt, Artificial Sequence
  Description of Artificial Sequence: Synthetic oligonucleotide
  Antisense strand to SEQ ID NO: 2102280
ucucaagguagccacuauc

SEQ ID NO: 2102282 - RNA, 19 nt, Artificial Sequence
  Description of Artificial Sequence: Synthetic oligonucleotide
  Sense strand starting at position 823 of SEQ ID NO: 1882195
gugcaauuagagcaagaca

SEQ ID NO: 2102283 - RNA, 19 nt, Artificial Sequence
  Description of Artificial Sequence: Synthetic oligonucleotide
  Antisense strand to SEQ ID NO: 2102282
ugucuugcucuaauugcac

SEQ ID NO: 2102284 - RNA, 19 nt, Artificial Sequence
  Description of Artificial Sequence: Synthetic oligonucleotide
  Sense strand starting at position 1307 of SEQ ID NO: 1882195
gugagaaucuagguuguaa

SEQ ID NO: 2102285 - RNA, 19 nt, Artificial Sequence
  Description of Artificial Sequence: Synthetic oligonucleotide
  Antisense strand to SEQ ID NO: 2102284
uuacaaccuagauucucac

SEQ ID NO: 2102286 - RNA, 19 nt, Artificial Sequence
  Description of Artificial Sequence: Synthetic oligonucleotide
  Sense strand starting at position 1391 of SEQ ID NO: 1882195
gcuauagagcgccuucgua

SEQ ID NO: 2102287 - RNA, 19 nt, Artificial Sequence
  Description of Artificial Sequence: Synthetic oligonucleotide
  Antisense strand to SEQ ID NO: 2102286
uacgaaggcgcucuauagc

SEQ ID NO: 2102288 - RNA, 19 nt, Artificial Sequence
  Description of Artificial Sequence: Synthetic oligonucleotide
  Sense strand starting at position 1843 of SEQ ID NO: 1882195
cuccguacccuugauaaug

SEQ ID NO: 2102289 - RNA, 19 nt, Artificial Sequence
  Description of Artificial Sequence: Synthetic oligonucleotide
  Antisense strand to SEQ ID NO: 2102288
cauuaucaaggguacggag

SEQ ID NO: 2102290 - RNA, 19 nt, Artificial Sequence
  Description of Artificial Sequence: Synthetic oligonucleotide
  Sense strand starting at position 2116 of SEQ ID NO: 1882195
ccguguagucaggcuguga

SEQ ID NO: 2102291 - RNA, 19 nt, Artificial Sequence
  Description of Artificial Sequence: Synthetic oligonucleotide
  Antisense strand to SEQ ID NO: 2102290
ucacagccugacuacacgg

SEQ ID NO: 2102292 - RNA, 19 nt, Artificial Sequence
  Description of Artificial Sequence: Synthetic oligonucleotide
  Sense strand starting at position 2117 of SEQ ID NO: 1882195
cguguagucaggcugugaa

SEQ ID NO: 2102293 - RNA, 19 nt, Artificial Sequence
  Description of Artificial Sequence: Synthetic oligonucleotide
  Antisense strand to SEQ ID NO: 2102292
uucacagccugacuacacg

SEQ ID NO: 2102294 - RNA, 19 nt, Artificial Sequence
  Description of Artificial Sequence: Synthetic oligonucleotide
  Sense strand starting at position 2186 of SEQ ID NO: 1882195
uaggaaggugcuugaacuu

SEQ ID NO: 2102295 - RNA, 19 nt, Artificial Sequence
  Description of Artificial Sequence: Synthetic oligonucleotide
  Antisense strand to SEQ ID NO: 2102294
aaguucaagcaccuuccua

SEQ ID NO: 2102296 - RNA, 19 nt, Artificial Sequence
  Description of Artificial Sequence: Synthetic oligonucleotide
  Sense strand starting at position 2269 of SEQ ID NO: 1882195
cccauaucugcugagaaua

SEQ ID NO: 2102297 - RNA, 19 nt, Artificial Sequence
  Description of Artificial Sequence: Synthetic oligonucleotide
  Antisense strand to SEQ ID NO: 2102296
uauucucagcagauauggg

SEQ ID NO: 2102298 - RNA, 19 nt, Artificial Sequence
  Description of Artificial Sequence: Synthetic oligonucleotide
  Sense strand starting at position 2572 of SEQ ID NO: 1882195
augaguguggcugacuauu

SEQ ID NO: 2102299 - RNA, 19 nt, Artificial Sequence
  Description of Artificial Sequence: Synthetic oligonucleotide
  Antisense strand to SEQ ID NO: 2102298
aauagucagccacacucau

SEQ ID NO: 2102300 - RNA, 19 nt, Artificial Sequence
  Description of Artificial Sequence: Synthetic oligonucleotide
  Sense strand starting at position 2606 of SEQ ID NO: 1882195
agacaccuguuuccuagaa

SEQ ID NO: 2102301 - RNA, 19 nt, Artificial Sequence
  Description of Artificial Sequence: Synthetic oligonucleotide
  Antisense strand to SEQ ID NO: 2102300
uucuaggaaacaggugucu

SEQ ID NO: 2102302 - RNA, 19 nt, Artificial Sequence
  Description of Artificial Sequence: Synthetic oligonucleotide
  Sense strand starting at position 2610 of SEQ ID NO: 1882195
accuguuuccuagaaugcu

SEQ ID NO: 2102303 - RNA, 19 nt, Artificial Sequence
  Description of Artificial Sequence: Synthetic oligonucleotide
  Antisense strand to SEQ ID NO: 2102302
agcauucuaggaaacaggu

SEQ ID NO: 2102304 - RNA, 19 nt, Artificial Sequence
  Description of Artificial Sequence: Synthetic oligonucleotide
  Sense strand starting at position 2662 of SEQ ID NO: 1882195
acucacguuguauaauaaa

SEQ ID NO: 2102305 - RNA, 19 nt, Artificial Sequence
  Description of Artificial Sequence: Synthetic oligonucleotide
  Antisense strand to SEQ ID NO: 2102304
uuuauuauacaacgugagu

SEQ ID NO: 2102306 - RNA, 19 nt, Artificial Sequence
  Description of Artificial Sequence: Synthetic oligonucleotide
  Sense strand starting at position 2951 of SEQ ID NO: 1882195
ccauguggccagugauuua

SEQ ID NO: 2102307 - RNA, 19 nt, Artificial Sequence
  Description of Artificial Sequence: Synthetic oligonucleotide
  Antisense strand to SEQ ID NO: 2102306
uaaaucacuggccacaugg

SEQ ID NO: 2102308 - RNA, 19 nt, Artificial Sequence
  Description of Artificial Sequence: Synthetic oligonucleotide
  Sense strand starting at position 3001 of SEQ ID NO: 1882195
gaguacucuggauguggaa

SEQ ID NO: 2102309 - RNA, 19 nt, Artificial Sequence
  Description of Artificial Sequence: Synthetic oligonucleotide
  Antisense strand to SEQ ID NO: 2102308
uuccacauccagaguacuc

SEQ ID NO: 2102310 - RNA, 19 nt, Artificial Sequence
  Description of Artificial Sequence: Synthetic oligonucleotide
  Sense strand starting at position 3031 of SEQ ID NO: 1882195
cuuacuggucgauaaucau

SEQ ID NO: 2102311 - RNA, 19 nt, Artificial Sequence
  Description of Artificial Sequence: Synthetic oligonucleotide
  Antisense strand to SEQ ID NO: 2102310
augauuaucgaccaguaag

SEQ ID NO: 2102312 - RNA, 19 nt, Artificial Sequence
  Description of Artificial Sequence: Synthetic oligonucleotide
  Sense strand starting at position 3070 of SEQ ID NO: 1882195
ggaagcguuccugaggaca

SEQ ID NO: 2102313 - RNA, 19 nt, Artificial Sequence
  Description of Artificial Sequence: Synthetic oligonucleotide
  Antisense strand to SEQ ID NO: 2102312
uguccucaggaacgcuucc

SEQ ID NO: 2102314 - RNA, 19 nt, Artificial Sequence
  Description of Artificial Sequence: Synthetic oligonucleotide
  Sense strand starting at position 3211 of SEQ ID NO: 1882195
augagucauucugugaaac

SEQ ID NO: 2102315 - RNA, 19 nt, Artificial Sequence
  Description of Artificial Sequence: Synthetic oligonucleotide
  Antisense strand to SEQ ID NO: 2102314
guuucacagaaugacucau

SEQ ID NO: 2102316 - RNA, 19 nt, Artificial Sequence
  Description of Artificial Sequence: Synthetic oligonucleotide
  Sense strand starting at position 3219 of SEQ ID NO: 1882195
uucugugaaaccugaggga

SEQ ID NO: 2102317 - RNA, 19 nt, Artificial Sequence
  Description of Artificial Sequence: Synthetic oligonucleotide
  Antisense strand to SEQ ID NO: 2102316
ucccucagguuucacagaa

SEQ ID NO: 2102318 - RNA, 19 nt, Artificial Sequence
  Description of Artificial Sequence: Synthetic oligonucleotide
  Sense strand starting at position 3223 of SEQ ID NO: 1882195
gugaaaccugagggaguaa

SEQ ID NO: 2102319 - RNA, 19 nt, Artificial Sequence
  Description of Artificial Sequence: Synthetic oligonucleotide
  Antisense strand to SEQ ID NO: 2102318
uuacucccucagguuucac

SEQ ID NO: 2102320 - RNA, 19 nt, Artificial Sequence
  Description of Artificial Sequence: Synthetic oligonucleotide
  Sense strand starting at position 3236 of SEQ ID NO: 1882195
gaguaaagcgaauagcaau

SEQ ID NO: 2102321 - RNA, 19 nt, Artificial Sequence
  Description of Artificial Sequence: Synthetic oligonucleotide
  Antisense strand to SEQ ID NO: 2102320
auugcuauucgcuuuacuc

SEQ ID NO: 2102322 - RNA, 19 nt, Artificial Sequence
  Description of Artificial Sequence: Synthetic oligonucleotide
  Sense strand starting at position 3242 of SEQ ID NO: 1882195
agcgaauagcaaugaaaca

SEQ ID NO: 2102323 - RNA, 19 nt, Artificial Sequence
  Description of Artificial Sequence: Synthetic oligonucleotide
  Antisense strand to SEQ ID NO: 2102322
uguuucauugcuauucgcu

SEQ ID NO: 2102324 - RNA, 19 nt, Artificial Sequence
  Description of Artificial Sequence: Synthetic oligonucleotide
  Sense strand starting at position 3254 of SEQ ID NO: 1882195
ugaaacaucauguguagag

SEQ ID NO: 2102325 - RNA, 19 nt, Artificial Sequence
  Description of Artificial Sequence: Synthetic oligonucleotide
  Antisense strand to SEQ ID NO: 2102324
cucuacacaugauguuuca

SEQ ID NO: 2102326 - RNA, 19 nt, Artificial Sequence
  Description of Artificial Sequence: Synthetic oligonucleotide
  Sense strand starting at position 3255 of SEQ ID NO: 1882195
gaaacaucauguguagaga

SEQ ID NO: 2102327 - RNA, 19 nt, Artificial Sequence
  Description of Artificial Sequence: Synthetic oligonucleotide
  Antisense strand to SEQ ID NO: 2102326
ucucuacacaugauguuuc

SEQ ID NO: 2102328 - RNA, 19 nt, Artificial Sequence
  Description of Artificial Sequence: Synthetic oligonucleotide
  Sense strand starting at position 3338 of SEQ ID NO: 1882195
gagacagcuggucagaagu

SEQ ID NO: 2102329 - RNA, 19 nt, Artificial Sequence
  Description of Artificial Sequence: Synthetic oligonucleotide
  Antisense strand to SEQ ID NO: 2102328
acuucugaccagcugucuc

SEQ ID NO: 2102330 - RNA, 19 nt, Artificial Sequence
  Description of Artificial Sequence: Synthetic oligonucleotide
  Sense strand starting at position 3509 of SEQ ID NO: 1882195
cuguaaguggucuacaaau

SEQ ID NO: 2102331 - RNA, 19 nt, Artificial Sequence
  Description of Artificial Sequence: Synthetic oligonucleotide
  Antisense strand to SEQ ID NO: 2102330
auuuguagaccacuuacag

SEQ ID NO: 2102332 - RNA, 19 nt, Artificial Sequence
  Description of Artificial Sequence: Synthetic oligonucleotide
  Sense strand starting at position 3617 of SEQ ID NO: 1882195
uuaaaugacugccugacuu

SEQ ID NO: 2102333 - RNA, 19 nt, Artificial Sequence
  Description of Artificial Sequence: Synthetic oligonucleotide
  Antisense strand to SEQ ID NO: 2102332
aagucaggcagucauuuaa

SEQ ID NO: 2102334 - RNA, 19 nt, Artificial Sequence
  Description of Artificial Sequence: Synthetic oligonucleotide
  Sense strand starting at position 3634 of SEQ ID NO: 1882195
uuguauguggcagaaacaa

SEQ ID NO: 2102335 - RNA, 19 nt, Artificial Sequence
  Description of Artificial Sequence: Synthetic oligonucleotide
  Antisense strand to SEQ ID NO: 2102334
uuguuucugccacauacaa

SEQ ID NO: 2102336 - RNA, 19 nt, Artificial Sequence
  Description of Artificial Sequence: Synthetic oligonucleotide
  Sense strand starting at position 3675 of SEQ ID NO: 1882195
guguuuaagcauagguggu

SEQ ID NO: 2102337 - RNA, 19 nt, Artificial Sequence
  Description of Artificial Sequence: Synthetic oligonucleotide
  Antisense strand to SEQ ID NO: 2102336
accaccuaugcuuaaacac

SEQ ID NO: 2102338 - RNA, 19 nt, Artificial Sequence
  Description of Artificial Sequence: Synthetic oligonucleotide
  Sense strand starting at position 3955 of SEQ ID NO: 1882195
guugcuuguagccugugaa

SEQ ID NO: 2102339 - RNA, 19 nt, Artificial Sequence
  Description of Artificial Sequence: Synthetic oligonucleotide
  Antisense strand to SEQ ID NO: 2102338
uucacaggcuacaagcaac

SEQ ID NO: 2102340 - RNA, 19 nt, Artificial Sequence
  Description of Artificial Sequence: Synthetic oligonucleotide
  Sense strand starting at position 372 of SEQ ID NO: 1882196
ugccuuucugcagacagga

SEQ ID NO: 2102341 - RNA, 19 nt, Artificial Sequence
  Description of Artificial Sequence: Synthetic oligonucleotide
  Antisense strand to SEQ ID NO: 2102340
uccugucugcagaaaggca

SEQ ID NO: 2102342 - RNA, 19 nt, Artificial Sequence
  Description of Artificial Sequence: Synthetic oligonucleotide
  Sense strand starting at position 429 of SEQ ID NO: 1882196
agcuguagccauuaacaug

SEQ ID NO: 2102343 - RNA, 19 nt, Artificial Sequence
  Description of Artificial Sequence: Synthetic oligonucleotide
  Antisense strand to SEQ ID NO: 2102342
cauguuaauggcuacagcu

SEQ ID NO: 2102344 - RNA, 19 nt, Artificial Sequence
  Description of Artificial Sequence: Synthetic oligonucleotide
  Sense strand starting at position 587 of SEQ ID NO: 1882196
aguuucuauguuggaucaa

SEQ ID NO: 2102345 - RNA, 19 nt, Artificial Sequence
  Description of Artificial Sequence: Synthetic oligonucleotide
  Antisense strand to SEQ ID NO: 2102344
uugauccaacauagaaacu

SEQ ID NO: 2102346 - RNA, 19 nt, Artificial Sequence
  Description of Artificial Sequence: Synthetic oligonucleotide
  Sense strand starting at position 699 of SEQ ID NO: 1882196
uguauacguguguuugcau

SEQ ID NO: 2102347 - RNA, 19 nt, Artificial Sequence
  Description of Artificial Sequence: Synthetic oligonucleotide
  Antisense strand to SEQ ID NO: 2102346
augcaaacacacguauaca

SEQ ID NO: 2102348 - RNA, 19 nt, Artificial Sequence
  Description of Artificial Sequence: Synthetic oligonucleotide
  Sense strand starting at position 711 of SEQ ID NO: 1882196
uuugcauguguguagggau

SEQ ID NO: 2102349 - RNA, 19 nt, Artificial Sequence
  Description of Artificial Sequence: Synthetic oligonucleotide
  Antisense strand to SEQ ID NO: 2102348
aucccuacacacaugcaaa

SEQ ID NO: 2102350 - RNA, 19 nt, Artificial Sequence
  Description of Artificial Sequence: Synthetic oligonucleotide
  Sense strand starting at position 772 of SEQ ID NO: 1882196
ccacauuucugcccaguau

SEQ ID NO: 2102351 - RNA, 19 nt, Artificial Sequence
  Description of Artificial Sequence: Synthetic oligonucleotide
  Antisense strand to SEQ ID NO: 2102350
auacugggcagaaaugugg

SEQ ID NO: 2102352 - RNA, 19 nt, Artificial Sequence
  Description of Artificial Sequence: Synthetic oligonucleotide
  Sense strand starting at position 784 of SEQ ID NO: 1882196
ccaguaucucuugggacca

SEQ ID NO: 2102353 - RNA, 19 nt, Artificial Sequence
  Description of Artificial Sequence: Synthetic oligonucleotide
  Antisense strand to SEQ ID NO: 2102352
uggucccaagagauacugg

SEQ ID NO: 2102354 - RNA, 19 nt, Artificial Sequence
  Description of Artificial Sequence: Synthetic oligonucleotide
  Sense strand starting at position 820 of SEQ ID NO: 1882196
gacagaaggucagaaauua

SEQ ID NO: 2102355 - RNA, 19 nt, Artificial Sequence
  Description of Artificial Sequence: Synthetic oligonucleotide
  Antisense strand to SEQ ID NO: 2102354
uaauuucugaccuucuguc

SEQ ID NO: 2102356 - RNA, 19 nt, Artificial Sequence
  Description of Artificial Sequence: Synthetic oligonucleotide
  Sense strand starting at position 828 of SEQ ID NO: 1882196
gucagaaauuaauccaguu

SEQ ID NO: 2102357 - RNA, 19 nt, Artificial Sequence
  Description of Artificial Sequence: Synthetic oligonucleotide
  Antisense strand to SEQ ID NO: 2102356
aacuggauuaauuucugac

SEQ ID NO: 2102358 - RNA, 19 nt, Artificial Sequence
  Description of Artificial Sequence: Synthetic oligonucleotide
  Sense strand starting at position 1085 of SEQ ID NO: 1882196
gcugauuucugacauaaga

SEQ ID NO: 2102359 - RNA, 19 nt, Artificial Sequence
  Description of Artificial Sequence: Synthetic oligonucleotide
  Antisense strand to SEQ ID NO: 2102358
ucuuaugucagaaaucagc

SEQ ID NO: 2102360 - RNA, 19 nt, Artificial Sequence
  Description of Artificial Sequence: Synthetic oligonucleotide
  Sense strand starting at position 1110 of SEQ ID NO: 1882196
agagauuauuguccuuaug

SEQ ID NO: 2102361 - RNA, 19 nt, Artificial Sequence
  Description of Artificial Sequence: Synthetic oligonucleotide
  Antisense strand to SEQ ID NO: 2102360
cauaaggacaauaaucucu

SEQ ID NO: 2102362 - RNA, 19 nt, Artificial Sequence
  Description of Artificial Sequence: Synthetic oligonucleotide
  Sense strand starting at position 1120 of SEQ ID NO: 1882196
guccuuaugcccuuagugu

SEQ ID NO: 2102363 - RNA, 19 nt, Artificial Sequence
  Description of Artificial Sequence: Synthetic oligonucleotide
  Antisense strand to SEQ ID NO: 2102362
acacuaagggcauaaggac

SEQ ID NO: 2102364 - RNA, 19 nt, Artificial Sequence
  Description of Artificial Sequence: Synthetic oligonucleotide
  Sense strand starting at position 1162 of SEQ ID NO: 1882196
uaaugagggcguugggauu

SEQ ID NO: 2102365 - RNA, 19 nt, Artificial Sequence
  Description of Artificial Sequence: Synthetic oligonucleotide
  Antisense strand to SEQ ID NO: 2102364
aaucccaacgcccucauua

SEQ ID NO: 2102366 - RNA, 19 nt, Artificial Sequence
  Description of Artificial Sequence: Synthetic oligonucleotide
  Sense strand starting at position 1291 of SEQ ID NO: 1882196
gcuccagacuccuugaacu

SEQ ID NO: 2102367 - RNA, 19 nt, Artificial Sequence
  Description of Artificial Sequence: Synthetic oligonucleotide
  Antisense strand to SEQ ID NO: 2102366
aguucaaggagucuggagc

SEQ ID NO: 2102368 - RNA, 19 nt, Artificial Sequence
  Description of Artificial Sequence: Synthetic oligonucleotide
  Sense strand starting at position 1828 of SEQ ID NO: 1882196
gugguuucgcaguccugga

SEQ ID NO: 2102369 - RNA, 19 nt, Artificial Sequence
  Description of Artificial Sequence: Synthetic oligonucleotide
  Antisense strand to SEQ ID NO: 2102368
uccaggacugcgaaaccac

SEQ ID NO: 2102370 - RNA, 19 nt, Artificial Sequence
  Description of Artificial Sequence: Synthetic oligonucleotide
  Sense strand starting at position 2049 of SEQ ID NO: 1882196
ggcugcuauguuggaucaa

SEQ ID NO: 2102371 - RNA, 19 nt, Artificial Sequence
  Description of Artificial Sequence: Synthetic oligonucleotide
  Antisense strand to SEQ ID NO: 2102370
uugauccaacauagcagcc

SEQ ID NO: 2102372 - RNA, 19 nt, Artificial Sequence
  Description of Artificial Sequence: Synthetic oligonucleotide
  Sense strand starting at position 2112 of SEQ ID NO: 1882196
uaggaaguguauuugcuuu

SEQ ID NO: 2102373 - RNA, 19 nt, Artificial Sequence
  Description of Artificial Sequence: Synthetic oligonucleotide
  Antisense strand to SEQ ID NO: 2102372
aaagcaaauacacuuccua

SEQ ID NO: 2102374 - RNA, 19 nt, Artificial Sequence
  Description of Artificial Sequence: Synthetic oligonucleotide
  Sense strand starting at position 2204 of SEQ ID NO: 1882196
gaaauuaguguuggugaag

SEQ ID NO: 2102375 - RNA, 19 nt, Artificial Sequence
  Description of Artificial Sequence: Synthetic oligonucleotide
  Antisense strand to SEQ ID NO: 2102374
cuucaccaacacuaauuuc

SEQ ID NO: 2102376 - RNA, 19 nt, Artificial Sequence
  Description of Artificial Sequence: Synthetic oligonucleotide
  Sense strand starting at position 2275 of SEQ ID NO: 1882196
cagccaugugaugaacaau

SEQ ID NO: 2102377 - RNA, 19 nt, Artificial Sequence
  Description of Artificial Sequence: Synthetic oligonucleotide
  Antisense strand to SEQ ID NO: 2102376
auuguucaucacauggcug

SEQ ID NO: 2102378 - RNA, 19 nt, Artificial Sequence
  Description of Artificial Sequence: Synthetic oligonucleotide
  Sense strand starting at position 2297 of SEQ ID NO: 1882196
gcgguuccucaacaaauca

SEQ ID NO: 2102379 - RNA, 19 nt, Artificial Sequence
  Description of Artificial Sequence: Synthetic oligonucleotide
  Antisense strand to SEQ ID NO: 2102378
ugauuuguugaggaaccgc

SEQ ID NO: 2102380 - RNA, 19 nt, Artificial Sequence
  Description of Artificial Sequence: Synthetic oligonucleotide
  Sense strand starting at position 2313 of SEQ ID NO: 1882196
ucaguuauaugauccagca

SEQ ID NO: 2102381 - RNA, 19 nt, Artificial Sequence
  Description of Artificial Sequence: Synthetic oligonucleotide
  Antisense strand to SEQ ID NO: 2102380
ugcuggaucauauaacuga

SEQ ID NO: 2102382 - RNA, 19 nt, Artificial Sequence
  Description of Artificial Sequence: Synthetic oligonucleotide
  Sense strand starting at position 2738 of SEQ ID NO: 1882196
agaguuucaguuuggagag

SEQ ID NO: 2102383 - RNA, 19 nt, Artificial Sequence
  Description of Artificial Sequence: Synthetic oligonucleotide
  Antisense strand to SEQ ID NO: 2102382
cucuccaaacugaaacucu

SEQ ID NO: 2102384 - RNA, 19 nt, Artificial Sequence
  Description of Artificial Sequence: Synthetic oligonucleotide
  Sense strand starting at position 2782 of SEQ ID NO: 1882196
uggugaugccugcauuaca

SEQ ID NO: 2102385 - RNA, 19 nt, Artificial Sequence
  Description of Artificial Sequence: Synthetic oligonucleotide
  Antisense strand to SEQ ID NO: 2102384
uguaaugcaggcaucacca

SEQ ID NO: 2102386 - RNA, 19 nt, Artificial Sequence
  Description of Artificial Sequence: Synthetic oligonucleotide
  Sense strand starting at position 2795 of SEQ ID NO: 1882196
auuacauugugaguguacu

SEQ ID NO: 2102387 - RNA, 19 nt, Artificial Sequence
  Description of Artificial Sequence: Synthetic oligonucleotide
  Antisense strand to SEQ ID NO: 2102386
aguacacucacaauguaau

SEQ ID NO: 2102388 - RNA, 19 nt, Artificial Sequence
  Description of Artificial Sequence: Synthetic oligonucleotide
  Sense strand starting at position 2796 of SEQ ID NO: 1882196
uuacauugugaguguacuu

SEQ ID NO: 2102389 - RNA, 19 nt, Artificial Sequence
  Description of Artificial Sequence: Synthetic oligonucleotide
  Antisense strand to SEQ ID NO: 2102388
aaguacacucacaauguaa

SEQ ID NO: 2102390 - RNA, 19 nt, Artificial Sequence
  Description of Artificial Sequence: Synthetic oligonucleotide
  Sense strand starting at position 2940 of SEQ ID NO: 1882196
auugaaagcucaguggaga

SEQ ID NO: 2102391 - RNA, 19 nt, Artificial Sequence
  Description of Artificial Sequence: Synthetic oligonucleotide
  Antisense strand to SEQ ID NO: 2102390
ucuccacugagcuuucaau

SEQ ID NO: 2102392 - RNA, 19 nt, Artificial Sequence
  Description of Artificial Sequence: Synthetic oligonucleotide
  Sense strand starting at position 2941 of SEQ ID NO: 1882196
uugaaagcucaguggagaa

SEQ ID NO: 2102393 - RNA, 19 nt, Artificial Sequence
  Description of Artificial Sequence: Synthetic oligonucleotide
  Antisense strand to SEQ ID NO: 2102392
uucuccacugagcuuucaa

SEQ ID NO: 2102394 - RNA, 19 nt, Artificial Sequence
  Description of Artificial Sequence: Synthetic oligonucleotide
  Sense strand starting at position 3004 of SEQ ID NO: 1882196
ggaaauaacuggcagauuu

SEQ ID NO: 2102395 - RNA, 19 nt, Artificial Sequence
  Description of Artificial Sequence: Synthetic oligonucleotide
  Antisense strand to SEQ ID NO: 2102394
aaaucugccaguuauuucc

SEQ ID NO: 2102396 - RNA, 19 nt, Artificial Sequence
  Description of Artificial Sequence: Synthetic oligonucleotide
  Sense strand starting at position 3015 of SEQ ID NO: 1882196
gcagauuuguggcuacugu

SEQ ID NO: 2102397 - RNA, 19 nt, Artificial Sequence
  Description of Artificial Sequence: Synthetic oligonucleotide
  Antisense strand to SEQ ID NO: 2102396
acaguagccacaaaucugc

SEQ ID NO: 2102398 - RNA, 19 nt, Artificial Sequence
  Description of Artificial Sequence: Synthetic oligonucleotide
  Sense strand starting at position 3035 of SEQ ID NO: 1882196
guagccuuggcuugaauaa

SEQ ID NO: 2102399 - RNA, 19 nt, Artificial Sequence
  Description of Artificial Sequence: Synthetic oligonucleotide
  Antisense strand to SEQ ID NO: 2102398
uuauucaagccaaggcuac

SEQ ID NO: 2102400 - RNA, 19 nt, Artificial Sequence
  Description of Artificial Sequence: Synthetic oligonucleotide
  Sense strand starting at position 3042 of SEQ ID NO: 1882196
uggcuugaauaauuggaga

SEQ ID NO: 2102401 - RNA, 19 nt, Artificial Sequence
  Description of Artificial Sequence: Synthetic oligonucleotide
  Antisense strand to SEQ ID NO: 2102400
ucuccaauuauucaagcca

SEQ ID NO: 2102402 - RNA, 19 nt, Artificial Sequence
  Description of Artificial Sequence: Synthetic oligonucleotide
  Sense strand starting at position 3045 of SEQ ID NO: 1882196
cuugaauaauuggagacaa

SEQ ID NO: 2102403 - RNA, 19 nt, Artificial Sequence
  Description of Artificial Sequence: Synthetic oligonucleotide
  Antisense strand to SEQ ID NO: 2102402
uugucuccaauuauucaag

SEQ ID NO: 2102404 - RNA, 19 nt, Artificial Sequence
  Description of Artificial Sequence: Synthetic oligonucleotide
  Sense strand starting at position 3197 of SEQ ID NO: 1882196
uuggacuuucuugaguagu

SEQ ID NO: 2102405 - RNA, 19 nt, Artificial Sequence
  Description of Artificial Sequence: Synthetic oligonucleotide
  Antisense strand to SEQ ID NO: 2102404
acuacucaagaaaguccaa

SEQ ID NO: 2102406 - RNA, 19 nt, Artificial Sequence
  Description of Artificial Sequence: Synthetic oligonucleotide
  Sense strand starting at position 3199 of SEQ ID NO: 1882196
ggacuuucuugaguaguaa

SEQ ID NO: 2102407 - RNA, 19 nt, Artificial Sequence
  Description of Artificial Sequence: Synthetic oligonucleotide
  Antisense strand to SEQ ID NO: 2102406
uuacuacucaagaaagucc

SEQ ID NO: 2102408 - RNA, 19 nt, Artificial Sequence
  Description of Artificial Sequence: Synthetic oligonucleotide
  Sense strand starting at position 3200 of SEQ ID NO: 1882196
gacuuucuugaguaguaaa

SEQ ID NO: 2102409 - RNA, 19 nt, Artificial Sequence
  Description of Artificial Sequence: Synthetic oligonucleotide
  Antisense strand to SEQ ID NO: 2102408
uuuacuacucaagaaaguc

SEQ ID NO: 2102410 - RNA, 19 nt, Artificial Sequence
  Description of Artificial Sequence: Synthetic oligonucleotide
  Sense strand starting at position 3329 of SEQ ID NO: 1882196
aguuuaauaucguuugacu

SEQ ID NO: 2102411 - RNA, 19 nt, Artificial Sequence
  Description of Artificial Sequence: Synthetic oligonucleotide
  Antisense strand to SEQ ID NO: 2102410
agucaaacgauauuaaacu

SEQ ID NO: 2102412 - RNA, 19 nt, Artificial Sequence
  Description of Artificial Sequence: Synthetic oligonucleotide
  Sense strand starting at position 3350 of SEQ ID NO: 1882196
cagaaaucuuuggugaggu

SEQ ID NO: 2102413 - RNA, 19 nt, Artificial Sequence
  Description of Artificial Sequence: Synthetic oligonucleotide
  Antisense strand to SEQ ID NO: 2102412
accucaccaaagauuucug

SEQ ID NO: 2102414 - RNA, 19 nt, Artificial Sequence
  Description of Artificial Sequence: Synthetic oligonucleotide
  Sense strand starting at position 3352 of SEQ ID NO: 1882196
gaaaucuuuggugagguca

SEQ ID NO: 2102415 - RNA, 19 nt, Artificial Sequence
  Description of Artificial Sequence: Synthetic oligonucleotide
  Antisense strand to SEQ ID NO: 2102414
ugaccucaccaaagauuuc

SEQ ID NO: 2102416 - RNA, 19 nt, Artificial Sequence
  Description of Artificial Sequence: Synthetic oligonucleotide
  Sense strand starting at position 3425 of SEQ ID NO: 1882196
aauagcugucuguacaguu

SEQ ID NO: 2102417 - RNA, 19 nt, Artificial Sequence
  Description of Artificial Sequence: Synthetic oligonucleotide
  Antisense strand to SEQ ID NO: 2102416
aacuguacagacagcuauu

SEQ ID NO: 2102418 - RNA, 19 nt, Artificial Sequence
  Description of Artificial Sequence: Synthetic oligonucleotide
  Sense strand starting at position 3452 of SEQ ID NO: 1882196
aguuacccuugugcuaaua

SEQ ID NO: 2102419 - RNA, 19 nt, Artificial Sequence
  Description of Artificial Sequence: Synthetic oligonucleotide
  Antisense strand to SEQ ID NO: 2102418
uauuagcacaaggguaacu

SEQ ID NO: 2102420 - RNA, 19 nt, Artificial Sequence
  Description of Artificial Sequence: Synthetic oligonucleotide
  Sense strand starting at position 192 of SEQ ID NO: 1882197
cccagauuauaugucauau

SEQ ID NO: 2102421 - RNA, 19 nt, Artificial Sequence
  Description of Artificial Sequence: Synthetic oligonucleotide
  Antisense strand to SEQ ID NO: 2102420
auaugacauauaaucuggg

SEQ ID NO: 2102422 - RNA, 19 nt, Artificial Sequence
  Description of Artificial Sequence: Synthetic oligonucleotide
  Sense strand starting at position 688 of SEQ ID NO: 1882197
ugccuuucugcagacagga

SEQ ID NO: 2102423 - RNA, 19 nt, Artificial Sequence
  Description of Artificial Sequence: Synthetic oligonucleotide
  Antisense strand to SEQ ID NO: 2102422
uccugucugcagaaaggca

SEQ ID NO: 2102424 - RNA, 19 nt, Artificial Sequence
  Description of Artificial Sequence: Synthetic oligonucleotide
  Sense strand starting at position 745 of SEQ ID NO: 1882197
agcuguagccauuaacaug

SEQ ID NO: 2102425 - RNA, 19 nt, Artificial Sequence
  Description of Artificial Sequence: Synthetic oligonucleotide
  Antisense strand to SEQ ID NO: 2102424
cauguuaauggcuacagcu

SEQ ID NO: 2102426 - RNA, 19 nt, Artificial Sequence
  Description of Artificial Sequence: Synthetic oligonucleotide
  Sense strand starting at position 903 of SEQ ID NO: 1882197
aguuucuauguuggaucaa

SEQ ID NO: 2102427 - RNA, 19 nt, Artificial Sequence
  Description of Artificial Sequence: Synthetic oligonucleotide
  Antisense strand to SEQ ID NO: 2102426
uugauccaacauagaaacu

SEQ ID NO: 2102428 - RNA, 19 nt, Artificial Sequence
  Description of Artificial Sequence: Synthetic oligonucleotide
  Sense strand starting at position 1015 of SEQ ID NO: 1882197
uguauacguguguuugcau

SEQ ID NO: 2102429 - RNA, 19 nt, Artificial Sequence
  Description of Artificial Sequence: Synthetic oligonucleotide
  Antisense strand to SEQ ID NO: 2102428
augcaaacacacguauaca

SEQ ID NO: 2102430 - RNA, 19 nt, Artificial Sequence
  Description of Artificial Sequence: Synthetic oligonucleotide
  Sense strand starting at position 1027 of SEQ ID NO: 1882197
uuugcauguguguagggau

SEQ ID NO: 2102431 - RNA, 19 nt, Artificial Sequence
  Description of Artificial Sequence: Synthetic oligonucleotide
  Antisense strand to SEQ ID NO: 2102430
aucccuacacacaugcaaa

SEQ ID NO: 2102432 - RNA, 19 nt, Artificial Sequence
  Description of Artificial Sequence: Synthetic oligonucleotide
  Sense strand starting at position 1088 of SEQ ID NO: 1882197
ccacauuucugcccaguau

SEQ ID NO: 2102433 - RNA, 19 nt, Artificial Sequence
  Description of Artificial Sequence: Synthetic oligonucleotide
  Antisense strand to SEQ ID NO: 2102432
auacugggcagaaaugugg

SEQ ID NO: 2102434 - RNA, 19 nt, Artificial Sequence
  Description of Artificial Sequence: Synthetic oligonucleotide
  Sense strand starting at position 1100 of SEQ ID NO: 1882197
ccaguaucucuugggacca

SEQ ID NO: 2102435 - RNA, 19 nt, Artificial Sequence
  Description of Artificial Sequence: Synthetic oligonucleotide
  Antisense strand to SEQ ID NO: 2102434
uggucccaagagauacugg

SEQ ID NO: 2102436 - RNA, 19 nt, Artificial Sequence
  Description of Artificial Sequence: Synthetic oligonucleotide
  Sense strand starting at position 1136 of SEQ ID NO: 1882197
gacagaaggucagaaauua

SEQ ID NO: 2102437 - RNA, 19 nt, Artificial Sequence
  Description of Artificial Sequence: Synthetic oligonucleotide
  Antisense strand to SEQ ID NO: 2102436
uaauuucugaccuucuguc

SEQ ID NO: 2102438 - RNA, 19 nt, Artificial Sequence
  Description of Artificial Sequence: Synthetic oligonucleotide
  Sense strand starting at position 1144 of SEQ ID NO: 1882197
gucagaaauuaauccaguu

SEQ ID NO: 2102439 - RNA, 19 nt, Artificial Sequence
  Description of Artificial Sequence: Synthetic oligonucleotide
  Antisense strand to SEQ ID NO: 2102438
aacuggauuaauuucugac

SEQ ID NO: 2102440 - RNA, 19 nt, Artificial Sequence
  Description of Artificial Sequence: Synthetic oligonucleotide
  Sense strand starting at position 1401 of SEQ ID NO: 1882197
gcugauuucugacauaaga

SEQ ID NO: 2102441 - RNA, 19 nt, Artificial Sequence
  Description of Artificial Sequence: Synthetic oligonucleotide
  Antisense strand to SEQ ID NO: 2102440
ucuuaugucagaaaucagc

SEQ ID NO: 2102442 - RNA, 19 nt, Artificial Sequence
  Description of Artificial Sequence: Synthetic oligonucleotide
  Sense strand starting at position 1426 of SEQ ID NO: 1882197
agagauuauuguccuuaug

SEQ ID NO: 2102443 - RNA, 19 nt, Artificial Sequence
  Description of Artificial Sequence: Synthetic oligonucleotide
  Antisense strand to SEQ ID NO: 2102442
cauaaggacaauaaucucu

SEQ ID NO: 2102444 - RNA, 19 nt, Artificial Sequence
  Description of Artificial Sequence: Synthetic oligonucleotide
  Sense strand starting at position 1436 of SEQ ID NO: 1882197
guccuuaugcccuuagugu

SEQ ID NO: 2102445 - RNA, 19 nt, Artificial Sequence
  Description of Artificial Sequence: Synthetic oligonucleotide
  Antisense strand to SEQ ID NO: 2102444
acacuaagggcauaaggac

SEQ ID NO: 2102446 - RNA, 19 nt, Artificial Sequence
  Description of Artificial Sequence: Synthetic oligonucleotide
  Sense strand starting at position 1478 of SEQ ID NO: 1882197
uaaugagggcguugggauu

SEQ ID NO: 2102447 - RNA, 19 nt, Artificial Sequence
  Description of Artificial Sequence: Synthetic oligonucleotide
  Antisense strand to SEQ ID NO: 2102446
aaucccaacgcccucauua

SEQ ID NO: 2102448 - RNA, 19 nt, Artificial Sequence
  Description of Artificial Sequence: Synthetic oligonucleotide
  Sense strand starting at position 1607 of SEQ ID NO: 1882197
gcuccagacuccuugaacu

SEQ ID NO: 2102449 - RNA, 19 nt, Artificial Sequence
  Description of Artificial Sequence: Synthetic oligonucleotide
  Antisense strand to SEQ ID NO: 2102448
aguucaaggagucuggagc

SEQ ID NO: 2102450 - RNA, 19 nt, Artificial Sequence
  Description of Artificial Sequence: Synthetic oligonucleotide
  Sense strand starting at position 2144 of SEQ ID NO: 1882197
gugguuucgcaguccugga

SEQ ID NO: 2102451 - RNA, 19 nt, Artificial Sequence
  Description of Artificial Sequence: Synthetic oligonucleotide
  Antisense strand to SEQ ID NO: 2102450
uccaggacugcgaaaccac

SEQ ID NO: 2102452 - RNA, 19 nt, Artificial Sequence
  Description of Artificial Sequence: Synthetic oligonucleotide
  Sense strand starting at position 2428 of SEQ ID NO: 1882197
uaggaaguguauuugcuuu

SEQ ID NO: 2102453 - RNA, 19 nt, Artificial Sequence
  Description of Artificial Sequence: Synthetic oligonucleotide
  Antisense strand to SEQ ID NO: 2102452
aaagcaaauacacuuccua

SEQ ID NO: 2102454 - RNA, 19 nt, Artificial Sequence
  Description of Artificial Sequence: Synthetic oligonucleotide
  Sense strand starting at position 2520 of SEQ ID NO: 1882197
gaaauuaguguuggugaag

SEQ ID NO: 2102455 - RNA, 19 nt, Artificial Sequence
  Description of Artificial Sequence: Synthetic oligonucleotide
  Antisense strand to SEQ ID NO: 2102454
cuucaccaacacuaauuuc

SEQ ID NO: 2102456 - RNA, 19 nt, Artificial Sequence
  Description of Artificial Sequence: Synthetic oligonucleotide
  Sense strand starting at position 2591 of SEQ ID NO: 1882197
cagccaugugaugaacaau

SEQ ID NO: 2102457 - RNA, 19 nt, Artificial Sequence
  Description of Artificial Sequence: Synthetic oligonucleotide
  Antisense strand to SEQ ID NO: 2102456
auuguucaucacauggcug

SEQ ID NO: 2102458 - RNA, 19 nt, Artificial Sequence
  Description of Artificial Sequence: Synthetic oligonucleotide
  Sense strand starting at position 2613 of SEQ ID NO: 1882197
gcgguuccucaacaaauca

SEQ ID NO: 2102459 - RNA, 19 nt, Artificial Sequence
  Description of Artificial Sequence: Synthetic oligonucleotide
  Antisense strand to SEQ ID NO: 2102458
ugauuuguugaggaaccgc

SEQ ID NO: 2102460 - RNA, 19 nt, Artificial Sequence
  Description of Artificial Sequence: Synthetic oligonucleotide
  Sense strand starting at position 2629 of SEQ ID NO: 1882197
ucaguuauaugauccagca

SEQ ID NO: 2102461 - RNA, 19 nt, Artificial Sequence
  Description of Artificial Sequence: Synthetic oligonucleotide
  Antisense strand to SEQ ID NO: 2102460
ugcuggaucauauaacuga

SEQ ID NO: 2102462 - RNA, 19 nt, Artificial Sequence
  Description of Artificial Sequence: Synthetic oligonucleotide
  Sense strand starting at position 3054 of SEQ ID NO: 1882197
agaguuucaguuuggagag

SEQ ID NO: 2102463 - RNA, 19 nt, Artificial Sequence
  Description of Artificial Sequence: Synthetic oligonucleotide
  Antisense strand to SEQ ID NO: 2102462
cucuccaaacugaaacucu

SEQ ID NO: 2102464 - RNA, 19 nt, Artificial Sequence
  Description of Artificial Sequence: Synthetic oligonucleotide
  Sense strand starting at position 3098 of SEQ ID NO: 1882197
uggugaugccugcauuaca

SEQ ID NO: 2102465 - RNA, 19 nt, Artificial Sequence
  Description of Artificial Sequence: Synthetic oligonucleotide
  Antisense strand to SEQ ID NO: 2102464
uguaaugcaggcaucacca

SEQ ID NO: 2102466 - RNA, 19 nt, Artificial Sequence
  Description of Artificial Sequence: Synthetic oligonucleotide
  Sense strand starting at position 3111 of SEQ ID NO: 1882197
auuacauugugaguguacu

SEQ ID NO: 2102467 - RNA, 19 nt, Artificial Sequence
  Description of Artificial Sequence: Synthetic oligonucleotide
  Antisense strand to SEQ ID NO: 2102466
aguacacucacaauguaau

SEQ ID NO: 2102468 - RNA, 19 nt, Artificial Sequence
  Description of Artificial Sequence: Synthetic oligonucleotide
  Sense strand starting at position 3112 of SEQ ID NO: 1882197
uuacauugugaguguacuu

SEQ ID NO: 2102469 - RNA, 19 nt, Artificial Sequence
  Description of Artificial Sequence: Synthetic oligonucleotide
  Antisense strand to SEQ ID NO: 2102468
aaguacacucacaauguaa

SEQ ID NO: 2102470 - RNA, 19 nt, Artificial Sequence
  Description of Artificial Sequence: Synthetic oligonucleotide
  Sense strand starting at position 3256 of SEQ ID NO: 1882197
auugaaagcucaguggaga

SEQ ID NO: 2102471 - RNA, 19 nt, Artificial Sequence
  Description of Artificial Sequence: Synthetic oligonucleotide
  Antisense strand to SEQ ID NO: 2102470
ucuccacugagcuuucaau

SEQ ID NO: 2102472 - RNA, 19 nt, Artificial Sequence
  Description of Artificial Sequence: Synthetic oligonucleotide
  Sense strand starting at position 3257 of SEQ ID NO: 1882197
uugaaagcucaguggagaa

SEQ ID NO: 2102473 - RNA, 19 nt, Artificial Sequence
  Description of Artificial Sequence: Synthetic oligonucleotide
  Antisense strand to SEQ ID NO: 2102472
uucuccacugagcuuucaa

SEQ ID NO: 2102474 - RNA, 19 nt, Artificial Sequence
  Description of Artificial Sequence: Synthetic oligonucleotide
  Sense strand starting at position 3320 of SEQ ID NO: 1882197
ggaaauaacuggcagauuu

SEQ ID NO: 2102475 - RNA, 19 nt, Artificial Sequence
  Description of Artificial Sequence: Synthetic oligonucleotide
  Antisense strand to SEQ ID NO: 2102474
aaaucugccaguuauuucc

SEQ ID NO: 2102476 - RNA, 19 nt, Artificial Sequence
  Description of Artificial Sequence: Synthetic oligonucleotide
  Sense strand starting at position 3331 of SEQ ID NO: 1882197
gcagauuuguggcuacugu

SEQ ID NO: 2102477 - RNA, 19 nt, Artificial Sequence
  Description of Artificial Sequence: Synthetic oligonucleotide
  Antisense strand to SEQ ID NO: 2102476
acaguagccacaaaucugc

SEQ ID NO: 2102478 - RNA, 19 nt, Artificial Sequence
  Description of Artificial Sequence: Synthetic oligonucleotide
  Sense strand starting at position 3351 of SEQ ID NO: 1882197
guagccuuggcuugaauaa

SEQ ID NO: 2102479 - RNA, 19 nt, Artificial Sequence
  Description of Artificial Sequence: Synthetic oligonucleotide
  Antisense strand to SEQ ID NO: 2102478
uuauucaagccaaggcuac

SEQ ID NO: 2102480 - RNA, 19 nt, Artificial Sequence
  Description of Artificial Sequence: Synthetic oligonucleotide
  Sense strand starting at position 3358 of SEQ ID NO: 1882197
uggcuugaauaauuggaga

SEQ ID NO: 2102481 - RNA, 19 nt, Artificial Sequence
  Description of Artificial Sequence: Synthetic oligonucleotide
  Antisense strand to SEQ ID NO: 2102480
ucuccaauuauucaagcca

SEQ ID NO: 2102482 - RNA, 19 nt, Artificial Sequence
  Description of Artificial Sequence: Synthetic oligonucleotide
  Sense strand starting at position 3361 of SEQ ID NO: 1882197
cuugaauaauuggagacaa

SEQ ID NO: 2102483 - RNA, 19 nt, Artificial Sequence
  Description of Artificial Sequence: Synthetic oligonucleotide
  Antisense strand to SEQ ID NO: 2102482
uugucuccaauuauucaag

SEQ ID NO: 2102484 - RNA, 19 nt, Artificial Sequence
  Description of Artificial Sequence: Synthetic oligonucleotide
  Sense strand starting at position 3513 of SEQ ID NO: 1882197
uuggacuuucuugaguagu

SEQ ID NO: 2102485 - RNA, 19 nt, Artificial Sequence
  Description of Artificial Sequence: Synthetic oligonucleotide
  Antisense strand to SEQ ID NO: 2102484
acuacucaagaaaguccaa

SEQ ID NO: 2102486 - RNA, 19 nt, Artificial Sequence
  Description of Artificial Sequence: Synthetic oligonucleotide
  Sense strand starting at position 3515 of SEQ ID NO: 1882197
ggacuuucuugaguaguaa

SEQ ID NO: 2102487 - RNA, 19 nt, Artificial Sequence
  Description of Artificial Sequence: Synthetic oligonucleotide
  Antisense strand to SEQ ID NO: 2102486
uuacuacucaagaaagucc

SEQ ID NO: 2102488 - RNA, 19 nt, Artificial Sequence
  Description of Artificial Sequence: Synthetic oligonucleotide
  Sense strand starting at position 3516 of SEQ ID NO: 1882197
gacuuucuugaguaguaaa

SEQ ID NO: 2102489 - RNA, 19 nt, Artificial Sequence
  Description of Artificial Sequence: Synthetic oligonucleotide
  Antisense strand to SEQ ID NO: 2102488
uuuacuacucaagaaaguc

SEQ ID NO: 2102490 - RNA, 19 nt, Artificial Sequence
  Description of Artificial Sequence: Synthetic oligonucleotide
  Sense strand starting at position 3645 of SEQ ID NO: 1882197
aguuuaauaucguuugacu

SEQ ID NO: 2102491 - RNA, 19 nt, Artificial Sequence
  Description of Artificial Sequence: Synthetic oligonucleotide
  Antisense strand to SEQ ID NO: 2102490
agucaaacgauauuaaacu

SEQ ID NO: 2102492 - RNA, 19 nt, Artificial Sequence
  Description of Artificial Sequence: Synthetic oligonucleotide
  Sense strand starting at position 3666 of SEQ ID NO: 1882197
cagaaaucuuuggugaggu

SEQ ID NO: 2102493 - RNA, 19 nt, Artificial Sequence
  Description of Artificial Sequence: Synthetic oligonucleotide
  Antisense strand to SEQ ID NO: 2102492
accucaccaaagauuucug

SEQ ID NO: 2102494 - RNA, 19 nt, Artificial Sequence
  Description of Artificial Sequence: Synthetic oligonucleotide
  Sense strand starting at position 3668 of SEQ ID NO: 1882197
gaaaucuuuggugagguca

SEQ ID NO: 2102495 - RNA, 19 nt, Artificial Sequence
  Description of Artificial Sequence: Synthetic oligonucleotide
  Antisense strand to SEQ ID NO: 2102494
ugaccucaccaaagauuuc

SEQ ID NO: 2102496 - RNA, 19 nt, Artificial Sequence
  Description of Artificial Sequence: Synthetic oligonucleotide
  Sense strand starting at position 3741 of SEQ ID NO: 1882197
aauagcugucuguacaguu

SEQ ID NO: 2102497 - RNA, 19 nt, Artificial Sequence
  Description of Artificial Sequence: Synthetic oligonucleotide
  Antisense strand to SEQ ID NO: 2102496
aacuguacagacagcuauu

SEQ ID NO: 2102498 - RNA, 19 nt, Artificial Sequence
  Description of Artificial Sequence: Synthetic oligonucleotide
  Sense strand starting at position 3768 of SEQ ID NO: 1882197
aguuacccuugugcuaaua

SEQ ID NO: 2102499 - RNA, 19 nt, Artificial Sequence
  Description of Artificial Sequence: Synthetic oligonucleotide
  Antisense strand to SEQ ID NO: 2102498
uauuagcacaaggguaacu

SEQ ID NO: 2102500 - RNA, 19 nt, Artificial Sequence
  Description of Artificial Sequence: Synthetic oligonucleotide
  Sense strand starting at position 2178 of SEQ ID NO: 1882198
cuacaaagaguauguggaa

SEQ ID NO: 2102501 - RNA, 19 nt, Artificial Sequence
  Description of Artificial Sequence: Synthetic oligonucleotide
  Antisense strand to SEQ ID NO: 2102500
uuccacauacucuuuguag

SEQ ID NO: 2102502 - RNA, 19 nt, Artificial Sequence
  Description of Artificial Sequence: Synthetic oligonucleotide
  Sense strand starting at position 2564 of SEQ ID NO: 1882198
ggguauugcucuguugcuu

SEQ ID NO: 2102503 - RNA, 19 nt, Artificial Sequence
  Description of Artificial Sequence: Synthetic oligonucleotide
  Antisense strand to SEQ ID NO: 2102502
aagcaacagagcaauaccc

SEQ ID NO: 2102504 - RNA, 19 nt, Artificial Sequence
  Description of Artificial Sequence: Synthetic oligonucleotide
  Sense strand starting at position 2565 of SEQ ID NO: 1882198
gguauugcucuguugcuua

SEQ ID NO: 2102505 - RNA, 19 nt, Artificial Sequence
  Description of Artificial Sequence: Synthetic oligonucleotide
  Antisense strand to SEQ ID NO: 2102504
uaagcaacagagcaauacc

SEQ ID NO: 2102506 - RNA, 19 nt, Artificial Sequence
  Description of Artificial Sequence: Synthetic oligonucleotide
  Sense strand starting at position 2599 of SEQ ID NO: 1882198
gcacaaucauaugugcaau

SEQ ID NO: 2102507 - RNA, 19 nt, Artificial Sequence
  Description of Artificial Sequence: Synthetic oligonucleotide
  Antisense strand to SEQ ID NO: 2102506
auugcacauaugauugugc

SEQ ID NO: 2102508 - RNA, 19 nt, Artificial Sequence
  Description of Artificial Sequence: Synthetic oligonucleotide
  Sense strand starting at position 2615 of SEQ ID NO: 1882198
aauuguagcuuguugagca

SEQ ID NO: 2102509 - RNA, 19 nt, Artificial Sequence
  Description of Artificial Sequence: Synthetic oligonucleotide
  Antisense strand to SEQ ID NO: 2102508
ugcucaacaagcuacaauu

SEQ ID NO: 2102510 - RNA, 19 nt, Artificial Sequence
  Description of Artificial Sequence: Synthetic oligonucleotide
  Sense strand starting at position 2803 of SEQ ID NO: 1882198
cucugaauguauuagguaa

SEQ ID NO: 2102511 - RNA, 19 nt, Artificial Sequence
  Description of Artificial Sequence: Synthetic oligonucleotide
  Antisense strand to SEQ ID NO: 2102510
uuaccuaauacauucagag

SEQ ID NO: 2102512 - RNA, 19 nt, Artificial Sequence
  Description of Artificial Sequence: Synthetic oligonucleotide
  Sense strand starting at position 2843 of SEQ ID NO: 1882198
ggugauuguugaguaauua

SEQ ID NO: 2102513 - RNA, 19 nt, Artificial Sequence
  Description of Artificial Sequence: Synthetic oligonucleotide
  Antisense strand to SEQ ID NO: 2102512
uaauuacucaacaaucacc

SEQ ID NO: 2102514 - RNA, 19 nt, Artificial Sequence
  Description of Artificial Sequence: Synthetic oligonucleotide
  Sense strand starting at position 2964 of SEQ ID NO: 1882198
gagugaugguccucaggaa

SEQ ID NO: 2102515 - RNA, 19 nt, Artificial Sequence
  Description of Artificial Sequence: Synthetic oligonucleotide
  Antisense strand to SEQ ID NO: 2102514
uuccugaggaccaucacuc

SEQ ID NO: 2102516 - RNA, 19 nt, Artificial Sequence
  Description of Artificial Sequence: Synthetic oligonucleotide
  Sense strand starting at position 3017 of SEQ ID NO: 1882198
acguccugcguucaugaua

SEQ ID NO: 2102517 - RNA, 19 nt, Artificial Sequence
  Description of Artificial Sequence: Synthetic oligonucleotide
  Antisense strand to SEQ ID NO: 2102516
uaucaugaacgcaggacgu

SEQ ID NO: 2102518 - RNA, 19 nt, Artificial Sequence
  Description of Artificial Sequence: Synthetic oligonucleotide
  Sense strand starting at position 3496 of SEQ ID NO: 1882198
gcacuuccaguaugauguu

SEQ ID NO: 2102519 - RNA, 19 nt, Artificial Sequence
  Description of Artificial Sequence: Synthetic oligonucleotide
  Antisense strand to SEQ ID NO: 2102518
aacaucauacuggaagugc

SEQ ID NO: 2102520 - RNA, 19 nt, Artificial Sequence
  Description of Artificial Sequence: Synthetic oligonucleotide
  Sense strand starting at position 3533 of SEQ ID NO: 1882198
gggacauucgugcaugcuu

SEQ ID NO: 2102521 - RNA, 19 nt, Artificial Sequence
  Description of Artificial Sequence: Synthetic oligonucleotide
  Antisense strand to SEQ ID NO: 2102520
aagcaugcacgaauguccc

SEQ ID NO: 2102522 - RNA, 19 nt, Artificial Sequence
  Description of Artificial Sequence: Synthetic oligonucleotide
  Sense strand starting at position 3641 of SEQ ID NO: 1882198
ugaagaagcuuccucuauu

SEQ ID NO: 2102523 - RNA, 19 nt, Artificial Sequence
  Description of Artificial Sequence: Synthetic oligonucleotide
  Antisense strand to SEQ ID NO: 2102522
aauagaggaagcuucuuca

SEQ ID NO: 2102524 - RNA, 19 nt, Artificial Sequence
  Description of Artificial Sequence: Synthetic oligonucleotide
  Sense strand starting at position 3661 of SEQ ID NO: 1882198
cuaguuugcugagaguugu

SEQ ID NO: 2102525 - RNA, 19 nt, Artificial Sequence
  Description of Artificial Sequence: Synthetic oligonucleotide
  Antisense strand to SEQ ID NO: 2102524
acaacucucagcaaacuag

SEQ ID NO: 2102526 - RNA, 19 nt, Artificial Sequence
  Description of Artificial Sequence: Synthetic oligonucleotide
  Sense strand starting at position 526 of SEQ ID NO: 1882199
gcagguauuccagggacaa

SEQ ID NO: 2102527 - RNA, 19 nt, Artificial Sequence
  Description of Artificial Sequence: Synthetic oligonucleotide
  Antisense strand to SEQ ID NO: 2102526
uugucccuggaauaccugc

SEQ ID NO: 2102528 - RNA, 19 nt, Artificial Sequence
  Description of Artificial Sequence: Synthetic oligonucleotide
  Sense strand starting at position 570 of SEQ ID NO: 1882199
ucuccuugggcugagaauu

SEQ ID NO: 2102529 - RNA, 19 nt, Artificial Sequence
  Description of Artificial Sequence: Synthetic oligonucleotide
  Antisense strand to SEQ ID NO: 2102528
aauucucagcccaaggaga

SEQ ID NO: 2102530 - RNA, 19 nt, Artificial Sequence
  Description of Artificial Sequence: Synthetic oligonucleotide
  Sense strand starting at position 815 of SEQ ID NO: 1882199
ugaaaugaacuguaagugu

SEQ ID NO: 2102531 - RNA, 19 nt, Artificial Sequence
  Description of Artificial Sequence: Synthetic oligonucleotide
  Antisense strand to SEQ ID NO: 2102530
acacuuacaguucauuuca

SEQ ID NO: 2102532 - RNA, 19 nt, Artificial Sequence
  Description of Artificial Sequence: Synthetic oligonucleotide
  Sense strand starting at position 818 of SEQ ID NO: 1882199
aaugaacuguaaguguaaa

SEQ ID NO: 2102533 - RNA, 19 nt, Artificial Sequence
  Description of Artificial Sequence: Synthetic oligonucleotide
  Antisense strand to SEQ ID NO: 2102532
uuuacacuuacaguucauu

SEQ ID NO: 2102534 - RNA, 19 nt, Artificial Sequence
  Description of Artificial Sequence: Synthetic oligonucleotide
  Sense strand starting at position 1143 of SEQ ID NO: 1882199
gguugaugauccuuucuga

SEQ ID NO: 2102535 - RNA, 19 nt, Artificial Sequence
  Description of Artificial Sequence: Synthetic oligonucleotide
  Antisense strand to SEQ ID NO: 2102534
ucagaaaggaucaucaacc

SEQ ID NO: 2102536 - RNA, 19 nt, Artificial Sequence
  Description of Artificial Sequence: Synthetic oligonucleotide
  Sense strand starting at position 1146 of SEQ ID NO: 1882199
ugaugauccuuucugauag

SEQ ID NO: 2102537 - RNA, 19 nt, Artificial Sequence
  Description of Artificial Sequence: Synthetic oligonucleotide
  Antisense strand to SEQ ID NO: 2102536
cuaucagaaaggaucauca

SEQ ID NO: 2102538 - RNA, 19 nt, Artificial Sequence
  Description of Artificial Sequence: Synthetic oligonucleotide
  Sense strand starting at position 2046 of SEQ ID NO: 1882199
ugucgagccuuauuucuca

SEQ ID NO: 2102539 - RNA, 19 nt, Artificial Sequence
  Description of Artificial Sequence: Synthetic oligonucleotide
  Antisense strand to SEQ ID NO: 2102538
ugagaaauaaggcucgaca

SEQ ID NO: 2102540 - RNA, 19 nt, Artificial Sequence
  Description of Artificial Sequence: Synthetic oligonucleotide
  Sense strand starting at position 2053 of SEQ ID NO: 1882199
ccuuauuucucagcaguua

SEQ ID NO: 2102541 - RNA, 19 nt, Artificial Sequence
  Description of Artificial Sequence: Synthetic oligonucleotide
  Antisense strand to SEQ ID NO: 2102540
uaacugcugagaaauaagg

SEQ ID NO: 2102542 - RNA, 19 nt, Artificial Sequence
  Description of Artificial Sequence: Synthetic oligonucleotide
  Sense strand starting at position 2064 of SEQ ID NO: 1882199
agcaguuacuagguagaau

SEQ ID NO: 2102543 - RNA, 19 nt, Artificial Sequence
  Description of Artificial Sequence: Synthetic oligonucleotide
  Antisense strand to SEQ ID NO: 2102542
auucuaccuaguaacugcu

SEQ ID NO: 2102544 - RNA, 19 nt, Artificial Sequence
  Description of Artificial Sequence: Synthetic oligonucleotide
  Sense strand starting at position 2065 of SEQ ID NO: 1882199
gcaguuacuagguagaaua

SEQ ID NO: 2102545 - RNA, 19 nt, Artificial Sequence
  Description of Artificial Sequence: Synthetic oligonucleotide
  Antisense strand to SEQ ID NO: 2102544
uauucuaccuaguaacugc

SEQ ID NO: 2102546 - RNA, 19 nt, Artificial Sequence
  Description of Artificial Sequence: Synthetic oligonucleotide
  Sense strand starting at position 2152 of SEQ ID NO: 1882199
uuuguucgaaagcaagaua

SEQ ID NO: 2102547 - RNA, 19 nt, Artificial Sequence
  Description of Artificial Sequence: Synthetic oligonucleotide
  Antisense strand to SEQ ID NO: 2102546
uaucuugcuuucgaacaaa

SEQ ID NO: 2102548 - RNA, 19 nt, Artificial Sequence
  Description of Artificial Sequence: Synthetic oligonucleotide
  Sense strand starting at position 2155 of SEQ ID NO: 1882199
guucgaaagcaagauacuu

SEQ ID NO: 2102549 - RNA, 19 nt, Artificial Sequence
  Description of Artificial Sequence: Synthetic oligonucleotide
  Antisense strand to SEQ ID NO: 2102548
aaguaucuugcuuucgaac

SEQ ID NO: 2102550 - RNA, 19 nt, Artificial Sequence
  Description of Artificial Sequence: Synthetic oligonucleotide
  Sense strand starting at position 2194 of SEQ ID NO: 1882199
cucucaagccuugagauuc

SEQ ID NO: 2102551 - RNA, 19 nt, Artificial Sequence
  Description of Artificial Sequence: Synthetic oligonucleotide
  Antisense strand to SEQ ID NO: 2102550
gaaucucaaggcuugagag

SEQ ID NO: 2102552 - RNA, 19 nt, Artificial Sequence
  Description of Artificial Sequence: Synthetic oligonucleotide
  Sense strand starting at position 2256 of SEQ ID NO: 1882199
aggagaggcuucucuaugu

SEQ ID NO: 2102553 - RNA, 19 nt, Artificial Sequence
  Description of Artificial Sequence: Synthetic oligonucleotide
  Antisense strand to SEQ ID NO: 2102552
acauagagaagccucuccu

SEQ ID NO: 2102554 - RNA, 19 nt, Artificial Sequence
  Description of Artificial Sequence: Synthetic oligonucleotide
  Sense strand starting at position 2266 of SEQ ID NO: 1882199
ucucuauguagagggagau

SEQ ID NO: 2102555 - RNA, 19 nt, Artificial Sequence
  Description of Artificial Sequence: Synthetic oligonucleotide
  Antisense strand to SEQ ID NO: 2102554
aucucccucuacauagaga

SEQ ID NO: 2102556 - RNA, 19 nt, Artificial Sequence
  Description of Artificial Sequence: Synthetic oligonucleotide
  Sense strand starting at position 2267 of SEQ ID NO: 1882199
cucuauguagagggagauu

SEQ ID NO: 2102557 - RNA, 19 nt, Artificial Sequence
  Description of Artificial Sequence: Synthetic oligonucleotide
  Antisense strand to SEQ ID NO: 2102556
aaucucccucuacauagag

SEQ ID NO: 2102558 - RNA, 19 nt, Artificial Sequence
  Description of Artificial Sequence: Synthetic oligonucleotide
  Sense strand starting at position 2340 of SEQ ID NO: 1882199
agaggacucuugucuaagu

SEQ ID NO: 2102559 - RNA, 19 nt, Artificial Sequence
  Description of Artificial Sequence: Synthetic oligonucleotide
  Antisense strand to SEQ ID NO: 2102558
acuuagacaagaguccucu

SEQ ID NO: 2102560 - RNA, 19 nt, Artificial Sequence
  Description of Artificial Sequence: Synthetic oligonucleotide
  Sense strand starting at position 2341 of SEQ ID NO: 1882199
gaggacucuugucuaaguu

SEQ ID NO: 2102561 - RNA, 19 nt, Artificial Sequence
  Description of Artificial Sequence: Synthetic oligonucleotide
  Antisense strand to SEQ ID NO: 2102560
aacuuagacaagaguccuc

SEQ ID NO: 2102562 - RNA, 19 nt, Artificial Sequence
  Description of Artificial Sequence: Synthetic oligonucleotide
  Sense strand starting at position 2513 of SEQ ID NO: 1882199
ugagaauccugaguuauga

SEQ ID NO: 2102563 - RNA, 19 nt, Artificial Sequence
  Description of Artificial Sequence: Synthetic oligonucleotide
  Antisense strand to SEQ ID NO: 2102562
ucauaacucaggauucuca

SEQ ID NO: 2102564 - RNA, 19 nt, Artificial Sequence
  Description of Artificial Sequence: Synthetic oligonucleotide
  Sense strand starting at position 2722 of SEQ ID NO: 1882199
aaaucuugucauuguagag

SEQ ID NO: 2102565 - RNA, 19 nt, Artificial Sequence
  Description of Artificial Sequence: Synthetic oligonucleotide
  Antisense strand to SEQ ID NO: 2102564
cucuacaaugacaagauuu

SEQ ID NO: 2102566 - RNA, 19 nt, Artificial Sequence
  Description of Artificial Sequence: Synthetic oligonucleotide
  Sense strand starting at position 2726 of SEQ ID NO: 1882199
cuugucauuguagagauau

SEQ ID NO: 2102567 - RNA, 19 nt, Artificial Sequence
  Description of Artificial Sequence: Synthetic oligonucleotide
  Antisense strand to SEQ ID NO: 2102566
auaucucuacaaugacaag

SEQ ID NO: 2102568 - RNA, 19 nt, Artificial Sequence
  Description of Artificial Sequence: Synthetic oligonucleotide
  Sense strand starting at position 2748 of SEQ ID NO: 1882199
gcagaauaaucuucccgag

SEQ ID NO: 2102569 - RNA, 19 nt, Artificial Sequence
  Description of Artificial Sequence: Synthetic oligonucleotide
  Antisense strand to SEQ ID NO: 2102568
cucgggaagauuauucugc

SEQ ID NO: 2102570 - RNA, 19 nt, Artificial Sequence
  Description of Artificial Sequence: Synthetic oligonucleotide
  Sense strand starting at position 2777 of SEQ ID NO: 1882199
gaauaugucccucaagugu

SEQ ID NO: 2102571 - RNA, 19 nt, Artificial Sequence
  Description of Artificial Sequence: Synthetic oligonucleotide
  Antisense strand to SEQ ID NO: 2102570
acacuugagggacauauuc

SEQ ID NO: 2102572 - RNA, 19 nt, Artificial Sequence
  Description of Artificial Sequence: Synthetic oligonucleotide
  Sense strand starting at position 3154 of SEQ ID NO: 1882199
gacugacuucugcaggaug

SEQ ID NO: 2102573 - RNA, 19 nt, Artificial Sequence
  Description of Artificial Sequence: Synthetic oligonucleotide
  Antisense strand to SEQ ID NO: 2102572
cauccugcagaagucaguc

SEQ ID NO: 2102574 - RNA, 19 nt, Artificial Sequence
  Description of Artificial Sequence: Synthetic oligonucleotide
  Sense strand starting at position 3157 of SEQ ID NO: 1882199
ugacuucugcaggauguga

SEQ ID NO: 2102575 - RNA, 19 nt, Artificial Sequence
  Description of Artificial Sequence: Synthetic oligonucleotide
  Antisense strand to SEQ ID NO: 2102574
ucacauccugcagaaguca

SEQ ID NO: 2102576 - RNA, 19 nt, Artificial Sequence
  Description of Artificial Sequence: Synthetic oligonucleotide
  Sense strand starting at position 3230 of SEQ ID NO: 1882199
gcaugaaugacaugcucag

SEQ ID NO: 2102577 - RNA, 19 nt, Artificial Sequence
  Description of Artificial Sequence: Synthetic oligonucleotide
  Antisense strand to SEQ ID NO: 2102576
cugagcaugucauucaugc

SEQ ID NO: 2102578 - RNA, 19 nt, Artificial Sequence
  Description of Artificial Sequence: Synthetic oligonucleotide
  Sense strand starting at position 3254 of SEQ ID NO: 1882199
ggucauucccaccagagca

SEQ ID NO: 2102579 - RNA, 19 nt, Artificial Sequence
  Description of Artificial Sequence: Synthetic oligonucleotide
  Antisense strand to SEQ ID NO: 2102578
ugcucuggugggaaugacc

SEQ ID NO: 2102580 - RNA, 19 nt, Artificial Sequence
  Description of Artificial Sequence: Synthetic oligonucleotide
  Sense strand starting at position 3286 of SEQ ID NO: 1882199
ggaaucauucggcaucaga

SEQ ID NO: 2102581 - RNA, 19 nt, Artificial Sequence
  Description of Artificial Sequence: Synthetic oligonucleotide
  Antisense strand to SEQ ID NO: 2102580
ucugaugccgaaugauucc

SEQ ID NO: 2102582 - RNA, 19 nt, Artificial Sequence
  Description of Artificial Sequence: Synthetic oligonucleotide
  Sense strand starting at position 3402 of SEQ ID NO: 1882199
cuaugaugagaaugagcua

SEQ ID NO: 2102583 - RNA, 19 nt, Artificial Sequence
  Description of Artificial Sequence: Synthetic oligonucleotide
  Antisense strand to SEQ ID NO: 2102582
uagcucauucucaucauag

SEQ ID NO: 2102584 - RNA, 19 nt, Artificial Sequence
  Description of Artificial Sequence: Synthetic oligonucleotide
  Sense strand starting at position 3504 of SEQ ID NO: 1882199
augcuucuggaguauaauu

SEQ ID NO: 2102585 - RNA, 19 nt, Artificial Sequence
  Description of Artificial Sequence: Synthetic oligonucleotide
  Antisense strand to SEQ ID NO: 2102584
aauuauacuccagaagcau

SEQ ID NO: 2102586 - RNA, 19 nt, Artificial Sequence
  Description of Artificial Sequence: Synthetic oligonucleotide
  Sense strand starting at position 3506 of SEQ ID NO: 1882199
gcuucuggaguauaauuaa

SEQ ID NO: 2102587 - RNA, 19 nt, Artificial Sequence
  Description of Artificial Sequence: Synthetic oligonucleotide
  Antisense strand to SEQ ID NO: 2102586
uuaauuauacuccagaagc

SEQ ID NO: 2102588 - RNA, 19 nt, Artificial Sequence
  Description of Artificial Sequence: Synthetic oligonucleotide
  Sense strand starting at position 3526 of SEQ ID NO: 1882199
auuggauucuagguugagu

SEQ ID NO: 2102589 - RNA, 19 nt, Artificial Sequence
  Description of Artificial Sequence: Synthetic oligonucleotide
  Antisense strand to SEQ ID NO: 2102588
acucaaccuagaauccaau

SEQ ID NO: 2102590 - RNA, 19 nt, Artificial Sequence
  Description of Artificial Sequence: Synthetic oligonucleotide
  Sense strand starting at position 3593 of SEQ ID NO: 1882199
ccuggacuguucuuuggaa

SEQ ID NO: 2102591 - RNA, 19 nt, Artificial Sequence
  Description of Artificial Sequence: Synthetic oligonucleotide
  Antisense strand to SEQ ID NO: 2102590
uuccaaagaacaguccagg

SEQ ID NO: 2102592 - RNA, 19 nt, Artificial Sequence
  Description of Artificial Sequence: Synthetic oligonucleotide
  Sense strand starting at position 3594 of SEQ ID NO: 1882199
cuggacuguucuuuggaau

SEQ ID NO: 2102593 - RNA, 19 nt, Artificial Sequence
  Description of Artificial Sequence: Synthetic oligonucleotide
  Antisense strand to SEQ ID NO: 2102592
auuccaaagaacaguccag

SEQ ID NO: 2102594 - RNA, 19 nt, Artificial Sequence
  Description of Artificial Sequence: Synthetic oligonucleotide
  Sense strand starting at position 3595 of SEQ ID NO: 1882199
uggacuguucuuuggaaua

SEQ ID NO: 2102595 - RNA, 19 nt, Artificial Sequence
  Description of Artificial Sequence: Synthetic oligonucleotide
  Antisense strand to SEQ ID NO: 2102594
uauuccaaagaacagucca

SEQ ID NO: 2102596 - RNA, 19 nt, Artificial Sequence
  Description of Artificial Sequence: Synthetic oligonucleotide
  Sense strand starting at position 3617 of SEQ ID NO: 1882199
agaaguggacacuguaagu

SEQ ID NO: 2102597 - RNA, 19 nt, Artificial Sequence
  Description of Artificial Sequence: Synthetic oligonucleotide
  Antisense strand to SEQ ID NO: 2102596
acuuacaguguccacuucu

SEQ ID NO: 2102598 - RNA, 19 nt, Artificial Sequence
  Description of Artificial Sequence: Synthetic oligonucleotide
  Sense strand starting at position 3752 of SEQ ID NO: 1882199
caaaguugaccugagccau

SEQ ID NO: 2102599 - RNA, 19 nt, Artificial Sequence
  Description of Artificial Sequence: Synthetic oligonucleotide
  Antisense strand to SEQ ID NO: 2102598
auggcucaggucaacuuug

SEQ ID NO: 2102600 - RNA, 19 nt, Artificial Sequence
  Description of Artificial Sequence: Synthetic oligonucleotide
  Sense strand starting at position 3760 of SEQ ID NO: 1882199
accugagccauucggaaau

SEQ ID NO: 2102601 - RNA, 19 nt, Artificial Sequence
  Description of Artificial Sequence: Synthetic oligonucleotide
  Antisense strand to SEQ ID NO: 2102600
auuuccgaauggcucaggu

SEQ ID NO: 2102602 - RNA, 19 nt, Artificial Sequence
  Description of Artificial Sequence: Synthetic oligonucleotide
  Sense strand starting at position 3773 of SEQ ID NO: 1882199
ggaaauauguguguucuag

SEQ ID NO: 2102603 - RNA, 19 nt, Artificial Sequence
  Description of Artificial Sequence: Synthetic oligonucleotide
  Antisense strand to SEQ ID NO: 2102602
cuagaacacacauauuucc

SEQ ID NO: 2102604 - RNA, 19 nt, Artificial Sequence
  Description of Artificial Sequence: Synthetic oligonucleotide
  Sense strand starting at position 3897 of SEQ ID NO: 1882199
aauagugaguucucaggau

SEQ ID NO: 2102605 - RNA, 19 nt, Artificial Sequence
  Description of Artificial Sequence: Synthetic oligonucleotide
  Antisense strand to SEQ ID NO: 2102604
auccugagaacucacuauu

SEQ ID NO: 2102606 - RNA, 19 nt, Artificial Sequence
  Description of Artificial Sequence: Synthetic oligonucleotide
  Sense strand starting at position 207 of SEQ ID NO: 1882200
cagguauccuauccugaag

SEQ ID NO: 2102607 - RNA, 19 nt, Artificial Sequence
  Description of Artificial Sequence: Synthetic oligonucleotide
  Antisense strand to SEQ ID NO: 2102606
cuucaggauaggauaccug

SEQ ID NO: 2102608 - RNA, 19 nt, Artificial Sequence
  Description of Artificial Sequence: Synthetic oligonucleotide
  Sense strand starting at position 210 of SEQ ID NO: 1882200
guauccuauccugaaggua

SEQ ID NO: 2102609 - RNA, 19 nt, Artificial Sequence
  Description of Artificial Sequence: Synthetic oligonucleotide
  Antisense strand to SEQ ID NO: 2102608
uaccuucaggauaggauac

SEQ ID NO: 2102610 - RNA, 19 nt, Artificial Sequence
  Description of Artificial Sequence: Synthetic oligonucleotide
  Sense strand starting at position 235 of SEQ ID NO: 1882200
ggguguguaauaggugaca

SEQ ID NO: 2102611 - RNA, 19 nt, Artificial Sequence
  Description of Artificial Sequence: Synthetic oligonucleotide
  Antisense strand to SEQ ID NO: 2102610
ugucaccuauuacacaccc

SEQ ID NO: 2102612 - RNA, 19 nt, Artificial Sequence
  Description of Artificial Sequence: Synthetic oligonucleotide
  Sense strand starting at position 237 of SEQ ID NO: 1882200
guguguaauaggugacaau

SEQ ID NO: 2102613 - RNA, 19 nt, Artificial Sequence
  Description of Artificial Sequence: Synthetic oligonucleotide
  Antisense strand to SEQ ID NO: 2102612
auugucaccuauuacacac

SEQ ID NO: 2102614 - RNA, 19 nt, Artificial Sequence
  Description of Artificial Sequence: Synthetic oligonucleotide
  Sense strand starting at position 238 of SEQ ID NO: 1882200
uguguaauaggugacaaua

SEQ ID NO: 2102615 - RNA, 19 nt, Artificial Sequence
  Description of Artificial Sequence: Synthetic oligonucleotide
  Antisense strand to SEQ ID NO: 2102614
uauugucaccuauuacaca

SEQ ID NO: 2102616 - RNA, 19 nt, Artificial Sequence
  Description of Artificial Sequence: Synthetic oligonucleotide
  Sense strand starting at position 248 of SEQ ID NO: 1882200
gugacaauauaucuaaguu

SEQ ID NO: 2102617 - RNA, 19 nt, Artificial Sequence
  Description of Artificial Sequence: Synthetic oligonucleotide
  Antisense strand to SEQ ID NO: 2102616
aacuuagauauauugucac

SEQ ID NO: 2102618 - RNA, 19 nt, Artificial Sequence
  Description of Artificial Sequence: Synthetic oligonucleotide
  Sense strand starting at position 291 of SEQ ID NO: 1882200
guauacucuaugugaggca

SEQ ID NO: 2102619 - RNA, 19 nt, Artificial Sequence
  Description of Artificial Sequence: Synthetic oligonucleotide
  Antisense strand to SEQ ID NO: 2102618
ugccucacauagaguauac

SEQ ID NO: 2102620 - RNA, 19 nt, Artificial Sequence
  Description of Artificial Sequence: Synthetic oligonucleotide
  Sense strand starting at position 296 of SEQ ID NO: 1882200
cucuaugugaggcaucagu

SEQ ID NO: 2102621 - RNA, 19 nt, Artificial Sequence
  Description of Artificial Sequence: Synthetic oligonucleotide
  Antisense strand to SEQ ID NO: 2102620
acugaugccucacauagag

SEQ ID NO: 2102622 - RNA, 19 nt, Artificial Sequence
  Description of Artificial Sequence: Synthetic oligonucleotide
  Sense strand starting at position 323 of SEQ ID NO: 1882200
ucuguagagccagagagua

SEQ ID NO: 2102623 - RNA, 19 nt, Artificial Sequence
  Description of Artificial Sequence: Synthetic oligonucleotide
  Antisense strand to SEQ ID NO: 2102622
uacucucuggcucuacaga

SEQ ID NO: 2102624 - RNA, 19 nt, Artificial Sequence
  Description of Artificial Sequence: Synthetic oligonucleotide
  Sense strand starting at position 353 of SEQ ID NO: 1882200
cuuugugggccauaagguu

SEQ ID NO: 2102625 - RNA, 19 nt, Artificial Sequence
  Description of Artificial Sequence: Synthetic oligonucleotide
  Antisense strand to SEQ ID NO: 2102624
aaccuuauggcccacaaag

SEQ ID NO: 2102626 - RNA, 19 nt, Artificial Sequence
  Description of Artificial Sequence: Synthetic oligonucleotide
  Sense strand starting at position 362 of SEQ ID NO: 1882200
ccauaagguuucucuugua

SEQ ID NO: 2102627 - RNA, 19 nt, Artificial Sequence
  Description of Artificial Sequence: Synthetic oligonucleotide
  Antisense strand to SEQ ID NO: 2102626
uacaagagaaaccuuaugg

SEQ ID NO: 2102628 - RNA, 19 nt, Artificial Sequence
  Description of Artificial Sequence: Synthetic oligonucleotide
  Sense strand starting at position 425 of SEQ ID NO: 1882200
gaacgugacuggguuccaa

SEQ ID NO: 2102629 - RNA, 19 nt, Artificial Sequence
  Description of Artificial Sequence: Synthetic oligonucleotide
  Antisense strand to SEQ ID NO: 2102628
uuggaacccagucacguuc

SEQ ID NO: 2102630 - RNA, 19 nt, Artificial Sequence
  Description of Artificial Sequence: Synthetic oligonucleotide
  Sense strand starting at position 654 of SEQ ID NO: 1882200
guuguuuaaacauagaguc

SEQ ID NO: 2102631 - RNA, 19 nt, Artificial Sequence
  Description of Artificial Sequence: Synthetic oligonucleotide
  Antisense strand to SEQ ID NO: 2102630
gacucuauguuuaaacaac

SEQ ID NO: 2102632 - RNA, 19 nt, Artificial Sequence
  Description of Artificial Sequence: Synthetic oligonucleotide
  Sense strand starting at position 664 of SEQ ID NO: 1882200
cauagagucuguuucuaug

SEQ ID NO: 2102633 - RNA, 19 nt, Artificial Sequence
  Description of Artificial Sequence: Synthetic oligonucleotide
  Antisense strand to SEQ ID NO: 2102632
cauagaaacagacucuaug

SEQ ID NO: 2102634 - RNA, 19 nt, Artificial Sequence
  Description of Artificial Sequence: Synthetic oligonucleotide
  Sense strand starting at position 692 of SEQ ID NO: 1882200
uuuaauggcuguuuaaacu

SEQ ID NO: 2102635 - RNA, 19 nt, Artificial Sequence
  Description of Artificial Sequence: Synthetic oligonucleotide
  Antisense strand to SEQ ID NO: 2102634
aguuuaaacagccauuaaa

SEQ ID NO: 2102636 - RNA, 19 nt, Artificial Sequence
  Description of Artificial Sequence: Synthetic oligonucleotide
  Sense strand starting at position 699 of SEQ ID NO: 1882200
gcuguuuaaacugguagga

SEQ ID NO: 2102637 - RNA, 19 nt, Artificial Sequence
  Description of Artificial Sequence: Synthetic oligonucleotide
  Antisense strand to SEQ ID NO: 2102636
uccuaccaguuuaaacagc

SEQ ID NO: 2102638 - RNA, 19 nt, Artificial Sequence
  Description of Artificial Sequence: Synthetic oligonucleotide
  Sense strand starting at position 778 of SEQ ID NO: 1882200
cugucuggauguucuauaa

SEQ ID NO: 2102639 - RNA, 19 nt, Artificial Sequence
  Description of Artificial Sequence: Synthetic oligonucleotide
  Antisense strand to SEQ ID NO: 2102638
uuauagaacauccagacag

SEQ ID NO: 2102640 - RNA, 19 nt, Artificial Sequence
  Description of Artificial Sequence: Synthetic oligonucleotide
  Sense strand starting at position 1397 of SEQ ID NO: 1882200
uagguaacuucuccaaggu

SEQ ID NO: 2102641 - RNA, 19 nt, Artificial Sequence
  Description of Artificial Sequence: Synthetic oligonucleotide
  Antisense strand to SEQ ID NO: 2102640
accuuggagaaguuaccua

SEQ ID NO: 2102642 - RNA, 19 nt, Artificial Sequence
  Description of Artificial Sequence: Synthetic oligonucleotide
  Sense strand starting at position 1536 of SEQ ID NO: 1882200
ccagguacucuuuauaaug

SEQ ID NO: 2102643 - RNA, 19 nt, Artificial Sequence
  Description of Artificial Sequence: Synthetic oligonucleotide
  Antisense strand to SEQ ID NO: 2102642
cauuauaaagaguaccugg

SEQ ID NO: 2102644 - RNA, 19 nt, Artificial Sequence
  Description of Artificial Sequence: Synthetic oligonucleotide
  Sense strand starting at position 1728 of SEQ ID NO: 1882200
acgccaauucuuuauuaag

SEQ ID NO: 2102645 - RNA, 19 nt, Artificial Sequence
  Description of Artificial Sequence: Synthetic oligonucleotide
  Antisense strand to SEQ ID NO: 2102644
cuuaauaaagaauuggcgu

SEQ ID NO: 2102646 - RNA, 19 nt, Artificial Sequence
  Description of Artificial Sequence: Synthetic oligonucleotide
  Sense strand starting at position 2101 of SEQ ID NO: 1882200
cugaguuaugggcgaaucu

SEQ ID NO: 2102647 - RNA, 19 nt, Artificial Sequence
  Description of Artificial Sequence: Synthetic oligonucleotide
  Antisense strand to SEQ ID NO: 2102646
agauucgcccauaacucag

SEQ ID NO: 2102648 - RNA, 19 nt, Artificial Sequence
  Description of Artificial Sequence: Synthetic oligonucleotide
  Sense strand starting at position 2102 of SEQ ID NO: 1882200
ugaguuaugggcgaaucuc

SEQ ID NO: 2102649 - RNA, 19 nt, Artificial Sequence
  Description of Artificial Sequence: Synthetic oligonucleotide
  Antisense strand to SEQ ID NO: 2102648
gagauucgcccauaacuca

SEQ ID NO: 2102650 - RNA, 19 nt, Artificial Sequence
  Description of Artificial Sequence: Synthetic oligonucleotide
  Sense strand starting at position 2166 of SEQ ID NO: 1882200
cgaggauucucuuucucau

SEQ ID NO: 2102651 - RNA, 19 nt, Artificial Sequence
  Description of Artificial Sequence: Synthetic oligonucleotide
  Antisense strand to SEQ ID NO: 2102650
augagaaagagaauccucg

SEQ ID NO: 2102652 - RNA, 19 nt, Artificial Sequence
  Description of Artificial Sequence: Synthetic oligonucleotide
  Sense strand starting at position 2214 of SEQ ID NO: 1882200
accgcacuucucgaauuau

SEQ ID NO: 2102653 - RNA, 19 nt, Artificial Sequence
  Description of Artificial Sequence: Synthetic oligonucleotide
  Antisense strand to SEQ ID NO: 2102652
auaauucgagaagugcggu

SEQ ID NO: 2102654 - RNA, 19 nt, Artificial Sequence
  Description of Artificial Sequence: Synthetic oligonucleotide
  Sense strand starting at position 2790 of SEQ ID NO: 1882200
uggcuaaaucgggaagcga

SEQ ID NO: 2102655 - RNA, 19 nt, Artificial Sequence
  Description of Artificial Sequence: Synthetic oligonucleotide
  Antisense strand to SEQ ID NO: 2102654
ucgcuucccgauuuagcca

SEQ ID NO: 2102656 - RNA, 19 nt, Artificial Sequence
  Description of Artificial Sequence: Synthetic oligonucleotide
  Sense strand starting at position 3413 of SEQ ID NO: 1882200
cggguuguuggccagacaa

SEQ ID NO: 2102657 - RNA, 19 nt, Artificial Sequence
  Description of Artificial Sequence: Synthetic oligonucleotide
  Antisense strand to SEQ ID NO: 2102656
uugucuggccaacaacccg

SEQ ID NO: 2102658 - RNA, 19 nt, Artificial Sequence
  Description of Artificial Sequence: Synthetic oligonucleotide
  Sense strand starting at position 3415 of SEQ ID NO: 1882200
gguuguuggccagacaagu

SEQ ID NO: 2102659 - RNA, 19 nt, Artificial Sequence
  Description of Artificial Sequence: Synthetic oligonucleotide
  Antisense strand to SEQ ID NO: 2102658
acuugucuggccaacaacc

SEQ ID NO: 2102660 - RNA, 19 nt, Artificial Sequence
  Description of Artificial Sequence: Synthetic oligonucleotide
  Sense strand starting at position 3438 of SEQ ID NO: 1882200
gaaacugccugcuuugaag

SEQ ID NO: 2102661 - RNA, 19 nt, Artificial Sequence
  Description of Artificial Sequence: Synthetic oligonucleotide
  Antisense strand to SEQ ID NO: 2102660
cuucaaagcaggcaguuuc

SEQ ID NO: 2102662 - RNA, 19 nt, Artificial Sequence
  Description of Artificial Sequence: Synthetic oligonucleotide
  Sense strand starting at position 3447 of SEQ ID NO: 1882200
ugcuuugaagcaugaauaa

SEQ ID NO: 2102663 - RNA, 19 nt, Artificial Sequence
  Description of Artificial Sequence: Synthetic oligonucleotide
  Antisense strand to SEQ ID NO: 2102662
uuauucaugcuucaaagca

SEQ ID NO: 2102664 - RNA, 19 nt, Artificial Sequence
  Description of Artificial Sequence: Synthetic oligonucleotide
  Sense strand starting at position 3475 of SEQ ID NO: 1882200
gacucuuagcaauguaaug

SEQ ID NO: 2102665 - RNA, 19 nt, Artificial Sequence
  Description of Artificial Sequence: Synthetic oligonucleotide
  Antisense strand to SEQ ID NO: 2102664
cauuacauugcuaagaguc

SEQ ID NO: 2102666 - RNA, 19 nt, Artificial Sequence
  Description of Artificial Sequence: Synthetic oligonucleotide
  Sense strand starting at position 3505 of SEQ ID NO: 1882200
ucgggagaugugcgaagau

SEQ ID NO: 2102667 - RNA, 19 nt, Artificial Sequence
  Description of Artificial Sequence: Synthetic oligonucleotide
  Antisense strand to SEQ ID NO: 2102666
aucuucgcacaucucccga

SEQ ID NO: 2102668 - RNA, 19 nt, Artificial Sequence
  Description of Artificial Sequence: Synthetic oligonucleotide
  Sense strand starting at position 3565 of SEQ ID NO: 1882200
gcucguuugcaguuaucuu

SEQ ID NO: 2102669 - RNA, 19 nt, Artificial Sequence
  Description of Artificial Sequence: Synthetic oligonucleotide
  Antisense strand to SEQ ID NO: 2102668
aagauaacugcaaacgagc

SEQ ID NO: 2102670 - RNA, 19 nt, Artificial Sequence
  Description of Artificial Sequence: Synthetic oligonucleotide
  Sense strand starting at position 3593 of SEQ ID NO: 1882200
uuuaguuugguagagguuu

SEQ ID NO: 2102671 - RNA, 19 nt, Artificial Sequence
  Description of Artificial Sequence: Synthetic oligonucleotide
  Antisense strand to SEQ ID NO: 2102670
aaaccucuaccaaacuaaa

SEQ ID NO: 2102672 - RNA, 19 nt, Artificial Sequence
  Description of Artificial Sequence: Synthetic oligonucleotide
  Sense strand starting at position 3595 of SEQ ID NO: 1882200
uaguuugguagagguuuaa

SEQ ID NO: 2102673 - RNA, 19 nt, Artificial Sequence
  Description of Artificial Sequence: Synthetic oligonucleotide
  Antisense strand to SEQ ID NO: 2102672
uuaaaccucuaccaaacua

SEQ ID NO: 2102674 - RNA, 19 nt, Artificial Sequence
  Description of Artificial Sequence: Synthetic oligonucleotide
  Sense strand starting at position 3599 of SEQ ID NO: 1882200
uugguagagguuuaauguu

SEQ ID NO: 2102675 - RNA, 19 nt, Artificial Sequence
  Description of Artificial Sequence: Synthetic oligonucleotide
  Antisense strand to SEQ ID NO: 2102674
aacauuaaaccucuaccaa

SEQ ID NO: 2102676 - RNA, 19 nt, Artificial Sequence
  Description of Artificial Sequence: Synthetic oligonucleotide
  Sense strand starting at position 3676 of SEQ ID NO: 1882200
acuuuacuaguauagguaa

SEQ ID NO: 2102677 - RNA, 19 nt, Artificial Sequence
  Description of Artificial Sequence: Synthetic oligonucleotide
  Antisense strand to SEQ ID NO: 2102676
uuaccuauacuaguaaagu

SEQ ID NO: 2102678 - RNA, 19 nt, Artificial Sequence
  Description of Artificial Sequence: Synthetic oligonucleotide
  Sense strand starting at position 3816 of SEQ ID NO: 1882200
guauaagaauuguuaagug

SEQ ID NO: 2102679 - RNA, 19 nt, Artificial Sequence
  Description of Artificial Sequence: Synthetic oligonucleotide
  Antisense strand to SEQ ID NO: 2102678
cacuuaacaauucuuauac

SEQ ID NO: 2102680 - RNA, 19 nt, Artificial Sequence
  Description of Artificial Sequence: Synthetic oligonucleotide
  Sense strand starting at position 3820 of SEQ ID NO: 1882200
aagaauuguuaaguguaag

SEQ ID NO: 2102681 - RNA, 19 nt, Artificial Sequence
  Description of Artificial Sequence: Synthetic oligonucleotide
  Antisense strand to SEQ ID NO: 2102680
cuuacacuuaacaauucuu

SEQ ID NO: 2102682 - RNA, 19 nt, Artificial Sequence
  Description of Artificial Sequence: Synthetic oligonucleotide
  Sense strand starting at position 3823 of SEQ ID NO: 1882200
aauuguuaaguguaagcca

SEQ ID NO: 2102683 - RNA, 19 nt, Artificial Sequence
  Description of Artificial Sequence: Synthetic oligonucleotide
  Antisense strand to SEQ ID NO: 2102682
uggcuuacacuuaacaauu

SEQ ID NO: 2102684 - RNA, 19 nt, Artificial Sequence
  Description of Artificial Sequence: Synthetic oligonucleotide
  Sense strand starting at position 3832 of SEQ ID NO: 1882200
guguaagccacuuaacgau

SEQ ID NO: 2102685 - RNA, 19 nt, Artificial Sequence
  Description of Artificial Sequence: Synthetic oligonucleotide
  Antisense strand to SEQ ID NO: 2102684
aucguuaaguggcuuacac

SEQ ID NO: 2102686 - RNA, 19 nt, Artificial Sequence
  Description of Artificial Sequence: Synthetic oligonucleotide
  Sense strand starting at position 73 of SEQ ID NO: 1882201
gacagaaucuugccguguu

SEQ ID NO: 2102687 - RNA, 19 nt, Artificial Sequence
  Description of Artificial Sequence: Synthetic oligonucleotide
  Antisense strand to SEQ ID NO: 2102686
aacacggcaagauucuguc

SEQ ID NO: 2102688 - RNA, 19 nt, Artificial Sequence
  Description of Artificial Sequence: Synthetic oligonucleotide
  Sense strand starting at position 256 of SEQ ID NO: 1882201
uuggcagucuggugucaaa

SEQ ID NO: 2102689 - RNA, 19 nt, Artificial Sequence
  Description of Artificial Sequence: Synthetic oligonucleotide
  Antisense strand to SEQ ID NO: 2102688
uuugacaccagacugccaa

SEQ ID NO: 2102690 - RNA, 19 nt, Artificial Sequence
  Description of Artificial Sequence: Synthetic oligonucleotide
  Sense strand starting at position 500 of SEQ ID NO: 1882201
ggaagaugcucagacaaac

SEQ ID NO: 2102691 - RNA, 19 nt, Artificial Sequence
  Description of Artificial Sequence: Synthetic oligonucleotide
  Antisense strand to SEQ ID NO: 2102690
guuugucugagcaucuucc

SEQ ID NO: 2102692 - RNA, 19 nt, Artificial Sequence
  Description of Artificial Sequence: Synthetic oligonucleotide
  Sense strand starting at position 546 of SEQ ID NO: 1882201
cagcauauguuagccauga

SEQ ID NO: 2102693 - RNA, 19 nt, Artificial Sequence
  Description of Artificial Sequence: Synthetic oligonucleotide
  Antisense strand to SEQ ID NO: 2102692
ucauggcuaacauaugcug

SEQ ID NO: 2102694 - RNA, 19 nt, Artificial Sequence
  Description of Artificial Sequence: Synthetic oligonucleotide
  Sense strand starting at position 550 of SEQ ID NO: 1882201
auauguuagccaugaccac

SEQ ID NO: 2102695 - RNA, 19 nt, Artificial Sequence
  Description of Artificial Sequence: Synthetic oligonucleotide
  Antisense strand to SEQ ID NO: 2102694
guggucauggcuaacauau

SEQ ID NO: 2102696 - RNA, 19 nt, Artificial Sequence
  Description of Artificial Sequence: Synthetic oligonucleotide
  Sense strand starting at position 656 of SEQ ID NO: 1882201
gggaaugucccuggugguu

SEQ ID NO: 2102697 - RNA, 19 nt, Artificial Sequence
  Description of Artificial Sequence: Synthetic oligonucleotide
  Antisense strand to SEQ ID NO: 2102696
aaccaccagggacauuccc

SEQ ID NO: 2102698 - RNA, 19 nt, Artificial Sequence
  Description of Artificial Sequence: Synthetic oligonucleotide
  Sense strand starting at position 668 of SEQ ID NO: 1882201
ggugguugcucuuucagca

SEQ ID NO: 2102699 - RNA, 19 nt, Artificial Sequence
  Description of Artificial Sequence: Synthetic oligonucleotide
  Antisense strand to SEQ ID NO: 2102698
ugcugaaagagcaaccacc

SEQ ID NO: 2102700 - RNA, 19 nt, Artificial Sequence
  Description of Artificial Sequence: Synthetic oligonucleotide
  Sense strand starting at position 770 of SEQ ID NO: 1882201
gaccuuugaucagaaagua

SEQ ID NO: 2102701 - RNA, 19 nt, Artificial Sequence
  Description of Artificial Sequence: Synthetic oligonucleotide
  Antisense strand to SEQ ID NO: 2102700
uacuuucugaucaaagguc

SEQ ID NO: 2102702 - RNA, 19 nt, Artificial Sequence
  Description of Artificial Sequence: Synthetic oligonucleotide
  Sense strand starting at position 914 of SEQ ID NO: 1882201
guaagcugauuccucuuua

SEQ ID NO: 2102703 - RNA, 19 nt, Artificial Sequence
  Description of Artificial Sequence: Synthetic oligonucleotide
  Antisense strand to SEQ ID NO: 2102702
uaaagaggaaucagcuuac

SEQ ID NO: 2102704 - RNA, 19 nt, Artificial Sequence
  Description of Artificial Sequence: Synthetic oligonucleotide
  Sense strand starting at position 1074 of SEQ ID NO: 1882201
gcacgaucguugucuagcu

SEQ ID NO: 2102705 - RNA, 19 nt, Artificial Sequence
  Description of Artificial Sequence: Synthetic oligonucleotide
  Antisense strand to SEQ ID NO: 2102704
agcuagacaacgaucgugc

SEQ ID NO: 2102706 - RNA, 19 nt, Artificial Sequence
  Description of Artificial Sequence: Synthetic oligonucleotide
  Sense strand starting at position 1129 of SEQ ID NO: 1882201
uugccuccuggcugaagau

SEQ ID NO: 2102707 - RNA, 19 nt, Artificial Sequence
  Description of Artificial Sequence: Synthetic oligonucleotide
  Antisense strand to SEQ ID NO: 2102706
aucuucagccaggaggcaa

SEQ ID NO: 2102708 - RNA, 19 nt, Artificial Sequence
  Description of Artificial Sequence: Synthetic oligonucleotide
  Sense strand starting at position 1240 of SEQ ID NO: 1882201
ggaguagacucuguggucu

SEQ ID NO: 2102709 - RNA, 19 nt, Artificial Sequence
  Description of Artificial Sequence: Synthetic oligonucleotide
  Antisense strand to SEQ ID NO: 2102708
agaccacagagucuacucc

SEQ ID NO: 2102710 - RNA, 19 nt, Artificial Sequence
  Description of Artificial Sequence: Synthetic oligonucleotide
  Sense strand starting at position 1246 of SEQ ID NO: 1882201
gacucuguggucugucuga

SEQ ID NO: 2102711 - RNA, 19 nt, Artificial Sequence
  Description of Artificial Sequence: Synthetic oligonucleotide
  Antisense strand to SEQ ID NO: 2102710
ucagacagaccacagaguc

SEQ ID NO: 2102712 - RNA, 19 nt, Artificial Sequence
  Description of Artificial Sequence: Synthetic oligonucleotide
  Sense strand starting at position 1396 of SEQ ID NO: 1882201
gagguuuaguuuccauguu

SEQ ID NO: 2102713 - RNA, 19 nt, Artificial Sequence
  Description of Artificial Sequence: Synthetic oligonucleotide
  Antisense strand to SEQ ID NO: 2102712
aacauggaaacuaaaccuc

SEQ ID NO: 2102714 - RNA, 19 nt, Artificial Sequence
  Description of Artificial Sequence: Synthetic oligonucleotide
  Sense strand starting at position 1416 of SEQ ID NO: 1882201
uguucugaguucuuucuau

SEQ ID NO: 2102715 - RNA, 19 nt, Artificial Sequence
  Description of Artificial Sequence: Synthetic oligonucleotide
  Antisense strand to SEQ ID NO: 2102714
auagaaagaacucagaaca

SEQ ID NO: 2102716 - RNA, 19 nt, Artificial Sequence
  Description of Artificial Sequence: Synthetic oligonucleotide
  Sense strand starting at position 1552 of SEQ ID NO: 1882201
ggccgugcuuccucagaag

SEQ ID NO: 2102717 - RNA, 19 nt, Artificial Sequence
  Description of Artificial Sequence: Synthetic oligonucleotide
  Antisense strand to SEQ ID NO: 2102716
cuucugaggaagcacggcc

SEQ ID NO: 2102718 - RNA, 19 nt, Artificial Sequence
  Description of Artificial Sequence: Synthetic oligonucleotide
  Sense strand starting at position 1564 of SEQ ID NO: 1882201
ucagaaggcucuugggaag

SEQ ID NO: 2102719 - RNA, 19 nt, Artificial Sequence
  Description of Artificial Sequence: Synthetic oligonucleotide
  Antisense strand to SEQ ID NO: 2102718
cuucccaagagccuucuga

SEQ ID NO: 2102720 - RNA, 19 nt, Artificial Sequence
  Description of Artificial Sequence: Synthetic oligonucleotide
  Sense strand starting at position 1682 of SEQ ID NO: 1882201
gugugugccucugugucau

SEQ ID NO: 2102721 - RNA, 19 nt, Artificial Sequence
  Description of Artificial Sequence: Synthetic oligonucleotide
  Antisense strand to SEQ ID NO: 2102720
augacacagaggcacacac

SEQ ID NO: 2102722 - RNA, 19 nt, Artificial Sequence
  Description of Artificial Sequence: Synthetic oligonucleotide
  Sense strand starting at position 1684 of SEQ ID NO: 1882201
gugugccucugugucauua

SEQ ID NO: 2102723 - RNA, 19 nt, Artificial Sequence
  Description of Artificial Sequence: Synthetic oligonucleotide
  Antisense strand to SEQ ID NO: 2102722
uaaugacacagaggcacac

SEQ ID NO: 2102724 - RNA, 19 nt, Artificial Sequence
  Description of Artificial Sequence: Synthetic oligonucleotide
  Sense strand starting at position 1686 of SEQ ID NO: 1882201
gugccucugugucauuaca

SEQ ID NO: 2102725 - RNA, 19 nt, Artificial Sequence
  Description of Artificial Sequence: Synthetic oligonucleotide
  Antisense strand to SEQ ID NO: 2102724
uguaaugacacagaggcac

SEQ ID NO: 2102726 - RNA, 19 nt, Artificial Sequence
  Description of Artificial Sequence: Synthetic oligonucleotide
  Sense strand starting at position 1688 of SEQ ID NO: 1882201
gccucugugucauuacaug

SEQ ID NO: 2102727 - RNA, 19 nt, Artificial Sequence
  Description of Artificial Sequence: Synthetic oligonucleotide
  Antisense strand to SEQ ID NO: 2102726
cauguaaugacacagaggc

SEQ ID NO: 2102728 - RNA, 19 nt, Artificial Sequence
  Description of Artificial Sequence: Synthetic oligonucleotide
  Sense strand starting at position 1693 of SEQ ID NO: 1882201
ugugucauuacaugcuguu

SEQ ID NO: 2102729 - RNA, 19 nt, Artificial Sequence
  Description of Artificial Sequence: Synthetic oligonucleotide
  Antisense strand to SEQ ID NO: 2102728
aacagcauguaaugacaca

SEQ ID NO: 2102730 - RNA, 19 nt, Artificial Sequence
  Description of Artificial Sequence: Synthetic oligonucleotide
  Sense strand starting at position 1699 of SEQ ID NO: 1882201
auuacaugcuguucucuua

SEQ ID NO: 2102731 - RNA, 19 nt, Artificial Sequence
  Description of Artificial Sequence: Synthetic oligonucleotide
  Antisense strand to SEQ ID NO: 2102730
uaagagaacagcauguaau

SEQ ID NO: 2102732 - RNA, 19 nt, Artificial Sequence
  Description of Artificial Sequence: Synthetic oligonucleotide
  Sense strand starting at position 1706 of SEQ ID NO: 1882201
gcuguucucuuauauagau

SEQ ID NO: 2102733 - RNA, 19 nt, Artificial Sequence
  Description of Artificial Sequence: Synthetic oligonucleotide
  Antisense strand to SEQ ID NO: 2102732
aucuauauaagagaacagc

SEQ ID NO: 2102734 - RNA, 19 nt, Artificial Sequence
  Description of Artificial Sequence: Synthetic oligonucleotide
  Sense strand starting at position 1742 of SEQ ID NO: 1882201
ugucuuuguguccaaauuc

SEQ ID NO: 2102735 - RNA, 19 nt, Artificial Sequence
  Description of Artificial Sequence: Synthetic oligonucleotide
  Antisense strand to SEQ ID NO: 2102734
gaauuuggacacaaagaca

SEQ ID NO: 2102736 - RNA, 19 nt, Artificial Sequence
  Description of Artificial Sequence: Synthetic oligonucleotide
  Sense strand starting at position 2544 of SEQ ID NO: 1882201
ggaccucagucauuggauu

SEQ ID NO: 2102737 - RNA, 19 nt, Artificial Sequence
  Description of Artificial Sequence: Synthetic oligonucleotide
  Antisense strand to SEQ ID NO: 2102736
aauccaaugacugaggucc

SEQ ID NO: 2102738 - RNA, 19 nt, Artificial Sequence
  Description of Artificial Sequence: Synthetic oligonucleotide
  Sense strand starting at position 2545 of SEQ ID NO: 1882201
gaccucagucauuggauua

SEQ ID NO: 2102739 - RNA, 19 nt, Artificial Sequence
  Description of Artificial Sequence: Synthetic oligonucleotide
  Antisense strand to SEQ ID NO: 2102738
uaauccaaugacugagguc

SEQ ID NO: 2102740 - RNA, 19 nt, Artificial Sequence
  Description of Artificial Sequence: Synthetic oligonucleotide
  Sense strand starting at position 2550 of SEQ ID NO: 1882201
cagucauuggauuagagcu

SEQ ID NO: 2102741 - RNA, 19 nt, Artificial Sequence
  Description of Artificial Sequence: Synthetic oligonucleotide
  Antisense strand to SEQ ID NO: 2102740
agcucuaauccaaugacug

SEQ ID NO: 2102742 - RNA, 19 nt, Artificial Sequence
  Description of Artificial Sequence: Synthetic oligonucleotide
  Sense strand starting at position 2932 of SEQ ID NO: 1882201
gaaagugagccauguggaa

SEQ ID NO: 2102743 - RNA, 19 nt, Artificial Sequence
  Description of Artificial Sequence: Synthetic oligonucleotide
  Antisense strand to SEQ ID NO: 2102742
uuccacauggcucacuuuc

SEQ ID NO: 2102744 - RNA, 19 nt, Artificial Sequence
  Description of Artificial Sequence: Synthetic oligonucleotide
  Sense strand starting at position 2934 of SEQ ID NO: 1882201
aagugagccauguggaagu

SEQ ID NO: 2102745 - RNA, 19 nt, Artificial Sequence
  Description of Artificial Sequence: Synthetic oligonucleotide
  Antisense strand to SEQ ID NO: 2102744
acuuccacauggcucacuu

SEQ ID NO: 2102746 - RNA, 19 nt, Artificial Sequence
  Description of Artificial Sequence: Synthetic oligonucleotide
  Sense strand starting at position 3042 of SEQ ID NO: 1882201
ggcugugugcugcaggaga

SEQ ID NO: 2102747 - RNA, 19 nt, Artificial Sequence
  Description of Artificial Sequence: Synthetic oligonucleotide
  Antisense strand to SEQ ID NO: 2102746
ucuccugcagcacacagcc

SEQ ID NO: 2102748 - RNA, 19 nt, Artificial Sequence
  Description of Artificial Sequence: Synthetic oligonucleotide
  Sense strand starting at position 3130 of SEQ ID NO: 1882201
cauguaggucuugauugga

SEQ ID NO: 2102749 - RNA, 19 nt, Artificial Sequence
  Description of Artificial Sequence: Synthetic oligonucleotide
  Antisense strand to SEQ ID NO: 2102748
uccaaucaagaccuacaug

SEQ ID NO: 2102750 - RNA, 19 nt, Artificial Sequence
  Description of Artificial Sequence: Synthetic oligonucleotide
  Sense strand starting at position 3201 of SEQ ID NO: 1882201
acaggagucuggugauuuc

SEQ ID NO: 2102751 - RNA, 19 nt, Artificial Sequence
  Description of Artificial Sequence: Synthetic oligonucleotide
  Antisense strand to SEQ ID NO: 2102750
gaaaucaccagacuccugu

SEQ ID NO: 2102752 - RNA, 19 nt, Artificial Sequence
  Description of Artificial Sequence: Synthetic oligonucleotide
  Sense strand starting at position 3363 of SEQ ID NO: 1882201
gaacauaugcugggugagu

SEQ ID NO: 2102753 - RNA, 19 nt, Artificial Sequence
  Description of Artificial Sequence: Synthetic oligonucleotide
  Antisense strand to SEQ ID NO: 2102752
acucacccagcauauguuc

SEQ ID NO: 2102754 - RNA, 19 nt, Artificial Sequence
  Description of Artificial Sequence: Synthetic oligonucleotide
  Sense strand starting at position 3365 of SEQ ID NO: 1882201
acauaugcugggugaguga

SEQ ID NO: 2102755 - RNA, 19 nt, Artificial Sequence
  Description of Artificial Sequence: Synthetic oligonucleotide
  Antisense strand to SEQ ID NO: 2102754
ucacucacccagcauaugu

SEQ ID NO: 2102756 - RNA, 19 nt, Artificial Sequence
  Description of Artificial Sequence: Synthetic oligonucleotide
  Sense strand starting at position 3580 of SEQ ID NO: 1882201
gcaugucacuauuaaggua

SEQ ID NO: 2102757 - RNA, 19 nt, Artificial Sequence
  Description of Artificial Sequence: Synthetic oligonucleotide
  Antisense strand to SEQ ID NO: 2102756
uaccuuaauagugacaugc

SEQ ID NO: 2102758 - RNA, 19 nt, Artificial Sequence
  Description of Artificial Sequence: Synthetic oligonucleotide
  Sense strand starting at position 3886 of SEQ ID NO: 1882201
ccuggucuagccuaaucua

SEQ ID NO: 2102759 - RNA, 19 nt, Artificial Sequence
  Description of Artificial Sequence: Synthetic oligonucleotide
  Antisense strand to SEQ ID NO: 2102758
uagauuaggcuagaccagg

SEQ ID NO: 2102760 - RNA, 19 nt, Artificial Sequence
  Description of Artificial Sequence: Synthetic oligonucleotide
  Sense strand starting at position 3894 of SEQ ID NO: 1882201
agccuaaucuaguguauca

SEQ ID NO: 2102761 - RNA, 19 nt, Artificial Sequence
  Description of Artificial Sequence: Synthetic oligonucleotide
  Antisense strand to SEQ ID NO: 2102760
ugauacacuagauuaggcu

SEQ ID NO: 2102762 - RNA, 19 nt, Artificial Sequence
  Description of Artificial Sequence: Synthetic oligonucleotide
  Sense strand starting at position 3896 of SEQ ID NO: 1882201
ccuaaucuaguguaucauu

SEQ ID NO: 2102763 - RNA, 19 nt, Artificial Sequence
  Description of Artificial Sequence: Synthetic oligonucleotide
  Antisense strand to SEQ ID NO: 2102762
aaugauacacuagauuagg

SEQ ID NO: 2102764 - RNA, 19 nt, Artificial Sequence
  Description of Artificial Sequence: Synthetic oligonucleotide
  Sense strand starting at position 3905 of SEQ ID NO: 1882201
guguaucauuuccaggaga

SEQ ID NO: 2102765 - RNA, 19 nt, Artificial Sequence
  Description of Artificial Sequence: Synthetic oligonucleotide
  Antisense strand to SEQ ID NO: 2102764
ucuccuggaaaugauacac

SEQ ID NO: 2102766 - RNA, 19 nt, Artificial Sequence
  Description of Artificial Sequence: Synthetic oligonucleotide
  Sense strand starting at position 301 of SEQ ID NO: 1882202
cugaauaaaugccagagau

SEQ ID NO: 2102767 - RNA, 19 nt, Artificial Sequence
  Description of Artificial Sequence: Synthetic oligonucleotide
  Antisense strand to SEQ ID NO: 2102766
aucucuggcauuuauucag

SEQ ID NO: 2102768 - RNA, 19 nt, Artificial Sequence
  Description of Artificial Sequence: Synthetic oligonucleotide
  Sense strand starting at position 374 of SEQ ID NO: 1882202
aguuuccucuuggcacaau

SEQ ID NO: 2102769 - RNA, 19 nt, Artificial Sequence
  Description of Artificial Sequence: Synthetic oligonucleotide
  Antisense strand to SEQ ID NO: 2102768
auugugccaagaggaaacu

SEQ ID NO: 2102770 - RNA, 19 nt, Artificial Sequence
  Description of Artificial Sequence: Synthetic oligonucleotide
  Sense strand starting at position 386 of SEQ ID NO: 1882202
gcacaaugcaaguagaaag

SEQ ID NO: 2102771 - RNA, 19 nt, Artificial Sequence
  Description of Artificial Sequence: Synthetic oligonucleotide
  Antisense strand to SEQ ID NO: 2102770
cuuucuacuugcauugugc

SEQ ID NO: 2102772 - RNA, 19 nt, Artificial Sequence
  Description of Artificial Sequence: Synthetic oligonucleotide
  Sense strand starting at position 397 of SEQ ID NO: 1882202
guagaaagauaguaauaag

SEQ ID NO: 2102773 - RNA, 19 nt, Artificial Sequence
  Description of Artificial Sequence: Synthetic oligonucleotide
  Antisense strand to SEQ ID NO: 2102772
cuuauuacuaucuuucuac

SEQ ID NO: 2102774 - RNA, 19 nt, Artificial Sequence
  Description of Artificial Sequence: Synthetic oligonucleotide
  Sense strand starting at position 2064 of SEQ ID NO: 1882202
cuagacuaaugccugacau

SEQ ID NO: 2102775 - RNA, 19 nt, Artificial Sequence
  Description of Artificial Sequence: Synthetic oligonucleotide
  Antisense strand to SEQ ID NO: 2102774
augucaggcauuagucuag

SEQ ID NO: 2102776 - RNA, 19 nt, Artificial Sequence
  Description of Artificial Sequence: Synthetic oligonucleotide
  Sense strand starting at position 2068 of SEQ ID NO: 1882202
acuaaugccugacauauag

SEQ ID NO: 2102777 - RNA, 19 nt, Artificial Sequence
  Description of Artificial Sequence: Synthetic oligonucleotide
  Antisense strand to SEQ ID NO: 2102776
cuauaugucaggcauuagu

SEQ ID NO: 2102778 - RNA, 19 nt, Artificial Sequence
  Description of Artificial Sequence: Synthetic oligonucleotide
  Sense strand starting at position 2074 of SEQ ID NO: 1882202
gccugacauauaggauaug

SEQ ID NO: 2102779 - RNA, 19 nt, Artificial Sequence
  Description of Artificial Sequence: Synthetic oligonucleotide
  Antisense strand to SEQ ID NO: 2102778
cauauccuauaugucaggc

SEQ ID NO: 2102780 - RNA, 19 nt, Artificial Sequence
  Description of Artificial Sequence: Synthetic oligonucleotide
  Sense strand starting at position 2085 of SEQ ID NO: 1882202
aggauaugcuaagaacuaa

SEQ ID NO: 2102781 - RNA, 19 nt, Artificial Sequence
  Description of Artificial Sequence: Synthetic oligonucleotide
  Antisense strand to SEQ ID NO: 2102780
uuaguucuuagcauauccu

SEQ ID NO: 2102782 - RNA, 19 nt, Artificial Sequence
  Description of Artificial Sequence: Synthetic oligonucleotide
  Sense strand starting at position 2287 of SEQ ID NO: 1882202
agaguuguguuccauuuac

SEQ ID NO: 2102783 - RNA, 19 nt, Artificial Sequence
  Description of Artificial Sequence: Synthetic oligonucleotide
  Antisense strand to SEQ ID NO: 2102782
guaaauggaacacaacucu

SEQ ID NO: 2102784 - RNA, 19 nt, Artificial Sequence
  Description of Artificial Sequence: Synthetic oligonucleotide
  Sense strand starting at position 2293 of SEQ ID NO: 1882202
guguuccauuuacaacuaa

SEQ ID NO: 2102785 - RNA, 19 nt, Artificial Sequence
  Description of Artificial Sequence: Synthetic oligonucleotide
  Antisense strand to SEQ ID NO: 2102784
uuaguuguaaauggaacac

SEQ ID NO: 2102786 - RNA, 19 nt, Artificial Sequence
  Description of Artificial Sequence: Synthetic oligonucleotide
  Sense strand starting at position 2313 of SEQ ID NO: 1882202
ccacgagaggcaugacaau

SEQ ID NO: 2102787 - RNA, 19 nt, Artificial Sequence
  Description of Artificial Sequence: Synthetic oligonucleotide
  Antisense strand to SEQ ID NO: 2102786
auugucaugccucucgugg

SEQ ID NO: 2102788 - RNA, 19 nt, Artificial Sequence
  Description of Artificial Sequence: Synthetic oligonucleotide
  Sense strand starting at position 2336 of SEQ ID NO: 1882202
guggauaauugagaugguu

SEQ ID NO: 2102789 - RNA, 19 nt, Artificial Sequence
  Description of Artificial Sequence: Synthetic oligonucleotide
  Antisense strand to SEQ ID NO: 2102788
aaccaucucaauuauccac

SEQ ID NO: 2102790 - RNA, 19 nt, Artificial Sequence
  Description of Artificial Sequence: Synthetic oligonucleotide
  Sense strand starting at position 2338 of SEQ ID NO: 1882202
ggauaauugagaugguuug

SEQ ID NO: 2102791 - RNA, 19 nt, Artificial Sequence
  Description of Artificial Sequence: Synthetic oligonucleotide
  Antisense strand to SEQ ID NO: 2102790
caaaccaucucaauuaucc

SEQ ID NO: 2102792 - RNA, 19 nt, Artificial Sequence
  Description of Artificial Sequence: Synthetic oligonucleotide
  Sense strand starting at position 2348 of SEQ ID NO: 1882202
gaugguuugacagguauag

SEQ ID NO: 2102793 - RNA, 19 nt, Artificial Sequence
  Description of Artificial Sequence: Synthetic oligonucleotide
  Antisense strand to SEQ ID NO: 2102792
cuauaccugucaaaccauc

SEQ ID NO: 2102794 - RNA, 19 nt, Artificial Sequence
  Description of Artificial Sequence: Synthetic oligonucleotide
  Sense strand starting at position 2468 of SEQ ID NO: 1882202
auauuaagugucuaggcuu

SEQ ID NO: 2102795 - RNA, 19 nt, Artificial Sequence
  Description of Artificial Sequence: Synthetic oligonucleotide
  Antisense strand to SEQ ID NO: 2102794
aagccuagacacuuaauau

SEQ ID NO: 2102796 - RNA, 19 nt, Artificial Sequence
  Description of Artificial Sequence: Synthetic oligonucleotide
  Sense strand starting at position 2471 of SEQ ID NO: 1882202
uuaagugucuaggcuuaaa

SEQ ID NO: 2102797 - RNA, 19 nt, Artificial Sequence
  Description of Artificial Sequence: Synthetic oligonucleotide
  Antisense strand to SEQ ID NO: 2102796
uuuaagccuagacacuuaa

SEQ ID NO: 2102798 - RNA, 19 nt, Artificial Sequence
  Description of Artificial Sequence: Synthetic oligonucleotide
  Sense strand starting at position 2586 of SEQ ID NO: 1882202
ggauuaauguuguuaacau

SEQ ID NO: 2102799 - RNA, 19 nt, Artificial Sequence
  Description of Artificial Sequence: Synthetic oligonucleotide
  Antisense strand to SEQ ID NO: 2102798
auguuaacaacauuaaucc

SEQ ID NO: 2102800 - RNA, 19 nt, Artificial Sequence
  Description of Artificial Sequence: Synthetic oligonucleotide
  Sense strand starting at position 2646 of SEQ ID NO: 1882202
uuauguuacuccuuuacag

SEQ ID NO: 2102801 - RNA, 19 nt, Artificial Sequence
  Description of Artificial Sequence: Synthetic oligonucleotide
  Antisense strand to SEQ ID NO: 2102800
cuguaaaggaguaacauaa

SEQ ID NO: 2102802 - RNA, 19 nt, Artificial Sequence
  Description of Artificial Sequence: Synthetic oligonucleotide
  Sense strand starting at position 2692 of SEQ ID NO: 1882202
aucuuauuaugggcuguau

SEQ ID NO: 2102803 - RNA, 19 nt, Artificial Sequence
  Description of Artificial Sequence: Synthetic oligonucleotide
  Antisense strand to SEQ ID NO: 2102802
auacagcccauaauaagau

SEQ ID NO: 2102804 - RNA, 19 nt, Artificial Sequence
  Description of Artificial Sequence: Synthetic oligonucleotide
  Sense strand starting at position 2735 of SEQ ID NO: 1882202
uugaguggaugugucauaa

SEQ ID NO: 2102805 - RNA, 19 nt, Artificial Sequence
  Description of Artificial Sequence: Synthetic oligonucleotide
  Antisense strand to SEQ ID NO: 2102804
uuaugacacauccacucaa

SEQ ID NO: 2102806 - RNA, 19 nt, Artificial Sequence
  Description of Artificial Sequence: Synthetic oligonucleotide
  Sense strand starting at position 2739 of SEQ ID NO: 1882202
guggaugugucauaauuua

SEQ ID NO: 2102807 - RNA, 19 nt, Artificial Sequence
  Description of Artificial Sequence: Synthetic oligonucleotide
  Antisense strand to SEQ ID NO: 2102806
uaaauuaugacacauccac

SEQ ID NO: 2102808 - RNA, 19 nt, Artificial Sequence
  Description of Artificial Sequence: Synthetic oligonucleotide
  Sense strand starting at position 2747 of SEQ ID NO: 1882202
gucauaauuuacugaagua

SEQ ID NO: 2102809 - RNA, 19 nt, Artificial Sequence
  Description of Artificial Sequence: Synthetic oligonucleotide
  Antisense strand to SEQ ID NO: 2102808
uacuucaguaaauuaugac

SEQ ID NO: 2102810 - RNA, 19 nt, Artificial Sequence
  Description of Artificial Sequence: Synthetic oligonucleotide
  Sense strand starting at position 2805 of SEQ ID NO: 1882202
uauaaauaacaguggaguu

SEQ ID NO: 2102811 - RNA, 19 nt, Artificial Sequence
  Description of Artificial Sequence: Synthetic oligonucleotide
  Antisense strand to SEQ ID NO: 2102810
aacuccacuguuauuuaua

SEQ ID NO: 2102812 - RNA, 19 nt, Artificial Sequence
  Description of Artificial Sequence: Synthetic oligonucleotide
  Sense strand starting at position 2867 of SEQ ID NO: 1882202
auucccagaugugaaauau

SEQ ID NO: 2102813 - RNA, 19 nt, Artificial Sequence
  Description of Artificial Sequence: Synthetic oligonucleotide
  Antisense strand to SEQ ID NO: 2102812
auauuucacaucugggaau

SEQ ID NO: 2102814 - RNA, 19 nt, Artificial Sequence
  Description of Artificial Sequence: Synthetic oligonucleotide
  Sense strand starting at position 2986 of SEQ ID NO: 1882202
augagauguuaauuaagug

SEQ ID NO: 2102815 - RNA, 19 nt, Artificial Sequence
  Description of Artificial Sequence: Synthetic oligonucleotide
  Antisense strand to SEQ ID NO: 2102814
cacuuaauuaacaucucau

SEQ ID NO: 2102816 - RNA, 19 nt, Artificial Sequence
  Description of Artificial Sequence: Synthetic oligonucleotide
  Sense strand starting at position 2990 of SEQ ID NO: 1882202
gauguuaauuaaguggaaa

SEQ ID NO: 2102817 - RNA, 19 nt, Artificial Sequence
  Description of Artificial Sequence: Synthetic oligonucleotide
  Antisense strand to SEQ ID NO: 2102816
uuuccacuuaauuaacauc

SEQ ID NO: 2102818 - RNA, 19 nt, Artificial Sequence
  Description of Artificial Sequence: Synthetic oligonucleotide
  Sense strand starting at position 3013 of SEQ ID NO: 1882202
cuggcuugauauguagaca

SEQ ID NO: 2102819 - RNA, 19 nt, Artificial Sequence
  Description of Artificial Sequence: Synthetic oligonucleotide
  Antisense strand to SEQ ID NO: 2102818
ugucuacauaucaagccag

SEQ ID NO: 2102820 - RNA, 19 nt, Artificial Sequence
  Description of Artificial Sequence: Synthetic oligonucleotide
  Sense strand starting at position 3016 of SEQ ID NO: 1882202
gcuugauauguagacacca

SEQ ID NO: 2102821 - RNA, 19 nt, Artificial Sequence
  Description of Artificial Sequence: Synthetic oligonucleotide
  Antisense strand to SEQ ID NO: 2102820
uggugucuacauaucaagc

SEQ ID NO: 2102822 - RNA, 19 nt, Artificial Sequence
  Description of Artificial Sequence: Synthetic oligonucleotide
  Sense strand starting at position 3222 of SEQ ID NO: 1882202
cacgguggcacauguuaua

SEQ ID NO: 2102823 - RNA, 19 nt, Artificial Sequence
  Description of Artificial Sequence: Synthetic oligonucleotide
  Antisense strand to SEQ ID NO: 2102822
uauaacaugugccaccgug

SEQ ID NO: 2102824 - RNA, 19 nt, Artificial Sequence
  Description of Artificial Sequence: Synthetic oligonucleotide
  Sense strand starting at position 3265 of SEQ ID NO: 1882202
ugaaguccauaguuuagga

SEQ ID NO: 2102825 - RNA, 19 nt, Artificial Sequence
  Description of Artificial Sequence: Synthetic oligonucleotide
  Antisense strand to SEQ ID NO: 2102824
uccuaaacuauggacuuca

SEQ ID NO: 2102826 - RNA, 19 nt, Artificial Sequence
  Description of Artificial Sequence: Synthetic oligonucleotide
  Sense strand starting at position 3302 of SEQ ID NO: 1882202
gaaucuauggguugggaca

SEQ ID NO: 2102827 - RNA, 19 nt, Artificial Sequence
  Description of Artificial Sequence: Synthetic oligonucleotide
  Antisense strand to SEQ ID NO: 2102826
ugucccaacccauagauuc

SEQ ID NO: 2102828 - RNA, 19 nt, Artificial Sequence
  Description of Artificial Sequence: Synthetic oligonucleotide
  Sense strand starting at position 3304 of SEQ ID NO: 1882202
aucuauggguugggacaaa

SEQ ID NO: 2102829 - RNA, 19 nt, Artificial Sequence
  Description of Artificial Sequence: Synthetic oligonucleotide
  Antisense strand to SEQ ID NO: 2102828
uuugucccaacccauagau

SEQ ID NO: 2102830 - RNA, 19 nt, Artificial Sequence
  Description of Artificial Sequence: Synthetic oligonucleotide
  Sense strand starting at position 3530 of SEQ ID NO: 1882202
ucugcauucccacauguca

SEQ ID NO: 2102831 - RNA, 19 nt, Artificial Sequence
  Description of Artificial Sequence: Synthetic oligonucleotide
  Antisense strand to SEQ ID NO: 2102830
ugacaugugggaaugcaga

SEQ ID NO: 2102832 - RNA, 19 nt, Artificial Sequence
  Description of Artificial Sequence: Synthetic oligonucleotide
  Sense strand starting at position 3538 of SEQ ID NO: 1882202
cccacaugucagcagagaa

SEQ ID NO: 2102833 - RNA, 19 nt, Artificial Sequence
  Description of Artificial Sequence: Synthetic oligonucleotide
  Antisense strand to SEQ ID NO: 2102832
uucucugcugacauguggg

SEQ ID NO: 2102834 - RNA, 19 nt, Artificial Sequence
  Description of Artificial Sequence: Synthetic oligonucleotide
  Sense strand starting at position 3585 of SEQ ID NO: 1882202
cagcauuuguuguuguaaa

SEQ ID NO: 2102835 - RNA, 19 nt, Artificial Sequence
  Description of Artificial Sequence: Synthetic oligonucleotide
  Antisense strand to SEQ ID NO: 2102834
uuuacaacaacaaaugcug

SEQ ID NO: 2102836 - RNA, 19 nt, Artificial Sequence
  Description of Artificial Sequence: Synthetic oligonucleotide
  Sense strand starting at position 3620 of SEQ ID NO: 1882202
uccuaauagguguguagua

SEQ ID NO: 2102837 - RNA, 19 nt, Artificial Sequence
  Description of Artificial Sequence: Synthetic oligonucleotide
  Antisense strand to SEQ ID NO: 2102836
uacuacacaccuauuagga

SEQ ID NO: 2102838 - RNA, 19 nt, Artificial Sequence
  Description of Artificial Sequence: Synthetic oligonucleotide
  Sense strand starting at position 3630 of SEQ ID NO: 1882202
uguguaguaguauguuauu

SEQ ID NO: 2102839 - RNA, 19 nt, Artificial Sequence
  Description of Artificial Sequence: Synthetic oligonucleotide
  Antisense strand to SEQ ID NO: 2102838
aauaacauacuacuacaca

SEQ ID NO: 2102840 - RNA, 19 nt, Artificial Sequence
  Description of Artificial Sequence: Synthetic oligonucleotide
  Sense strand starting at position 3717 of SEQ ID NO: 1882202
cuauauaucuccuuuagug

SEQ ID NO: 2102841 - RNA, 19 nt, Artificial Sequence
  Description of Artificial Sequence: Synthetic oligonucleotide
  Antisense strand to SEQ ID NO: 2102840
cacuaaaggagauauauag

SEQ ID NO: 2102842 - RNA, 19 nt, Artificial Sequence
  Description of Artificial Sequence: Synthetic oligonucleotide
  Sense strand starting at position 3809 of SEQ ID NO: 1882202
cuuuguaugaugugguuaa

SEQ ID NO: 2102843 - RNA, 19 nt, Artificial Sequence
  Description of Artificial Sequence: Synthetic oligonucleotide
  Antisense strand to SEQ ID NO: 2102842
uuaaccacaucauacaaag

SEQ ID NO: 2102844 - RNA, 19 nt, Artificial Sequence
  Description of Artificial Sequence: Synthetic oligonucleotide
  Sense strand starting at position 3813 of SEQ ID NO: 1882202
guaugaugugguuaacagu

SEQ ID NO: 2102845 - RNA, 19 nt, Artificial Sequence
  Description of Artificial Sequence: Synthetic oligonucleotide
  Antisense strand to SEQ ID NO: 2102844
acuguuaaccacaucauac

SEQ ID NO: 2102846 - RNA, 19 nt, Artificial Sequence
  Description of Artificial Sequence: Synthetic oligonucleotide
  Sense strand starting at position 176 of SEQ ID NO: 1882203
agacguuguaaaugaauaa

SEQ ID NO: 2102847 - RNA, 19 nt, Artificial Sequence
  Description of Artificial Sequence: Synthetic oligonucleotide
  Antisense strand to SEQ ID NO: 2102846
uuauucauuuacaacgucu

SEQ ID NO: 2102848 - RNA, 19 nt, Artificial Sequence
  Description of Artificial Sequence: Synthetic oligonucleotide
  Sense strand starting at position 194 of SEQ ID NO: 1882203
auuacaauguaacugagua

SEQ ID NO: 2102849 - RNA, 19 nt, Artificial Sequence
  Description of Artificial Sequence: Synthetic oligonucleotide
  Antisense strand to SEQ ID NO: 2102848
uacucaguuacauuguaau

SEQ ID NO: 2102850 - RNA, 19 nt, Artificial Sequence
  Description of Artificial Sequence: Synthetic oligonucleotide
  Sense strand starting at position 337 of SEQ ID NO: 1882203
aaugacuugugaguuagaa

SEQ ID NO: 2102851 - RNA, 19 nt, Artificial Sequence
  Description of Artificial Sequence: Synthetic oligonucleotide
  Antisense strand to SEQ ID NO: 2102850
uucuaacucacaagucauu

SEQ ID NO: 2102852 - RNA, 19 nt, Artificial Sequence
  Description of Artificial Sequence: Synthetic oligonucleotide
  Sense strand starting at position 339 of SEQ ID NO: 1882203
ugacuugugaguuagaagu

SEQ ID NO: 2102853 - RNA, 19 nt, Artificial Sequence
  Description of Artificial Sequence: Synthetic oligonucleotide
  Antisense strand to SEQ ID NO: 2102852
acuucuaacucacaaguca

SEQ ID NO: 2102854 - RNA, 19 nt, Artificial Sequence
  Description of Artificial Sequence: Synthetic oligonucleotide
  Sense strand starting at position 345 of SEQ ID NO: 1882203
gugaguuagaaguguaaug

SEQ ID NO: 2102855 - RNA, 19 nt, Artificial Sequence
  Description of Artificial Sequence: Synthetic oligonucleotide
  Antisense strand to SEQ ID NO: 2102854
cauuacacuucuaacucac

SEQ ID NO: 2102856 - RNA, 19 nt, Artificial Sequence
  Description of Artificial Sequence: Synthetic oligonucleotide
  Sense strand starting at position 347 of SEQ ID NO: 1882203
gaguuagaaguguaaugac

SEQ ID NO: 2102857 - RNA, 19 nt, Artificial Sequence
  Description of Artificial Sequence: Synthetic oligonucleotide
  Antisense strand to SEQ ID NO: 2102856
gucauuacacuucuaacuc

SEQ ID NO: 2102858 - RNA, 19 nt, Artificial Sequence
  Description of Artificial Sequence: Synthetic oligonucleotide
  Sense strand starting at position 433 of SEQ ID NO: 1882203
ugauguaugcccuggagga

SEQ ID NO: 2102859 - RNA, 19 nt, Artificial Sequence
  Description of Artificial Sequence: Synthetic oligonucleotide
  Antisense strand to SEQ ID NO: 2102858
uccuccagggcauacauca

SEQ ID NO: 2102860 - RNA, 19 nt, Artificial Sequence
  Description of Artificial Sequence: Synthetic oligonucleotide
  Sense strand starting at position 434 of SEQ ID NO: 1882203
gauguaugcccuggaggag

SEQ ID NO: 2102861 - RNA, 19 nt, Artificial Sequence
  Description of Artificial Sequence: Synthetic oligonucleotide
  Antisense strand to SEQ ID NO: 2102860
cuccuccagggcauacauc

SEQ ID NO: 2102862 - RNA, 19 nt, Artificial Sequence
  Description of Artificial Sequence: Synthetic oligonucleotide
  Sense strand starting at position 435 of SEQ ID NO: 1882203
auguaugcccuggaggaga

SEQ ID NO: 2102863 - RNA, 19 nt, Artificial Sequence
  Description of Artificial Sequence: Synthetic oligonucleotide
  Antisense strand to SEQ ID NO: 2102862
ucuccuccagggcauacau

SEQ ID NO: 2102864 - RNA, 19 nt, Artificial Sequence
  Description of Artificial Sequence: Synthetic oligonucleotide
  Sense strand starting at position 529 of SEQ ID NO: 1882203
aagggauggcugcagaauu

SEQ ID NO: 2102865 - RNA, 19 nt, Artificial Sequence
  Description of Artificial Sequence: Synthetic oligonucleotide
  Antisense strand to SEQ ID NO: 2102864
aauucugcagccaucccuu

SEQ ID NO: 2102866 - RNA, 19 nt, Artificial Sequence
  Description of Artificial Sequence: Synthetic oligonucleotide
  Sense strand starting at position 543 of SEQ ID NO: 1882203
gaauuaggguuuccuccuu

SEQ ID NO: 2102867 - RNA, 19 nt, Artificial Sequence
  Description of Artificial Sequence: Synthetic oligonucleotide
  Antisense strand to SEQ ID NO: 2102866
aaggaggaaacccuaauuc

SEQ ID NO: 2102868 - RNA, 19 nt, Artificial Sequence
  Description of Artificial Sequence: Synthetic oligonucleotide
  Sense strand starting at position 667 of SEQ ID NO: 1882203
aggaaugaggccugcacaa

SEQ ID NO: 2102869 - RNA, 19 nt, Artificial Sequence
  Description of Artificial Sequence: Synthetic oligonucleotide
  Antisense strand to SEQ ID NO: 2102868
uugugcaggccucauuccu

SEQ ID NO: 2102870 - RNA, 19 nt, Artificial Sequence
  Description of Artificial Sequence: Synthetic oligonucleotide
  Sense strand starting at position 669 of SEQ ID NO: 1882203
gaaugaggccugcacaaau

SEQ ID NO: 2102871 - RNA, 19 nt, Artificial Sequence
  Description of Artificial Sequence: Synthetic oligonucleotide
  Antisense strand to SEQ ID NO: 2102870
auuugugcaggccucauuc

SEQ ID NO: 2102872 - RNA, 19 nt, Artificial Sequence
  Description of Artificial Sequence: Synthetic oligonucleotide
  Sense strand starting at position 802 of SEQ ID NO: 1882203
ccacauggaguuugauauu

SEQ ID NO: 2102873 - RNA, 19 nt, Artificial Sequence
  Description of Artificial Sequence: Synthetic oligonucleotide
  Antisense strand to SEQ ID NO: 2102872
aauaucaaacuccaugugg

SEQ ID NO: 2102874 - RNA, 19 nt, Artificial Sequence
  Description of Artificial Sequence: Synthetic oligonucleotide
  Sense strand starting at position 808 of SEQ ID NO: 1882203
ggaguuugauauucuacug

SEQ ID NO: 2102875 - RNA, 19 nt, Artificial Sequence
  Description of Artificial Sequence: Synthetic oligonucleotide
  Antisense strand to SEQ ID NO: 2102874
caguagaauaucaaacucc

SEQ ID NO: 2102876 - RNA, 19 nt, Artificial Sequence
  Description of Artificial Sequence: Synthetic oligonucleotide
  Sense strand starting at position 903 of SEQ ID NO: 1882203
ggugucaugaaauagagua

SEQ ID NO: 2102877 - RNA, 19 nt, Artificial Sequence
  Description of Artificial Sequence: Synthetic oligonucleotide
  Antisense strand to SEQ ID NO: 2102876
uacucuauuucaugacacc

SEQ ID NO: 2102878 - RNA, 19 nt, Artificial Sequence
  Description of Artificial Sequence: Synthetic oligonucleotide
  Sense strand starting at position 938 of SEQ ID NO: 1882203
ggaagagcuucuuuaaagg

SEQ ID NO: 2102879 - RNA, 19 nt, Artificial Sequence
  Description of Artificial Sequence: Synthetic oligonucleotide
  Antisense strand to SEQ ID NO: 2102878
ccuuuaaagaagcucuucc

SEQ ID NO: 2102880 - RNA, 19 nt, Artificial Sequence
  Description of Artificial Sequence: Synthetic oligonucleotide
  Sense strand starting at position 1046 of SEQ ID NO: 1882203
caacaugugguauauaagu

SEQ ID NO: 2102881 - RNA, 19 nt, Artificial Sequence
  Description of Artificial Sequence: Synthetic oligonucleotide
  Antisense strand to SEQ ID NO: 2102880
acuuauauaccacauguug

SEQ ID NO: 2102882 - RNA, 19 nt, Artificial Sequence
  Description of Artificial Sequence: Synthetic oligonucleotide
  Sense strand starting at position 1052 of SEQ ID NO: 1882203
gugguauauaagugcauuu

SEQ ID NO: 2102883 - RNA, 19 nt, Artificial Sequence
  Description of Artificial Sequence: Synthetic oligonucleotide
  Antisense strand to SEQ ID NO: 2102882
aaaugcacuuauauaccac

SEQ ID NO: 2102884 - RNA, 19 nt, Artificial Sequence
  Description of Artificial Sequence: Synthetic oligonucleotide
  Sense strand starting at position 1091 of SEQ ID NO: 1882203
ggacauggccgugaucuca

SEQ ID NO: 2102885 - RNA, 19 nt, Artificial Sequence
  Description of Artificial Sequence: Synthetic oligonucleotide
  Antisense strand to SEQ ID NO: 2102884
ugagaucacggccaugucc

SEQ ID NO: 2102886 - RNA, 19 nt, Artificial Sequence
  Description of Artificial Sequence: Synthetic oligonucleotide
  Sense strand starting at position 1194 of SEQ ID NO: 1882203
gggugaugauagcuaugca

SEQ ID NO: 2102887 - RNA, 19 nt, Artificial Sequence
  Description of Artificial Sequence: Synthetic oligonucleotide
  Antisense strand to SEQ ID NO: 2102886
ugcauagcuaucaucaccc

SEQ ID NO: 2102888 - RNA, 19 nt, Artificial Sequence
  Description of Artificial Sequence: Synthetic oligonucleotide
  Sense strand starting at position 1197 of SEQ ID NO: 1882203
ugaugauagcuaugcagau

SEQ ID NO: 2102889 - RNA, 19 nt, Artificial Sequence
  Description of Artificial Sequence: Synthetic oligonucleotide
  Antisense strand to SEQ ID NO: 2102888
aucugcauagcuaucauca

SEQ ID NO: 2102890 - RNA, 19 nt, Artificial Sequence
  Description of Artificial Sequence: Synthetic oligonucleotide
  Sense strand starting at position 1198 of SEQ ID NO: 1882203
gaugauagcuaugcagaua

SEQ ID NO: 2102891 - RNA, 19 nt, Artificial Sequence
  Description of Artificial Sequence: Synthetic oligonucleotide
  Antisense strand to SEQ ID NO: 2102890
uaucugcauagcuaucauc

SEQ ID NO: 2102892 - RNA, 19 nt, Artificial Sequence
  Description of Artificial Sequence: Synthetic oligonucleotide
  Sense strand starting at position 1201 of SEQ ID NO: 1882203
gauagcuaugcagauauau

SEQ ID NO: 2102893 - RNA, 19 nt, Artificial Sequence
  Description of Artificial Sequence: Synthetic oligonucleotide
  Antisense strand to SEQ ID NO: 2102892
auauaucugcauagcuauc

SEQ ID NO: 2102894 - RNA, 19 nt, Artificial Sequence
  Description of Artificial Sequence: Synthetic oligonucleotide
  Sense strand starting at position 1307 of SEQ ID NO: 1882203
ugggcugugugauuuacau

SEQ ID NO: 2102895 - RNA, 19 nt, Artificial Sequence
  Description of Artificial Sequence: Synthetic oligonucleotide
  Antisense strand to SEQ ID NO: 2102894
auguaaaucacacagccca

SEQ ID NO: 2102896 - RNA, 19 nt, Artificial Sequence
  Description of Artificial Sequence: Synthetic oligonucleotide
  Sense strand starting at position 1309 of SEQ ID NO: 1882203
ggcugugugauuuacaugu

SEQ ID NO: 2102897 - RNA, 19 nt, Artificial Sequence
  Description of Artificial Sequence: Synthetic oligonucleotide
  Antisense strand to SEQ ID NO: 2102896
acauguaaaucacacagcc

SEQ ID NO: 2102898 - RNA, 19 nt, Artificial Sequence
  Description of Artificial Sequence: Synthetic oligonucleotide
  Sense strand starting at position 1453 of SEQ ID NO: 1882203
auuguacaagcauagauau

SEQ ID NO: 2102899 - RNA, 19 nt, Artificial Sequence
  Description of Artificial Sequence: Synthetic oligonucleotide
  Antisense strand to SEQ ID NO: 2102898
auaucuaugcuuguacaau

SEQ ID NO: 2102900 - RNA, 19 nt, Artificial Sequence
  Description of Artificial Sequence: Synthetic oligonucleotide
  Sense strand starting at position 1502 of SEQ ID NO: 1882203
uagcuuagucuggaggacu

SEQ ID NO: 2102901 - RNA, 19 nt, Artificial Sequence
  Description of Artificial Sequence: Synthetic oligonucleotide
  Antisense strand to SEQ ID NO: 2102900
aguccuccagacuaagcua

SEQ ID NO: 2102902 - RNA, 19 nt, Artificial Sequence
  Description of Artificial Sequence: Synthetic oligonucleotide
  Sense strand starting at position 2799 of SEQ ID NO: 1882203
auuguaaacgauuagcaga

SEQ ID NO: 2102903 - RNA, 19 nt, Artificial Sequence
  Description of Artificial Sequence: Synthetic oligonucleotide
  Antisense strand to SEQ ID NO: 2102902
ucugcuaaucguuuacaau

SEQ ID NO: 2102904 - RNA, 19 nt, Artificial Sequence
  Description of Artificial Sequence: Synthetic oligonucleotide
  Sense strand starting at position 2801 of SEQ ID NO: 1882203
uguaaacgauuagcagaua

SEQ ID NO: 2102905 - RNA, 19 nt, Artificial Sequence
  Description of Artificial Sequence: Synthetic oligonucleotide
  Antisense strand to SEQ ID NO: 2102904
uaucugcuaaucguuuaca

SEQ ID NO: 2102906 - RNA, 19 nt, Artificial Sequence
  Description of Artificial Sequence: Synthetic oligonucleotide
  Sense strand starting at position 2812 of SEQ ID NO: 1882203
agcagauagaccgauuacu

SEQ ID NO: 2102907 - RNA, 19 nt, Artificial Sequence
  Description of Artificial Sequence: Synthetic oligonucleotide
  Antisense strand to SEQ ID NO: 2102906
aguaaucggucuaucugcu

SEQ ID NO: 2102908 - RNA, 19 nt, Artificial Sequence
  Description of Artificial Sequence: Synthetic oligonucleotide
  Sense strand starting at position 2834 of SEQ ID NO: 1882203
guggcuuuaauuugugauu

SEQ ID NO: 2102909 - RNA, 19 nt, Artificial Sequence
  Description of Artificial Sequence: Synthetic oligonucleotide
  Antisense strand to SEQ ID NO: 2102908
aaucacaaauuaaagccac

SEQ ID NO: 2102910 - RNA, 19 nt, Artificial Sequence
  Description of Artificial Sequence: Synthetic oligonucleotide
  Sense strand starting at position 3180 of SEQ ID NO: 1882203
accuuaauccagugacugu

SEQ ID NO: 2102911 - RNA, 19 nt, Artificial Sequence
  Description of Artificial Sequence: Synthetic oligonucleotide
  Antisense strand to SEQ ID NO: 2102910
acagucacuggauuaaggu

SEQ ID NO: 2102912 - RNA, 19 nt, Artificial Sequence
  Description of Artificial Sequence: Synthetic oligonucleotide
  Sense strand starting at position 3448 of SEQ ID NO: 1882203
ucaccauaguuuguuccaa

SEQ ID NO: 2102913 - RNA, 19 nt, Artificial Sequence
  Description of Artificial Sequence: Synthetic oligonucleotide
  Antisense strand to SEQ ID NO: 2102912
uuggaacaaacuaugguga

SEQ ID NO: 2102914 - RNA, 19 nt, Artificial Sequence
  Description of Artificial Sequence: Synthetic oligonucleotide
  Sense strand starting at position 3450 of SEQ ID NO: 1882203
accauaguuuguuccaaug

SEQ ID NO: 2102915 - RNA, 19 nt, Artificial Sequence
  Description of Artificial Sequence: Synthetic oligonucleotide
  Antisense strand to SEQ ID NO: 2102914
cauuggaacaaacuauggu

SEQ ID NO: 2102916 - RNA, 19 nt, Artificial Sequence
  Description of Artificial Sequence: Synthetic oligonucleotide
  Sense strand starting at position 3486 of SEQ ID NO: 1882203
gcugauauuugcuuucuca

SEQ ID NO: 2102917 - RNA, 19 nt, Artificial Sequence
  Description of Artificial Sequence: Synthetic oligonucleotide
  Antisense strand to SEQ ID NO: 2102916
ugagaaagcaaauaucagc

SEQ ID NO: 2102918 - RNA, 19 nt, Artificial Sequence
  Description of Artificial Sequence: Synthetic oligonucleotide
  Sense strand starting at position 3522 of SEQ ID NO: 1882203
cuaaucuucuguucugaga

SEQ ID NO: 2102919 - RNA, 19 nt, Artificial Sequence
  Description of Artificial Sequence: Synthetic oligonucleotide
  Antisense strand to SEQ ID NO: 2102918
ucucagaacagaagauuag

SEQ ID NO: 2102920 - RNA, 19 nt, Artificial Sequence
  Description of Artificial Sequence: Synthetic oligonucleotide
  Sense strand starting at position 3668 of SEQ ID NO: 1882203
ccuccuuuagaugggaaau

SEQ ID NO: 2102921 - RNA, 19 nt, Artificial Sequence
  Description of Artificial Sequence: Synthetic oligonucleotide
  Antisense strand to SEQ ID NO: 2102920
auuucccaucuaaaggagg

SEQ ID NO: 2102922 - RNA, 19 nt, Artificial Sequence
  Description of Artificial Sequence: Synthetic oligonucleotide
  Sense strand starting at position 3802 of SEQ ID NO: 1882203
agaaaugagaacugugcua

SEQ ID NO: 2102923 - RNA, 19 nt, Artificial Sequence
  Description of Artificial Sequence: Synthetic oligonucleotide
  Antisense strand to SEQ ID NO: 2102922
uagcacaguucucauuucu

SEQ ID NO: 2102924 - RNA, 19 nt, Artificial Sequence
  Description of Artificial Sequence: Synthetic oligonucleotide
  Sense strand starting at position 3833 of SEQ ID NO: 1882203
ugucaaacaucucucagga

SEQ ID NO: 2102925 - RNA, 19 nt, Artificial Sequence
  Description of Artificial Sequence: Synthetic oligonucleotide
  Antisense strand to SEQ ID NO: 2102924
uccugagagauguuugaca

SEQ ID NO: 2102926 - RNA, 19 nt, Artificial Sequence
  Description of Artificial Sequence: Synthetic oligonucleotide
  Sense strand starting at position 62 of SEQ ID NO: 1882205
uuuccacuagacugagaau

SEQ ID NO: 2102927 - RNA, 19 nt, Artificial Sequence
  Description of Artificial Sequence: Synthetic oligonucleotide
  Antisense strand to SEQ ID NO: 2102926
auucucagucuaguggaaa

SEQ ID NO: 2102928 - RNA, 19 nt, Artificial Sequence
  Description of Artificial Sequence: Synthetic oligonucleotide
  Sense strand starting at position 74 of SEQ ID NO: 1882205
ugagaauuaguuugucaac

SEQ ID NO: 2102929 - RNA, 19 nt, Artificial Sequence
  Description of Artificial Sequence: Synthetic oligonucleotide
  Antisense strand to SEQ ID NO: 2102928
guugacaaacuaauucuca

SEQ ID NO: 2102930 - RNA, 19 nt, Artificial Sequence
  Description of Artificial Sequence: Synthetic oligonucleotide
  Sense strand starting at position 75 of SEQ ID NO: 1882205
gagaauuaguuugucaaca

SEQ ID NO: 2102931 - RNA, 19 nt, Artificial Sequence
  Description of Artificial Sequence: Synthetic oligonucleotide
  Antisense strand to SEQ ID NO: 2102930
uguugacaaacuaauucuc

SEQ ID NO: 2102932 - RNA, 19 nt, Artificial Sequence
  Description of Artificial Sequence: Synthetic oligonucleotide
  Sense strand starting at position 76 of SEQ ID NO: 1882205
agaauuaguuugucaacag

SEQ ID NO: 2102933 - RNA, 19 nt, Artificial Sequence
  Description of Artificial Sequence: Synthetic oligonucleotide
  Antisense strand to SEQ ID NO: 2102932
cuguugacaaacuaauucu

SEQ ID NO: 2102934 - RNA, 19 nt, Artificial Sequence
  Description of Artificial Sequence: Synthetic oligonucleotide
  Sense strand starting at position 142 of SEQ ID NO: 1882205
gcagaugacguagaaagua

SEQ ID NO: 2102935 - RNA, 19 nt, Artificial Sequence
  Description of Artificial Sequence: Synthetic oligonucleotide
  Antisense strand to SEQ ID NO: 2102934
uacuuucuacgucaucugc

SEQ ID NO: 2102936 - RNA, 19 nt, Artificial Sequence
  Description of Artificial Sequence: Synthetic oligonucleotide
  Sense strand starting at position 826 of SEQ ID NO: 1882205
uacuacgguguuuaugaga

SEQ ID NO: 2102937 - RNA, 19 nt, Artificial Sequence
  Description of Artificial Sequence: Synthetic oligonucleotide
  Antisense strand to SEQ ID NO: 2102936
ucucauaaacaccguagua

SEQ ID NO: 2102938 - RNA, 19 nt, Artificial Sequence
  Description of Artificial Sequence: Synthetic oligonucleotide
  Sense strand starting at position 880 of SEQ ID NO: 1882205
guaggaaagcuguaauguc

SEQ ID NO: 2102939 - RNA, 19 nt, Artificial Sequence
  Description of Artificial Sequence: Synthetic oligonucleotide
  Antisense strand to SEQ ID NO: 2102938
gacauuacagcuuuccuac

SEQ ID NO: 2102940 - RNA, 19 nt, Artificial Sequence
  Description of Artificial Sequence: Synthetic oligonucleotide
  Sense strand starting at position 887 of SEQ ID NO: 1882205
agcuguaaugucuaagaca

SEQ ID NO: 2102941 - RNA, 19 nt, Artificial Sequence
  Description of Artificial Sequence: Synthetic oligonucleotide
  Antisense strand to SEQ ID NO: 2102940
ugucuuagacauuacagcu

SEQ ID NO: 2102942 - RNA, 19 nt, Artificial Sequence
  Description of Artificial Sequence: Synthetic oligonucleotide
  Sense strand starting at position 1832 of SEQ ID NO: 1882205
uccugaugucacggaaaug

SEQ ID NO: 2102943 - RNA, 19 nt, Artificial Sequence
  Description of Artificial Sequence: Synthetic oligonucleotide
  Antisense strand to SEQ ID NO: 2102942
cauuuccgugacaucagga

SEQ ID NO: 2102944 - RNA, 19 nt, Artificial Sequence
  Description of Artificial Sequence: Synthetic oligonucleotide
  Sense strand starting at position 1900 of SEQ ID NO: 1882205
uggcaccuuccugagauau

SEQ ID NO: 2102945 - RNA, 19 nt, Artificial Sequence
  Description of Artificial Sequence: Synthetic oligonucleotide
  Antisense strand to SEQ ID NO: 2102944
auaucucaggaaggugcca

SEQ ID NO: 2102946 - RNA, 19 nt, Artificial Sequence
  Description of Artificial Sequence: Synthetic oligonucleotide
  Sense strand starting at position 2017 of SEQ ID NO: 1882205
gcuuaaaguguuuccacgu

SEQ ID NO: 2102947 - RNA, 19 nt, Artificial Sequence
  Description of Artificial Sequence: Synthetic oligonucleotide
  Antisense strand to SEQ ID NO: 2102946
acguggaaacacuuuaagc

SEQ ID NO: 2102948 - RNA, 19 nt, Artificial Sequence
  Description of Artificial Sequence: Synthetic oligonucleotide
  Sense strand starting at position 2059 of SEQ ID NO: 1882205
uggagccugacguauaauu

SEQ ID NO: 2102949 - RNA, 19 nt, Artificial Sequence
  Description of Artificial Sequence: Synthetic oligonucleotide
  Antisense strand to SEQ ID NO: 2102948
aauuauacgucaggcucca

SEQ ID NO: 2102950 - RNA, 19 nt, Artificial Sequence
  Description of Artificial Sequence: Synthetic oligonucleotide
  Sense strand starting at position 2069 of SEQ ID NO: 1882205
cguauaauucgagcgccga

SEQ ID NO: 2102951 - RNA, 19 nt, Artificial Sequence
  Description of Artificial Sequence: Synthetic oligonucleotide
  Antisense strand to SEQ ID NO: 2102950
ucggcgcucgaauuauacg

SEQ ID NO: 2102952 - RNA, 19 nt, Artificial Sequence
  Description of Artificial Sequence: Synthetic oligonucleotide
  Sense strand starting at position 2371 of SEQ ID NO: 1882205
acuggaugauuugaugaau

SEQ ID NO: 2102953 - RNA, 19 nt, Artificial Sequence
  Description of Artificial Sequence: Synthetic oligonucleotide
  Antisense strand to SEQ ID NO: 2102952
auucaucaaaucauccagu

SEQ ID NO: 2102954 - RNA, 19 nt, Artificial Sequence
  Description of Artificial Sequence: Synthetic oligonucleotide
  Sense strand starting at position 2526 of SEQ ID NO: 1882205
ggacaaaugagucguagau

SEQ ID NO: 2102955 - RNA, 19 nt, Artificial Sequence
  Description of Artificial Sequence: Synthetic oligonucleotide
  Antisense strand to SEQ ID NO: 2102954
aucuacgacucauuugucc

SEQ ID NO: 2102956 - RNA, 19 nt, Artificial Sequence
  Description of Artificial Sequence: Synthetic oligonucleotide
  Sense strand starting at position 2530 of SEQ ID NO: 1882205
aaaugagucguagauugug

SEQ ID NO: 2102957 - RNA, 19 nt, Artificial Sequence
  Description of Artificial Sequence: Synthetic oligonucleotide
  Antisense strand to SEQ ID NO: 2102956
cacaaucuacgacucauuu

SEQ ID NO: 2102958 - RNA, 19 nt, Artificial Sequence
  Description of Artificial Sequence: Synthetic oligonucleotide
  Sense strand starting at position 2675 of SEQ ID NO: 1882205
uagguaaagcgauaccaau

SEQ ID NO: 2102959 - RNA, 19 nt, Artificial Sequence
  Description of Artificial Sequence: Synthetic oligonucleotide
  Antisense strand to SEQ ID NO: 2102958
auugguaucgcuuuaccua

SEQ ID NO: 2102960 - RNA, 19 nt, Artificial Sequence
  Description of Artificial Sequence: Synthetic oligonucleotide
  Sense strand starting at position 2753 of SEQ ID NO: 1882205
uauggaucuugccuuagag

SEQ ID NO: 2102961 - RNA, 19 nt, Artificial Sequence
  Description of Artificial Sequence: Synthetic oligonucleotide
  Antisense strand to SEQ ID NO: 2102960
cucuaaggcaagauccaua

SEQ ID NO: 2102962 - RNA, 19 nt, Artificial Sequence
  Description of Artificial Sequence: Synthetic oligonucleotide
  Sense strand starting at position 2768 of SEQ ID NO: 1882205
agagacguugccuacauaa

SEQ ID NO: 2102963 - RNA, 19 nt, Artificial Sequence
  Description of Artificial Sequence: Synthetic oligonucleotide
  Antisense strand to SEQ ID NO: 2102962
uuauguaggcaacgucucu

SEQ ID NO: 2102964 - RNA, 19 nt, Artificial Sequence
  Description of Artificial Sequence: Synthetic oligonucleotide
  Sense strand starting at position 2837 of SEQ ID NO: 1882205
augauauuacuagaugugu

SEQ ID NO: 2102965 - RNA, 19 nt, Artificial Sequence
  Description of Artificial Sequence: Synthetic oligonucleotide
  Antisense strand to SEQ ID NO: 2102964
acacaucuaguaauaucau

SEQ ID NO: 2102966 - RNA, 19 nt, Artificial Sequence
  Description of Artificial Sequence: Synthetic oligonucleotide
  Sense strand starting at position 2842 of SEQ ID NO: 1882205
auuacuagaugugugaaua

SEQ ID NO: 2102967 - RNA, 19 nt, Artificial Sequence
  Description of Artificial Sequence: Synthetic oligonucleotide
  Antisense strand to SEQ ID NO: 2102966
uauucacacaucuaguaau

SEQ ID NO: 2102968 - RNA, 19 nt, Artificial Sequence
  Description of Artificial Sequence: Synthetic oligonucleotide
  Sense strand starting at position 2843 of SEQ ID NO: 1882205
uuacuagaugugugaauag

SEQ ID NO: 2102969 - RNA, 19 nt, Artificial Sequence
  Description of Artificial Sequence: Synthetic oligonucleotide
  Antisense strand to SEQ ID NO: 2102968
cuauucacacaucuaguaa

SEQ ID NO: 2102970 - RNA, 19 nt, Artificial Sequence
  Description of Artificial Sequence: Synthetic oligonucleotide
  Sense strand starting at position 2883 of SEQ ID NO: 1882205
ucaguagucaaauagguag

SEQ ID NO: 2102971 - RNA, 19 nt, Artificial Sequence
  Description of Artificial Sequence: Synthetic oligonucleotide
  Antisense strand to SEQ ID NO: 2102970
cuaccuauuugacuacuga

SEQ ID NO: 2102972 - RNA, 19 nt, Artificial Sequence
  Description of Artificial Sequence: Synthetic oligonucleotide
  Sense strand starting at position 2885 of SEQ ID NO: 1882205
aguagucaaauagguagau

SEQ ID NO: 2102973 - RNA, 19 nt, Artificial Sequence
  Description of Artificial Sequence: Synthetic oligonucleotide
  Antisense strand to SEQ ID NO: 2102972
aucuaccuauuugacuacu

SEQ ID NO: 2102974 - RNA, 19 nt, Artificial Sequence
  Description of Artificial Sequence: Synthetic oligonucleotide
  Sense strand starting at position 2886 of SEQ ID NO: 1882205
guagucaaauagguagaua

SEQ ID NO: 2102975 - RNA, 19 nt, Artificial Sequence
  Description of Artificial Sequence: Synthetic oligonucleotide
  Antisense strand to SEQ ID NO: 2102974
uaucuaccuauuugacuac

SEQ ID NO: 2102976 - RNA, 19 nt, Artificial Sequence
  Description of Artificial Sequence: Synthetic oligonucleotide
  Sense strand starting at position 3025 of SEQ ID NO: 1882205
ggucuuuaauuauccagaa

SEQ ID NO: 2102977 - RNA, 19 nt, Artificial Sequence
  Description of Artificial Sequence: Synthetic oligonucleotide
  Antisense strand to SEQ ID NO: 2102976
uucuggauaauuaaagacc

SEQ ID NO: 2102978 - RNA, 19 nt, Artificial Sequence
  Description of Artificial Sequence: Synthetic oligonucleotide
  Sense strand starting at position 3064 of SEQ ID NO: 1882205
ggccuauugcuuucguuua

SEQ ID NO: 2102979 - RNA, 19 nt, Artificial Sequence
  Description of Artificial Sequence: Synthetic oligonucleotide
  Antisense strand to SEQ ID NO: 2102978
uaaacgaaagcaauaggcc

SEQ ID NO: 2102980 - RNA, 19 nt, Artificial Sequence
  Description of Artificial Sequence: Synthetic oligonucleotide
  Sense strand starting at position 3238 of SEQ ID NO: 1882205
ggaggaugcaguuauucuc

SEQ ID NO: 2102981 - RNA, 19 nt, Artificial Sequence
  Description of Artificial Sequence: Synthetic oligonucleotide
  Antisense strand to SEQ ID NO: 2102980
gagaauaacugcauccucc

SEQ ID NO: 2102982 - RNA, 19 nt, Artificial Sequence
  Description of Artificial Sequence: Synthetic oligonucleotide
  Sense strand starting at position 3281 of SEQ ID NO: 1882205
guugguccuagauagguua

SEQ ID NO: 2102983 - RNA, 19 nt, Artificial Sequence
  Description of Artificial Sequence: Synthetic oligonucleotide
  Antisense strand to SEQ ID NO: 2102982
uaaccuaucuaggaccaac

SEQ ID NO: 2102984 - RNA, 19 nt, Artificial Sequence
  Description of Artificial Sequence: Synthetic oligonucleotide
  Sense strand starting at position 3365 of SEQ ID NO: 1882205
gagggucucugacauuuga

SEQ ID NO: 2102985 - RNA, 19 nt, Artificial Sequence
  Description of Artificial Sequence: Synthetic oligonucleotide
  Antisense strand to SEQ ID NO: 2102984
ucaaaugucagagacccuc

SEQ ID NO: 2102986 - RNA, 19 nt, Artificial Sequence
  Description of Artificial Sequence: Synthetic oligonucleotide
  Sense strand starting at position 3523 of SEQ ID NO: 1882205
cuuggucuuaaaugaugga

SEQ ID NO: 2102987 - RNA, 19 nt, Artificial Sequence
  Description of Artificial Sequence: Synthetic oligonucleotide
  Antisense strand to SEQ ID NO: 2102986
uccaucauuuaagaccaag

SEQ ID NO: 2102988 - RNA, 19 nt, Artificial Sequence
  Description of Artificial Sequence: Synthetic oligonucleotide
  Sense strand starting at position 3540 of SEQ ID NO: 1882205
gaaggaguaucuucuguaa

SEQ ID NO: 2102989 - RNA, 19 nt, Artificial Sequence
  Description of Artificial Sequence: Synthetic oligonucleotide
  Antisense strand to SEQ ID NO: 2102988
uuacagaagauacuccuuc

SEQ ID NO: 2102990 - RNA, 19 nt, Artificial Sequence
  Description of Artificial Sequence: Synthetic oligonucleotide
  Sense strand starting at position 3543 of SEQ ID NO: 1882205
ggaguaucuucuguaacua

SEQ ID NO: 2102991 - RNA, 19 nt, Artificial Sequence
  Description of Artificial Sequence: Synthetic oligonucleotide
  Antisense strand to SEQ ID NO: 2102990
uaguuacagaagauacucc

SEQ ID NO: 2102992 - RNA, 19 nt, Artificial Sequence
  Description of Artificial Sequence: Synthetic oligonucleotide
  Sense strand starting at position 3656 of SEQ ID NO: 1882205
caguuuaaggagugaguga

SEQ ID NO: 2102993 - RNA, 19 nt, Artificial Sequence
  Description of Artificial Sequence: Synthetic oligonucleotide
  Antisense strand to SEQ ID NO: 2102992
ucacucacuccuuaaacug

SEQ ID NO: 2102994 - RNA, 19 nt, Artificial Sequence
  Description of Artificial Sequence: Synthetic oligonucleotide
  Sense strand starting at position 3759 of SEQ ID NO: 1882205
agcacagaguuccugagau

SEQ ID NO: 2102995 - RNA, 19 nt, Artificial Sequence
  Description of Artificial Sequence: Synthetic oligonucleotide
  Antisense strand to SEQ ID NO: 2102994
aucucaggaacucugugcu

SEQ ID NO: 2102996 - RNA, 19 nt, Artificial Sequence
  Description of Artificial Sequence: Synthetic oligonucleotide
  Sense strand starting at position 3775 of SEQ ID NO: 1882205
gauuucguuauuggugauu

SEQ ID NO: 2102997 - RNA, 19 nt, Artificial Sequence
  Description of Artificial Sequence: Synthetic oligonucleotide
  Antisense strand to SEQ ID NO: 2102996
aaucaccaauaacgaaauc

SEQ ID NO: 2102998 - RNA, 19 nt, Artificial Sequence
  Description of Artificial Sequence: Synthetic oligonucleotide
  Sense strand starting at position 3787 of SEQ ID NO: 1882205
ggugauucucuagagcuua

SEQ ID NO: 2102999 - RNA, 19 nt, Artificial Sequence
  Description of Artificial Sequence: Synthetic oligonucleotide
  Antisense strand to SEQ ID NO: 2102998
uaagcucuagagaaucacc

SEQ ID NO: 2103000 - RNA, 19 nt, Artificial Sequence
  Description of Artificial Sequence: Synthetic oligonucleotide
  Sense strand starting at position 3804 of SEQ ID NO: 1882205
uacguugguacucauggaa

SEQ ID NO: 2103001 - RNA, 19 nt, Artificial Sequence
  Description of Artificial Sequence: Synthetic oligonucleotide
  Antisense strand to SEQ ID NO: 2103000
uuccaugaguaccaacgua

SEQ ID NO: 2103002 - RNA, 19 nt, Artificial Sequence
  Description of Artificial Sequence: Synthetic oligonucleotide
  Sense strand starting at position 3807 of SEQ ID NO: 1882205
guugguacucauggaaaca

SEQ ID NO: 2103003 - RNA, 19 nt, Artificial Sequence
  Description of Artificial Sequence: Synthetic oligonucleotide
  Antisense strand to SEQ ID NO: 2103002
uguuuccaugaguaccaac

SEQ ID NO: 2103004 - RNA, 19 nt, Artificial Sequence
  Description of Artificial Sequence: Synthetic oligonucleotide
  Sense strand starting at position 3850 of SEQ ID NO: 1882205
uuauaagacuuguccacug

SEQ ID NO: 2103005 - RNA, 19 nt, Artificial Sequence
  Description of Artificial Sequence: Synthetic oligonucleotide
  Antisense strand to SEQ ID NO: 2103004
caguggacaagucuuauaa

SEQ ID NO: 2103006 - RNA, 19 nt, Artificial Sequence
  Description of Artificial Sequence: Synthetic oligonucleotide
  Sense strand starting at position 59 of SEQ ID NO: 1882204
ucuugaucucgucaaagug

SEQ ID NO: 2103007 - RNA, 19 nt, Artificial Sequence
  Description of Artificial Sequence: Synthetic oligonucleotide
  Antisense strand to SEQ ID NO: 2103006
cacuuugacgagaucaaga

SEQ ID NO: 2103008 - RNA, 19 nt, Artificial Sequence
  Description of Artificial Sequence: Synthetic oligonucleotide
  Sense strand starting at position 139 of SEQ ID NO: 1882204
gaguccugaccucaagcaa

SEQ ID NO: 2103009 - RNA, 19 nt, Artificial Sequence
  Description of Artificial Sequence: Synthetic oligonucleotide
  Antisense strand to SEQ ID NO: 2103008
uugcuugaggucaggacuc

SEQ ID NO: 2103010 - RNA, 19 nt, Artificial Sequence
  Description of Artificial Sequence: Synthetic oligonucleotide
  Sense strand starting at position 253 of SEQ ID NO: 1882204
uuuccacuagacugagaau

SEQ ID NO: 2103011 - RNA, 19 nt, Artificial Sequence
  Description of Artificial Sequence: Synthetic oligonucleotide
  Antisense strand to SEQ ID NO: 2103010
auucucagucuaguggaaa

SEQ ID NO: 2103012 - RNA, 19 nt, Artificial Sequence
  Description of Artificial Sequence: Synthetic oligonucleotide
  Sense strand starting at position 265 of SEQ ID NO: 1882204
ugagaauuaguuugucaac

SEQ ID NO: 2103013 - RNA, 19 nt, Artificial Sequence
  Description of Artificial Sequence: Synthetic oligonucleotide
  Antisense strand to SEQ ID NO: 2103012
guugacaaacuaauucuca

SEQ ID NO: 2103014 - RNA, 19 nt, Artificial Sequence
  Description of Artificial Sequence: Synthetic oligonucleotide
  Sense strand starting at position 266 of SEQ ID NO: 1882204
gagaauuaguuugucaaca

SEQ ID NO: 2103015 - RNA, 19 nt, Artificial Sequence
  Description of Artificial Sequence: Synthetic oligonucleotide
  Antisense strand to SEQ ID NO: 2103014
uguugacaaacuaauucuc

SEQ ID NO: 2103016 - RNA, 19 nt, Artificial Sequence
  Description of Artificial Sequence: Synthetic oligonucleotide
  Sense strand starting at position 267 of SEQ ID NO: 1882204
agaauuaguuugucaacag

SEQ ID NO: 2103017 - RNA, 19 nt, Artificial Sequence
  Description of Artificial Sequence: Synthetic oligonucleotide
  Antisense strand to SEQ ID NO: 2103016
cuguugacaaacuaauucu

SEQ ID NO: 2103018 - RNA, 19 nt, Artificial Sequence
  Description of Artificial Sequence: Synthetic oligonucleotide
  Sense strand starting at position 333 of SEQ ID NO: 1882204
gcagaugacguagaaagua

SEQ ID NO: 2103019 - RNA, 19 nt, Artificial Sequence
  Description of Artificial Sequence: Synthetic oligonucleotide
  Antisense strand to SEQ ID NO: 2103018
uacuuucuacgucaucugc

SEQ ID NO: 2103020 - RNA, 19 nt, Artificial Sequence
  Description of Artificial Sequence: Synthetic oligonucleotide
  Sense strand starting at position 1017 of SEQ ID NO: 1882204
uacuacgguguuuaugaga

SEQ ID NO: 2103021 - RNA, 19 nt, Artificial Sequence
  Description of Artificial Sequence: Synthetic oligonucleotide
  Antisense strand to SEQ ID NO: 2103020
ucucauaaacaccguagua

SEQ ID NO: 2103022 - RNA, 19 nt, Artificial Sequence
  Description of Artificial Sequence: Synthetic oligonucleotide
  Sense strand starting at position 1071 of SEQ ID NO: 1882204
guaggaaagcuguaauguc

SEQ ID NO: 2103023 - RNA, 19 nt, Artificial Sequence
  Description of Artificial Sequence: Synthetic oligonucleotide
  Antisense strand to SEQ ID NO: 2103022
gacauuacagcuuuccuac

SEQ ID NO: 2103024 - RNA, 19 nt, Artificial Sequence
  Description of Artificial Sequence: Synthetic oligonucleotide
  Sense strand starting at position 1078 of SEQ ID NO: 1882204
agcuguaaugucuaagaca

SEQ ID NO: 2103025 - RNA, 19 nt, Artificial Sequence
  Description of Artificial Sequence: Synthetic oligonucleotide
  Antisense strand to SEQ ID NO: 2103024
ugucuuagacauuacagcu

SEQ ID NO: 2103026 - RNA, 19 nt, Artificial Sequence
  Description of Artificial Sequence: Synthetic oligonucleotide
  Sense strand starting at position 2023 of SEQ ID NO: 1882204
uccugaugucacggaaaug

SEQ ID NO: 2103027 - RNA, 19 nt, Artificial Sequence
  Description of Artificial Sequence: Synthetic oligonucleotide
  Antisense strand to SEQ ID NO: 2103026
cauuuccgugacaucagga

SEQ ID NO: 2103028 - RNA, 19 nt, Artificial Sequence
  Description of Artificial Sequence: Synthetic oligonucleotide
  Sense strand starting at position 2091 of SEQ ID NO: 1882204
uggcaccuuccugagauau

SEQ ID NO: 2103029 - RNA, 19 nt, Artificial Sequence
  Description of Artificial Sequence: Synthetic oligonucleotide
  Antisense strand to SEQ ID NO: 2103028
auaucucaggaaggugcca

SEQ ID NO: 2103030 - RNA, 19 nt, Artificial Sequence
  Description of Artificial Sequence: Synthetic oligonucleotide
  Sense strand starting at position 2142 of SEQ ID NO: 1882204
gugagaaccuccucaugug

SEQ ID NO: 2103031 - RNA, 19 nt, Artificial Sequence
  Description of Artificial Sequence: Synthetic oligonucleotide
  Antisense strand to SEQ ID NO: 2103030
cacaugaggagguucucac

SEQ ID NO: 2103032 - RNA, 19 nt, Artificial Sequence
  Description of Artificial Sequence: Synthetic oligonucleotide
  Sense strand starting at position 2208 of SEQ ID NO: 1882204
gcuuaaaguguuuccacgu

SEQ ID NO: 2103033 - RNA, 19 nt, Artificial Sequence
  Description of Artificial Sequence: Synthetic oligonucleotide
  Antisense strand to SEQ ID NO: 2103032
acguggaaacacuuuaagc

SEQ ID NO: 2103034 - RNA, 19 nt, Artificial Sequence
  Description of Artificial Sequence: Synthetic oligonucleotide
  Sense strand starting at position 2250 of SEQ ID NO: 1882204
uggagccugacguauaauu

SEQ ID NO: 2103035 - RNA, 19 nt, Artificial Sequence
  Description of Artificial Sequence: Synthetic oligonucleotide
  Antisense strand to SEQ ID NO: 2103034
aauuauacgucaggcucca

SEQ ID NO: 2103036 - RNA, 19 nt, Artificial Sequence
  Description of Artificial Sequence: Synthetic oligonucleotide
  Sense strand starting at position 2260 of SEQ ID NO: 1882204
cguauaauucgagcgccga

SEQ ID NO: 2103037 - RNA, 19 nt, Artificial Sequence
  Description of Artificial Sequence: Synthetic oligonucleotide
  Antisense strand to SEQ ID NO: 2103036
ucggcgcucgaauuauacg

SEQ ID NO: 2103038 - RNA, 19 nt, Artificial Sequence
  Description of Artificial Sequence: Synthetic oligonucleotide
  Sense strand starting at position 2562 of SEQ ID NO: 1882204
acuggaugauuugaugaau

SEQ ID NO: 2103039 - RNA, 19 nt, Artificial Sequence
  Description of Artificial Sequence: Synthetic oligonucleotide
  Antisense strand to SEQ ID NO: 2103038
auucaucaaaucauccagu

SEQ ID NO: 2103040 - RNA, 19 nt, Artificial Sequence
  Description of Artificial Sequence: Synthetic oligonucleotide
  Sense strand starting at position 2717 of SEQ ID NO: 1882204
ggacaaaugagucguagau

SEQ ID NO: 2103041 - RNA, 19 nt, Artificial Sequence
  Description of Artificial Sequence: Synthetic oligonucleotide
  Antisense strand to SEQ ID NO: 2103040
aucuacgacucauuugucc

SEQ ID NO: 2103042 - RNA, 19 nt, Artificial Sequence
  Description of Artificial Sequence: Synthetic oligonucleotide
  Sense strand starting at position 2721 of SEQ ID NO: 1882204
aaaugagucguagauugug

SEQ ID NO: 2103043 - RNA, 19 nt, Artificial Sequence
  Description of Artificial Sequence: Synthetic oligonucleotide
  Antisense strand to SEQ ID NO: 2103042
cacaaucuacgacucauuu

SEQ ID NO: 2103044 - RNA, 19 nt, Artificial Sequence
  Description of Artificial Sequence: Synthetic oligonucleotide
  Sense strand starting at position 2866 of SEQ ID NO: 1882204
uagguaaagcgauaccaau

SEQ ID NO: 2103045 - RNA, 19 nt, Artificial Sequence
  Description of Artificial Sequence: Synthetic oligonucleotide
  Antisense strand to SEQ ID NO: 2103044
auugguaucgcuuuaccua

SEQ ID NO: 2103046 - RNA, 19 nt, Artificial Sequence
  Description of Artificial Sequence: Synthetic oligonucleotide
  Sense strand starting at position 2944 of SEQ ID NO: 1882204
uauggaucuugccuuagag

SEQ ID NO: 2103047 - RNA, 19 nt, Artificial Sequence
  Description of Artificial Sequence: Synthetic oligonucleotide
  Antisense strand to SEQ ID NO: 2103046
cucuaaggcaagauccaua

SEQ ID NO: 2103048 - RNA, 19 nt, Artificial Sequence
  Description of Artificial Sequence: Synthetic oligonucleotide
  Sense strand starting at position 2959 of SEQ ID NO: 1882204
agagacguugccuacauaa

SEQ ID NO: 2103049 - RNA, 19 nt, Artificial Sequence
  Description of Artificial Sequence: Synthetic oligonucleotide
  Antisense strand to SEQ ID NO: 2103048
uuauguaggcaacgucucu

SEQ ID NO: 2103050 - RNA, 19 nt, Artificial Sequence
  Description of Artificial Sequence: Synthetic oligonucleotide
  Sense strand starting at position 3028 of SEQ ID NO: 1882204
augauauuacuagaugugu

SEQ ID NO: 2103051 - RNA, 19 nt, Artificial Sequence
  Description of Artificial Sequence: Synthetic oligonucleotide
  Antisense strand to SEQ ID NO: 2103050
acacaucuaguaauaucau

SEQ ID NO: 2103052 - RNA, 19 nt, Artificial Sequence
  Description of Artificial Sequence: Synthetic oligonucleotide
  Sense strand starting at position 3033 of SEQ ID NO: 1882204
auuacuagaugugugaaua

SEQ ID NO: 2103053 - RNA, 19 nt, Artificial Sequence
  Description of Artificial Sequence: Synthetic oligonucleotide
  Antisense strand to SEQ ID NO: 2103052
uauucacacaucuaguaau

SEQ ID NO: 2103054 - RNA, 19 nt, Artificial Sequence
  Description of Artificial Sequence: Synthetic oligonucleotide
  Sense strand starting at position 3034 of SEQ ID NO: 1882204
uuacuagaugugugaauag

SEQ ID NO: 2103055 - RNA, 19 nt, Artificial Sequence
  Description of Artificial Sequence: Synthetic oligonucleotide
  Antisense strand to SEQ ID NO: 2103054
cuauucacacaucuaguaa

SEQ ID NO: 2103056 - RNA, 19 nt, Artificial Sequence
  Description of Artificial Sequence: Synthetic oligonucleotide
  Sense strand starting at position 3074 of SEQ ID NO: 1882204
ucaguagucaaauagguag

SEQ ID NO: 2103057 - RNA, 19 nt, Artificial Sequence
  Description of Artificial Sequence: Synthetic oligonucleotide
  Antisense strand to SEQ ID NO: 2103056
cuaccuauuugacuacuga

SEQ ID NO: 2103058 - RNA, 19 nt, Artificial Sequence
  Description of Artificial Sequence: Synthetic oligonucleotide
  Sense strand starting at position 3076 of SEQ ID NO: 1882204
aguagucaaauagguagau

SEQ ID NO: 2103059 - RNA, 19 nt, Artificial Sequence
  Description of Artificial Sequence: Synthetic oligonucleotide
  Antisense strand to SEQ ID NO: 2103058
aucuaccuauuugacuacu

SEQ ID NO: 2103060 - RNA, 19 nt, Artificial Sequence
  Description of Artificial Sequence: Synthetic oligonucleotide
  Sense strand starting at position 3077 of SEQ ID NO: 1882204
guagucaaauagguagaua

SEQ ID NO: 2103061 - RNA, 19 nt, Artificial Sequence
  Description of Artificial Sequence: Synthetic oligonucleotide
  Antisense strand to SEQ ID NO: 2103060
uaucuaccuauuugacuac

SEQ ID NO: 2103062 - RNA, 19 nt, Artificial Sequence
  Description of Artificial Sequence: Synthetic oligonucleotide
  Sense strand starting at position 3216 of SEQ ID NO: 1882204
ggucuuuaauuauccagaa

SEQ ID NO: 2103063 - RNA, 19 nt, Artificial Sequence
  Description of Artificial Sequence: Synthetic oligonucleotide
  Antisense strand to SEQ ID NO: 2103062
uucuggauaauuaaagacc

SEQ ID NO: 2103064 - RNA, 19 nt, Artificial Sequence
  Description of Artificial Sequence: Synthetic oligonucleotide
  Sense strand starting at position 3255 of SEQ ID NO: 1882204
ggccuauugcuuucguuua

SEQ ID NO: 2103065 - RNA, 19 nt, Artificial Sequence
  Description of Artificial Sequence: Synthetic oligonucleotide
  Antisense strand to SEQ ID NO: 2103064
uaaacgaaagcaauaggcc

SEQ ID NO: 2103066 - RNA, 19 nt, Artificial Sequence
  Description of Artificial Sequence: Synthetic oligonucleotide
  Sense strand starting at position 3429 of SEQ ID NO: 1882204
ggaggaugcaguuauucuc

SEQ ID NO: 2103067 - RNA, 19 nt, Artificial Sequence
  Description of Artificial Sequence: Synthetic oligonucleotide
  Antisense strand to SEQ ID NO: 2103066
gagaauaacugcauccucc

SEQ ID NO: 2103068 - RNA, 19 nt, Artificial Sequence
  Description of Artificial Sequence: Synthetic oligonucleotide
  Sense strand starting at position 3472 of SEQ ID NO: 1882204
guugguccuagauagguua

SEQ ID NO: 2103069 - RNA, 19 nt, Artificial Sequence
  Description of Artificial Sequence: Synthetic oligonucleotide
  Antisense strand to SEQ ID NO: 2103068
uaaccuaucuaggaccaac

SEQ ID NO: 2103070 - RNA, 19 nt, Artificial Sequence
  Description of Artificial Sequence: Synthetic oligonucleotide
  Sense strand starting at position 3556 of SEQ ID NO: 1882204
gagggucucugacauuuga

SEQ ID NO: 2103071 - RNA, 19 nt, Artificial Sequence
  Description of Artificial Sequence: Synthetic oligonucleotide
  Antisense strand to SEQ ID NO: 2103070
ucaaaugucagagacccuc

SEQ ID NO: 2103072 - RNA, 19 nt, Artificial Sequence
  Description of Artificial Sequence: Synthetic oligonucleotide
  Sense strand starting at position 3714 of SEQ ID NO: 1882204
cuuggucuuaaaugaugga

SEQ ID NO: 2103073 - RNA, 19 nt, Artificial Sequence
  Description of Artificial Sequence: Synthetic oligonucleotide
  Antisense strand to SEQ ID NO: 2103072
uccaucauuuaagaccaag

SEQ ID NO: 2103074 - RNA, 19 nt, Artificial Sequence
  Description of Artificial Sequence: Synthetic oligonucleotide
  Sense strand starting at position 3731 of SEQ ID NO: 1882204
gaaggaguaucuucuguaa

SEQ ID NO: 2103075 - RNA, 19 nt, Artificial Sequence
  Description of Artificial Sequence: Synthetic oligonucleotide
  Antisense strand to SEQ ID NO: 2103074
uuacagaagauacuccuuc

SEQ ID NO: 2103076 - RNA, 19 nt, Artificial Sequence
  Description of Artificial Sequence: Synthetic oligonucleotide
  Sense strand starting at position 3734 of SEQ ID NO: 1882204
ggaguaucuucuguaacua

SEQ ID NO: 2103077 - RNA, 19 nt, Artificial Sequence
  Description of Artificial Sequence: Synthetic oligonucleotide
  Antisense strand to SEQ ID NO: 2103076
uaguuacagaagauacucc

SEQ ID NO: 2103078 - RNA, 19 nt, Artificial Sequence
  Description of Artificial Sequence: Synthetic oligonucleotide
  Sense strand starting at position 3847 of SEQ ID NO: 1882204
caguuuaaggagugaguga

SEQ ID NO: 2103079 - RNA, 19 nt, Artificial Sequence
  Description of Artificial Sequence: Synthetic oligonucleotide
  Antisense strand to SEQ ID NO: 2103078
ucacucacuccuuaaacug

SEQ ID NO: 2103080 - RNA, 19 nt, Artificial Sequence
  Description of Artificial Sequence: Synthetic oligonucleotide
  Sense strand starting at position 3950 of SEQ ID NO: 1882204
agcacagaguuccugagau

SEQ ID NO: 2103081 - RNA, 19 nt, Artificial Sequence
  Description of Artificial Sequence: Synthetic oligonucleotide
  Antisense strand to SEQ ID NO: 2103080
aucucaggaacucugugcu

SEQ ID NO: 2103082 - RNA, 19 nt, Artificial Sequence
  Description of Artificial Sequence: Synthetic oligonucleotide
  Sense strand starting at position 3966 of SEQ ID NO: 1882204
gauuucguuauuggugauu

SEQ ID NO: 2103083 - RNA, 19 nt, Artificial Sequence
  Description of Artificial Sequence: Synthetic oligonucleotide
  Antisense strand to SEQ ID NO: 2103082
aaucaccaauaacgaaauc

SEQ ID NO: 2103084 - RNA, 19 nt, Artificial Sequence
  Description of Artificial Sequence: Synthetic oligonucleotide
  Sense strand starting at position 3978 of SEQ ID NO: 1882204
ggugauucucuagagcuua

SEQ ID NO: 2103085 - RNA, 19 nt, Artificial Sequence
  Description of Artificial Sequence: Synthetic oligonucleotide
  Antisense strand to SEQ ID NO: 2103084
uaagcucuagagaaucacc

SEQ ID NO: 2103086 - RNA, 19 nt, Artificial Sequence
  Description of Artificial Sequence: Synthetic oligonucleotide
  Sense strand starting at position 198 of SEQ ID NO: 1882206
cuguaaccguaagugauuu

SEQ ID NO: 2103087 - RNA, 19 nt, Artificial Sequence
  Description of Artificial Sequence: Synthetic oligonucleotide
  Antisense strand to SEQ ID NO: 2103086
aaaucacuuacgguuacag

SEQ ID NO: 2103088 - RNA, 19 nt, Artificial Sequence
  Description of Artificial Sequence: Synthetic oligonucleotide
  Sense strand starting at position 199 of SEQ ID NO: 1882206
uguaaccguaagugauuua

SEQ ID NO: 2103089 - RNA, 19 nt, Artificial Sequence
  Description of Artificial Sequence: Synthetic oligonucleotide
  Antisense strand to SEQ ID NO: 2103088
uaaaucacuuacgguuaca

SEQ ID NO: 2103090 - RNA, 19 nt, Artificial Sequence
  Description of Artificial Sequence: Synthetic oligonucleotide
  Sense strand starting at position 237 of SEQ ID NO: 1882206
ugccuaucauuguucuuua

SEQ ID NO: 2103091 - RNA, 19 nt, Artificial Sequence
  Description of Artificial Sequence: Synthetic oligonucleotide
  Antisense strand to SEQ ID NO: 2103090
uaaagaacaaugauaggca

SEQ ID NO: 2103092 - RNA, 19 nt, Artificial Sequence
  Description of Artificial Sequence: Synthetic oligonucleotide
  Sense strand starting at position 248 of SEQ ID NO: 1882206
guucuuuaaucugguuuaa

SEQ ID NO: 2103093 - RNA, 19 nt, Artificial Sequence
  Description of Artificial Sequence: Synthetic oligonucleotide
  Antisense strand to SEQ ID NO: 2103092
uuaaaccagauuaaagaac

SEQ ID NO: 2103094 - RNA, 19 nt, Artificial Sequence
  Description of Artificial Sequence: Synthetic oligonucleotide
  Sense strand starting at position 250 of SEQ ID NO: 1882206
ucuuuaaucugguuuaagu

SEQ ID NO: 2103095 - RNA, 19 nt, Artificial Sequence
  Description of Artificial Sequence: Synthetic oligonucleotide
  Antisense strand to SEQ ID NO: 2103094
acuuaaaccagauuaaaga

SEQ ID NO: 2103096 - RNA, 19 nt, Artificial Sequence
  Description of Artificial Sequence: Synthetic oligonucleotide
  Sense strand starting at position 260 of SEQ ID NO: 1882206
gguuuaagugguugagccu

SEQ ID NO: 2103097 - RNA, 19 nt, Artificial Sequence
  Description of Artificial Sequence: Synthetic oligonucleotide
  Antisense strand to SEQ ID NO: 2103096
aggcucaaccacuuaaacc

SEQ ID NO: 2103098 - RNA, 19 nt, Artificial Sequence
  Description of Artificial Sequence: Synthetic oligonucleotide
  Sense strand starting at position 267 of SEQ ID NO: 1882206
gugguugagccuuaugaca

SEQ ID NO: 2103099 - RNA, 19 nt, Artificial Sequence
  Description of Artificial Sequence: Synthetic oligonucleotide
  Antisense strand to SEQ ID NO: 2103098
ugucauaaggcucaaccac

SEQ ID NO: 2103100 - RNA, 19 nt, Artificial Sequence
  Description of Artificial Sequence: Synthetic oligonucleotide
  Sense strand starting at position 269 of SEQ ID NO: 1882206
gguugagccuuaugacacu

SEQ ID NO: 2103101 - RNA, 19 nt, Artificial Sequence
  Description of Artificial Sequence: Synthetic oligonucleotide
  Antisense strand to SEQ ID NO: 2103100
agugucauaaggcucaacc

SEQ ID NO: 2103102 - RNA, 19 nt, Artificial Sequence
  Description of Artificial Sequence: Synthetic oligonucleotide
  Sense strand starting at position 275 of SEQ ID NO: 1882206
gccuuaugacacugccauu

SEQ ID NO: 2103103 - RNA, 19 nt, Artificial Sequence
  Description of Artificial Sequence: Synthetic oligonucleotide
  Antisense strand to SEQ ID NO: 2103102
aauggcagugucauaaggc

SEQ ID NO: 2103104 - RNA, 19 nt, Artificial Sequence
  Description of Artificial Sequence: Synthetic oligonucleotide
  Sense strand starting at position 286 of SEQ ID NO: 1882206
cugccauuucuauggguca

SEQ ID NO: 2103105 - RNA, 19 nt, Artificial Sequence
  Description of Artificial Sequence: Synthetic oligonucleotide
  Antisense strand to SEQ ID NO: 2103104
ugacccauagaaauggcag

SEQ ID NO: 2103106 - RNA, 19 nt, Artificial Sequence
  Description of Artificial Sequence: Synthetic oligonucleotide
  Sense strand starting at position 287 of SEQ ID NO: 1882206
ugccauuucuaugggucaa

SEQ ID NO: 2103107 - RNA, 19 nt, Artificial Sequence
  Description of Artificial Sequence: Synthetic oligonucleotide
  Antisense strand to SEQ ID NO: 2103106
uugacccauagaaauggca

SEQ ID NO: 2103108 - RNA, 19 nt, Artificial Sequence
  Description of Artificial Sequence: Synthetic oligonucleotide
  Sense strand starting at position 310 of SEQ ID NO: 1882206
gguggaauauugucauaaa

SEQ ID NO: 2103109 - RNA, 19 nt, Artificial Sequence
  Description of Artificial Sequence: Synthetic oligonucleotide
  Antisense strand to SEQ ID NO: 2103108
uuuaugacaauauuccacc

SEQ ID NO: 2103110 - RNA, 19 nt, Artificial Sequence
  Description of Artificial Sequence: Synthetic oligonucleotide
  Sense strand starting at position 405 of SEQ ID NO: 1882206
ggauuauaaucccagacac

SEQ ID NO: 2103111 - RNA, 19 nt, Artificial Sequence
  Description of Artificial Sequence: Synthetic oligonucleotide
  Antisense strand to SEQ ID NO: 2103110
gugucugggauuauaaucc

SEQ ID NO: 2103112 - RNA, 19 nt, Artificial Sequence
  Description of Artificial Sequence: Synthetic oligonucleotide
  Sense strand starting at position 424 of SEQ ID NO: 1882206
aggacucacuagcuauauu

SEQ ID NO: 2103113 - RNA, 19 nt, Artificial Sequence
  Description of Artificial Sequence: Synthetic oligonucleotide
  Antisense strand to SEQ ID NO: 2103112
aauauagcuagugaguccu

SEQ ID NO: 2103114 - RNA, 19 nt, Artificial Sequence
  Description of Artificial Sequence: Synthetic oligonucleotide
  Sense strand starting at position 434 of SEQ ID NO: 1882206
agcuauauucuugggcaag

SEQ ID NO: 2103115 - RNA, 19 nt, Artificial Sequence
  Description of Artificial Sequence: Synthetic oligonucleotide
  Antisense strand to SEQ ID NO: 2103114
cuugcccaagaauauagcu

SEQ ID NO: 2103116 - RNA, 19 nt, Artificial Sequence
  Description of Artificial Sequence: Synthetic oligonucleotide
  Sense strand starting at position 436 of SEQ ID NO: 1882206
cuauauucuugggcaaguu

SEQ ID NO: 2103117 - RNA, 19 nt, Artificial Sequence
  Description of Artificial Sequence: Synthetic oligonucleotide
  Antisense strand to SEQ ID NO: 2103116
aacuugcccaagaauauag

SEQ ID NO: 2103118 - RNA, 19 nt, Artificial Sequence
  Description of Artificial Sequence: Synthetic oligonucleotide
  Sense strand starting at position 437 of SEQ ID NO: 1882206
uauauucuugggcaaguua

SEQ ID NO: 2103119 - RNA, 19 nt, Artificial Sequence
  Description of Artificial Sequence: Synthetic oligonucleotide
  Antisense strand to SEQ ID NO: 2103118
uaacuugcccaagaauaua

SEQ ID NO: 2103120 - RNA, 19 nt, Artificial Sequence
  Description of Artificial Sequence: Synthetic oligonucleotide
  Sense strand starting at position 543 of SEQ ID NO: 1882206
gagauaugcauguagggca

SEQ ID NO: 2103121 - RNA, 19 nt, Artificial Sequence
  Description of Artificial Sequence: Synthetic oligonucleotide
  Antisense strand to SEQ ID NO: 2103120
ugcccuacaugcauaucuc

SEQ ID NO: 2103122 - RNA, 19 nt, Artificial Sequence
  Description of Artificial Sequence: Synthetic oligonucleotide
  Sense strand starting at position 572 of SEQ ID NO: 1882206
ugccuaggagcuuaauaaa

SEQ ID NO: 2103123 - RNA, 19 nt, Artificial Sequence
  Description of Artificial Sequence: Synthetic oligonucleotide
  Antisense strand to SEQ ID NO: 2103122
uuuauuaagcuccuaggca

SEQ ID NO: 2103124 - RNA, 19 nt, Artificial Sequence
  Description of Artificial Sequence: Synthetic oligonucleotide
  Sense strand starting at position 575 of SEQ ID NO: 1882206
cuaggagcuuaauaaauaa

SEQ ID NO: 2103125 - RNA, 19 nt, Artificial Sequence
  Description of Artificial Sequence: Synthetic oligonucleotide
  Antisense strand to SEQ ID NO: 2103124
uuauuuauuaagcuccuag

SEQ ID NO: 2103126 - RNA, 19 nt, Artificial Sequence
  Description of Artificial Sequence: Synthetic oligonucleotide
  Sense strand starting at position 709 of SEQ ID NO: 1882206
aguuacuauucccugcauu

SEQ ID NO: 2103127 - RNA, 19 nt, Artificial Sequence
  Description of Artificial Sequence: Synthetic oligonucleotide
  Antisense strand to SEQ ID NO: 2103126
aaugcagggaauaguaacu

SEQ ID NO: 2103128 - RNA, 19 nt, Artificial Sequence
  Description of Artificial Sequence: Synthetic oligonucleotide
  Sense strand starting at position 710 of SEQ ID NO: 1882206
guuacuauucccugcauuu

SEQ ID NO: 2103129 - RNA, 19 nt, Artificial Sequence
  Description of Artificial Sequence: Synthetic oligonucleotide
  Antisense strand to SEQ ID NO: 2103128
aaaugcagggaauaguaac

SEQ ID NO: 2103130 - RNA, 19 nt, Artificial Sequence
  Description of Artificial Sequence: Synthetic oligonucleotide
  Sense strand starting at position 762 of SEQ ID NO: 1882206
guaaauauucuauggcucu

SEQ ID NO: 2103131 - RNA, 19 nt, Artificial Sequence
  Description of Artificial Sequence: Synthetic oligonucleotide
  Antisense strand to SEQ ID NO: 2103130
agagccauagaauauuuac

SEQ ID NO: 2103132 - RNA, 19 nt, Artificial Sequence
  Description of Artificial Sequence: Synthetic oligonucleotide
  Sense strand starting at position 829 of SEQ ID NO: 1882206
uuuaauguugucuaccaag

SEQ ID NO: 2103133 - RNA, 19 nt, Artificial Sequence
  Description of Artificial Sequence: Synthetic oligonucleotide
  Antisense strand to SEQ ID NO: 2103132
cuugguagacaacauuaaa

SEQ ID NO: 2103134 - RNA, 19 nt, Artificial Sequence
  Description of Artificial Sequence: Synthetic oligonucleotide
  Sense strand starting at position 886 of SEQ ID NO: 1882206
aaacgaacucugugcuugu

SEQ ID NO: 2103135 - RNA, 19 nt, Artificial Sequence
  Description of Artificial Sequence: Synthetic oligonucleotide
  Antisense strand to SEQ ID NO: 2103134
acaagcacagaguucguuu

SEQ ID NO: 2103136 - RNA, 19 nt, Artificial Sequence
  Description of Artificial Sequence: Synthetic oligonucleotide
  Sense strand starting at position 889 of SEQ ID NO: 1882206
cgaacucugugcuuguuaa

SEQ ID NO: 2103137 - RNA, 19 nt, Artificial Sequence
  Description of Artificial Sequence: Synthetic oligonucleotide
  Antisense strand to SEQ ID NO: 2103136
uuaacaagcacagaguucg

SEQ ID NO: 2103138 - RNA, 19 nt, Artificial Sequence
  Description of Artificial Sequence: Synthetic oligonucleotide
  Sense strand starting at position 890 of SEQ ID NO: 1882206
gaacucugugcuuguuaaa

SEQ ID NO: 2103139 - RNA, 19 nt, Artificial Sequence
  Description of Artificial Sequence: Synthetic oligonucleotide
  Antisense strand to SEQ ID NO: 2103138
uuuaacaagcacagaguuc

SEQ ID NO: 2103140 - RNA, 19 nt, Artificial Sequence
  Description of Artificial Sequence: Synthetic oligonucleotide
  Sense strand starting at position 985 of SEQ ID NO: 1882206
agaggugauucucacaauu

SEQ ID NO: 2103141 - RNA, 19 nt, Artificial Sequence
  Description of Artificial Sequence: Synthetic oligonucleotide
  Antisense strand to SEQ ID NO: 2103140
aauugugagaaucaccucu

SEQ ID NO: 2103142 - RNA, 19 nt, Artificial Sequence
  Description of Artificial Sequence: Synthetic oligonucleotide
  Sense strand starting at position 1075 of SEQ ID NO: 1882206
aaaucucagccgcgaauua

SEQ ID NO: 2103143 - RNA, 19 nt, Artificial Sequence
  Description of Artificial Sequence: Synthetic oligonucleotide
  Antisense strand to SEQ ID NO: 2103142
uaauucgcggcugagauuu

SEQ ID NO: 2103144 - RNA, 19 nt, Artificial Sequence
  Description of Artificial Sequence: Synthetic oligonucleotide
  Sense strand starting at position 1086 of SEQ ID NO: 1882206
gcgaauuacucucacgaug

SEQ ID NO: 2103145 - RNA, 19 nt, Artificial Sequence
  Description of Artificial Sequence: Synthetic oligonucleotide
  Antisense strand to SEQ ID NO: 2103144
caucgugagaguaauucgc

SEQ ID NO: 2103146 - RNA, 19 nt, Artificial Sequence
  Description of Artificial Sequence: Synthetic oligonucleotide
  Sense strand starting at position 1139 of SEQ ID NO: 1882206
aauggaauguuauaaagga

SEQ ID NO: 2103147 - RNA, 19 nt, Artificial Sequence
  Description of Artificial Sequence: Synthetic oligonucleotide
  Antisense strand to SEQ ID NO: 2103146
uccuuuauaacauuccauu

SEQ ID NO: 2103148 - RNA, 19 nt, Artificial Sequence
  Description of Artificial Sequence: Synthetic oligonucleotide
  Sense strand starting at position 1189 of SEQ ID NO: 1882206
acugccgacuucuauagau

SEQ ID NO: 2103149 - RNA, 19 nt, Artificial Sequence
  Description of Artificial Sequence: Synthetic oligonucleotide
  Antisense strand to SEQ ID NO: 2103148
aucuauagaagucggcagu

SEQ ID NO: 2103150 - RNA, 19 nt, Artificial Sequence
  Description of Artificial Sequence: Synthetic oligonucleotide
  Sense strand starting at position 1191 of SEQ ID NO: 1882206
ugccgacuucuauagauca

SEQ ID NO: 2103151 - RNA, 19 nt, Artificial Sequence
  Description of Artificial Sequence: Synthetic oligonucleotide
  Antisense strand to SEQ ID NO: 2103150
ugaucuauagaagucggca

SEQ ID NO: 2103152 - RNA, 19 nt, Artificial Sequence
  Description of Artificial Sequence: Synthetic oligonucleotide
  Sense strand starting at position 1248 of SEQ ID NO: 1882206
aagucuaaauguuggaaau

SEQ ID NO: 2103153 - RNA, 19 nt, Artificial Sequence
  Description of Artificial Sequence: Synthetic oligonucleotide
  Antisense strand to SEQ ID NO: 2103152
auuuccaacauuuagacuu

SEQ ID NO: 2103154 - RNA, 19 nt, Artificial Sequence
  Description of Artificial Sequence: Synthetic oligonucleotide
  Sense strand starting at position 1249 of SEQ ID NO: 1882206
agucuaaauguuggaaauc

SEQ ID NO: 2103155 - RNA, 19 nt, Artificial Sequence
  Description of Artificial Sequence: Synthetic oligonucleotide
  Antisense strand to SEQ ID NO: 2103154
gauuuccaacauuuagacu

SEQ ID NO: 2103156 - RNA, 19 nt, Artificial Sequence
  Description of Artificial Sequence: Synthetic oligonucleotide
  Sense strand starting at position 1348 of SEQ ID NO: 1882206
cgcgcacagccucuuuauu

SEQ ID NO: 2103157 - RNA, 19 nt, Artificial Sequence
  Description of Artificial Sequence: Synthetic oligonucleotide
  Antisense strand to SEQ ID NO: 2103156
aauaaagaggcugugcgcg

SEQ ID NO: 2103158 - RNA, 19 nt, Artificial Sequence
  Description of Artificial Sequence: Synthetic oligonucleotide
  Sense strand starting at position 1716 of SEQ ID NO: 1882206
gugcuucccucggcgacaa

SEQ ID NO: 2103159 - RNA, 19 nt, Artificial Sequence
  Description of Artificial Sequence: Synthetic oligonucleotide
  Antisense strand to SEQ ID NO: 2103158
uugucgccgagggaagcac

SEQ ID NO: 2103160 - RNA, 19 nt, Artificial Sequence
  Description of Artificial Sequence: Synthetic oligonucleotide
  Sense strand starting at position 3687 of SEQ ID NO: 1882206
ggucacauuuccgagaggu

SEQ ID NO: 2103161 - RNA, 19 nt, Artificial Sequence
  Description of Artificial Sequence: Synthetic oligonucleotide
  Antisense strand to SEQ ID NO: 2103160
accucucggaaaugugacc

SEQ ID NO: 2103162 - RNA, 19 nt, Artificial Sequence
  Description of Artificial Sequence: Synthetic oligonucleotide
  Sense strand starting at position 3916 of SEQ ID NO: 1882206
guuggugcagcuguucaau

SEQ ID NO: 2103163 - RNA, 19 nt, Artificial Sequence
  Description of Artificial Sequence: Synthetic oligonucleotide
  Antisense strand to SEQ ID NO: 2103162
auugaacagcugcaccaac

SEQ ID NO: 2103164 - RNA, 19 nt, Artificial Sequence
  Description of Artificial Sequence: Synthetic oligonucleotide
  Sense strand starting at position 3968 of SEQ ID NO: 1882206
uaaagaaauuccguaggag

SEQ ID NO: 2103165 - RNA, 19 nt, Artificial Sequence
  Description of Artificial Sequence: Synthetic oligonucleotide
  Antisense strand to SEQ ID NO: 2103164
cuccuacggaauuucuuua

SEQ ID NO: 2103166 - RNA, 19 nt, Artificial Sequence
  Description of Artificial Sequence: Synthetic oligonucleotide
  Sense strand starting at position 43 of SEQ ID NO: 1882207
agugcaugcgcuuugaugu

SEQ ID NO: 2103167 - RNA, 19 nt, Artificial Sequence
  Description of Artificial Sequence: Synthetic oligonucleotide
  Antisense strand to SEQ ID NO: 2103166
acaucaaagcgcaugcacu

SEQ ID NO: 2103168 - RNA, 19 nt, Artificial Sequence
  Description of Artificial Sequence: Synthetic oligonucleotide
  Sense strand starting at position 97 of SEQ ID NO: 1882207
gaggaaagccucuagcacu

SEQ ID NO: 2103169 - RNA, 19 nt, Artificial Sequence
  Description of Artificial Sequence: Synthetic oligonucleotide
  Antisense strand to SEQ ID NO: 2103168
agugcuagaggcuuuccuc

SEQ ID NO: 2103170 - RNA, 19 nt, Artificial Sequence
  Description of Artificial Sequence: Synthetic oligonucleotide
  Sense strand starting at position 105 of SEQ ID NO: 1882207
ccucuagcacuugggaaua

SEQ ID NO: 2103171 - RNA, 19 nt, Artificial Sequence
  Description of Artificial Sequence: Synthetic oligonucleotide
  Antisense strand to SEQ ID NO: 2103170
uauucccaagugcuagagg

SEQ ID NO: 2103172 - RNA, 19 nt, Artificial Sequence
  Description of Artificial Sequence: Synthetic oligonucleotide
  Sense strand starting at position 139 of SEQ ID NO: 1882207
uggagaagguaauaaacua

SEQ ID NO: 2103173 - RNA, 19 nt, Artificial Sequence
  Description of Artificial Sequence: Synthetic oligonucleotide
  Antisense strand to SEQ ID NO: 2103172
uaguuuauuaccuucucca

SEQ ID NO: 2103174 - RNA, 19 nt, Artificial Sequence
  Description of Artificial Sequence: Synthetic oligonucleotide
  Sense strand starting at position 147 of SEQ ID NO: 1882207
guaauaaacuauccuggca

SEQ ID NO: 2103175 - RNA, 19 nt, Artificial Sequence
  Description of Artificial Sequence: Synthetic oligonucleotide
  Antisense strand to SEQ ID NO: 2103174
ugccaggauaguuuauuac

SEQ ID NO: 2103176 - RNA, 19 nt, Artificial Sequence
  Description of Artificial Sequence: Synthetic oligonucleotide
  Sense strand starting at position 155 of SEQ ID NO: 1882207
cuauccuggcaucagaaau

SEQ ID NO: 2103177 - RNA, 19 nt, Artificial Sequence
  Description of Artificial Sequence: Synthetic oligonucleotide
  Antisense strand to SEQ ID NO: 2103176
auuucugaugccaggauag

SEQ ID NO: 2103178 - RNA, 19 nt, Artificial Sequence
  Description of Artificial Sequence: Synthetic oligonucleotide
  Sense strand starting at position 204 of SEQ ID NO: 1882207
ccuuuagguuauucugcau

SEQ ID NO: 2103179 - RNA, 19 nt, Artificial Sequence
  Description of Artificial Sequence: Synthetic oligonucleotide
  Antisense strand to SEQ ID NO: 2103178
augcagaauaaccuaaagg

SEQ ID NO: 2103180 - RNA, 19 nt, Artificial Sequence
  Description of Artificial Sequence: Synthetic oligonucleotide
  Sense strand starting at position 207 of SEQ ID NO: 1882207
uuagguuauucugcaugua

SEQ ID NO: 2103181 - RNA, 19 nt, Artificial Sequence
  Description of Artificial Sequence: Synthetic oligonucleotide
  Antisense strand to SEQ ID NO: 2103180
uacaugcagaauaaccuaa

SEQ ID NO: 2103182 - RNA, 19 nt, Artificial Sequence
  Description of Artificial Sequence: Synthetic oligonucleotide
  Sense strand starting at position 210 of SEQ ID NO: 1882207
gguuauucugcauguagaa

SEQ ID NO: 2103183 - RNA, 19 nt, Artificial Sequence
  Description of Artificial Sequence: Synthetic oligonucleotide
  Antisense strand to SEQ ID NO: 2103182
uucuacaugcagaauaacc

SEQ ID NO: 2103184 - RNA, 19 nt, Artificial Sequence
  Description of Artificial Sequence: Synthetic oligonucleotide
  Sense strand starting at position 661 of SEQ ID NO: 1882207
aaaugacaguaugggauaa

SEQ ID NO: 2103185 - RNA, 19 nt, Artificial Sequence
  Description of Artificial Sequence: Synthetic oligonucleotide
  Antisense strand to SEQ ID NO: 2103184
uuaucccauacugucauuu

SEQ ID NO: 2103186 - RNA, 19 nt, Artificial Sequence
  Description of Artificial Sequence: Synthetic oligonucleotide
  Sense strand starting at position 711 of SEQ ID NO: 1882207
gagaaauuguaccuaaagu

SEQ ID NO: 2103187 - RNA, 19 nt, Artificial Sequence
  Description of Artificial Sequence: Synthetic oligonucleotide
  Antisense strand to SEQ ID NO: 2103186
acuuuagguacaauuucuc

SEQ ID NO: 2103188 - RNA, 19 nt, Artificial Sequence
  Description of Artificial Sequence: Synthetic oligonucleotide
  Sense strand starting at position 823 of SEQ ID NO: 1882207
gggcgucuuccuuagccua

SEQ ID NO: 2103189 - RNA, 19 nt, Artificial Sequence
  Description of Artificial Sequence: Synthetic oligonucleotide
  Antisense strand to SEQ ID NO: 2103188
uaggcuaaggaagacgccc

SEQ ID NO: 2103190 - RNA, 19 nt, Artificial Sequence
  Description of Artificial Sequence: Synthetic oligonucleotide
  Sense strand starting at position 826 of SEQ ID NO: 1882207
cgucuuccuuagccuauaa

SEQ ID NO: 2103191 - RNA, 19 nt, Artificial Sequence
  Description of Artificial Sequence: Synthetic oligonucleotide
  Antisense strand to SEQ ID NO: 2103190
uuauaggcuaaggaagacg

SEQ ID NO: 2103192 - RNA, 19 nt, Artificial Sequence
  Description of Artificial Sequence: Synthetic oligonucleotide
  Sense strand starting at position 1070 of SEQ ID NO: 1882207
caaggauugccuggguuau

SEQ ID NO: 2103193 - RNA, 19 nt, Artificial Sequence
  Description of Artificial Sequence: Synthetic oligonucleotide
  Antisense strand to SEQ ID NO: 2103192
auaacccaggcaauccuug

SEQ ID NO: 2103194 - RNA, 19 nt, Artificial Sequence
  Description of Artificial Sequence: Synthetic oligonucleotide
  Sense strand starting at position 1071 of SEQ ID NO: 1882207
aaggauugccuggguuauu

SEQ ID NO: 2103195 - RNA, 19 nt, Artificial Sequence
  Description of Artificial Sequence: Synthetic oligonucleotide
  Antisense strand to SEQ ID NO: 2103194
aauaacccaggcaauccuu

SEQ ID NO: 2103196 - RNA, 19 nt, Artificial Sequence
  Description of Artificial Sequence: Synthetic oligonucleotide
  Sense strand starting at position 1081 of SEQ ID NO: 1882207
uggguuauuccggguggau

SEQ ID NO: 2103197 - RNA, 19 nt, Artificial Sequence
  Description of Artificial Sequence: Synthetic oligonucleotide
  Antisense strand to SEQ ID NO: 2103196
auccacccggaauaaccca

SEQ ID NO: 2103198 - RNA, 19 nt, Artificial Sequence
  Description of Artificial Sequence: Synthetic oligonucleotide
  Sense strand starting at position 1093 of SEQ ID NO: 1882207
gguggaucgugaaacugaa

SEQ ID NO: 2103199 - RNA, 19 nt, Artificial Sequence
  Description of Artificial Sequence: Synthetic oligonucleotide
  Antisense strand to SEQ ID NO: 2103198
uucaguuucacgauccacc

SEQ ID NO: 2103200 - RNA, 19 nt, Artificial Sequence
  Description of Artificial Sequence: Synthetic oligonucleotide
  Sense strand starting at position 1120 of SEQ ID NO: 1882207
acgggauggcucuaacuag

SEQ ID NO: 2103201 - RNA, 19 nt, Artificial Sequence
  Description of Artificial Sequence: Synthetic oligonucleotide
  Antisense strand to SEQ ID NO: 2103200
cuaguuagagccaucccgu

SEQ ID NO: 2103202 - RNA, 19 nt, Artificial Sequence
  Description of Artificial Sequence: Synthetic oligonucleotide
  Sense strand starting at position 1237 of SEQ ID NO: 1882207
cuuagcuguuuguuguaaa

SEQ ID NO: 2103203 - RNA, 19 nt, Artificial Sequence
  Description of Artificial Sequence: Synthetic oligonucleotide
  Antisense strand to SEQ ID NO: 2103202
uuuacaacaaacagcuaag

SEQ ID NO: 2103204 - RNA, 19 nt, Artificial Sequence
  Description of Artificial Sequence: Synthetic oligonucleotide
  Sense strand starting at position 1578 of SEQ ID NO: 1882207
agaagcacauaagauaaau

SEQ ID NO: 2103205 - RNA, 19 nt, Artificial Sequence
  Description of Artificial Sequence: Synthetic oligonucleotide
  Antisense strand to SEQ ID NO: 2103204
auuuaucuuaugugcuucu

SEQ ID NO: 2103206 - RNA, 19 nt, Artificial Sequence
  Description of Artificial Sequence: Synthetic oligonucleotide
  Sense strand starting at position 1633 of SEQ ID NO: 1882207
gaaacaauugcgcgaguuc

SEQ ID NO: 2103207 - RNA, 19 nt, Artificial Sequence
  Description of Artificial Sequence: Synthetic oligonucleotide
  Antisense strand to SEQ ID NO: 2103206
gaacucgcgcaauuguuuc

SEQ ID NO: 2103208 - RNA, 19 nt, Artificial Sequence
  Description of Artificial Sequence: Synthetic oligonucleotide
  Sense strand starting at position 1634 of SEQ ID NO: 1882207
aaacaauugcgcgaguucu

SEQ ID NO: 2103209 - RNA, 19 nt, Artificial Sequence
  Description of Artificial Sequence: Synthetic oligonucleotide
  Antisense strand to SEQ ID NO: 2103208
agaacucgcgcaauuguuu

SEQ ID NO: 2103210 - RNA, 19 nt, Artificial Sequence
  Description of Artificial Sequence: Synthetic oligonucleotide
  Sense strand starting at position 1636 of SEQ ID NO: 1882207
acaauugcgcgaguucuuu

SEQ ID NO: 2103211 - RNA, 19 nt, Artificial Sequence
  Description of Artificial Sequence: Synthetic oligonucleotide
  Antisense strand to SEQ ID NO: 2103210
aaagaacucgcgcaauugu

SEQ ID NO: 2103212 - RNA, 19 nt, Artificial Sequence
  Description of Artificial Sequence: Synthetic oligonucleotide
  Sense strand starting at position 1642 of SEQ ID NO: 1882207
gcgcgaguucuuuaaagaa

SEQ ID NO: 2103213 - RNA, 19 nt, Artificial Sequence
  Description of Artificial Sequence: Synthetic oligonucleotide
  Antisense strand to SEQ ID NO: 2103212
uucuuuaaagaacucgcgc

SEQ ID NO: 2103214 - RNA, 19 nt, Artificial Sequence
  Description of Artificial Sequence: Synthetic oligonucleotide
  Sense strand starting at position 1687 of SEQ ID NO: 1882207
gguacaauuuaccagccaa

SEQ ID NO: 2103215 - RNA, 19 nt, Artificial Sequence
  Description of Artificial Sequence: Synthetic oligonucleotide
  Antisense strand to SEQ ID NO: 2103214
uuggcugguaaauuguacc

SEQ ID NO: 2103216 - RNA, 19 nt, Artificial Sequence
  Description of Artificial Sequence: Synthetic oligonucleotide
  Sense strand starting at position 2271 of SEQ ID NO: 1882207
aaucauuguuucccggaga

SEQ ID NO: 2103217 - RNA, 19 nt, Artificial Sequence
  Description of Artificial Sequence: Synthetic oligonucleotide
  Antisense strand to SEQ ID NO: 2103216
ucuccgggaaacaaugauu

SEQ ID NO: 2103218 - RNA, 19 nt, Artificial Sequence
  Description of Artificial Sequence: Synthetic oligonucleotide
  Sense strand starting at position 2313 of SEQ ID NO: 1882207
ccugccaaucaaugugaaa

SEQ ID NO: 2103219 - RNA, 19 nt, Artificial Sequence
  Description of Artificial Sequence: Synthetic oligonucleotide
  Antisense strand to SEQ ID NO: 2103218
uuucacauugauuggcagg

SEQ ID NO: 2103220 - RNA, 19 nt, Artificial Sequence
  Description of Artificial Sequence: Synthetic oligonucleotide
  Sense strand starting at position 2365 of SEQ ID NO: 1882207
ucgucaucccaagagacaa

SEQ ID NO: 2103221 - RNA, 19 nt, Artificial Sequence
  Description of Artificial Sequence: Synthetic oligonucleotide
  Antisense strand to SEQ ID NO: 2103220
uugucucuugggaugacga

SEQ ID NO: 2103222 - RNA, 19 nt, Artificial Sequence
  Description of Artificial Sequence: Synthetic oligonucleotide
  Sense strand starting at position 2617 of SEQ ID NO: 1882207
cucuaauuggcaggacaaa

SEQ ID NO: 2103223 - RNA, 19 nt, Artificial Sequence
  Description of Artificial Sequence: Synthetic oligonucleotide
  Antisense strand to SEQ ID NO: 2103222
uuuguccugccaauuagag

SEQ ID NO: 2103224 - RNA, 19 nt, Artificial Sequence
  Description of Artificial Sequence: Synthetic oligonucleotide
  Sense strand starting at position 2990 of SEQ ID NO: 1882207
cugccuuguccgggacaaa

SEQ ID NO: 2103225 - RNA, 19 nt, Artificial Sequence
  Description of Artificial Sequence: Synthetic oligonucleotide
  Antisense strand to SEQ ID NO: 2103224
uuugucccggacaaggcag

SEQ ID NO: 2103226 - RNA, 19 nt, Artificial Sequence
  Description of Artificial Sequence: Synthetic oligonucleotide
  Sense strand starting at position 2991 of SEQ ID NO: 1882207
ugccuuguccgggacaaau

SEQ ID NO: 2103227 - RNA, 19 nt, Artificial Sequence
  Description of Artificial Sequence: Synthetic oligonucleotide
  Antisense strand to SEQ ID NO: 2103226
auuugucccggacaaggca

SEQ ID NO: 2103228 - RNA, 19 nt, Artificial Sequence
  Description of Artificial Sequence: Synthetic oligonucleotide
  Sense strand starting at position 2993 of SEQ ID NO: 1882207
ccuuguccgggacaaauca

SEQ ID NO: 2103229 - RNA, 19 nt, Artificial Sequence
  Description of Artificial Sequence: Synthetic oligonucleotide
  Antisense strand to SEQ ID NO: 2103228
ugauuugucccggacaagg

SEQ ID NO: 2103230 - RNA, 19 nt, Artificial Sequence
  Description of Artificial Sequence: Synthetic oligonucleotide
  Sense strand starting at position 3138 of SEQ ID NO: 1882207
uagcauuagcucgcugagu

SEQ ID NO: 2103231 - RNA, 19 nt, Artificial Sequence
  Description of Artificial Sequence: Synthetic oligonucleotide
  Antisense strand to SEQ ID NO: 2103230
acucagcgagcuaaugcua

SEQ ID NO: 2103232 - RNA, 19 nt, Artificial Sequence
  Description of Artificial Sequence: Synthetic oligonucleotide
  Sense strand starting at position 3256 of SEQ ID NO: 1882207
ggaagcaauuucuagggca

SEQ ID NO: 2103233 - RNA, 19 nt, Artificial Sequence
  Description of Artificial Sequence: Synthetic oligonucleotide
  Antisense strand to SEQ ID NO: 2103232
ugcccuagaaauugcuucc

SEQ ID NO: 2103234 - RNA, 19 nt, Artificial Sequence
  Description of Artificial Sequence: Synthetic oligonucleotide
  Sense strand starting at position 3381 of SEQ ID NO: 1882207
auccuuucggguuggugaa

SEQ ID NO: 2103235 - RNA, 19 nt, Artificial Sequence
  Description of Artificial Sequence: Synthetic oligonucleotide
  Antisense strand to SEQ ID NO: 2103234
uucaccaacccgaaaggau

SEQ ID NO: 2103236 - RNA, 19 nt, Artificial Sequence
  Description of Artificial Sequence: Synthetic oligonucleotide
  Sense strand starting at position 3865 of SEQ ID NO: 1882207
cccuuaagcgaaugauguu

SEQ ID NO: 2103237 - RNA, 19 nt, Artificial Sequence
  Description of Artificial Sequence: Synthetic oligonucleotide
  Antisense strand to SEQ ID NO: 2103236
aacaucauucgcuuaaggg

SEQ ID NO: 2103238 - RNA, 19 nt, Artificial Sequence
  Description of Artificial Sequence: Synthetic oligonucleotide
  Sense strand starting at position 3866 of SEQ ID NO: 1882207
ccuuaagcgaaugauguuu

SEQ ID NO: 2103239 - RNA, 19 nt, Artificial Sequence
  Description of Artificial Sequence: Synthetic oligonucleotide
  Antisense strand to SEQ ID NO: 2103238
aaacaucauucgcuuaagg

SEQ ID NO: 2103240 - RNA, 19 nt, Artificial Sequence
  Description of Artificial Sequence: Synthetic oligonucleotide
  Sense strand starting at position 3871 of SEQ ID NO: 1882207
agcgaaugauguuucuuua

SEQ ID NO: 2103241 - RNA, 19 nt, Artificial Sequence
  Description of Artificial Sequence: Synthetic oligonucleotide
  Antisense strand to SEQ ID NO: 2103240
uaaagaaacaucauucgcu

SEQ ID NO: 2103242 - RNA, 19 nt, Artificial Sequence
  Description of Artificial Sequence: Synthetic oligonucleotide
  Sense strand starting at position 3874 of SEQ ID NO: 1882207
gaaugauguuucuuuaguc

SEQ ID NO: 2103243 - RNA, 19 nt, Artificial Sequence
  Description of Artificial Sequence: Synthetic oligonucleotide
  Antisense strand to SEQ ID NO: 2103242
gacuaaagaaacaucauuc

SEQ ID NO: 2103244 - RNA, 19 nt, Artificial Sequence
  Description of Artificial Sequence: Synthetic oligonucleotide
  Sense strand starting at position 3878 of SEQ ID NO: 1882207
gauguuucuuuagucugga

SEQ ID NO: 2103245 - RNA, 19 nt, Artificial Sequence
  Description of Artificial Sequence: Synthetic oligonucleotide
  Antisense strand to SEQ ID NO: 2103244
uccagacuaaagaaacauc

SEQ ID NO: 2103246 - RNA, 19 nt, Artificial Sequence
  Description of Artificial Sequence: Synthetic oligonucleotide
  Sense strand starting at position 355 of SEQ ID NO: 1882208
aauaucuugggaugaguau

SEQ ID NO: 2103247 - RNA, 19 nt, Artificial Sequence
  Description of Artificial Sequence: Synthetic oligonucleotide
  Antisense strand to SEQ ID NO: 2103246
auacucaucccaagauauu

SEQ ID NO: 2103248 - RNA, 19 nt, Artificial Sequence
  Description of Artificial Sequence: Synthetic oligonucleotide
  Sense strand starting at position 540 of SEQ ID NO: 1882208
agauucauuugggagugga

SEQ ID NO: 2103249 - RNA, 19 nt, Artificial Sequence
  Description of Artificial Sequence: Synthetic oligonucleotide
  Antisense strand to SEQ ID NO: 2103248
uccacucccaaaugaaucu

SEQ ID NO: 2103250 - RNA, 19 nt, Artificial Sequence
  Description of Artificial Sequence: Synthetic oligonucleotide
  Sense strand starting at position 633 of SEQ ID NO: 1882208
aucaaacuguaugugaaua

SEQ ID NO: 2103251 - RNA, 19 nt, Artificial Sequence
  Description of Artificial Sequence: Synthetic oligonucleotide
  Antisense strand to SEQ ID NO: 2103250
uauucacauacaguuugau

SEQ ID NO: 2103252 - RNA, 19 nt, Artificial Sequence
  Description of Artificial Sequence: Synthetic oligonucleotide
  Sense strand starting at position 774 of SEQ ID NO: 1882208
guuccuuaaccuugaagau

SEQ ID NO: 2103253 - RNA, 19 nt, Artificial Sequence
  Description of Artificial Sequence: Synthetic oligonucleotide
  Antisense strand to SEQ ID NO: 2103252
aucuucaagguuaaggaac

SEQ ID NO: 2103254 - RNA, 19 nt, Artificial Sequence
  Description of Artificial Sequence: Synthetic oligonucleotide
  Sense strand starting at position 899 of SEQ ID NO: 1882208
uuugcuacugcagaugaau

SEQ ID NO: 2103255 - RNA, 19 nt, Artificial Sequence
  Description of Artificial Sequence: Synthetic oligonucleotide
  Antisense strand to SEQ ID NO: 2103254
auucaucugcaguagcaaa

SEQ ID NO: 2103256 - RNA, 19 nt, Artificial Sequence
  Description of Artificial Sequence: Synthetic oligonucleotide
  Sense strand starting at position 971 of SEQ ID NO: 1882208
ugauauuugucacuguccu

SEQ ID NO: 2103257 - RNA, 19 nt, Artificial Sequence
  Description of Artificial Sequence: Synthetic oligonucleotide
  Antisense strand to SEQ ID NO: 2103256
aggacagugacaaauauca

SEQ ID NO: 2103258 - RNA, 19 nt, Artificial Sequence
  Description of Artificial Sequence: Synthetic oligonucleotide
  Sense strand starting at position 978 of SEQ ID NO: 1882208
ugucacuguccuuggauuu

SEQ ID NO: 2103259 - RNA, 19 nt, Artificial Sequence
  Description of Artificial Sequence: Synthetic oligonucleotide
  Antisense strand to SEQ ID NO: 2103258
aaauccaaggacagugaca

SEQ ID NO: 2103260 - RNA, 19 nt, Artificial Sequence
  Description of Artificial Sequence: Synthetic oligonucleotide
  Sense strand starting at position 1200 of SEQ ID NO: 1882208
ugugcuuuauuucucacau

SEQ ID NO: 2103261 - RNA, 19 nt, Artificial Sequence
  Description of Artificial Sequence: Synthetic oligonucleotide
  Antisense strand to SEQ ID NO: 2103260
augugagaaauaaagcaca

SEQ ID NO: 2103262 - RNA, 19 nt, Artificial Sequence
  Description of Artificial Sequence: Synthetic oligonucleotide
  Sense strand starting at position 1289 of SEQ ID NO: 1882208
gacucuggguuauuauuau

SEQ ID NO: 2103263 - RNA, 19 nt, Artificial Sequence
  Description of Artificial Sequence: Synthetic oligonucleotide
  Antisense strand to SEQ ID NO: 2103262
auaauaauaacccagaguc

SEQ ID NO: 2103264 - RNA, 19 nt, Artificial Sequence
  Description of Artificial Sequence: Synthetic oligonucleotide
  Sense strand starting at position 1328 of SEQ ID NO: 1882208
gcuguauuuggcuauucuu

SEQ ID NO: 2103265 - RNA, 19 nt, Artificial Sequence
  Description of Artificial Sequence: Synthetic oligonucleotide
  Antisense strand to SEQ ID NO: 2103264
aagaauagccaaauacagc

SEQ ID NO: 2103266 - RNA, 19 nt, Artificial Sequence
  Description of Artificial Sequence: Synthetic oligonucleotide
  Sense strand starting at position 1331 of SEQ ID NO: 1882208
guauuuggcuauucuuauu

SEQ ID NO: 2103267 - RNA, 19 nt, Artificial Sequence
  Description of Artificial Sequence: Synthetic oligonucleotide
  Antisense strand to SEQ ID NO: 2103266
aauaagaauagccaaauac

SEQ ID NO: 2103268 - RNA, 19 nt, Artificial Sequence
  Description of Artificial Sequence: Synthetic oligonucleotide
  Sense strand starting at position 1342 of SEQ ID NO: 1882208
uucuuauuacuagauguuc

SEQ ID NO: 2103269 - RNA, 19 nt, Artificial Sequence
  Description of Artificial Sequence: Synthetic oligonucleotide
  Antisense strand to SEQ ID NO: 2103268
gaacaucuaguaauaagaa

SEQ ID NO: 2103270 - RNA, 19 nt, Artificial Sequence
  Description of Artificial Sequence: Synthetic oligonucleotide
  Sense strand starting at position 1391 of SEQ ID NO: 1882208
ugacuugauguugagguau

SEQ ID NO: 2103271 - RNA, 19 nt, Artificial Sequence
  Description of Artificial Sequence: Synthetic oligonucleotide
  Antisense strand to SEQ ID NO: 2103270
auaccucaacaucaaguca

SEQ ID NO: 2103272 - RNA, 19 nt, Artificial Sequence
  Description of Artificial Sequence: Synthetic oligonucleotide
  Sense strand starting at position 1561 of SEQ ID NO: 1882208
aggacuuuacaaugaucuu

SEQ ID NO: 2103273 - RNA, 19 nt, Artificial Sequence
  Description of Artificial Sequence: Synthetic oligonucleotide
  Antisense strand to SEQ ID NO: 2103272
aagaucauuguaaaguccu

SEQ ID NO: 2103274 - RNA, 19 nt, Artificial Sequence
  Description of Artificial Sequence: Synthetic oligonucleotide
  Sense strand starting at position 1579 of SEQ ID NO: 1882208
uuaucuucucaguaguaac

SEQ ID NO: 2103275 - RNA, 19 nt, Artificial Sequence
  Description of Artificial Sequence: Synthetic oligonucleotide
  Antisense strand to SEQ ID NO: 2103274
guuacuacugagaagauaa

SEQ ID NO: 2103276 - RNA, 19 nt, Artificial Sequence
  Description of Artificial Sequence: Synthetic oligonucleotide
  Sense strand starting at position 1785 of SEQ ID NO: 1882208
gugucacugccuguuaucu

SEQ ID NO: 2103277 - RNA, 19 nt, Artificial Sequence
  Description of Artificial Sequence: Synthetic oligonucleotide
  Antisense strand to SEQ ID NO: 2103276
agauaacaggcagugacac

SEQ ID NO: 2103278 - RNA, 19 nt, Artificial Sequence
  Description of Artificial Sequence: Synthetic oligonucleotide
  Sense strand starting at position 1874 of SEQ ID NO: 1882208
gagacuuaccaaggcuuga

SEQ ID NO: 2103279 - RNA, 19 nt, Artificial Sequence
  Description of Artificial Sequence: Synthetic oligonucleotide
  Antisense strand to SEQ ID NO: 2103278
ucaagccuugguaagucuc

SEQ ID NO: 2103280 - RNA, 19 nt, Artificial Sequence
  Description of Artificial Sequence: Synthetic oligonucleotide
  Sense strand starting at position 1878 of SEQ ID NO: 1882208
cuuaccaaggcuugaugau

SEQ ID NO: 2103281 - RNA, 19 nt, Artificial Sequence
  Description of Artificial Sequence: Synthetic oligonucleotide
  Antisense strand to SEQ ID NO: 2103280
aucaucaagccuugguaag

SEQ ID NO: 2103282 - RNA, 19 nt, Artificial Sequence
  Description of Artificial Sequence: Synthetic oligonucleotide
  Sense strand starting at position 1879 of SEQ ID NO: 1882208
uuaccaaggcuugaugauu

SEQ ID NO: 2103283 - RNA, 19 nt, Artificial Sequence
  Description of Artificial Sequence: Synthetic oligonucleotide
  Antisense strand to SEQ ID NO: 2103282
aaucaucaagccuugguaa

SEQ ID NO: 2103284 - RNA, 19 nt, Artificial Sequence
  Description of Artificial Sequence: Synthetic oligonucleotide
  Sense strand starting at position 1887 of SEQ ID NO: 1882208
gcuugaugauuucugcaau

SEQ ID NO: 2103285 - RNA, 19 nt, Artificial Sequence
  Description of Artificial Sequence: Synthetic oligonucleotide
  Antisense strand to SEQ ID NO: 2103284
auugcagaaaucaucaagc

SEQ ID NO: 2103286 - RNA, 19 nt, Artificial Sequence
  Description of Artificial Sequence: Synthetic oligonucleotide
  Sense strand starting at position 1992 of SEQ ID NO: 1882208
cgagaacacucagcagaca

SEQ ID NO: 2103287 - RNA, 19 nt, Artificial Sequence
  Description of Artificial Sequence: Synthetic oligonucleotide
  Antisense strand to SEQ ID NO: 2103286
ugucugcugaguguucucg

SEQ ID NO: 2103288 - RNA, 19 nt, Artificial Sequence
  Description of Artificial Sequence: Synthetic oligonucleotide
  Sense strand starting at position 2040 of SEQ ID NO: 1882208
ggcagcuuaccagaaguau

SEQ ID NO: 2103289 - RNA, 19 nt, Artificial Sequence
  Description of Artificial Sequence: Synthetic oligonucleotide
  Antisense strand to SEQ ID NO: 2103288
auacuucugguaagcugcc

SEQ ID NO: 2103290 - RNA, 19 nt, Artificial Sequence
  Description of Artificial Sequence: Synthetic oligonucleotide
  Sense strand starting at position 2405 of SEQ ID NO: 1882208
ugguacuaauggucuaaga

SEQ ID NO: 2103291 - RNA, 19 nt, Artificial Sequence
  Description of Artificial Sequence: Synthetic oligonucleotide
  Antisense strand to SEQ ID NO: 2103290
ucuuagaccauuaguacca

SEQ ID NO: 2103292 - RNA, 19 nt, Artificial Sequence
  Description of Artificial Sequence: Synthetic oligonucleotide
  Sense strand starting at position 2959 of SEQ ID NO: 1882208
agcacauuccauuaguuga

SEQ ID NO: 2103293 - RNA, 19 nt, Artificial Sequence
  Description of Artificial Sequence: Synthetic oligonucleotide
  Antisense strand to SEQ ID NO: 2103292
ucaacuaauggaaugugcu

SEQ ID NO: 2103294 - RNA, 19 nt, Artificial Sequence
  Description of Artificial Sequence: Synthetic oligonucleotide
  Sense strand starting at position 2962 of SEQ ID NO: 1882208
acauuccauuaguugacau

SEQ ID NO: 2103295 - RNA, 19 nt, Artificial Sequence
  Description of Artificial Sequence: Synthetic oligonucleotide
  Antisense strand to SEQ ID NO: 2103294
augucaacuaauggaaugu

SEQ ID NO: 2103296 - RNA, 19 nt, Artificial Sequence
  Description of Artificial Sequence: Synthetic oligonucleotide
  Sense strand starting at position 2969 of SEQ ID NO: 1882208
auuaguugacauuguaaga

SEQ ID NO: 2103297 - RNA, 19 nt, Artificial Sequence
  Description of Artificial Sequence: Synthetic oligonucleotide
  Antisense strand to SEQ ID NO: 2103296
ucuuacaaugucaacuaau

SEQ ID NO: 2103298 - RNA, 19 nt, Artificial Sequence
  Description of Artificial Sequence: Synthetic oligonucleotide
  Sense strand starting at position 2982 of SEQ ID NO: 1882208
guaagaaaguggucucaca

SEQ ID NO: 2103299 - RNA, 19 nt, Artificial Sequence
  Description of Artificial Sequence: Synthetic oligonucleotide
  Antisense strand to SEQ ID NO: 2103298
ugugagaccacuuucuuac

SEQ ID NO: 2103300 - RNA, 19 nt, Artificial Sequence
  Description of Artificial Sequence: Synthetic oligonucleotide
  Sense strand starting at position 3009 of SEQ ID NO: 1882208
uuguuaaaucgacaccaac

SEQ ID NO: 2103301 - RNA, 19 nt, Artificial Sequence
  Description of Artificial Sequence: Synthetic oligonucleotide
  Antisense strand to SEQ ID NO: 2103300
guuggugucgauuuaacaa

SEQ ID NO: 2103302 - RNA, 19 nt, Artificial Sequence
  Description of Artificial Sequence: Synthetic oligonucleotide
  Sense strand starting at position 3110 of SEQ ID NO: 1882208
uuuaguguucuggaaccau

SEQ ID NO: 2103303 - RNA, 19 nt, Artificial Sequence
  Description of Artificial Sequence: Synthetic oligonucleotide
  Antisense strand to SEQ ID NO: 2103302
augguuccagaacacuaaa

SEQ ID NO: 2103304 - RNA, 19 nt, Artificial Sequence
  Description of Artificial Sequence: Synthetic oligonucleotide
  Sense strand starting at position 3114 of SEQ ID NO: 1882208
guguucuggaaccaugaau

SEQ ID NO: 2103305 - RNA, 19 nt, Artificial Sequence
  Description of Artificial Sequence: Synthetic oligonucleotide
  Antisense strand to SEQ ID NO: 2103304
auucaugguuccagaacac

SEQ ID NO: 2103306 - RNA, 19 nt, Artificial Sequence
  Description of Artificial Sequence: Synthetic oligonucleotide
  Sense strand starting at position 3225 of SEQ ID NO: 1882208
agagaaggauuugacaagu

SEQ ID NO: 2103307 - RNA, 19 nt, Artificial Sequence
  Description of Artificial Sequence: Synthetic oligonucleotide
  Antisense strand to SEQ ID NO: 2103306
acuugucaaauccuucucu

SEQ ID NO: 2103308 - RNA, 19 nt, Artificial Sequence
  Description of Artificial Sequence: Synthetic oligonucleotide
  Sense strand starting at position 3390 of SEQ ID NO: 1882208
aaagaaguacgacagugua

SEQ ID NO: 2103309 - RNA, 19 nt, Artificial Sequence
  Description of Artificial Sequence: Synthetic oligonucleotide
  Antisense strand to SEQ ID NO: 2103308
uacacugucguacuucuuu

SEQ ID NO: 2103310 - RNA, 19 nt, Artificial Sequence
  Description of Artificial Sequence: Synthetic oligonucleotide
  Sense strand starting at position 3418 of SEQ ID NO: 1882208
ucugaaagcccuuagucau

SEQ ID NO: 2103311 - RNA, 19 nt, Artificial Sequence
  Description of Artificial Sequence: Synthetic oligonucleotide
  Antisense strand to SEQ ID NO: 2103310
augacuaagggcuuucaga

SEQ ID NO: 2103312 - RNA, 19 nt, Artificial Sequence
  Description of Artificial Sequence: Synthetic oligonucleotide
  Sense strand starting at position 3493 of SEQ ID NO: 1882208
aucuguagucuuuaauaca

SEQ ID NO: 2103313 - RNA, 19 nt, Artificial Sequence
  Description of Artificial Sequence: Synthetic oligonucleotide
  Antisense strand to SEQ ID NO: 2103312
uguauuaaagacuacagau

SEQ ID NO: 2103314 - RNA, 19 nt, Artificial Sequence
  Description of Artificial Sequence: Synthetic oligonucleotide
  Sense strand starting at position 3606 of SEQ ID NO: 1882208
acaaaucuccgugauaauu

SEQ ID NO: 2103315 - RNA, 19 nt, Artificial Sequence
  Description of Artificial Sequence: Synthetic oligonucleotide
  Antisense strand to SEQ ID NO: 2103314
aauuaucacggagauuugu

SEQ ID NO: 2103316 - RNA, 19 nt, Artificial Sequence
  Description of Artificial Sequence: Synthetic oligonucleotide
  Sense strand starting at position 3656 of SEQ ID NO: 1882208
cagugucauguauaugaau

SEQ ID NO: 2103317 - RNA, 19 nt, Artificial Sequence
  Description of Artificial Sequence: Synthetic oligonucleotide
  Antisense strand to SEQ ID NO: 2103316
auucauauacaugacacug

SEQ ID NO: 2103318 - RNA, 19 nt, Artificial Sequence
  Description of Artificial Sequence: Synthetic oligonucleotide
  Sense strand starting at position 3721 of SEQ ID NO: 1882208
guacguaugaaauguauuu

SEQ ID NO: 2103319 - RNA, 19 nt, Artificial Sequence
  Description of Artificial Sequence: Synthetic oligonucleotide
  Antisense strand to SEQ ID NO: 2103318
aaauacauuucauacguac

SEQ ID NO: 2103320 - RNA, 19 nt, Artificial Sequence
  Description of Artificial Sequence: Synthetic oligonucleotide
  Sense strand starting at position 3805 of SEQ ID NO: 1882208
gaaaguguugaacaucuuu

SEQ ID NO: 2103321 - RNA, 19 nt, Artificial Sequence
  Description of Artificial Sequence: Synthetic oligonucleotide
  Antisense strand to SEQ ID NO: 2103320
aaagauguucaacacuuuc

SEQ ID NO: 2103322 - RNA, 19 nt, Artificial Sequence
  Description of Artificial Sequence: Synthetic oligonucleotide
  Sense strand starting at position 3868 of SEQ ID NO: 1882208
agaagaauaugcuucuggu

SEQ ID NO: 2103323 - RNA, 19 nt, Artificial Sequence
  Description of Artificial Sequence: Synthetic oligonucleotide
  Antisense strand to SEQ ID NO: 2103322
accagaagcauauucuucu

SEQ ID NO: 2103324 - RNA, 19 nt, Artificial Sequence
  Description of Artificial Sequence: Synthetic oligonucleotide
  Sense strand starting at position 3917 of SEQ ID NO: 1882208
aauagagaauuugagucau

SEQ ID NO: 2103325 - RNA, 19 nt, Artificial Sequence
  Description of Artificial Sequence: Synthetic oligonucleotide
  Antisense strand to SEQ ID NO: 2103324
augacucaaauucucuauu

SEQ ID NO: 2103326 - RNA, 19 nt, Artificial Sequence
  Description of Artificial Sequence: Synthetic oligonucleotide
  Sense strand starting at position 93 of SEQ ID NO: 1882209
ggucauugauagcuaacca

SEQ ID NO: 2103327 - RNA, 19 nt, Artificial Sequence
  Description of Artificial Sequence: Synthetic oligonucleotide
  Antisense strand to SEQ ID NO: 2103326
ugguuagcuaucaaugacc

SEQ ID NO: 2103328 - RNA, 19 nt, Artificial Sequence
  Description of Artificial Sequence: Synthetic oligonucleotide
  Sense strand starting at position 221 of SEQ ID NO: 1882209
gggcuuauauauccuagaa

SEQ ID NO: 2103329 - RNA, 19 nt, Artificial Sequence
  Description of Artificial Sequence: Synthetic oligonucleotide
  Antisense strand to SEQ ID NO: 2103328
uucuaggauauauaagccc

SEQ ID NO: 2103330 - RNA, 19 nt, Artificial Sequence
  Description of Artificial Sequence: Synthetic oligonucleotide
  Sense strand starting at position 571 of SEQ ID NO: 1882209
gugaauauugaaggugauu

SEQ ID NO: 2103331 - RNA, 19 nt, Artificial Sequence
  Description of Artificial Sequence: Synthetic oligonucleotide
  Antisense strand to SEQ ID NO: 2103330
aaucaccuucaauauucac

SEQ ID NO: 2103332 - RNA, 19 nt, Artificial Sequence
  Description of Artificial Sequence: Synthetic oligonucleotide
  Sense strand starting at position 884 of SEQ ID NO: 1882209
ccauaaacauugucacagu

SEQ ID NO: 2103333 - RNA, 19 nt, Artificial Sequence
  Description of Artificial Sequence: Synthetic oligonucleotide
  Antisense strand to SEQ ID NO: 2103332
acugugacaauguuuaugg

SEQ ID NO: 2103334 - RNA, 19 nt, Artificial Sequence
  Description of Artificial Sequence: Synthetic oligonucleotide
  Sense strand starting at position 1133 of SEQ ID NO: 1882209
cuguaagcaagguauagau

SEQ ID NO: 2103335 - RNA, 19 nt, Artificial Sequence
  Description of Artificial Sequence: Synthetic oligonucleotide
  Antisense strand to SEQ ID NO: 2103334
aucuauaccuugcuuacag

SEQ ID NO: 2103336 - RNA, 19 nt, Artificial Sequence
  Description of Artificial Sequence: Synthetic oligonucleotide
  Sense strand starting at position 1135 of SEQ ID NO: 1882209
guaagcaagguauagauau

SEQ ID NO: 2103337 - RNA, 19 nt, Artificial Sequence
  Description of Artificial Sequence: Synthetic oligonucleotide
  Antisense strand to SEQ ID NO: 2103336
auaucuauaccuugcuuac

SEQ ID NO: 2103338 - RNA, 19 nt, Artificial Sequence
  Description of Artificial Sequence: Synthetic oligonucleotide
  Sense strand starting at position 1473 of SEQ ID NO: 1882209
gcccuuaaucaguaaguga

SEQ ID NO: 2103339 - RNA, 19 nt, Artificial Sequence
  Description of Artificial Sequence: Synthetic oligonucleotide
  Antisense strand to SEQ ID NO: 2103338
ucacuuacugauuaagggc

SEQ ID NO: 2103340 - RNA, 19 nt, Artificial Sequence
  Description of Artificial Sequence: Synthetic oligonucleotide
  Sense strand starting at position 1476 of SEQ ID NO: 1882209
cuuaaucaguaagugaguu

SEQ ID NO: 2103341 - RNA, 19 nt, Artificial Sequence
  Description of Artificial Sequence: Synthetic oligonucleotide
  Antisense strand to SEQ ID NO: 2103340
aacucacuuacugauuaag

SEQ ID NO: 2103342 - RNA, 19 nt, Artificial Sequence
  Description of Artificial Sequence: Synthetic oligonucleotide
  Sense strand starting at position 1530 of SEQ ID NO: 1882209
uuacaagugugaucucaac

SEQ ID NO: 2103343 - RNA, 19 nt, Artificial Sequence
  Description of Artificial Sequence: Synthetic oligonucleotide
  Antisense strand to SEQ ID NO: 2103342
guugagaucacacuuguaa

SEQ ID NO: 2103344 - RNA, 19 nt, Artificial Sequence
  Description of Artificial Sequence: Synthetic oligonucleotide
  Sense strand starting at position 1615 of SEQ ID NO: 1882209
agaaaugucagaggcuuga

SEQ ID NO: 2103345 - RNA, 19 nt, Artificial Sequence
  Description of Artificial Sequence: Synthetic oligonucleotide
  Antisense strand to SEQ ID NO: 2103344
ucaagccucugacauuucu

SEQ ID NO: 2103346 - RNA, 19 nt, Artificial Sequence
  Description of Artificial Sequence: Synthetic oligonucleotide
  Sense strand starting at position 1619 of SEQ ID NO: 1882209
augucagaggcuugaacua

SEQ ID NO: 2103347 - RNA, 19 nt, Artificial Sequence
  Description of Artificial Sequence: Synthetic oligonucleotide
  Antisense strand to SEQ ID NO: 2103346
uaguucaagccucugacau

SEQ ID NO: 2103348 - RNA, 19 nt, Artificial Sequence
  Description of Artificial Sequence: Synthetic oligonucleotide
  Sense strand starting at position 1624 of SEQ ID NO: 1882209
agaggcuugaacuaauguu

SEQ ID NO: 2103349 - RNA, 19 nt, Artificial Sequence
  Description of Artificial Sequence: Synthetic oligonucleotide
  Antisense strand to SEQ ID NO: 2103348
aacauuaguucaagccucu

SEQ ID NO: 2103350 - RNA, 19 nt, Artificial Sequence
  Description of Artificial Sequence: Synthetic oligonucleotide
  Sense strand starting at position 1640 of SEQ ID NO: 1882209
guucauuagugaccaggga

SEQ ID NO: 2103351 - RNA, 19 nt, Artificial Sequence
  Description of Artificial Sequence: Synthetic oligonucleotide
  Antisense strand to SEQ ID NO: 2103350
ucccuggucacuaaugaac

SEQ ID NO: 2103352 - RNA, 19 nt, Artificial Sequence
  Description of Artificial Sequence: Synthetic oligonucleotide
  Sense strand starting at position 1735 of SEQ ID NO: 1882209
guaguuagaugucugaaua

SEQ ID NO: 2103353 - RNA, 19 nt, Artificial Sequence
  Description of Artificial Sequence: Synthetic oligonucleotide
  Antisense strand to SEQ ID NO: 2103352
uauucagacaucuaacuac

SEQ ID NO: 2103354 - RNA, 19 nt, Artificial Sequence
  Description of Artificial Sequence: Synthetic oligonucleotide
  Sense strand starting at position 1736 of SEQ ID NO: 1882209
uaguuagaugucugaauaa

SEQ ID NO: 2103355 - RNA, 19 nt, Artificial Sequence
  Description of Artificial Sequence: Synthetic oligonucleotide
  Antisense strand to SEQ ID NO: 2103354
uuauucagacaucuaacua

SEQ ID NO: 2103356 - RNA, 19 nt, Artificial Sequence
  Description of Artificial Sequence: Synthetic oligonucleotide
  Sense strand starting at position 1758 of SEQ ID NO: 1882209
aagggauguucucuggaau

SEQ ID NO: 2103357 - RNA, 19 nt, Artificial Sequence
  Description of Artificial Sequence: Synthetic oligonucleotide
  Antisense strand to SEQ ID NO: 2103356
auuccagagaacaucccuu

SEQ ID NO: 2103358 - RNA, 19 nt, Artificial Sequence
  Description of Artificial Sequence: Synthetic oligonucleotide
  Sense strand starting at position 1759 of SEQ ID NO: 1882209
agggauguucucuggaauu

SEQ ID NO: 2103359 - RNA, 19 nt, Artificial Sequence
  Description of Artificial Sequence: Synthetic oligonucleotide
  Antisense strand to SEQ ID NO: 2103358
aauuccagagaacaucccu

SEQ ID NO: 2103360 - RNA, 19 nt, Artificial Sequence
  Description of Artificial Sequence: Synthetic oligonucleotide
  Sense strand starting at position 1770 of SEQ ID NO: 1882209
cuggaauugauacguuuaa

SEQ ID NO: 2103361 - RNA, 19 nt, Artificial Sequence
  Description of Artificial Sequence: Synthetic oligonucleotide
  Antisense strand to SEQ ID NO: 2103360
uuaaacguaucaauuccag

SEQ ID NO: 2103362 - RNA, 19 nt, Artificial Sequence
  Description of Artificial Sequence: Synthetic oligonucleotide
  Sense strand starting at position 1771 of SEQ ID NO: 1882209
uggaauugauacguuuaac

SEQ ID NO: 2103363 - RNA, 19 nt, Artificial Sequence
  Description of Artificial Sequence: Synthetic oligonucleotide
  Antisense strand to SEQ ID NO: 2103362
guuaaacguaucaauucca

SEQ ID NO: 2103364 - RNA, 19 nt, Artificial Sequence
  Description of Artificial Sequence: Synthetic oligonucleotide
  Sense strand starting at position 1774 of SEQ ID NO: 1882209
aauugauacguuuaacugu

SEQ ID NO: 2103365 - RNA, 19 nt, Artificial Sequence
  Description of Artificial Sequence: Synthetic oligonucleotide
  Antisense strand to SEQ ID NO: 2103364
acaguuaaacguaucaauu

SEQ ID NO: 2103366 - RNA, 19 nt, Artificial Sequence
  Description of Artificial Sequence: Synthetic oligonucleotide
  Sense strand starting at position 1780 of SEQ ID NO: 1882209
uacguuuaacugugagaca

SEQ ID NO: 2103367 - RNA, 19 nt, Artificial Sequence
  Description of Artificial Sequence: Synthetic oligonucleotide
  Antisense strand to SEQ ID NO: 2103366
ugucucacaguuaaacgua

SEQ ID NO: 2103368 - RNA, 19 nt, Artificial Sequence
  Description of Artificial Sequence: Synthetic oligonucleotide
  Sense strand starting at position 2021 of SEQ ID NO: 1882209
caugaaugacccuguugaa

SEQ ID NO: 2103369 - RNA, 19 nt, Artificial Sequence
  Description of Artificial Sequence: Synthetic oligonucleotide
  Antisense strand to SEQ ID NO: 2103368
uucaacagggucauucaug

SEQ ID NO: 2103370 - RNA, 19 nt, Artificial Sequence
  Description of Artificial Sequence: Synthetic oligonucleotide
  Sense strand starting at position 2354 of SEQ ID NO: 1882209
ggaaauugaugcccugaga

SEQ ID NO: 2103371 - RNA, 19 nt, Artificial Sequence
  Description of Artificial Sequence: Synthetic oligonucleotide
  Antisense strand to SEQ ID NO: 2103370
ucucagggcaucaauuucc

SEQ ID NO: 2103372 - RNA, 19 nt, Artificial Sequence
  Description of Artificial Sequence: Synthetic oligonucleotide
  Sense strand starting at position 2357 of SEQ ID NO: 1882209
aauugaugcccugagaggu

SEQ ID NO: 2103373 - RNA, 19 nt, Artificial Sequence
  Description of Artificial Sequence: Synthetic oligonucleotide
  Antisense strand to SEQ ID NO: 2103372
accucucagggcaucaauu

SEQ ID NO: 2103374 - RNA, 19 nt, Artificial Sequence
  Description of Artificial Sequence: Synthetic oligonucleotide
  Sense strand starting at position 2782 of SEQ ID NO: 1882209
ucacauuuguugccagguu

SEQ ID NO: 2103375 - RNA, 19 nt, Artificial Sequence
  Description of Artificial Sequence: Synthetic oligonucleotide
  Antisense strand to SEQ ID NO: 2103374
aaccuggcaacaaauguga

SEQ ID NO: 2103376 - RNA, 19 nt, Artificial Sequence
  Description of Artificial Sequence: Synthetic oligonucleotide
  Sense strand starting at position 2856 of SEQ ID NO: 1882209
ucuuaauaagguuagucau

SEQ ID NO: 2103377 - RNA, 19 nt, Artificial Sequence
  Description of Artificial Sequence: Synthetic oligonucleotide
  Antisense strand to SEQ ID NO: 2103376
augacuaaccuuauuaaga

SEQ ID NO: 2103378 - RNA, 19 nt, Artificial Sequence
  Description of Artificial Sequence: Synthetic oligonucleotide
  Sense strand starting at position 2858 of SEQ ID NO: 1882209
uuaauaagguuagucaucu

SEQ ID NO: 2103379 - RNA, 19 nt, Artificial Sequence
  Description of Artificial Sequence: Synthetic oligonucleotide
  Antisense strand to SEQ ID NO: 2103378
agaugacuaaccuuauuaa

SEQ ID NO: 2103380 - RNA, 19 nt, Artificial Sequence
  Description of Artificial Sequence: Synthetic oligonucleotide
  Sense strand starting at position 2866 of SEQ ID NO: 1882209
guuagucaucucuucguuu

SEQ ID NO: 2103381 - RNA, 19 nt, Artificial Sequence
  Description of Artificial Sequence: Synthetic oligonucleotide
  Antisense strand to SEQ ID NO: 2103380
aaacgaagagaugacuaac

SEQ ID NO: 2103382 - RNA, 19 nt, Artificial Sequence
  Description of Artificial Sequence: Synthetic oligonucleotide
  Sense strand starting at position 2880 of SEQ ID NO: 1882209
cguuuagucaucucuuugu

SEQ ID NO: 2103383 - RNA, 19 nt, Artificial Sequence
  Description of Artificial Sequence: Synthetic oligonucleotide
  Antisense strand to SEQ ID NO: 2103382
acaaagagaugacuaaacg

SEQ ID NO: 2103384 - RNA, 19 nt, Artificial Sequence
  Description of Artificial Sequence: Synthetic oligonucleotide
  Sense strand starting at position 2927 of SEQ ID NO: 1882209
auauaugucugguuuaagg

SEQ ID NO: 2103385 - RNA, 19 nt, Artificial Sequence
  Description of Artificial Sequence: Synthetic oligonucleotide
  Antisense strand to SEQ ID NO: 2103384
ccuuaaaccagacauauau

SEQ ID NO: 2103386 - RNA, 19 nt, Artificial Sequence
  Description of Artificial Sequence: Synthetic oligonucleotide
  Sense strand starting at position 2929 of SEQ ID NO: 1882209
auaugucugguuuaaggau

SEQ ID NO: 2103387 - RNA, 19 nt, Artificial Sequence
  Description of Artificial Sequence: Synthetic oligonucleotide
  Antisense strand to SEQ ID NO: 2103386
auccuuaaaccagacauau

SEQ ID NO: 2103388 - RNA, 19 nt, Artificial Sequence
  Description of Artificial Sequence: Synthetic oligonucleotide
  Sense strand starting at position 3239 of SEQ ID NO: 1882209
ggguuauuagguugauucu

SEQ ID NO: 2103389 - RNA, 19 nt, Artificial Sequence
  Description of Artificial Sequence: Synthetic oligonucleotide
  Antisense strand to SEQ ID NO: 2103388
agaaucaaccuaauaaccc

SEQ ID NO: 2103390 - RNA, 19 nt, Artificial Sequence
  Description of Artificial Sequence: Synthetic oligonucleotide
  Sense strand starting at position 3240 of SEQ ID NO: 1882209
gguuauuagguugauucua

SEQ ID NO: 2103391 - RNA, 19 nt, Artificial Sequence
  Description of Artificial Sequence: Synthetic oligonucleotide
  Antisense strand to SEQ ID NO: 2103390
uagaaucaaccuaauaacc

SEQ ID NO: 2103392 - RNA, 19 nt, Artificial Sequence
  Description of Artificial Sequence: Synthetic oligonucleotide
  Sense strand starting at position 3333 of SEQ ID NO: 1882209
aauaaaguauggucuuagu

SEQ ID NO: 2103393 - RNA, 19 nt, Artificial Sequence
  Description of Artificial Sequence: Synthetic oligonucleotide
  Antisense strand to SEQ ID NO: 2103392
acuaagaccauacuuuauu

SEQ ID NO: 2103394 - RNA, 19 nt, Artificial Sequence
  Description of Artificial Sequence: Synthetic oligonucleotide
  Sense strand starting at position 3341 of SEQ ID NO: 1882209
auggucuuaguuuggagaa

SEQ ID NO: 2103395 - RNA, 19 nt, Artificial Sequence
  Description of Artificial Sequence: Synthetic oligonucleotide
  Antisense strand to SEQ ID NO: 2103394
uucuccaaacuaagaccau

SEQ ID NO: 2103396 - RNA, 19 nt, Artificial Sequence
  Description of Artificial Sequence: Synthetic oligonucleotide
  Sense strand starting at position 3462 of SEQ ID NO: 1882209
cauuccugcccagagguaa

SEQ ID NO: 2103397 - RNA, 19 nt, Artificial Sequence
  Description of Artificial Sequence: Synthetic oligonucleotide
  Antisense strand to SEQ ID NO: 2103396
uuaccucugggcaggaaug

SEQ ID NO: 2103398 - RNA, 19 nt, Artificial Sequence
  Description of Artificial Sequence: Synthetic oligonucleotide
  Sense strand starting at position 3585 of SEQ ID NO: 1882209
uuccuuggccucugagaag

SEQ ID NO: 2103399 - RNA, 19 nt, Artificial Sequence
  Description of Artificial Sequence: Synthetic oligonucleotide
  Antisense strand to SEQ ID NO: 2103398
cuucucagaggccaaggaa

SEQ ID NO: 2103400 - RNA, 19 nt, Artificial Sequence
  Description of Artificial Sequence: Synthetic oligonucleotide
  Sense strand starting at position 3659 of SEQ ID NO: 1882209
aucuguuauuuccugccau

SEQ ID NO: 2103401 - RNA, 19 nt, Artificial Sequence
  Description of Artificial Sequence: Synthetic oligonucleotide
  Antisense strand to SEQ ID NO: 2103400
auggcaggaaauaacagau

SEQ ID NO: 2103402 - RNA, 19 nt, Artificial Sequence
  Description of Artificial Sequence: Synthetic oligonucleotide
  Sense strand starting at position 3718 of SEQ ID NO: 1882209
agcagagaugacugcagaa

SEQ ID NO: 2103403 - RNA, 19 nt, Artificial Sequence
  Description of Artificial Sequence: Synthetic oligonucleotide
  Antisense strand to SEQ ID NO: 2103402
uucugcagucaucucugcu

SEQ ID NO: 2103404 - RNA, 19 nt, Artificial Sequence
  Description of Artificial Sequence: Synthetic oligonucleotide
  Sense strand starting at position 3741 of SEQ ID NO: 1882209
uuaggugcucaguacauga

SEQ ID NO: 2103405 - RNA, 19 nt, Artificial Sequence
  Description of Artificial Sequence: Synthetic oligonucleotide
  Antisense strand to SEQ ID NO: 2103404
ucauguacugagcaccuaa

SEQ ID NO: 2103406 - RNA, 19 nt, Artificial Sequence
  Description of Artificial Sequence: Synthetic oligonucleotide
  Sense strand starting at position 809 of SEQ ID NO: 1882211
uggucagcuaagcaagauu

SEQ ID NO: 2103407 - RNA, 19 nt, Artificial Sequence
  Description of Artificial Sequence: Synthetic oligonucleotide
  Antisense strand to SEQ ID NO: 2103406
aaucuugcuuagcugacca

SEQ ID NO: 2103408 - RNA, 19 nt, Artificial Sequence
  Description of Artificial Sequence: Synthetic oligonucleotide
  Sense strand starting at position 820 of SEQ ID NO: 1882211
gcaagauucucucccgguc

SEQ ID NO: 2103409 - RNA, 19 nt, Artificial Sequence
  Description of Artificial Sequence: Synthetic oligonucleotide
  Antisense strand to SEQ ID NO: 2103408
gaccgggagagaaucuugc

SEQ ID NO: 2103410 - RNA, 19 nt, Artificial Sequence
  Description of Artificial Sequence: Synthetic oligonucleotide
  Sense strand starting at position 2221 of SEQ ID NO: 1882211
ccgucauucguuuaaagag

SEQ ID NO: 2103411 - RNA, 19 nt, Artificial Sequence
  Description of Artificial Sequence: Synthetic oligonucleotide
  Antisense strand to SEQ ID NO: 2103410
cucuuuaaacgaaugacgg

SEQ ID NO: 2103412 - RNA, 19 nt, Artificial Sequence
  Description of Artificial Sequence: Synthetic oligonucleotide
  Sense strand starting at position 2238 of SEQ ID NO: 1882211
agcagaaccguucgagaua

SEQ ID NO: 2103413 - RNA, 19 nt, Artificial Sequence
  Description of Artificial Sequence: Synthetic oligonucleotide
  Antisense strand to SEQ ID NO: 2103412
uaucucgaacgguucugcu

SEQ ID NO: 2103414 - RNA, 19 nt, Artificial Sequence
  Description of Artificial Sequence: Synthetic oligonucleotide
  Sense strand starting at position 2259 of SEQ ID NO: 1882211
ggcauuuacuuauccguag

SEQ ID NO: 2103415 - RNA, 19 nt, Artificial Sequence
  Description of Artificial Sequence: Synthetic oligonucleotide
  Antisense strand to SEQ ID NO: 2103414
cuacggauaaguaaaugcc

SEQ ID NO: 2103416 - RNA, 19 nt, Artificial Sequence
  Description of Artificial Sequence: Synthetic oligonucleotide
  Sense strand starting at position 2260 of SEQ ID NO: 1882211
gcauuuacuuauccguagu

SEQ ID NO: 2103417 - RNA, 19 nt, Artificial Sequence
  Description of Artificial Sequence: Synthetic oligonucleotide
  Antisense strand to SEQ ID NO: 2103416
acuacggauaaguaaaugc

SEQ ID NO: 2103418 - RNA, 19 nt, Artificial Sequence
  Description of Artificial Sequence: Synthetic oligonucleotide
  Sense strand starting at position 2273 of SEQ ID NO: 1882211
cguaguugccauuaggcaa

SEQ ID NO: 2103419 - RNA, 19 nt, Artificial Sequence
  Description of Artificial Sequence: Synthetic oligonucleotide
  Antisense strand to SEQ ID NO: 2103418
uugccuaauggcaacuacg

SEQ ID NO: 2103420 - RNA, 19 nt, Artificial Sequence
  Description of Artificial Sequence: Synthetic oligonucleotide
  Sense strand starting at position 2310 of SEQ ID NO: 1882211
agaggagauucgucaucac

SEQ ID NO: 2103421 - RNA, 19 nt, Artificial Sequence
  Description of Artificial Sequence: Synthetic oligonucleotide
  Antisense strand to SEQ ID NO: 2103420
gugaugacgaaucuccucu

SEQ ID NO: 2103422 - RNA, 19 nt, Artificial Sequence
  Description of Artificial Sequence: Synthetic oligonucleotide
  Sense strand starting at position 2313 of SEQ ID NO: 1882211
ggagauucgucaucacucu

SEQ ID NO: 2103423 - RNA, 19 nt, Artificial Sequence
  Description of Artificial Sequence: Synthetic oligonucleotide
  Antisense strand to SEQ ID NO: 2103422
agagugaugacgaaucucc

SEQ ID NO: 2103424 - RNA, 19 nt, Artificial Sequence
  Description of Artificial Sequence: Synthetic oligonucleotide
  Sense strand starting at position 2314 of SEQ ID NO: 1882211
gagauucgucaucacucuu

SEQ ID NO: 2103425 - RNA, 19 nt, Artificial Sequence
  Description of Artificial Sequence: Synthetic oligonucleotide
  Antisense strand to SEQ ID NO: 2103424
aagagugaugacgaaucuc

SEQ ID NO: 2103426 - RNA, 19 nt, Artificial Sequence
  Description of Artificial Sequence: Synthetic oligonucleotide
  Sense strand starting at position 2320 of SEQ ID NO: 1882211
cgucaucacucuuuagauu

SEQ ID NO: 2103427 - RNA, 19 nt, Artificial Sequence
  Description of Artificial Sequence: Synthetic oligonucleotide
  Antisense strand to SEQ ID NO: 2103426
aaucuaaagagugaugacg

SEQ ID NO: 2103428 - RNA, 19 nt, Artificial Sequence
  Description of Artificial Sequence: Synthetic oligonucleotide
  Sense strand starting at position 2467 of SEQ ID NO: 1882211
gaagguuuagcccaagugu

SEQ ID NO: 2103429 - RNA, 19 nt, Artificial Sequence
  Description of Artificial Sequence: Synthetic oligonucleotide
  Antisense strand to SEQ ID NO: 2103428
acacuugggcuaaaccuuc

SEQ ID NO: 2103430 - RNA, 19 nt, Artificial Sequence
  Description of Artificial Sequence: Synthetic oligonucleotide
  Sense strand starting at position 2518 of SEQ ID NO: 1882211
aaccuaguaugguuguaaa

SEQ ID NO: 2103431 - RNA, 19 nt, Artificial Sequence
  Description of Artificial Sequence: Synthetic oligonucleotide
  Antisense strand to SEQ ID NO: 2103430
uuuacaaccauacuagguu

SEQ ID NO: 2103432 - RNA, 19 nt, Artificial Sequence
  Description of Artificial Sequence: Synthetic oligonucleotide
  Sense strand starting at position 2521 of SEQ ID NO: 1882211
cuaguaugguuguaaauuu

SEQ ID NO: 2103433 - RNA, 19 nt, Artificial Sequence
  Description of Artificial Sequence: Synthetic oligonucleotide
  Antisense strand to SEQ ID NO: 2103432
aaauuuacaaccauacuag

SEQ ID NO: 2103434 - RNA, 19 nt, Artificial Sequence
  Description of Artificial Sequence: Synthetic oligonucleotide
  Sense strand starting at position 2559 of SEQ ID NO: 1882211
agaacacucucguuaguau

SEQ ID NO: 2103435 - RNA, 19 nt, Artificial Sequence
  Description of Artificial Sequence: Synthetic oligonucleotide
  Antisense strand to SEQ ID NO: 2103434
auacuaacgagaguguucu

SEQ ID NO: 2103436 - RNA, 19 nt, Artificial Sequence
  Description of Artificial Sequence: Synthetic oligonucleotide
  Sense strand starting at position 2560 of SEQ ID NO: 1882211
gaacacucucguuaguauu

SEQ ID NO: 2103437 - RNA, 19 nt, Artificial Sequence
  Description of Artificial Sequence: Synthetic oligonucleotide
  Antisense strand to SEQ ID NO: 2103436
aauacuaacgagaguguuc

SEQ ID NO: 2103438 - RNA, 19 nt, Artificial Sequence
  Description of Artificial Sequence: Synthetic oligonucleotide
  Sense strand starting at position 2619 of SEQ ID NO: 1882211
uaagguuuagcccaagcau

SEQ ID NO: 2103439 - RNA, 19 nt, Artificial Sequence
  Description of Artificial Sequence: Synthetic oligonucleotide
  Antisense strand to SEQ ID NO: 2103438
augcuugggcuaaaccuua

SEQ ID NO: 2103440 - RNA, 19 nt, Artificial Sequence
  Description of Artificial Sequence: Synthetic oligonucleotide
  Sense strand starting at position 2699 of SEQ ID NO: 1882211
uugcguggcagucucauua

SEQ ID NO: 2103441 - RNA, 19 nt, Artificial Sequence
  Description of Artificial Sequence: Synthetic oligonucleotide
  Antisense strand to SEQ ID NO: 2103440
uaaugagacugccacgcaa

SEQ ID NO: 2103442 - RNA, 19 nt, Artificial Sequence
  Description of Artificial Sequence: Synthetic oligonucleotide
  Sense strand starting at position 2737 of SEQ ID NO: 1882211
gaagcaaagugacaaugaa

SEQ ID NO: 2103443 - RNA, 19 nt, Artificial Sequence
  Description of Artificial Sequence: Synthetic oligonucleotide
  Antisense strand to SEQ ID NO: 2103442
uucauugucacuuugcuuc

SEQ ID NO: 2103444 - RNA, 19 nt, Artificial Sequence
  Description of Artificial Sequence: Synthetic oligonucleotide
  Sense strand starting at position 2752 of SEQ ID NO: 1882211
ugaaaucugcaguagguuu

SEQ ID NO: 2103445 - RNA, 19 nt, Artificial Sequence
  Description of Artificial Sequence: Synthetic oligonucleotide
  Antisense strand to SEQ ID NO: 2103444
aaaccuacugcagauuuca

SEQ ID NO: 2103446 - RNA, 19 nt, Artificial Sequence
  Description of Artificial Sequence: Synthetic oligonucleotide
  Sense strand starting at position 2765 of SEQ ID NO: 1882211
agguuuguugacugaauag

SEQ ID NO: 2103447 - RNA, 19 nt, Artificial Sequence
  Description of Artificial Sequence: Synthetic oligonucleotide
  Antisense strand to SEQ ID NO: 2103446
cuauucagucaacaaaccu

SEQ ID NO: 2103448 - RNA, 19 nt, Artificial Sequence
  Description of Artificial Sequence: Synthetic oligonucleotide
  Sense strand starting at position 2775 of SEQ ID NO: 1882211
acugaauagugacugaauu

SEQ ID NO: 2103449 - RNA, 19 nt, Artificial Sequence
  Description of Artificial Sequence: Synthetic oligonucleotide
  Antisense strand to SEQ ID NO: 2103448
aauucagucacuauucagu

SEQ ID NO: 2103450 - RNA, 19 nt, Artificial Sequence
  Description of Artificial Sequence: Synthetic oligonucleotide
  Sense strand starting at position 2776 of SEQ ID NO: 1882211
cugaauagugacugaauug

SEQ ID NO: 2103451 - RNA, 19 nt, Artificial Sequence
  Description of Artificial Sequence: Synthetic oligonucleotide
  Antisense strand to SEQ ID NO: 2103450
caauucagucacuauucag

SEQ ID NO: 2103452 - RNA, 19 nt, Artificial Sequence
  Description of Artificial Sequence: Synthetic oligonucleotide
  Sense strand starting at position 2846 of SEQ ID NO: 1882211
uuaagaugugcuugggaac

SEQ ID NO: 2103453 - RNA, 19 nt, Artificial Sequence
  Description of Artificial Sequence: Synthetic oligonucleotide
  Antisense strand to SEQ ID NO: 2103452
guucccaagcacaucuuaa

SEQ ID NO: 2103454 - RNA, 19 nt, Artificial Sequence
  Description of Artificial Sequence: Synthetic oligonucleotide
  Sense strand starting at position 2847 of SEQ ID NO: 1882211
uaagaugugcuugggaaca

SEQ ID NO: 2103455 - RNA, 19 nt, Artificial Sequence
  Description of Artificial Sequence: Synthetic oligonucleotide
  Antisense strand to SEQ ID NO: 2103454
uguucccaagcacaucuua

SEQ ID NO: 2103456 - RNA, 19 nt, Artificial Sequence
  Description of Artificial Sequence: Synthetic oligonucleotide
  Sense strand starting at position 2890 of SEQ ID NO: 1882211
ggacuuuccuguuuaacag

SEQ ID NO: 2103457 - RNA, 19 nt, Artificial Sequence
  Description of Artificial Sequence: Synthetic oligonucleotide
  Antisense strand to SEQ ID NO: 2103456
cuguuaaacaggaaagucc

SEQ ID NO: 2103458 - RNA, 19 nt, Artificial Sequence
  Description of Artificial Sequence: Synthetic oligonucleotide
  Sense strand starting at position 2897 of SEQ ID NO: 1882211
ccuguuuaacaguguacca

SEQ ID NO: 2103459 - RNA, 19 nt, Artificial Sequence
  Description of Artificial Sequence: Synthetic oligonucleotide
  Antisense strand to SEQ ID NO: 2103458
ugguacacuguuaaacagg

SEQ ID NO: 2103460 - RNA, 19 nt, Artificial Sequence
  Description of Artificial Sequence: Synthetic oligonucleotide
  Sense strand starting at position 3307 of SEQ ID NO: 1882211
gacuguuugugacucagga

SEQ ID NO: 2103461 - RNA, 19 nt, Artificial Sequence
  Description of Artificial Sequence: Synthetic oligonucleotide
  Antisense strand to SEQ ID NO: 2103460
uccugagucacaaacaguc

SEQ ID NO: 2103462 - RNA, 19 nt, Artificial Sequence
  Description of Artificial Sequence: Synthetic oligonucleotide
  Sense strand starting at position 3309 of SEQ ID NO: 1882211
cuguuugugacucaggagu

SEQ ID NO: 2103463 - RNA, 19 nt, Artificial Sequence
  Description of Artificial Sequence: Synthetic oligonucleotide
  Antisense strand to SEQ ID NO: 2103462
acuccugagucacaaacag

SEQ ID NO: 2103464 - RNA, 19 nt, Artificial Sequence
  Description of Artificial Sequence: Synthetic oligonucleotide
  Sense strand starting at position 3362 of SEQ ID NO: 1882211
ccacaagcugcuuguugaa

SEQ ID NO: 2103465 - RNA, 19 nt, Artificial Sequence
  Description of Artificial Sequence: Synthetic oligonucleotide
  Antisense strand to SEQ ID NO: 2103464
uucaacaagcagcuugugg

SEQ ID NO: 2103466 - RNA, 19 nt, Artificial Sequence
  Description of Artificial Sequence: Synthetic oligonucleotide
  Sense strand starting at position 3388 of SEQ ID NO: 1882211
gugguauuccuaggauaag

SEQ ID NO: 2103467 - RNA, 19 nt, Artificial Sequence
  Description of Artificial Sequence: Synthetic oligonucleotide
  Antisense strand to SEQ ID NO: 2103466
cuuauccuaggaauaccac

SEQ ID NO: 2103468 - RNA, 19 nt, Artificial Sequence
  Description of Artificial Sequence: Synthetic oligonucleotide
  Sense strand starting at position 3648 of SEQ ID NO: 1882211
cacugugugauacgugaaa

SEQ ID NO: 2103469 - RNA, 19 nt, Artificial Sequence
  Description of Artificial Sequence: Synthetic oligonucleotide
  Antisense strand to SEQ ID NO: 2103468
uuucacguaucacacagug

SEQ ID NO: 2103470 - RNA, 19 nt, Artificial Sequence
  Description of Artificial Sequence: Synthetic oligonucleotide
  Sense strand starting at position 3650 of SEQ ID NO: 1882211
cugugugauacgugaaaga

SEQ ID NO: 2103471 - RNA, 19 nt, Artificial Sequence
  Description of Artificial Sequence: Synthetic oligonucleotide
  Antisense strand to SEQ ID NO: 2103470
ucuuucacguaucacacag

SEQ ID NO: 2103472 - RNA, 19 nt, Artificial Sequence
  Description of Artificial Sequence: Synthetic oligonucleotide
  Sense strand starting at position 3707 of SEQ ID NO: 1882211
cucagaaucugugcuuugu

SEQ ID NO: 2103473 - RNA, 19 nt, Artificial Sequence
  Description of Artificial Sequence: Synthetic oligonucleotide
  Antisense strand to SEQ ID NO: 2103472
acaaagcacagauucugag

SEQ ID NO: 2103474 - RNA, 19 nt, Artificial Sequence
  Description of Artificial Sequence: Synthetic oligonucleotide
  Sense strand starting at position 3709 of SEQ ID NO: 1882211
cagaaucugugcuuuguga

SEQ ID NO: 2103475 - RNA, 19 nt, Artificial Sequence
  Description of Artificial Sequence: Synthetic oligonucleotide
  Antisense strand to SEQ ID NO: 2103474
ucacaaagcacagauucug

SEQ ID NO: 2103476 - RNA, 19 nt, Artificial Sequence
  Description of Artificial Sequence: Synthetic oligonucleotide
  Sense strand starting at position 3711 of SEQ ID NO: 1882211
gaaucugugcuuugugaac

SEQ ID NO: 2103477 - RNA, 19 nt, Artificial Sequence
  Description of Artificial Sequence: Synthetic oligonucleotide
  Antisense strand to SEQ ID NO: 2103476
guucacaaagcacagauuc

SEQ ID NO: 2103478 - RNA, 19 nt, Artificial Sequence
  Description of Artificial Sequence: Synthetic oligonucleotide
  Sense strand starting at position 3818 of SEQ ID NO: 1882211
ggguguugcccaggacuuu

SEQ ID NO: 2103479 - RNA, 19 nt, Artificial Sequence
  Description of Artificial Sequence: Synthetic oligonucleotide
  Antisense strand to SEQ ID NO: 2103478
aaaguccugggcaacaccc

SEQ ID NO: 2103480 - RNA, 19 nt, Artificial Sequence
  Description of Artificial Sequence: Synthetic oligonucleotide
  Sense strand starting at position 3957 of SEQ ID NO: 1882211
uugugauucuuucuuccua

SEQ ID NO: 2103481 - RNA, 19 nt, Artificial Sequence
  Description of Artificial Sequence: Synthetic oligonucleotide
  Antisense strand to SEQ ID NO: 2103480
uaggaagaaagaaucacaa

SEQ ID NO: 2103482 - RNA, 19 nt, Artificial Sequence
  Description of Artificial Sequence: Synthetic oligonucleotide
  Sense strand starting at position 3958 of SEQ ID NO: 1882211
ugugauucuuucuuccuau

SEQ ID NO: 2103483 - RNA, 19 nt, Artificial Sequence
  Description of Artificial Sequence: Synthetic oligonucleotide
  Antisense strand to SEQ ID NO: 2103482
auaggaagaaagaaucaca

SEQ ID NO: 2103484 - RNA, 19 nt, Artificial Sequence
  Description of Artificial Sequence: Synthetic oligonucleotide
  Sense strand starting at position 3959 of SEQ ID NO: 1882211
gugauucuuucuuccuauu

SEQ ID NO: 2103485 - RNA, 19 nt, Artificial Sequence
  Description of Artificial Sequence: Synthetic oligonucleotide
  Antisense strand to SEQ ID NO: 2103484
aauaggaagaaagaaucac

SEQ ID NO: 2103486 - RNA, 19 nt, Artificial Sequence
  Description of Artificial Sequence: Synthetic oligonucleotide
  Sense strand starting at position 116 of SEQ ID NO: 1882210
cagugacaguccucgauua

SEQ ID NO: 2103487 - RNA, 19 nt, Artificial Sequence
  Description of Artificial Sequence: Synthetic oligonucleotide
  Antisense strand to SEQ ID NO: 2103486
uaaucgaggacugucacug

SEQ ID NO: 2103488 - RNA, 19 nt, Artificial Sequence
  Description of Artificial Sequence: Synthetic oligonucleotide
  Sense strand starting at position 117 of SEQ ID NO: 1882210
agugacaguccucgauuaa

SEQ ID NO: 2103489 - RNA, 19 nt, Artificial Sequence
  Description of Artificial Sequence: Synthetic oligonucleotide
  Antisense strand to SEQ ID NO: 2103488
uuaaucgaggacugucacu

SEQ ID NO: 2103490 - RNA, 19 nt, Artificial Sequence
  Description of Artificial Sequence: Synthetic oligonucleotide
  Sense strand starting at position 118 of SEQ ID NO: 1882210
gugacaguccucgauuaac

SEQ ID NO: 2103491 - RNA, 19 nt, Artificial Sequence
  Description of Artificial Sequence: Synthetic oligonucleotide
  Antisense strand to SEQ ID NO: 2103490
guuaaucgaggacugucac

SEQ ID NO: 2103492 - RNA, 19 nt, Artificial Sequence
  Description of Artificial Sequence: Synthetic oligonucleotide
  Sense strand starting at position 971 of SEQ ID NO: 1882210
uggucagcuaagcaagauu

SEQ ID NO: 2103493 - RNA, 19 nt, Artificial Sequence
  Description of Artificial Sequence: Synthetic oligonucleotide
  Antisense strand to SEQ ID NO: 2103492
aaucuugcuuagcugacca

SEQ ID NO: 2103494 - RNA, 19 nt, Artificial Sequence
  Description of Artificial Sequence: Synthetic oligonucleotide
  Sense strand starting at position 982 of SEQ ID NO: 1882210
gcaagauucucucccgguc

SEQ ID NO: 2103495 - RNA, 19 nt, Artificial Sequence
  Description of Artificial Sequence: Synthetic oligonucleotide
  Antisense strand to SEQ ID NO: 2103494
gaccgggagagaaucuugc

SEQ ID NO: 2103496 - RNA, 19 nt, Artificial Sequence
  Description of Artificial Sequence: Synthetic oligonucleotide
  Sense strand starting at position 2383 of SEQ ID NO: 1882210
ccgucauucguuuaaagag

SEQ ID NO: 2103497 - RNA, 19 nt, Artificial Sequence
  Description of Artificial Sequence: Synthetic oligonucleotide
  Antisense strand to SEQ ID NO: 2103496
cucuuuaaacgaaugacgg

SEQ ID NO: 2103498 - RNA, 19 nt, Artificial Sequence
  Description of Artificial Sequence: Synthetic oligonucleotide
  Sense strand starting at position 2400 of SEQ ID NO: 1882210
agcagaaccguucgagaua

SEQ ID NO: 2103499 - RNA, 19 nt, Artificial Sequence
  Description of Artificial Sequence: Synthetic oligonucleotide
  Antisense strand to SEQ ID NO: 2103498
uaucucgaacgguucugcu

SEQ ID NO: 2103500 - RNA, 19 nt, Artificial Sequence
  Description of Artificial Sequence: Synthetic oligonucleotide
  Sense strand starting at position 2421 of SEQ ID NO: 1882210
ggcauuuacuuauccguag

SEQ ID NO: 2103501 - RNA, 19 nt, Artificial Sequence
  Description of Artificial Sequence: Synthetic oligonucleotide
  Antisense strand to SEQ ID NO: 2103500
cuacggauaaguaaaugcc

SEQ ID NO: 2103502 - RNA, 19 nt, Artificial Sequence
  Description of Artificial Sequence: Synthetic oligonucleotide
  Sense strand starting at position 2422 of SEQ ID NO: 1882210
gcauuuacuuauccguagu

SEQ ID NO: 2103503 - RNA, 19 nt, Artificial Sequence
  Description of Artificial Sequence: Synthetic oligonucleotide
  Antisense strand to SEQ ID NO: 2103502
acuacggauaaguaaaugc

SEQ ID NO: 2103504 - RNA, 19 nt, Artificial Sequence
  Description of Artificial Sequence: Synthetic oligonucleotide
  Sense strand starting at position 2435 of SEQ ID NO: 1882210
cguaguugccauuaggcaa

SEQ ID NO: 2103505 - RNA, 19 nt, Artificial Sequence
  Description of Artificial Sequence: Synthetic oligonucleotide
  Antisense strand to SEQ ID NO: 2103504
uugccuaauggcaacuacg

SEQ ID NO: 2103506 - RNA, 19 nt, Artificial Sequence
  Description of Artificial Sequence: Synthetic oligonucleotide
  Sense strand starting at position 2472 of SEQ ID NO: 1882210
agaggagauucgucaucac

SEQ ID NO: 2103507 - RNA, 19 nt, Artificial Sequence
  Description of Artificial Sequence: Synthetic oligonucleotide
  Antisense strand to SEQ ID NO: 2103506
gugaugacgaaucuccucu

SEQ ID NO: 2103508 - RNA, 19 nt, Artificial Sequence
  Description of Artificial Sequence: Synthetic oligonucleotide
  Sense strand starting at position 2475 of SEQ ID NO: 1882210
ggagauucgucaucacucu

SEQ ID NO: 2103509 - RNA, 19 nt, Artificial Sequence
  Description of Artificial Sequence: Synthetic oligonucleotide
  Antisense strand to SEQ ID NO: 2103508
agagugaugacgaaucucc

SEQ ID NO: 2103510 - RNA, 19 nt, Artificial Sequence
  Description of Artificial Sequence: Synthetic oligonucleotide
  Sense strand starting at position 2476 of SEQ ID NO: 1882210
gagauucgucaucacucuu

SEQ ID NO: 2103511 - RNA, 19 nt, Artificial Sequence
  Description of Artificial Sequence: Synthetic oligonucleotide
  Antisense strand to SEQ ID NO: 2103510
aagagugaugacgaaucuc

SEQ ID NO: 2103512 - RNA, 19 nt, Artificial Sequence
  Description of Artificial Sequence: Synthetic oligonucleotide
  Sense strand starting at position 2482 of SEQ ID NO: 1882210
cgucaucacucuuuagauu

SEQ ID NO: 2103513 - RNA, 19 nt, Artificial Sequence
  Description of Artificial Sequence: Synthetic oligonucleotide
  Antisense strand to SEQ ID NO: 2103512
aaucuaaagagugaugacg

SEQ ID NO: 2103514 - RNA, 19 nt, Artificial Sequence
  Description of Artificial Sequence: Synthetic oligonucleotide
  Sense strand starting at position 2629 of SEQ ID NO: 1882210
gaagguuuagcccaagugu

SEQ ID NO: 2103515 - RNA, 19 nt, Artificial Sequence
  Description of Artificial Sequence: Synthetic oligonucleotide
  Antisense strand to SEQ ID NO: 2103514
acacuugggcuaaaccuuc

SEQ ID NO: 2103516 - RNA, 19 nt, Artificial Sequence
  Description of Artificial Sequence: Synthetic oligonucleotide
  Sense strand starting at position 2680 of SEQ ID NO: 1882210
aaccuaguaugguuguaaa

SEQ ID NO: 2103517 - RNA, 19 nt, Artificial Sequence
  Description of Artificial Sequence: Synthetic oligonucleotide
  Antisense strand to SEQ ID NO: 2103516
uuuacaaccauacuagguu

SEQ ID NO: 2103518 - RNA, 19 nt, Artificial Sequence
  Description of Artificial Sequence: Synthetic oligonucleotide
  Sense strand starting at position 2683 of SEQ ID NO: 1882210
cuaguaugguuguaaauuu

SEQ ID NO: 2103519 - RNA, 19 nt, Artificial Sequence
  Description of Artificial Sequence: Synthetic oligonucleotide
  Antisense strand to SEQ ID NO: 2103518
aaauuuacaaccauacuag

SEQ ID NO: 2103520 - RNA, 19 nt, Artificial Sequence
  Description of Artificial Sequence: Synthetic oligonucleotide
  Sense strand starting at position 2721 of SEQ ID NO: 1882210
agaacacucucguuaguau

SEQ ID NO: 2103521 - RNA, 19 nt, Artificial Sequence
  Description of Artificial Sequence: Synthetic oligonucleotide
  Antisense strand to SEQ ID NO: 2103520
auacuaacgagaguguucu

SEQ ID NO: 2103522 - RNA, 19 nt, Artificial Sequence
  Description of Artificial Sequence: Synthetic oligonucleotide
  Sense strand starting at position 2722 of SEQ ID NO: 1882210
gaacacucucguuaguauu

SEQ ID NO: 2103523 - RNA, 19 nt, Artificial Sequence
  Description of Artificial Sequence: Synthetic oligonucleotide
  Antisense strand to SEQ ID NO: 2103522
aauacuaacgagaguguuc

SEQ ID NO: 2103524 - RNA, 19 nt, Artificial Sequence
  Description of Artificial Sequence: Synthetic oligonucleotide
  Sense strand starting at position 2781 of SEQ ID NO: 1882210
uaagguuuagcccaagcau

SEQ ID NO: 2103525 - RNA, 19 nt, Artificial Sequence
  Description of Artificial Sequence: Synthetic oligonucleotide
  Antisense strand to SEQ ID NO: 2103524
augcuugggcuaaaccuua

SEQ ID NO: 2103526 - RNA, 19 nt, Artificial Sequence
  Description of Artificial Sequence: Synthetic oligonucleotide
  Sense strand starting at position 2861 of SEQ ID NO: 1882210
uugcguggcagucucauua

SEQ ID NO: 2103527 - RNA, 19 nt, Artificial Sequence
  Description of Artificial Sequence: Synthetic oligonucleotide
  Antisense strand to SEQ ID NO: 2103526
uaaugagacugccacgcaa

SEQ ID NO: 2103528 - RNA, 19 nt, Artificial Sequence
  Description of Artificial Sequence: Synthetic oligonucleotide
  Sense strand starting at position 2899 of SEQ ID NO: 1882210
gaagcaaagugacaaugaa

SEQ ID NO: 2103529 - RNA, 19 nt, Artificial Sequence
  Description of Artificial Sequence: Synthetic oligonucleotide
  Antisense strand to SEQ ID NO: 2103528
uucauugucacuuugcuuc

SEQ ID NO: 2103530 - RNA, 19 nt, Artificial Sequence
  Description of Artificial Sequence: Synthetic oligonucleotide
  Sense strand starting at position 2914 of SEQ ID NO: 1882210
ugaaaucugcaguagguuu

SEQ ID NO: 2103531 - RNA, 19 nt, Artificial Sequence
  Description of Artificial Sequence: Synthetic oligonucleotide
  Antisense strand to SEQ ID NO: 2103530
aaaccuacugcagauuuca

SEQ ID NO: 2103532 - RNA, 19 nt, Artificial Sequence
  Description of Artificial Sequence: Synthetic oligonucleotide
  Sense strand starting at position 2927 of SEQ ID NO: 1882210
agguuuguugacugaauag

SEQ ID NO: 2103533 - RNA, 19 nt, Artificial Sequence
  Description of Artificial Sequence: Synthetic oligonucleotide
  Antisense strand to SEQ ID NO: 2103532
cuauucagucaacaaaccu

SEQ ID NO: 2103534 - RNA, 19 nt, Artificial Sequence
  Description of Artificial Sequence: Synthetic oligonucleotide
  Sense strand starting at position 2937 of SEQ ID NO: 1882210
acugaauagugacugaauu

SEQ ID NO: 2103535 - RNA, 19 nt, Artificial Sequence
  Description of Artificial Sequence: Synthetic oligonucleotide
  Antisense strand to SEQ ID NO: 2103534
aauucagucacuauucagu

SEQ ID NO: 2103536 - RNA, 19 nt, Artificial Sequence
  Description of Artificial Sequence: Synthetic oligonucleotide
  Sense strand starting at position 2938 of SEQ ID NO: 1882210
cugaauagugacugaauug

SEQ ID NO: 2103537 - RNA, 19 nt, Artificial Sequence
  Description of Artificial Sequence: Synthetic oligonucleotide
  Antisense strand to SEQ ID NO: 2103536
caauucagucacuauucag

SEQ ID NO: 2103538 - RNA, 19 nt, Artificial Sequence
  Description of Artificial Sequence: Synthetic oligonucleotide
  Sense strand starting at position 3008 of SEQ ID NO: 1882210
uuaagaugugcuugggaac

SEQ ID NO: 2103539 - RNA, 19 nt, Artificial Sequence
  Description of Artificial Sequence: Synthetic oligonucleotide
  Antisense strand to SEQ ID NO: 2103538
guucccaagcacaucuuaa

SEQ ID NO: 2103540 - RNA, 19 nt, Artificial Sequence
  Description of Artificial Sequence: Synthetic oligonucleotide
  Sense strand starting at position 3009 of SEQ ID NO: 1882210
uaagaugugcuugggaaca

SEQ ID NO: 2103541 - RNA, 19 nt, Artificial Sequence
  Description of Artificial Sequence: Synthetic oligonucleotide
  Antisense strand to SEQ ID NO: 2103540
uguucccaagcacaucuua

SEQ ID NO: 2103542 - RNA, 19 nt, Artificial Sequence
  Description of Artificial Sequence: Synthetic oligonucleotide
  Sense strand starting at position 3052 of SEQ ID NO: 1882210
ggacuuuccuguuuaacag

SEQ ID NO: 2103543 - RNA, 19 nt, Artificial Sequence
  Description of Artificial Sequence: Synthetic oligonucleotide
  Antisense strand to SEQ ID NO: 2103542
cuguuaaacaggaaagucc

SEQ ID NO: 2103544 - RNA, 19 nt, Artificial Sequence
  Description of Artificial Sequence: Synthetic oligonucleotide
  Sense strand starting at position 3059 of SEQ ID NO: 1882210
ccuguuuaacaguguacca

SEQ ID NO: 2103545 - RNA, 19 nt, Artificial Sequence
  Description of Artificial Sequence: Synthetic oligonucleotide
  Antisense strand to SEQ ID NO: 2103544
ugguacacuguuaaacagg

SEQ ID NO: 2103546 - RNA, 19 nt, Artificial Sequence
  Description of Artificial Sequence: Synthetic oligonucleotide
  Sense strand starting at position 3469 of SEQ ID NO: 1882210
gacuguuugugacucagga

SEQ ID NO: 2103547 - RNA, 19 nt, Artificial Sequence
  Description of Artificial Sequence: Synthetic oligonucleotide
  Antisense strand to SEQ ID NO: 2103546
uccugagucacaaacaguc

SEQ ID NO: 2103548 - RNA, 19 nt, Artificial Sequence
  Description of Artificial Sequence: Synthetic oligonucleotide
  Sense strand starting at position 3471 of SEQ ID NO: 1882210
cuguuugugacucaggagu

SEQ ID NO: 2103549 - RNA, 19 nt, Artificial Sequence
  Description of Artificial Sequence: Synthetic oligonucleotide
  Antisense strand to SEQ ID NO: 2103548
acuccugagucacaaacag

SEQ ID NO: 2103550 - RNA, 19 nt, Artificial Sequence
  Description of Artificial Sequence: Synthetic oligonucleotide
  Sense strand starting at position 3524 of SEQ ID NO: 1882210
ccacaagcugcuuguugaa

SEQ ID NO: 2103551 - RNA, 19 nt, Artificial Sequence
  Description of Artificial Sequence: Synthetic oligonucleotide
  Antisense strand to SEQ ID NO: 2103550
uucaacaagcagcuugugg

SEQ ID NO: 2103552 - RNA, 19 nt, Artificial Sequence
  Description of Artificial Sequence: Synthetic oligonucleotide
  Sense strand starting at position 3550 of SEQ ID NO: 1882210
gugguauuccuaggauaag

SEQ ID NO: 2103553 - RNA, 19 nt, Artificial Sequence
  Description of Artificial Sequence: Synthetic oligonucleotide
  Antisense strand to SEQ ID NO: 2103552
cuuauccuaggaauaccac

SEQ ID NO: 2103554 - RNA, 19 nt, Artificial Sequence
  Description of Artificial Sequence: Synthetic oligonucleotide
  Sense strand starting at position 3810 of SEQ ID NO: 1882210
cacugugugauacgugaaa

SEQ ID NO: 2103555 - RNA, 19 nt, Artificial Sequence
  Description of Artificial Sequence: Synthetic oligonucleotide
  Antisense strand to SEQ ID NO: 2103554
uuucacguaucacacagug

SEQ ID NO: 2103556 - RNA, 19 nt, Artificial Sequence
  Description of Artificial Sequence: Synthetic oligonucleotide
  Sense strand starting at position 3812 of SEQ ID NO: 1882210
cugugugauacgugaaaga

SEQ ID NO: 2103557 - RNA, 19 nt, Artificial Sequence
  Description of Artificial Sequence: Synthetic oligonucleotide
  Antisense strand to SEQ ID NO: 2103556
ucuuucacguaucacacag

SEQ ID NO: 2103558 - RNA, 19 nt, Artificial Sequence
  Description of Artificial Sequence: Synthetic oligonucleotide
  Sense strand starting at position 3869 of SEQ ID NO: 1882210
cucagaaucugugcuuugu

SEQ ID NO: 2103559 - RNA, 19 nt, Artificial Sequence
  Description of Artificial Sequence: Synthetic oligonucleotide
  Antisense strand to SEQ ID NO: 2103558
acaaagcacagauucugag

SEQ ID NO: 2103560 - RNA, 19 nt, Artificial Sequence
  Description of Artificial Sequence: Synthetic oligonucleotide
  Sense strand starting at position 3871 of SEQ ID NO: 1882210
cagaaucugugcuuuguga

SEQ ID NO: 2103561 - RNA, 19 nt, Artificial Sequence
  Description of Artificial Sequence: Synthetic oligonucleotide
  Antisense strand to SEQ ID NO: 2103560
ucacaaagcacagauucug

SEQ ID NO: 2103562 - RNA, 19 nt, Artificial Sequence
  Description of Artificial Sequence: Synthetic oligonucleotide
  Sense strand starting at position 3873 of SEQ ID NO: 1882210
gaaucugugcuuugugaac

SEQ ID NO: 2103563 - RNA, 19 nt, Artificial Sequence
  Description of Artificial Sequence: Synthetic oligonucleotide
  Antisense strand to SEQ ID NO: 2103562
guucacaaagcacagauuc

SEQ ID NO: 2103564 - RNA, 19 nt, Artificial Sequence
  Description of Artificial Sequence: Synthetic oligonucleotide
  Sense strand starting at position 3980 of SEQ ID NO: 1882210
ggguguugcccaggacuuu

SEQ ID NO: 2103565 - RNA, 19 nt, Artificial Sequence
  Description of Artificial Sequence: Synthetic oligonucleotide
  Antisense strand to SEQ ID NO: 2103564
aaaguccugggcaacaccc

SEQ ID NO: 2103566 - RNA, 19 nt, Artificial Sequence
  Description of Artificial Sequence: Synthetic oligonucleotide
  Sense strand starting at position 440 of SEQ ID NO: 1882212
ugaggaucagcuuaacuuu

SEQ ID NO: 2103567 - RNA, 19 nt, Artificial Sequence
  Description of Artificial Sequence: Synthetic oligonucleotide
  Antisense strand to SEQ ID NO: 2103566
aaaguuaagcugauccuca

SEQ ID NO: 2103568 - RNA, 19 nt, Artificial Sequence
  Description of Artificial Sequence: Synthetic oligonucleotide
  Sense strand starting at position 465 of SEQ ID NO: 1882212
agguacuauccgcauauga

SEQ ID NO: 2103569 - RNA, 19 nt, Artificial Sequence
  Description of Artificial Sequence: Synthetic oligonucleotide
  Antisense strand to SEQ ID NO: 2103568
ucauaugcggauaguaccu

SEQ ID NO: 2103570 - RNA, 19 nt, Artificial Sequence
  Description of Artificial Sequence: Synthetic oligonucleotide
  Sense strand starting at position 467 of SEQ ID NO: 1882212
guacuauccgcauaugaua

SEQ ID NO: 2103571 - RNA, 19 nt, Artificial Sequence
  Description of Artificial Sequence: Synthetic oligonucleotide
  Antisense strand to SEQ ID NO: 2103570
uaucauaugcggauaguac

SEQ ID NO: 2103572 - RNA, 19 nt, Artificial Sequence
  Description of Artificial Sequence: Synthetic oligonucleotide
  Sense strand starting at position 895 of SEQ ID NO: 1882212
ugaauuacaguuuagucau

SEQ ID NO: 2103573 - RNA, 19 nt, Artificial Sequence
  Description of Artificial Sequence: Synthetic oligonucleotide
  Antisense strand to SEQ ID NO: 2103572
augacuaaacuguaauuca

SEQ ID NO: 2103574 - RNA, 19 nt, Artificial Sequence
  Description of Artificial Sequence: Synthetic oligonucleotide
  Sense strand starting at position 905 of SEQ ID NO: 1882212
uuuagucauuugcucacua

SEQ ID NO: 2103575 - RNA, 19 nt, Artificial Sequence
  Description of Artificial Sequence: Synthetic oligonucleotide
  Antisense strand to SEQ ID NO: 2103574
uagugagcaaaugacuaaa

SEQ ID NO: 2103576 - RNA, 19 nt, Artificial Sequence
  Description of Artificial Sequence: Synthetic oligonucleotide
  Sense strand starting at position 906 of SEQ ID NO: 1882212
uuagucauuugcucacuau

SEQ ID NO: 2103577 - RNA, 19 nt, Artificial Sequence
  Description of Artificial Sequence: Synthetic oligonucleotide
  Antisense strand to SEQ ID NO: 2103576
auagugagcaaaugacuaa

SEQ ID NO: 2103578 - RNA, 19 nt, Artificial Sequence
  Description of Artificial Sequence: Synthetic oligonucleotide
  Sense strand starting at position 909 of SEQ ID NO: 1882212
gucauuugcucacuaugua

SEQ ID NO: 2103579 - RNA, 19 nt, Artificial Sequence
  Description of Artificial Sequence: Synthetic oligonucleotide
  Antisense strand to SEQ ID NO: 2103578
uacauagugagcaaaugac

SEQ ID NO: 2103580 - RNA, 19 nt, Artificial Sequence
  Description of Artificial Sequence: Synthetic oligonucleotide
  Sense strand starting at position 917 of SEQ ID NO: 1882212
cucacuauguaaucuugga

SEQ ID NO: 2103581 - RNA, 19 nt, Artificial Sequence
  Description of Artificial Sequence: Synthetic oligonucleotide
  Antisense strand to SEQ ID NO: 2103580
uccaagauuacauagugag

SEQ ID NO: 2103582 - RNA, 19 nt, Artificial Sequence
  Description of Artificial Sequence: Synthetic oligonucleotide
  Sense strand starting at position 933 of SEQ ID NO: 1882212
ggacaaaugacuugagccu

SEQ ID NO: 2103583 - RNA, 19 nt, Artificial Sequence
  Description of Artificial Sequence: Synthetic oligonucleotide
  Antisense strand to SEQ ID NO: 2103582
aggcucaagucauuugucc

SEQ ID NO: 2103584 - RNA, 19 nt, Artificial Sequence
  Description of Artificial Sequence: Synthetic oligonucleotide
  Sense strand starting at position 1037 of SEQ ID NO: 1882212
auguauaccucuucuugga

SEQ ID NO: 2103585 - RNA, 19 nt, Artificial Sequence
  Description of Artificial Sequence: Synthetic oligonucleotide
  Antisense strand to SEQ ID NO: 2103584
uccaagaagagguauacau

SEQ ID NO: 2103586 - RNA, 19 nt, Artificial Sequence
  Description of Artificial Sequence: Synthetic oligonucleotide
  Sense strand starting at position 1039 of SEQ ID NO: 1882212
guauaccucuucuuggaua

SEQ ID NO: 2103587 - RNA, 19 nt, Artificial Sequence
  Description of Artificial Sequence: Synthetic oligonucleotide
  Antisense strand to SEQ ID NO: 2103586
uauccaagaagagguauac

SEQ ID NO: 2103588 - RNA, 19 nt, Artificial Sequence
  Description of Artificial Sequence: Synthetic oligonucleotide
  Sense strand starting at position 1097 of SEQ ID NO: 1882212
gauugaggcccuuauugua

SEQ ID NO: 2103589 - RNA, 19 nt, Artificial Sequence
  Description of Artificial Sequence: Synthetic oligonucleotide
  Antisense strand to SEQ ID NO: 2103588
uacaauaagggccucaauc

SEQ ID NO: 2103590 - RNA, 19 nt, Artificial Sequence
  Description of Artificial Sequence: Synthetic oligonucleotide
  Sense strand starting at position 1302 of SEQ ID NO: 1882212
ucugaagucuguccucaau

SEQ ID NO: 2103591 - RNA, 19 nt, Artificial Sequence
  Description of Artificial Sequence: Synthetic oligonucleotide
  Antisense strand to SEQ ID NO: 2103590
auugaggacagacuucaga

SEQ ID NO: 2103592 - RNA, 19 nt, Artificial Sequence
  Description of Artificial Sequence: Synthetic oligonucleotide
  Sense strand starting at position 1304 of SEQ ID NO: 1882212
ugaagucuguccucaaucu

SEQ ID NO: 2103593 - RNA, 19 nt, Artificial Sequence
  Description of Artificial Sequence: Synthetic oligonucleotide
  Antisense strand to SEQ ID NO: 2103592
agauugaggacagacuuca

SEQ ID NO: 2103594 - RNA, 19 nt, Artificial Sequence
  Description of Artificial Sequence: Synthetic oligonucleotide
  Sense strand starting at position 1433 of SEQ ID NO: 1882212
aggcucugccuccaggauu

SEQ ID NO: 2103595 - RNA, 19 nt, Artificial Sequence
  Description of Artificial Sequence: Synthetic oligonucleotide
  Antisense strand to SEQ ID NO: 2103594
aauccuggaggcagagccu

SEQ ID NO: 2103596 - RNA, 19 nt, Artificial Sequence
  Description of Artificial Sequence: Synthetic oligonucleotide
  Sense strand starting at position 1819 of SEQ ID NO: 1882212
gcagaugagagugaagcuu

SEQ ID NO: 2103597 - RNA, 19 nt, Artificial Sequence
  Description of Artificial Sequence: Synthetic oligonucleotide
  Antisense strand to SEQ ID NO: 2103596
aagcuucacucucaucugc

SEQ ID NO: 2103598 - RNA, 19 nt, Artificial Sequence
  Description of Artificial Sequence: Synthetic oligonucleotide
  Sense strand starting at position 1990 of SEQ ID NO: 1882212
gguccucucuccucaagga

SEQ ID NO: 2103599 - RNA, 19 nt, Artificial Sequence
  Description of Artificial Sequence: Synthetic oligonucleotide
  Antisense strand to SEQ ID NO: 2103598
uccuugaggagagaggacc

SEQ ID NO: 2103600 - RNA, 19 nt, Artificial Sequence
  Description of Artificial Sequence: Synthetic oligonucleotide
  Sense strand starting at position 1991 of SEQ ID NO: 1882212
guccucucuccucaaggaa

SEQ ID NO: 2103601 - RNA, 19 nt, Artificial Sequence
  Description of Artificial Sequence: Synthetic oligonucleotide
  Antisense strand to SEQ ID NO: 2103600
uuccuugaggagagaggac

SEQ ID NO: 2103602 - RNA, 19 nt, Artificial Sequence
  Description of Artificial Sequence: Synthetic oligonucleotide
  Sense strand starting at position 2116 of SEQ ID NO: 1882212
cccucugugauguaauguu

SEQ ID NO: 2103603 - RNA, 19 nt, Artificial Sequence
  Description of Artificial Sequence: Synthetic oligonucleotide
  Antisense strand to SEQ ID NO: 2103602
aacauuacaucacagaggg

SEQ ID NO: 2103604 - RNA, 19 nt, Artificial Sequence
  Description of Artificial Sequence: Synthetic oligonucleotide
  Sense strand starting at position 2157 of SEQ ID NO: 1882212
gcaugaguacaacagcaau

SEQ ID NO: 2103605 - RNA, 19 nt, Artificial Sequence
  Description of Artificial Sequence: Synthetic oligonucleotide
  Antisense strand to SEQ ID NO: 2103604
auugcuguuguacucaugc

SEQ ID NO: 2103606 - RNA, 19 nt, Artificial Sequence
  Description of Artificial Sequence: Synthetic oligonucleotide
  Sense strand starting at position 2216 of SEQ ID NO: 1882212
aggguaucgcaacaaauca

SEQ ID NO: 2103607 - RNA, 19 nt, Artificial Sequence
  Description of Artificial Sequence: Synthetic oligonucleotide
  Antisense strand to SEQ ID NO: 2103606
ugauuuguugcgauacccu

SEQ ID NO: 2103608 - RNA, 19 nt, Artificial Sequence
  Description of Artificial Sequence: Synthetic oligonucleotide
  Sense strand starting at position 2263 of SEQ ID NO: 1882212
gacugucugaugugguaca

SEQ ID NO: 2103609 - RNA, 19 nt, Artificial Sequence
  Description of Artificial Sequence: Synthetic oligonucleotide
  Antisense strand to SEQ ID NO: 2103608
uguaccacaucagacaguc

SEQ ID NO: 2103610 - RNA, 19 nt, Artificial Sequence
  Description of Artificial Sequence: Synthetic oligonucleotide
  Sense strand starting at position 2281 of SEQ ID NO: 1882212
aagcauucccuuggucuga

SEQ ID NO: 2103611 - RNA, 19 nt, Artificial Sequence
  Description of Artificial Sequence: Synthetic oligonucleotide
  Antisense strand to SEQ ID NO: 2103610
ucagaccaagggaaugcuu

SEQ ID NO: 2103612 - RNA, 19 nt, Artificial Sequence
  Description of Artificial Sequence: Synthetic oligonucleotide
  Sense strand starting at position 2360 of SEQ ID NO: 1882212
gaacuuguguuugcagaua

SEQ ID NO: 2103613 - RNA, 19 nt, Artificial Sequence
  Description of Artificial Sequence: Synthetic oligonucleotide
  Antisense strand to SEQ ID NO: 2103612
uaucugcaaacacaaguuc

SEQ ID NO: 2103614 - RNA, 19 nt, Artificial Sequence
  Description of Artificial Sequence: Synthetic oligonucleotide
  Sense strand starting at position 2430 of SEQ ID NO: 1882212
aauggaaauuucuaguuga

SEQ ID NO: 2103615 - RNA, 19 nt, Artificial Sequence
  Description of Artificial Sequence: Synthetic oligonucleotide
  Antisense strand to SEQ ID NO: 2103614
ucaacuagaaauuuccauu

SEQ ID NO: 2103616 - RNA, 19 nt, Artificial Sequence
  Description of Artificial Sequence: Synthetic oligonucleotide
  Sense strand starting at position 2498 of SEQ ID NO: 1882212
guacuucguguggauauuu

SEQ ID NO: 2103617 - RNA, 19 nt, Artificial Sequence
  Description of Artificial Sequence: Synthetic oligonucleotide
  Antisense strand to SEQ ID NO: 2103616
aaauauccacacgaaguac

SEQ ID NO: 2103618 - RNA, 19 nt, Artificial Sequence
  Description of Artificial Sequence: Synthetic oligonucleotide
  Sense strand starting at position 2639 of SEQ ID NO: 1882212
ccagcagguaguuggaaau

SEQ ID NO: 2103619 - RNA, 19 nt, Artificial Sequence
  Description of Artificial Sequence: Synthetic oligonucleotide
  Antisense strand to SEQ ID NO: 2103618
auuuccaacuaccugcugg

SEQ ID NO: 2103620 - RNA, 19 nt, Artificial Sequence
  Description of Artificial Sequence: Synthetic oligonucleotide
  Sense strand starting at position 2656 of SEQ ID NO: 1882212
auuugagucugggacucaa

SEQ ID NO: 2103621 - RNA, 19 nt, Artificial Sequence
  Description of Artificial Sequence: Synthetic oligonucleotide
  Antisense strand to SEQ ID NO: 2103620
uugagucccagacucaaau

SEQ ID NO: 2103622 - RNA, 19 nt, Artificial Sequence
  Description of Artificial Sequence: Synthetic oligonucleotide
  Sense strand starting at position 2722 of SEQ ID NO: 1882212
gagagaguugaagguguaa

SEQ ID NO: 2103623 - RNA, 19 nt, Artificial Sequence
  Description of Artificial Sequence: Synthetic oligonucleotide
  Antisense strand to SEQ ID NO: 2103622
uuacaccuucaacucucuc

SEQ ID NO: 2103624 - RNA, 19 nt, Artificial Sequence
  Description of Artificial Sequence: Synthetic oligonucleotide
  Sense strand starting at position 2764 of SEQ ID NO: 1882212
agaggagagccuugugaaa

SEQ ID NO: 2103625 - RNA, 19 nt, Artificial Sequence
  Description of Artificial Sequence: Synthetic oligonucleotide
  Antisense strand to SEQ ID NO: 2103624
uuucacaaggcucuccucu

SEQ ID NO: 2103626 - RNA, 19 nt, Artificial Sequence
  Description of Artificial Sequence: Synthetic oligonucleotide
  Sense strand starting at position 2775 of SEQ ID NO: 1882212
uugugaaaugccuauguuu

SEQ ID NO: 2103627 - RNA, 19 nt, Artificial Sequence
  Description of Artificial Sequence: Synthetic oligonucleotide
  Antisense strand to SEQ ID NO: 2103626
aaacauaggcauuucacaa

SEQ ID NO: 2103628 - RNA, 19 nt, Artificial Sequence
  Description of Artificial Sequence: Synthetic oligonucleotide
  Sense strand starting at position 2777 of SEQ ID NO: 1882212
gugaaaugccuauguuuag

SEQ ID NO: 2103629 - RNA, 19 nt, Artificial Sequence
  Description of Artificial Sequence: Synthetic oligonucleotide
  Antisense strand to SEQ ID NO: 2103628
cuaaacauaggcauuucac

SEQ ID NO: 2103630 - RNA, 19 nt, Artificial Sequence
  Description of Artificial Sequence: Synthetic oligonucleotide
  Sense strand starting at position 2806 of SEQ ID NO: 1882212
aagagaguagagugaguaa

SEQ ID NO: 2103631 - RNA, 19 nt, Artificial Sequence
  Description of Artificial Sequence: Synthetic oligonucleotide
  Antisense strand to SEQ ID NO: 2103630
uuacucacucuacucucuu

SEQ ID NO: 2103632 - RNA, 19 nt, Artificial Sequence
  Description of Artificial Sequence: Synthetic oligonucleotide
  Sense strand starting at position 3353 of SEQ ID NO: 1882212
ucacgugauaaugagugaa

SEQ ID NO: 2103633 - RNA, 19 nt, Artificial Sequence
  Description of Artificial Sequence: Synthetic oligonucleotide
  Antisense strand to SEQ ID NO: 2103632
uucacucauuaucacguga

SEQ ID NO: 2103634 - RNA, 19 nt, Artificial Sequence
  Description of Artificial Sequence: Synthetic oligonucleotide
  Sense strand starting at position 3355 of SEQ ID NO: 1882212
acgugauaaugagugaauu

SEQ ID NO: 2103635 - RNA, 19 nt, Artificial Sequence
  Description of Artificial Sequence: Synthetic oligonucleotide
  Antisense strand to SEQ ID NO: 2103634
aauucacucauuaucacgu

SEQ ID NO: 2103636 - RNA, 19 nt, Artificial Sequence
  Description of Artificial Sequence: Synthetic oligonucleotide
  Sense strand starting at position 3503 of SEQ ID NO: 1882212
uuggcuucccaagacaugu

SEQ ID NO: 2103637 - RNA, 19 nt, Artificial Sequence
  Description of Artificial Sequence: Synthetic oligonucleotide
  Antisense strand to SEQ ID NO: 2103636
acaugucuugggaagccaa

SEQ ID NO: 2103638 - RNA, 19 nt, Artificial Sequence
  Description of Artificial Sequence: Synthetic oligonucleotide
  Sense strand starting at position 3588 of SEQ ID NO: 1882212
cggacuaauacagggugaa

SEQ ID NO: 2103639 - RNA, 19 nt, Artificial Sequence
  Description of Artificial Sequence: Synthetic oligonucleotide
  Antisense strand to SEQ ID NO: 2103638
uucacccuguauuaguccg

SEQ ID NO: 2103640 - RNA, 19 nt, Artificial Sequence
  Description of Artificial Sequence: Synthetic oligonucleotide
  Sense strand starting at position 3600 of SEQ ID NO: 1882212
gggugaauguuauuaacua

SEQ ID NO: 2103641 - RNA, 19 nt, Artificial Sequence
  Description of Artificial Sequence: Synthetic oligonucleotide
  Antisense strand to SEQ ID NO: 2103640
uaguuaauaacauucaccc

SEQ ID NO: 2103642 - RNA, 19 nt, Artificial Sequence
  Description of Artificial Sequence: Synthetic oligonucleotide
  Sense strand starting at position 3649 of SEQ ID NO: 1882212
cagucaggacuuuggaauu

SEQ ID NO: 2103643 - RNA, 19 nt, Artificial Sequence
  Description of Artificial Sequence: Synthetic oligonucleotide
  Antisense strand to SEQ ID NO: 2103642
aauuccaaaguccugacug

SEQ ID NO: 2103644 - RNA, 19 nt, Artificial Sequence
  Description of Artificial Sequence: Synthetic oligonucleotide
  Sense strand starting at position 3735 of SEQ ID NO: 1882212
ugagaagucuccuuuaccu

SEQ ID NO: 2103645 - RNA, 19 nt, Artificial Sequence
  Description of Artificial Sequence: Synthetic oligonucleotide
  Antisense strand to SEQ ID NO: 2103644
agguaaaggagacuucuca

SEQ ID NO: 2103646 - RNA, 19 nt, Artificial Sequence
  Description of Artificial Sequence: Synthetic oligonucleotide
  Sense strand starting at position 2 of SEQ ID NO: 1882213
cuuggauaucuuugaucag

SEQ ID NO: 2103647 - RNA, 19 nt, Artificial Sequence
  Description of Artificial Sequence: Synthetic oligonucleotide
  Antisense strand to SEQ ID NO: 2103646
cugaucaaagauauccaag

SEQ ID NO: 2103648 - RNA, 19 nt, Artificial Sequence
  Description of Artificial Sequence: Synthetic oligonucleotide
  Sense strand starting at position 5 of SEQ ID NO: 1882213
ggauaucuuugaucaggua

SEQ ID NO: 2103649 - RNA, 19 nt, Artificial Sequence
  Description of Artificial Sequence: Synthetic oligonucleotide
  Antisense strand to SEQ ID NO: 2103648
uaccugaucaaagauaucc

SEQ ID NO: 2103650 - RNA, 19 nt, Artificial Sequence
  Description of Artificial Sequence: Synthetic oligonucleotide
  Sense strand starting at position 54 of SEQ ID NO: 1882213
gugaaagcuccauaauaua

SEQ ID NO: 2103651 - RNA, 19 nt, Artificial Sequence
  Description of Artificial Sequence: Synthetic oligonucleotide
  Antisense strand to SEQ ID NO: 2103650
uauauuauggagcuuucac

SEQ ID NO: 2103652 - RNA, 19 nt, Artificial Sequence
  Description of Artificial Sequence: Synthetic oligonucleotide
  Sense strand starting at position 176 of SEQ ID NO: 1882213
gccuguauugccucuucuu

SEQ ID NO: 2103653 - RNA, 19 nt, Artificial Sequence
  Description of Artificial Sequence: Synthetic oligonucleotide
  Antisense strand to SEQ ID NO: 2103652
aagaagaggcaauacaggc

SEQ ID NO: 2103654 - RNA, 19 nt, Artificial Sequence
  Description of Artificial Sequence: Synthetic oligonucleotide
  Sense strand starting at position 358 of SEQ ID NO: 1882213
uggagaaguccaggaagca

SEQ ID NO: 2103655 - RNA, 19 nt, Artificial Sequence
  Description of Artificial Sequence: Synthetic oligonucleotide
  Antisense strand to SEQ ID NO: 2103654
ugcuuccuggacuucucca

SEQ ID NO: 2103656 - RNA, 19 nt, Artificial Sequence
  Description of Artificial Sequence: Synthetic oligonucleotide
  Sense strand starting at position 399 of SEQ ID NO: 1882213
aaaccaaugucguuuaaga

SEQ ID NO: 2103657 - RNA, 19 nt, Artificial Sequence
  Description of Artificial Sequence: Synthetic oligonucleotide
  Antisense strand to SEQ ID NO: 2103656
ucuuaaacgacauugguuu

SEQ ID NO: 2103658 - RNA, 19 nt, Artificial Sequence
  Description of Artificial Sequence: Synthetic oligonucleotide
  Sense strand starting at position 401 of SEQ ID NO: 1882213
accaaugucguuuaagaac

SEQ ID NO: 2103659 - RNA, 19 nt, Artificial Sequence
  Description of Artificial Sequence: Synthetic oligonucleotide
  Antisense strand to SEQ ID NO: 2103658
guucuuaaacgacauuggu

SEQ ID NO: 2103660 - RNA, 19 nt, Artificial Sequence
  Description of Artificial Sequence: Synthetic oligonucleotide
  Sense strand starting at position 464 of SEQ ID NO: 1882213
guaccuugaucuccuggaa

SEQ ID NO: 2103661 - RNA, 19 nt, Artificial Sequence
  Description of Artificial Sequence: Synthetic oligonucleotide
  Antisense strand to SEQ ID NO: 2103660
uuccaggagaucaagguac

SEQ ID NO: 2103662 - RNA, 19 nt, Artificial Sequence
  Description of Artificial Sequence: Synthetic oligonucleotide
  Sense strand starting at position 478 of SEQ ID NO: 1882213
uggaaauuauguguccauu

SEQ ID NO: 2103663 - RNA, 19 nt, Artificial Sequence
  Description of Artificial Sequence: Synthetic oligonucleotide
  Antisense strand to SEQ ID NO: 2103662
aauggacacauaauuucca

SEQ ID NO: 2103664 - RNA, 19 nt, Artificial Sequence
  Description of Artificial Sequence: Synthetic oligonucleotide
  Sense strand starting at position 502 of SEQ ID NO: 1882213
uggcuccuuuacucaaaga

SEQ ID NO: 2103665 - RNA, 19 nt, Artificial Sequence
  Description of Artificial Sequence: Synthetic oligonucleotide
  Antisense strand to SEQ ID NO: 2103664
ucuuugaguaaaggagcca

SEQ ID NO: 2103666 - RNA, 19 nt, Artificial Sequence
  Description of Artificial Sequence: Synthetic oligonucleotide
  Sense strand starting at position 587 of SEQ ID NO: 1882213
agaggaauauguguuccag

SEQ ID NO: 2103667 - RNA, 19 nt, Artificial Sequence
  Description of Artificial Sequence: Synthetic oligonucleotide
  Antisense strand to SEQ ID NO: 2103666
cuggaacacauauuccucu

SEQ ID NO: 2103668 - RNA, 19 nt, Artificial Sequence
  Description of Artificial Sequence: Synthetic oligonucleotide
  Sense strand starting at position 589 of SEQ ID NO: 1882213
aggaauauguguuccaggu

SEQ ID NO: 2103669 - RNA, 19 nt, Artificial Sequence
  Description of Artificial Sequence: Synthetic oligonucleotide
  Antisense strand to SEQ ID NO: 2103668
accuggaacacauauuccu

SEQ ID NO: 2103670 - RNA, 19 nt, Artificial Sequence
  Description of Artificial Sequence: Synthetic oligonucleotide
  Sense strand starting at position 649 of SEQ ID NO: 1882213
auuauacagugguuugauu

SEQ ID NO: 2103671 - RNA, 19 nt, Artificial Sequence
  Description of Artificial Sequence: Synthetic oligonucleotide
  Antisense strand to SEQ ID NO: 2103670
aaucaaaccacuguauaau

SEQ ID NO: 2103672 - RNA, 19 nt, Artificial Sequence
  Description of Artificial Sequence: Synthetic oligonucleotide
  Sense strand starting at position 697 of SEQ ID NO: 1882213
ucagguauuaugggucaga

SEQ ID NO: 2103673 - RNA, 19 nt, Artificial Sequence
  Description of Artificial Sequence: Synthetic oligonucleotide
  Antisense strand to SEQ ID NO: 2103672
ucugacccauaauaccuga

SEQ ID NO: 2103674 - RNA, 19 nt, Artificial Sequence
  Description of Artificial Sequence: Synthetic oligonucleotide
  Sense strand starting at position 698 of SEQ ID NO: 1882213
cagguauuaugggucagau

SEQ ID NO: 2103675 - RNA, 19 nt, Artificial Sequence
  Description of Artificial Sequence: Synthetic oligonucleotide
  Antisense strand to SEQ ID NO: 2103674
aucugacccauaauaccug

SEQ ID NO: 2103676 - RNA, 19 nt, Artificial Sequence
  Description of Artificial Sequence: Synthetic oligonucleotide
  Sense strand starting at position 746 of SEQ ID NO: 1882213
cugacuagguguucuauua

SEQ ID NO: 2103677 - RNA, 19 nt, Artificial Sequence
  Description of Artificial Sequence: Synthetic oligonucleotide
  Antisense strand to SEQ ID NO: 2103676
uaauagaacaccuagucag

SEQ ID NO: 2103678 - RNA, 19 nt, Artificial Sequence
  Description of Artificial Sequence: Synthetic oligonucleotide
  Sense strand starting at position 759 of SEQ ID NO: 1882213
cuauuacuugucuagcgaa

SEQ ID NO: 2103679 - RNA, 19 nt, Artificial Sequence
  Description of Artificial Sequence: Synthetic oligonucleotide
  Antisense strand to SEQ ID NO: 2103678
uucgcuagacaaguaauag

SEQ ID NO: 2103680 - RNA, 19 nt, Artificial Sequence
  Description of Artificial Sequence: Synthetic oligonucleotide
  Sense strand starting at position 772 of SEQ ID NO: 1882213
agcgaaaugaauuaacagu

SEQ ID NO: 2103681 - RNA, 19 nt, Artificial Sequence
  Description of Artificial Sequence: Synthetic oligonucleotide
  Antisense strand to SEQ ID NO: 2103680
acuguuaauucauuucgcu

SEQ ID NO: 2103682 - RNA, 19 nt, Artificial Sequence
  Description of Artificial Sequence: Synthetic oligonucleotide
  Sense strand starting at position 873 of SEQ ID NO: 1882213
ugguuaaaugcguaaauag

SEQ ID NO: 2103683 - RNA, 19 nt, Artificial Sequence
  Description of Artificial Sequence: Synthetic oligonucleotide
  Antisense strand to SEQ ID NO: 2103682
cuauuuacgcauuuaacca

SEQ ID NO: 2103684 - RNA, 19 nt, Artificial Sequence
  Description of Artificial Sequence: Synthetic oligonucleotide
  Sense strand starting at position 1200 of SEQ ID NO: 1882213
acaacugagcgccaggaau

SEQ ID NO: 2103685 - RNA, 19 nt, Artificial Sequence
  Description of Artificial Sequence: Synthetic oligonucleotide
  Antisense strand to SEQ ID NO: 2103684
auuccuggcgcucaguugu

SEQ ID NO: 2103686 - RNA, 19 nt, Artificial Sequence
  Description of Artificial Sequence: Synthetic oligonucleotide
  Sense strand starting at position 2384 of SEQ ID NO: 1882213
cuaacaagucagggacauu

SEQ ID NO: 2103687 - RNA, 19 nt, Artificial Sequence
  Description of Artificial Sequence: Synthetic oligonucleotide
  Antisense strand to SEQ ID NO: 2103686
aaugucccugacuuguuag

SEQ ID NO: 2103688 - RNA, 19 nt, Artificial Sequence
  Description of Artificial Sequence: Synthetic oligonucleotide
  Sense strand starting at position 2418 of SEQ ID NO: 1882213
gcagaccaaucuuugagau

SEQ ID NO: 2103689 - RNA, 19 nt, Artificial Sequence
  Description of Artificial Sequence: Synthetic oligonucleotide
  Antisense strand to SEQ ID NO: 2103688
aucucaaagauuggucugc

SEQ ID NO: 2103690 - RNA, 19 nt, Artificial Sequence
  Description of Artificial Sequence: Synthetic oligonucleotide
  Sense strand starting at position 2576 of SEQ ID NO: 1882213
cuucuacacccuugaguua

SEQ ID NO: 2103691 - RNA, 19 nt, Artificial Sequence
  Description of Artificial Sequence: Synthetic oligonucleotide
  Antisense strand to SEQ ID NO: 2103690
uaacucaaggguguagaag

SEQ ID NO: 2103692 - RNA, 19 nt, Artificial Sequence
  Description of Artificial Sequence: Synthetic oligonucleotide
  Sense strand starting at position 2577 of SEQ ID NO: 1882213
uucuacacccuugaguuau

SEQ ID NO: 2103693 - RNA, 19 nt, Artificial Sequence
  Description of Artificial Sequence: Synthetic oligonucleotide
  Antisense strand to SEQ ID NO: 2103692
auaacucaaggguguagaa

SEQ ID NO: 2103694 - RNA, 19 nt, Artificial Sequence
  Description of Artificial Sequence: Synthetic oligonucleotide
  Sense strand starting at position 2833 of SEQ ID NO: 1882213
uuaugcaucgaucaucaua

SEQ ID NO: 2103695 - RNA, 19 nt, Artificial Sequence
  Description of Artificial Sequence: Synthetic oligonucleotide
  Antisense strand to SEQ ID NO: 2103694
uaugaugaucgaugcauaa

SEQ ID NO: 2103696 - RNA, 19 nt, Artificial Sequence
  Description of Artificial Sequence: Synthetic oligonucleotide
  Sense strand starting at position 2835 of SEQ ID NO: 1882213
augcaucgaucaucauaau

SEQ ID NO: 2103697 - RNA, 19 nt, Artificial Sequence
  Description of Artificial Sequence: Synthetic oligonucleotide
  Antisense strand to SEQ ID NO: 2103696
auuaugaugaucgaugcau

SEQ ID NO: 2103698 - RNA, 19 nt, Artificial Sequence
  Description of Artificial Sequence: Synthetic oligonucleotide
  Sense strand starting at position 2836 of SEQ ID NO: 1882213
ugcaucgaucaucauaaua

SEQ ID NO: 2103699 - RNA, 19 nt, Artificial Sequence
  Description of Artificial Sequence: Synthetic oligonucleotide
  Antisense strand to SEQ ID NO: 2103698
uauuaugaugaucgaugca

SEQ ID NO: 2103700 - RNA, 19 nt, Artificial Sequence
  Description of Artificial Sequence: Synthetic oligonucleotide
  Sense strand starting at position 2970 of SEQ ID NO: 1882213
guauuaauauuggcauaag

SEQ ID NO: 2103701 - RNA, 19 nt, Artificial Sequence
  Description of Artificial Sequence: Synthetic oligonucleotide
  Antisense strand to SEQ ID NO: 2103700
cuuaugccaauauuaauac

SEQ ID NO: 2103702 - RNA, 19 nt, Artificial Sequence
  Description of Artificial Sequence: Synthetic oligonucleotide
  Sense strand starting at position 3001 of SEQ ID NO: 1882213
acagguauaugucugaucu

SEQ ID NO: 2103703 - RNA, 19 nt, Artificial Sequence
  Description of Artificial Sequence: Synthetic oligonucleotide
  Antisense strand to SEQ ID NO: 2103702
agaucagacauauaccugu

SEQ ID NO: 2103704 - RNA, 19 nt, Artificial Sequence
  Description of Artificial Sequence: Synthetic oligonucleotide
  Sense strand starting at position 3154 of SEQ ID NO: 1882213
cucaaucuccagugaugac

SEQ ID NO: 2103705 - RNA, 19 nt, Artificial Sequence
  Description of Artificial Sequence: Synthetic oligonucleotide
  Antisense strand to SEQ ID NO: 2103704
gucaucacuggagauugag

SEQ ID NO: 2103706 - RNA, 19 nt, Artificial Sequence
  Description of Artificial Sequence: Synthetic oligonucleotide
  Sense strand starting at position 3208 of SEQ ID NO: 1882213
cauggagacuuucuguaug

SEQ ID NO: 2103707 - RNA, 19 nt, Artificial Sequence
  Description of Artificial Sequence: Synthetic oligonucleotide
  Antisense strand to SEQ ID NO: 2103706
cauacagaaagucuccaug

SEQ ID NO: 2103708 - RNA, 19 nt, Artificial Sequence
  Description of Artificial Sequence: Synthetic oligonucleotide
  Sense strand starting at position 3211 of SEQ ID NO: 1882213
ggagacuuucuguaugcuu

SEQ ID NO: 2103709 - RNA, 19 nt, Artificial Sequence
  Description of Artificial Sequence: Synthetic oligonucleotide
  Antisense strand to SEQ ID NO: 2103708
aagcauacagaaagucucc

SEQ ID NO: 2103710 - RNA, 19 nt, Artificial Sequence
  Description of Artificial Sequence: Synthetic oligonucleotide
  Sense strand starting at position 3259 of SEQ ID NO: 1882213
ccugcucccauggaugaga

SEQ ID NO: 2103711 - RNA, 19 nt, Artificial Sequence
  Description of Artificial Sequence: Synthetic oligonucleotide
  Antisense strand to SEQ ID NO: 2103710
ucucauccaugggagcagg

SEQ ID NO: 2103712 - RNA, 19 nt, Artificial Sequence
  Description of Artificial Sequence: Synthetic oligonucleotide
  Sense strand starting at position 3291 of SEQ ID NO: 1882213
acuugugcccgagaucaag

SEQ ID NO: 2103713 - RNA, 19 nt, Artificial Sequence
  Description of Artificial Sequence: Synthetic oligonucleotide
  Antisense strand to SEQ ID NO: 2103712
cuugaucucgggcacaagu

SEQ ID NO: 2103714 - RNA, 19 nt, Artificial Sequence
  Description of Artificial Sequence: Synthetic oligonucleotide
  Sense strand starting at position 3493 of SEQ ID NO: 1882213
uagaaaccguuggcuaaau

SEQ ID NO: 2103715 - RNA, 19 nt, Artificial Sequence
  Description of Artificial Sequence: Synthetic oligonucleotide
  Antisense strand to SEQ ID NO: 2103714
auuuagccaacgguuucua

SEQ ID NO: 2103716 - RNA, 19 nt, Artificial Sequence
  Description of Artificial Sequence: Synthetic oligonucleotide
  Sense strand starting at position 3494 of SEQ ID NO: 1882213
agaaaccguuggcuaaauu

SEQ ID NO: 2103717 - RNA, 19 nt, Artificial Sequence
  Description of Artificial Sequence: Synthetic oligonucleotide
  Antisense strand to SEQ ID NO: 2103716
aauuuagccaacgguuucu

SEQ ID NO: 2103718 - RNA, 19 nt, Artificial Sequence
  Description of Artificial Sequence: Synthetic oligonucleotide
  Sense strand starting at position 3544 of SEQ ID NO: 1882213
uguuaaauccaguacaauc

SEQ ID NO: 2103719 - RNA, 19 nt, Artificial Sequence
  Description of Artificial Sequence: Synthetic oligonucleotide
  Antisense strand to SEQ ID NO: 2103718
gauuguacuggauuuaaca

SEQ ID NO: 2103720 - RNA, 19 nt, Artificial Sequence
  Description of Artificial Sequence: Synthetic oligonucleotide
  Sense strand starting at position 3749 of SEQ ID NO: 1882213
uucuuuguacuugauagca

SEQ ID NO: 2103721 - RNA, 19 nt, Artificial Sequence
  Description of Artificial Sequence: Synthetic oligonucleotide
  Antisense strand to SEQ ID NO: 2103720
ugcuaucaaguacaaagaa

SEQ ID NO: 2103722 - RNA, 19 nt, Artificial Sequence
  Description of Artificial Sequence: Synthetic oligonucleotide
  Sense strand starting at position 3873 of SEQ ID NO: 1882213
ugugaucuucuccaguaua

SEQ ID NO: 2103723 - RNA, 19 nt, Artificial Sequence
  Description of Artificial Sequence: Synthetic oligonucleotide
  Antisense strand to SEQ ID NO: 2103722
uauacuggagaagaucaca

SEQ ID NO: 2103724 - RNA, 19 nt, Artificial Sequence
  Description of Artificial Sequence: Synthetic oligonucleotide
  Sense strand starting at position 3953 of SEQ ID NO: 1882213
auccauuucucugauggau

SEQ ID NO: 2103725 - RNA, 19 nt, Artificial Sequence
  Description of Artificial Sequence: Synthetic oligonucleotide
  Antisense strand to SEQ ID NO: 2103724
auccaucagagaaauggau

SEQ ID NO: 2103726 - RNA, 19 nt, Artificial Sequence
  Description of Artificial Sequence: Synthetic oligonucleotide
  Sense strand starting at position 98 of SEQ ID NO: 1882214
ugauccaguucccuaucau

SEQ ID NO: 2103727 - RNA, 19 nt, Artificial Sequence
  Description of Artificial Sequence: Synthetic oligonucleotide
  Antisense strand to SEQ ID NO: 2103726
augauagggaacuggauca

SEQ ID NO: 2103728 - RNA, 19 nt, Artificial Sequence
  Description of Artificial Sequence: Synthetic oligonucleotide
  Sense strand starting at position 187 of SEQ ID NO: 1882214
uuguguagaaucugaguaa

SEQ ID NO: 2103729 - RNA, 19 nt, Artificial Sequence
  Description of Artificial Sequence: Synthetic oligonucleotide
  Antisense strand to SEQ ID NO: 2103728
uuacucagauucuacacaa

SEQ ID NO: 2103730 - RNA, 19 nt, Artificial Sequence
  Description of Artificial Sequence: Synthetic oligonucleotide
  Sense strand starting at position 190 of SEQ ID NO: 1882214
uguagaaucugaguaaugg

SEQ ID NO: 2103731 - RNA, 19 nt, Artificial Sequence
  Description of Artificial Sequence: Synthetic oligonucleotide
  Antisense strand to SEQ ID NO: 2103730
ccauuacucagauucuaca

SEQ ID NO: 2103732 - RNA, 19 nt, Artificial Sequence
  Description of Artificial Sequence: Synthetic oligonucleotide
  Sense strand starting at position 196 of SEQ ID NO: 1882214
aucugaguaauggguggau

SEQ ID NO: 2103733 - RNA, 19 nt, Artificial Sequence
  Description of Artificial Sequence: Synthetic oligonucleotide
  Antisense strand to SEQ ID NO: 2103732
auccacccauuacucagau

SEQ ID NO: 2103734 - RNA, 19 nt, Artificial Sequence
  Description of Artificial Sequence: Synthetic oligonucleotide
  Sense strand starting at position 198 of SEQ ID NO: 1882214
cugaguaauggguggauuc

SEQ ID NO: 2103735 - RNA, 19 nt, Artificial Sequence
  Description of Artificial Sequence: Synthetic oligonucleotide
  Antisense strand to SEQ ID NO: 2103734
gaauccacccauuacucag

SEQ ID NO: 2103736 - RNA, 19 nt, Artificial Sequence
  Description of Artificial Sequence: Synthetic oligonucleotide
  Sense strand starting at position 489 of SEQ ID NO: 1882214
ucgucuuaaucaucuaaag

SEQ ID NO: 2103737 - RNA, 19 nt, Artificial Sequence
  Description of Artificial Sequence: Synthetic oligonucleotide
  Antisense strand to SEQ ID NO: 2103736
cuuuagaugauuaagacga

SEQ ID NO: 2103738 - RNA, 19 nt, Artificial Sequence
  Description of Artificial Sequence: Synthetic oligonucleotide
  Sense strand starting at position 555 of SEQ ID NO: 1882214
gguacaauugucuacccga

SEQ ID NO: 2103739 - RNA, 19 nt, Artificial Sequence
  Description of Artificial Sequence: Synthetic oligonucleotide
  Antisense strand to SEQ ID NO: 2103738
ucggguagacaauuguacc

SEQ ID NO: 2103740 - RNA, 19 nt, Artificial Sequence
  Description of Artificial Sequence: Synthetic oligonucleotide
  Sense strand starting at position 558 of SEQ ID NO: 1882214
acaauugucuacccgagau

SEQ ID NO: 2103741 - RNA, 19 nt, Artificial Sequence
  Description of Artificial Sequence: Synthetic oligonucleotide
  Antisense strand to SEQ ID NO: 2103740
aucucggguagacaauugu

SEQ ID NO: 2103742 - RNA, 19 nt, Artificial Sequence
  Description of Artificial Sequence: Synthetic oligonucleotide
  Sense strand starting at position 560 of SEQ ID NO: 1882214
aauugucuacccgagauaa

SEQ ID NO: 2103743 - RNA, 19 nt, Artificial Sequence
  Description of Artificial Sequence: Synthetic oligonucleotide
  Antisense strand to SEQ ID NO: 2103742
uuaucucggguagacaauu

SEQ ID NO: 2103744 - RNA, 19 nt, Artificial Sequence
  Description of Artificial Sequence: Synthetic oligonucleotide
  Sense strand starting at position 562 of SEQ ID NO: 1882214
uugucuacccgagauaacu

SEQ ID NO: 2103745 - RNA, 19 nt, Artificial Sequence
  Description of Artificial Sequence: Synthetic oligonucleotide
  Antisense strand to SEQ ID NO: 2103744
aguuaucucggguagacaa

SEQ ID NO: 2103746 - RNA, 19 nt, Artificial Sequence
  Description of Artificial Sequence: Synthetic oligonucleotide
  Sense strand starting at position 571 of SEQ ID NO: 1882214
cgagauaacugcucagaac

SEQ ID NO: 2103747 - RNA, 19 nt, Artificial Sequence
  Description of Artificial Sequence: Synthetic oligonucleotide
  Antisense strand to SEQ ID NO: 2103746
guucugagcaguuaucucg

SEQ ID NO: 2103748 - RNA, 19 nt, Artificial Sequence
  Description of Artificial Sequence: Synthetic oligonucleotide
  Sense strand starting at position 929 of SEQ ID NO: 1882214
gguagugggcauuauucca

SEQ ID NO: 2103749 - RNA, 19 nt, Artificial Sequence
  Description of Artificial Sequence: Synthetic oligonucleotide
  Antisense strand to SEQ ID NO: 2103748
uggaauaaugcccacuacc

SEQ ID NO: 2103750 - RNA, 19 nt, Artificial Sequence
  Description of Artificial Sequence: Synthetic oligonucleotide
  Sense strand starting at position 1006 of SEQ ID NO: 1882214
gcauuacagaguugaagua

SEQ ID NO: 2103751 - RNA, 19 nt, Artificial Sequence
  Description of Artificial Sequence: Synthetic oligonucleotide
  Antisense strand to SEQ ID NO: 2103750
uacuucaacucuguaaugc

SEQ ID NO: 2103752 - RNA, 19 nt, Artificial Sequence
  Description of Artificial Sequence: Synthetic oligonucleotide
  Sense strand starting at position 1128 of SEQ ID NO: 1882214
ugccucucugcauaggaaa

SEQ ID NO: 2103753 - RNA, 19 nt, Artificial Sequence
  Description of Artificial Sequence: Synthetic oligonucleotide
  Antisense strand to SEQ ID NO: 2103752
uuuccuaugcagagaggca

SEQ ID NO: 2103754 - RNA, 19 nt, Artificial Sequence
  Description of Artificial Sequence: Synthetic oligonucleotide
  Sense strand starting at position 1253 of SEQ ID NO: 1882214
ugacuuaaugugggaucuu

SEQ ID NO: 2103755 - RNA, 19 nt, Artificial Sequence
  Description of Artificial Sequence: Synthetic oligonucleotide
  Antisense strand to SEQ ID NO: 2103754
aagaucccacauuaaguca

SEQ ID NO: 2103756 - RNA, 19 nt, Artificial Sequence
  Description of Artificial Sequence: Synthetic oligonucleotide
  Sense strand starting at position 1419 of SEQ ID NO: 1882214
cagugauaggccuaaacac

SEQ ID NO: 2103757 - RNA, 19 nt, Artificial Sequence
  Description of Artificial Sequence: Synthetic oligonucleotide
  Antisense strand to SEQ ID NO: 2103756
guguuuaggccuaucacug

SEQ ID NO: 2103758 - RNA, 19 nt, Artificial Sequence
  Description of Artificial Sequence: Synthetic oligonucleotide
  Sense strand starting at position 1581 of SEQ ID NO: 1882214
cugaaugggugggagauuu

SEQ ID NO: 2103759 - RNA, 19 nt, Artificial Sequence
  Description of Artificial Sequence: Synthetic oligonucleotide
  Antisense strand to SEQ ID NO: 2103758
aaaucucccacccauucag

SEQ ID NO: 2103760 - RNA, 19 nt, Artificial Sequence
  Description of Artificial Sequence: Synthetic oligonucleotide
  Sense strand starting at position 1778 of SEQ ID NO: 1882214
auuacaaaccuuggugaua

SEQ ID NO: 2103761 - RNA, 19 nt, Artificial Sequence
  Description of Artificial Sequence: Synthetic oligonucleotide
  Antisense strand to SEQ ID NO: 2103760
uaucaccaagguuuguaau

SEQ ID NO: 2103762 - RNA, 19 nt, Artificial Sequence
  Description of Artificial Sequence: Synthetic oligonucleotide
  Sense strand starting at position 1779 of SEQ ID NO: 1882214
uuacaaaccuuggugauau

SEQ ID NO: 2103763 - RNA, 19 nt, Artificial Sequence
  Description of Artificial Sequence: Synthetic oligonucleotide
  Antisense strand to SEQ ID NO: 2103762
auaucaccaagguuuguaa

SEQ ID NO: 2103764 - RNA, 19 nt, Artificial Sequence
  Description of Artificial Sequence: Synthetic oligonucleotide
  Sense strand starting at position 1879 of SEQ ID NO: 1882214
aagccucuuggguaaaguu

SEQ ID NO: 2103765 - RNA, 19 nt, Artificial Sequence
  Description of Artificial Sequence: Synthetic oligonucleotide
  Antisense strand to SEQ ID NO: 2103764
aacuuuacccaagaggcuu

SEQ ID NO: 2103766 - RNA, 19 nt, Artificial Sequence
  Description of Artificial Sequence: Synthetic oligonucleotide
  Sense strand starting at position 1904 of SEQ ID NO: 1882214
cuagaagugcugggauuca

SEQ ID NO: 2103767 - RNA, 19 nt, Artificial Sequence
  Description of Artificial Sequence: Synthetic oligonucleotide
  Antisense strand to SEQ ID NO: 2103766
ugaaucccagcacuucuag

SEQ ID NO: 2103768 - RNA, 19 nt, Artificial Sequence
  Description of Artificial Sequence: Synthetic oligonucleotide
  Sense strand starting at position 1933 of SEQ ID NO: 1882214
gggaauugcacauguacuu

SEQ ID NO: 2103769 - RNA, 19 nt, Artificial Sequence
  Description of Artificial Sequence: Synthetic oligonucleotide
  Antisense strand to SEQ ID NO: 2103768
aaguacaugugcaauuccc

SEQ ID NO: 2103770 - RNA, 19 nt, Artificial Sequence
  Description of Artificial Sequence: Synthetic oligonucleotide
  Sense strand starting at position 2073 of SEQ ID NO: 1882214
cggacuuguagucacuuua

SEQ ID NO: 2103771 - RNA, 19 nt, Artificial Sequence
  Description of Artificial Sequence: Synthetic oligonucleotide
  Antisense strand to SEQ ID NO: 2103770
uaaagugacuacaaguccg

SEQ ID NO: 2103772 - RNA, 19 nt, Artificial Sequence
  Description of Artificial Sequence: Synthetic oligonucleotide
  Sense strand starting at position 2144 of SEQ ID NO: 1882214
auggaugauucucuccauu

SEQ ID NO: 2103773 - RNA, 19 nt, Artificial Sequence
  Description of Artificial Sequence: Synthetic oligonucleotide
  Antisense strand to SEQ ID NO: 2103772
aauggagagaaucauccau

SEQ ID NO: 2103774 - RNA, 19 nt, Artificial Sequence
  Description of Artificial Sequence: Synthetic oligonucleotide
  Sense strand starting at position 2146 of SEQ ID NO: 1882214
ggaugauucucuccauuac

SEQ ID NO: 2103775 - RNA, 19 nt, Artificial Sequence
  Description of Artificial Sequence: Synthetic oligonucleotide
  Antisense strand to SEQ ID NO: 2103774
guaauggagagaaucaucc

SEQ ID NO: 2103776 - RNA, 19 nt, Artificial Sequence
  Description of Artificial Sequence: Synthetic oligonucleotide
  Sense strand starting at position 2403 of SEQ ID NO: 1882214
gggcauuagugaccaggua

SEQ ID NO: 2103777 - RNA, 19 nt, Artificial Sequence
  Description of Artificial Sequence: Synthetic oligonucleotide
  Antisense strand to SEQ ID NO: 2103776
uaccuggucacuaaugccc

SEQ ID NO: 2103778 - RNA, 19 nt, Artificial Sequence
  Description of Artificial Sequence: Synthetic oligonucleotide
  Sense strand starting at position 2427 of SEQ ID NO: 1882214
gagggagggcucugcucaa

SEQ ID NO: 2103779 - RNA, 19 nt, Artificial Sequence
  Description of Artificial Sequence: Synthetic oligonucleotide
  Antisense strand to SEQ ID NO: 2103778
uugagcagagcccucccuc

SEQ ID NO: 2103780 - RNA, 19 nt, Artificial Sequence
  Description of Artificial Sequence: Synthetic oligonucleotide
  Sense strand starting at position 2431 of SEQ ID NO: 1882214
gagggcucugcucaagaga

SEQ ID NO: 2103781 - RNA, 19 nt, Artificial Sequence
  Description of Artificial Sequence: Synthetic oligonucleotide
  Antisense strand to SEQ ID NO: 2103780
ucucuugagcagagcccuc

SEQ ID NO: 2103782 - RNA, 19 nt, Artificial Sequence
  Description of Artificial Sequence: Synthetic oligonucleotide
  Sense strand starting at position 2434 of SEQ ID NO: 1882214
ggcucugcucaagagaaag

SEQ ID NO: 2103783 - RNA, 19 nt, Artificial Sequence
  Description of Artificial Sequence: Synthetic oligonucleotide
  Antisense strand to SEQ ID NO: 2103782
cuuucucuugagcagagcc

SEQ ID NO: 2103784 - RNA, 19 nt, Artificial Sequence
  Description of Artificial Sequence: Synthetic oligonucleotide
  Sense strand starting at position 2788 of SEQ ID NO: 1882214
ggguauugggugggaggaa

SEQ ID NO: 2103785 - RNA, 19 nt, Artificial Sequence
  Description of Artificial Sequence: Synthetic oligonucleotide
  Antisense strand to SEQ ID NO: 2103784
uuccucccacccaauaccc

SEQ ID NO: 2103786 - RNA, 19 nt, Artificial Sequence
  Description of Artificial Sequence: Synthetic oligonucleotide
  Sense strand starting at position 2841 of SEQ ID NO: 1882214
guuauaguuccagggaagg

SEQ ID NO: 2103787 - RNA, 19 nt, Artificial Sequence
  Description of Artificial Sequence: Synthetic oligonucleotide
  Antisense strand to SEQ ID NO: 2103786
ccuucccuggaacuauaac

SEQ ID NO: 2103788 - RNA, 19 nt, Artificial Sequence
  Description of Artificial Sequence: Synthetic oligonucleotide
  Sense strand starting at position 2904 of SEQ ID NO: 1882214
gggacaggcucuuugggaa

SEQ ID NO: 2103789 - RNA, 19 nt, Artificial Sequence
  Description of Artificial Sequence: Synthetic oligonucleotide
  Antisense strand to SEQ ID NO: 2103788
uucccaaagagccuguccc

SEQ ID NO: 2103790 - RNA, 19 nt, Artificial Sequence
  Description of Artificial Sequence: Synthetic oligonucleotide
  Sense strand starting at position 2981 of SEQ ID NO: 1882214
gggcaagucucauuacaga

SEQ ID NO: 2103791 - RNA, 19 nt, Artificial Sequence
  Description of Artificial Sequence: Synthetic oligonucleotide
  Antisense strand to SEQ ID NO: 2103790
ucuguaaugagacuugccc

SEQ ID NO: 2103792 - RNA, 19 nt, Artificial Sequence
  Description of Artificial Sequence: Synthetic oligonucleotide
  Sense strand starting at position 3073 of SEQ ID NO: 1882214
gcggcauuugguggaaacu

SEQ ID NO: 2103793 - RNA, 19 nt, Artificial Sequence
  Description of Artificial Sequence: Synthetic oligonucleotide
  Antisense strand to SEQ ID NO: 2103792
aguuuccaccaaaugccgc

SEQ ID NO: 2103794 - RNA, 19 nt, Artificial Sequence
  Description of Artificial Sequence: Synthetic oligonucleotide
  Sense strand starting at position 3082 of SEQ ID NO: 1882214
gguggaaacuggcuuugga

SEQ ID NO: 2103795 - RNA, 19 nt, Artificial Sequence
  Description of Artificial Sequence: Synthetic oligonucleotide
  Antisense strand to SEQ ID NO: 2103794
uccaaagccaguuuccacc

SEQ ID NO: 2103796 - RNA, 19 nt, Artificial Sequence
  Description of Artificial Sequence: Synthetic oligonucleotide
  Sense strand starting at position 3091 of SEQ ID NO: 1882214
uggcuuuggacuugggaau

SEQ ID NO: 2103797 - RNA, 19 nt, Artificial Sequence
  Description of Artificial Sequence: Synthetic oligonucleotide
  Antisense strand to SEQ ID NO: 2103796
auucccaaguccaaagcca

SEQ ID NO: 2103798 - RNA, 19 nt, Artificial Sequence
  Description of Artificial Sequence: Synthetic oligonucleotide
  Sense strand starting at position 3092 of SEQ ID NO: 1882214
ggcuuuggacuugggaaua

SEQ ID NO: 2103799 - RNA, 19 nt, Artificial Sequence
  Description of Artificial Sequence: Synthetic oligonucleotide
  Antisense strand to SEQ ID NO: 2103798
uauucccaaguccaaagcc

SEQ ID NO: 2103800 - RNA, 19 nt, Artificial Sequence
  Description of Artificial Sequence: Synthetic oligonucleotide
  Sense strand starting at position 3222 of SEQ ID NO: 1882214
auuuguggcuaagaggaaa

SEQ ID NO: 2103801 - RNA, 19 nt, Artificial Sequence
  Description of Artificial Sequence: Synthetic oligonucleotide
  Antisense strand to SEQ ID NO: 2103800
uuuccucuuagccacaaau

SEQ ID NO: 2103802 - RNA, 19 nt, Artificial Sequence
  Description of Artificial Sequence: Synthetic oligonucleotide
  Sense strand starting at position 3298 of SEQ ID NO: 1882214
uagacaagucaugggucuu

SEQ ID NO: 2103803 - RNA, 19 nt, Artificial Sequence
  Description of Artificial Sequence: Synthetic oligonucleotide
  Antisense strand to SEQ ID NO: 2103802
aagacccaugacuugucua

SEQ ID NO: 2103804 - RNA, 19 nt, Artificial Sequence
  Description of Artificial Sequence: Synthetic oligonucleotide
  Sense strand starting at position 3951 of SEQ ID NO: 1882214
agaugaucucaucgccaaa

SEQ ID NO: 2103805 - RNA, 19 nt, Artificial Sequence
  Description of Artificial Sequence: Synthetic oligonucleotide
  Antisense strand to SEQ ID NO: 2103804
uuuggcgaugagaucaucu

SEQ ID NO: 2103806 - RNA, 19 nt, Artificial Sequence
  Description of Artificial Sequence: Synthetic oligonucleotide
  Sense strand starting at position 71 of SEQ ID NO: 1882215
uuagccucuccuuguagau

SEQ ID NO: 2103807 - RNA, 19 nt, Artificial Sequence
  Description of Artificial Sequence: Synthetic oligonucleotide
  Antisense strand to SEQ ID NO: 2103806
aucuacaaggagaggcuaa

SEQ ID NO: 2103808 - RNA, 19 nt, Artificial Sequence
  Description of Artificial Sequence: Synthetic oligonucleotide
  Sense strand starting at position 206 of SEQ ID NO: 1882215
gugccaugcuccucucaag

SEQ ID NO: 2103809 - RNA, 19 nt, Artificial Sequence
  Description of Artificial Sequence: Synthetic oligonucleotide
  Antisense strand to SEQ ID NO: 2103808
cuugagaggagcauggcac

SEQ ID NO: 2103810 - RNA, 19 nt, Artificial Sequence
  Description of Artificial Sequence: Synthetic oligonucleotide
  Sense strand starting at position 225 of SEQ ID NO: 1882215
aaaucaugucacuguggca

SEQ ID NO: 2103811 - RNA, 19 nt, Artificial Sequence
  Description of Artificial Sequence: Synthetic oligonucleotide
  Antisense strand to SEQ ID NO: 2103810
ugccacagugacaugauuu

SEQ ID NO: 2103812 - RNA, 19 nt, Artificial Sequence
  Description of Artificial Sequence: Synthetic oligonucleotide
  Sense strand starting at position 289 of SEQ ID NO: 1882215
gccucaguggugugagaga

SEQ ID NO: 2103813 - RNA, 19 nt, Artificial Sequence
  Description of Artificial Sequence: Synthetic oligonucleotide
  Antisense strand to SEQ ID NO: 2103812
ucucucacaccacugaggc

SEQ ID NO: 2103814 - RNA, 19 nt, Artificial Sequence
  Description of Artificial Sequence: Synthetic oligonucleotide
  Sense strand starting at position 662 of SEQ ID NO: 1882215
cuacuaugugcagauacua

SEQ ID NO: 2103815 - RNA, 19 nt, Artificial Sequence
  Description of Artificial Sequence: Synthetic oligonucleotide
  Antisense strand to SEQ ID NO: 2103814
uaguaucugcacauaguag

SEQ ID NO: 2103816 - RNA, 19 nt, Artificial Sequence
  Description of Artificial Sequence: Synthetic oligonucleotide
  Sense strand starting at position 869 of SEQ ID NO: 1882215
gcaccaugaguaggaguuu

SEQ ID NO: 2103817 - RNA, 19 nt, Artificial Sequence
  Description of Artificial Sequence: Synthetic oligonucleotide
  Antisense strand to SEQ ID NO: 2103816
aaacuccuacucauggugc

SEQ ID NO: 2103818 - RNA, 19 nt, Artificial Sequence
  Description of Artificial Sequence: Synthetic oligonucleotide
  Sense strand starting at position 882 of SEQ ID NO: 1882215
gaguuugccaaguggagaa

SEQ ID NO: 2103819 - RNA, 19 nt, Artificial Sequence
  Description of Artificial Sequence: Synthetic oligonucleotide
  Antisense strand to SEQ ID NO: 2103818
uucuccacuuggcaaacuc

SEQ ID NO: 2103820 - RNA, 19 nt, Artificial Sequence
  Description of Artificial Sequence: Synthetic oligonucleotide
  Sense strand starting at position 1169 of SEQ ID NO: 1882215
ggagcaaucccugagucgu

SEQ ID NO: 2103821 - RNA, 19 nt, Artificial Sequence
  Description of Artificial Sequence: Synthetic oligonucleotide
  Antisense strand to SEQ ID NO: 2103820
acgacucagggauugcucc

SEQ ID NO: 2103822 - RNA, 19 nt, Artificial Sequence
  Description of Artificial Sequence: Synthetic oligonucleotide
  Sense strand starting at position 1506 of SEQ ID NO: 1882215
gcccucgugccuggaagaa

SEQ ID NO: 2103823 - RNA, 19 nt, Artificial Sequence
  Description of Artificial Sequence: Synthetic oligonucleotide
  Antisense strand to SEQ ID NO: 2103822
uucuuccaggcacgagggc

SEQ ID NO: 2103824 - RNA, 19 nt, Artificial Sequence
  Description of Artificial Sequence: Synthetic oligonucleotide
  Sense strand starting at position 1580 of SEQ ID NO: 1882215
guggguuugccugugagca

SEQ ID NO: 2103825 - RNA, 19 nt, Artificial Sequence
  Description of Artificial Sequence: Synthetic oligonucleotide
  Antisense strand to SEQ ID NO: 2103824
ugcucacaggcaaacccac

SEQ ID NO: 2103826 - RNA, 19 nt, Artificial Sequence
  Description of Artificial Sequence: Synthetic oligonucleotide
  Sense strand starting at position 1581 of SEQ ID NO: 1882215
uggguuugccugugagcag

SEQ ID NO: 2103827 - RNA, 19 nt, Artificial Sequence
  Description of Artificial Sequence: Synthetic oligonucleotide
  Antisense strand to SEQ ID NO: 2103826
cugcucacaggcaaaccca

SEQ ID NO: 2103828 - RNA, 19 nt, Artificial Sequence
  Description of Artificial Sequence: Synthetic oligonucleotide
  Sense strand starting at position 2171 of SEQ ID NO: 1882215
ggagccuccauacguguua

SEQ ID NO: 2103829 - RNA, 19 nt, Artificial Sequence
  Description of Artificial Sequence: Synthetic oligonucleotide
  Antisense strand to SEQ ID NO: 2103828
uaacacguauggaggcucc

SEQ ID NO: 2103830 - RNA, 19 nt, Artificial Sequence
  Description of Artificial Sequence: Synthetic oligonucleotide
  Sense strand starting at position 2178 of SEQ ID NO: 1882215
ccauacguguuacuuccaa

SEQ ID NO: 2103831 - RNA, 19 nt, Artificial Sequence
  Description of Artificial Sequence: Synthetic oligonucleotide
  Antisense strand to SEQ ID NO: 2103830
uuggaaguaacacguaugg

SEQ ID NO: 2103832 - RNA, 19 nt, Artificial Sequence
  Description of Artificial Sequence: Synthetic oligonucleotide
  Sense strand starting at position 2657 of SEQ ID NO: 1882215
ccuuaccuucgggauaauc

SEQ ID NO: 2103833 - RNA, 19 nt, Artificial Sequence
  Description of Artificial Sequence: Synthetic oligonucleotide
  Antisense strand to SEQ ID NO: 2103832
gauuaucccgaagguaagg

SEQ ID NO: 2103834 - RNA, 19 nt, Artificial Sequence
  Description of Artificial Sequence: Synthetic oligonucleotide
  Sense strand starting at position 2659 of SEQ ID NO: 1882215
uuaccuucgggauaaucca

SEQ ID NO: 2103835 - RNA, 19 nt, Artificial Sequence
  Description of Artificial Sequence: Synthetic oligonucleotide
  Antisense strand to SEQ ID NO: 2103834
uggauuaucccgaagguaa

SEQ ID NO: 2103836 - RNA, 19 nt, Artificial Sequence
  Description of Artificial Sequence: Synthetic oligonucleotide
  Sense strand starting at position 2749 of SEQ ID NO: 1882215
acaagauggucucuaaguc

SEQ ID NO: 2103837 - RNA, 19 nt, Artificial Sequence
  Description of Artificial Sequence: Synthetic oligonucleotide
  Antisense strand to SEQ ID NO: 2103836
gacuuagagaccaucuugu

SEQ ID NO: 2103838 - RNA, 19 nt, Artificial Sequence
  Description of Artificial Sequence: Synthetic oligonucleotide
  Sense strand starting at position 2750 of SEQ ID NO: 1882215
caagauggucucuaagucu

SEQ ID NO: 2103839 - RNA, 19 nt, Artificial Sequence
  Description of Artificial Sequence: Synthetic oligonucleotide
  Antisense strand to SEQ ID NO: 2103838
agacuuagagaccaucuug

SEQ ID NO: 2103840 - RNA, 19 nt, Artificial Sequence
  Description of Artificial Sequence: Synthetic oligonucleotide
  Sense strand starting at position 2753 of SEQ ID NO: 1882215
gauggucucuaagucuuaa

SEQ ID NO: 2103841 - RNA, 19 nt, Artificial Sequence
  Description of Artificial Sequence: Synthetic oligonucleotide
  Antisense strand to SEQ ID NO: 2103840
uuaagacuuagagaccauc

SEQ ID NO: 2103842 - RNA, 19 nt, Artificial Sequence
  Description of Artificial Sequence: Synthetic oligonucleotide
  Sense strand starting at position 2793 of SEQ ID NO: 1882215
ucuauuaauugucuaagga

SEQ ID NO: 2103843 - RNA, 19 nt, Artificial Sequence
  Description of Artificial Sequence: Synthetic oligonucleotide
  Antisense strand to SEQ ID NO: 2103842
uccuuagacaauuaauaga

SEQ ID NO: 2103844 - RNA, 19 nt, Artificial Sequence
  Description of Artificial Sequence: Synthetic oligonucleotide
  Sense strand starting at position 2797 of SEQ ID NO: 1882215
uuaauugucuaaggauuug

SEQ ID NO: 2103845 - RNA, 19 nt, Artificial Sequence
  Description of Artificial Sequence: Synthetic oligonucleotide
  Antisense strand to SEQ ID NO: 2103844
caaauccuuagacaauuaa

SEQ ID NO: 2103846 - RNA, 19 nt, Artificial Sequence
  Description of Artificial Sequence: Synthetic oligonucleotide
  Sense strand starting at position 2809 of SEQ ID NO: 1882215
ggauuugucugugaauugu

SEQ ID NO: 2103847 - RNA, 19 nt, Artificial Sequence
  Description of Artificial Sequence: Synthetic oligonucleotide
  Antisense strand to SEQ ID NO: 2103846
acaauucacagacaaaucc

SEQ ID NO: 2103848 - RNA, 19 nt, Artificial Sequence
  Description of Artificial Sequence: Synthetic oligonucleotide
  Sense strand starting at position 2813 of SEQ ID NO: 1882215
uugucugugaauuguguga

SEQ ID NO: 2103849 - RNA, 19 nt, Artificial Sequence
  Description of Artificial Sequence: Synthetic oligonucleotide
  Antisense strand to SEQ ID NO: 2103848
ucacacaauucacagacaa

SEQ ID NO: 2103850 - RNA, 19 nt, Artificial Sequence
  Description of Artificial Sequence: Synthetic oligonucleotide
  Sense strand starting at position 2817 of SEQ ID NO: 1882215
cugugaauugugugaaagu

SEQ ID NO: 2103851 - RNA, 19 nt, Artificial Sequence
  Description of Artificial Sequence: Synthetic oligonucleotide
  Antisense strand to SEQ ID NO: 2103850
acuuucacacaauucacag

SEQ ID NO: 2103852 - RNA, 19 nt, Artificial Sequence
  Description of Artificial Sequence: Synthetic oligonucleotide
  Sense strand starting at position 2958 of SEQ ID NO: 1882215
ggacuucccuauggaugaa

SEQ ID NO: 2103853 - RNA, 19 nt, Artificial Sequence
  Description of Artificial Sequence: Synthetic oligonucleotide
  Antisense strand to SEQ ID NO: 2103852
uucauccauagggaagucc

SEQ ID NO: 2103854 - RNA, 19 nt, Artificial Sequence
  Description of Artificial Sequence: Synthetic oligonucleotide
  Sense strand starting at position 3061 of SEQ ID NO: 1882215
gagacagguuguccuuaug

SEQ ID NO: 2103855 - RNA, 19 nt, Artificial Sequence
  Description of Artificial Sequence: Synthetic oligonucleotide
  Antisense strand to SEQ ID NO: 2103854
cauaaggacaaccugucuc

SEQ ID NO: 2103856 - RNA, 19 nt, Artificial Sequence
  Description of Artificial Sequence: Synthetic oligonucleotide
  Sense strand starting at position 3187 of SEQ ID NO: 1882215
uuugaaguuucgcuuaaga

SEQ ID NO: 2103857 - RNA, 19 nt, Artificial Sequence
  Description of Artificial Sequence: Synthetic oligonucleotide
  Antisense strand to SEQ ID NO: 2103856
ucuuaagcgaaacuucaaa

SEQ ID NO: 2103858 - RNA, 19 nt, Artificial Sequence
  Description of Artificial Sequence: Synthetic oligonucleotide
  Sense strand starting at position 3189 of SEQ ID NO: 1882215
ugaaguuucgcuuaagaaa

SEQ ID NO: 2103859 - RNA, 19 nt, Artificial Sequence
  Description of Artificial Sequence: Synthetic oligonucleotide
  Antisense strand to SEQ ID NO: 2103858
uuucuuaagcgaaacuuca

SEQ ID NO: 2103860 - RNA, 19 nt, Artificial Sequence
  Description of Artificial Sequence: Synthetic oligonucleotide
  Sense strand starting at position 3214 of SEQ ID NO: 1882215
gaggaauccugucuuggug

SEQ ID NO: 2103861 - RNA, 19 nt, Artificial Sequence
  Description of Artificial Sequence: Synthetic oligonucleotide
  Antisense strand to SEQ ID NO: 2103860
caccaagacaggauuccuc

SEQ ID NO: 2103862 - RNA, 19 nt, Artificial Sequence
  Description of Artificial Sequence: Synthetic oligonucleotide
  Sense strand starting at position 3273 of SEQ ID NO: 1882215
agggccuuguauccauuau

SEQ ID NO: 2103863 - RNA, 19 nt, Artificial Sequence
  Description of Artificial Sequence: Synthetic oligonucleotide
  Antisense strand to SEQ ID NO: 2103862
auaauggauacaaggcccu

SEQ ID NO: 2103864 - RNA, 19 nt, Artificial Sequence
  Description of Artificial Sequence: Synthetic oligonucleotide
  Sense strand starting at position 3286 of SEQ ID NO: 1882215
cauuauuuccgugagcccu

SEQ ID NO: 2103865 - RNA, 19 nt, Artificial Sequence
  Description of Artificial Sequence: Synthetic oligonucleotide
  Antisense strand to SEQ ID NO: 2103864
agggcucacggaaauaaug

SEQ ID NO: 2103866 - RNA, 19 nt, Artificial Sequence
  Description of Artificial Sequence: Synthetic oligonucleotide
  Sense strand starting at position 3294 of SEQ ID NO: 1882215
ccgugagcccucccuguau

SEQ ID NO: 2103867 - RNA, 19 nt, Artificial Sequence
  Description of Artificial Sequence: Synthetic oligonucleotide
  Antisense strand to SEQ ID NO: 2103866
auacagggagggcucacgg

SEQ ID NO: 2103868 - RNA, 19 nt, Artificial Sequence
  Description of Artificial Sequence: Synthetic oligonucleotide
  Sense strand starting at position 3296 of SEQ ID NO: 1882215
gugagcccucccuguauua

SEQ ID NO: 2103869 - RNA, 19 nt, Artificial Sequence
  Description of Artificial Sequence: Synthetic oligonucleotide
  Antisense strand to SEQ ID NO: 2103868
uaauacagggagggcucac

SEQ ID NO: 2103870 - RNA, 19 nt, Artificial Sequence
  Description of Artificial Sequence: Synthetic oligonucleotide
  Sense strand starting at position 3321 of SEQ ID NO: 1882215
gcugucacagaguaauuaa

SEQ ID NO: 2103871 - RNA, 19 nt, Artificial Sequence
  Description of Artificial Sequence: Synthetic oligonucleotide
  Antisense strand to SEQ ID NO: 2103870
uuaauuacucugugacagc

SEQ ID NO: 2103872 - RNA, 19 nt, Artificial Sequence
  Description of Artificial Sequence: Synthetic oligonucleotide
  Sense strand starting at position 3365 of SEQ ID NO: 1882215
ggaauuucguggcuuggca

SEQ ID NO: 2103873 - RNA, 19 nt, Artificial Sequence
  Description of Artificial Sequence: Synthetic oligonucleotide
  Antisense strand to SEQ ID NO: 2103872
ugccaagccacgaaauucc

SEQ ID NO: 2103874 - RNA, 19 nt, Artificial Sequence
  Description of Artificial Sequence: Synthetic oligonucleotide
  Sense strand starting at position 3372 of SEQ ID NO: 1882215
cguggcuuggcacaauaau

SEQ ID NO: 2103875 - RNA, 19 nt, Artificial Sequence
  Description of Artificial Sequence: Synthetic oligonucleotide
  Antisense strand to SEQ ID NO: 2103874
auuauugugccaagccacg

SEQ ID NO: 2103876 - RNA, 19 nt, Artificial Sequence
  Description of Artificial Sequence: Synthetic oligonucleotide
  Sense strand starting at position 3381 of SEQ ID NO: 1882215
gcacaauaaugcuuuaugu

SEQ ID NO: 2103877 - RNA, 19 nt, Artificial Sequence
  Description of Artificial Sequence: Synthetic oligonucleotide
  Antisense strand to SEQ ID NO: 2103876
acauaaagcauuauugugc

SEQ ID NO: 2103878 - RNA, 19 nt, Artificial Sequence
  Description of Artificial Sequence: Synthetic oligonucleotide
  Sense strand starting at position 3437 of SEQ ID NO: 1882215
uguagccaucuauaagacu

SEQ ID NO: 2103879 - RNA, 19 nt, Artificial Sequence
  Description of Artificial Sequence: Synthetic oligonucleotide
  Antisense strand to SEQ ID NO: 2103878
agucuuauagauggcuaca

SEQ ID NO: 2103880 - RNA, 19 nt, Artificial Sequence
  Description of Artificial Sequence: Synthetic oligonucleotide
  Sense strand starting at position 3514 of SEQ ID NO: 1882215
gagagaggaucaguuguuu

SEQ ID NO: 2103881 - RNA, 19 nt, Artificial Sequence
  Description of Artificial Sequence: Synthetic oligonucleotide
  Antisense strand to SEQ ID NO: 2103880
aaacaacugauccucucuc

SEQ ID NO: 2103882 - RNA, 19 nt, Artificial Sequence
  Description of Artificial Sequence: Synthetic oligonucleotide
  Sense strand starting at position 3657 of SEQ ID NO: 1882215
ugggauuaccagugggagu

SEQ ID NO: 2103883 - RNA, 19 nt, Artificial Sequence
  Description of Artificial Sequence: Synthetic oligonucleotide
  Antisense strand to SEQ ID NO: 2103882
acucccacugguaauccca

SEQ ID NO: 2103884 - RNA, 19 nt, Artificial Sequence
  Description of Artificial Sequence: Synthetic oligonucleotide
  Sense strand starting at position 3691 of SEQ ID NO: 1882215
agaggaucucgugagcuca

SEQ ID NO: 2103885 - RNA, 19 nt, Artificial Sequence
  Description of Artificial Sequence: Synthetic oligonucleotide
  Antisense strand to SEQ ID NO: 2103884
ugagcucacgagauccucu

SEQ ID NO: 2103886 - RNA, 19 nt, Artificial Sequence
  Description of Artificial Sequence: Synthetic oligonucleotide
  Sense strand starting at position 12 of SEQ ID NO: 1882216
aguaauguggcauauaucu

SEQ ID NO: 2103887 - RNA, 19 nt, Artificial Sequence
  Description of Artificial Sequence: Synthetic oligonucleotide
  Antisense strand to SEQ ID NO: 2103886
agauauaugccacauuacu

SEQ ID NO: 2103888 - RNA, 19 nt, Artificial Sequence
  Description of Artificial Sequence: Synthetic oligonucleotide
  Sense strand starting at position 216 of SEQ ID NO: 1882216
aaaugcguucuccaacaga

SEQ ID NO: 2103889 - RNA, 19 nt, Artificial Sequence
  Description of Artificial Sequence: Synthetic oligonucleotide
  Antisense strand to SEQ ID NO: 2103888
ucuguuggagaacgcauuu

SEQ ID NO: 2103890 - RNA, 19 nt, Artificial Sequence
  Description of Artificial Sequence: Synthetic oligonucleotide
  Sense strand starting at position 668 of SEQ ID NO: 1882216
gugucaggucuucaggauu

SEQ ID NO: 2103891 - RNA, 19 nt, Artificial Sequence
  Description of Artificial Sequence: Synthetic oligonucleotide
  Antisense strand to SEQ ID NO: 2103890
aauccugaagaccugacac

SEQ ID NO: 2103892 - RNA, 19 nt, Artificial Sequence
  Description of Artificial Sequence: Synthetic oligonucleotide
  Sense strand starting at position 690 of SEQ ID NO: 1882216
agugguuaguuagcauuua

SEQ ID NO: 2103893 - RNA, 19 nt, Artificial Sequence
  Description of Artificial Sequence: Synthetic oligonucleotide
  Antisense strand to SEQ ID NO: 2103892
uaaaugcuaacuaaccacu

SEQ ID NO: 2103894 - RNA, 19 nt, Artificial Sequence
  Description of Artificial Sequence: Synthetic oligonucleotide
  Sense strand starting at position 735 of SEQ ID NO: 1882216
ccuugauacuagguacaga

SEQ ID NO: 2103895 - RNA, 19 nt, Artificial Sequence
  Description of Artificial Sequence: Synthetic oligonucleotide
  Antisense strand to SEQ ID NO: 2103894
ucuguaccuaguaucaagg

SEQ ID NO: 2103896 - RNA, 19 nt, Artificial Sequence
  Description of Artificial Sequence: Synthetic oligonucleotide
  Sense strand starting at position 755 of SEQ ID NO: 1882216
caaaguaaaucugugugaa

SEQ ID NO: 2103897 - RNA, 19 nt, Artificial Sequence
  Description of Artificial Sequence: Synthetic oligonucleotide
  Antisense strand to SEQ ID NO: 2103896
uucacacagauuuacuuug

SEQ ID NO: 2103898 - RNA, 19 nt, Artificial Sequence
  Description of Artificial Sequence: Synthetic oligonucleotide
  Sense strand starting at position 756 of SEQ ID NO: 1882216
aaaguaaaucugugugaac

SEQ ID NO: 2103899 - RNA, 19 nt, Artificial Sequence
  Description of Artificial Sequence: Synthetic oligonucleotide
  Antisense strand to SEQ ID NO: 2103898
guucacacagauuuacuuu

SEQ ID NO: 2103900 - RNA, 19 nt, Artificial Sequence
  Description of Artificial Sequence: Synthetic oligonucleotide
  Sense strand starting at position 772 of SEQ ID NO: 1882216
aacguuagacagcauucua

SEQ ID NO: 2103901 - RNA, 19 nt, Artificial Sequence
  Description of Artificial Sequence: Synthetic oligonucleotide
  Antisense strand to SEQ ID NO: 2103900
uagaaugcugucuaacguu

SEQ ID NO: 2103902 - RNA, 19 nt, Artificial Sequence
  Description of Artificial Sequence: Synthetic oligonucleotide
  Sense strand starting at position 803 of SEQ ID NO: 1882216
agguaacucguggacaacu

SEQ ID NO: 2103903 - RNA, 19 nt, Artificial Sequence
  Description of Artificial Sequence: Synthetic oligonucleotide
  Antisense strand to SEQ ID NO: 2103902
aguuguccacgaguuaccu

SEQ ID NO: 2103904 - RNA, 19 nt, Artificial Sequence
  Description of Artificial Sequence: Synthetic oligonucleotide
  Sense strand starting at position 988 of SEQ ID NO: 1882216
guuacugguguugagaauu

SEQ ID NO: 2103905 - RNA, 19 nt, Artificial Sequence
  Description of Artificial Sequence: Synthetic oligonucleotide
  Antisense strand to SEQ ID NO: 2103904
aauucucaacaccaguaac

SEQ ID NO: 2103906 - RNA, 19 nt, Artificial Sequence
  Description of Artificial Sequence: Synthetic oligonucleotide
  Sense strand starting at position 1058 of SEQ ID NO: 1882216
uugcuauuucuuuggcagu

SEQ ID NO: 2103907 - RNA, 19 nt, Artificial Sequence
  Description of Artificial Sequence: Synthetic oligonucleotide
  Antisense strand to SEQ ID NO: 2103906
acugccaaagaaauagcaa

SEQ ID NO: 2103908 - RNA, 19 nt, Artificial Sequence
  Description of Artificial Sequence: Synthetic oligonucleotide
  Sense strand starting at position 1060 of SEQ ID NO: 1882216
gcuauuucuuuggcaguca

SEQ ID NO: 2103909 - RNA, 19 nt, Artificial Sequence
  Description of Artificial Sequence: Synthetic oligonucleotide
  Antisense strand to SEQ ID NO: 2103908
ugacugccaaagaaauagc

SEQ ID NO: 2103910 - RNA, 19 nt, Artificial Sequence
  Description of Artificial Sequence: Synthetic oligonucleotide
  Sense strand starting at position 1068 of SEQ ID NO: 1882216
uuuggcagucauugagaaa

SEQ ID NO: 2103911 - RNA, 19 nt, Artificial Sequence
  Description of Artificial Sequence: Synthetic oligonucleotide
  Antisense strand to SEQ ID NO: 2103910
uuucucaaugacugccaaa

SEQ ID NO: 2103912 - RNA, 19 nt, Artificial Sequence
  Description of Artificial Sequence: Synthetic oligonucleotide
  Sense strand starting at position 1205 of SEQ ID NO: 1882216
gcaacaauaucaguucuag

SEQ ID NO: 2103913 - RNA, 19 nt, Artificial Sequence
  Description of Artificial Sequence: Synthetic oligonucleotide
  Antisense strand to SEQ ID NO: 2103912
cuagaacugauauuguugc

SEQ ID NO: 2103914 - RNA, 19 nt, Artificial Sequence
  Description of Artificial Sequence: Synthetic oligonucleotide
  Sense strand starting at position 1211 of SEQ ID NO: 1882216
auaucaguucuaggaaaug

SEQ ID NO: 2103915 - RNA, 19 nt, Artificial Sequence
  Description of Artificial Sequence: Synthetic oligonucleotide
  Antisense strand to SEQ ID NO: 2103914
cauuuccuagaacugauau

SEQ ID NO: 2103916 - RNA, 19 nt, Artificial Sequence
  Description of Artificial Sequence: Synthetic oligonucleotide
  Sense strand starting at position 1217 of SEQ ID NO: 1882216
guucuaggaaauggucaga

SEQ ID NO: 2103917 - RNA, 19 nt, Artificial Sequence
  Description of Artificial Sequence: Synthetic oligonucleotide
  Antisense strand to SEQ ID NO: 2103916
ucugaccauuuccuagaac

SEQ ID NO: 2103918 - RNA, 19 nt, Artificial Sequence
  Description of Artificial Sequence: Synthetic oligonucleotide
  Sense strand starting at position 1278 of SEQ ID NO: 1882216
uuuguuuaguaaucacaac

SEQ ID NO: 2103919 - RNA, 19 nt, Artificial Sequence
  Description of Artificial Sequence: Synthetic oligonucleotide
  Antisense strand to SEQ ID NO: 2103918
guugugauuacuaaacaaa

SEQ ID NO: 2103920 - RNA, 19 nt, Artificial Sequence
  Description of Artificial Sequence: Synthetic oligonucleotide
  Sense strand starting at position 1437 of SEQ ID NO: 1882216
aggcuugggucuuugaaua

SEQ ID NO: 2103921 - RNA, 19 nt, Artificial Sequence
  Description of Artificial Sequence: Synthetic oligonucleotide
  Antisense strand to SEQ ID NO: 2103920
uauucaaagacccaagccu

SEQ ID NO: 2103922 - RNA, 19 nt, Artificial Sequence
  Description of Artificial Sequence: Synthetic oligonucleotide
  Sense strand starting at position 1655 of SEQ ID NO: 1882216
ggccuaaacacgcaagagu

SEQ ID NO: 2103923 - RNA, 19 nt, Artificial Sequence
  Description of Artificial Sequence: Synthetic oligonucleotide
  Antisense strand to SEQ ID NO: 2103922
acucuugcguguuuaggcc

SEQ ID NO: 2103924 - RNA, 19 nt, Artificial Sequence
  Description of Artificial Sequence: Synthetic oligonucleotide
  Sense strand starting at position 1739 of SEQ ID NO: 1882216
ugccaaaucuaauugcaag

SEQ ID NO: 2103925 - RNA, 19 nt, Artificial Sequence
  Description of Artificial Sequence: Synthetic oligonucleotide
  Antisense strand to SEQ ID NO: 2103924
cuugcaauuagauuuggca

SEQ ID NO: 2103926 - RNA, 19 nt, Artificial Sequence
  Description of Artificial Sequence: Synthetic oligonucleotide
  Sense strand starting at position 1781 of SEQ ID NO: 1882216
aaaggacucuugguaccuu

SEQ ID NO: 2103927 - RNA, 19 nt, Artificial Sequence
  Description of Artificial Sequence: Synthetic oligonucleotide
  Antisense strand to SEQ ID NO: 2103926
aagguaccaagaguccuuu

SEQ ID NO: 2103928 - RNA, 19 nt, Artificial Sequence
  Description of Artificial Sequence: Synthetic oligonucleotide
  Sense strand starting at position 1802 of SEQ ID NO: 1882216
ggcuaaauccucgauaucu

SEQ ID NO: 2103929 - RNA, 19 nt, Artificial Sequence
  Description of Artificial Sequence: Synthetic oligonucleotide
  Antisense strand to SEQ ID NO: 2103928
agauaucgaggauuuagcc

SEQ ID NO: 2103930 - RNA, 19 nt, Artificial Sequence
  Description of Artificial Sequence: Synthetic oligonucleotide
  Sense strand starting at position 2132 of SEQ ID NO: 1882216
agguuuaguggcuaccuga

SEQ ID NO: 2103931 - RNA, 19 nt, Artificial Sequence
  Description of Artificial Sequence: Synthetic oligonucleotide
  Antisense strand to SEQ ID NO: 2103930
ucagguagccacuaaaccu

SEQ ID NO: 2103932 - RNA, 19 nt, Artificial Sequence
  Description of Artificial Sequence: Synthetic oligonucleotide
  Sense strand starting at position 2168 of SEQ ID NO: 1882216
cccugauaugaauguaaau

SEQ ID NO: 2103933 - RNA, 19 nt, Artificial Sequence
  Description of Artificial Sequence: Synthetic oligonucleotide
  Antisense strand to SEQ ID NO: 2103932
auuuacauucauaucaggg

SEQ ID NO: 2103934 - RNA, 19 nt, Artificial Sequence
  Description of Artificial Sequence: Synthetic oligonucleotide
  Sense strand starting at position 2303 of SEQ ID NO: 1882216
ugcucauaucguuucuguu

SEQ ID NO: 2103935 - RNA, 19 nt, Artificial Sequence
  Description of Artificial Sequence: Synthetic oligonucleotide
  Antisense strand to SEQ ID NO: 2103934
aacagaaacgauaugagca

SEQ ID NO: 2103936 - RNA, 19 nt, Artificial Sequence
  Description of Artificial Sequence: Synthetic oligonucleotide
  Sense strand starting at position 2554 of SEQ ID NO: 1882216
ucagucuugggucaaauag

SEQ ID NO: 2103937 - RNA, 19 nt, Artificial Sequence
  Description of Artificial Sequence: Synthetic oligonucleotide
  Antisense strand to SEQ ID NO: 2103936
cuauuugacccaagacuga

SEQ ID NO: 2103938 - RNA, 19 nt, Artificial Sequence
  Description of Artificial Sequence: Synthetic oligonucleotide
  Sense strand starting at position 2591 of SEQ ID NO: 1882216
cugguuaagucuuccaaga

SEQ ID NO: 2103939 - RNA, 19 nt, Artificial Sequence
  Description of Artificial Sequence: Synthetic oligonucleotide
  Antisense strand to SEQ ID NO: 2103938
ucuuggaagacuuaaccag

SEQ ID NO: 2103940 - RNA, 19 nt, Artificial Sequence
  Description of Artificial Sequence: Synthetic oligonucleotide
  Sense strand starting at position 2891 of SEQ ID NO: 1882216
gaaacuagccguuacacuu

SEQ ID NO: 2103941 - RNA, 19 nt, Artificial Sequence
  Description of Artificial Sequence: Synthetic oligonucleotide
  Antisense strand to SEQ ID NO: 2103940
aaguguaacggcuaguuuc

SEQ ID NO: 2103942 - RNA, 19 nt, Artificial Sequence
  Description of Artificial Sequence: Synthetic oligonucleotide
  Sense strand starting at position 3002 of SEQ ID NO: 1882216
uugcaaauccaugguagga

SEQ ID NO: 2103943 - RNA, 19 nt, Artificial Sequence
  Description of Artificial Sequence: Synthetic oligonucleotide
  Antisense strand to SEQ ID NO: 2103942
uccuaccauggauuugcaa

SEQ ID NO: 2103944 - RNA, 19 nt, Artificial Sequence
  Description of Artificial Sequence: Synthetic oligonucleotide
  Sense strand starting at position 3015 of SEQ ID NO: 1882216
guaggaaaucugggcacau

SEQ ID NO: 2103945 - RNA, 19 nt, Artificial Sequence
  Description of Artificial Sequence: Synthetic oligonucleotide
  Antisense strand to SEQ ID NO: 2103944
augugcccagauuuccuac

SEQ ID NO: 2103946 - RNA, 19 nt, Artificial Sequence
  Description of Artificial Sequence: Synthetic oligonucleotide
  Sense strand starting at position 3016 of SEQ ID NO: 1882216
uaggaaaucugggcacaug

SEQ ID NO: 2103947 - RNA, 19 nt, Artificial Sequence
  Description of Artificial Sequence: Synthetic oligonucleotide
  Antisense strand to SEQ ID NO: 2103946
caugugcccagauuuccua

SEQ ID NO: 2103948 - RNA, 19 nt, Artificial Sequence
  Description of Artificial Sequence: Synthetic oligonucleotide
  Sense strand starting at position 3147 of SEQ ID NO: 1882216
uuagaagcgcugcaaauuu

SEQ ID NO: 2103949 - RNA, 19 nt, Artificial Sequence
  Description of Artificial Sequence: Synthetic oligonucleotide
  Antisense strand to SEQ ID NO: 2103948
aaauuugcagcgcuucuaa

SEQ ID NO: 2103950 - RNA, 19 nt, Artificial Sequence
  Description of Artificial Sequence: Synthetic oligonucleotide
  Sense strand starting at position 3156 of SEQ ID NO: 1882216
cugcaaauuucuuaaagga

SEQ ID NO: 2103951 - RNA, 19 nt, Artificial Sequence
  Description of Artificial Sequence: Synthetic oligonucleotide
  Antisense strand to SEQ ID NO: 2103950
uccuuuaagaaauuugcag

SEQ ID NO: 2103952 - RNA, 19 nt, Artificial Sequence
  Description of Artificial Sequence: Synthetic oligonucleotide
  Sense strand starting at position 3306 of SEQ ID NO: 1882216
ugucccaaauuccuaguaa

SEQ ID NO: 2103953 - RNA, 19 nt, Artificial Sequence
  Description of Artificial Sequence: Synthetic oligonucleotide
  Antisense strand to SEQ ID NO: 2103952
uuacuaggaauuugggaca

SEQ ID NO: 2103954 - RNA, 19 nt, Artificial Sequence
  Description of Artificial Sequence: Synthetic oligonucleotide
  Sense strand starting at position 3368 of SEQ ID NO: 1882216
aaauguauuugacaggaag

SEQ ID NO: 2103955 - RNA, 19 nt, Artificial Sequence
  Description of Artificial Sequence: Synthetic oligonucleotide
  Antisense strand to SEQ ID NO: 2103954
cuuccugucaaauacauuu

SEQ ID NO: 2103956 - RNA, 19 nt, Artificial Sequence
  Description of Artificial Sequence: Synthetic oligonucleotide
  Sense strand starting at position 3423 of SEQ ID NO: 1882216
uguucuuacgaguacagau

SEQ ID NO: 2103957 - RNA, 19 nt, Artificial Sequence
  Description of Artificial Sequence: Synthetic oligonucleotide
  Antisense strand to SEQ ID NO: 2103956
aucuguacucguaagaaca

SEQ ID NO: 2103958 - RNA, 19 nt, Artificial Sequence
  Description of Artificial Sequence: Synthetic oligonucleotide
  Sense strand starting at position 3425 of SEQ ID NO: 1882216
uucuuacgaguacagauau

SEQ ID NO: 2103959 - RNA, 19 nt, Artificial Sequence
  Description of Artificial Sequence: Synthetic oligonucleotide
  Antisense strand to SEQ ID NO: 2103958
auaucuguacucguaagaa

SEQ ID NO: 2103960 - RNA, 19 nt, Artificial Sequence
  Description of Artificial Sequence: Synthetic oligonucleotide
  Sense strand starting at position 3469 of SEQ ID NO: 1882216
gaggcaauuccuggaauaa

SEQ ID NO: 2103961 - RNA, 19 nt, Artificial Sequence
  Description of Artificial Sequence: Synthetic oligonucleotide
  Antisense strand to SEQ ID NO: 2103960
uuauuccaggaauugccuc

SEQ ID NO: 2103962 - RNA, 19 nt, Artificial Sequence
  Description of Artificial Sequence: Synthetic oligonucleotide
  Sense strand starting at position 3479 of SEQ ID NO: 1882216
cuggaauaauuagucuaag

SEQ ID NO: 2103963 - RNA, 19 nt, Artificial Sequence
  Description of Artificial Sequence: Synthetic oligonucleotide
  Antisense strand to SEQ ID NO: 2103962
cuuagacuaauuauuccag

SEQ ID NO: 2103964 - RNA, 19 nt, Artificial Sequence
  Description of Artificial Sequence: Synthetic oligonucleotide
  Sense strand starting at position 3701 of SEQ ID NO: 1882216
cuguguauuguuuaaauga

SEQ ID NO: 2103965 - RNA, 19 nt, Artificial Sequence
  Description of Artificial Sequence: Synthetic oligonucleotide
  Antisense strand to SEQ ID NO: 2103964
ucauuuaaacaauacacag

SEQ ID NO: 2103966 - RNA, 19 nt, Artificial Sequence
  Description of Artificial Sequence: Synthetic oligonucleotide
  Sense strand starting at position 99 of SEQ ID NO: 1882217
gugucaggucuucaggauu

SEQ ID NO: 2103967 - RNA, 19 nt, Artificial Sequence
  Description of Artificial Sequence: Synthetic oligonucleotide
  Antisense strand to SEQ ID NO: 2103966
aauccugaagaccugacac

SEQ ID NO: 2103968 - RNA, 19 nt, Artificial Sequence
  Description of Artificial Sequence: Synthetic oligonucleotide
  Sense strand starting at position 121 of SEQ ID NO: 1882217
agugguuaguuagcauuua

SEQ ID NO: 2103969 - RNA, 19 nt, Artificial Sequence
  Description of Artificial Sequence: Synthetic oligonucleotide
  Antisense strand to SEQ ID NO: 2103968
uaaaugcuaacuaaccacu

SEQ ID NO: 2103970 - RNA, 19 nt, Artificial Sequence
  Description of Artificial Sequence: Synthetic oligonucleotide
  Sense strand starting at position 166 of SEQ ID NO: 1882217
ccuugauacuagguacaga

SEQ ID NO: 2103971 - RNA, 19 nt, Artificial Sequence
  Description of Artificial Sequence: Synthetic oligonucleotide
  Antisense strand to SEQ ID NO: 2103970
ucuguaccuaguaucaagg

SEQ ID NO: 2103972 - RNA, 19 nt, Artificial Sequence
  Description of Artificial Sequence: Synthetic oligonucleotide
  Sense strand starting at position 186 of SEQ ID NO: 1882217
caaaguaaaucugugugaa

SEQ ID NO: 2103973 - RNA, 19 nt, Artificial Sequence
  Description of Artificial Sequence: Synthetic oligonucleotide
  Antisense strand to SEQ ID NO: 2103972
uucacacagauuuacuuug

SEQ ID NO: 2103974 - RNA, 19 nt, Artificial Sequence
  Description of Artificial Sequence: Synthetic oligonucleotide
  Sense strand starting at position 187 of SEQ ID NO: 1882217
aaaguaaaucugugugaac

SEQ ID NO: 2103975 - RNA, 19 nt, Artificial Sequence
  Description of Artificial Sequence: Synthetic oligonucleotide
  Antisense strand to SEQ ID NO: 2103974
guucacacagauuuacuuu

SEQ ID NO: 2103976 - RNA, 19 nt, Artificial Sequence
  Description of Artificial Sequence: Synthetic oligonucleotide
  Sense strand starting at position 200 of SEQ ID NO: 1882217
gugaacguuagacagcauu

SEQ ID NO: 2103977 - RNA, 19 nt, Artificial Sequence
  Description of Artificial Sequence: Synthetic oligonucleotide
  Antisense strand to SEQ ID NO: 2103976
aaugcugucuaacguucac

SEQ ID NO: 2103978 - RNA, 19 nt, Artificial Sequence
  Description of Artificial Sequence: Synthetic oligonucleotide
  Sense strand starting at position 203 of SEQ ID NO: 1882217
aacguuagacagcauucua

SEQ ID NO: 2103979 - RNA, 19 nt, Artificial Sequence
  Description of Artificial Sequence: Synthetic oligonucleotide
  Antisense strand to SEQ ID NO: 2103978
uagaaugcugucuaacguu

SEQ ID NO: 2103980 - RNA, 19 nt, Artificial Sequence
  Description of Artificial Sequence: Synthetic oligonucleotide
  Sense strand starting at position 234 of SEQ ID NO: 1882217
agguaacucguggacaacu

SEQ ID NO: 2103981 - RNA, 19 nt, Artificial Sequence
  Description of Artificial Sequence: Synthetic oligonucleotide
  Antisense strand to SEQ ID NO: 2103980
aguuguccacgaguuaccu

SEQ ID NO: 2103982 - RNA, 19 nt, Artificial Sequence
  Description of Artificial Sequence: Synthetic oligonucleotide
  Sense strand starting at position 419 of SEQ ID NO: 1882217
guuacugguguugagaauu

SEQ ID NO: 2103983 - RNA, 19 nt, Artificial Sequence
  Description of Artificial Sequence: Synthetic oligonucleotide
  Antisense strand to SEQ ID NO: 2103982
aauucucaacaccaguaac

SEQ ID NO: 2103984 - RNA, 19 nt, Artificial Sequence
  Description of Artificial Sequence: Synthetic oligonucleotide
  Sense strand starting at position 489 of SEQ ID NO: 1882217
uugcuauuucuuuggcagu

SEQ ID NO: 2103985 - RNA, 19 nt, Artificial Sequence
  Description of Artificial Sequence: Synthetic oligonucleotide
  Antisense strand to SEQ ID NO: 2103984
acugccaaagaaauagcaa

SEQ ID NO: 2103986 - RNA, 19 nt, Artificial Sequence
  Description of Artificial Sequence: Synthetic oligonucleotide
  Sense strand starting at position 491 of SEQ ID NO: 1882217
gcuauuucuuuggcaguca

SEQ ID NO: 2103987 - RNA, 19 nt, Artificial Sequence
  Description of Artificial Sequence: Synthetic oligonucleotide
  Antisense strand to SEQ ID NO: 2103986
ugacugccaaagaaauagc

SEQ ID NO: 2103988 - RNA, 19 nt, Artificial Sequence
  Description of Artificial Sequence: Synthetic oligonucleotide
  Sense strand starting at position 499 of SEQ ID NO: 1882217
uuuggcagucauugagaaa

SEQ ID NO: 2103989 - RNA, 19 nt, Artificial Sequence
  Description of Artificial Sequence: Synthetic oligonucleotide
  Antisense strand to SEQ ID NO: 2103988
uuucucaaugacugccaaa

SEQ ID NO: 2103990 - RNA, 19 nt, Artificial Sequence
  Description of Artificial Sequence: Synthetic oligonucleotide
  Sense strand starting at position 636 of SEQ ID NO: 1882217
gcaacaauaucaguucuag

SEQ ID NO: 2103991 - RNA, 19 nt, Artificial Sequence
  Description of Artificial Sequence: Synthetic oligonucleotide
  Antisense strand to SEQ ID NO: 2103990
cuagaacugauauuguugc

SEQ ID NO: 2103992 - RNA, 19 nt, Artificial Sequence
  Description of Artificial Sequence: Synthetic oligonucleotide
  Sense strand starting at position 642 of SEQ ID NO: 1882217
auaucaguucuaggaaaug

SEQ ID NO: 2103993 - RNA, 19 nt, Artificial Sequence
  Description of Artificial Sequence: Synthetic oligonucleotide
  Antisense strand to SEQ ID NO: 2103992
cauuuccuagaacugauau

SEQ ID NO: 2103994 - RNA, 19 nt, Artificial Sequence
  Description of Artificial Sequence: Synthetic oligonucleotide
  Sense strand starting at position 648 of SEQ ID NO: 1882217
guucuaggaaauggucaga

SEQ ID NO: 2103995 - RNA, 19 nt, Artificial Sequence
  Description of Artificial Sequence: Synthetic oligonucleotide
  Antisense strand to SEQ ID NO: 2103994
ucugaccauuuccuagaac

SEQ ID NO: 2103996 - RNA, 19 nt, Artificial Sequence
  Description of Artificial Sequence: Synthetic oligonucleotide
  Sense strand starting at position 709 of SEQ ID NO: 1882217
uuuguuuaguaaucacaac

SEQ ID NO: 2103997 - RNA, 19 nt, Artificial Sequence
  Description of Artificial Sequence: Synthetic oligonucleotide
  Antisense strand to SEQ ID NO: 2103996
guugugauuacuaaacaaa

SEQ ID NO: 2103998 - RNA, 19 nt, Artificial Sequence
  Description of Artificial Sequence: Synthetic oligonucleotide
  Sense strand starting at position 868 of SEQ ID NO: 1882217
aggcuugggucuuugaaua

SEQ ID NO: 2103999 - RNA, 19 nt, Artificial Sequence
  Description of Artificial Sequence: Synthetic oligonucleotide
  Antisense strand to SEQ ID NO: 2103998
uauucaaagacccaagccu

SEQ ID NO: 2104000 - RNA, 19 nt, Artificial Sequence
  Description of Artificial Sequence: Synthetic oligonucleotide
  Sense strand starting at position 1086 of SEQ ID NO: 1882217
ggccuaaacacgcaagagu

SEQ ID NO: 2104001 - RNA, 19 nt, Artificial Sequence
  Description of Artificial Sequence: Synthetic oligonucleotide
  Antisense strand to SEQ ID NO: 2104000
acucuugcguguuuaggcc

SEQ ID NO: 2104002 - RNA, 19 nt, Artificial Sequence
  Description of Artificial Sequence: Synthetic oligonucleotide
  Sense strand starting at position 1170 of SEQ ID NO: 1882217
ugccaaaucuaauugcaag

SEQ ID NO: 2104003 - RNA, 19 nt, Artificial Sequence
  Description of Artificial Sequence: Synthetic oligonucleotide
  Antisense strand to SEQ ID NO: 2104002
cuugcaauuagauuuggca

SEQ ID NO: 2104004 - RNA, 19 nt, Artificial Sequence
  Description of Artificial Sequence: Synthetic oligonucleotide
  Sense strand starting at position 1212 of SEQ ID NO: 1882217
aaaggacucuugguaccuu

SEQ ID NO: 2104005 - RNA, 19 nt, Artificial Sequence
  Description of Artificial Sequence: Synthetic oligonucleotide
  Antisense strand to SEQ ID NO: 2104004
aagguaccaagaguccuuu

SEQ ID NO: 2104006 - RNA, 19 nt, Artificial Sequence
  Description of Artificial Sequence: Synthetic oligonucleotide
  Sense strand starting at position 1233 of SEQ ID NO: 1882217
ggcuaaauccucgauaucu

SEQ ID NO: 2104007 - RNA, 19 nt, Artificial Sequence
  Description of Artificial Sequence: Synthetic oligonucleotide
  Antisense strand to SEQ ID NO: 2104006
agauaucgaggauuuagcc

SEQ ID NO: 2104008 - RNA, 19 nt, Artificial Sequence
  Description of Artificial Sequence: Synthetic oligonucleotide
  Sense strand starting at position 1563 of SEQ ID NO: 1882217
agguuuaguggcuaccuga

SEQ ID NO: 2104009 - RNA, 19 nt, Artificial Sequence
  Description of Artificial Sequence: Synthetic oligonucleotide
  Antisense strand to SEQ ID NO: 2104008
ucagguagccacuaaaccu

SEQ ID NO: 2104010 - RNA, 19 nt, Artificial Sequence
  Description of Artificial Sequence: Synthetic oligonucleotide
  Sense strand starting at position 1599 of SEQ ID NO: 1882217
cccugauaugaauguaaau

SEQ ID NO: 2104011 - RNA, 19 nt, Artificial Sequence
  Description of Artificial Sequence: Synthetic oligonucleotide
  Antisense strand to SEQ ID NO: 2104010
auuuacauucauaucaggg

SEQ ID NO: 2104012 - RNA, 19 nt, Artificial Sequence
  Description of Artificial Sequence: Synthetic oligonucleotide
  Sense strand starting at position 1734 of SEQ ID NO: 1882217
ugcucauaucguuucuguu

SEQ ID NO: 2104013 - RNA, 19 nt, Artificial Sequence
  Description of Artificial Sequence: Synthetic oligonucleotide
  Antisense strand to SEQ ID NO: 2104012
aacagaaacgauaugagca

SEQ ID NO: 2104014 - RNA, 19 nt, Artificial Sequence
  Description of Artificial Sequence: Synthetic oligonucleotide
  Sense strand starting at position 1985 of SEQ ID NO: 1882217
ucagucuugggucaaauag

SEQ ID NO: 2104015 - RNA, 19 nt, Artificial Sequence
  Description of Artificial Sequence: Synthetic oligonucleotide
  Antisense strand to SEQ ID NO: 2104014
cuauuugacccaagacuga

SEQ ID NO: 2104016 - RNA, 19 nt, Artificial Sequence
  Description of Artificial Sequence: Synthetic oligonucleotide
  Sense strand starting at position 2022 of SEQ ID NO: 1882217
cugguuaagucuuccaaga

SEQ ID NO: 2104017 - RNA, 19 nt, Artificial Sequence
  Description of Artificial Sequence: Synthetic oligonucleotide
  Antisense strand to SEQ ID NO: 2104016
ucuuggaagacuuaaccag

SEQ ID NO: 2104018 - RNA, 19 nt, Artificial Sequence
  Description of Artificial Sequence: Synthetic oligonucleotide
  Sense strand starting at position 2322 of SEQ ID NO: 1882217
gaaacuagccguuacacuu

SEQ ID NO: 2104019 - RNA, 19 nt, Artificial Sequence
  Description of Artificial Sequence: Synthetic oligonucleotide
  Antisense strand to SEQ ID NO: 2104018
aaguguaacggcuaguuuc

SEQ ID NO: 2104020 - RNA, 19 nt, Artificial Sequence
  Description of Artificial Sequence: Synthetic oligonucleotide
  Sense strand starting at position 2433 of SEQ ID NO: 1882217
uugcaaauccaugguagga

SEQ ID NO: 2104021 - RNA, 19 nt, Artificial Sequence
  Description of Artificial Sequence: Synthetic oligonucleotide
  Antisense strand to SEQ ID NO: 2104020
uccuaccauggauuugcaa

SEQ ID NO: 2104022 - RNA, 19 nt, Artificial Sequence
  Description of Artificial Sequence: Synthetic oligonucleotide
  Sense strand starting at position 2446 of SEQ ID NO: 1882217
guaggaaaucugggcacau

SEQ ID NO: 2104023 - RNA, 19 nt, Artificial Sequence
  Description of Artificial Sequence: Synthetic oligonucleotide
  Antisense strand to SEQ ID NO: 2104022
augugcccagauuuccuac

SEQ ID NO: 2104024 - RNA, 19 nt, Artificial Sequence
  Description of Artificial Sequence: Synthetic oligonucleotide
  Sense strand starting at position 2447 of SEQ ID NO: 1882217
uaggaaaucugggcacaug

SEQ ID NO: 2104025 - RNA, 19 nt, Artificial Sequence
  Description of Artificial Sequence: Synthetic oligonucleotide
  Antisense strand to SEQ ID NO: 2104024
caugugcccagauuuccua

SEQ ID NO: 2104026 - RNA, 19 nt, Artificial Sequence
  Description of Artificial Sequence: Synthetic oligonucleotide
  Sense strand starting at position 2578 of SEQ ID NO: 1882217
uuagaagcgcugcaaauuu

SEQ ID NO: 2104027 - RNA, 19 nt, Artificial Sequence
  Description of Artificial Sequence: Synthetic oligonucleotide
  Antisense strand to SEQ ID NO: 2104026
aaauuugcagcgcuucuaa

SEQ ID NO: 2104028 - RNA, 19 nt, Artificial Sequence
  Description of Artificial Sequence: Synthetic oligonucleotide
  Sense strand starting at position 2587 of SEQ ID NO: 1882217
cugcaaauuucuuaaagga

SEQ ID NO: 2104029 - RNA, 19 nt, Artificial Sequence
  Description of Artificial Sequence: Synthetic oligonucleotide
  Antisense strand to SEQ ID NO: 2104028
uccuuuaagaaauuugcag

SEQ ID NO: 2104030 - RNA, 19 nt, Artificial Sequence
  Description of Artificial Sequence: Synthetic oligonucleotide
  Sense strand starting at position 2679 of SEQ ID NO: 1882217
ggcauagcucuguaauauu

SEQ ID NO: 2104031 - RNA, 19 nt, Artificial Sequence
  Description of Artificial Sequence: Synthetic oligonucleotide
  Antisense strand to SEQ ID NO: 2104030
aauauuacagagcuaugcc

SEQ ID NO: 2104032 - RNA, 19 nt, Artificial Sequence
  Description of Artificial Sequence: Synthetic oligonucleotide
  Sense strand starting at position 2737 of SEQ ID NO: 1882217
ugucccaaauuccuaguaa

SEQ ID NO: 2104033 - RNA, 19 nt, Artificial Sequence
  Description of Artificial Sequence: Synthetic oligonucleotide
  Antisense strand to SEQ ID NO: 2104032
uuacuaggaauuugggaca

SEQ ID NO: 2104034 - RNA, 19 nt, Artificial Sequence
  Description of Artificial Sequence: Synthetic oligonucleotide
  Sense strand starting at position 2799 of SEQ ID NO: 1882217
aaauguauuugacaggaag

SEQ ID NO: 2104035 - RNA, 19 nt, Artificial Sequence
  Description of Artificial Sequence: Synthetic oligonucleotide
  Antisense strand to SEQ ID NO: 2104034
cuuccugucaaauacauuu

SEQ ID NO: 2104036 - RNA, 19 nt, Artificial Sequence
  Description of Artificial Sequence: Synthetic oligonucleotide
  Sense strand starting at position 2854 of SEQ ID NO: 1882217
uguucuuacgaguacagau

SEQ ID NO: 2104037 - RNA, 19 nt, Artificial Sequence
  Description of Artificial Sequence: Synthetic oligonucleotide
  Antisense strand to SEQ ID NO: 2104036
aucuguacucguaagaaca

SEQ ID NO: 2104038 - RNA, 19 nt, Artificial Sequence
  Description of Artificial Sequence: Synthetic oligonucleotide
  Sense strand starting at position 2856 of SEQ ID NO: 1882217
uucuuacgaguacagauau

SEQ ID NO: 2104039 - RNA, 19 nt, Artificial Sequence
  Description of Artificial Sequence: Synthetic oligonucleotide
  Antisense strand to SEQ ID NO: 2104038
auaucuguacucguaagaa

SEQ ID NO: 2104040 - RNA, 19 nt, Artificial Sequence
  Description of Artificial Sequence: Synthetic oligonucleotide
  Sense strand starting at position 2900 of SEQ ID NO: 1882217
gaggcaauuccuggaauaa

SEQ ID NO: 2104041 - RNA, 19 nt, Artificial Sequence
  Description of Artificial Sequence: Synthetic oligonucleotide
  Antisense strand to SEQ ID NO: 2104040
uuauuccaggaauugccuc

SEQ ID NO: 2104042 - RNA, 19 nt, Artificial Sequence
  Description of Artificial Sequence: Synthetic oligonucleotide
  Sense strand starting at position 2910 of SEQ ID NO: 1882217
cuggaauaauuagucuaag

SEQ ID NO: 2104043 - RNA, 19 nt, Artificial Sequence
  Description of Artificial Sequence: Synthetic oligonucleotide
  Antisense strand to SEQ ID NO: 2104042
cuuagacuaauuauuccag

SEQ ID NO: 2104044 - RNA, 19 nt, Artificial Sequence
  Description of Artificial Sequence: Synthetic oligonucleotide
  Sense strand starting at position 3132 of SEQ ID NO: 1882217
cuguguauuguuuaaauga

SEQ ID NO: 2104045 - RNA, 19 nt, Artificial Sequence
  Description of Artificial Sequence: Synthetic oligonucleotide
  Antisense strand to SEQ ID NO: 2104044
ucauuuaaacaauacacag

SEQ ID NO: 2104046 - RNA, 19 nt, Artificial Sequence
  Description of Artificial Sequence: Synthetic oligonucleotide
  Sense strand starting at position 979 of SEQ ID NO: 1882218
cuggcaugauuccuucuca

SEQ ID NO: 2104047 - RNA, 19 nt, Artificial Sequence
  Description of Artificial Sequence: Synthetic oligonucleotide
  Antisense strand to SEQ ID NO: 2104046
ugagaaggaaucaugccag

SEQ ID NO: 2104048 - RNA, 19 nt, Artificial Sequence
  Description of Artificial Sequence: Synthetic oligonucleotide
  Sense strand starting at position 980 of SEQ ID NO: 1882218
uggcaugauuccuucucaa

SEQ ID NO: 2104049 - RNA, 19 nt, Artificial Sequence
  Description of Artificial Sequence: Synthetic oligonucleotide
  Antisense strand to SEQ ID NO: 2104048
uugagaaggaaucaugcca

SEQ ID NO: 2104050 - RNA, 19 nt, Artificial Sequence
  Description of Artificial Sequence: Synthetic oligonucleotide
  Sense strand starting at position 1266 of SEQ ID NO: 1882218
gcacaaucgccugacggaa

SEQ ID NO: 2104051 - RNA, 19 nt, Artificial Sequence
  Description of Artificial Sequence: Synthetic oligonucleotide
  Antisense strand to SEQ ID NO: 2104050
uuccgucaggcgauugugc

SEQ ID NO: 2104052 - RNA, 19 nt, Artificial Sequence
  Description of Artificial Sequence: Synthetic oligonucleotide
  Sense strand starting at position 1280 of SEQ ID NO: 1882218
cggaaauaacacugcacuu

SEQ ID NO: 2104053 - RNA, 19 nt, Artificial Sequence
  Description of Artificial Sequence: Synthetic oligonucleotide
  Antisense strand to SEQ ID NO: 2104052
aagugcaguguuauuuccg

SEQ ID NO: 2104054 - RNA, 19 nt, Artificial Sequence
  Description of Artificial Sequence: Synthetic oligonucleotide
  Sense strand starting at position 1430 of SEQ ID NO: 1882218
gaugcuuccgggugucaga

SEQ ID NO: 2104055 - RNA, 19 nt, Artificial Sequence
  Description of Artificial Sequence: Synthetic oligonucleotide
  Antisense strand to SEQ ID NO: 2104054
ucugacacccggaagcauc

SEQ ID NO: 2104056 - RNA, 19 nt, Artificial Sequence
  Description of Artificial Sequence: Synthetic oligonucleotide
  Sense strand starting at position 1891 of SEQ ID NO: 1882218
uugcguaugcauucacgaa

SEQ ID NO: 2104057 - RNA, 19 nt, Artificial Sequence
  Description of Artificial Sequence: Synthetic oligonucleotide
  Antisense strand to SEQ ID NO: 2104056
uucgugaaugcauacgcaa

SEQ ID NO: 2104058 - RNA, 19 nt, Artificial Sequence
  Description of Artificial Sequence: Synthetic oligonucleotide
  Sense strand starting at position 1912 of SEQ ID NO: 1882218
uaaaucuuuccgggccgaa

SEQ ID NO: 2104059 - RNA, 19 nt, Artificial Sequence
  Description of Artificial Sequence: Synthetic oligonucleotide
  Antisense strand to SEQ ID NO: 2104058
uucggcccggaaagauuua

SEQ ID NO: 2104060 - RNA, 19 nt, Artificial Sequence
  Description of Artificial Sequence: Synthetic oligonucleotide
  Sense strand starting at position 2093 of SEQ ID NO: 1882218
aacgauuuaugagacgaau

SEQ ID NO: 2104061 - RNA, 19 nt, Artificial Sequence
  Description of Artificial Sequence: Synthetic oligonucleotide
  Antisense strand to SEQ ID NO: 2104060
auucgucucauaaaucguu

SEQ ID NO: 2104062 - RNA, 19 nt, Artificial Sequence
  Description of Artificial Sequence: Synthetic oligonucleotide
  Sense strand starting at position 2099 of SEQ ID NO: 1882218
uuaugagacgaauguaaua

SEQ ID NO: 2104063 - RNA, 19 nt, Artificial Sequence
  Description of Artificial Sequence: Synthetic oligonucleotide
  Antisense strand to SEQ ID NO: 2104062
uauuacauucgucucauaa

SEQ ID NO: 2104064 - RNA, 19 nt, Artificial Sequence
  Description of Artificial Sequence: Synthetic oligonucleotide
  Sense strand starting at position 2139 of SEQ ID NO: 1882218
agaccaggcuaucaaagaa

SEQ ID NO: 2104065 - RNA, 19 nt, Artificial Sequence
  Description of Artificial Sequence: Synthetic oligonucleotide
  Antisense strand to SEQ ID NO: 2104064
uucuuugauagccuggucu

SEQ ID NO: 2104066 - RNA, 19 nt, Artificial Sequence
  Description of Artificial Sequence: Synthetic oligonucleotide
  Sense strand starting at position 2335 of SEQ ID NO: 1882218
cauuacuguuccuuguguu

SEQ ID NO: 2104067 - RNA, 19 nt, Artificial Sequence
  Description of Artificial Sequence: Synthetic oligonucleotide
  Antisense strand to SEQ ID NO: 2104066
aacacaaggaacaguaaug

SEQ ID NO: 2104068 - RNA, 19 nt, Artificial Sequence
  Description of Artificial Sequence: Synthetic oligonucleotide
  Sense strand starting at position 2339 of SEQ ID NO: 1882218
acuguuccuuguguugaga

SEQ ID NO: 2104069 - RNA, 19 nt, Artificial Sequence
  Description of Artificial Sequence: Synthetic oligonucleotide
  Antisense strand to SEQ ID NO: 2104068
ucucaacacaaggaacagu

SEQ ID NO: 2104070 - RNA, 19 nt, Artificial Sequence
  Description of Artificial Sequence: Synthetic oligonucleotide
  Sense strand starting at position 2342 of SEQ ID NO: 1882218
guuccuuguguugagaaua

SEQ ID NO: 2104071 - RNA, 19 nt, Artificial Sequence
  Description of Artificial Sequence: Synthetic oligonucleotide
  Antisense strand to SEQ ID NO: 2104070
uauucucaacacaaggaac

SEQ ID NO: 2104072 - RNA, 19 nt, Artificial Sequence
  Description of Artificial Sequence: Synthetic oligonucleotide
  Sense strand starting at position 2350 of SEQ ID NO: 1882218
uguugagaauaugcuguaa

SEQ ID NO: 2104073 - RNA, 19 nt, Artificial Sequence
  Description of Artificial Sequence: Synthetic oligonucleotide
  Antisense strand to SEQ ID NO: 2104072
uuacagcauauucucaaca

SEQ ID NO: 2104074 - RNA, 19 nt, Artificial Sequence
  Description of Artificial Sequence: Synthetic oligonucleotide
  Sense strand starting at position 2362 of SEQ ID NO: 1882218
gcuguaagagcugugucga

SEQ ID NO: 2104075 - RNA, 19 nt, Artificial Sequence
  Description of Artificial Sequence: Synthetic oligonucleotide
  Antisense strand to SEQ ID NO: 2104074
ucgacacagcucuuacagc

SEQ ID NO: 2104076 - RNA, 19 nt, Artificial Sequence
  Description of Artificial Sequence: Synthetic oligonucleotide
  Sense strand starting at position 2431 of SEQ ID NO: 1882218
gcaagaaguucuuccacag

SEQ ID NO: 2104077 - RNA, 19 nt, Artificial Sequence
  Description of Artificial Sequence: Synthetic oligonucleotide
  Antisense strand to SEQ ID NO: 2104076
cuguggaagaacuucuugc

SEQ ID NO: 2104078 - RNA, 19 nt, Artificial Sequence
  Description of Artificial Sequence: Synthetic oligonucleotide
  Sense strand starting at position 2532 of SEQ ID NO: 1882218
aagucuugcugucccagau

SEQ ID NO: 2104079 - RNA, 19 nt, Artificial Sequence
  Description of Artificial Sequence: Synthetic oligonucleotide
  Antisense strand to SEQ ID NO: 2104078
aucugggacagcaagacuu

SEQ ID NO: 2104080 - RNA, 19 nt, Artificial Sequence
  Description of Artificial Sequence: Synthetic oligonucleotide
  Sense strand starting at position 2657 of SEQ ID NO: 1882218
aguguuuauuucuuguacu

SEQ ID NO: 2104081 - RNA, 19 nt, Artificial Sequence
  Description of Artificial Sequence: Synthetic oligonucleotide
  Antisense strand to SEQ ID NO: 2104080
aguacaagaaauaaacacu

SEQ ID NO: 2104082 - RNA, 19 nt, Artificial Sequence
  Description of Artificial Sequence: Synthetic oligonucleotide
  Sense strand starting at position 2670 of SEQ ID NO: 1882218
uguacuuacccucaaguau

SEQ ID NO: 2104083 - RNA, 19 nt, Artificial Sequence
  Description of Artificial Sequence: Synthetic oligonucleotide
  Antisense strand to SEQ ID NO: 2104082
auacuugaggguaaguaca

SEQ ID NO: 2104084 - RNA, 19 nt, Artificial Sequence
  Description of Artificial Sequence: Synthetic oligonucleotide
  Sense strand starting at position 2941 of SEQ ID NO: 1882218
ucaugucuuccuuagauug

SEQ ID NO: 2104085 - RNA, 19 nt, Artificial Sequence
  Description of Artificial Sequence: Synthetic oligonucleotide
  Antisense strand to SEQ ID NO: 2104084
caaucuaaggaagacauga

SEQ ID NO: 2104086 - RNA, 19 nt, Artificial Sequence
  Description of Artificial Sequence: Synthetic oligonucleotide
  Sense strand starting at position 2948 of SEQ ID NO: 1882218
uuccuuagauugguacuga

SEQ ID NO: 2104087 - RNA, 19 nt, Artificial Sequence
  Description of Artificial Sequence: Synthetic oligonucleotide
  Antisense strand to SEQ ID NO: 2104086
ucaguaccaaucuaaggaa

SEQ ID NO: 2104088 - RNA, 19 nt, Artificial Sequence
  Description of Artificial Sequence: Synthetic oligonucleotide
  Sense strand starting at position 3061 of SEQ ID NO: 1882218
uuaaguacauuguccauaa

SEQ ID NO: 2104089 - RNA, 19 nt, Artificial Sequence
  Description of Artificial Sequence: Synthetic oligonucleotide
  Antisense strand to SEQ ID NO: 2104088
uuauggacaauguacuuaa

SEQ ID NO: 2104090 - RNA, 19 nt, Artificial Sequence
  Description of Artificial Sequence: Synthetic oligonucleotide
  Sense strand starting at position 3065 of SEQ ID NO: 1882218
guacauuguccauaaucug

SEQ ID NO: 2104091 - RNA, 19 nt, Artificial Sequence
  Description of Artificial Sequence: Synthetic oligonucleotide
  Antisense strand to SEQ ID NO: 2104090
cagauuauggacaauguac

SEQ ID NO: 2104092 - RNA, 19 nt, Artificial Sequence
  Description of Artificial Sequence: Synthetic oligonucleotide
  Sense strand starting at position 3071 of SEQ ID NO: 1882218
uguccauaaucugaauuug

SEQ ID NO: 2104093 - RNA, 19 nt, Artificial Sequence
  Description of Artificial Sequence: Synthetic oligonucleotide
  Antisense strand to SEQ ID NO: 2104092
caaauucagauuauggaca

SEQ ID NO: 2104094 - RNA, 19 nt, Artificial Sequence
  Description of Artificial Sequence: Synthetic oligonucleotide
  Sense strand starting at position 3079 of SEQ ID NO: 1882218
aucugaauuuguuaguugu

SEQ ID NO: 2104095 - RNA, 19 nt, Artificial Sequence
  Description of Artificial Sequence: Synthetic oligonucleotide
  Antisense strand to SEQ ID NO: 2104094
acaacuaacaaauucagau

SEQ ID NO: 2104096 - RNA, 19 nt, Artificial Sequence
  Description of Artificial Sequence: Synthetic oligonucleotide
  Sense strand starting at position 3081 of SEQ ID NO: 1882218
cugaauuuguuaguuguau

SEQ ID NO: 2104097 - RNA, 19 nt, Artificial Sequence
  Description of Artificial Sequence: Synthetic oligonucleotide
  Antisense strand to SEQ ID NO: 2104096
auacaacuaacaaauucag

SEQ ID NO: 2104098 - RNA, 19 nt, Artificial Sequence
  Description of Artificial Sequence: Synthetic oligonucleotide
  Sense strand starting at position 3093 of SEQ ID NO: 1882218
guuguaugugcucucuuau

SEQ ID NO: 2104099 - RNA, 19 nt, Artificial Sequence
  Description of Artificial Sequence: Synthetic oligonucleotide
  Antisense strand to SEQ ID NO: 2104098
auaagagagcacauacaac

SEQ ID NO: 2104100 - RNA, 19 nt, Artificial Sequence
  Description of Artificial Sequence: Synthetic oligonucleotide
  Sense strand starting at position 3096 of SEQ ID NO: 1882218
guaugugcucucuuauguu

SEQ ID NO: 2104101 - RNA, 19 nt, Artificial Sequence
  Description of Artificial Sequence: Synthetic oligonucleotide
  Antisense strand to SEQ ID NO: 2104100
aacauaagagagcacauac

SEQ ID NO: 2104102 - RNA, 19 nt, Artificial Sequence
  Description of Artificial Sequence: Synthetic oligonucleotide
  Sense strand starting at position 3193 of SEQ ID NO: 1882218
ugcuaaagacaguauuaac

SEQ ID NO: 2104103 - RNA, 19 nt, Artificial Sequence
  Description of Artificial Sequence: Synthetic oligonucleotide
  Antisense strand to SEQ ID NO: 2104102
guuaauacugucuuuagca

SEQ ID NO: 2104104 - RNA, 19 nt, Artificial Sequence
  Description of Artificial Sequence: Synthetic oligonucleotide
  Sense strand starting at position 3221 of SEQ ID NO: 1882218
aauuaauuacauuggguga

SEQ ID NO: 2104105 - RNA, 19 nt, Artificial Sequence
  Description of Artificial Sequence: Synthetic oligonucleotide
  Antisense strand to SEQ ID NO: 2104104
ucacccaauguaauuaauu

SEQ ID NO: 2104106 - RNA, 19 nt, Artificial Sequence
  Description of Artificial Sequence: Synthetic oligonucleotide
  Sense strand starting at position 3251 of SEQ ID NO: 1882218
agcuuaugacccuguccaa

SEQ ID NO: 2104107 - RNA, 19 nt, Artificial Sequence
  Description of Artificial Sequence: Synthetic oligonucleotide
  Antisense strand to SEQ ID NO: 2104106
uuggacagggucauaagcu

SEQ ID NO: 2104108 - RNA, 19 nt, Artificial Sequence
  Description of Artificial Sequence: Synthetic oligonucleotide
  Sense strand starting at position 3368 of SEQ ID NO: 1882218
cuuggcuaaagccgugaaa

SEQ ID NO: 2104109 - RNA, 19 nt, Artificial Sequence
  Description of Artificial Sequence: Synthetic oligonucleotide
  Antisense strand to SEQ ID NO: 2104108
uuucacggcuuuagccaag

SEQ ID NO: 2104110 - RNA, 19 nt, Artificial Sequence
  Description of Artificial Sequence: Synthetic oligonucleotide
  Sense strand starting at position 3610 of SEQ ID NO: 1882218
agacauagauucuuguaug

SEQ ID NO: 2104111 - RNA, 19 nt, Artificial Sequence
  Description of Artificial Sequence: Synthetic oligonucleotide
  Antisense strand to SEQ ID NO: 2104110
cauacaagaaucuaugucu

SEQ ID NO: 2104112 - RNA, 19 nt, Artificial Sequence
  Description of Artificial Sequence: Synthetic oligonucleotide
  Sense strand starting at position 3702 of SEQ ID NO: 1882218
cgaacaaacuccuuugauu

SEQ ID NO: 2104113 - RNA, 19 nt, Artificial Sequence
  Description of Artificial Sequence: Synthetic oligonucleotide
  Antisense strand to SEQ ID NO: 2104112
aaucaaaggaguuuguucg

SEQ ID NO: 2104114 - RNA, 19 nt, Artificial Sequence
  Description of Artificial Sequence: Synthetic oligonucleotide
  Sense strand starting at position 3714 of SEQ ID NO: 1882218
uuugauuaccguuaccauc

SEQ ID NO: 2104115 - RNA, 19 nt, Artificial Sequence
  Description of Artificial Sequence: Synthetic oligonucleotide
  Antisense strand to SEQ ID NO: 2104114
gaugguaacgguaaucaaa

SEQ ID NO: 2104116 - RNA, 19 nt, Artificial Sequence
  Description of Artificial Sequence: Synthetic oligonucleotide
  Sense strand starting at position 3816 of SEQ ID NO: 1882218
uguuuagaaucaccaauag

SEQ ID NO: 2104117 - RNA, 19 nt, Artificial Sequence
  Description of Artificial Sequence: Synthetic oligonucleotide
  Antisense strand to SEQ ID NO: 2104116
cuauuggugauucuaaaca

SEQ ID NO: 2104118 - RNA, 19 nt, Artificial Sequence
  Description of Artificial Sequence: Synthetic oligonucleotide
  Sense strand starting at position 3834 of SEQ ID NO: 1882218
gcuuccagguugcuaaaua

SEQ ID NO: 2104119 - RNA, 19 nt, Artificial Sequence
  Description of Artificial Sequence: Synthetic oligonucleotide
  Antisense strand to SEQ ID NO: 2104118
uauuuagcaaccuggaagc

SEQ ID NO: 2104120 - RNA, 19 nt, Artificial Sequence
  Description of Artificial Sequence: Synthetic oligonucleotide
  Sense strand starting at position 3954 of SEQ ID NO: 1882218
ccauacauguaagaaagaa

SEQ ID NO: 2104121 - RNA, 19 nt, Artificial Sequence
  Description of Artificial Sequence: Synthetic oligonucleotide
  Antisense strand to SEQ ID NO: 2104120
uucuuucuuacauguaugg

SEQ ID NO: 2104122 - RNA, 19 nt, Artificial Sequence
  Description of Artificial Sequence: Synthetic oligonucleotide
  Sense strand starting at position 3978 of SEQ ID NO: 1882218
uaguuugaagcauggucuu

SEQ ID NO: 2104123 - RNA, 19 nt, Artificial Sequence
  Description of Artificial Sequence: Synthetic oligonucleotide
  Antisense strand to SEQ ID NO: 2104122
aagaccaugcuucaaacua

SEQ ID NO: 2104124 - RNA, 19 nt, Artificial Sequence
  Description of Artificial Sequence: Synthetic oligonucleotide
  Sense strand starting at position 3981 of SEQ ID NO: 1882218
uuugaagcauggucuuaaa

SEQ ID NO: 2104125 - RNA, 19 nt, Artificial Sequence
  Description of Artificial Sequence: Synthetic oligonucleotide
  Antisense strand to SEQ ID NO: 2104124
uuuaagaccaugcuucaaa

SEQ ID NO: 2104126 - RNA, 19 nt, Artificial Sequence
  Description of Artificial Sequence: Synthetic oligonucleotide
  Sense strand starting at position 820 of SEQ ID NO: 1882219
uuguccuccugccaggaaa

SEQ ID NO: 2104127 - RNA, 19 nt, Artificial Sequence
  Description of Artificial Sequence: Synthetic oligonucleotide
  Antisense strand to SEQ ID NO: 2104126
uuuccuggcaggaggacaa

SEQ ID NO: 2104128 - RNA, 19 nt, Artificial Sequence
  Description of Artificial Sequence: Synthetic oligonucleotide
  Sense strand starting at position 2377 of SEQ ID NO: 1882219
augugauuuguguggguuu

SEQ ID NO: 2104129 - RNA, 19 nt, Artificial Sequence
  Description of Artificial Sequence: Synthetic oligonucleotide
  Antisense strand to SEQ ID NO: 2104128
aaacccacacaaaucacau

SEQ ID NO: 2104130 - RNA, 19 nt, Artificial Sequence
  Description of Artificial Sequence: Synthetic oligonucleotide
  Sense strand starting at position 2379 of SEQ ID NO: 1882219
gugauuuguguggguuugu

SEQ ID NO: 2104131 - RNA, 19 nt, Artificial Sequence
  Description of Artificial Sequence: Synthetic oligonucleotide
  Antisense strand to SEQ ID NO: 2104130
acaaacccacacaaaucac

SEQ ID NO: 2104132 - RNA, 19 nt, Artificial Sequence
  Description of Artificial Sequence: Synthetic oligonucleotide
  Sense strand starting at position 2380 of SEQ ID NO: 1882219
ugauuuguguggguuuguu

SEQ ID NO: 2104133 - RNA, 19 nt, Artificial Sequence
  Description of Artificial Sequence: Synthetic oligonucleotide
  Antisense strand to SEQ ID NO: 2104132
aacaaacccacacaaauca

SEQ ID NO: 2104134 - RNA, 19 nt, Artificial Sequence
  Description of Artificial Sequence: Synthetic oligonucleotide
  Sense strand starting at position 2388 of SEQ ID NO: 1882219
guggguuuguuuguuaguu

SEQ ID NO: 2104135 - RNA, 19 nt, Artificial Sequence
  Description of Artificial Sequence: Synthetic oligonucleotide
  Antisense strand to SEQ ID NO: 2104134
aacuaacaaacaaacccac

SEQ ID NO: 2104136 - RNA, 19 nt, Artificial Sequence
  Description of Artificial Sequence: Synthetic oligonucleotide
  Sense strand starting at position 2390 of SEQ ID NO: 1882219
ggguuuguuuguuaguuua

SEQ ID NO: 2104137 - RNA, 19 nt, Artificial Sequence
  Description of Artificial Sequence: Synthetic oligonucleotide
  Antisense strand to SEQ ID NO: 2104136
uaaacuaacaaacaaaccc

SEQ ID NO: 2104138 - RNA, 19 nt, Artificial Sequence
  Description of Artificial Sequence: Synthetic oligonucleotide
  Sense strand starting at position 2753 of SEQ ID NO: 1882219
uugagcugguuugagacaa

SEQ ID NO: 2104139 - RNA, 19 nt, Artificial Sequence
  Description of Artificial Sequence: Synthetic oligonucleotide
  Antisense strand to SEQ ID NO: 2104138
uugucucaaaccagcucaa

SEQ ID NO: 2104140 - RNA, 19 nt, Artificial Sequence
  Description of Artificial Sequence: Synthetic oligonucleotide
  Sense strand starting at position 225 of SEQ ID NO: 1882220
ccaucacauguguguaaca

SEQ ID NO: 2104141 - RNA, 19 nt, Artificial Sequence
  Description of Artificial Sequence: Synthetic oligonucleotide
  Antisense strand to SEQ ID NO: 2104140
uguuacacacaugugaugg

SEQ ID NO: 2104142 - RNA, 19 nt, Artificial Sequence
  Description of Artificial Sequence: Synthetic oligonucleotide
  Sense strand starting at position 449 of SEQ ID NO: 1882220
uuggucacugggugaguaa

SEQ ID NO: 2104143 - RNA, 19 nt, Artificial Sequence
  Description of Artificial Sequence: Synthetic oligonucleotide
  Antisense strand to SEQ ID NO: 2104142
uuacucacccagugaccaa

SEQ ID NO: 2104144 - RNA, 19 nt, Artificial Sequence
  Description of Artificial Sequence: Synthetic oligonucleotide
  Sense strand starting at position 450 of SEQ ID NO: 1882220
uggucacugggugaguaaa

SEQ ID NO: 2104145 - RNA, 19 nt, Artificial Sequence
  Description of Artificial Sequence: Synthetic oligonucleotide
  Antisense strand to SEQ ID NO: 2104144
uuuacucacccagugacca

SEQ ID NO: 2104146 - RNA, 19 nt, Artificial Sequence
  Description of Artificial Sequence: Synthetic oligonucleotide
  Sense strand starting at position 610 of SEQ ID NO: 1882220
uggacuuccugauucuuua

SEQ ID NO: 2104147 - RNA, 19 nt, Artificial Sequence
  Description of Artificial Sequence: Synthetic oligonucleotide
  Antisense strand to SEQ ID NO: 2104146
uaaagaaucaggaagucca

SEQ ID NO: 2104148 - RNA, 19 nt, Artificial Sequence
  Description of Artificial Sequence: Synthetic oligonucleotide
  Sense strand starting at position 635 of SEQ ID NO: 1882220
aaggguuugcuauguuaac

SEQ ID NO: 2104149 - RNA, 19 nt, Artificial Sequence
  Description of Artificial Sequence: Synthetic oligonucleotide
  Antisense strand to SEQ ID NO: 2104148
guuaacauagcaaacccuu

SEQ ID NO: 2104150 - RNA, 19 nt, Artificial Sequence
  Description of Artificial Sequence: Synthetic oligonucleotide
  Sense strand starting at position 636 of SEQ ID NO: 1882220
aggguuugcuauguuaaca

SEQ ID NO: 2104151 - RNA, 19 nt, Artificial Sequence
  Description of Artificial Sequence: Synthetic oligonucleotide
  Antisense strand to SEQ ID NO: 2104150
uguuaacauagcaaacccu

SEQ ID NO: 2104152 - RNA, 19 nt, Artificial Sequence
  Description of Artificial Sequence: Synthetic oligonucleotide
  Sense strand starting at position 768 of SEQ ID NO: 1882220
cuuaguguaacagagguaa

SEQ ID NO: 2104153 - RNA, 19 nt, Artificial Sequence
  Description of Artificial Sequence: Synthetic oligonucleotide
  Antisense strand to SEQ ID NO: 2104152
uuaccucuguuacacuaag

SEQ ID NO: 2104154 - RNA, 19 nt, Artificial Sequence
  Description of Artificial Sequence: Synthetic oligonucleotide
  Sense strand starting at position 862 of SEQ ID NO: 1882220
aguuguuuccaguaaguuu

SEQ ID NO: 2104155 - RNA, 19 nt, Artificial Sequence
  Description of Artificial Sequence: Synthetic oligonucleotide
  Antisense strand to SEQ ID NO: 2104154
aaacuuacuggaaacaacu

SEQ ID NO: 2104156 - RNA, 19 nt, Artificial Sequence
  Description of Artificial Sequence: Synthetic oligonucleotide
  Sense strand starting at position 1006 of SEQ ID NO: 1882220
cucucuccucuggaucaga

SEQ ID NO: 2104157 - RNA, 19 nt, Artificial Sequence
  Description of Artificial Sequence: Synthetic oligonucleotide
  Antisense strand to SEQ ID NO: 2104156
ucugauccagaggagagag

SEQ ID NO: 2104158 - RNA, 19 nt, Artificial Sequence
  Description of Artificial Sequence: Synthetic oligonucleotide
  Sense strand starting at position 1065 of SEQ ID NO: 1882220
ugaagaggccuuugucagu

SEQ ID NO: 2104159 - RNA, 19 nt, Artificial Sequence
  Description of Artificial Sequence: Synthetic oligonucleotide
  Antisense strand to SEQ ID NO: 2104158
acugacaaaggccucuuca

SEQ ID NO: 2104160 - RNA, 19 nt, Artificial Sequence
  Description of Artificial Sequence: Synthetic oligonucleotide
  Sense strand starting at position 1293 of SEQ ID NO: 1882220
agaucagugcuguaacccu

SEQ ID NO: 2104161 - RNA, 19 nt, Artificial Sequence
  Description of Artificial Sequence: Synthetic oligonucleotide
  Antisense strand to SEQ ID NO: 2104160
aggguuacagcacugaucu

SEQ ID NO: 2104162 - RNA, 19 nt, Artificial Sequence
  Description of Artificial Sequence: Synthetic oligonucleotide
  Sense strand starting at position 1301 of SEQ ID NO: 1882220
gcuguaacccuguaacgaa

SEQ ID NO: 2104163 - RNA, 19 nt, Artificial Sequence
  Description of Artificial Sequence: Synthetic oligonucleotide
  Antisense strand to SEQ ID NO: 2104162
uucguuacaggguuacagc

SEQ ID NO: 2104164 - RNA, 19 nt, Artificial Sequence
  Description of Artificial Sequence: Synthetic oligonucleotide
  Sense strand starting at position 1320 of SEQ ID NO: 1882220
cagggugucucucccaaau

SEQ ID NO: 2104165 - RNA, 19 nt, Artificial Sequence
  Description of Artificial Sequence: Synthetic oligonucleotide
  Antisense strand to SEQ ID NO: 2104164
auuugggagagacacccug

SEQ ID NO: 2104166 - RNA, 19 nt, Artificial Sequence
  Description of Artificial Sequence: Synthetic oligonucleotide
  Sense strand starting at position 2245 of SEQ ID NO: 1882220
cggagaaaggcuuguuaau

SEQ ID NO: 2104167 - RNA, 19 nt, Artificial Sequence
  Description of Artificial Sequence: Synthetic oligonucleotide
  Antisense strand to SEQ ID NO: 2104166
auuaacaagccuuucuccg

SEQ ID NO: 2104168 - RNA, 19 nt, Artificial Sequence
  Description of Artificial Sequence: Synthetic oligonucleotide
  Sense strand starting at position 2247 of SEQ ID NO: 1882220
gagaaaggcuuguuaaugu

SEQ ID NO: 2104169 - RNA, 19 nt, Artificial Sequence
  Description of Artificial Sequence: Synthetic oligonucleotide
  Antisense strand to SEQ ID NO: 2104168
acauuaacaagccuuucuc

SEQ ID NO: 2104170 - RNA, 19 nt, Artificial Sequence
  Description of Artificial Sequence: Synthetic oligonucleotide
  Sense strand starting at position 2317 of SEQ ID NO: 1882220
ccguguuaccauuacagac

SEQ ID NO: 2104171 - RNA, 19 nt, Artificial Sequence
  Description of Artificial Sequence: Synthetic oligonucleotide
  Antisense strand to SEQ ID NO: 2104170
gucuguaaugguaacacgg

SEQ ID NO: 2104172 - RNA, 19 nt, Artificial Sequence
  Description of Artificial Sequence: Synthetic oligonucleotide
  Sense strand starting at position 2921 of SEQ ID NO: 1882220
ugcgucugugcugcagauu

SEQ ID NO: 2104173 - RNA, 19 nt, Artificial Sequence
  Description of Artificial Sequence: Synthetic oligonucleotide
  Antisense strand to SEQ ID NO: 2104172
aaucugcagcacagacgca

SEQ ID NO: 2104174 - RNA, 19 nt, Artificial Sequence
  Description of Artificial Sequence: Synthetic oligonucleotide
  Sense strand starting at position 2932 of SEQ ID NO: 1882220
ugcagauugcgucagaacu

SEQ ID NO: 2104175 - RNA, 19 nt, Artificial Sequence
  Description of Artificial Sequence: Synthetic oligonucleotide
  Antisense strand to SEQ ID NO: 2104174
aguucugacgcaaucugca

SEQ ID NO: 2104176 - RNA, 19 nt, Artificial Sequence
  Description of Artificial Sequence: Synthetic oligonucleotide
  Sense strand starting at position 3025 of SEQ ID NO: 1882220
ugacaugugaguuguucca

SEQ ID NO: 2104177 - RNA, 19 nt, Artificial Sequence
  Description of Artificial Sequence: Synthetic oligonucleotide
  Antisense strand to SEQ ID NO: 2104176
uggaacaacucacauguca

SEQ ID NO: 2104178 - RNA, 19 nt, Artificial Sequence
  Description of Artificial Sequence: Synthetic oligonucleotide
  Sense strand starting at position 3072 of SEQ ID NO: 1882220
aggacauuccuguaugagu

SEQ ID NO: 2104179 - RNA, 19 nt, Artificial Sequence
  Description of Artificial Sequence: Synthetic oligonucleotide
  Antisense strand to SEQ ID NO: 2104178
acucauacaggaauguccu

SEQ ID NO: 2104180 - RNA, 19 nt, Artificial Sequence
  Description of Artificial Sequence: Synthetic oligonucleotide
  Sense strand starting at position 3074 of SEQ ID NO: 1882220
gacauuccuguaugaguuu

SEQ ID NO: 2104181 - RNA, 19 nt, Artificial Sequence
  Description of Artificial Sequence: Synthetic oligonucleotide
  Antisense strand to SEQ ID NO: 2104180
aaacucauacaggaauguc

SEQ ID NO: 2104182 - RNA, 19 nt, Artificial Sequence
  Description of Artificial Sequence: Synthetic oligonucleotide
  Sense strand starting at position 3126 of SEQ ID NO: 1882220
gaggaauggcuggaucgua

SEQ ID NO: 2104183 - RNA, 19 nt, Artificial Sequence
  Description of Artificial Sequence: Synthetic oligonucleotide
  Antisense strand to SEQ ID NO: 2104182
uacgauccagccauuccuc

SEQ ID NO: 2104184 - RNA, 19 nt, Artificial Sequence
  Description of Artificial Sequence: Synthetic oligonucleotide
  Sense strand starting at position 3255 of SEQ ID NO: 1882220
cugucuuuaguccagcaga

SEQ ID NO: 2104185 - RNA, 19 nt, Artificial Sequence
  Description of Artificial Sequence: Synthetic oligonucleotide
  Antisense strand to SEQ ID NO: 2104184
ucugcuggacuaaagacag

SEQ ID NO: 2104186 - RNA, 19 nt, Artificial Sequence
  Description of Artificial Sequence: Synthetic oligonucleotide
  Sense strand starting at position 3258 of SEQ ID NO: 1882220
ucuuuaguccagcagaugu

SEQ ID NO: 2104187 - RNA, 19 nt, Artificial Sequence
  Description of Artificial Sequence: Synthetic oligonucleotide
  Antisense strand to SEQ ID NO: 2104186
acaucugcuggacuaaaga

SEQ ID NO: 2104188 - RNA, 19 nt, Artificial Sequence
  Description of Artificial Sequence: Synthetic oligonucleotide
  Sense strand starting at position 3340 of SEQ ID NO: 1882220
uuccaugugcuuguuguau

SEQ ID NO: 2104189 - RNA, 19 nt, Artificial Sequence
  Description of Artificial Sequence: Synthetic oligonucleotide
  Antisense strand to SEQ ID NO: 2104188
auacaacaagcacauggaa

SEQ ID NO: 2104190 - RNA, 19 nt, Artificial Sequence
  Description of Artificial Sequence: Synthetic oligonucleotide
  Sense strand starting at position 3352 of SEQ ID NO: 1882220
guuguauacuuccuuugga

SEQ ID NO: 2104191 - RNA, 19 nt, Artificial Sequence
  Description of Artificial Sequence: Synthetic oligonucleotide
  Antisense strand to SEQ ID NO: 2104190
uccaaaggaaguauacaac

SEQ ID NO: 2104192 - RNA, 19 nt, Artificial Sequence
  Description of Artificial Sequence: Synthetic oligonucleotide
  Sense strand starting at position 3355 of SEQ ID NO: 1882220
guauacuuccuuuggagaa

SEQ ID NO: 2104193 - RNA, 19 nt, Artificial Sequence
  Description of Artificial Sequence: Synthetic oligonucleotide
  Antisense strand to SEQ ID NO: 2104192
uucuccaaaggaaguauac

SEQ ID NO: 2104194 - RNA, 19 nt, Artificial Sequence
  Description of Artificial Sequence: Synthetic oligonucleotide
  Sense strand starting at position 3422 of SEQ ID NO: 1882220
guuauugagaugugaguau

SEQ ID NO: 2104195 - RNA, 19 nt, Artificial Sequence
  Description of Artificial Sequence: Synthetic oligonucleotide
  Antisense strand to SEQ ID NO: 2104194
auacucacaucucaauaac

SEQ ID NO: 2104196 - RNA, 19 nt, Artificial Sequence
  Description of Artificial Sequence: Synthetic oligonucleotide
  Sense strand starting at position 3578 of SEQ ID NO: 1882220
ggugaauuccaguguaucu

SEQ ID NO: 2104197 - RNA, 19 nt, Artificial Sequence
  Description of Artificial Sequence: Synthetic oligonucleotide
  Antisense strand to SEQ ID NO: 2104196
agauacacuggaauucacc

SEQ ID NO: 2104198 - RNA, 19 nt, Artificial Sequence
  Description of Artificial Sequence: Synthetic oligonucleotide
  Sense strand starting at position 3613 of SEQ ID NO: 1882220
uuaugcuuugggugaucua

SEQ ID NO: 2104199 - RNA, 19 nt, Artificial Sequence
  Description of Artificial Sequence: Synthetic oligonucleotide
  Antisense strand to SEQ ID NO: 2104198
uagaucacccaaagcauaa

SEQ ID NO: 2104200 - RNA, 19 nt, Artificial Sequence
  Description of Artificial Sequence: Synthetic oligonucleotide
  Sense strand starting at position 3614 of SEQ ID NO: 1882220
uaugcuuugggugaucuaa

SEQ ID NO: 2104201 - RNA, 19 nt, Artificial Sequence
  Description of Artificial Sequence: Synthetic oligonucleotide
  Antisense strand to SEQ ID NO: 2104200
uuagaucacccaaagcaua

SEQ ID NO: 2104202 - RNA, 19 nt, Artificial Sequence
  Description of Artificial Sequence: Synthetic oligonucleotide
  Sense strand starting at position 3616 of SEQ ID NO: 1882220
ugcuuugggugaucuaaca

SEQ ID NO: 2104203 - RNA, 19 nt, Artificial Sequence
  Description of Artificial Sequence: Synthetic oligonucleotide
  Antisense strand to SEQ ID NO: 2104202
uguuagaucacccaaagca

SEQ ID NO: 2104204 - RNA, 19 nt, Artificial Sequence
  Description of Artificial Sequence: Synthetic oligonucleotide
  Sense strand starting at position 3623 of SEQ ID NO: 1882220
ggugaucuaacagagcauu

SEQ ID NO: 2104205 - RNA, 19 nt, Artificial Sequence
  Description of Artificial Sequence: Synthetic oligonucleotide
  Antisense strand to SEQ ID NO: 2104204
aaugcucuguuagaucacc

SEQ ID NO: 2104206 - RNA, 19 nt, Artificial Sequence
  Description of Artificial Sequence: Synthetic oligonucleotide
  Sense strand starting at position 3629 of SEQ ID NO: 1882220
cuaacagagcauugucuaa

SEQ ID NO: 2104207 - RNA, 19 nt, Artificial Sequence
  Description of Artificial Sequence: Synthetic oligonucleotide
  Antisense strand to SEQ ID NO: 2104206
uuagacaaugcucuguuag

SEQ ID NO: 2104208 - RNA, 19 nt, Artificial Sequence
  Description of Artificial Sequence: Synthetic oligonucleotide
  Sense strand starting at position 3636 of SEQ ID NO: 1882220
agcauugucuaauccaaag

SEQ ID NO: 2104209 - RNA, 19 nt, Artificial Sequence
  Description of Artificial Sequence: Synthetic oligonucleotide
  Antisense strand to SEQ ID NO: 2104208
cuuuggauuagacaaugcu

SEQ ID NO: 2104210 - RNA, 19 nt, Artificial Sequence
  Description of Artificial Sequence: Synthetic oligonucleotide
  Sense strand starting at position 3666 of SEQ ID NO: 1882220
agcuaugauuucuaagauu

SEQ ID NO: 2104211 - RNA, 19 nt, Artificial Sequence
  Description of Artificial Sequence: Synthetic oligonucleotide
  Antisense strand to SEQ ID NO: 2104210
aaucuuagaaaucauagcu

SEQ ID NO: 2104212 - RNA, 19 nt, Artificial Sequence
  Description of Artificial Sequence: Synthetic oligonucleotide
  Sense strand starting at position 3864 of SEQ ID NO: 1882220
agaaaucaguuucugguuu

SEQ ID NO: 2104213 - RNA, 19 nt, Artificial Sequence
  Description of Artificial Sequence: Synthetic oligonucleotide
  Antisense strand to SEQ ID NO: 2104212
aaaccagaaacugauuucu

SEQ ID NO: 2104214 - RNA, 19 nt, Artificial Sequence
  Description of Artificial Sequence: Synthetic oligonucleotide
  Sense strand starting at position 3868 of SEQ ID NO: 1882220
aucaguuucugguuucuca

SEQ ID NO: 2104215 - RNA, 19 nt, Artificial Sequence
  Description of Artificial Sequence: Synthetic oligonucleotide
  Antisense strand to SEQ ID NO: 2104214
ugagaaaccagaaacugau

SEQ ID NO: 2104216 - RNA, 19 nt, Artificial Sequence
  Description of Artificial Sequence: Synthetic oligonucleotide
  Sense strand starting at position 3886 of SEQ ID NO: 1882220
aguucuguugcguugcaau

SEQ ID NO: 2104217 - RNA, 19 nt, Artificial Sequence
  Description of Artificial Sequence: Synthetic oligonucleotide
  Antisense strand to SEQ ID NO: 2104216
auugcaacgcaacagaacu

SEQ ID NO: 2104218 - RNA, 19 nt, Artificial Sequence
  Description of Artificial Sequence: Synthetic oligonucleotide
  Sense strand starting at position 3888 of SEQ ID NO: 1882220
uucuguugcguugcaauau

SEQ ID NO: 2104219 - RNA, 19 nt, Artificial Sequence
  Description of Artificial Sequence: Synthetic oligonucleotide
  Antisense strand to SEQ ID NO: 2104218
auauugcaacgcaacagaa

SEQ ID NO: 2104220 - RNA, 19 nt, Artificial Sequence
  Description of Artificial Sequence: Synthetic oligonucleotide
  Sense strand starting at position 92 of SEQ ID NO: 1882221
cuggauggguucucgcaaa

SEQ ID NO: 2104221 - RNA, 19 nt, Artificial Sequence
  Description of Artificial Sequence: Synthetic oligonucleotide
  Antisense strand to SEQ ID NO: 2104220
uuugcgagaacccauccag

SEQ ID NO: 2104222 - RNA, 19 nt, Artificial Sequence
  Description of Artificial Sequence: Synthetic oligonucleotide
  Sense strand starting at position 214 of SEQ ID NO: 1882221
agacuuaaucacgagcaca

SEQ ID NO: 2104223 - RNA, 19 nt, Artificial Sequence
  Description of Artificial Sequence: Synthetic oligonucleotide
  Antisense strand to SEQ ID NO: 2104222
ugugcucgugauuaagucu

SEQ ID NO: 2104224 - RNA, 19 nt, Artificial Sequence
  Description of Artificial Sequence: Synthetic oligonucleotide
  Sense strand starting at position 377 of SEQ ID NO: 1882221
gacagagguucccaacaag

SEQ ID NO: 2104225 - RNA, 19 nt, Artificial Sequence
  Description of Artificial Sequence: Synthetic oligonucleotide
  Antisense strand to SEQ ID NO: 2104224
cuuguugggaaccucuguc

SEQ ID NO: 2104226 - RNA, 19 nt, Artificial Sequence
  Description of Artificial Sequence: Synthetic oligonucleotide
  Sense strand starting at position 592 of SEQ ID NO: 1882221
uuauaaucccaccguuaug

SEQ ID NO: 2104227 - RNA, 19 nt, Artificial Sequence
  Description of Artificial Sequence: Synthetic oligonucleotide
  Antisense strand to SEQ ID NO: 2104226
cauaacggugggauuauaa

SEQ ID NO: 2104228 - RNA, 19 nt, Artificial Sequence
  Description of Artificial Sequence: Synthetic oligonucleotide
  Sense strand starting at position 601 of SEQ ID NO: 1882221
caccguuauggaugccuaa

SEQ ID NO: 2104229 - RNA, 19 nt, Artificial Sequence
  Description of Artificial Sequence: Synthetic oligonucleotide
  Antisense strand to SEQ ID NO: 2104228
uuaggcauccauaacggug

SEQ ID NO: 2104230 - RNA, 19 nt, Artificial Sequence
  Description of Artificial Sequence: Synthetic oligonucleotide
  Sense strand starting at position 627 of SEQ ID NO: 1882221
gccaucagucaagggugau

SEQ ID NO: 2104231 - RNA, 19 nt, Artificial Sequence
  Description of Artificial Sequence: Synthetic oligonucleotide
  Antisense strand to SEQ ID NO: 2104230
aucacccuugacugauggc

SEQ ID NO: 2104232 - RNA, 19 nt, Artificial Sequence
  Description of Artificial Sequence: Synthetic oligonucleotide
  Sense strand starting at position 628 of SEQ ID NO: 1882221
ccaucagucaagggugaua

SEQ ID NO: 2104233 - RNA, 19 nt, Artificial Sequence
  Description of Artificial Sequence: Synthetic oligonucleotide
  Antisense strand to SEQ ID NO: 2104232
uaucacccuugacugaugg

SEQ ID NO: 2104234 - RNA, 19 nt, Artificial Sequence
  Description of Artificial Sequence: Synthetic oligonucleotide
  Sense strand starting at position 630 of SEQ ID NO: 1882221
aucagucaagggugauaga

SEQ ID NO: 2104235 - RNA, 19 nt, Artificial Sequence
  Description of Artificial Sequence: Synthetic oligonucleotide
  Antisense strand to SEQ ID NO: 2104234
ucuaucacccuugacugau

SEQ ID NO: 2104236 - RNA, 19 nt, Artificial Sequence
  Description of Artificial Sequence: Synthetic oligonucleotide
  Sense strand starting at position 641 of SEQ ID NO: 1882221
gugauagaugagggucauc

SEQ ID NO: 2104237 - RNA, 19 nt, Artificial Sequence
  Description of Artificial Sequence: Synthetic oligonucleotide
  Antisense strand to SEQ ID NO: 2104236
gaugacccucaucuaucac

SEQ ID NO: 2104238 - RNA, 19 nt, Artificial Sequence
  Description of Artificial Sequence: Synthetic oligonucleotide
  Sense strand starting at position 809 of SEQ ID NO: 1882221
gacaaauggcucggccaca

SEQ ID NO: 2104239 - RNA, 19 nt, Artificial Sequence
  Description of Artificial Sequence: Synthetic oligonucleotide
  Antisense strand to SEQ ID NO: 2104238
uguggccgagccauuuguc

SEQ ID NO: 2104240 - RNA, 19 nt, Artificial Sequence
  Description of Artificial Sequence: Synthetic oligonucleotide
  Sense strand starting at position 900 of SEQ ID NO: 1882221
aggcuuuaacaggaucuuu

SEQ ID NO: 2104241 - RNA, 19 nt, Artificial Sequence
  Description of Artificial Sequence: Synthetic oligonucleotide
  Antisense strand to SEQ ID NO: 2104240
aaagauccuguuaaagccu

SEQ ID NO: 2104242 - RNA, 19 nt, Artificial Sequence
  Description of Artificial Sequence: Synthetic oligonucleotide
  Sense strand starting at position 1195 of SEQ ID NO: 1882221
ugcugaggccuccaauaug

SEQ ID NO: 2104243 - RNA, 19 nt, Artificial Sequence
  Description of Artificial Sequence: Synthetic oligonucleotide
  Antisense strand to SEQ ID NO: 2104242
cauauuggaggccucagca

SEQ ID NO: 2104244 - RNA, 19 nt, Artificial Sequence
  Description of Artificial Sequence: Synthetic oligonucleotide
  Sense strand starting at position 1376 of SEQ ID NO: 1882221
cagaccaucgccugugaaa

SEQ ID NO: 2104245 - RNA, 19 nt, Artificial Sequence
  Description of Artificial Sequence: Synthetic oligonucleotide
  Antisense strand to SEQ ID NO: 2104244
uuucacaggcgauggucug

SEQ ID NO: 2104246 - RNA, 19 nt, Artificial Sequence
  Description of Artificial Sequence: Synthetic oligonucleotide
  Sense strand starting at position 1616 of SEQ ID NO: 1882221
ggccuuccgcgguuauaca

SEQ ID NO: 2104247 - RNA, 19 nt, Artificial Sequence
  Description of Artificial Sequence: Synthetic oligonucleotide
  Antisense strand to SEQ ID NO: 2104246
uguauaaccgcggaaggcc

SEQ ID NO: 2104248 - RNA, 19 nt, Artificial Sequence
  Description of Artificial Sequence: Synthetic oligonucleotide
  Sense strand starting at position 2068 of SEQ ID NO: 1882221
aaggaugcuguccgaggua

SEQ ID NO: 2104249 - RNA, 19 nt, Artificial Sequence
  Description of Artificial Sequence: Synthetic oligonucleotide
  Antisense strand to SEQ ID NO: 2104248
uaccucggacagcauccuu

SEQ ID NO: 2104250 - RNA, 19 nt, Artificial Sequence
  Description of Artificial Sequence: Synthetic oligonucleotide
  Sense strand starting at position 2110 of SEQ ID NO: 1882221
ucaggaagguguucugaau

SEQ ID NO: 2104251 - RNA, 19 nt, Artificial Sequence
  Description of Artificial Sequence: Synthetic oligonucleotide
  Antisense strand to SEQ ID NO: 2104250
auucagaacaccuuccuga

SEQ ID NO: 2104252 - RNA, 19 nt, Artificial Sequence
  Description of Artificial Sequence: Synthetic oligonucleotide
  Sense strand starting at position 2176 of SEQ ID NO: 1882221
gggcuugaggguuauacua

SEQ ID NO: 2104253 - RNA, 19 nt, Artificial Sequence
  Description of Artificial Sequence: Synthetic oligonucleotide
  Antisense strand to SEQ ID NO: 2104252
uaguauaacccucaagccc

SEQ ID NO: 2104254 - RNA, 19 nt, Artificial Sequence
  Description of Artificial Sequence: Synthetic oligonucleotide
  Sense strand starting at position 2409 of SEQ ID NO: 1882221
cauguaugaccucagguga

SEQ ID NO: 2104255 - RNA, 19 nt, Artificial Sequence
  Description of Artificial Sequence: Synthetic oligonucleotide
  Antisense strand to SEQ ID NO: 2104254
ucaccugaggucauacaug

SEQ ID NO: 2104256 - RNA, 19 nt, Artificial Sequence
  Description of Artificial Sequence: Synthetic oligonucleotide
  Sense strand starting at position 2497 of SEQ ID NO: 1882221
uguuaauucgagcagaaug

SEQ ID NO: 2104257 - RNA, 19 nt, Artificial Sequence
  Description of Artificial Sequence: Synthetic oligonucleotide
  Antisense strand to SEQ ID NO: 2104256
cauucugcucgaauuaaca

SEQ ID NO: 2104258 - RNA, 19 nt, Artificial Sequence
  Description of Artificial Sequence: Synthetic oligonucleotide
  Sense strand starting at position 2499 of SEQ ID NO: 1882221
uuaauucgagcagaauguu

SEQ ID NO: 2104259 - RNA, 19 nt, Artificial Sequence
  Description of Artificial Sequence: Synthetic oligonucleotide
  Antisense strand to SEQ ID NO: 2104258
aacauucugcucgaauuaa

SEQ ID NO: 2104260 - RNA, 19 nt, Artificial Sequence
  Description of Artificial Sequence: Synthetic oligonucleotide
  Sense strand starting at position 2624 of SEQ ID NO: 1882221
uguccugcuguguaauaaa

SEQ ID NO: 2104261 - RNA, 19 nt, Artificial Sequence
  Description of Artificial Sequence: Synthetic oligonucleotide
  Antisense strand to SEQ ID NO: 2104260
uuuauuacacagcaggaca

SEQ ID NO: 2104262 - RNA, 19 nt, Artificial Sequence
  Description of Artificial Sequence: Synthetic oligonucleotide
  Sense strand starting at position 2706 of SEQ ID NO: 1882221
ccguuauucucaucuuauu

SEQ ID NO: 2104263 - RNA, 19 nt, Artificial Sequence
  Description of Artificial Sequence: Synthetic oligonucleotide
  Antisense strand to SEQ ID NO: 2104262
aauaagaugagaauaacgg

SEQ ID NO: 2104264 - RNA, 19 nt, Artificial Sequence
  Description of Artificial Sequence: Synthetic oligonucleotide
  Sense strand starting at position 2717 of SEQ ID NO: 1882221
aucuuauugacagaagcga

SEQ ID NO: 2104265 - RNA, 19 nt, Artificial Sequence
  Description of Artificial Sequence: Synthetic oligonucleotide
  Antisense strand to SEQ ID NO: 2104264
ucgcuucugucaauaagau

SEQ ID NO: 2104266 - RNA, 19 nt, Artificial Sequence
  Description of Artificial Sequence: Synthetic oligonucleotide
  Sense strand starting at position 2825 of SEQ ID NO: 1882221
gcucaaagaaucugguuag

SEQ ID NO: 2104267 - RNA, 19 nt, Artificial Sequence
  Description of Artificial Sequence: Synthetic oligonucleotide
  Antisense strand to SEQ ID NO: 2104266
cuaaccagauucuuugagc

SEQ ID NO: 2104268 - RNA, 19 nt, Artificial Sequence
  Description of Artificial Sequence: Synthetic oligonucleotide
  Sense strand starting at position 2828 of SEQ ID NO: 1882221
caaagaaucugguuaguaa

SEQ ID NO: 2104269 - RNA, 19 nt, Artificial Sequence
  Description of Artificial Sequence: Synthetic oligonucleotide
  Antisense strand to SEQ ID NO: 2104268
uuacuaaccagauucuuug

SEQ ID NO: 2104270 - RNA, 19 nt, Artificial Sequence
  Description of Artificial Sequence: Synthetic oligonucleotide
  Sense strand starting at position 2831 of SEQ ID NO: 1882221
agaaucugguuaguaaaua

SEQ ID NO: 2104271 - RNA, 19 nt, Artificial Sequence
  Description of Artificial Sequence: Synthetic oligonucleotide
  Antisense strand to SEQ ID NO: 2104270
uauuuacuaaccagauucu

SEQ ID NO: 2104272 - RNA, 19 nt, Artificial Sequence
  Description of Artificial Sequence: Synthetic oligonucleotide
  Sense strand starting at position 2929 of SEQ ID NO: 1882221
aauggugucauagaaggua

SEQ ID NO: 2104273 - RNA, 19 nt, Artificial Sequence
  Description of Artificial Sequence: Synthetic oligonucleotide
  Antisense strand to SEQ ID NO: 2104272
uaccuucuaugacaccauu

SEQ ID NO: 2104274 - RNA, 19 nt, Artificial Sequence
  Description of Artificial Sequence: Synthetic oligonucleotide
  Sense strand starting at position 3003 of SEQ ID NO: 1882221
gccacauguuguccuagga

SEQ ID NO: 2104275 - RNA, 19 nt, Artificial Sequence
  Description of Artificial Sequence: Synthetic oligonucleotide
  Antisense strand to SEQ ID NO: 2104274
uccuaggacaacauguggc

SEQ ID NO: 2104276 - RNA, 19 nt, Artificial Sequence
  Description of Artificial Sequence: Synthetic oligonucleotide
  Sense strand starting at position 3050 of SEQ ID NO: 1882221
uucucacaguguuuacauu

SEQ ID NO: 2104277 - RNA, 19 nt, Artificial Sequence
  Description of Artificial Sequence: Synthetic oligonucleotide
  Antisense strand to SEQ ID NO: 2104276
aauguaaacacugugagaa

SEQ ID NO: 2104278 - RNA, 19 nt, Artificial Sequence
  Description of Artificial Sequence: Synthetic oligonucleotide
  Sense strand starting at position 3051 of SEQ ID NO: 1882221
ucucacaguguuuacauua

SEQ ID NO: 2104279 - RNA, 19 nt, Artificial Sequence
  Description of Artificial Sequence: Synthetic oligonucleotide
  Antisense strand to SEQ ID NO: 2104278
uaauguaaacacugugaga

SEQ ID NO: 2104280 - RNA, 19 nt, Artificial Sequence
  Description of Artificial Sequence: Synthetic oligonucleotide
  Sense strand starting at position 3100 of SEQ ID NO: 1882221
augucaaguaucgauaagu

SEQ ID NO: 2104281 - RNA, 19 nt, Artificial Sequence
  Description of Artificial Sequence: Synthetic oligonucleotide
  Antisense strand to SEQ ID NO: 2104280
acuuaucgauacuugacau

SEQ ID NO: 2104282 - RNA, 19 nt, Artificial Sequence
  Description of Artificial Sequence: Synthetic oligonucleotide
  Sense strand starting at position 3109 of SEQ ID NO: 1882221
aucgauaaguggucagggu

SEQ ID NO: 2104283 - RNA, 19 nt, Artificial Sequence
  Description of Artificial Sequence: Synthetic oligonucleotide
  Antisense strand to SEQ ID NO: 2104282
acccugaccacuuaucgau

SEQ ID NO: 2104284 - RNA, 19 nt, Artificial Sequence
  Description of Artificial Sequence: Synthetic oligonucleotide
  Sense strand starting at position 3469 of SEQ ID NO: 1882221
acaguugcgaucuauaguc

SEQ ID NO: 2104285 - RNA, 19 nt, Artificial Sequence
  Description of Artificial Sequence: Synthetic oligonucleotide
  Antisense strand to SEQ ID NO: 2104284
gacuauagaucgcaacugu

SEQ ID NO: 2104286 - RNA, 19 nt, Artificial Sequence
  Description of Artificial Sequence: Synthetic oligonucleotide
  Sense strand starting at position 3478 of SEQ ID NO: 1882221
aucuauaguccucagauuc

SEQ ID NO: 2104287 - RNA, 19 nt, Artificial Sequence
  Description of Artificial Sequence: Synthetic oligonucleotide
  Antisense strand to SEQ ID NO: 2104286
gaaucugaggacuauagau

SEQ ID NO: 2104288 - RNA, 19 nt, Artificial Sequence
  Description of Artificial Sequence: Synthetic oligonucleotide
  Sense strand starting at position 3505 of SEQ ID NO: 1882221
ggaaccauguuucucacuu

SEQ ID NO: 2104289 - RNA, 19 nt, Artificial Sequence
  Description of Artificial Sequence: Synthetic oligonucleotide
  Antisense strand to SEQ ID NO: 2104288
aagugagaaacaugguucc

SEQ ID NO: 2104290 - RNA, 19 nt, Artificial Sequence
  Description of Artificial Sequence: Synthetic oligonucleotide
  Sense strand starting at position 3509 of SEQ ID NO: 1882221
ccauguuucucacuuuaga

SEQ ID NO: 2104291 - RNA, 19 nt, Artificial Sequence
  Description of Artificial Sequence: Synthetic oligonucleotide
  Antisense strand to SEQ ID NO: 2104290
ucuaaagugagaaacaugg

SEQ ID NO: 2104292 - RNA, 19 nt, Artificial Sequence
  Description of Artificial Sequence: Synthetic oligonucleotide
  Sense strand starting at position 3512 of SEQ ID NO: 1882221
uguuucucacuuuagagaa

SEQ ID NO: 2104293 - RNA, 19 nt, Artificial Sequence
  Description of Artificial Sequence: Synthetic oligonucleotide
  Antisense strand to SEQ ID NO: 2104292
uucucuaaagugagaaaca

SEQ ID NO: 2104294 - RNA, 19 nt, Artificial Sequence
  Description of Artificial Sequence: Synthetic oligonucleotide
  Sense strand starting at position 3547 of SEQ ID NO: 1882221
uguucuuguuucuccaaga

SEQ ID NO: 2104295 - RNA, 19 nt, Artificial Sequence
  Description of Artificial Sequence: Synthetic oligonucleotide
  Antisense strand to SEQ ID NO: 2104294
ucuuggagaaacaagaaca

SEQ ID NO: 2104296 - RNA, 19 nt, Artificial Sequence
  Description of Artificial Sequence: Synthetic oligonucleotide
  Sense strand starting at position 3548 of SEQ ID NO: 1882221
guucuuguuucuccaagaa

SEQ ID NO: 2104297 - RNA, 19 nt, Artificial Sequence
  Description of Artificial Sequence: Synthetic oligonucleotide
  Antisense strand to SEQ ID NO: 2104296
uucuuggagaaacaagaac

SEQ ID NO: 2104298 - RNA, 19 nt, Artificial Sequence
  Description of Artificial Sequence: Synthetic oligonucleotide
  Sense strand starting at position 3552 of SEQ ID NO: 1882221
uuguuucuccaagaaguuu

SEQ ID NO: 2104299 - RNA, 19 nt, Artificial Sequence
  Description of Artificial Sequence: Synthetic oligonucleotide
  Antisense strand to SEQ ID NO: 2104298
aaacuucuuggagaaacaa

SEQ ID NO: 2104300 - RNA, 19 nt, Artificial Sequence
  Description of Artificial Sequence: Synthetic oligonucleotide
  Sense strand starting at position 328 of SEQ ID NO: 1882222
cuugccuuuggccauuaau

SEQ ID NO: 2104301 - RNA, 19 nt, Artificial Sequence
  Description of Artificial Sequence: Synthetic oligonucleotide
  Antisense strand to SEQ ID NO: 2104300
auuaauggccaaaggcaag

SEQ ID NO: 2104302 - RNA, 19 nt, Artificial Sequence
  Description of Artificial Sequence: Synthetic oligonucleotide
  Sense strand starting at position 421 of SEQ ID NO: 1882222
gaaucaaaguacguugaaa

SEQ ID NO: 2104303 - RNA, 19 nt, Artificial Sequence
  Description of Artificial Sequence: Synthetic oligonucleotide
  Antisense strand to SEQ ID NO: 2104302
uuucaacguacuuugauuc

SEQ ID NO: 2104304 - RNA, 19 nt, Artificial Sequence
  Description of Artificial Sequence: Synthetic oligonucleotide
  Sense strand starting at position 879 of SEQ ID NO: 1882222
gcaggaauucugggaaucu

SEQ ID NO: 2104305 - RNA, 19 nt, Artificial Sequence
  Description of Artificial Sequence: Synthetic oligonucleotide
  Antisense strand to SEQ ID NO: 2104304
agauucccagaauuccugc

SEQ ID NO: 2104306 - RNA, 19 nt, Artificial Sequence
  Description of Artificial Sequence: Synthetic oligonucleotide
  Sense strand starting at position 888 of SEQ ID NO: 1882222
cugggaaucuuucuuagug

SEQ ID NO: 2104307 - RNA, 19 nt, Artificial Sequence
  Description of Artificial Sequence: Synthetic oligonucleotide
  Antisense strand to SEQ ID NO: 2104306
cacuaagaaagauucccag

SEQ ID NO: 2104308 - RNA, 19 nt, Artificial Sequence
  Description of Artificial Sequence: Synthetic oligonucleotide
  Sense strand starting at position 889 of SEQ ID NO: 1882222
ugggaaucuuucuuagugu

SEQ ID NO: 2104309 - RNA, 19 nt, Artificial Sequence
  Description of Artificial Sequence: Synthetic oligonucleotide
  Antisense strand to SEQ ID NO: 2104308
acacuaagaaagauuccca

SEQ ID NO: 2104310 - RNA, 19 nt, Artificial Sequence
  Description of Artificial Sequence: Synthetic oligonucleotide
  Sense strand starting at position 1098 of SEQ ID NO: 1882222
agggauccacgccaugaau

SEQ ID NO: 2104311 - RNA, 19 nt, Artificial Sequence
  Description of Artificial Sequence: Synthetic oligonucleotide
  Antisense strand to SEQ ID NO: 2104310
auucauggcguggaucccu

SEQ ID NO: 2104312 - RNA, 19 nt, Artificial Sequence
  Description of Artificial Sequence: Synthetic oligonucleotide
  Sense strand starting at position 1100 of SEQ ID NO: 1882222
ggauccacgccaugaauca

SEQ ID NO: 2104313 - RNA, 19 nt, Artificial Sequence
  Description of Artificial Sequence: Synthetic oligonucleotide
  Antisense strand to SEQ ID NO: 2104312
ugauucauggcguggaucc

SEQ ID NO: 2104314 - RNA, 19 nt, Artificial Sequence
  Description of Artificial Sequence: Synthetic oligonucleotide
  Sense strand starting at position 1534 of SEQ ID NO: 1882222
cuuccagacuguucucaca

SEQ ID NO: 2104315 - RNA, 19 nt, Artificial Sequence
  Description of Artificial Sequence: Synthetic oligonucleotide
  Antisense strand to SEQ ID NO: 2104314
ugugagaacagucuggaag

SEQ ID NO: 2104316 - RNA, 19 nt, Artificial Sequence
  Description of Artificial Sequence: Synthetic oligonucleotide
  Sense strand starting at position 1536 of SEQ ID NO: 1882222
uccagacuguucucacaga

SEQ ID NO: 2104317 - RNA, 19 nt, Artificial Sequence
  Description of Artificial Sequence: Synthetic oligonucleotide
  Antisense strand to SEQ ID NO: 2104316
ucugugagaacagucugga

SEQ ID NO: 2104318 - RNA, 19 nt, Artificial Sequence
  Description of Artificial Sequence: Synthetic oligonucleotide
  Sense strand starting at position 1862 of SEQ ID NO: 1882222
ucguuaauguggucauuua

SEQ ID NO: 2104319 - RNA, 19 nt, Artificial Sequence
  Description of Artificial Sequence: Synthetic oligonucleotide
  Antisense strand to SEQ ID NO: 2104318
uaaaugaccacauuaacga

SEQ ID NO: 2104320 - RNA, 19 nt, Artificial Sequence
  Description of Artificial Sequence: Synthetic oligonucleotide
  Sense strand starting at position 1927 of SEQ ID NO: 1882222
acugauaagugcuccauag

SEQ ID NO: 2104321 - RNA, 19 nt, Artificial Sequence
  Description of Artificial Sequence: Synthetic oligonucleotide
  Antisense strand to SEQ ID NO: 2104320
cuauggagcacuuaucagu

SEQ ID NO: 2104322 - RNA, 19 nt, Artificial Sequence
  Description of Artificial Sequence: Synthetic oligonucleotide
  Sense strand starting at position 1931 of SEQ ID NO: 1882222
auaagugcuccauaggcuu

SEQ ID NO: 2104323 - RNA, 19 nt, Artificial Sequence
  Description of Artificial Sequence: Synthetic oligonucleotide
  Antisense strand to SEQ ID NO: 2104322
aagccuauggagcacuuau

SEQ ID NO: 2104324 - RNA, 19 nt, Artificial Sequence
  Description of Artificial Sequence: Synthetic oligonucleotide
  Sense strand starting at position 2119 of SEQ ID NO: 1882222
ggcuuaguggagugguaag

SEQ ID NO: 2104325 - RNA, 19 nt, Artificial Sequence
  Description of Artificial Sequence: Synthetic oligonucleotide
  Antisense strand to SEQ ID NO: 2104324
cuuaccacuccacuaagcc

SEQ ID NO: 2104326 - RNA, 19 nt, Artificial Sequence
  Description of Artificial Sequence: Synthetic oligonucleotide
  Sense strand starting at position 2378 of SEQ ID NO: 1882222
ggagauuucucaggauauu

SEQ ID NO: 2104327 - RNA, 19 nt, Artificial Sequence
  Description of Artificial Sequence: Synthetic oligonucleotide
  Antisense strand to SEQ ID NO: 2104326
aauauccugagaaaucucc

SEQ ID NO: 2104328 - RNA, 19 nt, Artificial Sequence
  Description of Artificial Sequence: Synthetic oligonucleotide
  Sense strand starting at position 2401 of SEQ ID NO: 1882222
ggagacagcuguuugugau

SEQ ID NO: 2104329 - RNA, 19 nt, Artificial Sequence
  Description of Artificial Sequence: Synthetic oligonucleotide
  Antisense strand to SEQ ID NO: 2104328
aucacaaacagcugucucc

SEQ ID NO: 2104330 - RNA, 19 nt, Artificial Sequence
  Description of Artificial Sequence: Synthetic oligonucleotide
  Sense strand starting at position 2427 of SEQ ID NO: 1882222
gacaguuauggguggcuau

SEQ ID NO: 2104331 - RNA, 19 nt, Artificial Sequence
  Description of Artificial Sequence: Synthetic oligonucleotide
  Antisense strand to SEQ ID NO: 2104330
auagccacccauaacuguc

SEQ ID NO: 2104332 - RNA, 19 nt, Artificial Sequence
  Description of Artificial Sequence: Synthetic oligonucleotide
  Sense strand starting at position 2519 of SEQ ID NO: 1882222
aguauaauguugccuuaua

SEQ ID NO: 2104333 - RNA, 19 nt, Artificial Sequence
  Description of Artificial Sequence: Synthetic oligonucleotide
  Antisense strand to SEQ ID NO: 2104332
uauaaggcaacauuauacu

SEQ ID NO: 2104334 - RNA, 19 nt, Artificial Sequence
  Description of Artificial Sequence: Synthetic oligonucleotide
  Sense strand starting at position 2578 of SEQ ID NO: 1882222
aggauugacuucucuaucu

SEQ ID NO: 2104335 - RNA, 19 nt, Artificial Sequence
  Description of Artificial Sequence: Synthetic oligonucleotide
  Antisense strand to SEQ ID NO: 2104334
agauagagaagucaauccu

SEQ ID NO: 2104336 - RNA, 19 nt, Artificial Sequence
  Description of Artificial Sequence: Synthetic oligonucleotide
  Sense strand starting at position 2837 of SEQ ID NO: 1882222
ccacucgauccugaaaugu

SEQ ID NO: 2104337 - RNA, 19 nt, Artificial Sequence
  Description of Artificial Sequence: Synthetic oligonucleotide
  Antisense strand to SEQ ID NO: 2104336
acauuucaggaucgagugg

SEQ ID NO: 2104338 - RNA, 19 nt, Artificial Sequence
  Description of Artificial Sequence: Synthetic oligonucleotide
  Sense strand starting at position 2986 of SEQ ID NO: 1882222
aaagaaaccugguuuguuu

SEQ ID NO: 2104339 - RNA, 19 nt, Artificial Sequence
  Description of Artificial Sequence: Synthetic oligonucleotide
  Antisense strand to SEQ ID NO: 2104338
aaacaaaccagguuucuuu

SEQ ID NO: 2104340 - RNA, 19 nt, Artificial Sequence
  Description of Artificial Sequence: Synthetic oligonucleotide
  Sense strand starting at position 3067 of SEQ ID NO: 1882222
cucggugugguagagagaa

SEQ ID NO: 2104341 - RNA, 19 nt, Artificial Sequence
  Description of Artificial Sequence: Synthetic oligonucleotide
  Antisense strand to SEQ ID NO: 2104340
uucucucuaccacaccgag

SEQ ID NO: 2104342 - RNA, 19 nt, Artificial Sequence
  Description of Artificial Sequence: Synthetic oligonucleotide
  Sense strand starting at position 3199 of SEQ ID NO: 1882222
agggauuguccuggaugau

SEQ ID NO: 2104343 - RNA, 19 nt, Artificial Sequence
  Description of Artificial Sequence: Synthetic oligonucleotide
  Antisense strand to SEQ ID NO: 2104342
aucauccaggacaaucccu

SEQ ID NO: 2104344 - RNA, 19 nt, Artificial Sequence
  Description of Artificial Sequence: Synthetic oligonucleotide
  Sense strand starting at position 3225 of SEQ ID NO: 1882222
ggccuaaucuacucacaag

SEQ ID NO: 2104345 - RNA, 19 nt, Artificial Sequence
  Description of Artificial Sequence: Synthetic oligonucleotide
  Antisense strand to SEQ ID NO: 2104344
cuugugaguagauuaggcc

SEQ ID NO: 2104346 - RNA, 19 nt, Artificial Sequence
  Description of Artificial Sequence: Synthetic oligonucleotide
  Sense strand starting at position 3388 of SEQ ID NO: 1882222
guggcaucucugcaaggaa

SEQ ID NO: 2104347 - RNA, 19 nt, Artificial Sequence
  Description of Artificial Sequence: Synthetic oligonucleotide
  Antisense strand to SEQ ID NO: 2104346
uuccuugcagagaugccac

SEQ ID NO: 2104348 - RNA, 19 nt, Artificial Sequence
  Description of Artificial Sequence: Synthetic oligonucleotide
  Sense strand starting at position 3475 of SEQ ID NO: 1882222
cccauuuguguugguuuga

SEQ ID NO: 2104349 - RNA, 19 nt, Artificial Sequence
  Description of Artificial Sequence: Synthetic oligonucleotide
  Antisense strand to SEQ ID NO: 2104348
ucaaaccaacacaaauggg

SEQ ID NO: 2104350 - RNA, 19 nt, Artificial Sequence
  Description of Artificial Sequence: Synthetic oligonucleotide
  Sense strand starting at position 3535 of SEQ ID NO: 1882222
auacguauugauuacuaga

SEQ ID NO: 2104351 - RNA, 19 nt, Artificial Sequence
  Description of Artificial Sequence: Synthetic oligonucleotide
  Antisense strand to SEQ ID NO: 2104350
ucuaguaaucaauacguau

SEQ ID NO: 2104352 - RNA, 19 nt, Artificial Sequence
  Description of Artificial Sequence: Synthetic oligonucleotide
  Sense strand starting at position 3537 of SEQ ID NO: 1882222
acguauugauuacuagaau

SEQ ID NO: 2104353 - RNA, 19 nt, Artificial Sequence
  Description of Artificial Sequence: Synthetic oligonucleotide
  Antisense strand to SEQ ID NO: 2104352
auucuaguaaucaauacgu

SEQ ID NO: 2104354 - RNA, 19 nt, Artificial Sequence
  Description of Artificial Sequence: Synthetic oligonucleotide
  Sense strand starting at position 3546 of SEQ ID NO: 1882222
uuacuagaauuugggaagu

SEQ ID NO: 2104355 - RNA, 19 nt, Artificial Sequence
  Description of Artificial Sequence: Synthetic oligonucleotide
  Antisense strand to SEQ ID NO: 2104354
acuucccaaauucuaguaa

SEQ ID NO: 2104356 - RNA, 19 nt, Artificial Sequence
  Description of Artificial Sequence: Synthetic oligonucleotide
  Sense strand starting at position 3548 of SEQ ID NO: 1882222
acuagaauuugggaaguga

SEQ ID NO: 2104357 - RNA, 19 nt, Artificial Sequence
  Description of Artificial Sequence: Synthetic oligonucleotide
  Antisense strand to SEQ ID NO: 2104356
ucacuucccaaauucuagu

SEQ ID NO: 2104358 - RNA, 19 nt, Artificial Sequence
  Description of Artificial Sequence: Synthetic oligonucleotide
  Sense strand starting at position 3651 of SEQ ID NO: 1882222
uuguguuuguggauauggu

SEQ ID NO: 2104359 - RNA, 19 nt, Artificial Sequence
  Description of Artificial Sequence: Synthetic oligonucleotide
  Antisense strand to SEQ ID NO: 2104358
accauauccacaaacacaa

SEQ ID NO: 2104360 - RNA, 19 nt, Artificial Sequence
  Description of Artificial Sequence: Synthetic oligonucleotide
  Sense strand starting at position 3652 of SEQ ID NO: 1882222
uguguuuguggauauggua

SEQ ID NO: 2104361 - RNA, 19 nt, Artificial Sequence
  Description of Artificial Sequence: Synthetic oligonucleotide
  Antisense strand to SEQ ID NO: 2104360
uaccauauccacaaacaca

SEQ ID NO: 2104362 - RNA, 19 nt, Artificial Sequence
  Description of Artificial Sequence: Synthetic oligonucleotide
  Sense strand starting at position 3683 of SEQ ID NO: 1882222
aggaucgcauccuugaaua

SEQ ID NO: 2104363 - RNA, 19 nt, Artificial Sequence
  Description of Artificial Sequence: Synthetic oligonucleotide
  Antisense strand to SEQ ID NO: 2104362
uauucaaggaugcgauccu

SEQ ID NO: 2104364 - RNA, 19 nt, Artificial Sequence
  Description of Artificial Sequence: Synthetic oligonucleotide
  Sense strand starting at position 3688 of SEQ ID NO: 1882222
cgcauccuugaauaaauca

SEQ ID NO: 2104365 - RNA, 19 nt, Artificial Sequence
  Description of Artificial Sequence: Synthetic oligonucleotide
  Antisense strand to SEQ ID NO: 2104364
ugauuuauucaaggaugcg

SEQ ID NO: 2104366 - RNA, 19 nt, Artificial Sequence
  Description of Artificial Sequence: Synthetic oligonucleotide
  Sense strand starting at position 3696 of SEQ ID NO: 1882222
ugaauaaaucagugucugu

SEQ ID NO: 2104367 - RNA, 19 nt, Artificial Sequence
  Description of Artificial Sequence: Synthetic oligonucleotide
  Antisense strand to SEQ ID NO: 2104366
acagacacugauuuauuca

SEQ ID NO: 2104368 - RNA, 19 nt, Artificial Sequence
  Description of Artificial Sequence: Synthetic oligonucleotide
  Sense strand starting at position 3699 of SEQ ID NO: 1882222
auaaaucagugucuguuau

SEQ ID NO: 2104369 - RNA, 19 nt, Artificial Sequence
  Description of Artificial Sequence: Synthetic oligonucleotide
  Antisense strand to SEQ ID NO: 2104368
auaacagacacugauuuau

SEQ ID NO: 2104370 - RNA, 19 nt, Artificial Sequence
  Description of Artificial Sequence: Synthetic oligonucleotide
  Sense strand starting at position 3728 of SEQ ID NO: 1882222
ucucaaagcuggucccaua

SEQ ID NO: 2104371 - RNA, 19 nt, Artificial Sequence
  Description of Artificial Sequence: Synthetic oligonucleotide
  Antisense strand to SEQ ID NO: 2104370
uaugggaccagcuuugaga

SEQ ID NO: 2104372 - RNA, 19 nt, Artificial Sequence
  Description of Artificial Sequence: Synthetic oligonucleotide
  Sense strand starting at position 3847 of SEQ ID NO: 1882222
caauguucugcccaggagu

SEQ ID NO: 2104373 - RNA, 19 nt, Artificial Sequence
  Description of Artificial Sequence: Synthetic oligonucleotide
  Antisense strand to SEQ ID NO: 2104372
acuccugggcagaacauug

SEQ ID NO: 2104374 - RNA, 19 nt, Artificial Sequence
  Description of Artificial Sequence: Synthetic oligonucleotide
  Sense strand starting at position 3850 of SEQ ID NO: 1882222
uguucugcccaggagugau

SEQ ID NO: 2104375 - RNA, 19 nt, Artificial Sequence
  Description of Artificial Sequence: Synthetic oligonucleotide
  Antisense strand to SEQ ID NO: 2104374
aucacuccugggcagaaca

SEQ ID NO: 2104376 - RNA, 19 nt, Artificial Sequence
  Description of Artificial Sequence: Synthetic oligonucleotide
  Sense strand starting at position 3863 of SEQ ID NO: 1882222
agugaugagucucuaagag

SEQ ID NO: 2104377 - RNA, 19 nt, Artificial Sequence
  Description of Artificial Sequence: Synthetic oligonucleotide
  Antisense strand to SEQ ID NO: 2104376
cucuuagagacucaucacu

SEQ ID NO: 2104378 - RNA, 19 nt, Artificial Sequence
  Description of Artificial Sequence: Synthetic oligonucleotide
  Sense strand starting at position 3969 of SEQ ID NO: 1882222
uccacagaauccuuuggga

SEQ ID NO: 2104379 - RNA, 19 nt, Artificial Sequence
  Description of Artificial Sequence: Synthetic oligonucleotide
  Antisense strand to SEQ ID NO: 2104378
ucccaaaggauucugugga

SEQ ID NO: 2104380 - RNA, 19 nt, Artificial Sequence
  Description of Artificial Sequence: Synthetic oligonucleotide
  Sense strand starting at position 15 of SEQ ID NO: 1882223
augauugacgcaugguaag

SEQ ID NO: 2104381 - RNA, 19 nt, Artificial Sequence
  Description of Artificial Sequence: Synthetic oligonucleotide
  Antisense strand to SEQ ID NO: 2104380
cuuaccaugcgucaaucau

SEQ ID NO: 2104382 - RNA, 19 nt, Artificial Sequence
  Description of Artificial Sequence: Synthetic oligonucleotide
  Sense strand starting at position 41 of SEQ ID NO: 1882223
gcguuugacaguuuguuau

SEQ ID NO: 2104383 - RNA, 19 nt, Artificial Sequence
  Description of Artificial Sequence: Synthetic oligonucleotide
  Antisense strand to SEQ ID NO: 2104382
auaacaaacugucaaacgc

SEQ ID NO: 2104384 - RNA, 19 nt, Artificial Sequence
  Description of Artificial Sequence: Synthetic oligonucleotide
  Sense strand starting at position 43 of SEQ ID NO: 1882223
guuugacaguuuguuauuc

SEQ ID NO: 2104385 - RNA, 19 nt, Artificial Sequence
  Description of Artificial Sequence: Synthetic oligonucleotide
  Antisense strand to SEQ ID NO: 2104384
gaauaacaaacugucaaac

SEQ ID NO: 2104386 - RNA, 19 nt, Artificial Sequence
  Description of Artificial Sequence: Synthetic oligonucleotide
  Sense strand starting at position 232 of SEQ ID NO: 1882223
gcugcagcgagcuauaaua

SEQ ID NO: 2104387 - RNA, 19 nt, Artificial Sequence
  Description of Artificial Sequence: Synthetic oligonucleotide
  Antisense strand to SEQ ID NO: 2104386
uauuauagcucgcugcagc

SEQ ID NO: 2104388 - RNA, 19 nt, Artificial Sequence
  Description of Artificial Sequence: Synthetic oligonucleotide
  Sense strand starting at position 621 of SEQ ID NO: 1882223
acaguaugaguggaaaugu

SEQ ID NO: 2104389 - RNA, 19 nt, Artificial Sequence
  Description of Artificial Sequence: Synthetic oligonucleotide
  Antisense strand to SEQ ID NO: 2104388
acauuuccacucauacugu

SEQ ID NO: 2104390 - RNA, 19 nt, Artificial Sequence
  Description of Artificial Sequence: Synthetic oligonucleotide
  Sense strand starting at position 630 of SEQ ID NO: 1882223
guggaaauguucucacauu

SEQ ID NO: 2104391 - RNA, 19 nt, Artificial Sequence
  Description of Artificial Sequence: Synthetic oligonucleotide
  Antisense strand to SEQ ID NO: 2104390
aaugugagaacauuuccac

SEQ ID NO: 2104392 - RNA, 19 nt, Artificial Sequence
  Description of Artificial Sequence: Synthetic oligonucleotide
  Sense strand starting at position 672 of SEQ ID NO: 1882223
guaagcuaaaguugaaaga

SEQ ID NO: 2104393 - RNA, 19 nt, Artificial Sequence
  Description of Artificial Sequence: Synthetic oligonucleotide
  Antisense strand to SEQ ID NO: 2104392
ucuuucaacuuuagcuuac

SEQ ID NO: 2104394 - RNA, 19 nt, Artificial Sequence
  Description of Artificial Sequence: Synthetic oligonucleotide
  Sense strand starting at position 881 of SEQ ID NO: 1882223
cugaguaacuacguuugau

SEQ ID NO: 2104395 - RNA, 19 nt, Artificial Sequence
  Description of Artificial Sequence: Synthetic oligonucleotide
  Antisense strand to SEQ ID NO: 2104394
aucaaacguaguuacucag

SEQ ID NO: 2104396 - RNA, 19 nt, Artificial Sequence
  Description of Artificial Sequence: Synthetic oligonucleotide
  Sense strand starting at position 893 of SEQ ID NO: 1882223
guuugauuuaguggucgag

SEQ ID NO: 2104397 - RNA, 19 nt, Artificial Sequence
  Description of Artificial Sequence: Synthetic oligonucleotide
  Antisense strand to SEQ ID NO: 2104396
cucgaccacuaaaucaaac

SEQ ID NO: 2104398 - RNA, 19 nt, Artificial Sequence
  Description of Artificial Sequence: Synthetic oligonucleotide
  Sense strand starting at position 896 of SEQ ID NO: 1882223
ugauuuaguggucgagcca

SEQ ID NO: 2104399 - RNA, 19 nt, Artificial Sequence
  Description of Artificial Sequence: Synthetic oligonucleotide
  Antisense strand to SEQ ID NO: 2104398
uggcucgaccacuaaauca

SEQ ID NO: 2104400 - RNA, 19 nt, Artificial Sequence
  Description of Artificial Sequence: Synthetic oligonucleotide
  Sense strand starting at position 1036 of SEQ ID NO: 1882223
gugagaccugggcaucaga

SEQ ID NO: 2104401 - RNA, 19 nt, Artificial Sequence
  Description of Artificial Sequence: Synthetic oligonucleotide
  Antisense strand to SEQ ID NO: 2104400
ucugaugcccaggucucac

SEQ ID NO: 2104402 - RNA, 19 nt, Artificial Sequence
  Description of Artificial Sequence: Synthetic oligonucleotide
  Sense strand starting at position 1071 of SEQ ID NO: 1882223
aggugauucuaagcaaagu

SEQ ID NO: 2104403 - RNA, 19 nt, Artificial Sequence
  Description of Artificial Sequence: Synthetic oligonucleotide
  Antisense strand to SEQ ID NO: 2104402
acuuugcuuagaaucaccu

SEQ ID NO: 2104404 - RNA, 19 nt, Artificial Sequence
  Description of Artificial Sequence: Synthetic oligonucleotide
  Sense strand starting at position 1072 of SEQ ID NO: 1882223
ggugauucuaagcaaaguu

SEQ ID NO: 2104405 - RNA, 19 nt, Artificial Sequence
  Description of Artificial Sequence: Synthetic oligonucleotide
  Antisense strand to SEQ ID NO: 2104404
aacuuugcuuagaaucacc

SEQ ID NO: 2104406 - RNA, 19 nt, Artificial Sequence
  Description of Artificial Sequence: Synthetic oligonucleotide
  Sense strand starting at position 1093 of SEQ ID NO: 1882223
ggaaccgcuggguauuaaa

SEQ ID NO: 2104407 - RNA, 19 nt, Artificial Sequence
  Description of Artificial Sequence: Synthetic oligonucleotide
  Antisense strand to SEQ ID NO: 2104406
uuuaauacccagcgguucc

SEQ ID NO: 2104408 - RNA, 19 nt, Artificial Sequence
  Description of Artificial Sequence: Synthetic oligonucleotide
  Sense strand starting at position 1601 of SEQ ID NO: 1882223
cgggaaguucguuacuuuc

SEQ ID NO: 2104409 - RNA, 19 nt, Artificial Sequence
  Description of Artificial Sequence: Synthetic oligonucleotide
  Antisense strand to SEQ ID NO: 2104408
gaaaguaacgaacuucccg

SEQ ID NO: 2104410 - RNA, 19 nt, Artificial Sequence
  Description of Artificial Sequence: Synthetic oligonucleotide
  Sense strand starting at position 2154 of SEQ ID NO: 1882223
ggcaucgugaaaggaugau

SEQ ID NO: 2104411 - RNA, 19 nt, Artificial Sequence
  Description of Artificial Sequence: Synthetic oligonucleotide
  Antisense strand to SEQ ID NO: 2104410
aucauccuuucacgaugcc

SEQ ID NO: 2104412 - RNA, 19 nt, Artificial Sequence
  Description of Artificial Sequence: Synthetic oligonucleotide
  Sense strand starting at position 2218 of SEQ ID NO: 1882223
ggaagagaauuggaucucu

SEQ ID NO: 2104413 - RNA, 19 nt, Artificial Sequence
  Description of Artificial Sequence: Synthetic oligonucleotide
  Antisense strand to SEQ ID NO: 2104412
agagauccaauucucuucc

SEQ ID NO: 2104414 - RNA, 19 nt, Artificial Sequence
  Description of Artificial Sequence: Synthetic oligonucleotide
  Sense strand starting at position 2246 of SEQ ID NO: 1882223
aggcgaugugcacaaauca

SEQ ID NO: 2104415 - RNA, 19 nt, Artificial Sequence
  Description of Artificial Sequence: Synthetic oligonucleotide
  Antisense strand to SEQ ID NO: 2104414
ugauuugugcacaucgccu

SEQ ID NO: 2104416 - RNA, 19 nt, Artificial Sequence
  Description of Artificial Sequence: Synthetic oligonucleotide
  Sense strand starting at position 2359 of SEQ ID NO: 1882223
ggcaauaauagucgacugu

SEQ ID NO: 2104417 - RNA, 19 nt, Artificial Sequence
  Description of Artificial Sequence: Synthetic oligonucleotide
  Antisense strand to SEQ ID NO: 2104416
acagucgacuauuauugcc

SEQ ID NO: 2104418 - RNA, 19 nt, Artificial Sequence
  Description of Artificial Sequence: Synthetic oligonucleotide
  Sense strand starting at position 2440 of SEQ ID NO: 1882223
aggugaucgccuuucgcga

SEQ ID NO: 2104419 - RNA, 19 nt, Artificial Sequence
  Description of Artificial Sequence: Synthetic oligonucleotide
  Antisense strand to SEQ ID NO: 2104418
ucgcgaaaggcgaucaccu

SEQ ID NO: 2104420 - RNA, 19 nt, Artificial Sequence
  Description of Artificial Sequence: Synthetic oligonucleotide
  Sense strand starting at position 2580 of SEQ ID NO: 1882223
ugcuaagcacuccauaguu

SEQ ID NO: 2104421 - RNA, 19 nt, Artificial Sequence
  Description of Artificial Sequence: Synthetic oligonucleotide
  Antisense strand to SEQ ID NO: 2104420
aacuauggagugcuuagca

SEQ ID NO: 2104422 - RNA, 19 nt, Artificial Sequence
  Description of Artificial Sequence: Synthetic oligonucleotide
  Sense strand starting at position 2677 of SEQ ID NO: 1882223
cucucuucuccagaugugu

SEQ ID NO: 2104423 - RNA, 19 nt, Artificial Sequence
  Description of Artificial Sequence: Synthetic oligonucleotide
  Antisense strand to SEQ ID NO: 2104422
acacaucuggagaagagag

SEQ ID NO: 2104424 - RNA, 19 nt, Artificial Sequence
  Description of Artificial Sequence: Synthetic oligonucleotide
  Sense strand starting at position 2686 of SEQ ID NO: 1882223
ccagauguguuguuccaua

SEQ ID NO: 2104425 - RNA, 19 nt, Artificial Sequence
  Description of Artificial Sequence: Synthetic oligonucleotide
  Antisense strand to SEQ ID NO: 2104424
uauggaacaacacaucugg

SEQ ID NO: 2104426 - RNA, 19 nt, Artificial Sequence
  Description of Artificial Sequence: Synthetic oligonucleotide
  Sense strand starting at position 2691 of SEQ ID NO: 1882223
uguguuguuccauagaugg

SEQ ID NO: 2104427 - RNA, 19 nt, Artificial Sequence
  Description of Artificial Sequence: Synthetic oligonucleotide
  Antisense strand to SEQ ID NO: 2104426
ccaucuauggaacaacaca

SEQ ID NO: 2104428 - RNA, 19 nt, Artificial Sequence
  Description of Artificial Sequence: Synthetic oligonucleotide
  Sense strand starting at position 2693 of SEQ ID NO: 1882223
uguuguuccauagauggau

SEQ ID NO: 2104429 - RNA, 19 nt, Artificial Sequence
  Description of Artificial Sequence: Synthetic oligonucleotide
  Antisense strand to SEQ ID NO: 2104428
auccaucuauggaacaaca

SEQ ID NO: 2104430 - RNA, 19 nt, Artificial Sequence
  Description of Artificial Sequence: Synthetic oligonucleotide
  Sense strand starting at position 2726 of SEQ ID NO: 1882223
ccauuaccacgcuguaaau

SEQ ID NO: 2104431 - RNA, 19 nt, Artificial Sequence
  Description of Artificial Sequence: Synthetic oligonucleotide
  Antisense strand to SEQ ID NO: 2104430
auuuacagcgugguaaugg

SEQ ID NO: 2104432 - RNA, 19 nt, Artificial Sequence
  Description of Artificial Sequence: Synthetic oligonucleotide
  Sense strand starting at position 2814 of SEQ ID NO: 1882223
auaccaguugcuuacucau

SEQ ID NO: 2104433 - RNA, 19 nt, Artificial Sequence
  Description of Artificial Sequence: Synthetic oligonucleotide
  Antisense strand to SEQ ID NO: 2104432
augaguaagcaacugguau

SEQ ID NO: 2104434 - RNA, 19 nt, Artificial Sequence
  Description of Artificial Sequence: Synthetic oligonucleotide
  Sense strand starting at position 2817 of SEQ ID NO: 1882223
ccaguugcuuacucaugua

SEQ ID NO: 2104435 - RNA, 19 nt, Artificial Sequence
  Description of Artificial Sequence: Synthetic oligonucleotide
  Antisense strand to SEQ ID NO: 2104434
uacaugaguaagcaacugg

SEQ ID NO: 2104436 - RNA, 19 nt, Artificial Sequence
  Description of Artificial Sequence: Synthetic oligonucleotide
  Sense strand starting at position 2837 of SEQ ID NO: 1882223
gcauguauacaacauguau

SEQ ID NO: 2104437 - RNA, 19 nt, Artificial Sequence
  Description of Artificial Sequence: Synthetic oligonucleotide
  Antisense strand to SEQ ID NO: 2104436
auacauguuguauacaugc

SEQ ID NO: 2104438 - RNA, 19 nt, Artificial Sequence
  Description of Artificial Sequence: Synthetic oligonucleotide
  Sense strand starting at position 3065 of SEQ ID NO: 1882223
ugaaguauuucuggaaccu

SEQ ID NO: 2104439 - RNA, 19 nt, Artificial Sequence
  Description of Artificial Sequence: Synthetic oligonucleotide
  Antisense strand to SEQ ID NO: 2104438
agguuccagaaauacuuca

SEQ ID NO: 2104440 - RNA, 19 nt, Artificial Sequence
  Description of Artificial Sequence: Synthetic oligonucleotide
  Sense strand starting at position 3150 of SEQ ID NO: 1882223
acagacaguucuuccagau

SEQ ID NO: 2104441 - RNA, 19 nt, Artificial Sequence
  Description of Artificial Sequence: Synthetic oligonucleotide
  Antisense strand to SEQ ID NO: 2104440
aucuggaagaacugucugu

SEQ ID NO: 2104442 - RNA, 19 nt, Artificial Sequence
  Description of Artificial Sequence: Synthetic oligonucleotide
  Sense strand starting at position 3154 of SEQ ID NO: 1882223
acaguucuuccagauucua

SEQ ID NO: 2104443 - RNA, 19 nt, Artificial Sequence
  Description of Artificial Sequence: Synthetic oligonucleotide
  Antisense strand to SEQ ID NO: 2104442
uagaaucuggaagaacugu

SEQ ID NO: 2104444 - RNA, 19 nt, Artificial Sequence
  Description of Artificial Sequence: Synthetic oligonucleotide
  Sense strand starting at position 3368 of SEQ ID NO: 1882223
auugauuacuagucaccua

SEQ ID NO: 2104445 - RNA, 19 nt, Artificial Sequence
  Description of Artificial Sequence: Synthetic oligonucleotide
  Antisense strand to SEQ ID NO: 2104444
uaggugacuaguaaucaau

SEQ ID NO: 2104446 - RNA, 19 nt, Artificial Sequence
  Description of Artificial Sequence: Synthetic oligonucleotide
  Sense strand starting at position 3435 of SEQ ID NO: 1882223
uuugguguguucuuagaaa

SEQ ID NO: 2104447 - RNA, 19 nt, Artificial Sequence
  Description of Artificial Sequence: Synthetic oligonucleotide
  Antisense strand to SEQ ID NO: 2104446
uuucuaagaacacaccaaa

SEQ ID NO: 2104448 - RNA, 19 nt, Artificial Sequence
  Description of Artificial Sequence: Synthetic oligonucleotide
  Sense strand starting at position 3862 of SEQ ID NO: 1882223
aucuguuagggcugggauu

SEQ ID NO: 2104449 - RNA, 19 nt, Artificial Sequence
  Description of Artificial Sequence: Synthetic oligonucleotide
  Antisense strand to SEQ ID NO: 2104448
aaucccagcccuaacagau

SEQ ID NO: 2104450 - RNA, 19 nt, Artificial Sequence
  Description of Artificial Sequence: Synthetic oligonucleotide
  Sense strand starting at position 3881 of SEQ ID NO: 1882223
ggaugaggccagugaggua

SEQ ID NO: 2104451 - RNA, 19 nt, Artificial Sequence
  Description of Artificial Sequence: Synthetic oligonucleotide
  Antisense strand to SEQ ID NO: 2104450
uaccucacuggccucaucc

SEQ ID NO: 2104452 - RNA, 19 nt, Artificial Sequence
  Description of Artificial Sequence: Synthetic oligonucleotide
  Sense strand starting at position 3909 of SEQ ID NO: 1882223
aguacaggcccagauguaa

SEQ ID NO: 2104453 - RNA, 19 nt, Artificial Sequence
  Description of Artificial Sequence: Synthetic oligonucleotide
  Antisense strand to SEQ ID NO: 2104452
uuacaucugggccuguacu

SEQ ID NO: 2104454 - RNA, 19 nt, Artificial Sequence
  Description of Artificial Sequence: Synthetic oligonucleotide
  Sense strand starting at position 3921 of SEQ ID NO: 1882223
gauguaaacugcucugucu

SEQ ID NO: 2104455 - RNA, 19 nt, Artificial Sequence
  Description of Artificial Sequence: Synthetic oligonucleotide
  Antisense strand to SEQ ID NO: 2104454
agacagagcaguuuacauc

SEQ ID NO: 2104456 - RNA, 19 nt, Artificial Sequence
  Description of Artificial Sequence: Synthetic oligonucleotide
  Sense strand starting at position 3923 of SEQ ID NO: 1882223
uguaaacugcucugucuua

SEQ ID NO: 2104457 - RNA, 19 nt, Artificial Sequence
  Description of Artificial Sequence: Synthetic oligonucleotide
  Antisense strand to SEQ ID NO: 2104456
uaagacagagcaguuuaca

SEQ ID NO: 2104458 - RNA, 19 nt, Artificial Sequence
  Description of Artificial Sequence: Synthetic oligonucleotide
  Sense strand starting at position 3924 of SEQ ID NO: 1882223
guaaacugcucugucuuau

SEQ ID NO: 2104459 - RNA, 19 nt, Artificial Sequence
  Description of Artificial Sequence: Synthetic oligonucleotide
  Antisense strand to SEQ ID NO: 2104458
auaagacagagcaguuuac

SEQ ID NO: 2104460 - RNA, 19 nt, Artificial Sequence
  Description of Artificial Sequence: Synthetic oligonucleotide
  Sense strand starting at position 101 of SEQ ID NO: 1882224
ugaugaccaucuuuauugu

SEQ ID NO: 2104461 - RNA, 19 nt, Artificial Sequence
  Description of Artificial Sequence: Synthetic oligonucleotide
  Antisense strand to SEQ ID NO: 2104460
acaauaaagauggucauca

SEQ ID NO: 2104462 - RNA, 19 nt, Artificial Sequence
  Description of Artificial Sequence: Synthetic oligonucleotide
  Sense strand starting at position 157 of SEQ ID NO: 1882224
gauggauuccagugcucau

SEQ ID NO: 2104463 - RNA, 19 nt, Artificial Sequence
  Description of Artificial Sequence: Synthetic oligonucleotide
  Antisense strand to SEQ ID NO: 2104462
augagcacuggaauccauc

SEQ ID NO: 2104464 - RNA, 19 nt, Artificial Sequence
  Description of Artificial Sequence: Synthetic oligonucleotide
  Sense strand starting at position 169 of SEQ ID NO: 1882224
ugcucaucggaauauaaua

SEQ ID NO: 2104465 - RNA, 19 nt, Artificial Sequence
  Description of Artificial Sequence: Synthetic oligonucleotide
  Antisense strand to SEQ ID NO: 2104464
uauuauauuccgaugagca

SEQ ID NO: 2104466 - RNA, 19 nt, Artificial Sequence
  Description of Artificial Sequence: Synthetic oligonucleotide
  Sense strand starting at position 205 of SEQ ID NO: 1882224
gagagacagucuguuucca

SEQ ID NO: 2104467 - RNA, 19 nt, Artificial Sequence
  Description of Artificial Sequence: Synthetic oligonucleotide
  Antisense strand to SEQ ID NO: 2104466
uggaaacagacugucucuc

SEQ ID NO: 2104468 - RNA, 19 nt, Artificial Sequence
  Description of Artificial Sequence: Synthetic oligonucleotide
  Sense strand starting at position 207 of SEQ ID NO: 1882224
gagacagucuguuuccaaa

SEQ ID NO: 2104469 - RNA, 19 nt, Artificial Sequence
  Description of Artificial Sequence: Synthetic oligonucleotide
  Antisense strand to SEQ ID NO: 2104468
uuuggaaacagacugucuc

SEQ ID NO: 2104470 - RNA, 19 nt, Artificial Sequence
  Description of Artificial Sequence: Synthetic oligonucleotide
  Sense strand starting at position 294 of SEQ ID NO: 1882224
uauugauaugcagguccca

SEQ ID NO: 2104471 - RNA, 19 nt, Artificial Sequence
  Description of Artificial Sequence: Synthetic oligonucleotide
  Antisense strand to SEQ ID NO: 2104470
ugggaccugcauaucaaua

SEQ ID NO: 2104472 - RNA, 19 nt, Artificial Sequence
  Description of Artificial Sequence: Synthetic oligonucleotide
  Sense strand starting at position 577 of SEQ ID NO: 1882224
cgacucaucuaauccagga

SEQ ID NO: 2104473 - RNA, 19 nt, Artificial Sequence
  Description of Artificial Sequence: Synthetic oligonucleotide
  Antisense strand to SEQ ID NO: 2104472
uccuggauuagaugagucg

SEQ ID NO: 2104474 - RNA, 19 nt, Artificial Sequence
  Description of Artificial Sequence: Synthetic oligonucleotide
  Sense strand starting at position 627 of SEQ ID NO: 1882224
uuuguugcgggcuuuguaa

SEQ ID NO: 2104475 - RNA, 19 nt, Artificial Sequence
  Description of Artificial Sequence: Synthetic oligonucleotide
  Antisense strand to SEQ ID NO: 2104474
uuacaaagcccgcaacaaa

SEQ ID NO: 2104476 - RNA, 19 nt, Artificial Sequence
  Description of Artificial Sequence: Synthetic oligonucleotide
  Sense strand starting at position 651 of SEQ ID NO: 1882224
ugucaauccuuccucgaaa

SEQ ID NO: 2104477 - RNA, 19 nt, Artificial Sequence
  Description of Artificial Sequence: Synthetic oligonucleotide
  Antisense strand to SEQ ID NO: 2104476
uuucgaggaaggauugaca

SEQ ID NO: 2104478 - RNA, 19 nt, Artificial Sequence
  Description of Artificial Sequence: Synthetic oligonucleotide
  Sense strand starting at position 652 of SEQ ID NO: 1882224
gucaauccuuccucgaaac

SEQ ID NO: 2104479 - RNA, 19 nt, Artificial Sequence
  Description of Artificial Sequence: Synthetic oligonucleotide
  Antisense strand to SEQ ID NO: 2104478
guuucgaggaaggauugac

SEQ ID NO: 2104480 - RNA, 19 nt, Artificial Sequence
  Description of Artificial Sequence: Synthetic oligonucleotide
  Sense strand starting at position 990 of SEQ ID NO: 1882224
gacuuaggacucuguuaac

SEQ ID NO: 2104481 - RNA, 19 nt, Artificial Sequence
  Description of Artificial Sequence: Synthetic oligonucleotide
  Antisense strand to SEQ ID NO: 2104480
guuaacagaguccuaaguc

SEQ ID NO: 2104482 - RNA, 19 nt, Artificial Sequence
  Description of Artificial Sequence: Synthetic oligonucleotide
  Sense strand starting at position 1085 of SEQ ID NO: 1882224
aggacacccguuuacuaau

SEQ ID NO: 2104483 - RNA, 19 nt, Artificial Sequence
  Description of Artificial Sequence: Synthetic oligonucleotide
  Antisense strand to SEQ ID NO: 2104482
auuaguaaacggguguccu

SEQ ID NO: 2104484 - RNA, 19 nt, Artificial Sequence
  Description of Artificial Sequence: Synthetic oligonucleotide
  Sense strand starting at position 1192 of SEQ ID NO: 1882224
cugaccucucggcagaaca

SEQ ID NO: 2104485 - RNA, 19 nt, Artificial Sequence
  Description of Artificial Sequence: Synthetic oligonucleotide
  Antisense strand to SEQ ID NO: 2104484
uguucugccgagaggucag

SEQ ID NO: 2104486 - RNA, 19 nt, Artificial Sequence
  Description of Artificial Sequence: Synthetic oligonucleotide
  Sense strand starting at position 2253 of SEQ ID NO: 1882224
uucugagugcggcagauuu

SEQ ID NO: 2104487 - RNA, 19 nt, Artificial Sequence
  Description of Artificial Sequence: Synthetic oligonucleotide
  Antisense strand to SEQ ID NO: 2104486
aaaucugccgcacucagaa

SEQ ID NO: 2104488 - RNA, 19 nt, Artificial Sequence
  Description of Artificial Sequence: Synthetic oligonucleotide
  Sense strand starting at position 2399 of SEQ ID NO: 1882224
cuggaucucugaccucaga

SEQ ID NO: 2104489 - RNA, 19 nt, Artificial Sequence
  Description of Artificial Sequence: Synthetic oligonucleotide
  Antisense strand to SEQ ID NO: 2104488
ucugaggucagagauccag

SEQ ID NO: 2104490 - RNA, 19 nt, Artificial Sequence
  Description of Artificial Sequence: Synthetic oligonucleotide
  Sense strand starting at position 2525 of SEQ ID NO: 1882224
guuauuaaacucugaaguu

SEQ ID NO: 2104491 - RNA, 19 nt, Artificial Sequence
  Description of Artificial Sequence: Synthetic oligonucleotide
  Antisense strand to SEQ ID NO: 2104490
aacuucagaguuuaauaac

SEQ ID NO: 2104492 - RNA, 19 nt, Artificial Sequence
  Description of Artificial Sequence: Synthetic oligonucleotide
  Sense strand starting at position 2907 of SEQ ID NO: 1882224
cuaucauauuacuccguau

SEQ ID NO: 2104493 - RNA, 19 nt, Artificial Sequence
  Description of Artificial Sequence: Synthetic oligonucleotide
  Antisense strand to SEQ ID NO: 2104492
auacggaguaauaugauag

SEQ ID NO: 2104494 - RNA, 19 nt, Artificial Sequence
  Description of Artificial Sequence: Synthetic oligonucleotide
  Sense strand starting at position 2909 of SEQ ID NO: 1882224
aucauauuacuccguauua

SEQ ID NO: 2104495 - RNA, 19 nt, Artificial Sequence
  Description of Artificial Sequence: Synthetic oligonucleotide
  Antisense strand to SEQ ID NO: 2104494
uaauacggaguaauaugau

SEQ ID NO: 2104496 - RNA, 19 nt, Artificial Sequence
  Description of Artificial Sequence: Synthetic oligonucleotide
  Sense strand starting at position 2910 of SEQ ID NO: 1882224
ucauauuacuccguauuau

SEQ ID NO: 2104497 - RNA, 19 nt, Artificial Sequence
  Description of Artificial Sequence: Synthetic oligonucleotide
  Antisense strand to SEQ ID NO: 2104496
auaauacggaguaauauga

SEQ ID NO: 2104498 - RNA, 19 nt, Artificial Sequence
  Description of Artificial Sequence: Synthetic oligonucleotide
  Sense strand starting at position 2918 of SEQ ID NO: 1882224
cuccguauuauugaucgga

SEQ ID NO: 2104499 - RNA, 19 nt, Artificial Sequence
  Description of Artificial Sequence: Synthetic oligonucleotide
  Antisense strand to SEQ ID NO: 2104498
uccgaucaauaauacggag

SEQ ID NO: 2104500 - RNA, 19 nt, Artificial Sequence
  Description of Artificial Sequence: Synthetic oligonucleotide
  Sense strand starting at position 2920 of SEQ ID NO: 1882224
ccguauuauugaucggaaa

SEQ ID NO: 2104501 - RNA, 19 nt, Artificial Sequence
  Description of Artificial Sequence: Synthetic oligonucleotide
  Antisense strand to SEQ ID NO: 2104500
uuuccgaucaauaauacgg

SEQ ID NO: 2104502 - RNA, 19 nt, Artificial Sequence
  Description of Artificial Sequence: Synthetic oligonucleotide
  Sense strand starting at position 2921 of SEQ ID NO: 1882224
cguauuauugaucggaaau

SEQ ID NO: 2104503 - RNA, 19 nt, Artificial Sequence
  Description of Artificial Sequence: Synthetic oligonucleotide
  Antisense strand to SEQ ID NO: 2104502
auuuccgaucaauaauacg

SEQ ID NO: 2104504 - RNA, 19 nt, Artificial Sequence
  Description of Artificial Sequence: Synthetic oligonucleotide
  Sense strand starting at position 2922 of SEQ ID NO: 1882224
guauuauugaucggaaaua

SEQ ID NO: 2104505 - RNA, 19 nt, Artificial Sequence
  Description of Artificial Sequence: Synthetic oligonucleotide
  Antisense strand to SEQ ID NO: 2104504
uauuuccgaucaauaauac

SEQ ID NO: 2104506 - RNA, 19 nt, Artificial Sequence
  Description of Artificial Sequence: Synthetic oligonucleotide
  Sense strand starting at position 2940 of SEQ ID NO: 1882224
acauguauuugcuuucuuu

SEQ ID NO: 2104507 - RNA, 19 nt, Artificial Sequence
  Description of Artificial Sequence: Synthetic oligonucleotide
  Antisense strand to SEQ ID NO: 2104506
aaagaaagcaaauacaugu

SEQ ID NO: 2104508 - RNA, 19 nt, Artificial Sequence
  Description of Artificial Sequence: Synthetic oligonucleotide
  Sense strand starting at position 3124 of SEQ ID NO: 1882224
gguucugaggaaugugaac

SEQ ID NO: 2104509 - RNA, 19 nt, Artificial Sequence
  Description of Artificial Sequence: Synthetic oligonucleotide
  Antisense strand to SEQ ID NO: 2104508
guucacauuccucagaacc

SEQ ID NO: 2104510 - RNA, 19 nt, Artificial Sequence
  Description of Artificial Sequence: Synthetic oligonucleotide
  Sense strand starting at position 3172 of SEQ ID NO: 1882224
ucgccauuucuguacuugu

SEQ ID NO: 2104511 - RNA, 19 nt, Artificial Sequence
  Description of Artificial Sequence: Synthetic oligonucleotide
  Antisense strand to SEQ ID NO: 2104510
acaaguacagaaauggcga

SEQ ID NO: 2104512 - RNA, 19 nt, Artificial Sequence
  Description of Artificial Sequence: Synthetic oligonucleotide
  Sense strand starting at position 3194 of SEQ ID NO: 1882224
ccauaucuucugggcaaca

SEQ ID NO: 2104513 - RNA, 19 nt, Artificial Sequence
  Description of Artificial Sequence: Synthetic oligonucleotide
  Antisense strand to SEQ ID NO: 2104512
uguugcccagaagauaugg

SEQ ID NO: 2104514 - RNA, 19 nt, Artificial Sequence
  Description of Artificial Sequence: Synthetic oligonucleotide
  Sense strand starting at position 3234 of SEQ ID NO: 1882224
guagaaagcccucaaucaa

SEQ ID NO: 2104515 - RNA, 19 nt, Artificial Sequence
  Description of Artificial Sequence: Synthetic oligonucleotide
  Antisense strand to SEQ ID NO: 2104514
uugauugagggcuuucuac

SEQ ID NO: 2104516 - RNA, 19 nt, Artificial Sequence
  Description of Artificial Sequence: Synthetic oligonucleotide
  Sense strand starting at position 3323 of SEQ ID NO: 1882224
gggagaguguuccuucuuc

SEQ ID NO: 2104517 - RNA, 19 nt, Artificial Sequence
  Description of Artificial Sequence: Synthetic oligonucleotide
  Antisense strand to SEQ ID NO: 2104516
gaagaaggaacacucuccc

SEQ ID NO: 2104518 - RNA, 19 nt, Artificial Sequence
  Description of Artificial Sequence: Synthetic oligonucleotide
  Sense strand starting at position 3439 of SEQ ID NO: 1882224
ccaccuuccugcuuagaga

SEQ ID NO: 2104519 - RNA, 19 nt, Artificial Sequence
  Description of Artificial Sequence: Synthetic oligonucleotide
  Antisense strand to SEQ ID NO: 2104518
ucucuaagcaggaaggugg

SEQ ID NO: 2104520 - RNA, 19 nt, Artificial Sequence
  Description of Artificial Sequence: Synthetic oligonucleotide
  Sense strand starting at position 3462 of SEQ ID NO: 1882224
acagaaucguuaguggacu

SEQ ID NO: 2104521 - RNA, 19 nt, Artificial Sequence
  Description of Artificial Sequence: Synthetic oligonucleotide
  Antisense strand to SEQ ID NO: 2104520
aguccacuaacgauucugu

SEQ ID NO: 2104522 - RNA, 19 nt, Artificial Sequence
  Description of Artificial Sequence: Synthetic oligonucleotide
  Sense strand starting at position 3527 of SEQ ID NO: 1882224
ggucuugagcaagaugauc

SEQ ID NO: 2104523 - RNA, 19 nt, Artificial Sequence
  Description of Artificial Sequence: Synthetic oligonucleotide
  Antisense strand to SEQ ID NO: 2104522
gaucaucuugcucaagacc

SEQ ID NO: 2104524 - RNA, 19 nt, Artificial Sequence
  Description of Artificial Sequence: Synthetic oligonucleotide
  Sense strand starting at position 3532 of SEQ ID NO: 1882224
ugagcaagaugaucaacuu

SEQ ID NO: 2104525 - RNA, 19 nt, Artificial Sequence
  Description of Artificial Sequence: Synthetic oligonucleotide
  Antisense strand to SEQ ID NO: 2104524
aaguugaucaucuugcuca

SEQ ID NO: 2104526 - RNA, 19 nt, Artificial Sequence
  Description of Artificial Sequence: Synthetic oligonucleotide
  Sense strand starting at position 3606 of SEQ ID NO: 1882224
ugaagcuucuauccagcaa

SEQ ID NO: 2104527 - RNA, 19 nt, Artificial Sequence
  Description of Artificial Sequence: Synthetic oligonucleotide
  Antisense strand to SEQ ID NO: 2104526
uugcuggauagaagcuuca

SEQ ID NO: 2104528 - RNA, 19 nt, Artificial Sequence
  Description of Artificial Sequence: Synthetic oligonucleotide
  Sense strand starting at position 3675 of SEQ ID NO: 1882224
cagucagaugaacguuuaa

SEQ ID NO: 2104529 - RNA, 19 nt, Artificial Sequence
  Description of Artificial Sequence: Synthetic oligonucleotide
  Antisense strand to SEQ ID NO: 2104528
uuaaacguucaucugacug

SEQ ID NO: 2104530 - RNA, 19 nt, Artificial Sequence
  Description of Artificial Sequence: Synthetic oligonucleotide
  Sense strand starting at position 3713 of SEQ ID NO: 1882224
acugguacuugaccaugaa

SEQ ID NO: 2104531 - RNA, 19 nt, Artificial Sequence
  Description of Artificial Sequence: Synthetic oligonucleotide
  Antisense strand to SEQ ID NO: 2104530
uucauggucaaguaccagu

SEQ ID NO: 2104532 - RNA, 19 nt, Artificial Sequence
  Description of Artificial Sequence: Synthetic oligonucleotide
  Sense strand starting at position 3716 of SEQ ID NO: 1882224
gguacuugaccaugaauga

SEQ ID NO: 2104533 - RNA, 19 nt, Artificial Sequence
  Description of Artificial Sequence: Synthetic oligonucleotide
  Antisense strand to SEQ ID NO: 2104532
ucauucauggucaaguacc

SEQ ID NO: 2104534 - RNA, 19 nt, Artificial Sequence
  Description of Artificial Sequence: Synthetic oligonucleotide
  Sense strand starting at position 3794 of SEQ ID NO: 1882224
acucuucuuguagauauau

SEQ ID NO: 2104535 - RNA, 19 nt, Artificial Sequence
  Description of Artificial Sequence: Synthetic oligonucleotide
  Antisense strand to SEQ ID NO: 2104534
auauaucuacaagaagagu

SEQ ID NO: 2104536 - RNA, 19 nt, Artificial Sequence
  Description of Artificial Sequence: Synthetic oligonucleotide
  Sense strand starting at position 3916 of SEQ ID NO: 1882224
ugcccagaguuccuaucaa

SEQ ID NO: 2104537 - RNA, 19 nt, Artificial Sequence
  Description of Artificial Sequence: Synthetic oligonucleotide
  Antisense strand to SEQ ID NO: 2104536
uugauaggaacucugggca

SEQ ID NO: 2104538 - RNA, 19 nt, Artificial Sequence
  Description of Artificial Sequence: Synthetic oligonucleotide
  Sense strand starting at position 3972 of SEQ ID NO: 1882224
ggagacuauuaacaccaga

SEQ ID NO: 2104539 - RNA, 19 nt, Artificial Sequence
  Description of Artificial Sequence: Synthetic oligonucleotide
  Antisense strand to SEQ ID NO: 2104538
ucugguguuaauagucucc

SEQ ID NO: 2104540 - RNA, 19 nt, Artificial Sequence
  Description of Artificial Sequence: Synthetic oligonucleotide
  Sense strand starting at position 161 of SEQ ID NO: 1882225
ucugcagccugauuucuaa

SEQ ID NO: 2104541 - RNA, 19 nt, Artificial Sequence
  Description of Artificial Sequence: Synthetic oligonucleotide
  Antisense strand to SEQ ID NO: 2104540
uuagaaaucaggcugcaga

SEQ ID NO: 2104542 - RNA, 19 nt, Artificial Sequence
  Description of Artificial Sequence: Synthetic oligonucleotide
  Sense strand starting at position 257 of SEQ ID NO: 1882225
ugcaaauaauuggcuguaa

SEQ ID NO: 2104543 - RNA, 19 nt, Artificial Sequence
  Description of Artificial Sequence: Synthetic oligonucleotide
  Antisense strand to SEQ ID NO: 2104542
uuacagccaauuauuugca

SEQ ID NO: 2104544 - RNA, 19 nt, Artificial Sequence
  Description of Artificial Sequence: Synthetic oligonucleotide
  Sense strand starting at position 258 of SEQ ID NO: 1882225
gcaaauaauuggcuguaag

SEQ ID NO: 2104545 - RNA, 19 nt, Artificial Sequence
  Description of Artificial Sequence: Synthetic oligonucleotide
  Antisense strand to SEQ ID NO: 2104544
cuuacagccaauuauuugc

SEQ ID NO: 2104546 - RNA, 19 nt, Artificial Sequence
  Description of Artificial Sequence: Synthetic oligonucleotide
  Sense strand starting at position 337 of SEQ ID NO: 1882225
guaaccauccagggaggua

SEQ ID NO: 2104547 - RNA, 19 nt, Artificial Sequence
  Description of Artificial Sequence: Synthetic oligonucleotide
  Antisense strand to SEQ ID NO: 2104546
uaccucccuggaugguuac

SEQ ID NO: 2104548 - RNA, 19 nt, Artificial Sequence
  Description of Artificial Sequence: Synthetic oligonucleotide
  Sense strand starting at position 351 of SEQ ID NO: 1882225
agguaucuguaagcaacua

SEQ ID NO: 2104549 - RNA, 19 nt, Artificial Sequence
  Description of Artificial Sequence: Synthetic oligonucleotide
  Antisense strand to SEQ ID NO: 2104548
uaguugcuuacagauaccu

SEQ ID NO: 2104550 - RNA, 19 nt, Artificial Sequence
  Description of Artificial Sequence: Synthetic oligonucleotide
  Sense strand starting at position 423 of SEQ ID NO: 1882225
aagugaagugcaugcaaga

SEQ ID NO: 2104551 - RNA, 19 nt, Artificial Sequence
  Description of Artificial Sequence: Synthetic oligonucleotide
  Antisense strand to SEQ ID NO: 2104550
ucuugcaugcacuucacuu

SEQ ID NO: 2104552 - RNA, 19 nt, Artificial Sequence
  Description of Artificial Sequence: Synthetic oligonucleotide
  Sense strand starting at position 465 of SEQ ID NO: 1882225
ggcuaaagugcacagaauu

SEQ ID NO: 2104553 - RNA, 19 nt, Artificial Sequence
  Description of Artificial Sequence: Synthetic oligonucleotide
  Antisense strand to SEQ ID NO: 2104552
aauucugugcacuuuagcc

SEQ ID NO: 2104554 - RNA, 19 nt, Artificial Sequence
  Description of Artificial Sequence: Synthetic oligonucleotide
  Sense strand starting at position 704 of SEQ ID NO: 1882225
gagggaaucuaccugcagu

SEQ ID NO: 2104555 - RNA, 19 nt, Artificial Sequence
  Description of Artificial Sequence: Synthetic oligonucleotide
  Antisense strand to SEQ ID NO: 2104554
acugcagguagauucccuc

SEQ ID NO: 2104556 - RNA, 19 nt, Artificial Sequence
  Description of Artificial Sequence: Synthetic oligonucleotide
  Sense strand starting at position 762 of SEQ ID NO: 1882225
uuucuauggguauguuuaa

SEQ ID NO: 2104557 - RNA, 19 nt, Artificial Sequence
  Description of Artificial Sequence: Synthetic oligonucleotide
  Antisense strand to SEQ ID NO: 2104556
uuaaacauacccauagaaa

SEQ ID NO: 2104558 - RNA, 19 nt, Artificial Sequence
  Description of Artificial Sequence: Synthetic oligonucleotide
  Sense strand starting at position 769 of SEQ ID NO: 1882225
ggguauguuuaaccagcca

SEQ ID NO: 2104559 - RNA, 19 nt, Artificial Sequence
  Description of Artificial Sequence: Synthetic oligonucleotide
  Antisense strand to SEQ ID NO: 2104558
uggcugguuaaacauaccc

SEQ ID NO: 2104560 - RNA, 19 nt, Artificial Sequence
  Description of Artificial Sequence: Synthetic oligonucleotide
  Sense strand starting at position 911 of SEQ ID NO: 1882225
ggaguucacgacgaugaca

SEQ ID NO: 2104561 - RNA, 19 nt, Artificial Sequence
  Description of Artificial Sequence: Synthetic oligonucleotide
  Antisense strand to SEQ ID NO: 2104560
ugucaucgucgugaacucc

SEQ ID NO: 2104562 - RNA, 19 nt, Artificial Sequence
  Description of Artificial Sequence: Synthetic oligonucleotide
  Sense strand starting at position 919 of SEQ ID NO: 1882225
cgacgaugacacugaauaa

SEQ ID NO: 2104563 - RNA, 19 nt, Artificial Sequence
  Description of Artificial Sequence: Synthetic oligonucleotide
  Antisense strand to SEQ ID NO: 2104562
uuauucagugucaucgucg

SEQ ID NO: 2104564 - RNA, 19 nt, Artificial Sequence
  Description of Artificial Sequence: Synthetic oligonucleotide
  Sense strand starting at position 1005 of SEQ ID NO: 1882225
acaauuauguaacucgaaa

SEQ ID NO: 2104565 - RNA, 19 nt, Artificial Sequence
  Description of Artificial Sequence: Synthetic oligonucleotide
  Antisense strand to SEQ ID NO: 2104564
uuucgaguuacauaauugu

SEQ ID NO: 2104566 - RNA, 19 nt, Artificial Sequence
  Description of Artificial Sequence: Synthetic oligonucleotide
  Sense strand starting at position 1072 of SEQ ID NO: 1882225
ucaguaagaucagccuaga

SEQ ID NO: 2104567 - RNA, 19 nt, Artificial Sequence
  Description of Artificial Sequence: Synthetic oligonucleotide
  Antisense strand to SEQ ID NO: 2104566
ucuaggcugaucuuacuga

SEQ ID NO: 2104568 - RNA, 19 nt, Artificial Sequence
  Description of Artificial Sequence: Synthetic oligonucleotide
  Sense strand starting at position 1075 of SEQ ID NO: 1882225
guaagaucagccuagagua

SEQ ID NO: 2104569 - RNA, 19 nt, Artificial Sequence
  Description of Artificial Sequence: Synthetic oligonucleotide
  Antisense strand to SEQ ID NO: 2104568
uacucuaggcugaucuuac

SEQ ID NO: 2104570 - RNA, 19 nt, Artificial Sequence
  Description of Artificial Sequence: Synthetic oligonucleotide
  Sense strand starting at position 1143 of SEQ ID NO: 1882225
uggcaaauuccacguagaa

SEQ ID NO: 2104571 - RNA, 19 nt, Artificial Sequence
  Description of Artificial Sequence: Synthetic oligonucleotide
  Antisense strand to SEQ ID NO: 2104570
uucuacguggaauuugcca

SEQ ID NO: 2104572 - RNA, 19 nt, Artificial Sequence
  Description of Artificial Sequence: Synthetic oligonucleotide
  Sense strand starting at position 1193 of SEQ ID NO: 1882225
agccgaaauguacaaguuu

SEQ ID NO: 2104573 - RNA, 19 nt, Artificial Sequence
  Description of Artificial Sequence: Synthetic oligonucleotide
  Antisense strand to SEQ ID NO: 2104572
aaacuuguacauuucggcu

SEQ ID NO: 2104574 - RNA, 19 nt, Artificial Sequence
  Description of Artificial Sequence: Synthetic oligonucleotide
  Sense strand starting at position 1200 of SEQ ID NO: 1882225
auguacaaguuuccacaaa

SEQ ID NO: 2104575 - RNA, 19 nt, Artificial Sequence
  Description of Artificial Sequence: Synthetic oligonucleotide
  Antisense strand to SEQ ID NO: 2104574
uuuguggaaacuuguacau

SEQ ID NO: 2104576 - RNA, 19 nt, Artificial Sequence
  Description of Artificial Sequence: Synthetic oligonucleotide
  Sense strand starting at position 1368 of SEQ ID NO: 1882225
gcacagauucgugcggguu

SEQ ID NO: 2104577 - RNA, 19 nt, Artificial Sequence
  Description of Artificial Sequence: Synthetic oligonucleotide
  Antisense strand to SEQ ID NO: 2104576
aacccgcacgaaucugugc

SEQ ID NO: 2104578 - RNA, 19 nt, Artificial Sequence
  Description of Artificial Sequence: Synthetic oligonucleotide
  Sense strand starting at position 1413 of SEQ ID NO: 1882225
gcuucuuagccguuacucu

SEQ ID NO: 2104579 - RNA, 19 nt, Artificial Sequence
  Description of Artificial Sequence: Synthetic oligonucleotide
  Antisense strand to SEQ ID NO: 2104578
agaguaacggcuaagaagc

SEQ ID NO: 2104580 - RNA, 19 nt, Artificial Sequence
  Description of Artificial Sequence: Synthetic oligonucleotide
  Sense strand starting at position 1457 of SEQ ID NO: 1882225
auacguguucuccaagaag

SEQ ID NO: 2104581 - RNA, 19 nt, Artificial Sequence
  Description of Artificial Sequence: Synthetic oligonucleotide
  Antisense strand to SEQ ID NO: 2104580
cuucuuggagaacacguau

SEQ ID NO: 2104582 - RNA, 19 nt, Artificial Sequence
  Description of Artificial Sequence: Synthetic oligonucleotide
  Sense strand starting at position 1469 of SEQ ID NO: 1882225
caagaagcagaguguuaag

SEQ ID NO: 2104583 - RNA, 19 nt, Artificial Sequence
  Description of Artificial Sequence: Synthetic oligonucleotide
  Antisense strand to SEQ ID NO: 2104582
cuuaacacucugcuucuug

SEQ ID NO: 2104584 - RNA, 19 nt, Artificial Sequence
  Description of Artificial Sequence: Synthetic oligonucleotide
  Sense strand starting at position 1478 of SEQ ID NO: 1882225
gaguguuaaguccacacga

SEQ ID NO: 2104585 - RNA, 19 nt, Artificial Sequence
  Description of Artificial Sequence: Synthetic oligonucleotide
  Antisense strand to SEQ ID NO: 2104584
ucguguggacuuaacacuc

SEQ ID NO: 2104586 - RNA, 19 nt, Artificial Sequence
  Description of Artificial Sequence: Synthetic oligonucleotide
  Sense strand starting at position 1483 of SEQ ID NO: 1882225
uuaaguccacacgagugau

SEQ ID NO: 2104587 - RNA, 19 nt, Artificial Sequence
  Description of Artificial Sequence: Synthetic oligonucleotide
  Antisense strand to SEQ ID NO: 2104586
aucacucguguggacuuaa

SEQ ID NO: 2104588 - RNA, 19 nt, Artificial Sequence
  Description of Artificial Sequence: Synthetic oligonucleotide
  Sense strand starting at position 1486 of SEQ ID NO: 1882225
aguccacacgagugauaac

SEQ ID NO: 2104589 - RNA, 19 nt, Artificial Sequence
  Description of Artificial Sequence: Synthetic oligonucleotide
  Antisense strand to SEQ ID NO: 2104588
guuaucacucguguggacu

SEQ ID NO: 2104590 - RNA, 19 nt, Artificial Sequence
  Description of Artificial Sequence: Synthetic oligonucleotide
  Sense strand starting at position 1495 of SEQ ID NO: 1882225
gagugauaacggcuugcgu

SEQ ID NO: 2104591 - RNA, 19 nt, Artificial Sequence
  Description of Artificial Sequence: Synthetic oligonucleotide
  Antisense strand to SEQ ID NO: 2104590
acgcaagccguuaucacuc

SEQ ID NO: 2104592 - RNA, 19 nt, Artificial Sequence
  Description of Artificial Sequence: Synthetic oligonucleotide
  Sense strand starting at position 1496 of SEQ ID NO: 1882225
agugauaacggcuugcguu

SEQ ID NO: 2104593 - RNA, 19 nt, Artificial Sequence
  Description of Artificial Sequence: Synthetic oligonucleotide
  Antisense strand to SEQ ID NO: 2104592
aacgcaagccguuaucacu

SEQ ID NO: 2104594 - RNA, 19 nt, Artificial Sequence
  Description of Artificial Sequence: Synthetic oligonucleotide
  Sense strand starting at position 2432 of SEQ ID NO: 1882225
gggugaucccgggaggacu

SEQ ID NO: 2104595 - RNA, 19 nt, Artificial Sequence
  Description of Artificial Sequence: Synthetic oligonucleotide
  Antisense strand to SEQ ID NO: 2104594
aguccucccgggaucaccc

SEQ ID NO: 2104596 - RNA, 19 nt, Artificial Sequence
  Description of Artificial Sequence: Synthetic oligonucleotide
  Sense strand starting at position 2772 of SEQ ID NO: 1882225
uuuagugucagugaagagu

SEQ ID NO: 2104597 - RNA, 19 nt, Artificial Sequence
  Description of Artificial Sequence: Synthetic oligonucleotide
  Antisense strand to SEQ ID NO: 2104596
acucuucacugacacuaaa

SEQ ID NO: 2104598 - RNA, 19 nt, Artificial Sequence
  Description of Artificial Sequence: Synthetic oligonucleotide
  Sense strand starting at position 2780 of SEQ ID NO: 1882225
cagugaagaguuuguggau

SEQ ID NO: 2104599 - RNA, 19 nt, Artificial Sequence
  Description of Artificial Sequence: Synthetic oligonucleotide
  Antisense strand to SEQ ID NO: 2104598
auccacaaacucuucacug

SEQ ID NO: 2104600 - RNA, 19 nt, Artificial Sequence
  Description of Artificial Sequence: Synthetic oligonucleotide
  Sense strand starting at position 2781 of SEQ ID NO: 1882225
agugaagaguuuguggaua

SEQ ID NO: 2104601 - RNA, 19 nt, Artificial Sequence
  Description of Artificial Sequence: Synthetic oligonucleotide
  Antisense strand to SEQ ID NO: 2104600
uauccacaaacucuucacu

SEQ ID NO: 2104602 - RNA, 19 nt, Artificial Sequence
  Description of Artificial Sequence: Synthetic oligonucleotide
  Sense strand starting at position 2803 of SEQ ID NO: 1882225
uugaguucugcugaggcau

SEQ ID NO: 2104603 - RNA, 19 nt, Artificial Sequence
  Description of Artificial Sequence: Synthetic oligonucleotide
  Antisense strand to SEQ ID NO: 2104602
augccucagcagaacucaa

SEQ ID NO: 2104604 - RNA, 19 nt, Artificial Sequence
  Description of Artificial Sequence: Synthetic oligonucleotide
  Sense strand starting at position 3039 of SEQ ID NO: 1882225
aauuguaagucuuuggaca

SEQ ID NO: 2104605 - RNA, 19 nt, Artificial Sequence
  Description of Artificial Sequence: Synthetic oligonucleotide
  Antisense strand to SEQ ID NO: 2104604
uguccaaagacuuacaauu

SEQ ID NO: 2104606 - RNA, 19 nt, Artificial Sequence
  Description of Artificial Sequence: Synthetic oligonucleotide
  Sense strand starting at position 3072 of SEQ ID NO: 1882225
augauauugcccuguugag

SEQ ID NO: 2104607 - RNA, 19 nt, Artificial Sequence
  Description of Artificial Sequence: Synthetic oligonucleotide
  Antisense strand to SEQ ID NO: 2104606
cucaacagggcaauaucau

SEQ ID NO: 2104608 - RNA, 19 nt, Artificial Sequence
  Description of Artificial Sequence: Synthetic oligonucleotide
  Sense strand starting at position 3097 of SEQ ID NO: 1882225
uggaaauugcccuguugag

SEQ ID NO: 2104609 - RNA, 19 nt, Artificial Sequence
  Description of Artificial Sequence: Synthetic oligonucleotide
  Antisense strand to SEQ ID NO: 2104608
cucaacagggcaauuucca

SEQ ID NO: 2104610 - RNA, 19 nt, Artificial Sequence
  Description of Artificial Sequence: Synthetic oligonucleotide
  Sense strand starting at position 3244 of SEQ ID NO: 1882225
cagguagaucuggguaaua

SEQ ID NO: 2104611 - RNA, 19 nt, Artificial Sequence
  Description of Artificial Sequence: Synthetic oligonucleotide
  Antisense strand to SEQ ID NO: 2104610
uauuacccagaucuaccug

SEQ ID NO: 2104612 - RNA, 19 nt, Artificial Sequence
  Description of Artificial Sequence: Synthetic oligonucleotide
  Sense strand starting at position 3246 of SEQ ID NO: 1882225
gguagaucuggguaauagu

SEQ ID NO: 2104613 - RNA, 19 nt, Artificial Sequence
  Description of Artificial Sequence: Synthetic oligonucleotide
  Antisense strand to SEQ ID NO: 2104612
acuauuacccagaucuacc

SEQ ID NO: 2104614 - RNA, 19 nt, Artificial Sequence
  Description of Artificial Sequence: Synthetic oligonucleotide
  Sense strand starting at position 3684 of SEQ ID NO: 1882225
gcuguuagauaaccucaga

SEQ ID NO: 2104615 - RNA, 19 nt, Artificial Sequence
  Description of Artificial Sequence: Synthetic oligonucleotide
  Antisense strand to SEQ ID NO: 2104614
ucugagguuaucuaacagc

SEQ ID NO: 2104616 - RNA, 19 nt, Artificial Sequence
  Description of Artificial Sequence: Synthetic oligonucleotide
  Sense strand starting at position 3889 of SEQ ID NO: 1882225
gugggaaauuagcuuaucu

SEQ ID NO: 2104617 - RNA, 19 nt, Artificial Sequence
  Description of Artificial Sequence: Synthetic oligonucleotide
  Antisense strand to SEQ ID NO: 2104616
agauaagcuaauuucccac

SEQ ID NO: 2104618 - RNA, 19 nt, Artificial Sequence
  Description of Artificial Sequence: Synthetic oligonucleotide
  Sense strand starting at position 3935 of SEQ ID NO: 1882225
gaaagagcaugugucaaag

SEQ ID NO: 2104619 - RNA, 19 nt, Artificial Sequence
  Description of Artificial Sequence: Synthetic oligonucleotide
  Antisense strand to SEQ ID NO: 2104618
cuuugacacaugcucuuuc

SEQ ID NO: 2104620 - RNA, 19 nt, Artificial Sequence
  Description of Artificial Sequence: Synthetic oligonucleotide
  Sense strand starting at position 244 of SEQ ID NO: 1882226
ccaugaagugcuuacuaug

SEQ ID NO: 2104621 - RNA, 19 nt, Artificial Sequence
  Description of Artificial Sequence: Synthetic oligonucleotide
  Antisense strand to SEQ ID NO: 2104620
cauaguaagcacuucaugg

SEQ ID NO: 2104622 - RNA, 19 nt, Artificial Sequence
  Description of Artificial Sequence: Synthetic oligonucleotide
  Sense strand starting at position 283 of SEQ ID NO: 1882226
ugaugauuguuucucauac

SEQ ID NO: 2104623 - RNA, 19 nt, Artificial Sequence
  Description of Artificial Sequence: Synthetic oligonucleotide
  Antisense strand to SEQ ID NO: 2104622
guaugagaaacaaucauca

SEQ ID NO: 2104624 - RNA, 19 nt, Artificial Sequence
  Description of Artificial Sequence: Synthetic oligonucleotide
  Sense strand starting at position 797 of SEQ ID NO: 1882226
gccgaagggacggaauuau

SEQ ID NO: 2104625 - RNA, 19 nt, Artificial Sequence
  Description of Artificial Sequence: Synthetic oligonucleotide
  Antisense strand to SEQ ID NO: 2104624
auaauuccgucccuucggc

SEQ ID NO: 2104626 - RNA, 19 nt, Artificial Sequence
  Description of Artificial Sequence: Synthetic oligonucleotide
  Sense strand starting at position 885 of SEQ ID NO: 1882226
ggcugaucuuaggcugaac

SEQ ID NO: 2104627 - RNA, 19 nt, Artificial Sequence
  Description of Artificial Sequence: Synthetic oligonucleotide
  Antisense strand to SEQ ID NO: 2104626
guucagccuaagaucagcc

SEQ ID NO: 2104628 - RNA, 19 nt, Artificial Sequence
  Description of Artificial Sequence: Synthetic oligonucleotide
  Sense strand starting at position 1067 of SEQ ID NO: 1882226
guagucuuccuacaaccaa

SEQ ID NO: 2104629 - RNA, 19 nt, Artificial Sequence
  Description of Artificial Sequence: Synthetic oligonucleotide
  Antisense strand to SEQ ID NO: 2104628
uugguuguaggaagacuac

SEQ ID NO: 2104630 - RNA, 19 nt, Artificial Sequence
  Description of Artificial Sequence: Synthetic oligonucleotide
  Sense strand starting at position 1158 of SEQ ID NO: 1882226
gcaaucucauaccuuguga

SEQ ID NO: 2104631 - RNA, 19 nt, Artificial Sequence
  Description of Artificial Sequence: Synthetic oligonucleotide
  Antisense strand to SEQ ID NO: 2104630
ucacaagguaugagauugc

SEQ ID NO: 2104632 - RNA, 19 nt, Artificial Sequence
  Description of Artificial Sequence: Synthetic oligonucleotide
  Sense strand starting at position 1197 of SEQ ID NO: 1882226
ggucguaacacuuaaacug

SEQ ID NO: 2104633 - RNA, 19 nt, Artificial Sequence
  Description of Artificial Sequence: Synthetic oligonucleotide
  Antisense strand to SEQ ID NO: 2104632
caguuuaaguguuacgacc

SEQ ID NO: 2104634 - RNA, 19 nt, Artificial Sequence
  Description of Artificial Sequence: Synthetic oligonucleotide
  Sense strand starting at position 1213 of SEQ ID NO: 1882226
cugauaauccaaggcuuua

SEQ ID NO: 2104635 - RNA, 19 nt, Artificial Sequence
  Description of Artificial Sequence: Synthetic oligonucleotide
  Antisense strand to SEQ ID NO: 2104634
uaaagccuuggauuaucag

SEQ ID NO: 2104636 - RNA, 19 nt, Artificial Sequence
  Description of Artificial Sequence: Synthetic oligonucleotide
  Sense strand starting at position 1261 of SEQ ID NO: 1882226
ggccaagacuccuuaggug

SEQ ID NO: 2104637 - RNA, 19 nt, Artificial Sequence
  Description of Artificial Sequence: Synthetic oligonucleotide
  Antisense strand to SEQ ID NO: 2104636
caccuaaggagucuuggcc

SEQ ID NO: 2104638 - RNA, 19 nt, Artificial Sequence
  Description of Artificial Sequence: Synthetic oligonucleotide
  Sense strand starting at position 1436 of SEQ ID NO: 1882226
cccuguuagcuauaacgga

SEQ ID NO: 2104639 - RNA, 19 nt, Artificial Sequence
  Description of Artificial Sequence: Synthetic oligonucleotide
  Antisense strand to SEQ ID NO: 2104638
uccguuauagcuaacaggg

SEQ ID NO: 2104640 - RNA, 19 nt, Artificial Sequence
  Description of Artificial Sequence: Synthetic oligonucleotide
  Sense strand starting at position 1470 of SEQ ID NO: 1882226
cugaaugaaaggugcgauu

SEQ ID NO: 2104641 - RNA, 19 nt, Artificial Sequence
  Description of Artificial Sequence: Synthetic oligonucleotide
  Antisense strand to SEQ ID NO: 2104640
aaucgcaccuuucauucag

SEQ ID NO: 2104642 - RNA, 19 nt, Artificial Sequence
  Description of Artificial Sequence: Synthetic oligonucleotide
  Sense strand starting at position 1472 of SEQ ID NO: 1882226
gaaugaaaggugcgauuac

SEQ ID NO: 2104643 - RNA, 19 nt, Artificial Sequence
  Description of Artificial Sequence: Synthetic oligonucleotide
  Antisense strand to SEQ ID NO: 2104642
guaaucgcaccuuucauuc

SEQ ID NO: 2104644 - RNA, 19 nt, Artificial Sequence
  Description of Artificial Sequence: Synthetic oligonucleotide
  Sense strand starting at position 1516 of SEQ ID NO: 1882226
gaauacauuccagguuggu

SEQ ID NO: 2104645 - RNA, 19 nt, Artificial Sequence
  Description of Artificial Sequence: Synthetic oligonucleotide
  Antisense strand to SEQ ID NO: 2104644
accaaccuggaauguauuc

SEQ ID NO: 2104646 - RNA, 19 nt, Artificial Sequence
  Description of Artificial Sequence: Synthetic oligonucleotide
  Sense strand starting at position 1848 of SEQ ID NO: 1882226
cgcccugagcacuguauuu

SEQ ID NO: 2104647 - RNA, 19 nt, Artificial Sequence
  Description of Artificial Sequence: Synthetic oligonucleotide
  Antisense strand to SEQ ID NO: 2104646
aaauacagugcucagggcg

SEQ ID NO: 2104648 - RNA, 19 nt, Artificial Sequence
  Description of Artificial Sequence: Synthetic oligonucleotide
  Sense strand starting at position 1888 of SEQ ID NO: 1882226
ggacuucuccaguagcgac

SEQ ID NO: 2104649 - RNA, 19 nt, Artificial Sequence
  Description of Artificial Sequence: Synthetic oligonucleotide
  Antisense strand to SEQ ID NO: 2104648
gucgcuacuggagaagucc

SEQ ID NO: 2104650 - RNA, 19 nt, Artificial Sequence
  Description of Artificial Sequence: Synthetic oligonucleotide
  Sense strand starting at position 2119 of SEQ ID NO: 1882226
uggagaagugaugguaaau

SEQ ID NO: 2104651 - RNA, 19 nt, Artificial Sequence
  Description of Artificial Sequence: Synthetic oligonucleotide
  Antisense strand to SEQ ID NO: 2104650
auuuaccaucacuucucca

SEQ ID NO: 2104652 - RNA, 19 nt, Artificial Sequence
  Description of Artificial Sequence: Synthetic oligonucleotide
  Sense strand starting at position 2157 of SEQ ID NO: 1882226
gagcuaguuacugguagaa

SEQ ID NO: 2104653 - RNA, 19 nt, Artificial Sequence
  Description of Artificial Sequence: Synthetic oligonucleotide
  Antisense strand to SEQ ID NO: 2104652
uucuaccaguaacuagcuc

SEQ ID NO: 2104654 - RNA, 19 nt, Artificial Sequence
  Description of Artificial Sequence: Synthetic oligonucleotide
  Sense strand starting at position 2258 of SEQ ID NO: 1882226
guaacucguuaacucauuu

SEQ ID NO: 2104655 - RNA, 19 nt, Artificial Sequence
  Description of Artificial Sequence: Synthetic oligonucleotide
  Antisense strand to SEQ ID NO: 2104654
aaaugaguuaacgaguuac

SEQ ID NO: 2104656 - RNA, 19 nt, Artificial Sequence
  Description of Artificial Sequence: Synthetic oligonucleotide
  Sense strand starting at position 2262 of SEQ ID NO: 1882226
cucguuaacucauuugcua

SEQ ID NO: 2104657 - RNA, 19 nt, Artificial Sequence
  Description of Artificial Sequence: Synthetic oligonucleotide
  Antisense strand to SEQ ID NO: 2104656
uagcaaaugaguuaacgag

SEQ ID NO: 2104658 - RNA, 19 nt, Artificial Sequence
  Description of Artificial Sequence: Synthetic oligonucleotide
  Sense strand starting at position 2291 of SEQ ID NO: 1882226
auuuauauaugaugggaac

SEQ ID NO: 2104659 - RNA, 19 nt, Artificial Sequence
  Description of Artificial Sequence: Synthetic oligonucleotide
  Antisense strand to SEQ ID NO: 2104658
guucccaucauauauaaau

SEQ ID NO: 2104660 - RNA, 19 nt, Artificial Sequence
  Description of Artificial Sequence: Synthetic oligonucleotide
  Sense strand starting at position 2485 of SEQ ID NO: 1882226
acacuagcaguagaauuau

SEQ ID NO: 2104661 - RNA, 19 nt, Artificial Sequence
  Description of Artificial Sequence: Synthetic oligonucleotide
  Antisense strand to SEQ ID NO: 2104660
auaauucuacugcuagugu

SEQ ID NO: 2104662 - RNA, 19 nt, Artificial Sequence
  Description of Artificial Sequence: Synthetic oligonucleotide
  Sense strand starting at position 2611 of SEQ ID NO: 1882226
ccagaaggcugguuacaua

SEQ ID NO: 2104663 - RNA, 19 nt, Artificial Sequence
  Description of Artificial Sequence: Synthetic oligonucleotide
  Antisense strand to SEQ ID NO: 2104662
uauguaaccagccuucugg

SEQ ID NO: 2104664 - RNA, 19 nt, Artificial Sequence
  Description of Artificial Sequence: Synthetic oligonucleotide
  Sense strand starting at position 2809 of SEQ ID NO: 1882226
aaacaaaguguguauuagu

SEQ ID NO: 2104665 - RNA, 19 nt, Artificial Sequence
  Description of Artificial Sequence: Synthetic oligonucleotide
  Antisense strand to SEQ ID NO: 2104664
acuaauacacacuuuguuu

SEQ ID NO: 2104666 - RNA, 19 nt, Artificial Sequence
  Description of Artificial Sequence: Synthetic oligonucleotide
  Sense strand starting at position 2817 of SEQ ID NO: 1882226
uguguauuagucugagaga

SEQ ID NO: 2104667 - RNA, 19 nt, Artificial Sequence
  Description of Artificial Sequence: Synthetic oligonucleotide
  Antisense strand to SEQ ID NO: 2104666
ucucucagacuaauacaca

SEQ ID NO: 2104668 - RNA, 19 nt, Artificial Sequence
  Description of Artificial Sequence: Synthetic oligonucleotide
  Sense strand starting at position 2854 of SEQ ID NO: 1882226
gguaacucaucauugaauc

SEQ ID NO: 2104669 - RNA, 19 nt, Artificial Sequence
  Description of Artificial Sequence: Synthetic oligonucleotide
  Antisense strand to SEQ ID NO: 2104668
gauucaaugaugaguuacc

SEQ ID NO: 2104670 - RNA, 19 nt, Artificial Sequence
  Description of Artificial Sequence: Synthetic oligonucleotide
  Sense strand starting at position 2945 of SEQ ID NO: 1882226
uuacucugucagcagaagu

SEQ ID NO: 2104671 - RNA, 19 nt, Artificial Sequence
  Description of Artificial Sequence: Synthetic oligonucleotide
  Antisense strand to SEQ ID NO: 2104670
acuucugcugacagaguaa

SEQ ID NO: 2104672 - RNA, 19 nt, Artificial Sequence
  Description of Artificial Sequence: Synthetic oligonucleotide
  Sense strand starting at position 3020 of SEQ ID NO: 1882226
ucaguauaaguggauuguu

SEQ ID NO: 2104673 - RNA, 19 nt, Artificial Sequence
  Description of Artificial Sequence: Synthetic oligonucleotide
  Antisense strand to SEQ ID NO: 2104672
aacaauccacuuauacuga

SEQ ID NO: 2104674 - RNA, 19 nt, Artificial Sequence
  Description of Artificial Sequence: Synthetic oligonucleotide
  Sense strand starting at position 3029 of SEQ ID NO: 1882226
guggauuguuaggcacuaa

SEQ ID NO: 2104675 - RNA, 19 nt, Artificial Sequence
  Description of Artificial Sequence: Synthetic oligonucleotide
  Antisense strand to SEQ ID NO: 2104674
uuagugccuaacaauccac

SEQ ID NO: 2104676 - RNA, 19 nt, Artificial Sequence
  Description of Artificial Sequence: Synthetic oligonucleotide
  Sense strand starting at position 3030 of SEQ ID NO: 1882226
uggauuguuaggcacuaaa

SEQ ID NO: 2104677 - RNA, 19 nt, Artificial Sequence
  Description of Artificial Sequence: Synthetic oligonucleotide
  Antisense strand to SEQ ID NO: 2104676
uuuagugccuaacaaucca

SEQ ID NO: 2104678 - RNA, 19 nt, Artificial Sequence
  Description of Artificial Sequence: Synthetic oligonucleotide
  Sense strand starting at position 3033 of SEQ ID NO: 1882226
auuguuaggcacuaaauua

SEQ ID NO: 2104679 - RNA, 19 nt, Artificial Sequence
  Description of Artificial Sequence: Synthetic oligonucleotide
  Antisense strand to SEQ ID NO: 2104678
uaauuuagugccuaacaau

SEQ ID NO: 2104680 - RNA, 19 nt, Artificial Sequence
  Description of Artificial Sequence: Synthetic oligonucleotide
  Sense strand starting at position 3040 of SEQ ID NO: 1882226
ggcacuaaauuaucuguuu

SEQ ID NO: 2104681 - RNA, 19 nt, Artificial Sequence
  Description of Artificial Sequence: Synthetic oligonucleotide
  Antisense strand to SEQ ID NO: 2104680
aaacagauaauuuagugcc

SEQ ID NO: 2104682 - RNA, 19 nt, Artificial Sequence
  Description of Artificial Sequence: Synthetic oligonucleotide
  Sense strand starting at position 3240 of SEQ ID NO: 1882226
gccuuugcauaauuauaga

SEQ ID NO: 2104683 - RNA, 19 nt, Artificial Sequence
  Description of Artificial Sequence: Synthetic oligonucleotide
  Antisense strand to SEQ ID NO: 2104682
ucuauaauuaugcaaaggc

SEQ ID NO: 2104684 - RNA, 19 nt, Artificial Sequence
  Description of Artificial Sequence: Synthetic oligonucleotide
  Sense strand starting at position 3386 of SEQ ID NO: 1882226
uguauacucuuaguaagau

SEQ ID NO: 2104685 - RNA, 19 nt, Artificial Sequence
  Description of Artificial Sequence: Synthetic oligonucleotide
  Antisense strand to SEQ ID NO: 2104684
aucuuacuaagaguauaca

SEQ ID NO: 2104686 - RNA, 19 nt, Artificial Sequence
  Description of Artificial Sequence: Synthetic oligonucleotide
  Sense strand starting at position 3501 of SEQ ID NO: 1882226
guauauguacuguggaaua

SEQ ID NO: 2104687 - RNA, 19 nt, Artificial Sequence
  Description of Artificial Sequence: Synthetic oligonucleotide
  Antisense strand to SEQ ID NO: 2104686
uauuccacaguacauauac

SEQ ID NO: 2104688 - RNA, 19 nt, Artificial Sequence
  Description of Artificial Sequence: Synthetic oligonucleotide
  Sense strand starting at position 3840 of SEQ ID NO: 1882226
gggagaucagucuggacca

SEQ ID NO: 2104689 - RNA, 19 nt, Artificial Sequence
  Description of Artificial Sequence: Synthetic oligonucleotide
  Antisense strand to SEQ ID NO: 2104688
ugguccagacugaucuccc

SEQ ID NO: 2104690 - RNA, 19 nt, Artificial Sequence
  Description of Artificial Sequence: Synthetic oligonucleotide
  Sense strand starting at position 3852 of SEQ ID NO: 1882226
uggaccaucuaguuauagu

SEQ ID NO: 2104691 - RNA, 19 nt, Artificial Sequence
  Description of Artificial Sequence: Synthetic oligonucleotide
  Antisense strand to SEQ ID NO: 2104690
acuauaacuagauggucca

SEQ ID NO: 2104692 - RNA, 19 nt, Artificial Sequence
  Description of Artificial Sequence: Synthetic oligonucleotide
  Sense strand starting at position 3923 of SEQ ID NO: 1882226
agaucacuugagggucaau

SEQ ID NO: 2104693 - RNA, 19 nt, Artificial Sequence
  Description of Artificial Sequence: Synthetic oligonucleotide
  Antisense strand to SEQ ID NO: 2104692
auugacccucaagugaucu

SEQ ID NO: 2104694 - RNA, 19 nt, Artificial Sequence
  Description of Artificial Sequence: Synthetic oligonucleotide
  Sense strand starting at position 3935 of SEQ ID NO: 1882226
ggucaauaauagucauuac

SEQ ID NO: 2104695 - RNA, 19 nt, Artificial Sequence
  Description of Artificial Sequence: Synthetic oligonucleotide
  Antisense strand to SEQ ID NO: 2104694
guaaugacuauuauugacc

SEQ ID NO: 2104696 - RNA, 19 nt, Artificial Sequence
  Description of Artificial Sequence: Synthetic oligonucleotide
  Sense strand starting at position 3946 of SEQ ID NO: 1882226
gucauuacaagcugagagu

SEQ ID NO: 2104697 - RNA, 19 nt, Artificial Sequence
  Description of Artificial Sequence: Synthetic oligonucleotide
  Antisense strand to SEQ ID NO: 2104696
acucucagcuuguaaugac

SEQ ID NO: 2104698 - RNA, 19 nt, Artificial Sequence
  Description of Artificial Sequence: Synthetic oligonucleotide
  Sense strand starting at position 3965 of SEQ ID NO: 1882226
cgauaagaauaauugcaau

SEQ ID NO: 2104699 - RNA, 19 nt, Artificial Sequence
  Description of Artificial Sequence: Synthetic oligonucleotide
  Antisense strand to SEQ ID NO: 2104698
auugcaauuauucuuaucg

SEQ ID NO: 2104700 - RNA, 19 nt, Artificial Sequence
  Description of Artificial Sequence: Synthetic oligonucleotide
  Sense strand starting at position 100 of SEQ ID NO: 1882227
ucugcaugucuuuagaauu

SEQ ID NO: 2104701 - RNA, 19 nt, Artificial Sequence
  Description of Artificial Sequence: Synthetic oligonucleotide
  Antisense strand to SEQ ID NO: 2104700
aauucuaaagacaugcaga

SEQ ID NO: 2104702 - RNA, 19 nt, Artificial Sequence
  Description of Artificial Sequence: Synthetic oligonucleotide
  Sense strand starting at position 185 of SEQ ID NO: 1882227
gggcaaauugguugacacu

SEQ ID NO: 2104703 - RNA, 19 nt, Artificial Sequence
  Description of Artificial Sequence: Synthetic oligonucleotide
  Antisense strand to SEQ ID NO: 2104702
agugucaaccaauuugccc

SEQ ID NO: 2104704 - RNA, 19 nt, Artificial Sequence
  Description of Artificial Sequence: Synthetic oligonucleotide
  Sense strand starting at position 186 of SEQ ID NO: 1882227
ggcaaauugguugacacuu

SEQ ID NO: 2104705 - RNA, 19 nt, Artificial Sequence
  Description of Artificial Sequence: Synthetic oligonucleotide
  Antisense strand to SEQ ID NO: 2104704
aagugucaaccaauuugcc

SEQ ID NO: 2104706 - RNA, 19 nt, Artificial Sequence
  Description of Artificial Sequence: Synthetic oligonucleotide
  Sense strand starting at position 199 of SEQ ID NO: 1882227
acacuuggccaguguauuu

SEQ ID NO: 2104707 - RNA, 19 nt, Artificial Sequence
  Description of Artificial Sequence: Synthetic oligonucleotide
  Antisense strand to SEQ ID NO: 2104706
aaauacacuggccaagugu

SEQ ID NO: 2104708 - RNA, 19 nt, Artificial Sequence
  Description of Artificial Sequence: Synthetic oligonucleotide
  Sense strand starting at position 223 of SEQ ID NO: 1882227
cugaaauauguccaaugca

SEQ ID NO: 2104709 - RNA, 19 nt, Artificial Sequence
  Description of Artificial Sequence: Synthetic oligonucleotide
  Antisense strand to SEQ ID NO: 2104708
ugcauuggacauauuucag

SEQ ID NO: 2104710 - RNA, 19 nt, Artificial Sequence
  Description of Artificial Sequence: Synthetic oligonucleotide
  Sense strand starting at position 254 of SEQ ID NO: 1882227
cuuguaauacagcaauaug

SEQ ID NO: 2104711 - RNA, 19 nt, Artificial Sequence
  Description of Artificial Sequence: Synthetic oligonucleotide
  Antisense strand to SEQ ID NO: 2104710
cauauugcuguauuacaag

SEQ ID NO: 2104712 - RNA, 19 nt, Artificial Sequence
  Description of Artificial Sequence: Synthetic oligonucleotide
  Sense strand starting at position 257 of SEQ ID NO: 1882227
guaauacagcaauauguuu

SEQ ID NO: 2104713 - RNA, 19 nt, Artificial Sequence
  Description of Artificial Sequence: Synthetic oligonucleotide
  Antisense strand to SEQ ID NO: 2104712
aaacauauugcuguauuac

SEQ ID NO: 2104714 - RNA, 19 nt, Artificial Sequence
  Description of Artificial Sequence: Synthetic oligonucleotide
  Sense strand starting at position 305 of SEQ ID NO: 1882227
uguaauucccuguaucaac

SEQ ID NO: 2104715 - RNA, 19 nt, Artificial Sequence
  Description of Artificial Sequence: Synthetic oligonucleotide
  Antisense strand to SEQ ID NO: 2104714
guugauacagggaauuaca

SEQ ID NO: 2104716 - RNA, 19 nt, Artificial Sequence
  Description of Artificial Sequence: Synthetic oligonucleotide
  Sense strand starting at position 451 of SEQ ID NO: 1882227
ugugucuuaaugcagggau

SEQ ID NO: 2104717 - RNA, 19 nt, Artificial Sequence
  Description of Artificial Sequence: Synthetic oligonucleotide
  Antisense strand to SEQ ID NO: 2104716
aucccugcauuaagacaca

SEQ ID NO: 2104718 - RNA, 19 nt, Artificial Sequence
  Description of Artificial Sequence: Synthetic oligonucleotide
  Sense strand starting at position 453 of SEQ ID NO: 1882227
ugucuuaaugcagggauaa

SEQ ID NO: 2104719 - RNA, 19 nt, Artificial Sequence
  Description of Artificial Sequence: Synthetic oligonucleotide
  Antisense strand to SEQ ID NO: 2104718
uuaucccugcauuaagaca

SEQ ID NO: 2104720 - RNA, 19 nt, Artificial Sequence
  Description of Artificial Sequence: Synthetic oligonucleotide
  Sense strand starting at position 454 of SEQ ID NO: 1882227
gucuuaaugcagggauaau

SEQ ID NO: 2104721 - RNA, 19 nt, Artificial Sequence
  Description of Artificial Sequence: Synthetic oligonucleotide
  Antisense strand to SEQ ID NO: 2104720
auuaucccugcauuaagac

SEQ ID NO: 2104722 - RNA, 19 nt, Artificial Sequence
  Description of Artificial Sequence: Synthetic oligonucleotide
  Sense strand starting at position 630 of SEQ ID NO: 1882227
uuagcucaucuaugaugau

SEQ ID NO: 2104723 - RNA, 19 nt, Artificial Sequence
  Description of Artificial Sequence: Synthetic oligonucleotide
  Antisense strand to SEQ ID NO: 2104722
aucaucauagaugagcuaa

SEQ ID NO: 2104724 - RNA, 19 nt, Artificial Sequence
  Description of Artificial Sequence: Synthetic oligonucleotide
  Sense strand starting at position 639 of SEQ ID NO: 1882227
cuaugaugaucagucuacu

SEQ ID NO: 2104725 - RNA, 19 nt, Artificial Sequence
  Description of Artificial Sequence: Synthetic oligonucleotide
  Antisense strand to SEQ ID NO: 2104724
aguagacugaucaucauag

SEQ ID NO: 2104726 - RNA, 19 nt, Artificial Sequence
  Description of Artificial Sequence: Synthetic oligonucleotide
  Sense strand starting at position 1191 of SEQ ID NO: 1882227
ggagauacuaccggguaca

SEQ ID NO: 2104727 - RNA, 19 nt, Artificial Sequence
  Description of Artificial Sequence: Synthetic oligonucleotide
  Antisense strand to SEQ ID NO: 2104726
uguacccgguaguaucucc

SEQ ID NO: 2104728 - RNA, 19 nt, Artificial Sequence
  Description of Artificial Sequence: Synthetic oligonucleotide
  Sense strand starting at position 1312 of SEQ ID NO: 1882227
cagguuaugaugugagaga

SEQ ID NO: 2104729 - RNA, 19 nt, Artificial Sequence
  Description of Artificial Sequence: Synthetic oligonucleotide
  Antisense strand to SEQ ID NO: 2104728
ucucucacaucauaaccug

SEQ ID NO: 2104730 - RNA, 19 nt, Artificial Sequence
  Description of Artificial Sequence: Synthetic oligonucleotide
  Sense strand starting at position 1416 of SEQ ID NO: 1882227
ggagcagggccguaagaaa

SEQ ID NO: 2104731 - RNA, 19 nt, Artificial Sequence
  Description of Artificial Sequence: Synthetic oligonucleotide
  Antisense strand to SEQ ID NO: 2104730
uuucuuacggcccugcucc

SEQ ID NO: 2104732 - RNA, 19 nt, Artificial Sequence
  Description of Artificial Sequence: Synthetic oligonucleotide
  Sense strand starting at position 1440 of SEQ ID NO: 1882227
cggcuaacgggaugagaau

SEQ ID NO: 2104733 - RNA, 19 nt, Artificial Sequence
  Description of Artificial Sequence: Synthetic oligonucleotide
  Antisense strand to SEQ ID NO: 2104732
auucucaucccguuagccg

SEQ ID NO: 2104734 - RNA, 19 nt, Artificial Sequence
  Description of Artificial Sequence: Synthetic oligonucleotide
  Sense strand starting at position 1566 of SEQ ID NO: 1882227
agaaguucggcccagaaua

SEQ ID NO: 2104735 - RNA, 19 nt, Artificial Sequence
  Description of Artificial Sequence: Synthetic oligonucleotide
  Antisense strand to SEQ ID NO: 2104734
uauucugggccgaacuucu

SEQ ID NO: 2104736 - RNA, 19 nt, Artificial Sequence
  Description of Artificial Sequence: Synthetic oligonucleotide
  Sense strand starting at position 1568 of SEQ ID NO: 1882227
aaguucggcccagaauaaa

SEQ ID NO: 2104737 - RNA, 19 nt, Artificial Sequence
  Description of Artificial Sequence: Synthetic oligonucleotide
  Antisense strand to SEQ ID NO: 2104736
uuuauucugggccgaacuu

SEQ ID NO: 2104738 - RNA, 19 nt, Artificial Sequence
  Description of Artificial Sequence: Synthetic oligonucleotide
  Sense strand starting at position 1608 of SEQ ID NO: 1882227
cguguuuggagagaagaca

SEQ ID NO: 2104739 - RNA, 19 nt, Artificial Sequence
  Description of Artificial Sequence: Synthetic oligonucleotide
  Antisense strand to SEQ ID NO: 2104738
ugucuucucuccaaacacg

SEQ ID NO: 2104740 - RNA, 19 nt, Artificial Sequence
  Description of Artificial Sequence: Synthetic oligonucleotide
  Sense strand starting at position 1699 of SEQ ID NO: 1882227
gggagucuggcagauaacu

SEQ ID NO: 2104741 - RNA, 19 nt, Artificial Sequence
  Description of Artificial Sequence: Synthetic oligonucleotide
  Antisense strand to SEQ ID NO: 2104740
aguuaucugccagacuccc

SEQ ID NO: 2104742 - RNA, 19 nt, Artificial Sequence
  Description of Artificial Sequence: Synthetic oligonucleotide
  Sense strand starting at position 1709 of SEQ ID NO: 1882227
cagauaacugcucaccgua

SEQ ID NO: 2104743 - RNA, 19 nt, Artificial Sequence
  Description of Artificial Sequence: Synthetic oligonucleotide
  Antisense strand to SEQ ID NO: 2104742
uacggugagcaguuaucug

SEQ ID NO: 2104744 - RNA, 19 nt, Artificial Sequence
  Description of Artificial Sequence: Synthetic oligonucleotide
  Sense strand starting at position 1722 of SEQ ID NO: 1882227
accguagaguccuuaaagg

SEQ ID NO: 2104745 - RNA, 19 nt, Artificial Sequence
  Description of Artificial Sequence: Synthetic oligonucleotide
  Antisense strand to SEQ ID NO: 2104744
ccuuuaaggacucuacggu

SEQ ID NO: 2104746 - RNA, 19 nt, Artificial Sequence
  Description of Artificial Sequence: Synthetic oligonucleotide
  Sense strand starting at position 2128 of SEQ ID NO: 1882227
gcgguaguucucgcuguga

SEQ ID NO: 2104747 - RNA, 19 nt, Artificial Sequence
  Description of Artificial Sequence: Synthetic oligonucleotide
  Antisense strand to SEQ ID NO: 2104746
ucacagcgagaacuaccgc

SEQ ID NO: 2104748 - RNA, 19 nt, Artificial Sequence
  Description of Artificial Sequence: Synthetic oligonucleotide
  Sense strand starting at position 2363 of SEQ ID NO: 1882227
gaggauuacccaugauugu

SEQ ID NO: 2104749 - RNA, 19 nt, Artificial Sequence
  Description of Artificial Sequence: Synthetic oligonucleotide
  Antisense strand to SEQ ID NO: 2104748
acaaucauggguaauccuc

SEQ ID NO: 2104750 - RNA, 19 nt, Artificial Sequence
  Description of Artificial Sequence: Synthetic oligonucleotide
  Sense strand starting at position 2603 of SEQ ID NO: 1882227
ucccuccuuccguagagau

SEQ ID NO: 2104751 - RNA, 19 nt, Artificial Sequence
  Description of Artificial Sequence: Synthetic oligonucleotide
  Antisense strand to SEQ ID NO: 2104750
aucucuacggaaggaggga

SEQ ID NO: 2104752 - RNA, 19 nt, Artificial Sequence
  Description of Artificial Sequence: Synthetic oligonucleotide
  Sense strand starting at position 2987 of SEQ ID NO: 1882227
ggugaaauauugucagcau

SEQ ID NO: 2104753 - RNA, 19 nt, Artificial Sequence
  Description of Artificial Sequence: Synthetic oligonucleotide
  Antisense strand to SEQ ID NO: 2104752
augcugacaauauuucacc

SEQ ID NO: 2104754 - RNA, 19 nt, Artificial Sequence
  Description of Artificial Sequence: Synthetic oligonucleotide
  Sense strand starting at position 3107 of SEQ ID NO: 1882227
ggagaaagcuauccaucau

SEQ ID NO: 2104755 - RNA, 19 nt, Artificial Sequence
  Description of Artificial Sequence: Synthetic oligonucleotide
  Antisense strand to SEQ ID NO: 2104754
augauggauagcuuucucc

SEQ ID NO: 2104756 - RNA, 19 nt, Artificial Sequence
  Description of Artificial Sequence: Synthetic oligonucleotide
  Sense strand starting at position 3377 of SEQ ID NO: 1882227
cacuaauuugugugacgcu

SEQ ID NO: 2104757 - RNA, 19 nt, Artificial Sequence
  Description of Artificial Sequence: Synthetic oligonucleotide
  Antisense strand to SEQ ID NO: 2104756
agcgucacacaaauuagug

SEQ ID NO: 2104758 - RNA, 19 nt, Artificial Sequence
  Description of Artificial Sequence: Synthetic oligonucleotide
  Sense strand starting at position 3404 of SEQ ID NO: 1882227
ccaggacaugaaugcauua

SEQ ID NO: 2104759 - RNA, 19 nt, Artificial Sequence
  Description of Artificial Sequence: Synthetic oligonucleotide
  Antisense strand to SEQ ID NO: 2104758
uaaugcauucauguccugg

SEQ ID NO: 2104760 - RNA, 19 nt, Artificial Sequence
  Description of Artificial Sequence: Synthetic oligonucleotide
  Sense strand starting at position 3429 of SEQ ID NO: 1882227
accugaggcaguuauugau

SEQ ID NO: 2104761 - RNA, 19 nt, Artificial Sequence
  Description of Artificial Sequence: Synthetic oligonucleotide
  Antisense strand to SEQ ID NO: 2104760
aucaauaacugccucaggu

SEQ ID NO: 2104762 - RNA, 19 nt, Artificial Sequence
  Description of Artificial Sequence: Synthetic oligonucleotide
  Sense strand starting at position 3467 of SEQ ID NO: 1882227
cccagagaguuuccuuucu

SEQ ID NO: 2104763 - RNA, 19 nt, Artificial Sequence
  Description of Artificial Sequence: Synthetic oligonucleotide
  Antisense strand to SEQ ID NO: 2104762
agaaaggaaacucucuggg

SEQ ID NO: 2104764 - RNA, 19 nt, Artificial Sequence
  Description of Artificial Sequence: Synthetic oligonucleotide
  Sense strand starting at position 3553 of SEQ ID NO: 1882227
guaaguacauuaccuuaau

SEQ ID NO: 2104765 - RNA, 19 nt, Artificial Sequence
  Description of Artificial Sequence: Synthetic oligonucleotide
  Antisense strand to SEQ ID NO: 2104764
auuaagguaauguacuuac

SEQ ID NO: 2104766 - RNA, 19 nt, Artificial Sequence
  Description of Artificial Sequence: Synthetic oligonucleotide
  Sense strand starting at position 3564 of SEQ ID NO: 1882227
accuuaaugcagcaguuua

SEQ ID NO: 2104767 - RNA, 19 nt, Artificial Sequence
  Description of Artificial Sequence: Synthetic oligonucleotide
  Antisense strand to SEQ ID NO: 2104766
uaaacugcugcauuaaggu

SEQ ID NO: 2104768 - RNA, 19 nt, Artificial Sequence
  Description of Artificial Sequence: Synthetic oligonucleotide
  Sense strand starting at position 3677 of SEQ ID NO: 1882227
cucaaacauugguuagcau

SEQ ID NO: 2104769 - RNA, 19 nt, Artificial Sequence
  Description of Artificial Sequence: Synthetic oligonucleotide
  Antisense strand to SEQ ID NO: 2104768
augcuaaccaauguuugag

SEQ ID NO: 2104770 - RNA, 19 nt, Artificial Sequence
  Description of Artificial Sequence: Synthetic oligonucleotide
  Sense strand starting at position 3678 of SEQ ID NO: 1882227
ucaaacauugguuagcauu

SEQ ID NO: 2104771 - RNA, 19 nt, Artificial Sequence
  Description of Artificial Sequence: Synthetic oligonucleotide
  Antisense strand to SEQ ID NO: 2104770
aaugcuaaccaauguuuga

SEQ ID NO: 2104772 - RNA, 19 nt, Artificial Sequence
  Description of Artificial Sequence: Synthetic oligonucleotide
  Sense strand starting at position 3688 of SEQ ID NO: 1882227
guuagcauuguggaaguua

SEQ ID NO: 2104773 - RNA, 19 nt, Artificial Sequence
  Description of Artificial Sequence: Synthetic oligonucleotide
  Antisense strand to SEQ ID NO: 2104772
uaacuuccacaaugcuaac

SEQ ID NO: 2104774 - RNA, 19 nt, Artificial Sequence
  Description of Artificial Sequence: Synthetic oligonucleotide
  Sense strand starting at position 3721 of SEQ ID NO: 1882227
aguaccuguccguuguauu

SEQ ID NO: 2104775 - RNA, 19 nt, Artificial Sequence
  Description of Artificial Sequence: Synthetic oligonucleotide
  Antisense strand to SEQ ID NO: 2104774
aauacaacggacagguacu

SEQ ID NO: 2104776 - RNA, 19 nt, Artificial Sequence
  Description of Artificial Sequence: Synthetic oligonucleotide
  Sense strand starting at position 3732 of SEQ ID NO: 1882227
guuguauuauaccuuagac

SEQ ID NO: 2104777 - RNA, 19 nt, Artificial Sequence
  Description of Artificial Sequence: Synthetic oligonucleotide
  Antisense strand to SEQ ID NO: 2104776
gucuaagguauaauacaac

SEQ ID NO: 2104778 - RNA, 19 nt, Artificial Sequence
  Description of Artificial Sequence: Synthetic oligonucleotide
  Sense strand starting at position 3769 of SEQ ID NO: 1882227
ccagucacuggaggaauau

SEQ ID NO: 2104779 - RNA, 19 nt, Artificial Sequence
  Description of Artificial Sequence: Synthetic oligonucleotide
  Antisense strand to SEQ ID NO: 2104778
auauuccuccagugacugg

SEQ ID NO: 2104780 - RNA, 19 nt, Artificial Sequence
  Description of Artificial Sequence: Synthetic oligonucleotide
  Sense strand starting at position 549 of SEQ ID NO: 1882228
gcagguacccucuaaggga

SEQ ID NO: 2104781 - RNA, 19 nt, Artificial Sequence
  Description of Artificial Sequence: Synthetic oligonucleotide
  Antisense strand to SEQ ID NO: 2104780
ucccuuagaggguaccugc

SEQ ID NO: 2104782 - RNA, 19 nt, Artificial Sequence
  Description of Artificial Sequence: Synthetic oligonucleotide
  Sense strand starting at position 633 of SEQ ID NO: 1882228
cuauccuguccuuagcaua

SEQ ID NO: 2104783 - RNA, 19 nt, Artificial Sequence
  Description of Artificial Sequence: Synthetic oligonucleotide
  Antisense strand to SEQ ID NO: 2104782
uaugcuaaggacaggauag

SEQ ID NO: 2104784 - RNA, 19 nt, Artificial Sequence
  Description of Artificial Sequence: Synthetic oligonucleotide
  Sense strand starting at position 1001 of SEQ ID NO: 1882228
aggguauauagcuaggguu

SEQ ID NO: 2104785 - RNA, 19 nt, Artificial Sequence
  Description of Artificial Sequence: Synthetic oligonucleotide
  Antisense strand to SEQ ID NO: 2104784
aacccuagcuauauacccu

SEQ ID NO: 2104786 - RNA, 19 nt, Artificial Sequence
  Description of Artificial Sequence: Synthetic oligonucleotide
  Sense strand starting at position 1866 of SEQ ID NO: 1882228
acccuaaggcucugaguaa

SEQ ID NO: 2104787 - RNA, 19 nt, Artificial Sequence
  Description of Artificial Sequence: Synthetic oligonucleotide
  Antisense strand to SEQ ID NO: 2104786
uuacucagagccuuagggu

SEQ ID NO: 2104788 - RNA, 19 nt, Artificial Sequence
  Description of Artificial Sequence: Synthetic oligonucleotide
  Sense strand starting at position 1867 of SEQ ID NO: 1882228
cccuaaggcucugaguaaa

SEQ ID NO: 2104789 - RNA, 19 nt, Artificial Sequence
  Description of Artificial Sequence: Synthetic oligonucleotide
  Antisense strand to SEQ ID NO: 2104788
uuuacucagagccuuaggg

SEQ ID NO: 2104790 - RNA, 19 nt, Artificial Sequence
  Description of Artificial Sequence: Synthetic oligonucleotide
  Sense strand starting at position 2051 of SEQ ID NO: 1882228
gccagagaguccucccauu

SEQ ID NO: 2104791 - RNA, 19 nt, Artificial Sequence
  Description of Artificial Sequence: Synthetic oligonucleotide
  Antisense strand to SEQ ID NO: 2104790
aaugggaggacucucuggc

SEQ ID NO: 2104792 - RNA, 19 nt, Artificial Sequence
  Description of Artificial Sequence: Synthetic oligonucleotide
  Sense strand starting at position 2158 of SEQ ID NO: 1882228
aagggcucccuagaaguau

SEQ ID NO: 2104793 - RNA, 19 nt, Artificial Sequence
  Description of Artificial Sequence: Synthetic oligonucleotide
  Antisense strand to SEQ ID NO: 2104792
auacuucuagggagcccuu

SEQ ID NO: 2104794 - RNA, 19 nt, Artificial Sequence
  Description of Artificial Sequence: Synthetic oligonucleotide
  Sense strand starting at position 2223 of SEQ ID NO: 1882228
agcuaugagcucuguaaca

SEQ ID NO: 2104795 - RNA, 19 nt, Artificial Sequence
  Description of Artificial Sequence: Synthetic oligonucleotide
  Antisense strand to SEQ ID NO: 2104794
uguuacagagcucauagcu

SEQ ID NO: 2104796 - RNA, 19 nt, Artificial Sequence
  Description of Artificial Sequence: Synthetic oligonucleotide
  Sense strand starting at position 2368 of SEQ ID NO: 1882228
aagggcaagucgucacaaa

SEQ ID NO: 2104797 - RNA, 19 nt, Artificial Sequence
  Description of Artificial Sequence: Synthetic oligonucleotide
  Antisense strand to SEQ ID NO: 2104796
uuugugacgacuugcccuu

SEQ ID NO: 2104798 - RNA, 19 nt, Artificial Sequence
  Description of Artificial Sequence: Synthetic oligonucleotide
  Sense strand starting at position 2440 of SEQ ID NO: 1882228
ugacauuuguuagggcuua

SEQ ID NO: 2104799 - RNA, 19 nt, Artificial Sequence
  Description of Artificial Sequence: Synthetic oligonucleotide
  Antisense strand to SEQ ID NO: 2104798
uaagcccuaacaaauguca

SEQ ID NO: 2104800 - RNA, 19 nt, Artificial Sequence
  Description of Artificial Sequence: Synthetic oligonucleotide
  Sense strand starting at position 2509 of SEQ ID NO: 1882228
gcccuauugucucagccaa

SEQ ID NO: 2104801 - RNA, 19 nt, Artificial Sequence
  Description of Artificial Sequence: Synthetic oligonucleotide
  Antisense strand to SEQ ID NO: 2104800
uuggcugagacaauagggc

SEQ ID NO: 2104802 - RNA, 19 nt, Artificial Sequence
  Description of Artificial Sequence: Synthetic oligonucleotide
  Sense strand starting at position 3857 of SEQ ID NO: 1882228
gugaguuacugcugggauc

SEQ ID NO: 2104803 - RNA, 19 nt, Artificial Sequence
  Description of Artificial Sequence: Synthetic oligonucleotide
  Antisense strand to SEQ ID NO: 2104802
gaucccagcaguaacucac

SEQ ID NO: 2104804 - RNA, 19 nt, Artificial Sequence
  Description of Artificial Sequence: Synthetic oligonucleotide
  Sense strand starting at position 27 of SEQ ID NO: 1882230
uacuuuaugcagggucaga

SEQ ID NO: 2104805 - RNA, 19 nt, Artificial Sequence
  Description of Artificial Sequence: Synthetic oligonucleotide
  Antisense strand to SEQ ID NO: 2104804
ucugacccugcauaaagua

SEQ ID NO: 2104806 - RNA, 19 nt, Artificial Sequence
  Description of Artificial Sequence: Synthetic oligonucleotide
  Sense strand starting at position 42 of SEQ ID NO: 1882230
cagagaugccucuggaaug

SEQ ID NO: 2104807 - RNA, 19 nt, Artificial Sequence
  Description of Artificial Sequence: Synthetic oligonucleotide
  Antisense strand to SEQ ID NO: 2104806
cauuccagaggcaucucug

SEQ ID NO: 2104808 - RNA, 19 nt, Artificial Sequence
  Description of Artificial Sequence: Synthetic oligonucleotide
  Sense strand starting at position 47 of SEQ ID NO: 1882230
augccucuggaaugaagua

SEQ ID NO: 2104809 - RNA, 19 nt, Artificial Sequence
  Description of Artificial Sequence: Synthetic oligonucleotide
  Antisense strand to SEQ ID NO: 2104808
uacuucauuccagaggcau

SEQ ID NO: 2104810 - RNA, 19 nt, Artificial Sequence
  Description of Artificial Sequence: Synthetic oligonucleotide
  Sense strand starting at position 67 of SEQ ID NO: 1882230
auacucccgcaaugugaaa

SEQ ID NO: 2104811 - RNA, 19 nt, Artificial Sequence
  Description of Artificial Sequence: Synthetic oligonucleotide
  Antisense strand to SEQ ID NO: 2104810
uuucacauugcgggaguau

SEQ ID NO: 2104812 - RNA, 19 nt, Artificial Sequence
  Description of Artificial Sequence: Synthetic oligonucleotide
  Sense strand starting at position 166 of SEQ ID NO: 1882230
ucucaaguaucccuguaua

SEQ ID NO: 2104813 - RNA, 19 nt, Artificial Sequence
  Description of Artificial Sequence: Synthetic oligonucleotide
  Antisense strand to SEQ ID NO: 2104812
uauacagggauacuugaga

SEQ ID NO: 2104814 - RNA, 19 nt, Artificial Sequence
  Description of Artificial Sequence: Synthetic oligonucleotide
  Sense strand starting at position 171 of SEQ ID NO: 1882230
aguaucccuguauaguauu

SEQ ID NO: 2104815 - RNA, 19 nt, Artificial Sequence
  Description of Artificial Sequence: Synthetic oligonucleotide
  Antisense strand to SEQ ID NO: 2104814
aauacuauacagggauacu

SEQ ID NO: 2104816 - RNA, 19 nt, Artificial Sequence
  Description of Artificial Sequence: Synthetic oligonucleotide
  Sense strand starting at position 259 of SEQ ID NO: 1882230
acugcaucagauuagugau

SEQ ID NO: 2104817 - RNA, 19 nt, Artificial Sequence
  Description of Artificial Sequence: Synthetic oligonucleotide
  Antisense strand to SEQ ID NO: 2104816
aucacuaaucugaugcagu

SEQ ID NO: 2104818 - RNA, 19 nt, Artificial Sequence
  Description of Artificial Sequence: Synthetic oligonucleotide
  Sense strand starting at position 432 of SEQ ID NO: 1882230
ggacuauucgugugaauuu

SEQ ID NO: 2104819 - RNA, 19 nt, Artificial Sequence
  Description of Artificial Sequence: Synthetic oligonucleotide
  Antisense strand to SEQ ID NO: 2104818
aaauucacacgaauagucc

SEQ ID NO: 2104820 - RNA, 19 nt, Artificial Sequence
  Description of Artificial Sequence: Synthetic oligonucleotide
  Sense strand starting at position 567 of SEQ ID NO: 1882230
cauaguaggcacugaaauc

SEQ ID NO: 2104821 - RNA, 19 nt, Artificial Sequence
  Description of Artificial Sequence: Synthetic oligonucleotide
  Antisense strand to SEQ ID NO: 2104820
gauuucagugccuacuaug

SEQ ID NO: 2104822 - RNA, 19 nt, Artificial Sequence
  Description of Artificial Sequence: Synthetic oligonucleotide
  Sense strand starting at position 577 of SEQ ID NO: 1882230
acugaaaucuuugcugagu

SEQ ID NO: 2104823 - RNA, 19 nt, Artificial Sequence
  Description of Artificial Sequence: Synthetic oligonucleotide
  Antisense strand to SEQ ID NO: 2104822
acucagcaaagauuucagu

SEQ ID NO: 2104824 - RNA, 19 nt, Artificial Sequence
  Description of Artificial Sequence: Synthetic oligonucleotide
  Sense strand starting at position 578 of SEQ ID NO: 1882230
cugaaaucuuugcugagug

SEQ ID NO: 2104825 - RNA, 19 nt, Artificial Sequence
  Description of Artificial Sequence: Synthetic oligonucleotide
  Antisense strand to SEQ ID NO: 2104824
cacucagcaaagauuucag

SEQ ID NO: 2104826 - RNA, 19 nt, Artificial Sequence
  Description of Artificial Sequence: Synthetic oligonucleotide
  Sense strand starting at position 580 of SEQ ID NO: 1882230
gaaaucuuugcugagugaa

SEQ ID NO: 2104827 - RNA, 19 nt, Artificial Sequence
  Description of Artificial Sequence: Synthetic oligonucleotide
  Antisense strand to SEQ ID NO: 2104826
uucacucagcaaagauuuc

SEQ ID NO: 2104828 - RNA, 19 nt, Artificial Sequence
  Description of Artificial Sequence: Synthetic oligonucleotide
  Sense strand starting at position 582 of SEQ ID NO: 1882230
aaucuuugcugagugaaca

SEQ ID NO: 2104829 - RNA, 19 nt, Artificial Sequence
  Description of Artificial Sequence: Synthetic oligonucleotide
  Antisense strand to SEQ ID NO: 2104828
uguucacucagcaaagauu

SEQ ID NO: 2104830 - RNA, 19 nt, Artificial Sequence
  Description of Artificial Sequence: Synthetic oligonucleotide
  Sense strand starting at position 583 of SEQ ID NO: 1882230
aucuuugcugagugaacaa

SEQ ID NO: 2104831 - RNA, 19 nt, Artificial Sequence
  Description of Artificial Sequence: Synthetic oligonucleotide
  Antisense strand to SEQ ID NO: 2104830
uuguucacucagcaaagau

SEQ ID NO: 2104832 - RNA, 19 nt, Artificial Sequence
  Description of Artificial Sequence: Synthetic oligonucleotide
  Sense strand starting at position 603 of SEQ ID NO: 1882230
guaagugaagcugaaauca

SEQ ID NO: 2104833 - RNA, 19 nt, Artificial Sequence
  Description of Artificial Sequence: Synthetic oligonucleotide
  Antisense strand to SEQ ID NO: 2104832
ugauuucagcuucacuuac

SEQ ID NO: 2104834 - RNA, 19 nt, Artificial Sequence
  Description of Artificial Sequence: Synthetic oligonucleotide
  Sense strand starting at position 931 of SEQ ID NO: 1882230
accuguuuauggucauaaa

SEQ ID NO: 2104835 - RNA, 19 nt, Artificial Sequence
  Description of Artificial Sequence: Synthetic oligonucleotide
  Antisense strand to SEQ ID NO: 2104834
uuuaugaccauaaacaggu

SEQ ID NO: 2104836 - RNA, 19 nt, Artificial Sequence
  Description of Artificial Sequence: Synthetic oligonucleotide
  Sense strand starting at position 1047 of SEQ ID NO: 1882230
auauuaggugauuguauga

SEQ ID NO: 2104837 - RNA, 19 nt, Artificial Sequence
  Description of Artificial Sequence: Synthetic oligonucleotide
  Antisense strand to SEQ ID NO: 2104836
ucauacaaucaccuaauau

SEQ ID NO: 2104838 - RNA, 19 nt, Artificial Sequence
  Description of Artificial Sequence: Synthetic oligonucleotide
  Sense strand starting at position 3049 of SEQ ID NO: 1882230
ugcagauuggcuugggaag

SEQ ID NO: 2104839 - RNA, 19 nt, Artificial Sequence
  Description of Artificial Sequence: Synthetic oligonucleotide
  Antisense strand to SEQ ID NO: 2104838
cuucccaagccaaucugca

SEQ ID NO: 2104840 - RNA, 19 nt, Artificial Sequence
  Description of Artificial Sequence: Synthetic oligonucleotide
  Sense strand starting at position 3156 of SEQ ID NO: 1882230
aguccuccacucuggauua

SEQ ID NO: 2104841 - RNA, 19 nt, Artificial Sequence
  Description of Artificial Sequence: Synthetic oligonucleotide
  Antisense strand to SEQ ID NO: 2104840
uaauccagaguggaggacu

SEQ ID NO: 2104842 - RNA, 19 nt, Artificial Sequence
  Description of Artificial Sequence: Synthetic oligonucleotide
  Sense strand starting at position 3236 of SEQ ID NO: 1882230
cgaugaacugccugacagu

SEQ ID NO: 2104843 - RNA, 19 nt, Artificial Sequence
  Description of Artificial Sequence: Synthetic oligonucleotide
  Antisense strand to SEQ ID NO: 2104842
acugucaggcaguucaucg

SEQ ID NO: 2104844 - RNA, 19 nt, Artificial Sequence
  Description of Artificial Sequence: Synthetic oligonucleotide
  Sense strand starting at position 3237 of SEQ ID NO: 1882230
gaugaacugccugacagua

SEQ ID NO: 2104845 - RNA, 19 nt, Artificial Sequence
  Description of Artificial Sequence: Synthetic oligonucleotide
  Antisense strand to SEQ ID NO: 2104844
uacugucaggcaguucauc

SEQ ID NO: 2104846 - RNA, 19 nt, Artificial Sequence
  Description of Artificial Sequence: Synthetic oligonucleotide
  Sense strand starting at position 3300 of SEQ ID NO: 1882230
gaugaacugccugacaguu

SEQ ID NO: 2104847 - RNA, 19 nt, Artificial Sequence
  Description of Artificial Sequence: Synthetic oligonucleotide
  Antisense strand to SEQ ID NO: 2104846
aacugucaggcaguucauc

SEQ ID NO: 2104848 - RNA, 19 nt, Artificial Sequence
  Description of Artificial Sequence: Synthetic oligonucleotide
  Sense strand starting at position 3331 of SEQ ID NO: 1882230
ccugguucuuugguuacaa

SEQ ID NO: 2104849 - RNA, 19 nt, Artificial Sequence
  Description of Artificial Sequence: Synthetic oligonucleotide
  Antisense strand to SEQ ID NO: 2104848
uuguaaccaaagaaccagg

SEQ ID NO: 2104850 - RNA, 19 nt, Artificial Sequence
  Description of Artificial Sequence: Synthetic oligonucleotide
  Sense strand starting at position 3332 of SEQ ID NO: 1882230
cugguucuuugguuacaaa

SEQ ID NO: 2104851 - RNA, 19 nt, Artificial Sequence
  Description of Artificial Sequence: Synthetic oligonucleotide
  Antisense strand to SEQ ID NO: 2104850
uuuguaaccaaagaaccag

SEQ ID NO: 2104852 - RNA, 19 nt, Artificial Sequence
  Description of Artificial Sequence: Synthetic oligonucleotide
  Sense strand starting at position 3379 of SEQ ID NO: 1882230
aggacuggucuuuaggcaa

SEQ ID NO: 2104853 - RNA, 19 nt, Artificial Sequence
  Description of Artificial Sequence: Synthetic oligonucleotide
  Antisense strand to SEQ ID NO: 2104852
uugccuaaagaccaguccu

SEQ ID NO: 2104854 - RNA, 19 nt, Artificial Sequence
  Description of Artificial Sequence: Synthetic oligonucleotide
  Sense strand starting at position 3400 of SEQ ID NO: 1882230
ugugaaauccgcguuuguc

SEQ ID NO: 2104855 - RNA, 19 nt, Artificial Sequence
  Description of Artificial Sequence: Synthetic oligonucleotide
  Antisense strand to SEQ ID NO: 2104854
gacaaacgcggauuucaca

SEQ ID NO: 2104856 - RNA, 19 nt, Artificial Sequence
  Description of Artificial Sequence: Synthetic oligonucleotide
  Sense strand starting at position 3401 of SEQ ID NO: 1882230
gugaaauccgcguuugucu

SEQ ID NO: 2104857 - RNA, 19 nt, Artificial Sequence
  Description of Artificial Sequence: Synthetic oligonucleotide
  Antisense strand to SEQ ID NO: 2104856
agacaaacgcggauuucac

SEQ ID NO: 2104858 - RNA, 19 nt, Artificial Sequence
  Description of Artificial Sequence: Synthetic oligonucleotide
  Sense strand starting at position 3402 of SEQ ID NO: 1882230
ugaaauccgcguuugucuu

SEQ ID NO: 2104859 - RNA, 19 nt, Artificial Sequence
  Description of Artificial Sequence: Synthetic oligonucleotide
  Antisense strand to SEQ ID NO: 2104858
aagacaaacgcggauuuca

SEQ ID NO: 2104860 - RNA, 19 nt, Artificial Sequence
  Description of Artificial Sequence: Synthetic oligonucleotide
  Sense strand starting at position 3557 of SEQ ID NO: 1882230
guaccaucugccugauuau

SEQ ID NO: 2104861 - RNA, 19 nt, Artificial Sequence
  Description of Artificial Sequence: Synthetic oligonucleotide
  Antisense strand to SEQ ID NO: 2104860
auaaucaggcagaugguac

SEQ ID NO: 2104862 - RNA, 19 nt, Artificial Sequence
  Description of Artificial Sequence: Synthetic oligonucleotide
  Sense strand starting at position 3570 of SEQ ID NO: 1882230
gauuaugugugaccacuua

SEQ ID NO: 2104863 - RNA, 19 nt, Artificial Sequence
  Description of Artificial Sequence: Synthetic oligonucleotide
  Antisense strand to SEQ ID NO: 2104862
uaaguggucacacauaauc

SEQ ID NO: 2104864 - RNA, 19 nt, Artificial Sequence
  Description of Artificial Sequence: Synthetic oligonucleotide
  Sense strand starting at position 3656 of SEQ ID NO: 1882230
ucuucucuugagcauguau

SEQ ID NO: 2104865 - RNA, 19 nt, Artificial Sequence
  Description of Artificial Sequence: Synthetic oligonucleotide
  Antisense strand to SEQ ID NO: 2104864
auacaugcucaagagaaga

SEQ ID NO: 2104866 - RNA, 19 nt, Artificial Sequence
  Description of Artificial Sequence: Synthetic oligonucleotide
  Sense strand starting at position 3658 of SEQ ID NO: 1882230
uucucuugagcauguauua

SEQ ID NO: 2104867 - RNA, 19 nt, Artificial Sequence
  Description of Artificial Sequence: Synthetic oligonucleotide
  Antisense strand to SEQ ID NO: 2104866
uaauacaugcucaagagaa

SEQ ID NO: 2104868 - RNA, 19 nt, Artificial Sequence
  Description of Artificial Sequence: Synthetic oligonucleotide
  Sense strand starting at position 3674 of SEQ ID NO: 1882230
uuaguuagcguacugcaua

SEQ ID NO: 2104869 - RNA, 19 nt, Artificial Sequence
  Description of Artificial Sequence: Synthetic oligonucleotide
  Antisense strand to SEQ ID NO: 2104868
uaugcaguacgcuaacuaa

SEQ ID NO: 2104870 - RNA, 19 nt, Artificial Sequence
  Description of Artificial Sequence: Synthetic oligonucleotide
  Sense strand starting at position 3677 of SEQ ID NO: 1882230
guuagcguacugcauauuu

SEQ ID NO: 2104871 - RNA, 19 nt, Artificial Sequence
  Description of Artificial Sequence: Synthetic oligonucleotide
  Antisense strand to SEQ ID NO: 2104870
aaauaugcaguacgcuaac

SEQ ID NO: 2104872 - RNA, 19 nt, Artificial Sequence
  Description of Artificial Sequence: Synthetic oligonucleotide
  Sense strand starting at position 3717 of SEQ ID NO: 1882230
gaacgucuccucuaccaga

SEQ ID NO: 2104873 - RNA, 19 nt, Artificial Sequence
  Description of Artificial Sequence: Synthetic oligonucleotide
  Antisense strand to SEQ ID NO: 2104872
ucugguagaggagacguuc

SEQ ID NO: 2104874 - RNA, 19 nt, Artificial Sequence
  Description of Artificial Sequence: Synthetic oligonucleotide
  Sense strand starting at position 3785 of SEQ ID NO: 1882230
cuagauuucuaguaccuac

SEQ ID NO: 2104875 - RNA, 19 nt, Artificial Sequence
  Description of Artificial Sequence: Synthetic oligonucleotide
  Antisense strand to SEQ ID NO: 2104874
guagguacuagaaaucuag

SEQ ID NO: 2104876 - RNA, 19 nt, Artificial Sequence
  Description of Artificial Sequence: Synthetic oligonucleotide
  Sense strand starting at position 3912 of SEQ ID NO: 1882230
aguugacauuuguaaugau

SEQ ID NO: 2104877 - RNA, 19 nt, Artificial Sequence
  Description of Artificial Sequence: Synthetic oligonucleotide
  Antisense strand to SEQ ID NO: 2104876
aucauuacaaaugucaacu

SEQ ID NO: 2104878 - RNA, 19 nt, Artificial Sequence
  Description of Artificial Sequence: Synthetic oligonucleotide
  Sense strand starting at position 3915 of SEQ ID NO: 1882230
ugacauuuguaaugaugag

SEQ ID NO: 2104879 - RNA, 19 nt, Artificial Sequence
  Description of Artificial Sequence: Synthetic oligonucleotide
  Antisense strand to SEQ ID NO: 2104878
cucaucauuacaaauguca

SEQ ID NO: 2104880 - RNA, 19 nt, Artificial Sequence
  Description of Artificial Sequence: Synthetic oligonucleotide
  Sense strand starting at position 3931 of SEQ ID NO: 1882230
gagagucucaagugaaguu

SEQ ID NO: 2104881 - RNA, 19 nt, Artificial Sequence
  Description of Artificial Sequence: Synthetic oligonucleotide
  Antisense strand to SEQ ID NO: 2104880
aacuucacuugagacucuc

SEQ ID NO: 2104882 - RNA, 19 nt, Artificial Sequence
  Description of Artificial Sequence: Synthetic oligonucleotide
  Sense strand starting at position 3932 of SEQ ID NO: 1882230
agagucucaagugaaguuu

SEQ ID NO: 2104883 - RNA, 19 nt, Artificial Sequence
  Description of Artificial Sequence: Synthetic oligonucleotide
  Antisense strand to SEQ ID NO: 2104882
aaacuucacuugagacucu

SEQ ID NO: 2104884 - RNA, 19 nt, Artificial Sequence
  Description of Artificial Sequence: Synthetic oligonucleotide
  Sense strand starting at position 114 of SEQ ID NO: 1882229
auauuaggugauuguauga

SEQ ID NO: 2104885 - RNA, 19 nt, Artificial Sequence
  Description of Artificial Sequence: Synthetic oligonucleotide
  Antisense strand to SEQ ID NO: 2104884
ucauacaaucaccuaauau

SEQ ID NO: 2104886 - RNA, 19 nt, Artificial Sequence
  Description of Artificial Sequence: Synthetic oligonucleotide
  Sense strand starting at position 626 of SEQ ID NO: 1882229
gccaacuucccaugcuuga

SEQ ID NO: 2104887 - RNA, 19 nt, Artificial Sequence
  Description of Artificial Sequence: Synthetic oligonucleotide
  Antisense strand to SEQ ID NO: 2104886
ucaagcaugggaaguuggc

SEQ ID NO: 2104888 - RNA, 19 nt, Artificial Sequence
  Description of Artificial Sequence: Synthetic oligonucleotide
  Sense strand starting at position 2116 of SEQ ID NO: 1882229
ugcagauuggcuugggaag

SEQ ID NO: 2104889 - RNA, 19 nt, Artificial Sequence
  Description of Artificial Sequence: Synthetic oligonucleotide
  Antisense strand to SEQ ID NO: 2104888
cuucccaagccaaucugca

SEQ ID NO: 2104890 - RNA, 19 nt, Artificial Sequence
  Description of Artificial Sequence: Synthetic oligonucleotide
  Sense strand starting at position 2223 of SEQ ID NO: 1882229
aguccuccacucuggauua

SEQ ID NO: 2104891 - RNA, 19 nt, Artificial Sequence
  Description of Artificial Sequence: Synthetic oligonucleotide
  Antisense strand to SEQ ID NO: 2104890
uaauccagaguggaggacu

SEQ ID NO: 2104892 - RNA, 19 nt, Artificial Sequence
  Description of Artificial Sequence: Synthetic oligonucleotide
  Sense strand starting at position 2303 of SEQ ID NO: 1882229
cgaugaacugccugacagu

SEQ ID NO: 2104893 - RNA, 19 nt, Artificial Sequence
  Description of Artificial Sequence: Synthetic oligonucleotide
  Antisense strand to SEQ ID NO: 2104892
acugucaggcaguucaucg

SEQ ID NO: 2104894 - RNA, 19 nt, Artificial Sequence
  Description of Artificial Sequence: Synthetic oligonucleotide
  Sense strand starting at position 2304 of SEQ ID NO: 1882229
gaugaacugccugacagua

SEQ ID NO: 2104895 - RNA, 19 nt, Artificial Sequence
  Description of Artificial Sequence: Synthetic oligonucleotide
  Antisense strand to SEQ ID NO: 2104894
uacugucaggcaguucauc

SEQ ID NO: 2104896 - RNA, 19 nt, Artificial Sequence
  Description of Artificial Sequence: Synthetic oligonucleotide
  Sense strand starting at position 2367 of SEQ ID NO: 1882229
gaugaacugccugacaguu

SEQ ID NO: 2104897 - RNA, 19 nt, Artificial Sequence
  Description of Artificial Sequence: Synthetic oligonucleotide
  Antisense strand to SEQ ID NO: 2104896
aacugucaggcaguucauc

SEQ ID NO: 2104898 - RNA, 19 nt, Artificial Sequence
  Description of Artificial Sequence: Synthetic oligonucleotide
  Sense strand starting at position 2398 of SEQ ID NO: 1882229
ccugguucuuugguuacaa

SEQ ID NO: 2104899 - RNA, 19 nt, Artificial Sequence
  Description of Artificial Sequence: Synthetic oligonucleotide
  Antisense strand to SEQ ID NO: 2104898
uuguaaccaaagaaccagg

SEQ ID NO: 2104900 - RNA, 19 nt, Artificial Sequence
  Description of Artificial Sequence: Synthetic oligonucleotide
  Sense strand starting at position 2399 of SEQ ID NO: 1882229
cugguucuuugguuacaaa

SEQ ID NO: 2104901 - RNA, 19 nt, Artificial Sequence
  Description of Artificial Sequence: Synthetic oligonucleotide
  Antisense strand to SEQ ID NO: 2104900
uuuguaaccaaagaaccag

SEQ ID NO: 2104902 - RNA, 19 nt, Artificial Sequence
  Description of Artificial Sequence: Synthetic oligonucleotide
  Sense strand starting at position 2446 of SEQ ID NO: 1882229
aggacuggucuuuaggcaa

SEQ ID NO: 2104903 - RNA, 19 nt, Artificial Sequence
  Description of Artificial Sequence: Synthetic oligonucleotide
  Antisense strand to SEQ ID NO: 2104902
uugccuaaagaccaguccu

SEQ ID NO: 2104904 - RNA, 19 nt, Artificial Sequence
  Description of Artificial Sequence: Synthetic oligonucleotide
  Sense strand starting at position 2467 of SEQ ID NO: 1882229
ugugaaauccgcguuuguc

SEQ ID NO: 2104905 - RNA, 19 nt, Artificial Sequence
  Description of Artificial Sequence: Synthetic oligonucleotide
  Antisense strand to SEQ ID NO: 2104904
gacaaacgcggauuucaca

SEQ ID NO: 2104906 - RNA, 19 nt, Artificial Sequence
  Description of Artificial Sequence: Synthetic oligonucleotide
  Sense strand starting at position 2468 of SEQ ID NO: 1882229
gugaaauccgcguuugucu

SEQ ID NO: 2104907 - RNA, 19 nt, Artificial Sequence
  Description of Artificial Sequence: Synthetic oligonucleotide
  Antisense strand to SEQ ID NO: 2104906
agacaaacgcggauuucac

SEQ ID NO: 2104908 - RNA, 19 nt, Artificial Sequence
  Description of Artificial Sequence: Synthetic oligonucleotide
  Sense strand starting at position 2469 of SEQ ID NO: 1882229
ugaaauccgcguuugucuu

SEQ ID NO: 2104909 - RNA, 19 nt, Artificial Sequence
  Description of Artificial Sequence: Synthetic oligonucleotide
  Antisense strand to SEQ ID NO: 2104908
aagacaaacgcggauuuca

SEQ ID NO: 2104910 - RNA, 19 nt, Artificial Sequence
  Description of Artificial Sequence: Synthetic oligonucleotide
  Sense strand starting at position 2624 of SEQ ID NO: 1882229
guaccaucugccugauuau

SEQ ID NO: 2104911 - RNA, 19 nt, Artificial Sequence
  Description of Artificial Sequence: Synthetic oligonucleotide
  Antisense strand to SEQ ID NO: 2104910
auaaucaggcagaugguac

SEQ ID NO: 2104912 - RNA, 19 nt, Artificial Sequence
  Description of Artificial Sequence: Synthetic oligonucleotide
  Sense strand starting at position 2633 of SEQ ID NO: 1882229
gccugauuaugugugacca

SEQ ID NO: 2104913 - RNA, 19 nt, Artificial Sequence
  Description of Artificial Sequence: Synthetic oligonucleotide
  Antisense strand to SEQ ID NO: 2104912
uggucacacauaaucaggc

SEQ ID NO: 2104914 - RNA, 19 nt, Artificial Sequence
  Description of Artificial Sequence: Synthetic oligonucleotide
  Sense strand starting at position 2637 of SEQ ID NO: 1882229
gauuaugugugaccacuua

SEQ ID NO: 2104915 - RNA, 19 nt, Artificial Sequence
  Description of Artificial Sequence: Synthetic oligonucleotide
  Antisense strand to SEQ ID NO: 2104914
uaaguggucacacauaauc

SEQ ID NO: 2104916 - RNA, 19 nt, Artificial Sequence
  Description of Artificial Sequence: Synthetic oligonucleotide
  Sense strand starting at position 2723 of SEQ ID NO: 1882229
ucuucucuugagcauguau

SEQ ID NO: 2104917 - RNA, 19 nt, Artificial Sequence
  Description of Artificial Sequence: Synthetic oligonucleotide
  Antisense strand to SEQ ID NO: 2104916
auacaugcucaagagaaga

SEQ ID NO: 2104918 - RNA, 19 nt, Artificial Sequence
  Description of Artificial Sequence: Synthetic oligonucleotide
  Sense strand starting at position 2725 of SEQ ID NO: 1882229
uucucuugagcauguauua

SEQ ID NO: 2104919 - RNA, 19 nt, Artificial Sequence
  Description of Artificial Sequence: Synthetic oligonucleotide
  Antisense strand to SEQ ID NO: 2104918
uaauacaugcucaagagaa

SEQ ID NO: 2104920 - RNA, 19 nt, Artificial Sequence
  Description of Artificial Sequence: Synthetic oligonucleotide
  Sense strand starting at position 2741 of SEQ ID NO: 1882229
uuaguuagcguacugcaua

SEQ ID NO: 2104921 - RNA, 19 nt, Artificial Sequence
  Description of Artificial Sequence: Synthetic oligonucleotide
  Antisense strand to SEQ ID NO: 2104920
uaugcaguacgcuaacuaa

SEQ ID NO: 2104922 - RNA, 19 nt, Artificial Sequence
  Description of Artificial Sequence: Synthetic oligonucleotide
  Sense strand starting at position 2744 of SEQ ID NO: 1882229
guuagcguacugcauauuu

SEQ ID NO: 2104923 - RNA, 19 nt, Artificial Sequence
  Description of Artificial Sequence: Synthetic oligonucleotide
  Antisense strand to SEQ ID NO: 2104922
aaauaugcaguacgcuaac

SEQ ID NO: 2104924 - RNA, 19 nt, Artificial Sequence
  Description of Artificial Sequence: Synthetic oligonucleotide
  Sense strand starting at position 2784 of SEQ ID NO: 1882229
gaacgucuccucuaccaga

SEQ ID NO: 2104925 - RNA, 19 nt, Artificial Sequence
  Description of Artificial Sequence: Synthetic oligonucleotide
  Antisense strand to SEQ ID NO: 2104924
ucugguagaggagacguuc

SEQ ID NO: 2104926 - RNA, 19 nt, Artificial Sequence
  Description of Artificial Sequence: Synthetic oligonucleotide
  Sense strand starting at position 2852 of SEQ ID NO: 1882229
cuagauuucuaguaccuac

SEQ ID NO: 2104927 - RNA, 19 nt, Artificial Sequence
  Description of Artificial Sequence: Synthetic oligonucleotide
  Antisense strand to SEQ ID NO: 2104926
guagguacuagaaaucuag

SEQ ID NO: 2104928 - RNA, 19 nt, Artificial Sequence
  Description of Artificial Sequence: Synthetic oligonucleotide
  Sense strand starting at position 2979 of SEQ ID NO: 1882229
aguugacauuuguaaugau

SEQ ID NO: 2104929 - RNA, 19 nt, Artificial Sequence
  Description of Artificial Sequence: Synthetic oligonucleotide
  Antisense strand to SEQ ID NO: 2104928
aucauuacaaaugucaacu

SEQ ID NO: 2104930 - RNA, 19 nt, Artificial Sequence
  Description of Artificial Sequence: Synthetic oligonucleotide
  Sense strand starting at position 2982 of SEQ ID NO: 1882229
ugacauuuguaaugaugag

SEQ ID NO: 2104931 - RNA, 19 nt, Artificial Sequence
  Description of Artificial Sequence: Synthetic oligonucleotide
  Antisense strand to SEQ ID NO: 2104930
cucaucauuacaaauguca

SEQ ID NO: 2104932 - RNA, 19 nt, Artificial Sequence
  Description of Artificial Sequence: Synthetic oligonucleotide
  Sense strand starting at position 2998 of SEQ ID NO: 1882229
gagagucucaagugaaguu

SEQ ID NO: 2104933 - RNA, 19 nt, Artificial Sequence
  Description of Artificial Sequence: Synthetic oligonucleotide
  Antisense strand to SEQ ID NO: 2104932
aacuucacuugagacucuc

SEQ ID NO: 2104934 - RNA, 19 nt, Artificial Sequence
  Description of Artificial Sequence: Synthetic oligonucleotide
  Sense strand starting at position 2999 of SEQ ID NO: 1882229
agagucucaagugaaguuu

SEQ ID NO: 2104935 - RNA, 19 nt, Artificial Sequence
  Description of Artificial Sequence: Synthetic oligonucleotide
  Antisense strand to SEQ ID NO: 2104934
aaacuucacuugagacucu

SEQ ID NO: 2104936 - RNA, 19 nt, Artificial Sequence
  Description of Artificial Sequence: Synthetic oligonucleotide
  Sense strand starting at position 3129 of SEQ ID NO: 1882229
uggcaucagaguggacaaa

SEQ ID NO: 2104937 - RNA, 19 nt, Artificial Sequence
  Description of Artificial Sequence: Synthetic oligonucleotide
  Antisense strand to SEQ ID NO: 2104936
uuuguccacucugaugcca

SEQ ID NO: 2104938 - RNA, 19 nt, Artificial Sequence
  Description of Artificial Sequence: Synthetic oligonucleotide
  Sense strand starting at position 3181 of SEQ ID NO: 1882229
cucugaagcuuuguccuaa

SEQ ID NO: 2104939 - RNA, 19 nt, Artificial Sequence
  Description of Artificial Sequence: Synthetic oligonucleotide
  Antisense strand to SEQ ID NO: 2104938
uuaggacaaagcuucagag

SEQ ID NO: 2104940 - RNA, 19 nt, Artificial Sequence
  Description of Artificial Sequence: Synthetic oligonucleotide
  Sense strand starting at position 3182 of SEQ ID NO: 1882229
ucugaagcuuuguccuaaa

SEQ ID NO: 2104941 - RNA, 19 nt, Artificial Sequence
  Description of Artificial Sequence: Synthetic oligonucleotide
  Antisense strand to SEQ ID NO: 2104940
uuuaggacaaagcuucaga

SEQ ID NO: 2104942 - RNA, 19 nt, Artificial Sequence
  Description of Artificial Sequence: Synthetic oligonucleotide
  Sense strand starting at position 3261 of SEQ ID NO: 1882229
aggaaagucaugggaaugu

SEQ ID NO: 2104943 - RNA, 19 nt, Artificial Sequence
  Description of Artificial Sequence: Synthetic oligonucleotide
  Antisense strand to SEQ ID NO: 2104942
acauucccaugacuuuccu

SEQ ID NO: 2104944 - RNA, 19 nt, Artificial Sequence
  Description of Artificial Sequence: Synthetic oligonucleotide
  Sense strand starting at position 3265 of SEQ ID NO: 1882229
aagucaugggaauguuaac

SEQ ID NO: 2104945 - RNA, 19 nt, Artificial Sequence
  Description of Artificial Sequence: Synthetic oligonucleotide
  Antisense strand to SEQ ID NO: 2104944
guuaacauucccaugacuu

SEQ ID NO: 2104946 - RNA, 19 nt, Artificial Sequence
  Description of Artificial Sequence: Synthetic oligonucleotide
  Sense strand starting at position 3303 of SEQ ID NO: 1882229
gggcaagcucuugaaagcu

SEQ ID NO: 2104947 - RNA, 19 nt, Artificial Sequence
  Description of Artificial Sequence: Synthetic oligonucleotide
  Antisense strand to SEQ ID NO: 2104946
agcuuucaagagcuugccc

SEQ ID NO: 2104948 - RNA, 19 nt, Artificial Sequence
  Description of Artificial Sequence: Synthetic oligonucleotide
  Sense strand starting at position 3311 of SEQ ID NO: 1882229
ucuugaaagcuuuauccug

SEQ ID NO: 2104949 - RNA, 19 nt, Artificial Sequence
  Description of Artificial Sequence: Synthetic oligonucleotide
  Antisense strand to SEQ ID NO: 2104948
caggauaaagcuuucaaga

SEQ ID NO: 2104950 - RNA, 19 nt, Artificial Sequence
  Description of Artificial Sequence: Synthetic oligonucleotide
  Sense strand starting at position 3339 of SEQ ID NO: 1882229
gaugcuuccuguuuagaua

SEQ ID NO: 2104951 - RNA, 19 nt, Artificial Sequence
  Description of Artificial Sequence: Synthetic oligonucleotide
  Antisense strand to SEQ ID NO: 2104950
uaucuaaacaggaagcauc

SEQ ID NO: 2104952 - RNA, 19 nt, Artificial Sequence
  Description of Artificial Sequence: Synthetic oligonucleotide
  Sense strand starting at position 3340 of SEQ ID NO: 1882229
augcuuccuguuuagauaa

SEQ ID NO: 2104953 - RNA, 19 nt, Artificial Sequence
  Description of Artificial Sequence: Synthetic oligonucleotide
  Antisense strand to SEQ ID NO: 2104952
uuaucuaaacaggaagcau

SEQ ID NO: 2104954 - RNA, 19 nt, Artificial Sequence
  Description of Artificial Sequence: Synthetic oligonucleotide
  Sense strand starting at position 3588 of SEQ ID NO: 1882229
caggccaaucuguguauuu

SEQ ID NO: 2104955 - RNA, 19 nt, Artificial Sequence
  Description of Artificial Sequence: Synthetic oligonucleotide
  Antisense strand to SEQ ID NO: 2104954
aaauacacagauuggccug

SEQ ID NO: 2104956 - RNA, 19 nt, Artificial Sequence
  Description of Artificial Sequence: Synthetic oligonucleotide
  Sense strand starting at position 3633 of SEQ ID NO: 1882229
uguccaguuuggucucuaa

SEQ ID NO: 2104957 - RNA, 19 nt, Artificial Sequence
  Description of Artificial Sequence: Synthetic oligonucleotide
  Antisense strand to SEQ ID NO: 2104956
uuagagaccaaacuggaca

SEQ ID NO: 2104958 - RNA, 19 nt, Artificial Sequence
  Description of Artificial Sequence: Synthetic oligonucleotide
  Sense strand starting at position 3801 of SEQ ID NO: 1882229
cuuagugggucaguucaga

SEQ ID NO: 2104959 - RNA, 19 nt, Artificial Sequence
  Description of Artificial Sequence: Synthetic oligonucleotide
  Antisense strand to SEQ ID NO: 2104958
ucugaacugacccacuaag

SEQ ID NO: 2104960 - RNA, 19 nt, Artificial Sequence
  Description of Artificial Sequence: Synthetic oligonucleotide
  Sense strand starting at position 3860 of SEQ ID NO: 1882229
guaagauaucucugcuagu

SEQ ID NO: 2104961 - RNA, 19 nt, Artificial Sequence
  Description of Artificial Sequence: Synthetic oligonucleotide
  Antisense strand to SEQ ID NO: 2104960
acuagcagagauaucuuac

SEQ ID NO: 2104962 - RNA, 19 nt, Artificial Sequence
  Description of Artificial Sequence: Synthetic oligonucleotide
  Sense strand starting at position 3976 of SEQ ID NO: 1882229
ggagaaauguauuaauugg

SEQ ID NO: 2104963 - RNA, 19 nt, Artificial Sequence
  Description of Artificial Sequence: Synthetic oligonucleotide
  Antisense strand to SEQ ID NO: 2104962
ccaauuaauacauuucucc

SEQ ID NO: 2104964 - RNA, 19 nt, Artificial Sequence
  Description of Artificial Sequence: Synthetic oligonucleotide
  Sense strand starting at position 11 of SEQ ID NO: 1882231
aaaguucuuugcuagaaga

SEQ ID NO: 2104965 - RNA, 19 nt, Artificial Sequence
  Description of Artificial Sequence: Synthetic oligonucleotide
  Antisense strand to SEQ ID NO: 2104964
ucuucuagcaaagaacuuu

SEQ ID NO: 2104966 - RNA, 19 nt, Artificial Sequence
  Description of Artificial Sequence: Synthetic oligonucleotide
  Sense strand starting at position 13 of SEQ ID NO: 1882231
aguucuuugcuagaagacu

SEQ ID NO: 2104967 - RNA, 19 nt, Artificial Sequence
  Description of Artificial Sequence: Synthetic oligonucleotide
  Antisense strand to SEQ ID NO: 2104966
agucuucuagcaaagaacu

SEQ ID NO: 2104968 - RNA, 19 nt, Artificial Sequence
  Description of Artificial Sequence: Synthetic oligonucleotide
  Sense strand starting at position 83 of SEQ ID NO: 1882231
ccaagaacuuagcaaguua

SEQ ID NO: 2104969 - RNA, 19 nt, Artificial Sequence
  Description of Artificial Sequence: Synthetic oligonucleotide
  Antisense strand to SEQ ID NO: 2104968
uaacuugcuaaguucuugg

SEQ ID NO: 2104970 - RNA, 19 nt, Artificial Sequence
  Description of Artificial Sequence: Synthetic oligonucleotide
  Sense strand starting at position 141 of SEQ ID NO: 1882231
gcaacauggguuugaauga

SEQ ID NO: 2104971 - RNA, 19 nt, Artificial Sequence
  Description of Artificial Sequence: Synthetic oligonucleotide
  Antisense strand to SEQ ID NO: 2104970
ucauucaaacccauguugc

SEQ ID NO: 2104972 - RNA, 19 nt, Artificial Sequence
  Description of Artificial Sequence: Synthetic oligonucleotide
  Sense strand starting at position 501 of SEQ ID NO: 1882231
uuaguaaaguccugggaaa

SEQ ID NO: 2104973 - RNA, 19 nt, Artificial Sequence
  Description of Artificial Sequence: Synthetic oligonucleotide
  Antisense strand to SEQ ID NO: 2104972
uuucccaggacuuuacuaa

SEQ ID NO: 2104974 - RNA, 19 nt, Artificial Sequence
  Description of Artificial Sequence: Synthetic oligonucleotide
  Sense strand starting at position 502 of SEQ ID NO: 1882231
uaguaaaguccugggaaag

SEQ ID NO: 2104975 - RNA, 19 nt, Artificial Sequence
  Description of Artificial Sequence: Synthetic oligonucleotide
  Antisense strand to SEQ ID NO: 2104974
cuuucccaggacuuuacua

SEQ ID NO: 2104976 - RNA, 19 nt, Artificial Sequence
  Description of Artificial Sequence: Synthetic oligonucleotide
  Sense strand starting at position 503 of SEQ ID NO: 1882231
aguaaaguccugggaaagu

SEQ ID NO: 2104977 - RNA, 19 nt, Artificial Sequence
  Description of Artificial Sequence: Synthetic oligonucleotide
  Antisense strand to SEQ ID NO: 2104976
acuuucccaggacuuuacu

SEQ ID NO: 2104978 - RNA, 19 nt, Artificial Sequence
  Description of Artificial Sequence: Synthetic oligonucleotide
  Sense strand starting at position 657 of SEQ ID NO: 1882231
cuuccaagaguugguccaa

SEQ ID NO: 2104979 - RNA, 19 nt, Artificial Sequence
  Description of Artificial Sequence: Synthetic oligonucleotide
  Antisense strand to SEQ ID NO: 2104978
uuggaccaacucuuggaag

SEQ ID NO: 2104980 - RNA, 19 nt, Artificial Sequence
  Description of Artificial Sequence: Synthetic oligonucleotide
  Sense strand starting at position 738 of SEQ ID NO: 1882231
gugaacauguaaguacuaa

SEQ ID NO: 2104981 - RNA, 19 nt, Artificial Sequence
  Description of Artificial Sequence: Synthetic oligonucleotide
  Antisense strand to SEQ ID NO: 2104980
uuaguacuuacauguucac

SEQ ID NO: 2104982 - RNA, 19 nt, Artificial Sequence
  Description of Artificial Sequence: Synthetic oligonucleotide
  Sense strand starting at position 775 of SEQ ID NO: 1882231
cuauuacuacucugggaau

SEQ ID NO: 2104983 - RNA, 19 nt, Artificial Sequence
  Description of Artificial Sequence: Synthetic oligonucleotide
  Antisense strand to SEQ ID NO: 2104982
auucccagaguaguaauag

SEQ ID NO: 2104984 - RNA, 19 nt, Artificial Sequence
  Description of Artificial Sequence: Synthetic oligonucleotide
  Sense strand starting at position 938 of SEQ ID NO: 1882231
uccacauaagcucagaagu

SEQ ID NO: 2104985 - RNA, 19 nt, Artificial Sequence
  Description of Artificial Sequence: Synthetic oligonucleotide
  Antisense strand to SEQ ID NO: 2104984
acuucugagcuuaugugga

SEQ ID NO: 2104986 - RNA, 19 nt, Artificial Sequence
  Description of Artificial Sequence: Synthetic oligonucleotide
  Sense strand starting at position 992 of SEQ ID NO: 1882231
uuaauuaaaguguggcuaa

SEQ ID NO: 2104987 - RNA, 19 nt, Artificial Sequence
  Description of Artificial Sequence: Synthetic oligonucleotide
  Antisense strand to SEQ ID NO: 2104986
uuagccacacuuuaauuaa

SEQ ID NO: 2104988 - RNA, 19 nt, Artificial Sequence
  Description of Artificial Sequence: Synthetic oligonucleotide
  Sense strand starting at position 995 of SEQ ID NO: 1882231
auuaaaguguggcuaacuu

SEQ ID NO: 2104989 - RNA, 19 nt, Artificial Sequence
  Description of Artificial Sequence: Synthetic oligonucleotide
  Antisense strand to SEQ ID NO: 2104988
aaguuagccacacuuuaau

SEQ ID NO: 2104990 - RNA, 19 nt, Artificial Sequence
  Description of Artificial Sequence: Synthetic oligonucleotide
  Sense strand starting at position 999 of SEQ ID NO: 1882231
aaguguggcuaacuuagaa

SEQ ID NO: 2104991 - RNA, 19 nt, Artificial Sequence
  Description of Artificial Sequence: Synthetic oligonucleotide
  Antisense strand to SEQ ID NO: 2104990
uucuaaguuagccacacuu

SEQ ID NO: 2104992 - RNA, 19 nt, Artificial Sequence
  Description of Artificial Sequence: Synthetic oligonucleotide
  Sense strand starting at position 1028 of SEQ ID NO: 1882231
uuaaguguuccuuguaagu

SEQ ID NO: 2104993 - RNA, 19 nt, Artificial Sequence
  Description of Artificial Sequence: Synthetic oligonucleotide
  Antisense strand to SEQ ID NO: 2104992
acuuacaaggaacacuuaa

SEQ ID NO: 2104994 - RNA, 19 nt, Artificial Sequence
  Description of Artificial Sequence: Synthetic oligonucleotide
  Sense strand starting at position 1039 of SEQ ID NO: 1882231
uuguaaguuuacucacaga

SEQ ID NO: 2104995 - RNA, 19 nt, Artificial Sequence
  Description of Artificial Sequence: Synthetic oligonucleotide
  Antisense strand to SEQ ID NO: 2104994
ucugugaguaaacuuacaa

SEQ ID NO: 2104996 - RNA, 19 nt, Artificial Sequence
  Description of Artificial Sequence: Synthetic oligonucleotide
  Sense strand starting at position 1083 of SEQ ID NO: 1882231
uucucagacuuauuaguau

SEQ ID NO: 2104997 - RNA, 19 nt, Artificial Sequence
  Description of Artificial Sequence: Synthetic oligonucleotide
  Antisense strand to SEQ ID NO: 2104996
auacuaauaagucugagaa

SEQ ID NO: 2104998 - RNA, 19 nt, Artificial Sequence
  Description of Artificial Sequence: Synthetic oligonucleotide
  Sense strand starting at position 1086 of SEQ ID NO: 1882231
ucagacuuauuaguauguu

SEQ ID NO: 2104999 - RNA, 19 nt, Artificial Sequence
  Description of Artificial Sequence: Synthetic oligonucleotide
  Antisense strand to SEQ ID NO: 2104998
aacauacuaauaagucuga

SEQ ID NO: 2105000 - RNA, 19 nt, Artificial Sequence
  Description of Artificial Sequence: Synthetic oligonucleotide
  Sense strand starting at position 1089 of SEQ ID NO: 1882231
gacuuauuaguauguugac

SEQ ID NO: 2105001 - RNA, 19 nt, Artificial Sequence
  Description of Artificial Sequence: Synthetic oligonucleotide
  Antisense strand to SEQ ID NO: 2105000
gucaacauacuaauaaguc

SEQ ID NO: 2105002 - RNA, 19 nt, Artificial Sequence
  Description of Artificial Sequence: Synthetic oligonucleotide
  Sense strand starting at position 1099 of SEQ ID NO: 1882231
uauguugaccuuuggcaga

SEQ ID NO: 2105003 - RNA, 19 nt, Artificial Sequence
  Description of Artificial Sequence: Synthetic oligonucleotide
  Antisense strand to SEQ ID NO: 2105002
ucugccaaaggucaacaua

SEQ ID NO: 2105004 - RNA, 19 nt, Artificial Sequence
  Description of Artificial Sequence: Synthetic oligonucleotide
  Sense strand starting at position 1101 of SEQ ID NO: 1882231
uguugaccuuuggcagauu

SEQ ID NO: 2105005 - RNA, 19 nt, Artificial Sequence
  Description of Artificial Sequence: Synthetic oligonucleotide
  Antisense strand to SEQ ID NO: 2105004
aaucugccaaaggucaaca

SEQ ID NO: 2105006 - RNA, 19 nt, Artificial Sequence
  Description of Artificial Sequence: Synthetic oligonucleotide
  Sense strand starting at position 1158 of SEQ ID NO: 1882231
agaacuauuucucggaauu

SEQ ID NO: 2105007 - RNA, 19 nt, Artificial Sequence
  Description of Artificial Sequence: Synthetic oligonucleotide
  Antisense strand to SEQ ID NO: 2105006
aauuccgagaaauaguucu

SEQ ID NO: 2105008 - RNA, 19 nt, Artificial Sequence
  Description of Artificial Sequence: Synthetic oligonucleotide
  Sense strand starting at position 1189 of SEQ ID NO: 1882231
ucuuaacaaucuugggaua

SEQ ID NO: 2105009 - RNA, 19 nt, Artificial Sequence
  Description of Artificial Sequence: Synthetic oligonucleotide
  Antisense strand to SEQ ID NO: 2105008
uaucccaagauuguuaaga

SEQ ID NO: 2105010 - RNA, 19 nt, Artificial Sequence
  Description of Artificial Sequence: Synthetic oligonucleotide
  Sense strand starting at position 1191 of SEQ ID NO: 1882231
uuaacaaucuugggauaca

SEQ ID NO: 2105011 - RNA, 19 nt, Artificial Sequence
  Description of Artificial Sequence: Synthetic oligonucleotide
  Antisense strand to SEQ ID NO: 2105010
uguaucccaagauuguuaa

SEQ ID NO: 2105012 - RNA, 19 nt, Artificial Sequence
  Description of Artificial Sequence: Synthetic oligonucleotide
  Sense strand starting at position 1501 of SEQ ID NO: 1882231
cggagaaauucucaaaucu

SEQ ID NO: 2105013 - RNA, 19 nt, Artificial Sequence
  Description of Artificial Sequence: Synthetic oligonucleotide
  Antisense strand to SEQ ID NO: 2105012
agauuugagaauuucuccg

SEQ ID NO: 2105014 - RNA, 19 nt, Artificial Sequence
  Description of Artificial Sequence: Synthetic oligonucleotide
  Sense strand starting at position 1922 of SEQ ID NO: 1882231
cgguaggucucgccgaaga

SEQ ID NO: 2105015 - RNA, 19 nt, Artificial Sequence
  Description of Artificial Sequence: Synthetic oligonucleotide
  Antisense strand to SEQ ID NO: 2105014
ucuucggcgagaccuaccg

SEQ ID NO: 2105016 - RNA, 19 nt, Artificial Sequence
  Description of Artificial Sequence: Synthetic oligonucleotide
  Sense strand starting at position 1924 of SEQ ID NO: 1882231
guaggucucgccgaagacu

SEQ ID NO: 2105017 - RNA, 19 nt, Artificial Sequence
  Description of Artificial Sequence: Synthetic oligonucleotide
  Antisense strand to SEQ ID NO: 2105016
agucuucggcgagaccuac

SEQ ID NO: 2105018 - RNA, 19 nt, Artificial Sequence
  Description of Artificial Sequence: Synthetic oligonucleotide
  Sense strand starting at position 2276 of SEQ ID NO: 1882231
gggucaucucagggagacu

SEQ ID NO: 2105019 - RNA, 19 nt, Artificial Sequence
  Description of Artificial Sequence: Synthetic oligonucleotide
  Antisense strand to SEQ ID NO: 2105018
agucucccugagaugaccc

SEQ ID NO: 2105020 - RNA, 19 nt, Artificial Sequence
  Description of Artificial Sequence: Synthetic oligonucleotide
  Sense strand starting at position 2287 of SEQ ID NO: 1882231
gggagacugugggaugaua

SEQ ID NO: 2105021 - RNA, 19 nt, Artificial Sequence
  Description of Artificial Sequence: Synthetic oligonucleotide
  Antisense strand to SEQ ID NO: 2105020
uaucaucccacagucuccc

SEQ ID NO: 2105022 - RNA, 19 nt, Artificial Sequence
  Description of Artificial Sequence: Synthetic oligonucleotide
  Sense strand starting at position 2289 of SEQ ID NO: 1882231
gagacugugggaugauagu

SEQ ID NO: 2105023 - RNA, 19 nt, Artificial Sequence
  Description of Artificial Sequence: Synthetic oligonucleotide
  Antisense strand to SEQ ID NO: 2105022
acuaucaucccacagucuc

SEQ ID NO: 2105024 - RNA, 19 nt, Artificial Sequence
  Description of Artificial Sequence: Synthetic oligonucleotide
  Sense strand starting at position 2978 of SEQ ID NO: 1882231
ggaauugauagccaauguu

SEQ ID NO: 2105025 - RNA, 19 nt, Artificial Sequence
  Description of Artificial Sequence: Synthetic oligonucleotide
  Antisense strand to SEQ ID NO: 2105024
aacauuggcuaucaauucc

SEQ ID NO: 2105026 - RNA, 19 nt, Artificial Sequence
  Description of Artificial Sequence: Synthetic oligonucleotide
  Sense strand starting at position 3026 of SEQ ID NO: 1882231
gacaauugaguuuggcaua

SEQ ID NO: 2105027 - RNA, 19 nt, Artificial Sequence
  Description of Artificial Sequence: Synthetic oligonucleotide
  Antisense strand to SEQ ID NO: 2105026
uaugccaaacucaauuguc

SEQ ID NO: 2105028 - RNA, 19 nt, Artificial Sequence
  Description of Artificial Sequence: Synthetic oligonucleotide
  Sense strand starting at position 3031 of SEQ ID NO: 1882231
uugaguuuggcauaugcca

SEQ ID NO: 2105029 - RNA, 19 nt, Artificial Sequence
  Description of Artificial Sequence: Synthetic oligonucleotide
  Antisense strand to SEQ ID NO: 2105028
uggcauaugccaaacucaa

SEQ ID NO: 2105030 - RNA, 19 nt, Artificial Sequence
  Description of Artificial Sequence: Synthetic oligonucleotide
  Sense strand starting at position 3095 of SEQ ID NO: 1882231
agcuacaucucgucagagu

SEQ ID NO: 2105031 - RNA, 19 nt, Artificial Sequence
  Description of Artificial Sequence: Synthetic oligonucleotide
  Antisense strand to SEQ ID NO: 2105030
acucugacgagauguagcu

SEQ ID NO: 2105032 - RNA, 19 nt, Artificial Sequence
  Description of Artificial Sequence: Synthetic oligonucleotide
  Sense strand starting at position 3096 of SEQ ID NO: 1882231
gcuacaucucgucagagug

SEQ ID NO: 2105033 - RNA, 19 nt, Artificial Sequence
  Description of Artificial Sequence: Synthetic oligonucleotide
  Antisense strand to SEQ ID NO: 2105032
cacucugacgagauguagc

SEQ ID NO: 2105034 - RNA, 19 nt, Artificial Sequence
  Description of Artificial Sequence: Synthetic oligonucleotide
  Sense strand starting at position 3106 of SEQ ID NO: 1882231
gucagaguggacugugaaa

SEQ ID NO: 2105035 - RNA, 19 nt, Artificial Sequence
  Description of Artificial Sequence: Synthetic oligonucleotide
  Antisense strand to SEQ ID NO: 2105034
uuucacaguccacucugac

SEQ ID NO: 2105036 - RNA, 19 nt, Artificial Sequence
  Description of Artificial Sequence: Synthetic oligonucleotide
  Sense strand starting at position 3262 of SEQ ID NO: 1882231
aaacuaauguugcauggga

SEQ ID NO: 2105037 - RNA, 19 nt, Artificial Sequence
  Description of Artificial Sequence: Synthetic oligonucleotide
  Antisense strand to SEQ ID NO: 2105036
ucccaugcaacauuaguuu

SEQ ID NO: 2105038 - RNA, 19 nt, Artificial Sequence
  Description of Artificial Sequence: Synthetic oligonucleotide
  Sense strand starting at position 3264 of SEQ ID NO: 1882231
acuaauguugcaugggaua

SEQ ID NO: 2105039 - RNA, 19 nt, Artificial Sequence
  Description of Artificial Sequence: Synthetic oligonucleotide
  Antisense strand to SEQ ID NO: 2105038
uaucccaugcaacauuagu

SEQ ID NO: 2105040 - RNA, 19 nt, Artificial Sequence
  Description of Artificial Sequence: Synthetic oligonucleotide
  Sense strand starting at position 3933 of SEQ ID NO: 1882231
augucuagcccagggauua

SEQ ID NO: 2105041 - RNA, 19 nt, Artificial Sequence
  Description of Artificial Sequence: Synthetic oligonucleotide
  Antisense strand to SEQ ID NO: 2105040
uaaucccugggcuagacau

SEQ ID NO: 2105042 - RNA, 19 nt, Artificial Sequence
  Description of Artificial Sequence: Synthetic oligonucleotide
  Sense strand starting at position 3934 of SEQ ID NO: 1882231
ugucuagcccagggauuau

SEQ ID NO: 2105043 - RNA, 19 nt, Artificial Sequence
  Description of Artificial Sequence: Synthetic oligonucleotide
  Antisense strand to SEQ ID NO: 2105042
auaaucccugggcuagaca

SEQ ID NO: 2105044 - RNA, 19 nt, Artificial Sequence
  Description of Artificial Sequence: Synthetic oligonucleotide
  Sense strand starting at position 48 of SEQ ID NO: 1882232
gugagcucucccgcagcaa

SEQ ID NO: 2105045 - RNA, 19 nt, Artificial Sequence
  Description of Artificial Sequence: Synthetic oligonucleotide
  Antisense strand to SEQ ID NO: 2105044
uugcugcgggagagcucac

SEQ ID NO: 2105046 - RNA, 19 nt, Artificial Sequence
  Description of Artificial Sequence: Synthetic oligonucleotide
  Sense strand starting at position 49 of SEQ ID NO: 1882232
ugagcucucccgcagcaaa

SEQ ID NO: 2105047 - RNA, 19 nt, Artificial Sequence
  Description of Artificial Sequence: Synthetic oligonucleotide
  Antisense strand to SEQ ID NO: 2105046
uuugcugcgggagagcuca

SEQ ID NO: 2105048 - RNA, 19 nt, Artificial Sequence
  Description of Artificial Sequence: Synthetic oligonucleotide
  Sense strand starting at position 166 of SEQ ID NO: 1882232
agagaaaucccauggagcu

SEQ ID NO: 2105049 - RNA, 19 nt, Artificial Sequence
  Description of Artificial Sequence: Synthetic oligonucleotide
  Antisense strand to SEQ ID NO: 2105048
agcuccaugggauuucucu

SEQ ID NO: 2105050 - RNA, 19 nt, Artificial Sequence
  Description of Artificial Sequence: Synthetic oligonucleotide
  Sense strand starting at position 167 of SEQ ID NO: 1882232
gagaaaucccauggagcuu

SEQ ID NO: 2105051 - RNA, 19 nt, Artificial Sequence
  Description of Artificial Sequence: Synthetic oligonucleotide
  Antisense strand to SEQ ID NO: 2105050
aagcuccaugggauuucuc

SEQ ID NO: 2105052 - RNA, 19 nt, Artificial Sequence
  Description of Artificial Sequence: Synthetic oligonucleotide
  Sense strand starting at position 869 of SEQ ID NO: 1882232
caggucucucccgaaggaa

SEQ ID NO: 2105053 - RNA, 19 nt, Artificial Sequence
  Description of Artificial Sequence: Synthetic oligonucleotide
  Antisense strand to SEQ ID NO: 2105052
uuccuucgggagagaccug

SEQ ID NO: 2105054 - RNA, 19 nt, Artificial Sequence
  Description of Artificial Sequence: Synthetic oligonucleotide
  Sense strand starting at position 946 of SEQ ID NO: 1882232
uugaaagaguuucucaaag

SEQ ID NO: 2105055 - RNA, 19 nt, Artificial Sequence
  Description of Artificial Sequence: Synthetic oligonucleotide
  Antisense strand to SEQ ID NO: 2105054
cuuugagaaacucuuucaa

SEQ ID NO: 2105056 - RNA, 19 nt, Artificial Sequence
  Description of Artificial Sequence: Synthetic oligonucleotide
  Sense strand starting at position 1022 of SEQ ID NO: 1882232
ccgagugcucggcuucuca

SEQ ID NO: 2105057 - RNA, 19 nt, Artificial Sequence
  Description of Artificial Sequence: Synthetic oligonucleotide
  Antisense strand to SEQ ID NO: 2105056
ugagaagccgagcacucgg

SEQ ID NO: 2105058 - RNA, 19 nt, Artificial Sequence
  Description of Artificial Sequence: Synthetic oligonucleotide
  Sense strand starting at position 2044 of SEQ ID NO: 1882232
gcucuuuguuacuuguuga

SEQ ID NO: 2105059 - RNA, 19 nt, Artificial Sequence
  Description of Artificial Sequence: Synthetic oligonucleotide
  Antisense strand to SEQ ID NO: 2105058
ucaacaaguaacaaagagc

SEQ ID NO: 2105060 - RNA, 19 nt, Artificial Sequence
  Description of Artificial Sequence: Synthetic oligonucleotide
  Sense strand starting at position 2200 of SEQ ID NO: 1882232
aggguauaguaauacaacu

SEQ ID NO: 2105061 - RNA, 19 nt, Artificial Sequence
  Description of Artificial Sequence: Synthetic oligonucleotide
  Antisense strand to SEQ ID NO: 2105060
aguuguauuacuauacccu

SEQ ID NO: 2105062 - RNA, 19 nt, Artificial Sequence
  Description of Artificial Sequence: Synthetic oligonucleotide
  Sense strand starting at position 2333 of SEQ ID NO: 1882232
gggagauauuaaagggcgu

SEQ ID NO: 2105063 - RNA, 19 nt, Artificial Sequence
  Description of Artificial Sequence: Synthetic oligonucleotide
  Antisense strand to SEQ ID NO: 2105062
acgcccuuuaauaucuccc

SEQ ID NO: 2105064 - RNA, 19 nt, Artificial Sequence
  Description of Artificial Sequence: Synthetic oligonucleotide
  Sense strand starting at position 2334 of SEQ ID NO: 1882232
ggagauauuaaagggcguu

SEQ ID NO: 2105065 - RNA, 19 nt, Artificial Sequence
  Description of Artificial Sequence: Synthetic oligonucleotide
  Antisense strand to SEQ ID NO: 2105064
aacgcccuuuaauaucucc

SEQ ID NO: 2105066 - RNA, 19 nt, Artificial Sequence
  Description of Artificial Sequence: Synthetic oligonucleotide
  Sense strand starting at position 2335 of SEQ ID NO: 1882232
gagauauuaaagggcguuu

SEQ ID NO: 2105067 - RNA, 19 nt, Artificial Sequence
  Description of Artificial Sequence: Synthetic oligonucleotide
  Antisense strand to SEQ ID NO: 2105066
aaacgcccuuuaauaucuc

SEQ ID NO: 2105068 - RNA, 19 nt, Artificial Sequence
  Description of Artificial Sequence: Synthetic oligonucleotide
  Sense strand starting at position 2346 of SEQ ID NO: 1882232
gggcguuugggagaggaga

SEQ ID NO: 2105069 - RNA, 19 nt, Artificial Sequence
  Description of Artificial Sequence: Synthetic oligonucleotide
  Antisense strand to SEQ ID NO: 2105068
ucuccucucccaaacgccc

SEQ ID NO: 2105070 - RNA, 19 nt, Artificial Sequence
  Description of Artificial Sequence: Synthetic oligonucleotide
  Sense strand starting at position 2472 of SEQ ID NO: 1882232
gaagguuagccauggacuu

SEQ ID NO: 2105071 - RNA, 19 nt, Artificial Sequence
  Description of Artificial Sequence: Synthetic oligonucleotide
  Antisense strand to SEQ ID NO: 2105070
aaguccauggcuaaccuuc

SEQ ID NO: 2105072 - RNA, 19 nt, Artificial Sequence
  Description of Artificial Sequence: Synthetic oligonucleotide
  Sense strand starting at position 2483 of SEQ ID NO: 1882232
auggacuugaauuguagau

SEQ ID NO: 2105073 - RNA, 19 nt, Artificial Sequence
  Description of Artificial Sequence: Synthetic oligonucleotide
  Antisense strand to SEQ ID NO: 2105072
aucuacaauucaaguccau

SEQ ID NO: 2105074 - RNA, 19 nt, Artificial Sequence
  Description of Artificial Sequence: Synthetic oligonucleotide
  Sense strand starting at position 2509 of SEQ ID NO: 1882232
gccgguggaguuugauaag

SEQ ID NO: 2105075 - RNA, 19 nt, Artificial Sequence
  Description of Artificial Sequence: Synthetic oligonucleotide
  Antisense strand to SEQ ID NO: 2105074
cuuaucaaacuccaccggc

SEQ ID NO: 2105076 - RNA, 19 nt, Artificial Sequence
  Description of Artificial Sequence: Synthetic oligonucleotide
  Sense strand starting at position 2597 of SEQ ID NO: 1882232
ccuugaaucugauuguguu

SEQ ID NO: 2105077 - RNA, 19 nt, Artificial Sequence
  Description of Artificial Sequence: Synthetic oligonucleotide
  Antisense strand to SEQ ID NO: 2105076
aacacaaucagauucaagg

SEQ ID NO: 2105078 - RNA, 19 nt, Artificial Sequence
  Description of Artificial Sequence: Synthetic oligonucleotide
  Sense strand starting at position 2601 of SEQ ID NO: 1882232
gaaucugauuguguugaga

SEQ ID NO: 2105079 - RNA, 19 nt, Artificial Sequence
  Description of Artificial Sequence: Synthetic oligonucleotide
  Antisense strand to SEQ ID NO: 2105078
ucucaacacaaucagauuc

SEQ ID NO: 2105080 - RNA, 19 nt, Artificial Sequence
  Description of Artificial Sequence: Synthetic oligonucleotide
  Sense strand starting at position 2653 of SEQ ID NO: 1882232
gcagguucucugggacuga

SEQ ID NO: 2105081 - RNA, 19 nt, Artificial Sequence
  Description of Artificial Sequence: Synthetic oligonucleotide
  Antisense strand to SEQ ID NO: 2105080
ucagucccagagaaccugc

SEQ ID NO: 2105082 - RNA, 19 nt, Artificial Sequence
  Description of Artificial Sequence: Synthetic oligonucleotide
  Sense strand starting at position 2666 of SEQ ID NO: 1882232
gacugacgcuucuuagaaa

SEQ ID NO: 2105083 - RNA, 19 nt, Artificial Sequence
  Description of Artificial Sequence: Synthetic oligonucleotide
  Antisense strand to SEQ ID NO: 2105082
uuucuaagaagcgucaguc

SEQ ID NO: 2105084 - RNA, 19 nt, Artificial Sequence
  Description of Artificial Sequence: Synthetic oligonucleotide
  Sense strand starting at position 2675 of SEQ ID NO: 1882232
uucuuagaaaguuguaugu

SEQ ID NO: 2105085 - RNA, 19 nt, Artificial Sequence
  Description of Artificial Sequence: Synthetic oligonucleotide
  Antisense strand to SEQ ID NO: 2105084
acauacaacuuucuaagaa

SEQ ID NO: 2105086 - RNA, 19 nt, Artificial Sequence
  Description of Artificial Sequence: Synthetic oligonucleotide
  Sense strand starting at position 2679 of SEQ ID NO: 1882232
uagaaaguuguauguauuc

SEQ ID NO: 2105087 - RNA, 19 nt, Artificial Sequence
  Description of Artificial Sequence: Synthetic oligonucleotide
  Antisense strand to SEQ ID NO: 2105086
gaauacauacaacuuucua

SEQ ID NO: 2105088 - RNA, 19 nt, Artificial Sequence
  Description of Artificial Sequence: Synthetic oligonucleotide
  Sense strand starting at position 2796 of SEQ ID NO: 1882232
auuacaaauugggauuaca

SEQ ID NO: 2105089 - RNA, 19 nt, Artificial Sequence
  Description of Artificial Sequence: Synthetic oligonucleotide
  Antisense strand to SEQ ID NO: 2105088
uguaaucccaauuuguaau

SEQ ID NO: 2105090 - RNA, 19 nt, Artificial Sequence
  Description of Artificial Sequence: Synthetic oligonucleotide
  Sense strand starting at position 2812 of SEQ ID NO: 1882232
acagauacaucuggaauuu

SEQ ID NO: 2105091 - RNA, 19 nt, Artificial Sequence
  Description of Artificial Sequence: Synthetic oligonucleotide
  Antisense strand to SEQ ID NO: 2105090
aaauuccagauguaucugu

SEQ ID NO: 2105092 - RNA, 19 nt, Artificial Sequence
  Description of Artificial Sequence: Synthetic oligonucleotide
  Sense strand starting at position 2844 of SEQ ID NO: 1882232
caaacaaguugguucugua

SEQ ID NO: 2105093 - RNA, 19 nt, Artificial Sequence
  Description of Artificial Sequence: Synthetic oligonucleotide
  Antisense strand to SEQ ID NO: 2105092
uacagaaccaacuuguuug

SEQ ID NO: 2105094 - RNA, 19 nt, Artificial Sequence
  Description of Artificial Sequence: Synthetic oligonucleotide
  Sense strand starting at position 2848 of SEQ ID NO: 1882232
caaguugguucuguaauca

SEQ ID NO: 2105095 - RNA, 19 nt, Artificial Sequence
  Description of Artificial Sequence: Synthetic oligonucleotide
  Antisense strand to SEQ ID NO: 2105094
ugauuacagaaccaacuug

SEQ ID NO: 2105096 - RNA, 19 nt, Artificial Sequence
  Description of Artificial Sequence: Synthetic oligonucleotide
  Sense strand starting at position 2856 of SEQ ID NO: 1882232
uucuguaaucaaugcuugu

SEQ ID NO: 2105097 - RNA, 19 nt, Artificial Sequence
  Description of Artificial Sequence: Synthetic oligonucleotide
  Antisense strand to SEQ ID NO: 2105096
acaagcauugauuacagaa

SEQ ID NO: 2105098 - RNA, 19 nt, Artificial Sequence
  Description of Artificial Sequence: Synthetic oligonucleotide
  Sense strand starting at position 3180 of SEQ ID NO: 1882232
ugugcuucuucuguuacau

SEQ ID NO: 2105099 - RNA, 19 nt, Artificial Sequence
  Description of Artificial Sequence: Synthetic oligonucleotide
  Antisense strand to SEQ ID NO: 2105098
auguaacagaagaagcaca

SEQ ID NO: 2105100 - RNA, 19 nt, Artificial Sequence
  Description of Artificial Sequence: Synthetic oligonucleotide
  Sense strand starting at position 3206 of SEQ ID NO: 1882232
ucucuaagaucuuuguuag

SEQ ID NO: 2105101 - RNA, 19 nt, Artificial Sequence
  Description of Artificial Sequence: Synthetic oligonucleotide
  Antisense strand to SEQ ID NO: 2105100
cuaacaaagaucuuagaga

SEQ ID NO: 2105102 - RNA, 19 nt, Artificial Sequence
  Description of Artificial Sequence: Synthetic oligonucleotide
  Sense strand starting at position 3207 of SEQ ID NO: 1882232
cucuaagaucuuuguuaga

SEQ ID NO: 2105103 - RNA, 19 nt, Artificial Sequence
  Description of Artificial Sequence: Synthetic oligonucleotide
  Antisense strand to SEQ ID NO: 2105102
ucuaacaaagaucuuagag

SEQ ID NO: 2105104 - RNA, 19 nt, Artificial Sequence
  Description of Artificial Sequence: Synthetic oligonucleotide
  Sense strand starting at position 3209 of SEQ ID NO: 1882232
cuaagaucuuuguuagagg

SEQ ID NO: 2105105 - RNA, 19 nt, Artificial Sequence
  Description of Artificial Sequence: Synthetic oligonucleotide
  Antisense strand to SEQ ID NO: 2105104
ccucuaacaaagaucuuag

SEQ ID NO: 2105106 - RNA, 19 nt, Artificial Sequence
  Description of Artificial Sequence: Synthetic oligonucleotide
  Sense strand starting at position 3255 of SEQ ID NO: 1882232
uuaauaugccaguagauuc

SEQ ID NO: 2105107 - RNA, 19 nt, Artificial Sequence
  Description of Artificial Sequence: Synthetic oligonucleotide
  Antisense strand to SEQ ID NO: 2105106
gaaucuacuggcauauuaa

SEQ ID NO: 2105108 - RNA, 19 nt, Artificial Sequence
  Description of Artificial Sequence: Synthetic oligonucleotide
  Sense strand starting at position 3379 of SEQ ID NO: 1882232
acgugacaucgaggcuuga

SEQ ID NO: 2105109 - RNA, 19 nt, Artificial Sequence
  Description of Artificial Sequence: Synthetic oligonucleotide
  Antisense strand to SEQ ID NO: 2105108
ucaagccucgaugucacgu

SEQ ID NO: 2105110 - RNA, 19 nt, Artificial Sequence
  Description of Artificial Sequence: Synthetic oligonucleotide
  Sense strand starting at position 3400 of SEQ ID NO: 1882232
gugcaugugguaugaaacu

SEQ ID NO: 2105111 - RNA, 19 nt, Artificial Sequence
  Description of Artificial Sequence: Synthetic oligonucleotide
  Antisense strand to SEQ ID NO: 2105110
aguuucauaccacaugcac

SEQ ID NO: 2105112 - RNA, 19 nt, Artificial Sequence
  Description of Artificial Sequence: Synthetic oligonucleotide
  Sense strand starting at position 3406 of SEQ ID NO: 1882232
gugguaugaaacugaccua

SEQ ID NO: 2105113 - RNA, 19 nt, Artificial Sequence
  Description of Artificial Sequence: Synthetic oligonucleotide
  Antisense strand to SEQ ID NO: 2105112
uaggucaguuucauaccac

SEQ ID NO: 2105114 - RNA, 19 nt, Artificial Sequence
  Description of Artificial Sequence: Synthetic oligonucleotide
  Sense strand starting at position 3409 of SEQ ID NO: 1882232
guaugaaacugaccuaagu

SEQ ID NO: 2105115 - RNA, 19 nt, Artificial Sequence
  Description of Artificial Sequence: Synthetic oligonucleotide
  Antisense strand to SEQ ID NO: 2105114
acuuaggucaguuucauac

SEQ ID NO: 2105116 - RNA, 19 nt, Artificial Sequence
  Description of Artificial Sequence: Synthetic oligonucleotide
  Sense strand starting at position 3466 of SEQ ID NO: 1882232
gcggaggaguggucaagaa

SEQ ID NO: 2105117 - RNA, 19 nt, Artificial Sequence
  Description of Artificial Sequence: Synthetic oligonucleotide
  Antisense strand to SEQ ID NO: 2105116
uucuugaccacuccuccgc

SEQ ID NO: 2105118 - RNA, 19 nt, Artificial Sequence
  Description of Artificial Sequence: Synthetic oligonucleotide
  Sense strand starting at position 3603 of SEQ ID NO: 1882232
ucucauaaugaaugguaau

SEQ ID NO: 2105119 - RNA, 19 nt, Artificial Sequence
  Description of Artificial Sequence: Synthetic oligonucleotide
  Antisense strand to SEQ ID NO: 2105118
auuaccauucauuaugaga

SEQ ID NO: 2105120 - RNA, 19 nt, Artificial Sequence
  Description of Artificial Sequence: Synthetic oligonucleotide
  Sense strand starting at position 3887 of SEQ ID NO: 1882232
cgugauagcauuuguccuu

SEQ ID NO: 2105121 - RNA, 19 nt, Artificial Sequence
  Description of Artificial Sequence: Synthetic oligonucleotide
  Antisense strand to SEQ ID NO: 2105120
aaggacaaaugcuaucacg

SEQ ID NO: 2105122 - RNA, 19 nt, Artificial Sequence
  Description of Artificial Sequence: Synthetic oligonucleotide
  Sense strand starting at position 3888 of SEQ ID NO: 1882232
gugauagcauuuguccuuu

SEQ ID NO: 2105123 - RNA, 19 nt, Artificial Sequence
  Description of Artificial Sequence: Synthetic oligonucleotide
  Antisense strand to SEQ ID NO: 2105122
aaaggacaaaugcuaucac

SEQ ID NO: 2105124 - RNA, 19 nt, Artificial Sequence
  Description of Artificial Sequence: Synthetic oligonucleotide
  Sense strand starting at position 61 of SEQ ID NO: 1882233
uuuagugaugucuacaaua

SEQ ID NO: 2105125 - RNA, 19 nt, Artificial Sequence
  Description of Artificial Sequence: Synthetic oligonucleotide
  Antisense strand to SEQ ID NO: 2105124
uauuguagacaucacuaaa

SEQ ID NO: 2105126 - RNA, 19 nt, Artificial Sequence
  Description of Artificial Sequence: Synthetic oligonucleotide
  Sense strand starting at position 63 of SEQ ID NO: 1882233
uagugaugucuacaauaug

SEQ ID NO: 2105127 - RNA, 19 nt, Artificial Sequence
  Description of Artificial Sequence: Synthetic oligonucleotide
  Antisense strand to SEQ ID NO: 2105126
cauauuguagacaucacua

SEQ ID NO: 2105128 - RNA, 19 nt, Artificial Sequence
  Description of Artificial Sequence: Synthetic oligonucleotide
  Sense strand starting at position 228 of SEQ ID NO: 1882233
ugguauuuauaggacugau

SEQ ID NO: 2105129 - RNA, 19 nt, Artificial Sequence
  Description of Artificial Sequence: Synthetic oligonucleotide
  Antisense strand to SEQ ID NO: 2105128
aucaguccuauaaauacca

SEQ ID NO: 2105130 - RNA, 19 nt, Artificial Sequence
  Description of Artificial Sequence: Synthetic oligonucleotide
  Sense strand starting at position 370 of SEQ ID NO: 1882233
gguggauauuuauauacaa

SEQ ID NO: 2105131 - RNA, 19 nt, Artificial Sequence
  Description of Artificial Sequence: Synthetic oligonucleotide
  Antisense strand to SEQ ID NO: 2105130
uuguauauaaauauccacc

SEQ ID NO: 2105132 - RNA, 19 nt, Artificial Sequence
  Description of Artificial Sequence: Synthetic oligonucleotide
  Sense strand starting at position 410 of SEQ ID NO: 1882233
uuuaaaggacacuguguua

SEQ ID NO: 2105133 - RNA, 19 nt, Artificial Sequence
  Description of Artificial Sequence: Synthetic oligonucleotide
  Antisense strand to SEQ ID NO: 2105132
uaacacaguguccuuuaaa

SEQ ID NO: 2105134 - RNA, 19 nt, Artificial Sequence
  Description of Artificial Sequence: Synthetic oligonucleotide
  Sense strand starting at position 413 of SEQ ID NO: 1882233
aaaggacacuguguuagau

SEQ ID NO: 2105135 - RNA, 19 nt, Artificial Sequence
  Description of Artificial Sequence: Synthetic oligonucleotide
  Antisense strand to SEQ ID NO: 2105134
aucuaacacaguguccuuu

SEQ ID NO: 2105136 - RNA, 19 nt, Artificial Sequence
  Description of Artificial Sequence: Synthetic oligonucleotide
  Sense strand starting at position 435 of SEQ ID NO: 1882233
cgaaguuaagaucgagaau

SEQ ID NO: 2105137 - RNA, 19 nt, Artificial Sequence
  Description of Artificial Sequence: Synthetic oligonucleotide
  Antisense strand to SEQ ID NO: 2105136
auucucgaucuuaacuucg

SEQ ID NO: 2105138 - RNA, 19 nt, Artificial Sequence
  Description of Artificial Sequence: Synthetic oligonucleotide
  Sense strand starting at position 438 of SEQ ID NO: 1882233
aguuaagaucgagaauguu

SEQ ID NO: 2105139 - RNA, 19 nt, Artificial Sequence
  Description of Artificial Sequence: Synthetic oligonucleotide
  Antisense strand to SEQ ID NO: 2105138
aacauucucgaucuuaacu

SEQ ID NO: 2105140 - RNA, 19 nt, Artificial Sequence
  Description of Artificial Sequence: Synthetic oligonucleotide
  Sense strand starting at position 441 of SEQ ID NO: 1882233
uaagaucgagaauguuaac

SEQ ID NO: 2105141 - RNA, 19 nt, Artificial Sequence
  Description of Artificial Sequence: Synthetic oligonucleotide
  Antisense strand to SEQ ID NO: 2105140
guuaacauucucgaucuua

SEQ ID NO: 2105142 - RNA, 19 nt, Artificial Sequence
  Description of Artificial Sequence: Synthetic oligonucleotide
  Sense strand starting at position 450 of SEQ ID NO: 1882233
gaauguuaaccgcagcaac

SEQ ID NO: 2105143 - RNA, 19 nt, Artificial Sequence
  Description of Artificial Sequence: Synthetic oligonucleotide
  Antisense strand to SEQ ID NO: 2105142
guugcugcgguuaacauuc

SEQ ID NO: 2105144 - RNA, 19 nt, Artificial Sequence
  Description of Artificial Sequence: Synthetic oligonucleotide
  Sense strand starting at position 514 of SEQ ID NO: 1882233
uuguuaacugaccauaugu

SEQ ID NO: 2105145 - RNA, 19 nt, Artificial Sequence
  Description of Artificial Sequence: Synthetic oligonucleotide
  Antisense strand to SEQ ID NO: 2105144
acauauggucaguuaacaa

SEQ ID NO: 2105146 - RNA, 19 nt, Artificial Sequence
  Description of Artificial Sequence: Synthetic oligonucleotide
  Sense strand starting at position 531 of SEQ ID NO: 1882233
gugcaaguaccauauguac

SEQ ID NO: 2105147 - RNA, 19 nt, Artificial Sequence
  Description of Artificial Sequence: Synthetic oligonucleotide
  Antisense strand to SEQ ID NO: 2105146
guacauaugguacuugcac

SEQ ID NO: 2105148 - RNA, 19 nt, Artificial Sequence
  Description of Artificial Sequence: Synthetic oligonucleotide
  Sense strand starting at position 545 of SEQ ID NO: 1882233
uguaccauuguacagagua

SEQ ID NO: 2105149 - RNA, 19 nt, Artificial Sequence
  Description of Artificial Sequence: Synthetic oligonucleotide
  Antisense strand to SEQ ID NO: 2105148
uacucuguacaaugguaca

SEQ ID NO: 2105150 - RNA, 19 nt, Artificial Sequence
  Description of Artificial Sequence: Synthetic oligonucleotide
  Sense strand starting at position 558 of SEQ ID NO: 1882233
agaguacuauaaucgcauu

SEQ ID NO: 2105151 - RNA, 19 nt, Artificial Sequence
  Description of Artificial Sequence: Synthetic oligonucleotide
  Antisense strand to SEQ ID NO: 2105150
aaugcgauuauaguacucu

SEQ ID NO: 2105152 - RNA, 19 nt, Artificial Sequence
  Description of Artificial Sequence: Synthetic oligonucleotide
  Sense strand starting at position 575 of SEQ ID NO: 1882233
uuauuucaucacggcguga

SEQ ID NO: 2105153 - RNA, 19 nt, Artificial Sequence
  Description of Artificial Sequence: Synthetic oligonucleotide
  Antisense strand to SEQ ID NO: 2105152
ucacgccgugaugaaauaa

SEQ ID NO: 2105154 - RNA, 19 nt, Artificial Sequence
  Description of Artificial Sequence: Synthetic oligonucleotide
  Sense strand starting at position 577 of SEQ ID NO: 1882233
auuucaucacggcgugagu

SEQ ID NO: 2105155 - RNA, 19 nt, Artificial Sequence
  Description of Artificial Sequence: Synthetic oligonucleotide
  Antisense strand to SEQ ID NO: 2105154
acucacgccgugaugaaau

SEQ ID NO: 2105156 - RNA, 19 nt, Artificial Sequence
  Description of Artificial Sequence: Synthetic oligonucleotide
  Sense strand starting at position 580 of SEQ ID NO: 1882233
ucaucacggcgugaguaaa

SEQ ID NO: 2105157 - RNA, 19 nt, Artificial Sequence
  Description of Artificial Sequence: Synthetic oligonucleotide
  Antisense strand to SEQ ID NO: 2105156
uuuacucacgccgugauga

SEQ ID NO: 2105158 - RNA, 19 nt, Artificial Sequence
  Description of Artificial Sequence: Synthetic oligonucleotide
  Sense strand starting at position 618 of SEQ ID NO: 1882233
ugaguugacuuaucugauu

SEQ ID NO: 2105159 - RNA, 19 nt, Artificial Sequence
  Description of Artificial Sequence: Synthetic oligonucleotide
  Antisense strand to SEQ ID NO: 2105158
aaucagauaagucaacuca

SEQ ID NO: 2105160 - RNA, 19 nt, Artificial Sequence
  Description of Artificial Sequence: Synthetic oligonucleotide
  Sense strand starting at position 821 of SEQ ID NO: 1882233
ggacuauuggagcgcugau

SEQ ID NO: 2105161 - RNA, 19 nt, Artificial Sequence
  Description of Artificial Sequence: Synthetic oligonucleotide
  Antisense strand to SEQ ID NO: 2105160
aucagcgcuccaauagucc

SEQ ID NO: 2105162 - RNA, 19 nt, Artificial Sequence
  Description of Artificial Sequence: Synthetic oligonucleotide
  Sense strand starting at position 833 of SEQ ID NO: 1882233
cgcugaugacucuggauga

SEQ ID NO: 2105163 - RNA, 19 nt, Artificial Sequence
  Description of Artificial Sequence: Synthetic oligonucleotide
  Antisense strand to SEQ ID NO: 2105162
ucauccagagucaucagcg

SEQ ID NO: 2105164 - RNA, 19 nt, Artificial Sequence
  Description of Artificial Sequence: Synthetic oligonucleotide
  Sense strand starting at position 1174 of SEQ ID NO: 1882233
guuuguggcaaugauuacu

SEQ ID NO: 2105165 - RNA, 19 nt, Artificial Sequence
  Description of Artificial Sequence: Synthetic oligonucleotide
  Antisense strand to SEQ ID NO: 2105164
aguaaucauugccacaaac

SEQ ID NO: 2105166 - RNA, 19 nt, Artificial Sequence
  Description of Artificial Sequence: Synthetic oligonucleotide
  Sense strand starting at position 1220 of SEQ ID NO: 1882233
cguuauaaauaugucgaca

SEQ ID NO: 2105167 - RNA, 19 nt, Artificial Sequence
  Description of Artificial Sequence: Synthetic oligonucleotide
  Antisense strand to SEQ ID NO: 2105166
ugucgacauauuuauaacg

SEQ ID NO: 2105168 - RNA, 19 nt, Artificial Sequence
  Description of Artificial Sequence: Synthetic oligonucleotide
  Sense strand starting at position 1245 of SEQ ID NO: 1882233
ccaaguagauggucaucau

SEQ ID NO: 2105169 - RNA, 19 nt, Artificial Sequence
  Description of Artificial Sequence: Synthetic oligonucleotide
  Antisense strand to SEQ ID NO: 2105168
augaugaccaucuacuugg

SEQ ID NO: 2105170 - RNA, 19 nt, Artificial Sequence
  Description of Artificial Sequence: Synthetic oligonucleotide
  Sense strand starting at position 1249 of SEQ ID NO: 1882233
guagauggucaucaucaca

SEQ ID NO: 2105171 - RNA, 19 nt, Artificial Sequence
  Description of Artificial Sequence: Synthetic oligonucleotide
  Antisense strand to SEQ ID NO: 2105170
ugugaugaugaccaucuac

SEQ ID NO: 2105172 - RNA, 19 nt, Artificial Sequence
  Description of Artificial Sequence: Synthetic oligonucleotide
  Sense strand starting at position 1369 of SEQ ID NO: 1882233
ucggaugucagagggaaau

SEQ ID NO: 2105173 - RNA, 19 nt, Artificial Sequence
  Description of Artificial Sequence: Synthetic oligonucleotide
  Antisense strand to SEQ ID NO: 2105172
auuucccucugacauccga

SEQ ID NO: 2105174 - RNA, 19 nt, Artificial Sequence
  Description of Artificial Sequence: Synthetic oligonucleotide
  Sense strand starting at position 1576 of SEQ ID NO: 1882233
gcacgucagcaguucucaa

SEQ ID NO: 2105175 - RNA, 19 nt, Artificial Sequence
  Description of Artificial Sequence: Synthetic oligonucleotide
  Antisense strand to SEQ ID NO: 2105174
uugagaacugcugacgugc

SEQ ID NO: 2105176 - RNA, 19 nt, Artificial Sequence
  Description of Artificial Sequence: Synthetic oligonucleotide
  Sense strand starting at position 2208 of SEQ ID NO: 1882233
gcggguagugucuacaaau

SEQ ID NO: 2105177 - RNA, 19 nt, Artificial Sequence
  Description of Artificial Sequence: Synthetic oligonucleotide
  Antisense strand to SEQ ID NO: 2105176
auuuguagacacuacccgc

SEQ ID NO: 2105178 - RNA, 19 nt, Artificial Sequence
  Description of Artificial Sequence: Synthetic oligonucleotide
  Sense strand starting at position 2221 of SEQ ID NO: 1882233
acaaauccucuucggaaua

SEQ ID NO: 2105179 - RNA, 19 nt, Artificial Sequence
  Description of Artificial Sequence: Synthetic oligonucleotide
  Antisense strand to SEQ ID NO: 2105178
uauuccgaagaggauuugu

SEQ ID NO: 2105180 - RNA, 19 nt, Artificial Sequence
  Description of Artificial Sequence: Synthetic oligonucleotide
  Sense strand starting at position 2232 of SEQ ID NO: 1882233
ucggaauaaucccuuccga

SEQ ID NO: 2105181 - RNA, 19 nt, Artificial Sequence
  Description of Artificial Sequence: Synthetic oligonucleotide
  Antisense strand to SEQ ID NO: 2105180
ucggaagggauuauuccga

SEQ ID NO: 2105182 - RNA, 19 nt, Artificial Sequence
  Description of Artificial Sequence: Synthetic oligonucleotide
  Sense strand starting at position 2376 of SEQ ID NO: 1882233
augcacucugaagguauaa

SEQ ID NO: 2105183 - RNA, 19 nt, Artificial Sequence
  Description of Artificial Sequence: Synthetic oligonucleotide
  Antisense strand to SEQ ID NO: 2105182
uuauaccuucagagugcau

SEQ ID NO: 2105184 - RNA, 19 nt, Artificial Sequence
  Description of Artificial Sequence: Synthetic oligonucleotide
  Sense strand starting at position 2875 of SEQ ID NO: 1882233
gcaucauauuuaucuuguu

SEQ ID NO: 2105185 - RNA, 19 nt, Artificial Sequence
  Description of Artificial Sequence: Synthetic oligonucleotide
  Antisense strand to SEQ ID NO: 2105184
aacaagauaaauaugaugc

SEQ ID NO: 2105186 - RNA, 19 nt, Artificial Sequence
  Description of Artificial Sequence: Synthetic oligonucleotide
  Sense strand starting at position 2954 of SEQ ID NO: 1882233
gucugaaugcuccaaugag

SEQ ID NO: 2105187 - RNA, 19 nt, Artificial Sequence
  Description of Artificial Sequence: Synthetic oligonucleotide
  Antisense strand to SEQ ID NO: 2105186
cucauuggagcauucagac

SEQ ID NO: 2105188 - RNA, 19 nt, Artificial Sequence
  Description of Artificial Sequence: Synthetic oligonucleotide
  Sense strand starting at position 3143 of SEQ ID NO: 1882233
ucagcauaacuggguuacu

SEQ ID NO: 2105189 - RNA, 19 nt, Artificial Sequence
  Description of Artificial Sequence: Synthetic oligonucleotide
  Antisense strand to SEQ ID NO: 2105188
aguaacccaguuaugcuga

SEQ ID NO: 2105190 - RNA, 19 nt, Artificial Sequence
  Description of Artificial Sequence: Synthetic oligonucleotide
  Sense strand starting at position 3146 of SEQ ID NO: 1882233
gcauaacuggguuacucau

SEQ ID NO: 2105191 - RNA, 19 nt, Artificial Sequence
  Description of Artificial Sequence: Synthetic oligonucleotide
  Antisense strand to SEQ ID NO: 2105190
augaguaacccaguuaugc

SEQ ID NO: 2105192 - RNA, 19 nt, Artificial Sequence
  Description of Artificial Sequence: Synthetic oligonucleotide
  Sense strand starting at position 3241 of SEQ ID NO: 1882233
ugauaaauguuagcuguag

SEQ ID NO: 2105193 - RNA, 19 nt, Artificial Sequence
  Description of Artificial Sequence: Synthetic oligonucleotide
  Antisense strand to SEQ ID NO: 2105192
cuacagcuaacauuuauca

SEQ ID NO: 2105194 - RNA, 19 nt, Artificial Sequence
  Description of Artificial Sequence: Synthetic oligonucleotide
  Sense strand starting at position 3302 of SEQ ID NO: 1882233
aguguauguuucuucuaag

SEQ ID NO: 2105195 - RNA, 19 nt, Artificial Sequence
  Description of Artificial Sequence: Synthetic oligonucleotide
  Antisense strand to SEQ ID NO: 2105194
cuuagaagaaacauacacu

SEQ ID NO: 2105196 - RNA, 19 nt, Artificial Sequence
  Description of Artificial Sequence: Synthetic oligonucleotide
  Sense strand starting at position 3366 of SEQ ID NO: 1882233
acuucucagucucugagau

SEQ ID NO: 2105197 - RNA, 19 nt, Artificial Sequence
  Description of Artificial Sequence: Synthetic oligonucleotide
  Antisense strand to SEQ ID NO: 2105196
aucucagagacugagaagu

SEQ ID NO: 2105198 - RNA, 19 nt, Artificial Sequence
  Description of Artificial Sequence: Synthetic oligonucleotide
  Sense strand starting at position 3582 of SEQ ID NO: 1882233
gcggacacuuaggucaauu

SEQ ID NO: 2105199 - RNA, 19 nt, Artificial Sequence
  Description of Artificial Sequence: Synthetic oligonucleotide
  Antisense strand to SEQ ID NO: 2105198
aauugaccuaaguguccgc

SEQ ID NO: 2105200 - RNA, 19 nt, Artificial Sequence
  Description of Artificial Sequence: Synthetic oligonucleotide
  Sense strand starting at position 3663 of SEQ ID NO: 1882233
auauguauuuccuuucugu

SEQ ID NO: 2105201 - RNA, 19 nt, Artificial Sequence
  Description of Artificial Sequence: Synthetic oligonucleotide
  Antisense strand to SEQ ID NO: 2105200
acagaaaggaaauacauau

SEQ ID NO: 2105202 - RNA, 19 nt, Artificial Sequence
  Description of Artificial Sequence: Synthetic oligonucleotide
  Sense strand starting at position 3671 of SEQ ID NO: 1882233
uuccuuucuguuggaucua

SEQ ID NO: 2105203 - RNA, 19 nt, Artificial Sequence
  Description of Artificial Sequence: Synthetic oligonucleotide
  Antisense strand to SEQ ID NO: 2105202
uagauccaacagaaaggaa

SEQ ID NO: 2105204 - RNA, 19 nt, Artificial Sequence
  Description of Artificial Sequence: Synthetic oligonucleotide
  Sense strand starting at position 82 of SEQ ID NO: 1882234
uagaaucaaugguagauuu

SEQ ID NO: 2105205 - RNA, 19 nt, Artificial Sequence
  Description of Artificial Sequence: Synthetic oligonucleotide
  Antisense strand to SEQ ID NO: 2105204
aaaucuaccauugauucua

SEQ ID NO: 2105206 - RNA, 19 nt, Artificial Sequence
  Description of Artificial Sequence: Synthetic oligonucleotide
  Sense strand starting at position 131 of SEQ ID NO: 1882234
augugacccuucuuaggau

SEQ ID NO: 2105207 - RNA, 19 nt, Artificial Sequence
  Description of Artificial Sequence: Synthetic oligonucleotide
  Antisense strand to SEQ ID NO: 2105206
auccuaagaagggucacau

SEQ ID NO: 2105208 - RNA, 19 nt, Artificial Sequence
  Description of Artificial Sequence: Synthetic oligonucleotide
  Sense strand starting at position 250 of SEQ ID NO: 1882234
auaguaaacuuaccagagu

SEQ ID NO: 2105209 - RNA, 19 nt, Artificial Sequence
  Description of Artificial Sequence: Synthetic oligonucleotide
  Antisense strand to SEQ ID NO: 2105208
acucugguaaguuuacuau

SEQ ID NO: 2105210 - RNA, 19 nt, Artificial Sequence
  Description of Artificial Sequence: Synthetic oligonucleotide
  Sense strand starting at position 311 of SEQ ID NO: 1882234
gcuuauguacuguauaaac

SEQ ID NO: 2105211 - RNA, 19 nt, Artificial Sequence
  Description of Artificial Sequence: Synthetic oligonucleotide
  Antisense strand to SEQ ID NO: 2105210
guuuauacaguacauaagc

SEQ ID NO: 2105212 - RNA, 19 nt, Artificial Sequence
  Description of Artificial Sequence: Synthetic oligonucleotide
  Sense strand starting at position 359 of SEQ ID NO: 1882234
uacugaaaugagugcccua

SEQ ID NO: 2105213 - RNA, 19 nt, Artificial Sequence
  Description of Artificial Sequence: Synthetic oligonucleotide
  Antisense strand to SEQ ID NO: 2105212
uagggcacucauuucagua

SEQ ID NO: 2105214 - RNA, 19 nt, Artificial Sequence
  Description of Artificial Sequence: Synthetic oligonucleotide
  Sense strand starting at position 498 of SEQ ID NO: 1882234
uggguaaauucuuucuuua

SEQ ID NO: 2105215 - RNA, 19 nt, Artificial Sequence
  Description of Artificial Sequence: Synthetic oligonucleotide
  Antisense strand to SEQ ID NO: 2105214
uaaagaaagaauuuaccca

SEQ ID NO: 2105216 - RNA, 19 nt, Artificial Sequence
  Description of Artificial Sequence: Synthetic oligonucleotide
  Sense strand starting at position 719 of SEQ ID NO: 1882234
acaugaaauugguuacuau

SEQ ID NO: 2105217 - RNA, 19 nt, Artificial Sequence
  Description of Artificial Sequence: Synthetic oligonucleotide
  Antisense strand to SEQ ID NO: 2105216
auaguaaccaauuucaugu

SEQ ID NO: 2105218 - RNA, 19 nt, Artificial Sequence
  Description of Artificial Sequence: Synthetic oligonucleotide
  Sense strand starting at position 722 of SEQ ID NO: 1882234
ugaaauugguuacuauaag

SEQ ID NO: 2105219 - RNA, 19 nt, Artificial Sequence
  Description of Artificial Sequence: Synthetic oligonucleotide
  Antisense strand to SEQ ID NO: 2105218
cuuauaguaaccaauuuca

SEQ ID NO: 2105220 - RNA, 19 nt, Artificial Sequence
  Description of Artificial Sequence: Synthetic oligonucleotide
  Sense strand starting at position 1070 of SEQ ID NO: 1882234
gguguaccaguguaaucag

SEQ ID NO: 2105221 - RNA, 19 nt, Artificial Sequence
  Description of Artificial Sequence: Synthetic oligonucleotide
  Antisense strand to SEQ ID NO: 2105220
cugauuacacugguacacc

SEQ ID NO: 2105222 - RNA, 19 nt, Artificial Sequence
  Description of Artificial Sequence: Synthetic oligonucleotide
  Sense strand starting at position 1073 of SEQ ID NO: 1882234
guaccaguguaaucagaga

SEQ ID NO: 2105223 - RNA, 19 nt, Artificial Sequence
  Description of Artificial Sequence: Synthetic oligonucleotide
  Antisense strand to SEQ ID NO: 2105222
ucucugauuacacugguac

SEQ ID NO: 2105224 - RNA, 19 nt, Artificial Sequence
  Description of Artificial Sequence: Synthetic oligonucleotide
  Sense strand starting at position 1401 of SEQ ID NO: 1882234
aagagaugauguuucugac

SEQ ID NO: 2105225 - RNA, 19 nt, Artificial Sequence
  Description of Artificial Sequence: Synthetic oligonucleotide
  Antisense strand to SEQ ID NO: 2105224
gucagaaacaucaucucuu

SEQ ID NO: 2105226 - RNA, 19 nt, Artificial Sequence
  Description of Artificial Sequence: Synthetic oligonucleotide
  Sense strand starting at position 1461 of SEQ ID NO: 1882234
guguuaucacaucauagaa

SEQ ID NO: 2105227 - RNA, 19 nt, Artificial Sequence
  Description of Artificial Sequence: Synthetic oligonucleotide
  Antisense strand to SEQ ID NO: 2105226
uucuaugaugugauaacac

SEQ ID NO: 2105228 - RNA, 19 nt, Artificial Sequence
  Description of Artificial Sequence: Synthetic oligonucleotide
  Sense strand starting at position 1517 of SEQ ID NO: 1882234
agagaacucucuucuugug

SEQ ID NO: 2105229 - RNA, 19 nt, Artificial Sequence
  Description of Artificial Sequence: Synthetic oligonucleotide
  Antisense strand to SEQ ID NO: 2105228
cacaagaagagaguucucu

SEQ ID NO: 2105230 - RNA, 19 nt, Artificial Sequence
  Description of Artificial Sequence: Synthetic oligonucleotide
  Sense strand starting at position 1539 of SEQ ID NO: 1882234
acagauauuucuuaagaga

SEQ ID NO: 2105231 - RNA, 19 nt, Artificial Sequence
  Description of Artificial Sequence: Synthetic oligonucleotide
  Antisense strand to SEQ ID NO: 2105230
ucucuuaagaaauaucugu

SEQ ID NO: 2105232 - RNA, 19 nt, Artificial Sequence
  Description of Artificial Sequence: Synthetic oligonucleotide
  Sense strand starting at position 1542 of SEQ ID NO: 1882234
gauauuucuuaagagagua

SEQ ID NO: 2105233 - RNA, 19 nt, Artificial Sequence
  Description of Artificial Sequence: Synthetic oligonucleotide
  Antisense strand to SEQ ID NO: 2105232
uacucucuuaagaaauauc

SEQ ID NO: 2105234 - RNA, 19 nt, Artificial Sequence
  Description of Artificial Sequence: Synthetic oligonucleotide
  Sense strand starting at position 1608 of SEQ ID NO: 1882234
agguauguccucuauguag

SEQ ID NO: 2105235 - RNA, 19 nt, Artificial Sequence
  Description of Artificial Sequence: Synthetic oligonucleotide
  Antisense strand to SEQ ID NO: 2105234
cuacauagaggacauaccu

SEQ ID NO: 2105236 - RNA, 19 nt, Artificial Sequence
  Description of Artificial Sequence: Synthetic oligonucleotide
  Sense strand starting at position 1626 of SEQ ID NO: 1882234
gguaguuuauccuuugaag

SEQ ID NO: 2105237 - RNA, 19 nt, Artificial Sequence
  Description of Artificial Sequence: Synthetic oligonucleotide
  Antisense strand to SEQ ID NO: 2105236
cuucaaaggauaaacuacc

SEQ ID NO: 2105238 - RNA, 19 nt, Artificial Sequence
  Description of Artificial Sequence: Synthetic oligonucleotide
  Sense strand starting at position 1762 of SEQ ID NO: 1882234
ugaagucaugcaggaaaca

SEQ ID NO: 2105239 - RNA, 19 nt, Artificial Sequence
  Description of Artificial Sequence: Synthetic oligonucleotide
  Antisense strand to SEQ ID NO: 2105238
uguuuccugcaugacuuca

SEQ ID NO: 2105240 - RNA, 19 nt, Artificial Sequence
  Description of Artificial Sequence: Synthetic oligonucleotide
  Sense strand starting at position 1831 of SEQ ID NO: 1882234
gaaauuggaaguuguugua

SEQ ID NO: 2105241 - RNA, 19 nt, Artificial Sequence
  Description of Artificial Sequence: Synthetic oligonucleotide
  Antisense strand to SEQ ID NO: 2105240
uacaacaacuuccaauuuc

SEQ ID NO: 2105242 - RNA, 19 nt, Artificial Sequence
  Description of Artificial Sequence: Synthetic oligonucleotide
  Sense strand starting at position 1913 of SEQ ID NO: 1882234
gagauuagguuucuccucu

SEQ ID NO: 2105243 - RNA, 19 nt, Artificial Sequence
  Description of Artificial Sequence: Synthetic oligonucleotide
  Antisense strand to SEQ ID NO: 2105242
agaggagaaaccuaaucuc

SEQ ID NO: 2105244 - RNA, 19 nt, Artificial Sequence
  Description of Artificial Sequence: Synthetic oligonucleotide
  Sense strand starting at position 1991 of SEQ ID NO: 1882234
ugcuauauuuaaccagugu

SEQ ID NO: 2105245 - RNA, 19 nt, Artificial Sequence
  Description of Artificial Sequence: Synthetic oligonucleotide
  Antisense strand to SEQ ID NO: 2105244
acacugguuaaauauagca

SEQ ID NO: 2105246 - RNA, 19 nt, Artificial Sequence
  Description of Artificial Sequence: Synthetic oligonucleotide
  Sense strand starting at position 2076 of SEQ ID NO: 1882234
cuggguuaucaguggauac

SEQ ID NO: 2105247 - RNA, 19 nt, Artificial Sequence
  Description of Artificial Sequence: Synthetic oligonucleotide
  Antisense strand to SEQ ID NO: 2105246
guauccacugauaacccag

SEQ ID NO: 2105248 - RNA, 19 nt, Artificial Sequence
  Description of Artificial Sequence: Synthetic oligonucleotide
  Sense strand starting at position 2077 of SEQ ID NO: 1882234
uggguuaucaguggauaca

SEQ ID NO: 2105249 - RNA, 19 nt, Artificial Sequence
  Description of Artificial Sequence: Synthetic oligonucleotide
  Antisense strand to SEQ ID NO: 2105248
uguauccacugauaaccca

SEQ ID NO: 2105250 - RNA, 19 nt, Artificial Sequence
  Description of Artificial Sequence: Synthetic oligonucleotide
  Sense strand starting at position 2167 of SEQ ID NO: 1882234
agguaauuauuguuugaag

SEQ ID NO: 2105251 - RNA, 19 nt, Artificial Sequence
  Description of Artificial Sequence: Synthetic oligonucleotide
  Antisense strand to SEQ ID NO: 2105250
cuucaaacaauaauuaccu

SEQ ID NO: 2105252 - RNA, 19 nt, Artificial Sequence
  Description of Artificial Sequence: Synthetic oligonucleotide
  Sense strand starting at position 2181 of SEQ ID NO: 1882234
ugaagcucuuaacuacaga

SEQ ID NO: 2105253 - RNA, 19 nt, Artificial Sequence
  Description of Artificial Sequence: Synthetic oligonucleotide
  Antisense strand to SEQ ID NO: 2105252
ucuguaguuaagagcuuca

SEQ ID NO: 2105254 - RNA, 19 nt, Artificial Sequence
  Description of Artificial Sequence: Synthetic oligonucleotide
  Sense strand starting at position 2198 of SEQ ID NO: 1882234
gacugagauuugggacuua

SEQ ID NO: 2105255 - RNA, 19 nt, Artificial Sequence
  Description of Artificial Sequence: Synthetic oligonucleotide
  Antisense strand to SEQ ID NO: 2105254
uaagucccaaaucucaguc

SEQ ID NO: 2105256 - RNA, 19 nt, Artificial Sequence
  Description of Artificial Sequence: Synthetic oligonucleotide
  Sense strand starting at position 2243 of SEQ ID NO: 1882234
gcagcaguugucuuaggca

SEQ ID NO: 2105257 - RNA, 19 nt, Artificial Sequence
  Description of Artificial Sequence: Synthetic oligonucleotide
  Antisense strand to SEQ ID NO: 2105256
ugccuaagacaacugcugc

SEQ ID NO: 2105258 - RNA, 19 nt, Artificial Sequence
  Description of Artificial Sequence: Synthetic oligonucleotide
  Sense strand starting at position 2353 of SEQ ID NO: 1882234
ugcauaaauggaggucuua

SEQ ID NO: 2105259 - RNA, 19 nt, Artificial Sequence
  Description of Artificial Sequence: Synthetic oligonucleotide
  Antisense strand to SEQ ID NO: 2105258
uaagaccuccauuuaugca

SEQ ID NO: 2105260 - RNA, 19 nt, Artificial Sequence
  Description of Artificial Sequence: Synthetic oligonucleotide
  Sense strand starting at position 2494 of SEQ ID NO: 1882234
agcuauguaccugaauguu

SEQ ID NO: 2105261 - RNA, 19 nt, Artificial Sequence
  Description of Artificial Sequence: Synthetic oligonucleotide
  Antisense strand to SEQ ID NO: 2105260
aacauucagguacauagcu

SEQ ID NO: 2105262 - RNA, 19 nt, Artificial Sequence
  Description of Artificial Sequence: Synthetic oligonucleotide
  Sense strand starting at position 2766 of SEQ ID NO: 1882234
uaugaaucugccgagauug

SEQ ID NO: 2105263 - RNA, 19 nt, Artificial Sequence
  Description of Artificial Sequence: Synthetic oligonucleotide
  Antisense strand to SEQ ID NO: 2105262
caaucucggcagauucaua

SEQ ID NO: 2105264 - RNA, 19 nt, Artificial Sequence
  Description of Artificial Sequence: Synthetic oligonucleotide
  Sense strand starting at position 2768 of SEQ ID NO: 1882234
ugaaucugccgagauugaa

SEQ ID NO: 2105265 - RNA, 19 nt, Artificial Sequence
  Description of Artificial Sequence: Synthetic oligonucleotide
  Antisense strand to SEQ ID NO: 2105264
uucaaucucggcagauuca

SEQ ID NO: 2105266 - RNA, 19 nt, Artificial Sequence
  Description of Artificial Sequence: Synthetic oligonucleotide
  Sense strand starting at position 2981 of SEQ ID NO: 1882234
agaauauggcccugacaaa

SEQ ID NO: 2105267 - RNA, 19 nt, Artificial Sequence
  Description of Artificial Sequence: Synthetic oligonucleotide
  Antisense strand to SEQ ID NO: 2105266
uuugucagggccauauucu

SEQ ID NO: 2105268 - RNA, 19 nt, Artificial Sequence
  Description of Artificial Sequence: Synthetic oligonucleotide
  Sense strand starting at position 3107 of SEQ ID NO: 1882234
uguaaagguguggauguaa

SEQ ID NO: 2105269 - RNA, 19 nt, Artificial Sequence
  Description of Artificial Sequence: Synthetic oligonucleotide
  Antisense strand to SEQ ID NO: 2105268
uuacauccacaccuuuaca

SEQ ID NO: 2105270 - RNA, 19 nt, Artificial Sequence
  Description of Artificial Sequence: Synthetic oligonucleotide
  Sense strand starting at position 3173 of SEQ ID NO: 1882234
acccuaugucucugagaaa

SEQ ID NO: 2105271 - RNA, 19 nt, Artificial Sequence
  Description of Artificial Sequence: Synthetic oligonucleotide
  Antisense strand to SEQ ID NO: 2105270
uuucucagagacauagggu

SEQ ID NO: 2105272 - RNA, 19 nt, Artificial Sequence
  Description of Artificial Sequence: Synthetic oligonucleotide
  Sense strand starting at position 3461 of SEQ ID NO: 1882234
cugacucuucucgagcuaa

SEQ ID NO: 2105273 - RNA, 19 nt, Artificial Sequence
  Description of Artificial Sequence: Synthetic oligonucleotide
  Antisense strand to SEQ ID NO: 2105272
uuagcucgagaagagucag

SEQ ID NO: 2105274 - RNA, 19 nt, Artificial Sequence
  Description of Artificial Sequence: Synthetic oligonucleotide
  Sense strand starting at position 3465 of SEQ ID NO: 1882234
cucuucucgagcuaaugga

SEQ ID NO: 2105275 - RNA, 19 nt, Artificial Sequence
  Description of Artificial Sequence: Synthetic oligonucleotide
  Antisense strand to SEQ ID NO: 2105274
uccauuagcucgagaagag

SEQ ID NO: 2105276 - RNA, 19 nt, Artificial Sequence
  Description of Artificial Sequence: Synthetic oligonucleotide
  Sense strand starting at position 3523 of SEQ ID NO: 1882234
gguucuaauagagguagaa

SEQ ID NO: 2105277 - RNA, 19 nt, Artificial Sequence
  Description of Artificial Sequence: Synthetic oligonucleotide
  Antisense strand to SEQ ID NO: 2105276
uucuaccucuauuagaacc

SEQ ID NO: 2105278 - RNA, 19 nt, Artificial Sequence
  Description of Artificial Sequence: Synthetic oligonucleotide
  Sense strand starting at position 3539 of SEQ ID NO: 1882234
gaaaguauauaagugaagu

SEQ ID NO: 2105279 - RNA, 19 nt, Artificial Sequence
  Description of Artificial Sequence: Synthetic oligonucleotide
  Antisense strand to SEQ ID NO: 2105278
acuucacuuauauacuuuc

SEQ ID NO: 2105280 - RNA, 19 nt, Artificial Sequence
  Description of Artificial Sequence: Synthetic oligonucleotide
  Sense strand starting at position 3884 of SEQ ID NO: 1882234
gggugagauguggguaaau

SEQ ID NO: 2105281 - RNA, 19 nt, Artificial Sequence
  Description of Artificial Sequence: Synthetic oligonucleotide
  Antisense strand to SEQ ID NO: 2105280
auuuacccacaucucaccc

SEQ ID NO: 2105282 - RNA, 19 nt, Artificial Sequence
  Description of Artificial Sequence: Synthetic oligonucleotide
  Sense strand starting at position 3886 of SEQ ID NO: 1882234
gugagauguggguaaauua

SEQ ID NO: 2105283 - RNA, 19 nt, Artificial Sequence
  Description of Artificial Sequence: Synthetic oligonucleotide
  Antisense strand to SEQ ID NO: 2105282
uaauuuacccacaucucac

SEQ ID NO: 2105284 - RNA, 19 nt, Artificial Sequence
  Description of Artificial Sequence: Synthetic oligonucleotide
  Sense strand starting at position 284 of SEQ ID NO: 1882235
uuagacuucccuuguaagg

SEQ ID NO: 2105285 - RNA, 19 nt, Artificial Sequence
  Description of Artificial Sequence: Synthetic oligonucleotide
  Antisense strand to SEQ ID NO: 2105284
ccuuacaagggaagucuaa

SEQ ID NO: 2105286 - RNA, 19 nt, Artificial Sequence
  Description of Artificial Sequence: Synthetic oligonucleotide
  Sense strand starting at position 485 of SEQ ID NO: 1882235
cgcauucucccacauugaa

SEQ ID NO: 2105287 - RNA, 19 nt, Artificial Sequence
  Description of Artificial Sequence: Synthetic oligonucleotide
  Antisense strand to SEQ ID NO: 2105286
uucaaugugggagaaugcg

SEQ ID NO: 2105288 - RNA, 19 nt, Artificial Sequence
  Description of Artificial Sequence: Synthetic oligonucleotide
  Sense strand starting at position 850 of SEQ ID NO: 1882235
gugagacuguagucacaac

SEQ ID NO: 2105289 - RNA, 19 nt, Artificial Sequence
  Description of Artificial Sequence: Synthetic oligonucleotide
  Antisense strand to SEQ ID NO: 2105288
guugugacuacagucucac

SEQ ID NO: 2105290 - RNA, 19 nt, Artificial Sequence
  Description of Artificial Sequence: Synthetic oligonucleotide
  Sense strand starting at position 914 of SEQ ID NO: 1882235
acaucuauccugggcaaca

SEQ ID NO: 2105291 - RNA, 19 nt, Artificial Sequence
  Description of Artificial Sequence: Synthetic oligonucleotide
  Antisense strand to SEQ ID NO: 2105290
uguugcccaggauagaugu

SEQ ID NO: 2105292 - RNA, 19 nt, Artificial Sequence
  Description of Artificial Sequence: Synthetic oligonucleotide
  Sense strand starting at position 916 of SEQ ID NO: 1882235
aucuauccugggcaacaua

SEQ ID NO: 2105293 - RNA, 19 nt, Artificial Sequence
  Description of Artificial Sequence: Synthetic oligonucleotide
  Antisense strand to SEQ ID NO: 2105292
uauguugcccaggauagau

SEQ ID NO: 2105294 - RNA, 19 nt, Artificial Sequence
  Description of Artificial Sequence: Synthetic oligonucleotide
  Sense strand starting at position 972 of SEQ ID NO: 1882235
accagaaguccuggacaua

SEQ ID NO: 2105295 - RNA, 19 nt, Artificial Sequence
  Description of Artificial Sequence: Synthetic oligonucleotide
  Antisense strand to SEQ ID NO: 2105294
uauguccaggacuucuggu

SEQ ID NO: 2105296 - RNA, 19 nt, Artificial Sequence
  Description of Artificial Sequence: Synthetic oligonucleotide
  Sense strand starting at position 1098 of SEQ ID NO: 1882235
acugucaucguuuggauuu

SEQ ID NO: 2105297 - RNA, 19 nt, Artificial Sequence
  Description of Artificial Sequence: Synthetic oligonucleotide
  Antisense strand to SEQ ID NO: 2105296
aaauccaaacgaugacagu

SEQ ID NO: 2105298 - RNA, 19 nt, Artificial Sequence
  Description of Artificial Sequence: Synthetic oligonucleotide
  Sense strand starting at position 1132 of SEQ ID NO: 1882235
cugggaauuccuggucuac

SEQ ID NO: 2105299 - RNA, 19 nt, Artificial Sequence
  Description of Artificial Sequence: Synthetic oligonucleotide
  Antisense strand to SEQ ID NO: 2105298
guagaccaggaauucccag

SEQ ID NO: 2105300 - RNA, 19 nt, Artificial Sequence
  Description of Artificial Sequence: Synthetic oligonucleotide
  Sense strand starting at position 1134 of SEQ ID NO: 1882235
gggaauuccuggucuacuu

SEQ ID NO: 2105301 - RNA, 19 nt, Artificial Sequence
  Description of Artificial Sequence: Synthetic oligonucleotide
  Antisense strand to SEQ ID NO: 2105300
aaguagaccaggaauuccc

SEQ ID NO: 2105302 - RNA, 19 nt, Artificial Sequence
  Description of Artificial Sequence: Synthetic oligonucleotide
  Sense strand starting at position 1147 of SEQ ID NO: 1882235
cuacuugugcuggagagau

SEQ ID NO: 2105303 - RNA, 19 nt, Artificial Sequence
  Description of Artificial Sequence: Synthetic oligonucleotide
  Antisense strand to SEQ ID NO: 2105302
aucucuccagcacaaguag

SEQ ID NO: 2105304 - RNA, 19 nt, Artificial Sequence
  Description of Artificial Sequence: Synthetic oligonucleotide
  Sense strand starting at position 1157 of SEQ ID NO: 1882235
uggagagauguuuaggcuu

SEQ ID NO: 2105305 - RNA, 19 nt, Artificial Sequence
  Description of Artificial Sequence: Synthetic oligonucleotide
  Antisense strand to SEQ ID NO: 2105304
aagccuaaacaucucucca

SEQ ID NO: 2105306 - RNA, 19 nt, Artificial Sequence
  Description of Artificial Sequence: Synthetic oligonucleotide
  Sense strand starting at position 1322 of SEQ ID NO: 1882235
agagaacagccaugcgaau

SEQ ID NO: 2105307 - RNA, 19 nt, Artificial Sequence
  Description of Artificial Sequence: Synthetic oligonucleotide
  Antisense strand to SEQ ID NO: 2105306
auucgcauggcuguucucu

SEQ ID NO: 2105308 - RNA, 19 nt, Artificial Sequence
  Description of Artificial Sequence: Synthetic oligonucleotide
  Sense strand starting at position 2041 of SEQ ID NO: 1882235
ugcugaaagcaauggagau

SEQ ID NO: 2105309 - RNA, 19 nt, Artificial Sequence
  Description of Artificial Sequence: Synthetic oligonucleotide
  Antisense strand to SEQ ID NO: 2105308
aucuccauugcuuucagca

SEQ ID NO: 2105310 - RNA, 19 nt, Artificial Sequence
  Description of Artificial Sequence: Synthetic oligonucleotide
  Sense strand starting at position 2042 of SEQ ID NO: 1882235
gcugaaagcaauggagauu

SEQ ID NO: 2105311 - RNA, 19 nt, Artificial Sequence
  Description of Artificial Sequence: Synthetic oligonucleotide
  Antisense strand to SEQ ID NO: 2105310
aaucuccauugcuuucagc

SEQ ID NO: 2105312 - RNA, 19 nt, Artificial Sequence
  Description of Artificial Sequence: Synthetic oligonucleotide
  Sense strand starting at position 2185 of SEQ ID NO: 1882235
gugcucacucaagaaacaa

SEQ ID NO: 2105313 - RNA, 19 nt, Artificial Sequence
  Description of Artificial Sequence: Synthetic oligonucleotide
  Antisense strand to SEQ ID NO: 2105312
uuguuucuugagugagcac

SEQ ID NO: 2105314 - RNA, 19 nt, Artificial Sequence
  Description of Artificial Sequence: Synthetic oligonucleotide
  Sense strand starting at position 2371 of SEQ ID NO: 1882235
ccgugugaacgugcaguua

SEQ ID NO: 2105315 - RNA, 19 nt, Artificial Sequence
  Description of Artificial Sequence: Synthetic oligonucleotide
  Antisense strand to SEQ ID NO: 2105314
uaacugcacguucacacgg

SEQ ID NO: 2105316 - RNA, 19 nt, Artificial Sequence
  Description of Artificial Sequence: Synthetic oligonucleotide
  Sense strand starting at position 2469 of SEQ ID NO: 1882235
gaaguacaguucucacuga

SEQ ID NO: 2105317 - RNA, 19 nt, Artificial Sequence
  Description of Artificial Sequence: Synthetic oligonucleotide
  Antisense strand to SEQ ID NO: 2105316
ucagugagaacuguacuuc

SEQ ID NO: 2105318 - RNA, 19 nt, Artificial Sequence
  Description of Artificial Sequence: Synthetic oligonucleotide
  Sense strand starting at position 2574 of SEQ ID NO: 1882235
ggagcaugguuuccuaaga

SEQ ID NO: 2105319 - RNA, 19 nt, Artificial Sequence
  Description of Artificial Sequence: Synthetic oligonucleotide
  Antisense strand to SEQ ID NO: 2105318
ucuuaggaaaccaugcucc

SEQ ID NO: 2105320 - RNA, 19 nt, Artificial Sequence
  Description of Artificial Sequence: Synthetic oligonucleotide
  Sense strand starting at position 2575 of SEQ ID NO: 1882235
gagcaugguuuccuaagaa

SEQ ID NO: 2105321 - RNA, 19 nt, Artificial Sequence
  Description of Artificial Sequence: Synthetic oligonucleotide
  Antisense strand to SEQ ID NO: 2105320
uucuuaggaaaccaugcuc

SEQ ID NO: 2105322 - RNA, 19 nt, Artificial Sequence
  Description of Artificial Sequence: Synthetic oligonucleotide
  Sense strand starting at position 2599 of SEQ ID NO: 1882235
uugugaucuguguagaaua

SEQ ID NO: 2105323 - RNA, 19 nt, Artificial Sequence
  Description of Artificial Sequence: Synthetic oligonucleotide
  Antisense strand to SEQ ID NO: 2105322
uauucuacacagaucacaa

SEQ ID NO: 2105324 - RNA, 19 nt, Artificial Sequence
  Description of Artificial Sequence: Synthetic oligonucleotide
  Sense strand starting at position 2601 of SEQ ID NO: 1882235
gugaucuguguagaauauu

SEQ ID NO: 2105325 - RNA, 19 nt, Artificial Sequence
  Description of Artificial Sequence: Synthetic oligonucleotide
  Antisense strand to SEQ ID NO: 2105324
aauauucuacacagaucac

SEQ ID NO: 2105326 - RNA, 19 nt, Artificial Sequence
  Description of Artificial Sequence: Synthetic oligonucleotide
  Sense strand starting at position 2665 of SEQ ID NO: 1882235
uguuucuaucaggacaugu

SEQ ID NO: 2105327 - RNA, 19 nt, Artificial Sequence
  Description of Artificial Sequence: Synthetic oligonucleotide
  Antisense strand to SEQ ID NO: 2105326
acauguccugauagaaaca

SEQ ID NO: 2105328 - RNA, 19 nt, Artificial Sequence
  Description of Artificial Sequence: Synthetic oligonucleotide
  Sense strand starting at position 2683 of SEQ ID NO: 1882235
uuuggauguucuuccagaa

SEQ ID NO: 2105329 - RNA, 19 nt, Artificial Sequence
  Description of Artificial Sequence: Synthetic oligonucleotide
  Antisense strand to SEQ ID NO: 2105328
uucuggaagaacauccaaa

SEQ ID NO: 2105330 - RNA, 19 nt, Artificial Sequence
  Description of Artificial Sequence: Synthetic oligonucleotide
  Sense strand starting at position 2687 of SEQ ID NO: 1882235
gauguucuuccagaaaguc

SEQ ID NO: 2105331 - RNA, 19 nt, Artificial Sequence
  Description of Artificial Sequence: Synthetic oligonucleotide
  Antisense strand to SEQ ID NO: 2105330
gacuuucuggaagaacauc

SEQ ID NO: 2105332 - RNA, 19 nt, Artificial Sequence
  Description of Artificial Sequence: Synthetic oligonucleotide
  Sense strand starting at position 2724 of SEQ ID NO: 1882235
guuggucuucuaggagaga

SEQ ID NO: 2105333 - RNA, 19 nt, Artificial Sequence
  Description of Artificial Sequence: Synthetic oligonucleotide
  Antisense strand to SEQ ID NO: 2105332
ucucuccuagaagaccaac

SEQ ID NO: 2105334 - RNA, 19 nt, Artificial Sequence
  Description of Artificial Sequence: Synthetic oligonucleotide
  Sense strand starting at position 3194 of SEQ ID NO: 1882235
gcacauccucuugggagaa

SEQ ID NO: 2105335 - RNA, 19 nt, Artificial Sequence
  Description of Artificial Sequence: Synthetic oligonucleotide
  Antisense strand to SEQ ID NO: 2105334
uucucccaagaggaugugc

SEQ ID NO: 2105336 - RNA, 19 nt, Artificial Sequence
  Description of Artificial Sequence: Synthetic oligonucleotide
  Sense strand starting at position 3236 of SEQ ID NO: 1882235
cugggaauugacuguagac

SEQ ID NO: 2105337 - RNA, 19 nt, Artificial Sequence
  Description of Artificial Sequence: Synthetic oligonucleotide
  Antisense strand to SEQ ID NO: 2105336
gucuacagucaauucccag

SEQ ID NO: 2105338 - RNA, 19 nt, Artificial Sequence
  Description of Artificial Sequence: Synthetic oligonucleotide
  Sense strand starting at position 3249 of SEQ ID NO: 1882235
guagaccucaagugggaua

SEQ ID NO: 2105339 - RNA, 19 nt, Artificial Sequence
  Description of Artificial Sequence: Synthetic oligonucleotide
  Antisense strand to SEQ ID NO: 2105338
uaucccacuugaggucuac

SEQ ID NO: 2105340 - RNA, 19 nt, Artificial Sequence
  Description of Artificial Sequence: Synthetic oligonucleotide
  Sense strand starting at position 3343 of SEQ ID NO: 1882235
uaauuacaucgucauggaa

SEQ ID NO: 2105341 - RNA, 19 nt, Artificial Sequence
  Description of Artificial Sequence: Synthetic oligonucleotide
  Antisense strand to SEQ ID NO: 2105340
uuccaugacgauguaauua

SEQ ID NO: 2105342 - RNA, 19 nt, Artificial Sequence
  Description of Artificial Sequence: Synthetic oligonucleotide
  Sense strand starting at position 3375 of SEQ ID NO: 1882235
uuauucugagacuauugua

SEQ ID NO: 2105343 - RNA, 19 nt, Artificial Sequence
  Description of Artificial Sequence: Synthetic oligonucleotide
  Antisense strand to SEQ ID NO: 2105342
uacaauagucucagaauaa

SEQ ID NO: 2105344 - RNA, 19 nt, Artificial Sequence
  Description of Artificial Sequence: Synthetic oligonucleotide
  Sense strand starting at position 3414 of SEQ ID NO: 1882235
aagugaguaauauguaggu

SEQ ID NO: 2105345 - RNA, 19 nt, Artificial Sequence
  Description of Artificial Sequence: Synthetic oligonucleotide
  Antisense strand to SEQ ID NO: 2105344
accuacauauuacucacuu

SEQ ID NO: 2105346 - RNA, 19 nt, Artificial Sequence
  Description of Artificial Sequence: Synthetic oligonucleotide
  Sense strand starting at position 3443 of SEQ ID NO: 1882235
accagaaauuuagguugaa

SEQ ID NO: 2105347 - RNA, 19 nt, Artificial Sequence
  Description of Artificial Sequence: Synthetic oligonucleotide
  Antisense strand to SEQ ID NO: 2105346
uucaaccuaaauuucuggu

SEQ ID NO: 2105348 - RNA, 19 nt, Artificial Sequence
  Description of Artificial Sequence: Synthetic oligonucleotide
  Sense strand starting at position 3687 of SEQ ID NO: 1882235
accuguuagcaaugaucau

SEQ ID NO: 2105349 - RNA, 19 nt, Artificial Sequence
  Description of Artificial Sequence: Synthetic oligonucleotide
  Antisense strand to SEQ ID NO: 2105348
augaucauugcuaacaggu

SEQ ID NO: 2105350 - RNA, 19 nt, Artificial Sequence
  Description of Artificial Sequence: Synthetic oligonucleotide
  Sense strand starting at position 3765 of SEQ ID NO: 1882235
gcaggucuuagugaaagau

SEQ ID NO: 2105351 - RNA, 19 nt, Artificial Sequence
  Description of Artificial Sequence: Synthetic oligonucleotide
  Antisense strand to SEQ ID NO: 2105350
aucuuucacuaagaccugc

SEQ ID NO: 2105352 - RNA, 19 nt, Artificial Sequence
  Description of Artificial Sequence: Synthetic oligonucleotide
  Sense strand starting at position 3771 of SEQ ID NO: 1882235
cuuagugaaagaugugcaa

SEQ ID NO: 2105353 - RNA, 19 nt, Artificial Sequence
  Description of Artificial Sequence: Synthetic oligonucleotide
  Antisense strand to SEQ ID NO: 2105352
uugcacaucuuucacuaag

SEQ ID NO: 2105354 - RNA, 19 nt, Artificial Sequence
  Description of Artificial Sequence: Synthetic oligonucleotide
  Sense strand starting at position 3774 of SEQ ID NO: 1882235
agugaaagaugugcaagau

SEQ ID NO: 2105355 - RNA, 19 nt, Artificial Sequence
  Description of Artificial Sequence: Synthetic oligonucleotide
  Antisense strand to SEQ ID NO: 2105354
aucuugcacaucuuucacu

SEQ ID NO: 2105356 - RNA, 19 nt, Artificial Sequence
  Description of Artificial Sequence: Synthetic oligonucleotide
  Sense strand starting at position 3775 of SEQ ID NO: 1882235
gugaaagaugugcaagaug

SEQ ID NO: 2105357 - RNA, 19 nt, Artificial Sequence
  Description of Artificial Sequence: Synthetic oligonucleotide
  Antisense strand to SEQ ID NO: 2105356
caucuugcacaucuuucac

SEQ ID NO: 2105358 - RNA, 19 nt, Artificial Sequence
  Description of Artificial Sequence: Synthetic oligonucleotide
  Sense strand starting at position 3901 of SEQ ID NO: 1882235
cggaaauaauaacugcaau

SEQ ID NO: 2105359 - RNA, 19 nt, Artificial Sequence
  Description of Artificial Sequence: Synthetic oligonucleotide
  Antisense strand to SEQ ID NO: 2105358
auugcaguuauuauuuccg

SEQ ID NO: 2105360 - RNA, 19 nt, Artificial Sequence
  Description of Artificial Sequence: Synthetic oligonucleotide
  Sense strand starting at position 3952 of SEQ ID NO: 1882235
uggguuuauaaugaguuua

SEQ ID NO: 2105361 - RNA, 19 nt, Artificial Sequence
  Description of Artificial Sequence: Synthetic oligonucleotide
  Antisense strand to SEQ ID NO: 2105360
uaaacucauuauaaaccca

SEQ ID NO: 2105362 - RNA, 19 nt, Artificial Sequence
  Description of Artificial Sequence: Synthetic oligonucleotide
  Sense strand starting at position 3978 of SEQ ID NO: 1882235
agaaguucccugggacaug

SEQ ID NO: 2105363 - RNA, 19 nt, Artificial Sequence
  Description of Artificial Sequence: Synthetic oligonucleotide
  Antisense strand to SEQ ID NO: 2105362
caugucccagggaacuucu

SEQ ID NO: 2105364 - RNA, 19 nt, Artificial Sequence
  Description of Artificial Sequence: Synthetic oligonucleotide
  Sense strand starting at position 2028 of SEQ ID NO: 1882236
gcuccuaggucuuguggaa

SEQ ID NO: 2105365 - RNA, 19 nt, Artificial Sequence
  Description of Artificial Sequence: Synthetic oligonucleotide
  Antisense strand to SEQ ID NO: 2105364
uuccacaagaccuaggagc

SEQ ID NO: 2105366 - RNA, 19 nt, Artificial Sequence
  Description of Artificial Sequence: Synthetic oligonucleotide
  Sense strand starting at position 2124 of SEQ ID NO: 1882236
cguucuacgcaucaggaaa

SEQ ID NO: 2105367 - RNA, 19 nt, Artificial Sequence
  Description of Artificial Sequence: Synthetic oligonucleotide
  Antisense strand to SEQ ID NO: 2105366
uuuccugaugcguagaacg

SEQ ID NO: 2105368 - RNA, 19 nt, Artificial Sequence
  Description of Artificial Sequence: Synthetic oligonucleotide
  Sense strand starting at position 2330 of SEQ ID NO: 1882236
cugucuucuccacaggaaa

SEQ ID NO: 2105369 - RNA, 19 nt, Artificial Sequence
  Description of Artificial Sequence: Synthetic oligonucleotide
  Antisense strand to SEQ ID NO: 2105368
uuuccuguggagaagacag

SEQ ID NO: 2105370 - RNA, 19 nt, Artificial Sequence
  Description of Artificial Sequence: Synthetic oligonucleotide
  Sense strand starting at position 2349 of SEQ ID NO: 1882236
cccagcugccucuagaaau

SEQ ID NO: 2105371 - RNA, 19 nt, Artificial Sequence
  Description of Artificial Sequence: Synthetic oligonucleotide
  Antisense strand to SEQ ID NO: 2105370
auuucuagaggcagcuggg

SEQ ID NO: 2105372 - RNA, 19 nt, Artificial Sequence
  Description of Artificial Sequence: Synthetic oligonucleotide
  Sense strand starting at position 2387 of SEQ ID NO: 1882236
ggguuugacuccugcauac

SEQ ID NO: 2105373 - RNA, 19 nt, Artificial Sequence
  Description of Artificial Sequence: Synthetic oligonucleotide
  Antisense strand to SEQ ID NO: 2105372
guaugcaggagucaaaccc

SEQ ID NO: 2105374 - RNA, 19 nt, Artificial Sequence
  Description of Artificial Sequence: Synthetic oligonucleotide
  Sense strand starting at position 2389 of SEQ ID NO: 1882236
guuugacuccugcauacac

SEQ ID NO: 2105375 - RNA, 19 nt, Artificial Sequence
  Description of Artificial Sequence: Synthetic oligonucleotide
  Antisense strand to SEQ ID NO: 2105374
guguaugcaggagucaaac

SEQ ID NO: 2105376 - RNA, 19 nt, Artificial Sequence
  Description of Artificial Sequence: Synthetic oligonucleotide
  Sense strand starting at position 2562 of SEQ ID NO: 1882236
cuggguuacuucuggacaa

SEQ ID NO: 2105377 - RNA, 19 nt, Artificial Sequence
  Description of Artificial Sequence: Synthetic oligonucleotide
  Antisense strand to SEQ ID NO: 2105376
uuguccagaaguaacccag

SEQ ID NO: 2105378 - RNA, 19 nt, Artificial Sequence
  Description of Artificial Sequence: Synthetic oligonucleotide
  Sense strand starting at position 2563 of SEQ ID NO: 1882236
uggguuacuucuggacaaa

SEQ ID NO: 2105379 - RNA, 19 nt, Artificial Sequence
  Description of Artificial Sequence: Synthetic oligonucleotide
  Antisense strand to SEQ ID NO: 2105378
uuuguccagaaguaaccca

SEQ ID NO: 2105380 - RNA, 19 nt, Artificial Sequence
  Description of Artificial Sequence: Synthetic oligonucleotide
  Sense strand starting at position 2806 of SEQ ID NO: 1882236
gccagugacguggguugau

SEQ ID NO: 2105381 - RNA, 19 nt, Artificial Sequence
  Description of Artificial Sequence: Synthetic oligonucleotide
  Antisense strand to SEQ ID NO: 2105380
aucaacccacgucacuggc

SEQ ID NO: 2105382 - RNA, 19 nt, Artificial Sequence
  Description of Artificial Sequence: Synthetic oligonucleotide
  Sense strand starting at position 2850 of SEQ ID NO: 1882236
auuugaacaugauguggau

SEQ ID NO: 2105383 - RNA, 19 nt, Artificial Sequence
  Description of Artificial Sequence: Synthetic oligonucleotide
  Antisense strand to SEQ ID NO: 2105382
auccacaucauguucaaau

SEQ ID NO: 2105384 - RNA, 19 nt, Artificial Sequence
  Description of Artificial Sequence: Synthetic oligonucleotide
  Sense strand starting at position 2853 of SEQ ID NO: 1882236
ugaacaugauguggaucaa

SEQ ID NO: 2105385 - RNA, 19 nt, Artificial Sequence
  Description of Artificial Sequence: Synthetic oligonucleotide
  Antisense strand to SEQ ID NO: 2105384
uugauccacaucauguuca

SEQ ID NO: 2105386 - RNA, 19 nt, Artificial Sequence
  Description of Artificial Sequence: Synthetic oligonucleotide
  Sense strand starting at position 2863 of SEQ ID NO: 1882236
guggaucaaugguguggaa

SEQ ID NO: 2105387 - RNA, 19 nt, Artificial Sequence
  Description of Artificial Sequence: Synthetic oligonucleotide
  Antisense strand to SEQ ID NO: 2105386
uuccacaccauugauccac

SEQ ID NO: 2105388 - RNA, 19 nt, Artificial Sequence
  Description of Artificial Sequence: Synthetic oligonucleotide
  Sense strand starting at position 2865 of SEQ ID NO: 1882236
ggaucaaugguguggaaua

SEQ ID NO: 2105389 - RNA, 19 nt, Artificial Sequence
  Description of Artificial Sequence: Synthetic oligonucleotide
  Antisense strand to SEQ ID NO: 2105388
uauuccacaccauugaucc

SEQ ID NO: 2105390 - RNA, 19 nt, Artificial Sequence
  Description of Artificial Sequence: Synthetic oligonucleotide
  Sense strand starting at position 2866 of SEQ ID NO: 1882236
gaucaaugguguggaauac

SEQ ID NO: 2105391 - RNA, 19 nt, Artificial Sequence
  Description of Artificial Sequence: Synthetic oligonucleotide
  Antisense strand to SEQ ID NO: 2105390
guauuccacaccauugauc

SEQ ID NO: 2105392 - RNA, 19 nt, Artificial Sequence
  Description of Artificial Sequence: Synthetic oligonucleotide
  Sense strand starting at position 2961 of SEQ ID NO: 1882236
ggcccugagauguggauua

SEQ ID NO: 2105393 - RNA, 19 nt, Artificial Sequence
  Description of Artificial Sequence: Synthetic oligonucleotide
  Antisense strand to SEQ ID NO: 2105392
uaauccacaucucagggcc

SEQ ID NO: 2105394 - RNA, 19 nt, Artificial Sequence
  Description of Artificial Sequence: Synthetic oligonucleotide
  Sense strand starting at position 3123 of SEQ ID NO: 1882236
auguguggccucuggaaac

SEQ ID NO: 2105395 - RNA, 19 nt, Artificial Sequence
  Description of Artificial Sequence: Synthetic oligonucleotide
  Antisense strand to SEQ ID NO: 2105394
guuuccagaggccacacau

SEQ ID NO: 2105396 - RNA, 19 nt, Artificial Sequence
  Description of Artificial Sequence: Synthetic oligonucleotide
  Sense strand starting at position 3258 of SEQ ID NO: 1882236
ggaugaaugugugucuugu

SEQ ID NO: 2105397 - RNA, 19 nt, Artificial Sequence
  Description of Artificial Sequence: Synthetic oligonucleotide
  Antisense strand to SEQ ID NO: 2105396
acaagacacacauucaucc

SEQ ID NO: 2105398 - RNA, 19 nt, Artificial Sequence
  Description of Artificial Sequence: Synthetic oligonucleotide
  Sense strand starting at position 3260 of SEQ ID NO: 1882236
augaaugugugucuuguaa

SEQ ID NO: 2105399 - RNA, 19 nt, Artificial Sequence
  Description of Artificial Sequence: Synthetic oligonucleotide
  Antisense strand to SEQ ID NO: 2105398
uuacaagacacacauucau

SEQ ID NO: 2105400 - RNA, 19 nt, Artificial Sequence
  Description of Artificial Sequence: Synthetic oligonucleotide
  Sense strand starting at position 3262 of SEQ ID NO: 1882236
gaaugugugucuuguaagc

SEQ ID NO: 2105401 - RNA, 19 nt, Artificial Sequence
  Description of Artificial Sequence: Synthetic oligonucleotide
  Antisense strand to SEQ ID NO: 2105400
gcuuacaagacacacauuc

SEQ ID NO: 2105402 - RNA, 19 nt, Artificial Sequence
  Description of Artificial Sequence: Synthetic oligonucleotide
  Sense strand starting at position 3264 of SEQ ID NO: 1882236
augugugucuuguaagccu

SEQ ID NO: 2105403 - RNA, 19 nt, Artificial Sequence
  Description of Artificial Sequence: Synthetic oligonucleotide
  Antisense strand to SEQ ID NO: 2105402
aggcuuacaagacacacau

SEQ ID NO: 2105404 - RNA, 19 nt, Artificial Sequence
  Description of Artificial Sequence: Synthetic oligonucleotide
  Sense strand starting at position 3287 of SEQ ID NO: 1882236
gcuugugauggcagcgaga

SEQ ID NO: 2105405 - RNA, 19 nt, Artificial Sequence
  Description of Artificial Sequence: Synthetic oligonucleotide
  Antisense strand to SEQ ID NO: 2105404
ucucgcugccaucacaagc

SEQ ID NO: 2105406 - RNA, 19 nt, Artificial Sequence
  Description of Artificial Sequence: Synthetic oligonucleotide
  Sense strand starting at position 3391 of SEQ ID NO: 1882236
ccgugugcucauuagagcu

SEQ ID NO: 2105407 - RNA, 19 nt, Artificial Sequence
  Description of Artificial Sequence: Synthetic oligonucleotide
  Antisense strand to SEQ ID NO: 2105406
agcucuaaugagcacacgg

SEQ ID NO: 2105408 - RNA, 19 nt, Artificial Sequence
  Description of Artificial Sequence: Synthetic oligonucleotide
  Sense strand starting at position 3414 of SEQ ID NO: 1882236
gcccuugugccuugaagac

SEQ ID NO: 2105409 - RNA, 19 nt, Artificial Sequence
  Description of Artificial Sequence: Synthetic oligonucleotide
  Antisense strand to SEQ ID NO: 2105408
gucuucaaggcacaagggc

SEQ ID NO: 2105410 - RNA, 19 nt, Artificial Sequence
  Description of Artificial Sequence: Synthetic oligonucleotide
  Sense strand starting at position 3424 of SEQ ID NO: 1882236
cuugaagacuuaguccaga

SEQ ID NO: 2105411 - RNA, 19 nt, Artificial Sequence
  Description of Artificial Sequence: Synthetic oligonucleotide
  Antisense strand to SEQ ID NO: 2105410
ucuggacuaagucuucaag

SEQ ID NO: 2105412 - RNA, 19 nt, Artificial Sequence
  Description of Artificial Sequence: Synthetic oligonucleotide
  Sense strand starting at position 3438 of SEQ ID NO: 1882236
ccagacauucuaugaaagu

SEQ ID NO: 2105413 - RNA, 19 nt, Artificial Sequence
  Description of Artificial Sequence: Synthetic oligonucleotide
  Antisense strand to SEQ ID NO: 2105412
acuuucauagaaugucugg

SEQ ID NO: 2105414 - RNA, 19 nt, Artificial Sequence
  Description of Artificial Sequence: Synthetic oligonucleotide
  Sense strand starting at position 3439 of SEQ ID NO: 1882236
cagacauucuaugaaagug

SEQ ID NO: 2105415 - RNA, 19 nt, Artificial Sequence
  Description of Artificial Sequence: Synthetic oligonucleotide
  Antisense strand to SEQ ID NO: 2105414
cacuuucauagaaugucug

SEQ ID NO: 2105416 - RNA, 19 nt, Artificial Sequence
  Description of Artificial Sequence: Synthetic oligonucleotide
  Sense strand starting at position 1594 of SEQ ID NO: 1882237
gcauauaguaguuacaguu

SEQ ID NO: 2105417 - RNA, 19 nt, Artificial Sequence
  Description of Artificial Sequence: Synthetic oligonucleotide
  Antisense strand to SEQ ID NO: 2105416
aacuguaacuacuauaugc

SEQ ID NO: 2105418 - RNA, 19 nt, Artificial Sequence
  Description of Artificial Sequence: Synthetic oligonucleotide
  Sense strand starting at position 2031 of SEQ ID NO: 1882237
acgugaacuuggucauaau

SEQ ID NO: 2105419 - RNA, 19 nt, Artificial Sequence
  Description of Artificial Sequence: Synthetic oligonucleotide
  Antisense strand to SEQ ID NO: 2105418
auuaugaccaaguucacgu

SEQ ID NO: 2105420 - RNA, 19 nt, Artificial Sequence
  Description of Artificial Sequence: Synthetic oligonucleotide
  Sense strand starting at position 2032 of SEQ ID NO: 1882237
cgugaacuuggucauaauc

SEQ ID NO: 2105421 - RNA, 19 nt, Artificial Sequence
  Description of Artificial Sequence: Synthetic oligonucleotide
  Antisense strand to SEQ ID NO: 2105420
gauuaugaccaaguucacg

SEQ ID NO: 2105422 - RNA, 19 nt, Artificial Sequence
  Description of Artificial Sequence: Synthetic oligonucleotide
  Sense strand starting at position 2132 of SEQ ID NO: 1882237
ucagcagcucuggaugaaa

SEQ ID NO: 2105423 - RNA, 19 nt, Artificial Sequence
  Description of Artificial Sequence: Synthetic oligonucleotide
  Antisense strand to SEQ ID NO: 2105422
uuucauccagagcugcuga

SEQ ID NO: 2105424 - RNA, 19 nt, Artificial Sequence
  Description of Artificial Sequence: Synthetic oligonucleotide
  Sense strand starting at position 2134 of SEQ ID NO: 1882237
agcagcucuggaugaaaua

SEQ ID NO: 2105425 - RNA, 19 nt, Artificial Sequence
  Description of Artificial Sequence: Synthetic oligonucleotide
  Antisense strand to SEQ ID NO: 2105424
uauuucauccagagcugcu

SEQ ID NO: 2105426 - RNA, 19 nt, Artificial Sequence
  Description of Artificial Sequence: Synthetic oligonucleotide
  Sense strand starting at position 2282 of SEQ ID NO: 1882237
ugagauugcuugcuauaau

SEQ ID NO: 2105427 - RNA, 19 nt, Artificial Sequence
  Description of Artificial Sequence: Synthetic oligonucleotide
  Antisense strand to SEQ ID NO: 2105426
auuauagcaagcaaucuca

SEQ ID NO: 2105428 - RNA, 19 nt, Artificial Sequence
  Description of Artificial Sequence: Synthetic oligonucleotide
  Sense strand starting at position 2466 of SEQ ID NO: 1882237
cucauaagguuguugacau

SEQ ID NO: 2105429 - RNA, 19 nt, Artificial Sequence
  Description of Artificial Sequence: Synthetic oligonucleotide
  Antisense strand to SEQ ID NO: 2105428
augucaacaaccuuaugag

SEQ ID NO: 2105430 - RNA, 19 nt, Artificial Sequence
  Description of Artificial Sequence: Synthetic oligonucleotide
  Sense strand starting at position 2499 of SEQ ID NO: 1882237
uacuuaaugugagugauga

SEQ ID NO: 2105431 - RNA, 19 nt, Artificial Sequence
  Description of Artificial Sequence: Synthetic oligonucleotide
  Antisense strand to SEQ ID NO: 2105430
ucaucacucacauuaagua

SEQ ID NO: 2105432 - RNA, 19 nt, Artificial Sequence
  Description of Artificial Sequence: Synthetic oligonucleotide
  Sense strand starting at position 2500 of SEQ ID NO: 1882237
acuuaaugugagugaugac

SEQ ID NO: 2105433 - RNA, 19 nt, Artificial Sequence
  Description of Artificial Sequence: Synthetic oligonucleotide
  Antisense strand to SEQ ID NO: 2105432
gucaucacucacauuaagu

SEQ ID NO: 2105434 - RNA, 19 nt, Artificial Sequence
  Description of Artificial Sequence: Synthetic oligonucleotide
  Sense strand starting at position 2501 of SEQ ID NO: 1882237
cuuaaugugagugaugacu

SEQ ID NO: 2105435 - RNA, 19 nt, Artificial Sequence
  Description of Artificial Sequence: Synthetic oligonucleotide
  Antisense strand to SEQ ID NO: 2105434
agucaucacucacauuaag

SEQ ID NO: 2105436 - RNA, 19 nt, Artificial Sequence
  Description of Artificial Sequence: Synthetic oligonucleotide
  Sense strand starting at position 2522 of SEQ ID NO: 1882237
augcauaugguaggauaca

SEQ ID NO: 2105437 - RNA, 19 nt, Artificial Sequence
  Description of Artificial Sequence: Synthetic oligonucleotide
  Antisense strand to SEQ ID NO: 2105436
uguauccuaccauaugcau

SEQ ID NO: 2105438 - RNA, 19 nt, Artificial Sequence
  Description of Artificial Sequence: Synthetic oligonucleotide
  Sense strand starting at position 2533 of SEQ ID NO: 1882237
aggauacacuguccuagua

SEQ ID NO: 2105439 - RNA, 19 nt, Artificial Sequence
  Description of Artificial Sequence: Synthetic oligonucleotide
  Antisense strand to SEQ ID NO: 2105438
uacuaggacaguguauccu

SEQ ID NO: 2105440 - RNA, 19 nt, Artificial Sequence
  Description of Artificial Sequence: Synthetic oligonucleotide
  Sense strand starting at position 2543 of SEQ ID NO: 1882237
guccuaguaggaugucaug

SEQ ID NO: 2105441 - RNA, 19 nt, Artificial Sequence
  Description of Artificial Sequence: Synthetic oligonucleotide
  Antisense strand to SEQ ID NO: 2105440
caugacauccuacuaggac

SEQ ID NO: 2105442 - RNA, 19 nt, Artificial Sequence
  Description of Artificial Sequence: Synthetic oligonucleotide
  Sense strand starting at position 2549 of SEQ ID NO: 1882237
guaggaugucauggucuau

SEQ ID NO: 2105443 - RNA, 19 nt, Artificial Sequence
  Description of Artificial Sequence: Synthetic oligonucleotide
  Antisense strand to SEQ ID NO: 2105442
auagaccaugacauccuac

SEQ ID NO: 2105444 - RNA, 19 nt, Artificial Sequence
  Description of Artificial Sequence: Synthetic oligonucleotide
  Sense strand starting at position 2569 of SEQ ID NO: 1882237
cggcaaucacgaguugcuu

SEQ ID NO: 2105445 - RNA, 19 nt, Artificial Sequence
  Description of Artificial Sequence: Synthetic oligonucleotide
  Antisense strand to SEQ ID NO: 2105444
aagcaacucgugauugccg

SEQ ID NO: 2105446 - RNA, 19 nt, Artificial Sequence
  Description of Artificial Sequence: Synthetic oligonucleotide
  Sense strand starting at position 2665 of SEQ ID NO: 1882237
aucugauugauaggugaac

SEQ ID NO: 2105447 - RNA, 19 nt, Artificial Sequence
  Description of Artificial Sequence: Synthetic oligonucleotide
  Antisense strand to SEQ ID NO: 2105446
guucaccuaucaaucagau

SEQ ID NO: 2105448 - RNA, 19 nt, Artificial Sequence
  Description of Artificial Sequence: Synthetic oligonucleotide
  Sense strand starting at position 2666 of SEQ ID NO: 1882237
ucugauugauaggugaacu

SEQ ID NO: 2105449 - RNA, 19 nt, Artificial Sequence
  Description of Artificial Sequence: Synthetic oligonucleotide
  Antisense strand to SEQ ID NO: 2105448
aguucaccuaucaaucaga

SEQ ID NO: 2105450 - RNA, 19 nt, Artificial Sequence
  Description of Artificial Sequence: Synthetic oligonucleotide
  Sense strand starting at position 2667 of SEQ ID NO: 1882237
cugauugauaggugaacug

SEQ ID NO: 2105451 - RNA, 19 nt, Artificial Sequence
  Description of Artificial Sequence: Synthetic oligonucleotide
  Antisense strand to SEQ ID NO: 2105450
caguucaccuaucaaucag

SEQ ID NO: 2105452 - RNA, 19 nt, Artificial Sequence
  Description of Artificial Sequence: Synthetic oligonucleotide
  Sense strand starting at position 2677 of SEQ ID NO: 1882237
ggugaacugaucuauugug

SEQ ID NO: 2105453 - RNA, 19 nt, Artificial Sequence
  Description of Artificial Sequence: Synthetic oligonucleotide
  Antisense strand to SEQ ID NO: 2105452
cacaauagaucaguucacc

SEQ ID NO: 2105454 - RNA, 19 nt, Artificial Sequence
  Description of Artificial Sequence: Synthetic oligonucleotide
  Sense strand starting at position 2684 of SEQ ID NO: 1882237
ugaucuauugugggaauua

SEQ ID NO: 2105455 - RNA, 19 nt, Artificial Sequence
  Description of Artificial Sequence: Synthetic oligonucleotide
  Antisense strand to SEQ ID NO: 2105454
uaauucccacaauagauca

SEQ ID NO: 2105456 - RNA, 19 nt, Artificial Sequence
  Description of Artificial Sequence: Synthetic oligonucleotide
  Sense strand starting at position 2780 of SEQ ID NO: 1882237
uucucuguucuuuaguaca

SEQ ID NO: 2105457 - RNA, 19 nt, Artificial Sequence
  Description of Artificial Sequence: Synthetic oligonucleotide
  Antisense strand to SEQ ID NO: 2105456
uguacuaaagaacagagaa

SEQ ID NO: 2105458 - RNA, 19 nt, Artificial Sequence
  Description of Artificial Sequence: Synthetic oligonucleotide
  Sense strand starting at position 2859 of SEQ ID NO: 1882237
gguuguucuaauuacagua

SEQ ID NO: 2105459 - RNA, 19 nt, Artificial Sequence
  Description of Artificial Sequence: Synthetic oligonucleotide
  Antisense strand to SEQ ID NO: 2105458
uacuguaauuagaacaacc

SEQ ID NO: 2105460 - RNA, 19 nt, Artificial Sequence
  Description of Artificial Sequence: Synthetic oligonucleotide
  Sense strand starting at position 2904 of SEQ ID NO: 1882237
ucacaaguuuguuugaauc

SEQ ID NO: 2105461 - RNA, 19 nt, Artificial Sequence
  Description of Artificial Sequence: Synthetic oligonucleotide
  Antisense strand to SEQ ID NO: 2105460
gauucaaacaaacuuguga
